United States Patent Application Publication US 2003/0077808 A1 - sequence listing, part 3

SEQ ID NO: 6217 - DNA, 8742 bp, Homo sapiens
tgcatatataaataacatttattaacttaggctgtacaatatattgatttagtcaaataaaaaataccgtacacaaaaattgaagtaaaatctgtaagatgccattcagactgaattttatattctgaataagacaagggactgccattcacttaaagcaaaatggctccaattccgtttatctatctatctatctatctatctatctatccatctatctatctatctatctataagtctcgctctgtcacccaggctggagtatctatctatttatttatgagataagtctcgctctgtcacccaggctggagtgcggtggtgcaatctcggctcactgcaacctctgcctcccacgttcaagtgatgctcctgtctcagcctactgaggagctgggattacaggcatgcaccatcacacctggctaatttttgtatttttagtagagatggggtttcaccatgttggccaggctggtctcgagctcctgacctcaggtgatccacccaccttggcctcccaaagtgctgggattacaggcgtgagccactgcgcccggcctccaattccattttgtaggaaagcacataaggctataccaatcaggcactgtggctggtctaatgctcacaccaggggccagcccactgcccagacttagcctccaggtaggctgctttgctatttaaaggcaacagtcttaggatccttattataaaagtttaaacaaaatcccaaagccgtcaagtcttcctggagatggcaatgtactatcagtttggaatgtataccagtttggaagctgaaatcactctgctgtagccttttgagcactggcagcattttccaaaatttttcttttccattcttcataatcctgtgtcagatcttcatctttctgtggtttatgtggcatctcctctaccttctccatttctgacagaaaattatcaaaagcaatttcaaaattcttagcttagaaatgaaatttaaaaaaaggtaaacttgtttaaattgtctaaaatagaaaagatactgaaatgacatggagaaacagcagttatcacttttttttgagatggggtcttgtaatgttgctcaggctgcactcaaattcctaggttcaaatgatcctcccacctccacctcttgagtagctgggaccgtggctgggactataggctcacactatcacacctagcttagctatcacttttttccctcccttacactccaagcattccaagacatctaataatagctaacgtctatcaagcacttaactggtgcttgataggcactgaaccaagtactttaaatagcattatttcatttaacccctactacactccgtaataggtgataatattaatcacattttataggtcaggaaattgaggctcacagaaattatactttcttagaatcccatagccagtggttgggcatagtggctcatgcctgtaatcccagcactttgggaggtgaagggggcgggtcacttgagcccaggagttcaagaccagcctgggtaacatagtgaggtcccatctctatcaaaaatacaaaaattagccaggtgtggtagcacatgcctgtagtcccagctactcgggaggctgaggtgggaggatggtttgagctcaggaggcggaggctgcagtgagccgagaccgtgccactgcactctagcatgggtgagagaaccaggccatgtctcagaaaaagagaaaccaaaaaaccaaaatcaaacaaacaaacaaaaaaaccaaaaaatcacatagccagtaggtggtattaaaacaataatgcagccatttgcctgagattgtctttgtagctaaagctcttataagcaaactggaacctaacttggaaacatttcttttgtcgggggaaaagaacctccgaaagacaaaaataatccccagccaatcacaaacagccaaccagctgacttgttatacaactagggacttcccatcagaccatgcccaggtttaagacaaatacctagctgtagctgcccaggctggtctcgcactcatgggctcaagcaatcctcccgcctcagcctcccaaagtgctgggattacaggaataagccactgtgccagaccagccatattcttaattacccaataacgatgttacttccattactgattgcttggaaaactggtcttatcaaatgattcacagtcagaatgtacttaaaactggactcctgtcaggcaagctgctagagcagcactgggctgttcactgcataaaatgtcaacgtcagtaccgtgttagtaaaacttaccctttgctggggcttcaaccactatcttctttctcttccgtggtggagtagctacatctccaggttctcctttaagaagtgttatcaaggttaatttttctcctgttctcaatttcagtatttgggcatgttttggatcacaaataaaattagacatcttaactgatcaaatatgaggagaagagaaatgatcttagacctctcttttgggcctcttgtcagacttgagaatcattttccaggcatagattcatggaatcataggttagaaacatcaataaaaacatacctggtccacatgtaatacggaatttaggaagcagccagtttacatatttgaaaatatttgacttttacaagcaaaaggactacattttcaaatgacgcattcttgaactacagaatacttactgtcgacctgctgtccaatcttctctagttgtttacacagtcgatcaaatatagctttttttacaccggatgtggctaccattttgtttttatccactttcagctttagaatcctacaaaacaatttcataagttgcttttctcaagacctgtacagttttcttctctgggcaaccagataatcaacttattttctttttgaccatgcttccagagcctctgtctagtttttttccttcattccaaacatgttattatctatgctaagttgtttagttgtttattggactgagagttaaaatgcacatgggatctattttataacaaaaggggcacataaaagacatttgctgtagtgcttcatgacttttagaactctttagtaaatctcagattaatttaatgaatgacaatcataggacttttttgttccactcattttaactcacaggatatttatattacaggaatgtaacaaccccaccccaccctgaaaataaactttcctaataagactccacagcaaccactaattacaaacacaaaataaactttttcttcagaatagacctgtcaagaccttttcttactcagcgtaatatggtttcaaaagtagagttgactattctcactgttttctacaatatcagctgcactccctccgtatatgcacatacttttgttgaattgaagagatgttttccataaatgccaattaatactcctaggtatgtacctaatagagccaagcataccaaaattagtgggtaggtagtgagaaatccattctttaagggccaactacattttgttttctaaggagttttctggcaagataaaaataagataactttagacaaagattatcaacaattactaatatttccaaggtaacatttcagcatacacatagataacccacaattgtaagattcagatgtgataatttatcactaaaatgttataaattccttgaagaacagttgtagccagtgttttgttttttttttaagagacagtgttgtgggggggtcagccccccgcccggccagccgccccggccgcccctactgggaagtgaggagcccctctgcccggccagctgccccgtccgggagggaggtgggggggtcagccccccgcccggccagccgccccgtccaggaaggaggtggggggggtcagcccccccgcccggccagccgccccgtccgggaggtgaggggcgcctctgcccggccgcccctactgggaagtgaggagcccctctgcccggccaccaccccgtctgggaggtatgcccgacagctcattgagaacgggccaggatgacaatggcagctttgtggaatagaaaggcgggaaaggtggggaaaagattgagaaatcggatggttgccgtgtctgtgtagaaagaagtagacatgggagacttttcattttgttctgcactaagaaaaattcttctgccttgggatcctgttgatctgtgaccttacccccaaccctgtgctctctgaaacatgtgctgtgtccactcagggttaaatggattaagggcggtgcaagatgtgctttgttaaacagatgcttgaaggcagcatgctcgttaagagtcatcaccaatccctaatctcaagtaatcagggacacaaacactgcggaaggccgcagggtcctctgcctaggaaaaccagagacctttgttcacttgtttatctgctgaccttccctccactattgtcccatgaccctgccaaatccccctctgtgagaaacacccaagaattatcaaaaaaaaaataaattaaaaaaaaaaaaataaaaataaaaataaaaaaaatgtaaaaaaaaaaaaaaaaaaaaaagagacagtgttgctgtgttgcctaggctgcagtgtagtagcgtgaccatagctcactataaccaagaactcctaggctccagtgagccttcagcttcagcctcccgagtagctgagaagccaggactggaggcatgtgctgacacccagctaattttttttttttttcttaagagattggggtcttattatgctgtctaggctagtcttgaactccttgcctcaagcagtcctcctgcctctgcctcccagtgttgggattacaggcgggagccaccacgcctggcccaaccagtactttttaaaaaatatgagcagaaaaatcacatgtgaagactgttttaatgacagatatcatctcttacaaaaggcagactgaaatcagaattcccagcatatatatacagctgctatttgctagtggaattctggcaacactagttccaagttgttagctacattatgggataaactgggaatatagtcacttggccaatattcctaatattatttctaggggaaaatatgctctgaattgatatcaactaagttagaagtattccttggggatgaaaaacccacttgtaaattggtaacttttctgaatgtttaatgaaatacctacttgcatgctgaaagcagtgcagcagaagtgaaaagtggcctggataagtcaagatccacttgctgtgtctggggaagactggactcatagctaaaggagaagttattgcagaattatctgttagaaaatattatttgaaaagagactgaaagtatcaaccagaacttacaagcttttaaaatggatatgtgtgctgtcacttaacacgagtcattttttttaagactgaaaattaaccagaacaggacaatggataatttgtatctatcagtataaattttctggtcccccccaccgccaccgccgccccgccccaagacggagtcttgctctgtcatccaggctggagtgcagtggtgcaatctcggcttactgcaacctccacctcctgggttcaagcaattctcctgccacagcctcccgagtagctgggattacaggtgcatgacgcctcgcccagctaatttttgtatttttagtagaaatggggtttcaccatgttggccaggctggtcttgaactcctgaccacatgatccacccaacttggcctcccaaagtgctgggattacaggcgtgagccaccacgcccggcctattggtatacattttcaattaaggttctctatgccccatacctttttagtatctttgaagccatgttcactgcttctatacagctaaactgtacagctaggtctcttattccaatatttgaattcaggcccagtaaacactcaaaagatttaagacagctctgatatgtctccttgttcaaaccagaaagtttaattaaataagcctgtgaaaggaaaaacacatacacaaatcataaaaaccttaagttctatatattagtacccttaaacacttgtttaataagcagtataacttttcaaaattaattttgtggcaagtcactctacctaaaggtttagcttcatttagtcaaaaaactggtaatcatgtcaggctgaggaagtactgctttcaaagagttcaaactatgcaaaggcaggcagtcatgcatatgcacagatgatttaaaattataacacaatattaatatagtcaaaataggcagtaaaaaaccacaggaaacacacagatggttacttgtgtttatacaaaggtgctaacgtgtaatttattgggaaaaggaaggagagaagtagcgggagtggagtagggggcggggtggtgagagagagagagagagagagagtgtgtgtgtgtgtgtgtgtgtgtgtgcaggagagaaagaggaaaaggaaactaggaaaagaaacaggaggatccactgtgggaaaccagctctgtctgggagacttaaggaaagtttcaatgtaacaataaggcaaggtcatgtaagacaaataggagtttgccagaagagcattgcaggaaaaaaacaaggtattgcattttcaaagccacaaatcattgacgtgcagagtctgttaagagaatactgcagcttgaggccaggattcaagagaggctggagagtttgatggtcatcaacaaagctttgtttttagtattaccatttaatgagtgtatcgttatgacacaggtgctgtgttaatggtgttatgtacatttaatcctcataataatccagcgaaattggatattttatcttcactttatggatgaggacactggaggctaacagaggtagctagtgtggagatttgatctcaacatgaaactcctcctgactgaccccaaagcttgttctctcaaacactgtgacattggaagaaaagcataggggtttggaaatacgtgctttaaaaggagggtaatgctagcagcaatgtggaagatggcctctagccgagaaagaggtggtcagggaaaacagtgaagagtaaagaaaacatggcaaaaaaatattttccaatgcaaaatgattctacagtatttccagaataacacacaagaatacccaggacaattctaaaacaagagtttttactagggtttagttcaaccaaaagttaaaagagcttcaatgttgcactggattattcagacattcggtgggacctacttaccctgtccaaggggcacttcatccaggaagctgcaaggtccaggcacatgactgcactgctggtctccgtggtgcgtgcggagaggccgacacacttcacccgggacaggcgcaagtactcctctgctttcctggttaaaagggcagtgtgttcgctacaacttattcagaagtttgctcaacacgttggtaaacaatgaatacagcctggttagcttcacactaagcctaactcctgtggctcgtttatctggggctgggaatgaaggtcatatcctctggtgagaggaagacagaaccagcactgactccaaacatcactgtgctcaaatgctttcaggcaaaaggaagttaaattttgacaaaaaaattacccttctttcctccttccattactggaacaagcacgaactatcagagacaggcaggttagaccagggttcctcctttcctcctatttcctttaaatcagtagttcttaaacttgatggtaggcgaaaatcaccttggggacttgcaaattactgggtcccaggccgagttactgatcagcaggcttgaggtgggacccaagaatttgtatttctaacaagtgacaagatgatatggctgttgctggtccaggaaccacattttgagaaccactgttctaaatgactaccgagtcctgcaggtttgtcttcaaatcttttaagtgctgttttccttgccttccctcgcctgactgctccacgttttagctacaatggctttatttcgaaccccggatcccgcttcccatctcaacgcttttacaggagctgtcgcccctgcctgggctgctcttgccatatctttcctcgcctagcatctgccatcaatccggcctcagcgggaacggcgcctgcttttccgagttttgtttgtttctttgtgttaaaggcagccgctaggccgcgctccaccccaagcccagtggctcaggagcattgcccggttaaggtctacacagtcctcgcccttacagacagcggggtctgcgcctcgttgtcgggttccccgctataaacccgactgcagtaggcgttggcggaatgaacggaaagttctccctggctcatttttctacccacggacagggctggctgttcccagggacgtgtgccatcgccgtttgctatcgcccttcttgccatctcattcaagctcacggccgagaagtttttcttgaagtaggccctaaaccccgcccggccccagcgctccccgtcactcccccgccgcccgtcgcctgggaagggcgcgggcctcacctgagggcccagggccgcgaggcggaagcccagccctggtcttgcgcggccgaactcacctcagcatgtcgggctcggcgaggcccaggcgcggggctaggcgcccgatcagctccgaccccatggcgccggcactaaagcgaacaattcccgtgaacgccgcgggtcaacgaaacc

SEQ ID NO: 6218 - DNA, 348 bp, Homo sapiens
tagagcacagccaaatttctatataaaagacacactgatggtgattaatttcctcttatctagagcctggcttatggaacaaagtagattgtctatcttccttattaatctagtaaatgatttagccttgttcctagtgtccagaaagttttagtaatgaagaaggcaaagcagatacaaatacatctatctgaaattgctgcccattggtatttgttccaaaagtttgattataaatcagttgttcagaagttggaagacattttcctttgggataaaatattatataggatcttgtgtctcttggtgattccatcaaatccaaatatacctgaggtatagtattgt

SEQ ID NO: 6219 - DNA, 348 bp, Homo sapiens; identical to SEQ ID NO: 6218

SEQ ID NO: 6220 - DNA, 128 bp, Homo sapiens
cacacctttcattcctgatctctggatcctaaacactgacactcattgtaaacattggttttttaatatatctggggcacagctcagtaaattgagcagaggaagaaagtggtatgttgtttaagttt

SEQ ID NO: 6221 - DNA, 128 bp, Homo sapiens; identical to SEQ ID NO: 6220

SEQ ID NO: 6222 - DNA, 899 bp, Homo sapiens
tggattttctaatgtaagaaaatgttgctgttagtaaaagtttcctcagtgtgccagaaagcagatggtggcagtgaatagtgttttcttttgccaggttttgtatatgctttctaaacctgcaagagattttgcttttccagattcagatttctgatcttttttattttaaaacagaaatagaaacttatatttaaatgtacttgcatcatgtggtctgtttgacatattatggttacttgaaaatgttgagtaacatttgatgttctgcatgaatttcttctctaagagtcttgggacttttaatgttgttctatactctctctctttatggaaataaagagtttctgccttgagagtgctacaatggggagttttgagtgatttatgaaaagcaatgggtaagatttttttatgtgaaaatttgtattttgtttcactcccaattactgtgcaagtaccagcttttcacagtgaggtttcttacagcatgactttgttcattatgacttcagtgtttgtatacagttttgaataatttatttctgtctactactggtgagatgttactttctgctaatttaaaatgttttgcctaacgtttttaatgaaagtccttataaatatgtttgtttaaagtctgaaatctaaacatgtccttaacagtaccaacgaggcagcattaaaacaaaaggcatgttgattttaaggccaactggaagaatgtatatctacaatggtgtagacgtgaggctgtaatgagcatgagtgtagtcaagacttatggctttgttgactaaaacttaagagatgctttcctttctataggacctccatttagaggagaaaaggaaatcattaagtcaatagatgagttattaaagtataaagtaaaaatg

SEQ ID NO: 6223 - DNA, 899 bp, Homo sapiens; identical to SEQ ID NO: 6222

SEQ ID NO: 6224 - DNA, 416 bp, Homo sapiens
tttctcctttgactttgtttttcccaataatgatttgtttttatcttctttcctagtaaccaaaaattaaaacaggacagagtttccaaaggaaatgtctgtagatgttaaccaaactgattgaatcactggttattctttgcttactttaaggctgtaaatctgcaaaaagacagaggtgatactggtatcactcacagccacaggttagtgccttggctgtgctgatgctgccagggtttaaacattgctgtgaggagcccagcacaggcaggagtgtggggtgaggatgtgtgataacagggcatgacgggcaggtagaactgctcgcttgtgttttacacacaggcgccccagccttcctataggctctttcttgtgaataggcttccaccatgaccaaaatgtttgaaaaa

SEQ ID NO: 6225 - DNA, 301 bp, Homo sapiens
caagaaattactatttttttttgagacggagtctcgctctgtcgcccaggctggagtgcagtggcctgatctcggctcactgcaagctccgcctcccgggttcatgccattctcctgcctcaacctctggagtaactgggactacaggcgcccaccaccaggcccggctaattttttgtatttttagtagagacggggtttcaccgtgttagccaggatggtctcgatctcctgacctcatgatctgcccacctcggcctcccgaggtgctgggattacaggcgtgagcccctgcgcccgg

SEQ ID NO: 6226 - DNA, 288 bp, Homo sapiens
tttttttttgagacggagtctcgctctgtcgcccaggctggagtgcagtggcctgatctcggctcactgcaagctccgcctcccgggttcatgccattctcctgcctcaacctctggagtaactgggactacaggcgcccaccaccaggcccggctaattttttgtatttttagtagagacggggtttcaccgtgttagccaggatggtctcgatctcctgacctcatgatctgcccacctcggcctcccgaggtgctgggattacaggcgtgagcccctgcgcccgg

SEQ ID NO: 6227 - DNA, 416 bp, Homo sapiens; identical to SEQ ID NO: 6224

SEQ ID NO: 6228 - DNA, 785 bp, Homo sapiens
ttatcattattattattattttaaagacagggtctcccttcattgccctggctgcagagcagcattgcaatcatagctgactgtaaccttgaacttttgggctcaagcaatcctcccacctcagcctcccaggtagctagggctacagatatgagctaccatgctcagttaattttttttgtttttaatttaatagttctcagaagtttaactcaagtgttttagtgtggatttctttggattttttctctttggaattcgttcagcttctgaagtctgcagagttatgtcttttgtcaaatttgggaaattttcagccattgcttctttgatttttcagccccacactttttcccatctcccctggaacccttatgacacagatgtgagatcattgttcatagtcccacaggtccctaaagctctgtccatcttgttttcccatgcattttctattcatttttcagaatgggaaatttctgttctgtcttcaagttcactggttctttcctctgttctgtctattctgccagtgattcctttatagagtttttaaaatttcagttatggtatttttcagttctaaaatttccatttggttcttcattatgtcttctatttatttattttttttttggctgagactttctatttttagtttgtttcaaatgcgttcttaattgcttaatgaagcatataatggtggctttcaatttttttacagataattctaacatctttgtcatcagtgttgacatctcttgattgtatcctgtcattccatt

SEQ ID NO: 6229 - DNA, 6146 bp, Homo sapiens
agagctgctttgatcttgtgtgtacattagatgactgccaggggcatgaaggggatgtgcttccagggcatttgctggcagggcgtctcgtgatctcttggtattggtgtgagcacagcctggcaggagagggcagatctccatgcaaagtatgtcagaaagcagatggaagccaggccccctcctgaaagaggctccttgaaggtaggtgcacactcatgtctttgttacttgtaagggggcatcttacaggcaagaggagttaggtgaatgtgaagaggaaggaactgctcactctgggcagggggctgggggaggcttcgtagaggagggggtgtttgagctgggccttgaaggtcaaaagggttttgttaggtgggaaatgggggaaggacagcctgaaagggttaggtacattcgaggagcccagagaaggttcgtggctggagcagacgcattcgtagagtgaagtcatgggagaagaggctgggaaactagattggttccaactcctaaaggaccactgaaggagtgtgggctgcacgctgggtgcagcaggtgagtttcctcacttgggtttcactgtcagcatttttaaaaggcaaactggttctcttcctgagaagaattcattgattcactcgtggccagtaagtcatctgacaaacccttgtgtacttctgatgggataggagtgtttgtagacaacaggcacacaaatataacatgcagcccagtgcagctcaggagcagccttccatggataagcggttggtacctacagtgtgctcctgtccttgctaatctgaacacataggtagtaaccttaagcatgtctcaatcttctgacttgtgatgaggtttccaattcttgttcctgactttagaatgaagtttggagagttgtcattaggtctctaggttctgaggattactgtggggtaggcagagggagagaagagtgttggggccagatgttcctgtgcttctaccagaaagttgatttgcccagtgtaccaccctcacttggcaggcctgagcagagtggcctgccactgacaacccagagaaagaaggtacagtgcaggcttgccctggtgggctcttggatgccctaagctgcagcatccagggccaggtgggatttggtaggataggccccccgtctactgtgtctgatcatactgcctttgaaagagaagggtgggtggtgaagacaagacgatgagacagggtggcctctgcatgttgtagcacccaactggaacatttgcagatgatacttggaaaaagctttaggaaagaggcccacttcatttatgaaatgacaccagctaatgtttgaccttagtcatatgttccttggttcctcattttgccatctgctggctgactcatacagcttcacttttaattaaaggtgggctgtgatgagagtcatgatcagtgagtggcttccatggcagaaagttctgtgtagttcttgggggatgtgagtgtaagtttgaggtgctaagacgaatatgtccatacattgtaaactatttcctctgtcctttccctcctctaaccattcctgccttcttcatctttctaactttcccaaggcattttacatcagatttcagatatagaacaatggatgttaaaacaaacccaaattcctaatgcttggtaccatgaaaacatggcaacactgtttgcattttctttacaaatggcctgtatgggtcagcccaggcattgacataggagcccattgtttgcatcctctgggtccttgtagttcatatgctggagcaatgcatagagacacacagaaaggctgagaatggccatgaggtatgtaacaatgaggcccagagcctgagctttggtgtctagcagacctgggtttgaatgttagctctttgtcttcctgtgtgaccttgttggttactcgtctctctgtgtctcctccactcctataaaccaggaggtacaaatgccactcatgtcacagggctgttgctgggacatacccttgcaccttgtgttgtctctttctgggactcaggttctcaagatttgcttctacatttacaggttggagattattccagcaacactgatgaaagatttttttttttttttggtctctcagctttgcaaatttcagagatttccaacagtgttcaagggactgcaatgtgatcttggaaaaatcctgtatgttctttgaataatctcagttgtgctatctagaaaatgaactggttagtctagaacatggttttcaaacctatgtggccatggaatgtcattttggagggatgctttcacaggatgtaagattctgagttgaaagttttttttttttttttgagacagagtctcactctgtggcccaggctgtagtgcaatggggcaatctctgctcactgcaacctttgcctcctgagttcaagcaattctcctgcctcagcctcccaagtagctgggattacaggtgcatgcatgccaccacgcatggctaatttttgtatttttagtagagacagggtttcaccatgttggtcagtctggtcttgaactcctcacctcaggtgatccgcctgccttggcctcccaaagtgctgggattacaggtgtgagccgctgcacccaggtgaaagctattttctgtaagcccttgaaaaaagttgtgccacttccttttggtatccatggtttggtaaggtgtcatttctctcgcattgcttccaagatttttttttttttttaatgattatcattattattattattttaaagacagggtctcccttcattgccctggctgcagagcagcattgcaatcatagctgactgtaaccttgaacttttgggctcaagcaatcctcccacctcagcctcccaggtagctagggctacagatatgagctaccatgctcagttaatttttttttgtttttatttaatagttctcagaagtttaactcaagtgttttagtgtggaatttctttggatttattctctttgggattcgttcagcttctgaagtctgcagagttatgtcttttgtcaaatttgggaaattttcagccattgcttctttgatttttcagccccacactttttcccatctcccctggaacccttatgacacagatgtgagatcattgttcatagtcccacaggtccctaaagctctgtccatcttgttttcccatgcattttctattcatttttcagaatgggaaatttctgttctgtcttcaagttcactggttctttcctctgttctgtctattctgccagtgattcctttatagagtttttaaaatttcagttatggtatttttcagttctaaaatttccatttggttcttcattatgtcttctatttatttattttttttttggctgagactttctatttttagtttgtttcaaatgcgttcttaattgcttaatgaagcatataatggtggctttcaatttttttacagataattctaacatctttgtcatcagtgttgacatctcttgattgtatcctgtcattccatttgagatcttcctggttctgggtatgatgtgtaacttttgattgaaatctagagattttcatattatgttagtaggttgaaggtgttatttaaactttgttttagctggcatcctctgacatcactccagcagaagaaagggaaggaacacgctgcattactgcgtggtgagtgcagtagtctaccttcgccacatggcctccattgatccctgaaatgggtgaggggctccttgtttctgctgggcaggagtggactttttggatctgatctggggctgtactcatacctttgtggctgggagggttcgatatttttcagcactgtatccaatatcacctgcacagacaccttaggggatggggacttgctgttgcctggcagggatgaaagtgccagctccctaattggccacctccgacagcaccaaggtagacaggagggatgttacagcttagcaagcatgttacactgagccccctagttggcctttgctggcatgtgtggaagtggggatcaaactatatttctgtggtgttaactagagtaaagcagctcactgtctaaaagttttctatcttgctaagtcacaactttcctggtcctctggctttggtccttctttcctccctcccttcccgtccccctttcctccctcttttccttcattccttctttcttctttcctctgtgtttgttgacatttctagatcccagctccttcagctccatgtctggtatatatgggcaaagaaagaaaagagagagggagaaagaggacgggagagaaagggaggaaggggaaaggagaggagagggaaagaaagagggtagagagagagggagggaggaaggggaaaggagaggagaggagagggaaagagagagaggaggagagggagagagagagagagagaggaagggaggaaggggagaggagagggaaagagaggaggagagggaaagagaggaggagagggagagagggagagagaggaagggaggaaggggaaaggagaggagagggagagagagaggaagagagggaaggggaaagagaggaaaagaaagagaaaaagagaggggaagggaggaatgggaaaggagaggagagggaaagaaagaaagagagagagacacacaccagagaactaattaactccattgttcctcaggtcacaaggtccccgtctgatctgccttcactccacctttcagagtcttatgtttgttttgtgtatattatcaaggggttttaggtcacttagtcggaagaatagggaaaagtatgtctactccagcttaatggaagtggaattctcctgagaacctttttttgatacaaaatatgtacttgtgcatattttgtatcaaaatatataatgtacatgtcccttttgtacatgtatataaattgtatataaatatttagggttataaaaataaccaaagacaccaaaaactgccacaggtggatttgagaagatgtggaaatgcctcactgctaagacatgctcattcttgacaggctgggaaccctgaatgctgtagtgtcaccactgccctgtcctgtacctacctatcttttcactcatttcctccaagctcaggttttcagtttggggtatgtgccacctaacagtgagctgtggaactgcagcacaatcatcaaattcaaaaaaggcaaggacatcttgctcagtttttaagatacgccatagatggagtaaaccataacctttgattccagatccttaaccctgattaaaaacaacacaacccttcatgttgatttaaaacatcccttgcaaaagatggtttgaatattccaagttggaaatacccagtcttttaaagttacagcaccctttttgatacaaaaaatgtgcatgacagaaattgtacagtgagtagtgttataaaaataaccaaacacaccaaaagctgccacgggtaaatttgagaaagtgttgaaatgtaccgcacagcatgagaccttgctggctccgtctaatagatgacgctggggctgcaaatgatgtcccagccttccagggcctgtggtctccagaacagggctgaaacctgttctgagttgacagtgctttcctaaggagaccccaagttgagaggaccctcttacccactcatcaataatcaaagcagacttgatgcccatcagagatgcccaatgattctggtgagccgttcctccctctggctgtcagtactggggagtatggtggggactttcagatagctcagtgaagctcagaaagagagggagttccccctgacacccgccccagtcagtaagccccggggcctgaggggcatccccactgctcgacctctccactctctcggggaggacgaggcagccttgacccacgagggctgatgaatgggtaggttatcggcaggctcctaggccaccagcttagaggtcacattgtcccttttagattcagtgtggcgggaatctaaaaggtcgaggatcgagaagcctgcaggatggcaaagtgagggaccccggcagtgcgacctcaggaatccactcccggaactctgactggggtgcctgtggaggctct

SEQ ID NO: 6230 - DNA, 397 bp, Homo sapiens
tgcagtagtctaccttcgccacatggcctccattgatccctgaaatgggtgaggggctccttgtttctgctgggcaggagtggactttttggatctgatctggggctgtactcatacctttgtggctgggagggttcgatatttttcagcactgtatccaatatcacctgcacagacaccttaggggatggggacttgctgttgcctggcagggatgaaagtgccagctccctaattggccacctccgacagcaccaaggtagacaggagggatgttacagcttagcaagcatgttacactgagccccctagttggcctttgctggcatgtgtggaagtggggatcaaactatatttctgtggtgttaactagagtaaagcagctcactgtctaaaa

SEQ ID NO: 6231 - DNA, 361 bp, Homo sapiens
  SITE (116): n equals a,t,g, or c
ttcctcattttgccatctgctggctgactcatacagcttcacttttaattaaaggtgggctgtgatgagagtcatgatcagtgagtggcttccatggcaaaaagttctgtgtagtncttgggggatgtgagtgtaagtcttaggtggtaacacgaatatgtccatacattgtaaactatttgctctgtcctttccctcctctaaccattactgccttcttcatcttgctaactttaccaaggcattttacatcagatttcagatatagaacaatggatgttaaaacaaacccaaattcctaatgcttggtaccatgaaaacatggcaacactgtttgcattttctttacaaatggcctgta

SEQ ID NO: 6232 - DNA, 7694 bp, Homo sapiens
cacgcactgacgacatcacgcacgtacgcacgccctggctgctaggagacgctattctctttacctggccctgatgcgcgccagccaaccaggccaaggccaggggacctcgagaccggcagcctcgacgaagaaccggaaggaggaaaaggaacgggagggaggaagagtaagtggaagggtgggacgaggacaccaggcaggagttttgggcccagagctgctataccagcagggaggagctgggagaaaccgctggggagggggtggaggcggggctgagaggaggagggcggagctgggggaggggccgagcgggactgacagaaacaattgggggctgggttgagggcggggctgagataagaggcggggtgtggggcagggccgggcggggctgagagaaaccattgtgggcagggccgtgggagagctgagcgaggagaagctgcaggaagagctcgcggactcttgagaatcagcagggggaggcaggtgtccgctgagagaaggagggagggggagaaagaaatcactgggaggggctgggggcggggtttttaaagcagctgcgtgagaagtagggcggggctgggagaggcggggctctgggggggctgagaatgctggggaaggtttgggggcggggctttggaggcagccacaggagaagcaggtcggggctgcgggcggggctcggggtggggcggggctgagagaaactcctggggagggggccgagggcggggctttgggagcagccgcgggagaagcggggcggggcagggaggggaggggcggggcagggaggggcggggctgagagaaactgctggctgaggtcggggctttggaagcagccccgcgaagagcagggcggggcaatgggagaactgagcgaggagcagctgcgggaggacccctcggactcctgagaaccagcttaggggagcgggggcttggggaggtgtagggtggaatcacgagaaagctctgtgggagggcctggtgcacagctcagctgcagcgtggagctgagggaaagccgggcgttcctggaggaggagcagggcggggctgtggcaaagaggtgtgggagcagatggggcggggctgcgggaaattgctggagaagggggagccaagctggagtaaggctggcgggtgagaatggtgggggaggagctagtgcagagctggaggaaagagctgaaaggtgctggggtgggcagaggggtaggagaagcgggacggggctagaggaggcggagctgggactggagatgcagggtgagcagggtggggctgtgggaaacgaagctgggggtggagctgcagcaggaactgggttagagcttctggaggagccgcctgcaagaggagggcgtagttgtgggaaagagctgtgggtggaactggttaagtgctgggaggaggaagagctgggggcggaacagctggggcggagctgccggaggaggagctgggggtggagatgctggtgaaatgaagcagagccgaactgggggtggagctgtgggtggagctgggggagggagctgaggcccttctgtgatgcacccttaggcaagagtcaaaacttgcccgcagcgacctaactgcacctccagtgtctacccccatagggcacggaagcagcaagaagggcgggaacacttgactggggtctatgcagctctaggctgagtcttgcagggctgagccccccaggcctgctctcctgtgtcctagccgctctgtcagtgcctgccagtggggtccggaggaaccgtctctttaacgtctcttttgcaggtgatgagaaacatccccactcttaatgtcttgcctcctccgacctaagtcgcccagcacacagcccaacttccctggcaaacttgcttttcaaactctcttctctcagtcacgggctcaggttctgtagtgctgccatgctttactcctctgtccctccccttatctagtctcccgcattgacttcataaccaagttctgggtccctgcctctggagtgcctgatgagacaaaacggctcctcgtcctgcatccccgctgctacttccagaattcaggcctcgtggtctggagcctgcactgttccatgagcctcctgagcaacctggagtcctctgtctttcttccctcaggtctgtcgtccacattccatcggctcagtttctaagtcacaaatctgtccccagcaatcctctagtgaaaacgctgctgggccttctcaggtttaagtcctagcagttcagggagtcggctcagctctccccacccttaagccaaacactctttgggttcacgctgtgctgttcagtcactggtccccaccagcctgctgttccaggtctccctgctttgcaccggcggttcccatggccttgtcctggtgcgctcctggcctccttcaaggcacaactttaaagtcaccttcacagccccactccgagtattagagactttcgtctccagctctgatagcattttgtacctcccccgtccccaccccacgttaggctcttgcaacccagggtggtaattgctctgtaagactgtggctgccgcagggtctcttgagttccttgaaggcaaggccggtgttttactcatttctgaaactgggtgcccagggcacagtatctgcttagtaagtgttgaatgagcaaagggctgctttcttgttttttctagtgagatgcgcctacttctccctggagaagctcgaggaagcaggaatgctggagatgaggtgaggaggagagggtccctctttatgggatgtaggccgtagggctgcaggggaccttcagatcaccagttccaattcctatgcatgctagcatcccctcctgggttccttccccacaagaatggttgccagcttctgccgaacaccccagaacctgcttagagtggtttcaaatcatgaatgaggatccccgggatggtgggtggccgttgctcctcccgtggcctcttgtttgaagaactagaactcgcataatgagctggatagccaccgtgtggctgctagcagggaagcccttggtggccacataagggctcccttttccaactctctcagctgctcctcactctcactcctgggtgtgctgggcagtggggtgcaatgtgcacgtaggtgcacactctccctgggcggcagcgagaagcagaggtctgatctgtggtcggatgaggagaggaagtgcaagtaaagcagctgcagcggtgagtgggcctaggaagaatggcatcaacaggccaggcagggatgcgggtggtgttcggctaaccctgagaaagggaccagaatgcacctgagtcttgattttcattcccaatagcaggtcagcacgaaacccaaaaacgctctgatttctgccttccatgctacactctcttcacctgctgccttctcactcctctcattaacaatgtcctggcaggaacaagactttcccctccctctcttctcgtctcttagcaggtcaggtcggccttcacctccctagacccgtcctgctcctgccttcccctgtggggccctccatggatgctctggagtcccgggcaatagtcagccaactgcagacatgcggggccttcttgggttccttgctgtgctcccttgaaaccactgtgcctggctgcaccccagtagcacacactgaactgacccccactcctggggccagcggtgtgtctcctcaagttctgcttgcttcttcaggccttgcttgcatgcctatcgtgccacacatcatatctcttttaggaagtccttgccttttccaaagatcctgctttgcagctgactgtaccctctgcctgcctcccccaggatactgcctccttcctgaaaccacagcccccgctcaggtcttccttccttcctcatcaccagggagccccctgcagagctcccagtccatcccggtggccttctgagcctcacctccccttccttcccctcccatcccttcccctcccctccccttccctctccccgcttcccttccctaccctaccctgcccccccaccccctgcccccaaccctgccctctcctgctctgtcctctccctccatggcaggctagcctccctggctagagctgtcccttgcgaatttgccatcaccttgcctctccgtgctcagcatccccggctgtgcagtccttctcttctgcccacatgctcccctagagaagcattctttttgctcagcctaatttccgtgcaactcctcctgttttctgagcctgtcaccgccttcctcttcctttgcctccccactgacactttccagagtgcagccacctctcctcactgtgcttttttgactctgaggcccaggaggaagttgcccttctctggagatggttcacgtttgatcctgcctagtgttccggggcacggccagtctgggaccgctttgaccctgattcatggtttcccttcagatgctttttggtcagcctgctttcctcgtctaggaaatggcttttgctcatttttctattgagtcacttgccttgttgatatggagttgtaggagctctttctgaattctgcctctaaccccatgttggctttttgtatttcagagacctcgtctgctcaggggcttgttcttacatcttttgcagggctgttttgaagtcagtattcacttaagcactccaaattgtaagtaaccccagaggtcatggagtgtcccactgcccctccatctggaggcagtgacccctctcccacagaggaggtgctcgcatgtgtccagtgccctgcccattagattagagagggttcccttttttgctctcttgcattcatttgtccgccttttagctttacttttctgccctggactcacacagggtcatgtgaacgtgtggtgtagcaggaggagagaggtaaagtggaggaataggagctggaagggaggaggagggaagaaaaaaggagggggagggggaggagagggagtgggttggaggagggaaggaggaggagaaggagaggaggaggagatgagaccaaggacaagaggtgaaggaagagaggaggacacagaaaagagaagaaagaggagaggaggagacggagaagaggaggaggagcagcaaagaaggaagaagaggaagaggactagaagagcaagtaaggaggaggaggggggagtaggaggagaggagaaggacagaaggagaaggagaggcagatgaggagaggaggtcgaggagaggaggaaatgagaaagaggaggagaaaaggagaggagagggattaggggggaggaggaagagaaaacaggagatggagaagaggaggagtgagagaaaagaggaggagaggaggggggaggacggggaggaagggagaaggagagaaataggagggaggaaaggagaggtgtaggaggaggaggacaggacgagaggaggagcagaggaggaggagaaggagaggaaggggaggagatttggaggaagaggagaggtggaggaagaaaggagaaggcggagaagaggagaaagcagagaggaggaggctgaagaaaggaggaccatttaggagaggaggaggaggaaaggaggaagaggaagagtggaataagaggagcagaggaaaaggaggagggggtggaggaggagtgaagaggagaggaggaggaacagagttggaggaggtggaagagagaagagaaggaggagaggaagagagaaggaaatgagaaggagaaaagtaggaagaagagagaagaggagagagagaggagaggatgaggaggaggagaggagaaggagagcaggaggtgggaggaggaggagagtaagaggaggaaatgaggaggaagaagaaagaaggacagcagatggagaggaggaagagagaattaggagaggaggaagaggggaggagaggaggagaaggaaacgaggaggaggacgaagctgcatcacccttatcaggttccagttctcggtgcgccccgttctgcaagacactctcctgtggtcagccctggcctgcagaggattcccgcgctggatctctgaaggatgctggcgccctctctgcagcacattcctgatgcccttgctgacacatgtgtcctctgggtcctctcctgaaacctgatcctccggggtgtcttctggcctcacctcttctgtccagttccagcaagctcactttgcttagcctttgaatcccttccttcactgtctgctgtgacaattcgggcctttcactgtcactcaggcctggaccatcactgttgcccatcccatgccatcaacaggtttgccccatcccttcggctccctaccagggcattcagttgtgttgagcagcagagtgcctccaagtccccactggttgagctgcatccgggtcccatcccacagggaccccccctggccgctgcaggtgcatgctgatcctgcagctcctcgagggtgtcatcgctttcccccttcccagacccagcacaccctgcctgcatggcgctgcgctgcaccttcactctggtcacgggtctggcagtcggctcaccaattcgtcctgcttccctgggactcgccggcttttagcactgcaattcactcagcaaactgggactgttggtcaccctacctggcagccagtgataaggtgagggccactcctgggagggaggacacctgtggggaaaattcttgtgttatttatttctccttcgggatagggtgcctgcagcgcttcatgggagggggtgggctgatgctgcgggctcagaagtttcaagggcatctggggagaccagatattcagagaccttctcctagatgtgcctgttccatgtatcagggacacaggttttcccaacagggctggtgtcattggcatgacagacctgccttggctgagcgttcacccgtcttcggagttcagccaccttagcaagtcctgggtttgtccttcagattttgctgctcgcccattgcctggatcgggggctactttgtaaaccaccaggaagactccagtgtttctgcttaatttttagatgtttgttaattgctcttggcctctcattaatcccctgtgggtcatccaggaaatatactcaccactgtctgttctctgagttttcatttccaggcatccgccctgcctggatctcctcacctgccaggaacttcctctccacaagccggccatcccagcaaaagttctaacaccaaaggtctggcaactagcctgccatcttgtgcctggagccgcctgcgtgccacctactcccgaagatgggaaccttgttgccagttgggcagatgcggggcaatcctgtaccaagaccccattttaccacctgctttctcagaccactctggaacccactgtctcagattgtgtcctccaggaagcagaccatgagagggagttggcagggccaaagatttactggggctaactaacactcaggaaagggataggaaggaaacagggctggagagcaggttgagcccgacctgacagtctcgagcagcccaacagggaggtgtggagcaagggttgcccactagaggggcctgcattgggtacgggtgatggggtccacatggtacctggcatatagcaggctgtgcaatccatattaactgactggataaattaat

SEQ ID NO: 6233 - DNA, 671 bp, Homo sapiens
ggaaaaatggcagagttaagatgatacccccaggatgatgaatacaattgacttcttattggatttggaacgtaattagaaagaaatatgcacaaaggacagtaacgtatccacatatagatgtacccactcagcctcacttcatagccagtcctgatccttttcaaattcagttgaactactttgggccacagtctcccagattaccaggtacttgctaaaaatatttagagtaactaaaagcagatcatcccaagaaacttacttcaagttaattgaaaatccaatattcctgaatcatttgttaatagttctcaaagaataatggtaataagacaattcccacatacctctactctttggttttataaagtataaacctgggcactaaaataatttaactacctgatatggacaagaactcaataaccagcataatcaggaatgagactttatttattcagtaagacttgcaaccatatcccatacaaaagtcttttcctttcatccatgtctgtattcaaatgaatagcaataaattaagttcacccaaaacccattggactttatttaaatcaattataaaatttcatttgaaacaagaaaatttccctccttttctactgaatctgtagcttaggacgctttcagctgaaactgacagaaatatc

SEQ ID NO: 6234 - DNA, 303 bp, Homo sapiens
tcctcacataataacaccctttcttctacctcttcttaaggctcggaaagccttctcagaatctctccctccagcaaatctcctctcatatctcattgtccagaactgcgatatgcatgctcctaaaccaaccactagcaagaggaaagaaatcaaaataagcttaagctaatcaagattggtcaacttttcctgaagcatatgattacacagtacctatacaaatgtgggattctgtcaacaagcaaccaactgtatctgccacatcttccccaagtgttgcagtcaccctgtactgaggag

SEQ ID NO: 6235 - DNA, 642 bp, Homo sapiens
gccacaacgcccagcctgcttgaacttttaaaaagatttgtcagtcatatgttaaacattttagaggactcttctgttttcttcctgcaatatctccaattcatactacctccccaatgtctacctttaaggagaaaccatcccatattgtaagcttgaaagggtcatttataataaacgtaaccagttttgttcacagatacataatgtgcctctttaagatgactagagatcagatttgccaaattttcctctctgatttctatcaaggtcatcctaggtatgtctcatctgtttaatcttcctttctacgtagcctaatccatagtatatttttttttgtggtccaccacttagttctttttctttatttggactcagatggggtgaaagtattactttcaacttgagtcgctacatttccccaagaagaatttggggagggtgaaggtgaccctgaaaagggccctgtagtgtctcccaagttttcgtctttgcttgggtccctcctggtctctctgtcatctttgttcagagtctcaatcactcatggtcttaaatttcatgtcagatctttagtaggaataaaatgtctgcttagatgcctgtggaaccgtggatgaaactggccgagtcaaaggg

SEQ ID NO: 6236 - DNA, 642 bp, Homo sapiens
gccacaacgcccagcctgcttgaacttttaaaaagatttgtcagtcatatgttaaacattttagaggactcttctgttttcttcctgctttatctccaattcatactacctccccaatgtctacctttaaggagaaaccatcccatattgtaagcttgaaagggtcatttataataaacgtaaccagttttgttcacagatacataatgtgcctctttaagatgactagagatcagatttgccaaattttcctctctgatttctatcaaggtcatcctaggtatgtctcatctgtttaatcttcctttctacgtagcctaatccatagtatatttttttttgtggtccaccacttagttctttttctttatttggactcagatggggtgaaagtattactttcaacttgagtcgctacatttccccaagaagaatttggggagggtgaaggtgaccctgaaaagggccctgtagtgtctcccaagttttcgtctttgcttgggtccctcctggtctctctgtcatctttgttcagagtctcaatcactcatggtcttaaatttcatgtcagatctttagtaggaataaaatgtctgcttagatgcctgtggaaccgtggatgaaactggccgagtcaaaggg

SEQ ID NO: 6237 - DNA, 642 bp, Homo sapiens; identical to SEQ ID NO: 6236

SEQ ID NO: 6238 - DNA, 281 bp, Homo sapiens
cttttcacaggtcagggtgaaccacagcctgttcccagattatccccaaagatcaaactgaccttgaccaacaagttctagttcttctacatgtacttgggaaactgtcactttccagagagagttcagcactatagtgacgctttattggaaaagttgacaatctgccttgtttactaacccttctgtaaacacttatttggtaaaccatcaccagaccatgtgccttggaatgcgtgcgcatgcaggggacatttttaatgaggtacagtgccattgag

SEQ ID NO: 6239 - DNA, 266 bp, Homo sapiens
tcacacctgtaatcccagcactttgggaggccaaggcaggtagatcacctgaggtcaggagttagagaccagcctggccaacatggtgaaaccccgtctctactaaaaatacaaaaattagctgggtgtggtggcacatgcctgtaatcccagctactcaggaggctgaggcaggagaattgcttgaacccgggaggcagaggttgcagcgagctgagattgcaccactgcactccagcctgggtgacagagcgagactccgtctc

SEQ ID NO: 6240 - DNA, 281 bp, Homo sapiens; identical to SEQ ID NO: 6238

SEQ ID NO: 6241 - DNA, 266 bp, Homo sapiens
tcacacctgtaatcccagcactttgggaggccaaggcaggtagatcacctgaggtcaggagttagagaccagcctggccaacatggtgaaaccccgtctctactaaaaatacaaaaattagctgggtgtggtggcacacgtctgtagtcccagctactcaggaggctgaggcaggagaattgcttgaacccgggaggcagaggttgcagcgagctgagattgcaccactgcactccagcctgggtgacagagcgagactccgtctc

SEQ ID NO: 6242 - DNA, 281 bp, Homo sapiens; identical to SEQ ID NO: 6238

SEQ ID NO: 6243 - DNA, 3777 bp, Homo sapiens
ccttcaggtgaagtttttgaagaatccgagtgagcaaccgtggaaatcttcctgtatctattgcatttatcagtgacactgctttcttcatgctaaacaaaattataaaacagagttttgaaatgagttttccaagttgaactgcactttctatagttgtctataagttttcattccaacaactctgaatgctatatggtaaatctgagtgaaataaaaacagatgacagccagcaaaaaaggcagggcaacgggtacatttccaaaaagatgcccccaaaattacttctgctgaaaaggtccatttggcaaattttctctttcttttgggcaaaccaaactactagggaaaccttgtactgcgcagggaagagccttaatttagtagagcgtttatataaacacttaacccaaaaatggaactctgaaaggggtgggaggagaggaatagcaattatggcaattacaccaaaaacataaaagaatactgcaaggcaaataacttttcaaatactatgtacaaaatcatctggggtcactaagcacacagttattttaaaaccctgtttcaactgtaaaatcaaatttattattacaacagtaatcaattttgagatagggtcttactctgtcacccaggctggagtgcagtggcacgatctcagctcactacagcctctgcctcctgggttctaagaatccttgtgcctcagcctcccaagtagctagaactacatgcgcgggccacagcgctggctaatttttgtattttttgtagagacagagttttgccctgttgcccaggctggtcttgaactcctgagctcaatcagtcctgcagtggctcacccctataatcccagcactttgcaaggccagggaggacagatcacccgaagccaggagttccagaccagcctagccaacatggtgaaaccccatctttactaaaaatacaaaaaattagctgggcgtggtggcgggtgcctgtaatcccagctactcaggaggctcagggaggagaatcgcttgaacacaggaggcggaggctgcagtgagccgagatggcgccattgcactccagcctgcgcaacaagagggaaacgccctctcagggaaaaaaaagagagagagattagcccgcctcagcctcccaaagtgctggaattacaggcatgagccacagcacctttcctgtaataatcaactttaaatgatgtgatgagaacaattctatactgcaccatattggatacagtttactgatgtagcggtgttccccaagacactggtatgaggaaagaaactggcgatcagaaccaaagtgaggcaggaaaatagggtcaggaggctgggaacataaagctgattcccacttcagctatgacaagaaatgtcctctccatatggcataggcggagaaaatgactttgtaactttacttcatcctcttcatttacatagggagtacaccaagtaaccaatggaatcctctagagggtatttaaattcccaaaaattctgtaggggcccttcagcccctatgctcaagcagctcccacactgtggagggtagtttcattttcaataaatgtcttcttcattctttcctcgctttctttgtgcgtcttctccagttctttgttcaagacgccaagaacctggacaccctccactggtaacaaaaggaatccagaaagaaggaaaaactttaaaataactcttttcttctgaaagatttctacccaatccaagcacaaagaaattacttccgaacactattttgcctatatacttcagtactttttctgtatccacacgctacctgcactattgcttattttttcacaaattgagtctttttttacttaaataatgttaaaggggagctttatatcactaccatggacaaccaactttatctaccataagtagaaattaactaaaaatctgtttaaaatgcaaataaaagcaaatgctaccaaagccaggctagattcttctaccaaccaaaaattcggtcccctattcgatactgatttaaaaggggtattaacacatgttggctattaaagaccctccagcagcagcgtgagcctttcccaccagagtgtctgaaccggaactgaaatcggaaacggaataccgttccacgtgattcggcagcactgaaggcagcacccgggaacttctgataccaaactccgcgaacagtgacgcagaccccacgcttgcagaccacacgcttccgtacagacctcagctgccaggcgcactgtgagccccacaggtggaccaccgtgactgtagaggcgctacacggccccacgcactccgcagacgcagcgtcgcaacctcggcagcccaccccaccccaccccactcaaccgggcccgccgcggcgcccaggcggcaggcagcaaggacagccttgtgcgagcccgatctgggccttcctgggcgcggctaccgcaagagcttaacggatcagctacctggggctctcccgtaggatcagcgccgcggggaccgccatcttcggctttctcgcactgccgccgtctgttagctgcgccgaacccagccaatggcggccgcggcggacggaaagccggaaggcccaagccgcgcaggggccgttttagggctccgggtctcctgcgacccgggcgccgggagacttgtcccgcagtcctggagggcggagagggcagcccagttgccctcccgacactccaatcgtgttggagttaagtctgtgcatatatatgtctttatatttatatattatatatgtatgtacatacctggataggggtgtgtgtctgtatttaatagggcaggtttaagcaagtctatgtacagacctgtatagatatatgtgtgtatgttcgtgcataaatatatacattattatttttaatagggcaggtttaagcaagcccgtgtatacatacttggataaatggtgtgtgcgtgtgtatatttttttaatagggcgggtttaagtgagcctgtgtgtacatacttggataggtgatttgtgagtatttttttttccagcgtttgggctacagagaggcaggcatttgagcgagctcccccgagcctgcccaggaagcggcgcatcacccctcaggagaggtggtgcctccagttccaccctaagcactgtgccgtcaacccctcctgtatctgcatctgcagggcttgtagtatgtacgttcaattccttcagcaacgttcaatgaatgagtgcctactgtgtaccaagcactgttctaggcactggagatacaaaaggccaaaattcctgccctcagggtttgccggcagtctaaatggacaagtatttgttgcacccttctttagagtctgacagtgcagagtaggggagatgaatcgctgcagtgagtgatgtcaaagacctcacccaagactagggagacaccatgtttgcataaataccttggtctgcctttgagaaaaacatggagtgagttaaaggaattcagatgtgggagcagtgaaaggcatccgaggtaagatcaggaaaagctccctagggcaggtggcaaatgcggtgggtctgcagagatgtggagggtgaggctgtgtgtttcaggtcagtagagtagaagggcggtttgacgtttgaagaacaggaatttagactagaaaaagcctttaatgactggttgtggcatgtgcacttaatctggtgagaaatgggtaagcattaaatgttttttctatccattaaatgttttgaaccaa

SEQ ID NO: 6244 - DNA, 132 bp, Homo sapiens
taagtctcttcgtaggtctctaagaacttgctttagaatctgggtgctcctatattgggtgcatatatatttaggatagttagctcttcttgttgcattgatccctttaccattatgtaatgcccttctttg

SEQ ID NO: 6245 - DNA, 11150 bp, Homo sapiens
caggctgtgaacaaccggtccatccaactccccaccaccgtgcgggacatcatgaaccgctggaccctgcagatgggcttcccggtcatcacggtggataccagcacggggaccctttcccaggagcacttcctccttgaccccgattccaatgttacccgcccctcagaattcaagtgagcagatggggtcactgaggcatggtcaggtgggtggggtagagggcagttactaagggaccatagtaggactggcctcctgtggtcccagccccagccactgtagacagaccctccctccagagccaggagttcaggggcactcggtgccagagctgggcagaagctgggagcctgggcagctgctcctcactggcagtgaccacaccgccatctctcaccacctctggatctttaattgcagctacgtgtggattgtgcccatcacatccatcagagatggcagacagcagcaggactactggctgatagatgtaagaggtaatccagccctgccttatgggcagcagcccccaccccatactcctagctcctggcccatgttctgagggctgtgatgggccattccattcaacaaatggacttgacttctttggttccaatctccactttgctgctgcttcgctgtgtgactctgggcaagttaccatcccgctctggtctctagttcctcttctataaaatgaggctaagagcaatactccattagttatgtgaggattaaaggagagaatcctaggccaggcatggtggctcatgcctgtaatcccagcactttgggaggccgaggcgacctggggtcaggagttcgagaccagcctgacaaacatggagaaaccccatttctactaaaaatacaaaattagccaggtgtggtggtgcatgcctgtaatcccagctactctggaggctggggcaggagaattgcttgaacctgggaggcagaggttgcagtgagccaagatcgcaccattgcactccagcctgggcaacaagagcgaaactctgtctcaaaaaaaaaaaaaaaaaaaaaaggagagaatccacataaaatgcttaaagtagtgcctggcacatgttatgagcagccctactcagcaaggcactgaagaagcgaagggcatgacaagtcatcctttgccttggccaaggctacagatgaaggaaggcaagaagttggaggcattctagtgctgtgctgagtgctttcagagtgtatggttggggctagtgaggtatggggacatggagcagggaataagggagattcaagttcatggagaggtcagggagggcttcccggaggaggtgagctgagtcttagaggaagagtaggaatcagacaggctaatgtggcagagaaaagaattccaggcaaagggaatagcaagtgccagggatagaggtaggagagagtgtggggactgagtgtagctagggcagaggtgtgcccaagagataaagctggtccccaagggccccaggggctgcaggagacagtggatggggcaggtgggaaatgagcaacctattggccctgacctctggctgctgaaacaaagtatgagaggagtgagggaggagggggacccacagggaggaaggggcactaagccccagaaagagacagcagcactgggggtctgggtgaatgggaggggaagggagaggaggagctgcctgtggttcccacttgggtgacaggtgtgatggagtgtggaggagggcaaggaggaggaacagcctggattgctgagtgtgagcggcctggcagctggcctggccgtgcagagcctagggaggcagggcaggttctgaggtttggggtggcatgtcatcttcatgggttgatggtctgtgaagccactggcagcccagttcctcatcccttccttccccacccttagcgtctccccagcagcttgagggtgaggtggtgccaggctgcgggggcagctgctcttgcaagaggtccaggggtcagcccatggcctctgagcagccctgcccaggtctcgtccctctccacagcccagaacgatctcttcagcacatcaggcaatgagtgggtcctgctgaacctcaatgtgacgggctattaccgggtgaactacgacgaagagaactggaggaagattcagactcagctgcagagagaccactcggtgagtgtctgccacccctcgccctgccccctgccccaggacaggcaccagactgcaaggcctgccacccacagccaacccatggtcacatgctgtgcttcgcattctaggccatccctgtcatcaatcgggcacagatcattaatgacgccttcaacctggccaggtgagtgctccgctgcctggctcagctgcagaagctcgtgacttcagcaagtctgagtccacaatgagggcccctgctcctcctgctgcccttcccatatgccacgtgctgtgccctgagctcctgtgctccctggacgtccctccctgggtccccacacacccatttcacagatgaagaatgtgacaccttgcccgaagtcacacagtagttcatgacagccagacagaggcttgtccaactccaaagccatcctctactccacagcaccaagctttttgtttttgtttttgtttgtttgtttgtttgtttgtttgttttgagacggagtctcgctctgttgcccaggttggagtacagtggcgcgatctcagctcactgcagcctccacctcccaggttcaagcgattctctgcctcagcctcccgagttgctgggattacaggtgtgcaccaccatgcccagctaatttttgtatttttagtagagatggggtttcaccatgttggtcaggctggtctcgcactcctgaccttgtgatccacccacctcggcttcccaaagtgctgggattacaggcatgagccatggcacctggccatgcccccccgctttttttttttgagatggagtcttgctctgtcacccgggctggagtgcagtggcgtgatcttggctcactacgacctctgcctcctagattcaagcgattctcccttctcggcctcctgagtagctaggattacaggcatgtgccaccatgcccagctgatttttgcatttttagtacagatggggtttcaccatgttgaccaggctggtctcaaactcctgacctcaggtgatccacctgccttgccatcccaaagagctgggattataggtgtgagccaccgtgcccagctgcaccaagcttttcctgaaggctgactatgctgggccactgttctaagtgccaaaaatctgggctggacagggcaggagggatgcagtatggataaacaggtacttattgagcacctactctgtttggggtgaggtactctaagctcttggacatgagtgatgtcacccacagacaaggacatttgtgagctaaatgtgtacagaaggcaggaggaagaaaggcctagagtgcccagaaagtcagaagaggtggtcagagttaagaacacgggcttcttgcccttttaaatctcagctctgtctctcgtgaggtgtgtgaccttgggcaagtcacttcacttctctgagcctcagtttcctcatctgtaaaatggggataataagcaaaggagtggaactgccaatgggtgagggtggggccttgtttgtggcaccacccagcagccatgtagctctttttccatggcaaatgcctgagctggctcagttgggaatctgggacctccggctccaggagtggatacagggggcctaggggtgtggagcatctttgagggcctgggttggggttcccaggctgtggctgggctgggtggaggtgctttacttgggcccctctgtttattcccagtgcccataaggtccctgtcactctggcgctgaacaacaccctcttcctgattgaagagagacagtacatgccctgggaggccgccctgagcagcctgagctacttcaagctcatgtttgaccgctccgaggtctatggccccatgaaggtacggaggtgcatggtagggttcaagaaccagttcgccccagtgcctgaaagtgcactattaggaagttaatagactattgcctactggactcctggtcagggaaccttcaaaagcaaaacaaaaaaccaaaaaaaaagaaagattgccttgtcaggttctctcctgagagcacgcaggtgaaagagcgagccggagggacatggaggtgagtgagcaggcactgaggaggtgagtgaggaggctgcgtggggcaaaacaataaaggtcgcggagacttcagcaacgtttgttgatttgaaatatggggaattaacgctttcagaaggcacagaaaaggccaccatgctgagggccagaagacctgtcttttgccagctgtgtggccttgggcaaccctttctcagacccagttaacttctctgtcagatgggcaggcctctacctgcccggccagcccacctgcgctatgagagagatgtgggtattggctgctttggagtatcttaaggctgagcataggggcctatttgagggctgaggctcccgcttgggagaccaaaaggaaactcgagcttattctggatgaataagctacatccataggatgctcactgcagcagtttataaaagacaaaaagcaaacaaaacacaaatacttaaacgtctaaaggttgaagattggttaaactgtagaatatccatttcagggtgtgatatgtagtcattaaatcatgcttgaagagatcttttttcattaaaaaatgttcaattatcaggccgggtgcagtggggctcatgcctgtaatcccagcactttgggaggccgaggcaggcggatcacgaggtcagcagatcgagaccatcctggctaacacggtgaaacctcgtctctactaaaaaaaaaaaaatacaaaaaattagccaggcgtggtggcgggcacctgtagtcccagctactcgggaggctgaggcaggagaatggcatgaacctgggaggtggagcttgcagtgagccaagatggtgctactgcactccagcctgggcaacagagcaagactccatctcaaaaaaaaagaaaaaaaaaaagttcaattatctgttaatatccattatggtaaatgagagattttggtaaatgaagtttcaaccctcttactgctttccccacattccccatcctcctaatgtagttaaatcataatatttagtcaaatcagtgttaagcatttgctttattgtgattatctaaatagtattctctgctgagccatgtagagcactatgtttatgtttccttttttgtacacagttacaaatgtatcacacaataggtcaagtttttgtttgtttgtttagagacaaggtctcactctcttgcccaagctggagtgcagtggtgcaatcaagcttcactgcagcctcaaatacctaggctcaagggatcctcctgcctcagtctctccattagctgggacctcagatgtgcaccaccatgctcttttgtagagatgcatcttttgtagagatgggatctttctgtattggccaggatggtctggaacacctggcttcaagcaatcctccctccttggcctcccaaagtgttatgattataggcgtgagccactgtgcccagcccagttttgagactggactcctcctggagtcctattctgcctgctctcttccagagctgccacacagctcccatgcttggaggtgcctccctctactgtgtttcctgcatcccatggattctttgattttttcccctctcataggggaatacatcttccaggagtttttgagaaagggttcatgagaggtgacttttctggggtagatcatctgaaatgtctttattccactctcacactggattgagcgttcagctgagtttagaagtttcaaggtgggaaattatttctctgaatgtttaaggtcttgctccactgatgtcaggcttgccatgttgctgatgcgatgcccagagccattcttatttccagttatttgaatgtgaccagttttcctcccttctggaaactttgggagcttctctcggtcctggtgggccttggtttgggcctcgtctccatctaccttttccaatcaggactggcattcacatcatctagtattggaagattttgtattgcttctttaaactttattcccttcactttttccagttatctctttctggaacccctgtaatccagcttatttctcttgctttcatcctctagttttctttttctcttctgttttccagcttgttgactttttattctgccccctgggaggttccctcagctttgcacaccacctcacctagaaattgttttcatttcttctgtcgtatttttaaatttccaagtgttctttctgattccagcatcctatgcaatatcttctcttcactctcagaggatatttattacaggctcttatgaagttttcctttttttttttttttccattgactcgtttcctcttgagttttgtgtttgttttggcctcttttcaagttggaggctgagccacccctttgggtttgagacagacacaaacaaaatgcaagtggaagctccatgggaaggtggagtgtgttgtccgggggatctcattgcgaggtgactgggtggccaagtaactcttcactggggaccctcaaaaattagtccatgggtttgttctctcgagacaaggcagtttttccagagagtaagcctctgtattgtgcaatgaggctggtagtactcccattctaggacacaggagggaagggaactggggtgccacctttcagtatggaaactttcacctctgaccctctttgcaatccagcaaccctcccactgtggtctggtgaccccactttctgagccccctggttcaatctctctcatggggtggtgaggggtgctgccctctacaaggagggaagtggggacttgggggttgaatgactccttctgtagactttgacttcatcttcctgtttgcagtccttacctcccctctgtcccttgctgacttgtccctttaatttttttatttatttttatttatttatttatttttgagacagaatcccactctgtcacccaggctggagcgcagtggcccgatcttggctcacttcaacctccacctcccagattcaagcgattctcctgcctcagcctcctgagtagctgggattacaggcgcctgccaccatgcctggctaatttttgtatttttagtagcttcggggtttcaccacgttggccaggctggtctcaaactcctgacctcaggtgatccgcccgcctcagcctcccaaagtgctgggattacaggcatgtgcccccatacctggccttgtccctttaattctgagtcttgtcacagcaagttcccttgcttctgtctccccttctgcagattctcaattgcaaattctcccactctgccaagcctggtacatctccctttctgcgcgtcccagctgcctaaactatattgaccttgcatccgctgttgcctctcctgttctttgttattgggggtttattccttttacatttggacgtggatccaggtgggcacagaaatcaacctgccatgtcaaaccagagtccacaaaggattttactagcatggggtggggcttacactacaatgttaggagaaaaatgccatgtgaagaatatgctaagtaaaaaagaaaaaactatagaaaaaagaaggtgtaaatgcatcaatgtggaaactgtagttttggtgagctcctgggtgtgttttattttctgcatatacttctctgtgtttcccaaattccctacaataagtcatggaatttttttttttttttttttttgagatggagtctcgctctgttacccaggctggagtgcagtggcgtgatcacagctcactgtaacctctgcctcccgggtttaagcgattctcctgcctcagcctcccaagtagctgggaatacaggtgtgcaccaccacactcggctaatttttttgtggttttagtagagacgtggtttcaccatgttgcccaggctgatctcgaactcctggactcaggggatccacccgcctcagcctctcaaaatgctggaattacaagtgtgagccactgcgcccagcaactcatggaatatttatgattgtgtagggaaaacccaacattttatattaagaaatggtgacccgtagacaaagaatattgcaactgactaaggctttaagcagaaagaaactcagctcagttatttgaactctagacttctatgggcccctttgagcactgtttggcctcaggtgaggccctgacctctgacgtctctgccagcgcctgccccccaacatcagaggctctgtggggctccaggcaggtcaggcatgagtctttgatgagattcatattttcttttccccagaactacctgaagaagcaggtcacacccctcttcattcacttcagaaataataccaacaactggagggagatcccagaaaacctgatggaccagtgagtgggagctctcatgggtttggaagtcctgggcaccccggggagtcaagagcaacatcctggcagtgttctctgccgcagctctcaatgcgggggcaccaggcagggagagacccccacccaggagcagggaggtcctgccctgaggctccatgtggcctgagggcccatcggacctctttatacaaagacccaaactgaaactctagctcaccccactggcttgaggttatacagtttctaggtgttgaaactggggctggagcctgttcctgcccttctgggtcacagggctgctttggggaccaaggaacctcaggcccaaggcacaaagcacatacagcgggggtcagagggccagttaggccacagagccttaggcagggtgccggcctggggttgtgtgtcaagaggtgaatcttggctggagttcgccaggtgtgctaaccgcgtgtcacccctggggcaggtacagcgaggttaatgccatcagcaccgcctgctccaacggagttccagagtgtgaggagatggtctctggccttttcaagcagtggatggagaaccccaataataacccgtgagtgtctcccctgcgcctcctctgccagtcttcatctgcccccaacagccccgtcctcagcagaaccctgtcccaccctccccgctgctgttccacacctgacctccctaccccacaccaggatccaccccaacctgcggtccaccgtctactgcaacgctatcgcccagggcggggaggaggagtgggacttcgcctgggagcagttccgaaatgccacactggtcaatgaggctgacaagctccgggcagccctggcctgcagcaaagagttgtggatcctgaacaggtgagtcttggcgcagggtgggactgcgagagccctctccccacctggagaaccaggcaggcctccacactcctcgccagatccttcacgtgacccccacagacctgttgaggtggaggcagtatttccaaagtaaccggtgcagactggaagctttaataagtgatagagacaagatatggactcaggtctgggtccatgtcctctgttcctagctgctgtggcctcttagcctttacctgacaacaactcgtcttcccttctgtcaaaggctctggtgtagctggacctgggtcttttcaaacatccagctgggcaccccctcaagcccttggatgagggtccccacctcccaccatgtgcctcatatgccattacctggatgcagtaaagaagagccacccttgggcagggtgtggtggctcatacctgtaatcccagcactttggaagactgaggtggatggatcacctgaggtcaggagttcgagaccagcctggccaacatggagaaaccccgtctctactaaaaatactaaaaatacaaaaaaaaaaaaaaaataggcatggtggcacatgcctgtaatcccagctacccgggaggctgaggcaggagaatcacttgaacctggcaggcgaaggttacagtaagcccaaatcgctccactgcactccagcctgggcgacagagtgagactccgtctcgaaagaaaagaaaagagaaaagaaaagaaaagaaaagaagggccaccctcagtgtcaaagacgggagtgaccacccacctggtgccagggcttggggcgctaggactccttccttcattgattcattgtcaaatatttctatgtcaggcatgacactagcttagccagtgaccctgtgaccctgcttaggtgactcagttttccatctatagagggaagaaggaccaaggggtccctcagcccctggcaggccgaggggatgttgagaggatgcaggcataggtgatgtgcgtgggacagtccaagttctctcctgagtcacctgaattagcagtagctgagacagcatctggccctcttaggtacctgagctacaccctgaacccggacttaatccggaagcaggacgccacctctaccatcatcagcattaccaacaacgtcattgggcaaggtctggtctgggactttgtccagagcaactggaagaagctttttaacgagtgagtctgtggaatgggtgtcagggacagcgagcgccgaggctggggcccggggggtggcctgtgcgggtaagacacgccgggggcactaaccagaagtggacaaaaatcagccaagcctgggggctagggtggggcaggaatggaaagacaagctggggtatgggccgtcccttttcccatttggaaggaaaacgtggcgtgtgggcgtattctccagaagagaggggagtgaggaactcggcagtcagacctgtgttcaagctgtgactcccccacatcctagtggggtctcccagggcgtgtcatttcatctcctctataatcatggctccctacccagtaggtgtgaggatgagcctccttagttcccggcctccctcacagttcacctctctccctccctgcagttatggtggtggctcgttctccttctccaacctcatccaggcagtgacacgacgattctccaccgagtatgagctgcagcag

SEQ ID NO: 6246 - DNA, 32173 bp, Homo sapiens
tttttccagagagtaagcctctgtattgtgcaatgaggctggtagtactcccattctaggacacaggagggaagggaactggggtgccacctttcagtatggaaactttcacctctgaccctctttgcaatccagcaaccctcccactgtggtctggtgaccccactttctgagccccctggttcaatctctctcatggggtggtgaggggtgctgccctctacaaggagggaagtggggacttgggggttgaatgactccttctgtagactttgacttcatcttcctgtttgcagtccttacctcccctctgtcccttgctgacttgtccctttaatttttttatttatttttatttatttatttatttttgagacagaatcccactctgtcacccaggctggagcgcagtggcccgatcttggctcacttcaacctccacctcccagattcaagcgattctcctgcctcagcctcctgagtagctgggattacaggcgcctgccaccatgcctggctaatttttgtatttttagtagcttcggggtttcaccacgttggccaggctggtctcaaactcctgacctcaggtgatccgcccgcctcagcctcccaaagtgctgggattacaggcatgtgcccccatacctggccttgtccctttaattctgagtcttgtcacagcaagttcccttgcttctgtctccccttctgcagattctcaattgcaaattctcccactctgccaagcctggtacatctccctttctgcgcgtcccagctgcctaaactatattgaccttgcatccgctgttgcctctcctgttctttgttattgggggtttattccttttacatttggacgtggatccaggtgggcacagaaatcaacctgccatgtcaaaccagagtccacaaaggattttactagcatggggtggggcttacactacaatgttaggagaaaaatgccatgtgaagaatatgctaagtaaaaaagaaaaaactatagaaaaaagaaggtgtaaatgcatcaatgtggaaactgtagttttggtgagctcctgggtgtgttttattttctgcatatacttctctgtgtttcccaaattccctacaataagtcatggaatttttttttttttttttttttgagatggagtctcgctctgttacccaggctggagtgcagtggcgtgatcacagctcactgtaacctctgcctcccgggtttaagcgattctcctgcctcagcctcccaagtagctgggaatacaggtgtgcaccaccacactcggctaatttttttgtggttttagtagagacgtggtttcaccatgttgcccaggctgatctcgaactcctggactcaggggatccacccgcctcagcctctcaaaatgctggaattacaagtgtgagccactgcgcccagcaactcatggaatatttatgattgtgtagggaaaacccaacattttatattaagaaatggtgacccgtagacaaagaatattgcaactgactaaggctttaagcagaaagaaactcagctcagttatttgaactctagacttctatgggcccctttgagcactgtttggcctcaggtgaggccctgacctctgacgtctctgccagcgcctgccccccaacatcagaggctctgtggggctccaggcaggtcaggcatgagtctttgatgagattcatattttcttttccccagaactacctgaagaagcaggtcacacccctcttcattcacttcagaaataataccaacaactggagggagatcccagaaaacctgatggaccagtgagtgggagctctcatgggtttggaagtcctgggcaccccggggagtcaagagcaacatcctggcagtgttctctgccgcagctctcaatgcgggggcaccaggcagggagagacccccacccaggagcagggaggtcctgccctgaggctccatgtggcctgagggcccatcggacctctttatacaaagacccaaactgaaactctagctcaccccactggcttgaggttatacagtttctaggtgttgaaactggggctggagcctgttcctgcccttctgggtcacagggctgctttggggaccaaggaacctcaggcccaaggcacaaagcacatacagcgggggtcagagggccagttaggccacagagccttaggcagggtgccggcctggggttgtgtgtcaagaggtgaatcttggctggagttcgccaggtgtgctaaccgcgtgtcacccctggggcaggtacagcgaggttaatgccatcagcaccgcctgctccaacggagttccagagtgtgaggagatggtctctggccttttcaagcagtggatggagaaccccaataataacccgtgagtgtctcccctgcgcctcctctgccagtcttcatctgcccccaacagccccgtcctcagcagaaccctgtcccaccctccccgctgctgttccacacctgacctccctaccccacaccaggatccaccccaacctgcggtccaccgtctactgcaacgctatcgcccagggcggggaggaggagtgggacttcgcctgggagcagttccgaaatgccacactggtcaatgaggctgacaagctccgggcagccctggcctgcagcaaagagttgtggatcctgaacaggtgagtcttggcgcagggtgggactgcgagagccctctccccacctggagaaccaggcaggcctccacactcctcgccagatccttcacgtgacccccacagacctgttgaggtggaggcagtatttccaaagtaaccggtgcagactggaagctttaataagtgatagagacaagatatggactcaggtctgggtccatgtcctctgttcctagctgctgtggcctcttagcctttacctgacaacaactcgtcttcccttctgtcaaaggctctggtgtagctggacctgggtcttttcaaacatccagctgggcaccccctcaagcccttggatgagggtccccacctcccaccatgtgcctcatatgccattacctggatgcagtaaagaagagccacccttgggcagggtgtggtggctcatacctgtaatcccagcactttggaagactgaggtggatggatcacctgaggtcaggagttcgagaccagcctggccaacatggagaaaccccgtctctactaaaaatactaaaaatacaaaaaaaaaaaaaaaataggcatggtggcacatgcctgtaatcccagctacccgggaggctgaggcaggagaatcacttgaacctggcaggcgaaggttacagtaagcccaaatcgctccactgcactccagcctgggcgacagagtgagactccgtctcgaaagaaaagaaaagagaaaagaaaagaaaagaaaagaagggccaccctcagtgtcaaagacgggagtgaccacccacctggtgccagggcttggggcgctaggactccttccttcattgattcattgtcaaatatttctatgtcaggcatgacactagcttagccagtgaccctgtgaccctgcttaggtgactcagttttccatctatagagggaagaaggaccaaggggtccctcagcccctggcaggccgaggggatgttgagaggatgcaggcataggtgatgtgcgtgggacagtccaagttctctcctgagtcacctgaattagcagtagctgagacagcatctggccctcttaggtacctgagctacaccctgaacccggacttaatccggaagcaggacgccacctctaccatcatcagcattaccaacaacgtcattgggcaaggtctggtctgggactttgtccagagcaactggaagaagctttttaacgagtgagtctgtggaatgggtgtcagggacagcgagcgccgaggctggggccccggggggtggcctgtgcgggtaagacacgccgggggcactaaccagaagtggacaaaaatcagccaagcctgggggctagggtggggcaggaatggaaagacaagctggggtatgggccgtcccttttcccatttggaaggaaaacgtggcgtgtgggcgtattctccagaagagaggggagtgaggaactcggcagtcagacctgtgttcaagctgtgactcccccacatcctagtggggtctcccagggcgtgtcatttcatctcctctataatcatggctccctacccagtaggtgtgaggatgagcctccttagttcccggcctccctcacagttcacctctctccctccctgcagttatggtggtggctcgttctccttctccaacctcatccaggcagtgacacgacgattctccaccgagtatgagctgcagcaggtaagaagtcattccccagacctgggctctgcctacttccttcccaggccaaaggggcactccattcttctcccacgtggccctgagggagcacaggctccacgccgccaggccttcctcatttacagaggaagccgagtagccagactttggaaatgttgataattcaatttaaaaaattcatcttgggatttttgtataggcacaaaagggaagagtggtataatgaacctccatgtacccgttacccaggttcaacaattatcaacattttgccagtactttttccgggcgggcaatttttaagcaaatcactgatcatgtaattttacctctaaataatttagtcatatgaaaaataaacgcattcttttattttttttattttttattttttttttgagatggagtcttgctctgtcacccaggctggagtgcagtggtgcgatctgggctcactgcaagctccgcctcccgggttcacgtcattctcctgcctcagcttcctgagtagctgggactacaagtgcccgccaccgcgcctggctaatttttttgtatttttagtagagatggggtttcaccatggtctcgatctcctgacctcatgatctgcctgcctcggcctcccaaagtgctgggattacaggcgtgagccacggcgtccagcttttttttttttttgagactgagtctcgctctgtcatgcaggctggagtggtgcagtggtatgatctcggctcactgcaacctctgcctctggggttcaatcaattctcctgcctcagcttcccgagtagctgggattacaggcatgcgcccccacacccggctaatttttgtatttttagtagagacgaggtttcaccatgttggccaggctggtctcgaactcctgacctcaagtgatccacccacctcggtctcccaaagtgctgagattacaggtgtgagccactgcgcccagcaataaagggattcttaaaacataatcacactgtccttagcaaacccaggaaaatgattatcttcttactatcatatacccaaggcatattcaaattttctaagttgtttataaaaggtctttttacaattgatatatatgcttgaattagaagcttgacaaagtcaactaacagagtgacaagcttttctcattgcatcatatcaaggggtacatgatagcagcatgactcactactgctaatactaaccttgatcacttcaagtggtgtccgccaggtttctccactgtagagctactgttttccccttcccatcctctgtaaggagcaagtcactacatccagaccacactcaagggaaaatgatagaagtaccacctcctggccaggcgcggtggctcacgcctgtaattccagcactttgggaggccaaggcaggcggatcacctgaggtcaggagttcaagaccagcctggccaacatggtgaaacccgtctctactaaaaatacaacaattagccagacgtggtggtgggcacctgtaatcccagatactggggaggctgagacaggaaaatcgcttgaacctgggaggcggagttgcagtgagccgagatcgtgccattgcactccagcctgggcaacaaagagcgaaactccctttttaaaaaaaaaaaaaaaaaaaaaagtatcgtctcctggaggtaagagaatcaaagaatttttggacatgtgttaaaaccaccacagtaattaataaacaccttgagggagatactttgagaggatgctgatgtgctgtttctctttaatgttttacccaccaatctcagcactcatcattggatcttgcctgctgcagttatcactgggacaatagaacatattttattcaaatgcttgttgccttgatttttaacctttaaatatttagatacatggtatattggcctctattttatactcttgtccaagccccctccaatgtcaggtatttgaggaacatatgcattttattttgttttttttttgagaaggagtcttgctctgtcacccaggctggagtgcagtggcatgatctcggctcactgtaacctctgcttcccaggttcaagcgattctcccacctcagcctgccaagtagctgggattacaggtacctacaagcatgcccggctaatttttatatttttagtagagacggggtttcaccatgttggccaggctggtctcgaactcctgagctcaggtgatccgcccgcctcggcctctgaaagtgctaggattacaggcatgagccaccacgcctggcgaaggatatgcattgtataatgctttgtgtattcaaggaaacttgtgcaccatctgtattggtttcctgagcctgtcataacaaagtaccacaaactgggcagcttaaaacaatagatatttattccctcagagtcctagaggccagaagtgtgaaattaaggtgaccagaagattactttttaagaaaaaaatttagccaggatcccataccatgggagaacaacctttcctaggttaacatatatttgctatagaagctgagcatgtttctttgacaagataaagtcccacagccaacccatgggttgttatctcctcaaatattggtcagaagaattctttaggtacatctttcccaattctaacccttcctcagacacacttctctcagttgctgattctgtatttgctgccctcctccccagacaggtaaaactgaaggcaaaatgtcagtggatgtgatcacttcagcagcacatatactaaaactggaacgatacagagacgattagcatggcccctctgcaaggatgacacacaaattcatgaagcatttctttttttttttgagatggagtttcactctgttgcccaggctggagtgtaacggcctgatctcggctcactgcaacctccacccactgggttcaagtgattctcccacctcagcctcccgagtagctgggattacaggtgtacacatcaccatgcccggctaatttttgtatttttagtagaaatggggtttcaccatgttggccaggctgagaactcctgactgcaggtgttccacccacctcagccccacaaagtgctgagattacaggcgtgagccgccatgcccggccccatattttttttaatgtcaatggaatttaccatttgcaacaaagaaaatgtgggggctgggcagaacaatttggttaaaaagctgttgcatgagtgctgttagtgtgagaagcccctgtttctcttagataggtggtggtgggttgaggggataactctccatgggaaagttatgtggggcatgaggacttgcaataaccattgcagaactacttctccttcagtatgtcaaagttgcctggtatggaggtggctggtctctttgccagcagttctaagaagaagacaggccatttctcagaggaaacttgtggctctcttacagttgctcaatggttctctggtttcccaatgcaggagccggagatatttggctggatgtgtataaattgcccaaggagacttggctcaagaaactagagcacccccaactcacttcaaatccaaagaaaaaagtcagacagccgcaactggtaggaaatatctctgctttcagctgatatgtttctccctacccctgacccacatctagcccaagtccttggaaacttatggtgaatgaggcctctgggctataagagaggacaacaggaatattggcccctgtctcccaagtcaatttcctttggttaaaataagatattaaaaagtagaggtgtcttcagtagtgggaatcgcagtatctctagtctgggagttgcctctccactgagaccactcccaggcatttctctggaaggagggtcttttgtcctgactcctgcttcactggtaatctttttttccctcctggctgaaataatcttttcatgcctcaaattccattaaatttttccagactatggtataaagaggttgttctcaatatacagaaatatatatatattttctattatccttagaaagtagaaactctaccatttcagtttatttatatatgatgactgggccttgtgctgtttttttgtttttgtttttgttttttgagtctcgctctgttgcccaggctggaatgcagtggtgcgatctctgctcactgcaacctctgcctcccgggttcaagcaattctcttgcctcagcctcctgagtagctgggactacaggtgcacgctgccatgccaggctaatttttttgtatttttagtagagacggggtttcactgtgttagccaggatggtctcaatctcctgacctcgtgatgtgcccgcctcggcctcccaaagtgctgggattacaggcatgagccatcgcacccggcctgtgctatgtttttaagatatagttgctcagtaaatattaagacttaatttgcttatttatacagtgtatgcttattatttttacttttaaaccaccaacattaatatattaatattaactgagcatccctttaaaatacattgtattaggtgctaaataaattagtgaaattattaatataggagaccaagattgagagttacattcactgctgagctcaagtggctttgaataaatgcctttatggccagtgaatatcttcataatggagtgtagtcctatgtccctgggaaagttactagcccagagatattcctcctctaagctattacagaatgttattatttgtatgtattttttgacacttctcacatactgcctaggtttgtagttatcctgttatacatgaaaatcctcttgtcttcaatggataataaatttctagattgttaagatcataccttctgctttttatcaacaaattccatagtatcatacttggtactcaaaaagatatatttttgtttggactaatttgttatccaaataggaaaagcaccttgaatggggtggtttctcaccataattcacttctttttcatacactgagaagcagccaatgaatgccagttacagtggtagttcttttactacgaattatatttagagttacttaaatgtaattctcaacatcaccaatatgttttgccaatcagaaatatttgcctcaatttggattcttgtaatggtgttctgactgatctcctcaactctattcattcagatttcctcttgttattaactatttcctgtttccccacctaccttttaagatcctgaaaaatagggatcgtgtgttgaagttctgcaggccagaggcccacacaaatactggccctccacatctgttgcatgaattcactcacaagagtaattgaggggaagagagagcatgccagaagattaaagggggtggtaaacatacatcaaacctattgtgaattaatttctcatttttcttctcagaactcccttggtcccatttctgcagatcctttagaaatggtaagaaactttaaagaaaatctccagagagacttaagtttgtattttagagattttttaaaaattattatttttcttttcttttctttttctttcttttttttttttttttttttttgagacagagtttcattcttgttgctcttgttgctcaggctggagtgcaatggagcgatcttggctcatcgcaacttactgccccccaggttcaagtgattctcctgcctcagcctcctgagtaactaggattataggcatgcactaccacgcccggctaatattgtatttttagtagagacagggttttctccatgttggtcaggctggtcttggggtgccgacctcaggtgatctgcctgccttggcctcccaaagtgctgggattataggcgtgagtcaccacactgggcccaagattttgatttttacttgaaatttaccctaaatgtcaaatatgctaatgaaatgttccacctgggcactattttcaattctcagtgacttaatcttgtgcctcatatccattgaagatgacctcccgtccctgaggacagttgacccaagtcatttggccagacgtgggtttacctgaagttaagggagcttaaatttcagggcccctcacttgggcccctggaaggggccctagcaatgtgttcatatggttatatatttttgtaaaattagcaaaggtaacatattgtaaccataatcacttaattccactacctcttcactctagctttcctctgtcacaatttcctccatattagatggaattacagtggccatgggcattttgtgttcatagttctgtcttctttttcttaaaagagggtcctatgaatcctggatttgcctctaccaaaataacagcccaattcaccaagccgagtaacttgggggttttgtgtttgttttggaataccttagagaacagagcagtttccctggagcttcctggctcttcctctgagaccaggaacataccatgtcttcagaaagcatggctcttggaggactcaggcgtgtcagtagagtagtggtgaacttctgaagtggaagtatctcgctagagccccttcttttttccctttcaaagttacattaggccaggtggggtggctcatgtctgtaatcccaacactttgggagcctaaggcaggaggatctcttgagctcaggaatttgagaccagcctgggcaacacagcaaaaccttgcctctacaaaaaatacaaaaaatggccgggtgcagtggctcacgcctgtaatcccaacactttgggaggccgagacaggtggatcacgaggtcaggagtttgagaccagcctgaccaacatggtgaaaccccatctctactaaaaatacaaaaattagccggatgtggtggcgtgtgcctgtaatctcagctactcaggaggctgaggcaggagactcgcttgaacccgggaggcggaggttgcagtgagccgagatcacaccactgcactccagcctgggagacagctgtctaaaaaaaaaaaaaaattagccaggtgtagtggcatgtggctgtggtcccagctactcaaaagactgaggtgggtggatggcttgagccctggagtggaggctgcagtgagtcgagattacaccactgtactctagcctgagtgacagagcaagaccctgtctcacaaaaaataataaaaataaaaatagttatatttcacattgtacaaataatatatgaatatatcactcttggaaaagtcaaggaattcagataaacagccctctccagaggtaatcaccattattagcttgacatgtttttttgtttgtttgtttgttttgtatttttagtagagacagggtttcactatgttggccaggctagtctcgaacgcctgacctcaggtcatccacccgctttggcctcccaaagtgctgggattacaggcatgagccaccgcgcccagccccagttgatgtgtgttttctagatctttagtgtgtatttacatcttacgtttattttgaaaaatacagttttgtttcatggaattttttttctacataagtggcatcatactgtatatattttcttataaacttgcatttttttactcatcaatttgtttgcacatttttttctttttcttttttcattttgaaacaggggctcactctgtcactcaggctggaatgtaatggcatgatcatggctcactgcagcctcaacctcctgggctcaagcagtcctctcacctcagcttcccaaatagctaagactacagttgtgtgctgctatgcttgtctaatttttaaaaatttttatagaaaaacatgttgctcaggctgggcattatttcttcttaaaatgttaggtagactttactaatgtgtccatctagtcctggagctttctttgtggaactacaaattcaactcctttaatagataaagcactattcaggttatctatttcttcttgagcaagcttttgtaccttgtgtctttcgagtaatttgtccattttgtctaagttgtcaaatttattggcttaaagtggttcataacattccattattatcccttcattgtctttaaaatctattgtgatgtcatccctctcattcctgatattggtaatttgtgtcttctctctttttttcttaatcagtttggctaaaggtttgtcaattttattcatcttctcaaaagaacaatattttagtttcatatatttttccctattgtttttctgttttctatctcactgatttccagtttgtttttattatttcctttgttctgctcactttgggtttagtttcctcttctaatttctttctttctttttcttctttttttcttttttttttgagatggaatctcgctctgtcacccaggctggagtgcactggcatgatcttggctcactgcaacctccgtctcccaggttcaagcaattctctgcctcagcctcccgagtagctgggattacaggtgcctgccaccacgcctggctaatttttgtatttttagtagagacggggtctcaccatcttggccaggctggtcttgaactcctgacctcgtgatcccacctgcctcagcctcccaaagtgttgggattataggcctgagcactgggcccagctcctcttctagtttcttaaggtagaagctcaaatcattgagatcgtcttttctgatataggcatttaatgctatacacttgtatctaagtactgctttaaaatttgatttttttattttcattcatttcaaagtactttataatttgcttttgtatttcttctttgactagtaggtttttatttttttatttttgagagagagtctcattctgttgctcagactggagtgcagtggtgcaatcttggctcactgcaacctctgcctcccgggttcaagcaattctcctgcctcagcctcccaagtagctgggattacaggcacatgtcaccatgcccagctaatttttgtatttttagtagagatggggtttcaccatattggtcaggctggtcttgaactcctgacctcgtgattcgcccgcctcgacctcccaaagtgctggaattataggcgtgagccactgcacccagccgactagtagatttttagaagtatgttatttagtgtccaaatattggaaatgttacagctggctttttttatgggcttctcataaaatccgttgtgatcagaaaatccattgcgatcagaaaacatactttatatatttgaatcattttaagtttatttagatttgttttattcccacaatgtggattatattggtaagtgtttatatgtacttgaaaaggatgtttgaagaccaataaagctgttattggtcaggctattcaagtttttctcctttctgtttttccttttatatccttactatattcttactgattttctgtttacttattctgtacttattgaaaaaggagtctctaagattgtagatttatctttttcttctttcactcttacgaatttttgcttcgtgtattttgaagctttgtaattagatgcttaacaatttggaatgttttgtcttcagatgaattgattgttttgtcattattcactgaccctttgattcctgataatattctctgttcagaattcttctatgtcaaatactaatatggccacccaagctttcttttgattcattttagcaagatatatctttttctgtacttttattcttaacatgtttgtgtcattatatttaatataacgagtttcttctttttccctatggtttcagatagtgtttcataaaatgagtttcttggccacatgtggtggctcacacctgtaatcccattactttgggaggcagaagcaggaggatcacaggagcccaggagttcaagatcatcctgagcagcatggcgagacctcatctctgcaaaactaaattagccaggtgtggtagtgcacacctgtgagatcccagctattcagaaggctgaggtgggaggattgcttaagctcaggaggtcgctcctgcagtgagctgtgattgttccactacactgcagcctgggtgacagagcaaaatcctgtctctcacacacacacgcacacacaaagtttctttttgacctcatatagttgggtcttgccctttctaaaaaaactgtttcaaagatgggctctcgctatgttgcccaggctggaatgcagtggctattcacaggcacagtcatagcacattgccacctcaaactcctggcctcaagcgttcttcccacttcagcctccagagtagctgggactacaagtgtgtcaccatgcccagtaagggtctagcctttttatagagtctgacaatctctgccttttcactggggttatttagaccatatacatttaatgtgattatttatatgtttgggtttaaatctacagtcttgctatttacttttacaatcttgctatttactttctatttgtcctcttatttttctttttccccttcttttccaccttcttttaaaattagtatttttaattattctatttcctctcttctcttggcttattaactatgccttttccttgttttaggatgcaaatgttagttttaaaggagacattaaattgagtcttccagtttacataatgaagatcaaaccacctaagcctgttacaggtaagtgtgattcaaatctctctccttttgccattgatttatctgttctttcttcctttccccatgtcttatcttttcaacttattagcaacgatatcaaaattacaaacatagttatgaagaggaaattttttttaaacccataagctctgagacattaaaacaaaaaatgtaagtaatgcatttgtattacatacagttaactaacagaattggaaggtcaggagaaaaagatatcttttctgaattgccaggttgagttcatttattcctacatttctgtgctgattcatttgactgctagttgtaatacattcattcctacattcttgtgttaatttattcattattatttgctgaatgcccataatgcaccaagcacaaagatgagtaaaacacctctcctctcctgcactctagaagttgatagtctactaagggagaatgacaagaaaccaccatagtaggatgtgataagtacagcaatggggaccatcaagggctgtgaaaactcagggtaagaagcgactgacttgctagggagtaagggacatttgggcacagtttcaaagaaagggacttggtcaagaggagcagagaggctagctattgtaggcggcaaatacagaggatatcctctcagcattcacacatgatcacaaagacatatctataagaatgttcacccctggtggactagtagttacgattaaaaaaaaaaaccagaaaaatgtttacggtagcattatgtacagaggtgaataattggttaaataaaatctgggccgtgtgcggcggctcgtgcctataatcctagcactttgggaggccaaggtgggcagattgcttgagctcaggagttcaagaccagcttggggaacatggcaaaaccccacctccacaaaaaatacaaaaattaggcagagtggcatgcacctgtggtcctgactacttgggaggctaaggcagtagaatcgcttgagcccaggaagcagaggttgcagtgagctgagattgtgccattgcactccagtctgggagatgggagtgaaaccgcgtcataaataaataaataaataaataaataaataaataaataaatctggtacactcatacaaaagaatactttgcaaccattaaaaaaacaaaagagaggccaagtgtggtggcttaagcctataaccctagcactttgagaggccaaaggaggaggatcacttgagcctaggaagttgaggctgtagtgagctatgatcacaccactacactccagcctggtgacagaacaagaccctggttcaaaatcaagaacaaccccccgaaaagggaaatgccaaaggcgaagaatagacaattttctcttgtaaaagaatgtggtggtcagacttgctctatcaatatttattataaagctgcagttattaagataaaaaatagataagtgaataatagaaatatagatgaaatatagaaatatagatagatagaaatagcagatagaaaaatagaggaaaaataggtgaatgaagcaggatacagagaccaaaacagacccaggcataaatggacacttgatgcattacagaggcagcgctatggagctctggagaaagggtggccatttcaataagtggtggtggctgtttatgtggagacaaaaaataaaacttaacccctgcctcatgtcgtacacaaaactaaattccagatgaactgtagaagtaaatatatgaaaggcaaagcagtaaagcttttagaaaataaatatactcttcaggcccggtgcagtggcttatgtctgtaatcccagcactttgggaggtcgaggcaagtggatcacttgaagctaggagttcaagaccagcctggccaacatggcgaaaccccgtctgtactagaaataccaaaaaaaaatagctgggcgtgatggcgtgcacctgtagttccagcactttgggaggctgaggcaggcagattgcttgtgagctcaggagttcgagaccatcctgggcaacatggagaaaccccatctccacaaaaaaaaatacaaaaattagctaggcatggtggcctgtgcctgtagtcccagctacttgggaggttaaagcgggagaattgcttgaacctgggaggcagaagttgcagtgagctgaaatcgcaccattgcactcctgcctgggcgacacagcgagcgagaacctgtctcaaaaaaaagaaaaagaaaataatataaacaataactttatcacctctgggtagggaaagacttttcaaataagacacaaaaagtacttacaatttttaaaaattgaataaatttgactacattaaaattaggaatttcagatcattcaaagacatcattaagaggatgaaagatcaggccacatagaggtagaagttatttgcaaaacacataaaacccactaatggttcatgtccagaatatatgaagaattactacagattcttaagaaaaagagggagaatccagtacaaaacatgcaagagtattgcacaggctattcacaaaaaaaagattatttaaatgaccaataaacatgaaaaggtgctcaccatcattagtctgcagggaagtgcaaattaaaatcacagtgaagtagcgtaacacattcactaggatgggtaaaattaaaaagactgaccacaccaagtgatggtgaagatgtggaacaatcagtactcccatacattgcatttagcaatgaaaactggtacaaccactttggaaaatgtgtttgctattatctagtaaagctgacaataatttgtgtcctatgacacagtatttacactgctaggtgatagggtgaccaaccataccagtttgcctgactgaggggtttcctgggatgtgagatttttcagtgctaaaactaggaaactcctaagcaagccattttgagttagtcaccctacttctaggaatgtacccatagatttgcaagcaagtgtgttccaggaaacatgtgcatgaatggtgatagtgacatgatttttaatagccccaaacacaaagcaactaaattttcatcagtagtagaacagataaattgtactatatttattcagtgggatactatacagcaatgaaaaatgaacaaactgcagctacacacagcaaaatggataaatctcatgaacaatattgagcaaaagaggacagccatagagttaatactgcatggttccccttatgtacagtttagaatcaggcaaaatgaaactatggtgttgaggacgcatgtttaggtgataaaagcataaataaatgcaatgaagtggctaccataaaggtcaggagagtggttgccactcttcccagagaattgtgattagaaaggggcccctgggaagcttctagtgagatggcaatgttctatttctttttttttttcttttttcttttcttttttttttctttttgagacagggtctccctctgtcgcccaggctggagtgcagtggcacaatctcgactcactgtgacctctgcttcccaagcaatcctcccacctcagcctcccaagtagctgggactacaggaacatgccatcaggcctggctaatttttgtattttttgtagagatgggattttgccatgttgcctggctggtctcaaactccggggctcaagcgatcctcctgccttggccttccaaagtgctgggattataggcatgagctaccgcacccagccgatgttctatttcttgacctgagtagatgataccagaggtttgctttataataactcattaaggtatattaaggtatatattttatgctcttttcagaatgtatgttacacttcacaataagaaaaaggtttaataactaaagataagcaacaatgaagaggatctatagtactaatatgaaataatctctaaaacattttagtaagtgaaaatacaaggggaataatgtataatagcaattctcaaactttagctgcatcagactcatttggagaactcattaaaacccagattgtttgcctatagtgccagctactcaagaagctgagatggaaggattgcttgaaccaaggagttcaagcctagcctgggcaatagaacacaacccccatctcaaaaaacaacccagattgctgggccccaccacagagtttcttctattccagtaggtctggggtgggccctgagaatctgtatttttaacaagttcccaggtgactctgccactgctgatctggcatcgtcctttgagagctagtgtatcatacgatattatgtgtttataaaactggtgtctgcctctagaaaattatgcagttgtctctgaggaagcagtcaagggcactgtggaatctcctgggcaacttgagggacgcaggtaccttccaaagtgaacagaattctgaaactcagggtgcaaatccagaaaactagtcatccagttttactgtggatttaggaacagatgaaaaagaaggaaatgaaaggttattgggaagagaagtagtaagaaaagtgactgacagagaaagatttttttaaaggaaggtaattgggtaaatgttggcataagaagagactgagactgcctaattatgtgagtgttcagcagtggctgaaaagtgatggtaactggcagatctggggccttcctcagctggggagacagggacagtgatctaaagtctccagtggcattgtgaacatttccctgccccaccgccccccacaccctggcctttgcaaatattctgtaatccaaaagcagagagaatgatgttgggatgaagatacagaagaaggaggacagcagctgctctctgcctgggctctgtgagctggtggggtacaggagaggccgggagaagactgaatacagaccaattgcagagcaagaatcgatttctgaggctgagggattctgcaggaagctgggaagagtggaagaagtaggggaaaatcaggaaagggggagtcacatggcttgactaattctgtaatattttcaacctaggcaccacattcaaaagccccctggaagtctttgcaaagatcaaggactgctacggactgggctccgggcagaatcatttcatcaaggacagtcagtgggagcagcaagctgagatcttcaacgcttcctacaagaagtacctagatagggagtgggaggaagagccactcaggtgagcctcctaatcccgggaaagccagggagcatccccaggcttctgctgtcttggcacatgcaggaatcaacccagggacctgaattaatctgagatttaaaagctctttctggggccgggacagtggcccacatctgtaatccctacactttgggaggccgaggcaggaggatcatttgagcccccaaatctgagaccagcctgggccacatgtcgagaccttatctctaaaataaataagctctttctggtttgggagaattttgagcgaacatcagcagatattttgaaatgttgtgtggagattgttactatatagttagaacaaaggctgataataatggagttaaaagaagaaatagatatctatggaaatgagaaatataatttatttcagttttatacatgacagctctaaaaatttttttttctttttaaatttttttttctagttatctaaaagcacagaggctgggcacggtggctcaggcctgtaatcccagcactttgagagtctgaggcatgcagattacctgaggccaggagtttgagaccagcctggtcaacacggtgaaaccgactctactaaaaatacaacaattagccgggcatggtggcgggcacctgtaattccagctacttaggaggctgaggcaggagaatcactggaacccaggagatggaggctgcagtgaggcgagatcacgccactgcactgtagcttggacagagatagactctgtctcaaaaaataataattaaaaaaaataataaaaaacacagaagatcctaaagacaaataaagtcaccactactaaaatttttctccatttccttcctgcctttctaaatgtaatgtagcataggtgtataattattataatatatgactttcccatcttggtgagcagttaggtgtcattagctccaagttgtgttggagagccccagtctttgaagtatcaatgagggagctggttttaggaattaggtctcctcatagctactgtggatctcaggaatgttcttgttctcacatgggaagtgaaatctctcgtgctgtcaagtggaccttaaattttcttacttcaggacacaaagtcctaaggctaatccctgacaacagcttcctgttactgtctggaactacgtcaagattcagtggtatgctggggctggctcctactgcatagtgagataattagggttttgcaagccagttgttaaaccactgttagttgtccattgtgggagcattgacaccatgaaaatctgcaaaccctataaattggggcctcttttatttaagagacccagttatcagcacaacactggctgtattgcccctgggataagagaacatctatgtagatcacccgagtctgctctttaaggacatcttccccaaaacagaagtggctctccaaaagacagctgtctctggcaagagctctgcacaccacactggcctaggagtgattcccagccccacccaacctgccctcaccagcatccaaggtcagcgcatcccaccaggaccagcacctagaatgtgatgtgcttcatggccttcttacccctgggaaggtccattctaactatctattctggttttaggaccaagactctgccagcagctctccttgccagggagtctacatggctctgactcgtgtgtctttctttcccagtacggccaccttctatttccttcttcctagctgcctatttgcaatgccaccggaagtcaagggcccctcaggtaaatgaacatgaagtgggtggttgtcctagcaaggagtcaccttggggaaacccctcagcaagcccccacagagatgttccccaacaaacctcgcatggtaggagggaatgaagaggggagtttggttgccagctgtagcctgtcagtttctgcttgcatctgtggcccctgagcacaggttctctgatcacaaaggctggcactgccttcagggagtggttgccataggagaaggcatgagcccacatccaccgggctgcttctggatatgagtttgtcttgtagaagatgttacttaaaacactgagggtgtgaattttctagatgtgaaagcagccgagggggagttgagactgtcctccctatgcaagaaggcgggtgggccccaggaacagccctcatggggctgcccagtccctctctcttgggaaactcacccttctcttgggtgctgcccattaaaacaaaccacttcagacttcaaaccagcttctcttgggcaaacaccttctgtgcaaaccaaaggccacccagatttccccctgtgtaacacccattttctgtctttcccccgcccccccaccaggaatggcctgtgtccttggtatacactggaccagaagtcacaatttcttcctgtattcactaaaccgaactctaaaggataaagctggtactttactgctgagatgggagtcgcctaagctcaggacttgcagacatgtccttctccagcttagctaagagcatgtgactgacatacatcaagtgtcactttagggaccagatctaggcaggcagtagggggtttggtgggtgtagtgtgaccgcaagaatctgtctctgaaatgtcatgttccttaaagacaacaggtcaatagggacaaagtctacagtcaggtccacagggctccttaagcagctaaggtaaaaagagagtaagcttggctgggcgcaatggctcacgcctataatcccagcactttgggaggccgaggcgagtggatcacctgaggtcaggagttcaagaccagcctggccaacatggtgaaaccccatctctactaaaaatacaaaaattagccggatatggtggcatgcgcctgtaatctcagctacttgggagtctgaggcaggagaatcacatgaacctgggaggcagaggttgcagtgagccaagatcacaccactgcactccagcctgggtgacagagcaagactatctcaaaaaaaaaaaaaaaaaaaaagagagagattgagaaagtaggcttggaatcagaaggtcagtgctaatcctagcccagctgtctgcaaaccatgtagtctcaggccagtcgcttcacaccccaacccacttttcatgcagaacatagagctaattaattacaccattgttgtctagtgcatgcgtttgttgaaaatagcaaaatccagagagtttctgtatgtgaagctcttcgaaattgaaacgcactaaggaaatataggttgttgttgttttacaaatttatggaggtgaccaggtgtggtggctcatgcctgtaatcccagtactttgggaggcagaggcaggtggatctcttgagcccaggagtttgaaaccagtctgggcaacataggagaccctgtttctacaaaaaatagccaagcgtggcagcatgagcctgtagtcccaactactcaggaggctgggccaggaggatcacttgagcccaggagtttgaggctgcagtgagccaaggttgcaccactgcactccagcctgggtgacagtgaggccctgtctcaaaaaaaaaaaaattaatggaagcagtcacatgagcaagtttgctttgtgataattccttgaactgtacacttgttatactttatattacacttcaaaagtaacattaaaaaattcacaaaggaggagtttcttttcttccgtccctttcccaggcaacctggcttctaatctccttctatactgactgtatggccttgagcaagtcacttctctgcctcatctataaaatggggatactaataagactactttatagaacccttgtgagaatgcaatgaaattatgtgtgtaaagtgcctaacacagtatctagcacctaggacatactcattaaacattagctgtagagtaataataaacagtgtgacattatcttatcatcctaggcaaggagaatagcacttcataaagagaaggatgatggtgagtccagacaggtgctcctggttcccattccctgaacaggcagaccagtctgagtcacaggttgtccaggtagaagtgatgggtaggtgcagagtctgggggaaccggttgagtattgtccttccccctagaccccgagggtgtgtggccctgtgctgcgcccattgcagtctctcagctcagctgctcctcctcctacctggtgctggcctgcgaggatggtgtgctcacgctgtgggacctggccaaaggtaagtcctccctgcctctctacctagtacctgggtgggactctgggcaatgagtctgggagctctggaattcccacaggccctgggccttctgttacctctgtgttcttaaagtcaccttggggaactggtcctactcccctctcattcatttattcaacaaacatttattggatataatatgtgctaatgcttcccactgcccatgtgtttattgagtgacttctctgagcctggcactgtactaggctctggaagtatgatcattgccttcattattacactccagtgaagaagtatgtctggcacagtacaagtgatcatggtggcctcagccttcctcttcccagcccccaagctctctaaataagtgagtcttcttccctgctattctgtctcatccccagtcagcgcaaactctattgtattagagctaagagacctataaagcagtcaaagtgagaccagcagctattctgggtgggtggcactgtggttgagttctagggtcctgggtccagctttgcagatacagaaatcaatgatattgcttcctaaattcgtcagcctctagagaagcagctccctctaaccggactttgttaaaggccagtaatgactcagtggtttgccattttgcagttggagatgtatttacctagagagtggaggtgggccaccttcactgggcagccctcctggcaggtgcagagcatcagagatagtaccctgtttgttgggtagcttgtgatcagaccagggagttgactgttctcagggaggtgtctgtcaagctagcaaattgccttcctcacttggctatcactttctgaagaatgcagtggttatttcaactttggaggatattttccccacacactgctaagataaacaccactaaagaccctcctttattttacttattgaaccaacagcattattatagaagcaaaagatatttcaaggaaagaagaatgatgatgatttcataagcccttgaccaaaatagcttgttttcatttttttctggatattaagttcttgttgtttggccacacacacacacacacacacacacaccgccttttctgaaacagctgtgcctccccctgcccatacgcctttgcatcccatggtcagctgcgcctcagtccctggctgggttgtagcttccttccactccagtgctgaccctgccctcctccatgctcttgcttctccccctccccaattcctctccagacacagcagcattcccctgcagggggcttttctctcccattgggcactaggtttactgattttctctcacagggtgctcattgcttgattttgccttcacatcctacaagtccctcacacacttgctggtcacagcccctgtgcccatggcctcctcccctaccccgttttctgaccggcttgtgtgattactttctctaggattccctcttggggtcgctgctcttcctcagggatgtttctgccaaagcattcacttcctaaaatatttctcggtccacaaaggacagaatatgtatcctgaaggtcaagtgaaatcccaaatgaaatgtgtggtgctgtgcacagacgcctccctccatctggtggaggctagcgggacccaaggacccaccatcagtgtgcttgttgagaggtcagtagcttgagggtgggacggggtaaataattggccagattattttaattgctatttgatagtaaaatctgacagcctctctgactacagtccaccttttgtatagtcatcactctcctggtgagcttctgaagatcaccaatgtcacatatatgttacaattttttctaacaaaattgtatgatagcacagatgacatctgctatggtttgactctcccctccaaaacccatgtgaaaactcaatccccattgtggcagtactgtgagatggggcctttaggagatgattggatcatgaaggctcttcccacatgaatggattaacccactcatgcattaatggattaataggtgaatggattaatgggtatcatgggagtggaaatagtggctttataagaaaaggaagagatacctgagctagaacatgagcacactcaattccctcaccatgtcacaccctatgccgtctcgggactctctagagagtccccaccagcaagaaggctctcactagctgtggacccttgaccttggacttctcagcctccagaactgtaagaaataaattcctttgctttatacattatccagtttcaggtattctgttataagcaacagaaaatggattaagacaacatccttcccatcccatacggccaagaagaggctcatttctcccacagtaaacttccatcagtttctccagggatctctctctcttttaaacatttaaaaatacctaatgcatgcaaatgaacctgtataatgtgtgtgtgtgtgtgtgtgcgcgcgcgcatgtgtgtacgtgtgtgtgtgtaataaagaataatgagatcaactcccctgaaaccgttggaaatcgataatctccagttccatttgggctccctgcatggctctccctcatcaatccttcttgctccgccccaaacaccttattaattacctaatgctaaataacaaaccaccccaaaacttaatggtttaagaaaatagtcagtgtttagtccttgagtctgtaggtcagcaatttggactggactcagtccgtttcttctactggtctcacctgggctctcaaatgtgccttcaggcagctcacagctcttctaagatagcttcactcacacacctggcagttggcaggttattggccagtgcacctcggttttcctcatggtctctcctgcagactagtacagcctttctcacatggtagtctaagggctcctagcagcaggagagggcaaccatagcacacaaatgcttttcaagcttctgctcatgttacatttgctaatgtcccattgggcaaagcacatcccacatccatgcccacattcaagcagtagaaaaacagactccatcttttgatgggagtcactgccaaatacagccaactgcttttcaatctaccacaccatttttctaaattcatcattcctttgctttcccttaagaattaaccacatttaggccaggtacagagggtcacacctgtaatccaagcactttgggaggccaaggcgggtggaccacttgagctcaggagttcaagaccagcctgggtaacatagtgagaccccttctctgtgaaaagaacaaaaattattaaaaaaagaaaaagaattaaccacatttgtatgactgtatctctaaacagtatattatttagctatgcatatttaggaaacttacaaagcaaaccataagaccagcgtggccaacatggtgaaaccctgtctctactaaaaatacaaaaattagctgggtgtggtggggggtgcctgtagtcccagctactcgggaggctgtggcagaataattgcctgaatccaggaggcggaggttgcagtgaaccaagattgtgccactgcactccagcttgggcgacagagtgagactctgtctcaaaaaaaaaaaattgatatataattcatggaccatcaaactcaccattttaagtggttttcagtaaactaacaaggtagggtgggtggggtgcttcatgcctgtaatcccagcactttgggaggccaacgcaggaggatcccttgaacccaggagtttgagaccagcctgggcaatatcataagatctcatctctaaataaataaataaataaataaataaataaataaataagctgggcatggtggtgcatacctgtagtcctagctactcaggagactgaggtgagaggatcgcttgaaccaggaaggcagaggttgcagtgagcggaggtggtgccaccgcattccagcctgggtgacagagcaagaccctgtctcaaaaaaccaaaaccaaaccaaaccaaacaaacaaacagaaaaaaaccatgtggtacaaccatcactactgtctaattccagaacatttttattacgccaaaaaaaaaccttgtactcattagcagtcactccttattcctacctggtcccctcagcccctggcaaccactaatatactttctgtctctatggatttattacctattctggatgtttcataaaatggaatcatatacacacagcctttttgtgtctgtctgccttctttcacttagtgtaatgttttcaagattcatgcatacggtagcagggatcattcttttttatggctgaataatggtccattacatggatgtaccacattttgttttcagctcatcattgatgggcatttgggttgtttcagtcttctggctgtgatgaatatcatggaccttcacgtgcaaattttgtacaaacatgttttaatttatcttgggtatacacctaggagcggaattgctgggtcatttggttactctgtgtttaactttttgagaaactgacaaaatgttttccaaagcaactgtaccattgtccattcctattagcagtgtatcacatgagggttctaattgctccatgtctacacttatctctctttccctctttttttagtatagtcatctagtgggtaggaagtggtatcattatggttttcagttatatctccctaatgagtaatgaatgacatgatgttgaatatttcatgtgcttattggccttatacacatttgtgtatctttggagaaatgggtaaaactgactatttttcttttcgagagagggtcttactatgttgcctaggttgtccttaaattcctgggctcaagcaaccctcccacttcagccttctgagtagcttggattacaggcatgtgccactgtgcccagtcttttgctattttaaaattgggttgtctttttattgtaagagttctttatatattctgaatattagacccttaatcagagatagggtttgcaagtatttctcccattctatggactgtcttttcactcacttaataggtcttttgatacccaaaattttaaatcttgatgaaatcctatttatctgttttttttccctttggttgcttatactttatgtatcatatctaagaaagtattgtctaacccaaggtcatgaagatttatacctatttttttatttcaaaaaaatttttcaaacccacaaaagacctgacgatgttttttctaagagttttattggccaggcatggcggctcacgcctgtaatcccagcactttgggaggccaaggcaggtggatcatgaggtcaggagttcaagaccagcctggccaagatggtgaaaccccgtccctactaaaaaatacgaaaattagctggatgcagtggcgggcgcctgtaatcccagctactcgggaggctgaggcaggagaattgcttgaacccgggaggcggagtttgcagtgagctgagatcgcaccactgcactctagcctggatgacagagcaagactctgcctcaaaaaaaaaaaaaaaaaaaaaaagagttttattatgttttcactcaaacgtaggcatttgatctattttgacttaatatttgtatatgatatgaggttggggtccaacttcattccttttgcatgtggatatccggttgtccaagtcccatttgttgaaaagactgttcttctcccactgaatggtcttggcaacctagttgaaaatcaattgacggtaaatataagggtttgtttttggattctcaattctatttcattcatctatatttgcatccttatgcctgtaccatactgtcctgattactatagttttgtagtgagttttaaaattgggaagtgtgagtcctccaatttgctttttttttttttgagaaagggtctcactctgtcacccaggctggagtacagtggtgagatcacagctcactgcagcctcaacttcccaggctcaggtgatccccccacctcaacctcctgagtagttgggactataggcacatgccaccatgcccggctaatgttctgtatttttctgcagagacagggtttcaccatcttgcccaggctggccaactgtgttctttttcaatattgttttggctattctgggtcccttgcaatttcttatgcattttaggatcactgatcaatttccgcaaaaaaaaaaaaaaaaaagtagttaaaattttgatgggattgaatctctagagcaatatggggactattgccatcttaatgatgctaaatcttccagtccatggacacagatttatttgggtcttttttctttttacttaggtgttctttaatttctttcaaaaatgttttgtagtttttggcattccagtcttgcacttattttgtcaaatttattcctaaatattttattcttgttgatgctatcgtaaatggaattgttttcttaatttcattttcaggtttttcattgctaatgtatgggaatacaattgatatttgtgtattgctcttgtatcctgcaaccttgcagaaatcattagttctaatagattttttaatggattccttaaaatttttatgtatgcaaacatgtcatacacatagttttacttcttcctttctggattcctttcatttcattctcttggctgattgcctggctagaacctccaggactgataactcttctaatttgtaggagtattttttttttaaacccatttatttactgaagcaactggatcatttgtggtatagaaatttccacattttagatttggctggttgcttcattagcccctctctactctcttgattggattgatattataataaaatattacacctgaaggccagaatctccctgagccaggttttgcctgggattgtcattttgcaacctctgtgttcacaaggactttgcccgggagcaaggtggacgtcctgcctatccctggaacagggtgtggtcccatccatggggactctaaagtgggagtggaaagccagaggcctgagagagctcctcctcaaggctgttagggacccagccggactgagaatcttttgtttttctggcagctggagcagttcaagaaggacaacgaggaaacaggcttcggctcaggcacccgggccctggagcaagccctggagaagacgaaagccaacatcaagtgggtgaaggagaacaaggaggtggtgctccagtggttcacagaaaacagcaaatagtccccagcccttgaagtcacccggcccccatgcaaggtgcccacatgtgtccatcccagcggctggtgcagggcctccattcctggagcccgaggcaccagtgtcctcccctcaaggacaaagtctccagcccacgttctctctgcctgtgagccagtctagttcctgatgacccaggctgcctgagcacctcccagcccctgcccctcatgccaaccccgccctaggcctggcatggcacctgtcgcccagtgccctggggctgatctcagggaagcccagctccagggccagatgagcagaagctctcgatggacaatgaacggccttgctgggggccgccctgtaccctctttcacctttccctaaagaccctaaatctgaggaatcaacagggcagcagatctgtatatttttttctaagagaaaatgtaaataaaggatttctagatgagtgagactcattactaaactaaag

SEQ ID NO: 6247 - DNA, 277 bp, Homo sapiens
gagcaaagatccaagaagacaagaagacaacaacagtgcccctgagtcccgccccacaccccagtccgagtgcacttccctcatgcgacccccagggccccgtcccccacccctgcctgtgacacctgaacactggctttctctcatctctgtctcctctttcttgtcctcctcccagtgttgttcaggaagagccatgggcatcctgggcaccccctccctgacatacacacctcagggtggaccacagaatggagggcctcatagatttgctggg

SEQ ID NO: 6248 - DNA, 175 bp, Homo sapiens
tttttgagatggagtcttgctctgtcacccaggctggagtgcagtggtgcgatctgggctcactgcaagctccgcctcccgggttcacgtcattctcctgcctcagcttcctgagtagctgggactacaagtgcccgccaccgcgcctggctaatttttttgtatttttagtaga

SEQ ID NO: 6249 - DNA, 147 bp, Homo sapiens
tgagacggagtttcattcttgttgcccaggctggagtgcaatggtgcgatcttggctcaccacaacctccgcctcctgggttcaagcgattctcctgcctcagcttcccaagtagctgggattacaggcatgcaccaccatgcccgg

SEQ ID NO: 6250 - DNA, 277 bp, Homo sapiens; identical to SEQ ID NO: 6247

SEQ ID NO: 6251 - DNA, 437 bp, Homo sapiens
tccactctgagagatttcccttcattcttagtgaattatttcatttggctattaatttccaaggtctccttttgatcctgtaattgttccttcttatagccttttattctttttgtgtggatgcatagcccatctctaagaataggaattaaattttatcaaggttttcttcttctccctgccttgcctttgtttcctccagatttcctttctctactgtgtttgttttggtctgtctttcaggtaagatactttcctacaatttctagtgagccatggctatccattcatatttaagagggaggcactaaaagccaatagcaagttgtatgtgcatggatttctcttaggctagtcaatttccaataaagaaatcttttattcttttgcctagagttgtatgggcctagtggtggtatgccatcattctagtaacc

SEQ ID NO: 6252 - DNA, 437 bp, Homo sapiens; identical to SEQ ID NO: 6251

SEQ ID NO: 6253 - DNA, 287 bp, Homo sapiens
atcccagcactttgggaggccgaggcgggcggatcacgaggtcaggagatagagaccatcctggctaacacggtgaaaccccgtctctactaaaaatacaaaaaattagccgagcatggtggcgggcgcctgtagtcccagctactggggaggctgaggcaggagaatggcgtgaacccaggaggcggagcttgcagtgagccgagatcacgccactgcactccagcctgggcgacagagcaagactccatctcaaaaacaaacaaacaaacaaaaaaactataaaa

SEQ ID NO: 6254 - DNA, 287 bp, Homo sapiens
atcccagcactttgggagcccgaggcgggcggatcacgaggtcaggagatagagaccatcctggctaacacggtgaaaccccgtctctactaaaaatacaaaaaattagccgagcatggtggcgggcgcctgtagtcccagctactggggaggctgaggcaggagaatggcgtgaacccaggaggcggagcttgcagtgagccgagatcacgccactgcactccagcctgggcgacagagcaagactccatctcaaaaacaaacaaacaaacaaaaaaactataaaa

SEQ ID NO: 6255 - DNA, 591 bp, Homo sapiens
tgaaggtgatgctagctgctataacaaataagcacgcctgtgcacagttgctcaaagatagtagaagtttatttcttgtttatataagatccataatgactcttgccaattagcaggctgctctcttccaagtggtaacccagggactcaagctcttttcatcttgtggctcagccatctgacacatgtggcttccagcactgccctgctgttgtctgcacaaagctggtggaagaagtaggaatttgcaggaccatgtgtggagcattttaaggatgaggcctgggagtggcacaaatctttgaactccaggaggctaggaaacagagcataaccttgtgcccaggaagatgcggggcatagtacatctttgcctcacctgatgtattgtttgtttaaaatcactttggattctcatttaccttttccccctcaagatctttgtttttgactttggagataaccagaaataactaagcatgcttcgttccctctacgatttcatcctcatggggaagcaagaccccactcttttattttcatgtatgtatatatgtatgtatgcatgtatgtatgtatgtttgagacaga

SEQ ID NO: 6256 - DNA, 409 bp, Homo sapiens
gatatgctttgttagcttagcatgctgttctaggctgcctttctttttttttttttttttttaaacttcatggtgagcagaacactgtactccagactgtgaggccccacctgtgcagcctgctggcttctcataccagcttccttctcaccttaaccccacgtattgttgcaacggcaaaaaagagaattgcacagaggaacaccacctatcagagttcacactgagtttgcagattcatccttttgcttccagccatcccatggaatgccgttcttggaagggtcatctcatggtccattgtcggccctcttagaagagatttcaggccttcccttgtagcttgatagttacagggagtgctagggtaagtggaaaaagcacatgacttggaataaagacttagtac

SEQ ID NO: 6257 - DNA, 433 bp, Homo sapiens
ctaaaggaagacatttagaaaatttagaatataaatttctgttagtagaaactaatttctcttgctgttctctaaagtatacttgatttgaaatatgtgccctgaagttttgctatgttgaaaaaaatgatgagccgggcgcagtggctcacgcctgtaatcccagcactttggaaggccaaggcgggtggatcacctgaggtcaggagtttgagaccagcctgaccaacatgttgaaaccgtttctctactgaaaatacaaaaattagccaggaatggtggtacacagctgtagtcccagctacttgggaggctgaggcaggagaatcgcttgaacccgggaagtggaggttgcagtgagccgagatcttgccattgttctccagcctgggcgacaagagtgaaactccatctcaaaaaaaaaaaaaaaaaa

SEQ ID NO: 6258 - DNA, 729 bp, Homo sapiens
cttagctgtgtcttttactgctcttcaactaccacccattcacttgcccccaaatcgagacctccaaaccaccacccaccctaagctaaaacagagaaatctagctctgtgctacttacgggtgtcctcctgccacctcacactggtcatttctaaaacagaacctgtcatttctctctctcctgtatttcccttcagtctctgggacactttctatccaagtggtcaaaccagaaacttgagacgtatggtaaatgcttccaccttctgtgccagtacctcatggcagtacttgctttcatcttggtaatatttctcacatctacctcttttttctgaaacaagatttagctctgttgtccaggctggagtgcattggcacaatcattcacagctcactgcagcctccaccttctgggctcaagtgatcctcccaccccagcctcccgagtagctgggaaaacagctgcccaccaccacacccagctaaactttttaattttttgtagagatggggtctcactctactacctgggctttctcacttggaaaattgaactccttgaactcctgggctcaagtgatcctccctctaggcctcccaaagcgttgggattacagatgtgaaccaccgcacctggcctcacatctacctcttgcttctcattttcctttttaaaagtgagaagagtcagacttgtatagcataaaaagcagagagctgagtat

SEQ ID NO: 6259 - DNA, 401 bp, Homo sapiens
cataaataaatagtcctgataaagaatactaaaaattagagatccggccgccacttctaattccagtctcctcttccaagtttccagaaatgtctttggtttacagcttttcagaccttttcctgtgcatatgtatacatgtgtttgtgtgtatatatgtgtactttgtagaaaattttaaaatctcacctgagtattactttgtttctaattgttttgttggcattctccttctttctgatgactcttaacttcctatgctgcctagagagagttaaaagaagaaaatgttttgaaataatttcctttatcagatctcagtcacctgaacattaatttcaaaccaaaagagagttacagaaagagataattaaatgtttgccagtgacttgtaattgcct

SEQ ID NO: 6260 - DNA, 470 bp, Homo sapiens
gtcattgctgtgtgtctcaccagcaagagtgatgttctaatgacattcattacacttagctggcctctgtaggatgactcagatatggtgtccatattgtcccatgtggttcccatttctttttttcttccctcactttgacagcgcacattctctggtagtttgctgggaaagggtatatgaaaagtagatttggaggggatttaatttctaaaaatgtctctattacatccttaagtgattgatgtttttatatggaattctagggaggaaataattttacctcggaatttgaggccgtttttccattttcatatagcatctggctttgttgttgagagagattgtgacattctgatgattgtttacatgtaagcttcttcctgggtgttctgaaatatcccactgatgcatgtaatgtggtgtgaatttactttcattcaatgtgttgggttcttggtggtctcttt

SEQ ID NO: 6261 - DNA, 660 bp, Homo sapiens
ggcaacagtcattcctcagcagagtggagagggagacacatgttctgccgcgcccatgttcagtctgttctgtgggcagagttgtaggaacacacttagcccaaatcgatgccagcctggcagtgggtgaagggccagcaaggtttgtctatggctcatgaccttagggaaaatgagattttactcctcgtgcagcctcctgcctggagaattgcacacccctgtttcagataggtaacagctttcttgaagctttcaagaataaaaataaaaactttaaagtacatggctgtcagaaagtccctcctggtagctaacttgagccctttgtgcttattttatcttggccaagcctccccggagcatgtgtaccagatacgataaccttccaccaaaccagggacctctcagatctcggcttttcagaacaaagaatttggatttccttagcctttcatcatcatctcatcacccaaacctttcattatctttttcaattttttctttgaactctttccaaaacttgtcttttgagttacagagaccatcacttaattagatctttcatttccaggggatactcctagtgcctaggaagaaataaattaaatttcactcggatatatttcattgggggaagggtgtagaaaaaaagaaatt

SEQ ID NO: 6262 - DNA, 660 bp, Homo sapiens; identical to SEQ ID NO: 6261

SEQ ID NO: 6263 - DNA, 253 bp, Homo sapiens
tgcaacccagcagcagttgagcaccttgtcaaagtgtgggaatgagcgtgtgtgggtctctgtgcttccagccttttctgcaccagctgttccaagcggagcagaggggtctgtcttgcttctccgtaacttcatcaacctgtaagtaggcttgccttttacagtgctgttctcattagctgtgcagacttccttatcctgatcattgggtatctgtgcgcagactttcataggggaaggggatagtctttaa

SEQ ID NO: 6264 - DNA, 253 bp, Homo sapiens
tgcaacccagcagcagttgagcaccttgtcaaagtgtgggaatgagcgtgtgtgggtctctgtgcttccagccttttctgcaccagctgttccaagcggagcagaggggtctgtcttgcttctccgtaacttcatcaacctgtaagtaggcttgccttttacagtgctgttctcattagctgtgcagacttccttatcctgatcatttggtatctgtgcgcagactttcataggggaaggggatagtctttaa

SEQ ID NO: 6265 - DNA, 84 bp, Homo sapiens
ctcactgcatcctccgcctcccaggttcaagtgattctcctgcctcagcctcccaagtagctgggattacaggcacccaccacc

SEQ ID NO: 6266 - DNA, 84 bp, Homo sapiens; identical to SEQ ID NO: 6265

SEQ ID NO: 6267 - DNA, 490 bp, Homo sapiens
cttcataaagctcttgcgctaattccaaagagaaaaagagtaattttacagtggagaaatctggccaataccaccttaactaagtgatcaagttaacaccagcagtaaaatgttctattctgcatgttgacatcatgtacacccatgtatgatgtactgaggagggtacaccatcactcctgggacattcctgccaaaaatgcatatcctcagtctgatcatgaagaaacattaggcaaaccccagttcgggacagcatgcaagataattggcctatactcttccaaagtaccaaggtcaagaaagacaaagactgaggagctgtcccaggttaaaggagaccaagagagacaactactaaatgcagtggatttagttccaggattgaattcctcccttcccctcccctcccctctcttttttcctttccttttcccttttctttccttacagggtcttgctctgttgccagactggactgcagtggtgt

SEQ ID NO: 6268 - DNA, 490 bp, Homo sapiens
cttcataaagctcttgcgctaattccaaagagaaaaagagtaattttacagtggagaaatctggccaataccaccttaactaagtgatcaagttaacaccagcagtaaaatgttctattctgcatgttgacatcatgtacacccatgtatgatgtactgaggagggtacaccatcactcctgggacattcctgccaaaaatgcatatcctcagtctgatcatgaagaaacattaggcaaaccccagttcgggacagcatgcaagataattggcctatactcttccaaagtaccaaggtcaagaaagacaaagactgaggagctgtcccaggttaaaggagaccaagagagacaaccactaaatgcagtggatttagttccaggattgaattcctcccttcccctcccctcccctctcttttttcctttccttttcccttttctttccttacagggtcttgctctgttgccagactggactgcagtggtgt

SEQ ID NO: 6269 - DNA, 490 bp, Homo sapiens; identical to SEQ ID NO: 6268

SEQ ID NO: 6270 - DNA, 363 bp, Homo sapiens
gagtgggtatgtggagtgacctggaaagggagaagcgatatgaatgttgcactactcagcctgcatgatggggtcaagacactttctgctggaggttgacatttgttttagtagtttatgttgatgcaaagatcctgggaaacatgcatgattttgagccttttcacaaggaagggtgatgttaaaagtgagctaacttgagaaactggcttcaaaatctgggccaatttgagcaacaaaataaataatggtagaagggtattgtaacccagagaataaaataaatatccacaagtccttaatgatgatataaatacataagtggggagaagggaaaacttttgtacagaggattccattagt

SEQ ID NO: 6271 - DNA, 363 bp, Homo sapiens; identical to SEQ ID NO: 6270

SEQ ID NO: 6272 - DNA, 363 bp, Homo sapiens; identical to SEQ ID NO: 6270

SEQ ID NO: 6273 - DNA, 352 bp, Homo sapiens
catctttgtcaatcaggttagtgacaagtggcatcccctctttgcatgtgactcctagcaaggaacacctttttgaatgctgcttggccattcctatttcgtattagagttgagaaagctcatcagcctctgtgtggagagactcgaagttaagaccctcgtgaggaaaaaggaagaccagacagaagggtataaccagaggctgcaggctgggctgccctggcgatagctggaggagagcttcatgtaggagttgggggtggggtgcaggacttgctcaggggtactttgagctccttgtttccctgtagagtggaggccaggaatcatttaggccagggaatagtagtgt

SEQ ID NO: 6274 - DNA, 512 bp, Homo sapiens
atttttatagtgtcactgaggctgagttatggaataacaccttctctttggcccacgttatgtcatttgaactcctaccactctgtgaaatagcctcccctcataaattggacaaacagaatggctgatttgctcactgttaaaactgtgactggtttggtttctttgaatcccaagtgcagtaggcaggagtgaatcatagactcttagagttggaagggatcttagacatcatcaaatcaaacttctctacaatgtctctgaaaagcaaacatccacactgcttgaacacttccagtgacaagaaactcactatcttacaaagcatccacagggtcaaagcaatgttctatttatcaagctgagaactatctcatcttaagtgtcactcactagtctgatcctagaacacatgagagcctttcatatatccttaagatcacattggtttgattgttcctaggactagggacagtgccagggaattgctgctgtgaacctaaagtctaatc

SEQ ID NO: 6275 - DNA, 512 bp, Homo sapiens
atttttatagtgtcactgaggctgagttatggaataacaccttctctttggcccacgttatgtcatttgaactcctaccactctgtgaaatagcctcccctcataaattggacaaacagaatggctgatttgctcactgttaaaactgtgactggtttggtttctttgaatcccaagtgcagtaggcaggagtgaatcatagactcttagagttggaagggatcttagacatcatcaaatcaaacttctctacaatgtctctgaaaagcaaacatccacactgcttgaacacttccagtgacaagaaactcactatcttacaaagcatccacagggtcaaagcagtgttctatttatcaagctgagaactatctcatcctaagtgtcactcactagtctgatcctagaacacatgagagcctttcatatatccttaagatcacattggtttgattgttcctaggactagggacagtgccagggaattgctgctgtgaacctaaagtctaatc

SEQ ID NO: 6276 - DNA, 366 bp, Homo sapiens
actactgcctataacaggaaaaacaatggtgtcttggcttcacctggcacctttcccacatagggttccagtctcaggctgttacctgactcaggctgtgcattctacctgcagggacttatttccagcctctaggtgagccaactcaggctcagagaggcaaagtaccttgctttaggcaggaatgggtacagttaggtctaggacttgcagacaaataagccaactccctggctctttaacttcttaattcgtttggctattcatacccctgttctcctttccactctgccccacaacccttcttctagtttgccctctctgccctagggaggcctcttgtatagatgagaaatgctgagcatt

SEQ ID NO: 6277 - DNA, 252 bp, Homo sapiens
attactgccacatttgagaagtgaagcacatgaaagctgtggtcaaatttgagaagaggctatttacctttgcagtatggttttcctgaatgtctaaatatatctttacttgatcagtcaagtggaagttggaaaattctaatactatgctgaactccctagttagcaacaacctttataccagagttggggcgggaaacaactgtattccttgaatcatgatagaatgttgtcaccaaattgttacttcta

SEQ ID NO: 6278 - DNA, 252 bp, Homo sapiens
attactgccacatttgacaagtgaagcacatgaaagctgtggtcaaatttgagaagaggctatttacctttgcagtatggttttcctgaatgtctaaatatatctttacttgatcagtcaagtggaagttggaaaattctaatactatgctgaactccctagttagcaacaacctttataccagagttggggcgggaaacaactgtattccttgaatcatgatagaatgttgtcaccaaattgttacttcta

SEQ ID NO: 6279 - DNA, 366 bp, Homo sapiens
actactgcctataacaggaaaaacaatagtgtcttggcttcacctggcacctttcccacatagggttccagtctcaggctgttacctgactcaggctgtgcattctacctgcagggacttatttccagcctctaggtgagccaactcaggctcagagaggcaaagtaccttgctttaggcaggaatgggtacagttaggtctaggacttgcagacaaataagccaactccctggctctttaacttcttaattcgtttggctattcatacccctgttctcctttccactctgccccacaacccttcttctagtttgccctctctgccctagggaggcctcttgtatagatgagaaatgctgagcatt

SEQ ID NO: 6280 - DNA, 599 bp, Homo sapiens
caacagctctagcctgatgaacacgcaggcgccgccctacagcatggcgcccgccatggtgaacagctcggcaggtaaccttggcagctctgcgctcctgagcccctctctctcccctctcctcctcttaggctccaccagtgaatctgcctaaacggcccgagaaggtggatcagttggcgaaagtgggaatcatactacttttctgcttctcagaaacttgctccatctatttaagacttgagaattacattatattttatgtaaattatttttattcaatctgtgtttgtataacaagtggacatatttcaagtattattggagattgttaaatatgcacactaagttctctttctctttgggaattattagtattggaagatcctcaaattctctccatttggtagtggtggagacaaacatttcgaattcacatttcaggggaaatcgctggaagggcagagcaaggggggtttgaagtactttttacatttagggaaacacctctaaatgtatgctcggaagtagctgcttcataaatgctctgtgcagattgtctctattgggaaactgttttaaatgtttcatgatgttta

SEQ ID NO: 6281 - DNA, 107 bp, Homo sapiens
ctctttacgtaagaagagcttgactacaatggtggactcttttgacgcttttgccaccttgctatcatttctgtttttagggcaatctctacaccactgtgcagtta

SEQ ID NO: 6282 - DNA, 373 bp, Homo sapiens
agacaatgagtaccactttttacataaagtgatgtgtatttccagcgacctgttactctctgtcacatgttaaaatggatctcacgggaggattccctccttcagagactgcagggcgtggcttagccagtgtgtatcccgtgatgccccgtgatgcgttaggaatgcatgggacagccagatccttggttctttctgattacattttttcatttcttctgccttccacctcctttctggcctctctgtctttgaaagttcatgtccctgtgtccggcggaacagccagtgagaggctgggctcgcctcctgtctgagcttctgcgtcgttgatttctaggacctaattgaagggtgacattccatgataatt

SEQ ID NO: 6283 - DNA, 26013 bp, Homo sapiens
tgtgttaaatgggcttgccaacaatatggatgatttgaagataaacaccgatattactggtgctaaagaagaactcctagatgacaacaattttatctcagacaaagagagcggagttcataagccaaaagattgtcaaacatcatttcagaaaaataatacgttgactctgcctgaagaactgtcaaaggacaaatctgaaaacgccttaagtggaggccagtctagtctatttatacatgctggtgctcctactgtttctagtgaaaactttatcttgcctaaaggagctgctgttaatggaccagtttcacactcctccttaactaagacttccaatatgaataaaggcagtgtttcattaaccactggacagcctgtggatcagccaacaacagaatcttgttcaactttgaaggtagcagctgatcttcagctgtctacaccacagaaagcaagtcaacaccaagttttatttttgttatcagatgtagcacatgctaagaatcccacccattccaataaaaaactacctacctctgcttcagttggttgtgacattcagaattcagtagggagtaatataaagtcagatggcactttaataaatcaagtagaggtgggtgaggatggtgaagatttattggtgaaagatgattgtgtcaatacagtaacgggaatttcctcaggtacagatggatttaggtcagaaaatgatacaaactgggatccccaaaaagagttcattcaatttcttatgactaatgaggaaacagtagataaagctccacctcattctaaaataggtctagaaaaaaaaagaaagcgaaaaatggatgtaagcaagataactcgttataccgaggattgctttagtgattctaattgtgtacccaataaatcaaaaatgcaagaagtagactttctagaacaaaatgaagagctacaagcagtagactcacagaaatatgcattatcaaaagtgaagcctgaatcaactgatgaagacttagaatctgtggatgccttccaacatctaatttataacccagataagtgtggagaagagagttcacctgttcatactagcacttttctttcaaataccttaaaaaagaaatgtgaagagagtgattctgagtcacctgctactttcagtaccgaagagccatcattctacccctgtacaaagtgcaatgtgaattttagggagaagaagcacctccacaggcatatgatgtatcatttagatgggaatagtcactttcgccatcttaatgtcccaaggccatatgcttgtagagaatgtggacggacatttcgagatcgcaattcacttctaaaacatatgattattcaccaggagagaagacagaagttgatggaggaaattcgtgaattgaaagaacttcaggatgaaggaagaagtgcacgattacagtgtcctcagtgtgtgtttggtaccaattgccctaaaacatttgtgcaacatgctaaaacccatgaaaaagataaaaggtactactgctgtgaagagtgtaacttcatggcagtgacagaaaatgaattggaatgccatcgaggcattgcacatggggcagtggtaaaatgccctatggtcacttctgatattgcccagagaaaaacacaaaaaaagactttcatgaaagactctgtagtaggatcatccaaaaaatcagctacctacatatgtaagatgtgtccttttactacttcagccaaaagtgttttaaaaaagcacacggagtacttgcattcatcatcatgtgttgattcatttggtagtcctcttggacttgataaaagaaaaaatgacatccttgaagaacctgtagatagtgatagcactaaaacattaactaaacaacagtcaaccacatttccaaagaactctgctttaaaacaagatgtgaagcgaacatttggatcaacctcacaatcaagtagtttttcaaaaattcataagcggccacacagaatacagaaagctcggaaaagcattgcccaatcaggtgtaaacatgtgcaatcaaaacagctctcctcataagaatgttacaattaaaagcagcgttgaccaaaaacctaagtatttccatcaagcagcaaaagaaaagtctaatgccaaggcaaatagccactatttgtatagacacaaatatgaaaactataggatgatcaaaaaatcaggtgaatcatatcctgtgcatttcaaaaaagaagaagctagttcattaaattctttacacctgttttcatcatcaagtaattctcacaacaattttatttcagaccctcataagcctgacgccaaaaggcctgaaagcttcaaagatcacagacgtgtagctgtaaagagagtaattaaggaatctaagaaggaaagttctgttggaggggaagacttggatagctatccagattttttgcataaaatgactgttgtcgttttgcaaaaacttaattctgctgaaaagaaagatagttatgaaacagaagatgaaagttcctgggataatgttgagttaggagactacactacacaggccatagaagatgaaacctatagtgatattaatcaagagcatgtaaatttattccctttatttaagagcaaagtggaaggtcaggagcctggagaaaatgctactcttagttatgaccaaaacgatggcttttattttgaatactatgaagatactggaagtaacaactttttgcatgagatacatgatcctcagcatttagaaactgcagatgcttcattgtcaaagcatagttctgtttttcattggactgatttgtctcttgagaagaaatcgtgtccttactgcccagcaacatttgaaacaggtgttgggttatcaaatcatgtcagggggcatcttcacagagcaggattaagctatgaagcccgtcatgttgtatcaccagaacaaatagccacaagtgacaaaatgcagcatttcaaaagaactggcacaggaacacctgttaaacgagttagaaaaggtaagttctccatggggatgatttgggctgataggtctgtgttctaattctgaagatttaaaagttttttttgaatttagtctttattagaatcataattttatgtttcagaattaactcattttagggtggtcagtttatataagaaagtctgatattactcttaaaaatttttttctagctatagagaagtctgaaaccacttctgaacacacttgtcagctctgtggtggttggtttgatactaaaattggattatcaaatcatgttagaggccacttgaaaagacttggaaagacgaaatgggatgctcacaaatctccaatctgtgttctgaatgagatgatgcaaaatgaagaaaaatatgaaaaaatcttaaaggcattgaacagtcgtcgtattattcccagaccatttgtagctcaaaaacttgcatcaagtgatgactttatatctcaaaatgttatacctcttgaagcataccgtaatggcctaaagactgaagctctgtcagtgtctgcatcagaagaagaagggctgaatttcttaaatgaatatgatgaaacaaaaccagaactgcccagtgggaaaaagaatcagtctcttacactcatagaacttcttaaaaataaaaggatgggagaagaaaggaattctgctatttctcctcaaaagatccataatcagacagcaagaaagagattcgttcagaaatgcgttcttccattaaatgaggatagtccgttgatgtatcagccacaaaaaatggacttgactatgcactcaggtaagaggacgtttatgactatgctatacacagtttaaatgcagttcaattatgccttctttaatggaatctatgtggaaaatactttctcacaatcttcctgtttaagctgctttttttttttacagagcacagattggttattctactgtcatttctgtataactcatcaattgatgctcattagcactgagttctctgtgcctcttttcttggtctgaatgtaaggtgagaacaaaagcagaagaaaaccacacacacacacaataaaaacaacaaacaaaaagctgatctgtaaaaataaaacttgctctggctggaggatggttgtggatgggaggttgatgttcaaaagcatagcattattgaaaaggcatacctctgtcatatttttgccagttctccaaggtgatcatgttttcaagatttagctgttggtttttccactgcttaggtaaaacaaaacagactcttaaagctgaatggattggtgtctgttgtgattaacccaaagaaacatctccctctccaattcctcattgtattgcggaatagtttggttttggagaacagttgtgaacataaaacatatttgtttggggttttaggttttaagatagtgctctaatggaacaggacagatgatttagcttagtgctggtgcaccaatagttttttccttttgaaaggaatattttgtatgtattggcaaataatgtggcagataaagtagccaaactttattcagtattgccaagtgtggtttatacttttagactagaaaaattttaagtgttttttctagatttctttttgaaggttaatgttgaaggtttatgtaaatggtctcatgattagagctctaagttgaatgtgtcagaggtaatagttaatggattaataacgactaacattactgtaaagtaatgttgtttatttgctttggggcagacattgtgatatcccgaatagttgtaatgcagttttgatttaaggaaagataactttgtattgtaagtggtctggaaagcagtttatcttgtatgagcttctgtttaatccggctttttctttcgaataaagagtctctgaaagtcaatagctttcaatattttttcagaagggtaaaacgcagggaagatgtgttagctgtgttgaccaaggggtagtatacttcagagatggaaagcatatttgtggctatcacagtaatgctgaagaaaccagttgaaatgtgttgggggagtgaggattgtctgagaagttaggagtttcttattgtttgaacatgtttttcctgtgatgactaagatgttagcttgttgatcatttatttagcacaaagattttagcaaaaaactttaaatcattaactttcattattgattgcgcattcagagtaatgaacataaaataccctaaataaaatgttgtgtctaacagctgttcagtggtgtgttttaccaccttttctcccagccttcatcagaaagcctaatttagtattgagacttttacggttttgtgggtaaaacactttaattaccactttgtcaactagactttttaattctttttattggtaatgttgtaagctttgaaacttctcaacagaaccgtgttgttcaaatcacaggattgtattgtagtaggtttaagaaataatctgcgtaacacagaaatctgcaagaaagtaataataggtgtatatccagaggagctcaaaggttcaagtcactcctcgtctacctttccaaagagcatgagttgactctaaatactaactacaaactaataacagttaacttaatttcccctccttattttaagttaacctatttcattgaacgttttgaaaaccatctttattgtggtgcttttctacactctttaagctaagaaaatttcactttttgaagtgagaactggattatagttttcttttgaatgataggtatgcctgtgaagcttagaacatgtgtgcattgcaatacgacgtttacaagtgctgttagcctgtccaaccacttacgcgcttatgcacgaaagaagagtgctggacttttgactggtacaggtatgtttgaacagatatcacagcaagtctgtttgatacaatacactttttttttccccaccagactggtgttaattcagatcatatttatagctttctttggtaagctgcatttgagtctgaatacccattgaatttcagcaacttgtaaactgttagatgtaattctaagcaagttaatctttttcttttggctcttattgacttaatttgggggaaaaaaaattaacccaagaggtgtggaactttgagtctaccttaatcccatttattttttagaatactatttttgatttttaaattgattttagattccagtaaaacacctctctttatagttctagtcgggctcagtggtgtgcccctatagtcccagctactcatgaggctggcaggaggatcacttgagctcaagagttagcggctataatgtgctatgattgtgcctgtgaatagtcactgcactccagcctgggcaacatagcataaaaatattgtagttctagcttggggaaatcctttattagaaaaggaaattatagggaaatttcaaaatgtagacttgattaggaaactaagcaaactaatgaattttcattagtctatagattagatctttgaaggggtgagccttaataatggcttgtgttgacaagcgaatagatttttcttttaatacttcttaaatatattaaggattaataaatttagctatgcacataagtgttaacatgcacatttctgtgttatttttggttggttagcccaaccttgcagatacctcttaatactgctcatctgtgaaaattttattagcttacttatatgtaatacgcttcttataacctacaaaatgctttgcactttcatttgtagtcttttaagctaccctgcttcagcaaatctcatttccctcacatcttaaaatataccctctttttgacatagatctacataaattcttttgcctaaaattctttccaatcattttatttctcttgctcttttttagatcactgcctcctgctttcttctagttgttttcccagcttttttgttcttcctcatgtcctagaacttagatccaatatgttcttgctttcaaaaaaccacttatatttatactagtgtctttcttctgcttctttgcattcttccttaacttgatatacaaatgaccagggatgaatgttgacaatttatattaaaaagagaggagtggggtgagttttagtctactggattaggcctcctactctgagattataatttttatataccctcacctttatcaggcttggcaagtgattgcagacattagaggtggggaacaataaaaataagagactatacaagtaggaaatcattattgttaccatacttgctaacttttattgaacatttactatgtgtcaggcactatgctatgcaatttacatgcataacatttaatctttacaacagccatacaagttgtaggtactggaattctcttaacgttttataggaaactaggacttaaagaacttaatttgctcaaacttacacagttaataagtagcaaggttgtaattcaaatcagggctatcttacctaatctttgtttttaatcactattctctaccttacacaggcggtctatttttgaatttcttatttttaaaataagaaattgaaataaaaataagcaatggaaaattctaaaatgaaggtgggtttgttcatttatttatttatttattttgagacggagtctcgctctgtcacccagattggagtgcagtggcgcgatctcggctcactgcaacctccacctccctggttcaagcaattcccctgcctcagcctcccgagtagctgggattacagactcatgccatcatgcctggcaaatttttttgtatttttagtagagatggggttttaccatgttggacaggctggtctcgaactcctgacctcaggcagtctgcccgccttagcctcccaaagtgctgggattacagccgagagccaccgcacccagcctgaaggtgggtttaaaatggggactattctggtgaagactgaataaataagagtctaattaaaaagagcagagatccaagaagtgcttaggcctaaattagactttagaggagttaatgttccattctgattattcaagcagattatgcaaatatccaataaggcaagatatctccagtccagattttattagtccattaaaaaaatgcttttacttcatctgaaaattctgcaaaacacaggattaattacttataaataactggtagtaaatctccatttaccaagaatgcacttatgaagattatctaaaaaatcttcattatcagagagaaaagtaatgtaggatgactgggaatatgtttaggtcctgaagaataaaagagggtgttattttaaaaatatgattaagtactaccaaaatattagaagtactaggaaatagaaagcgtgtgtttggcagtcctaggcaaagaaaaggaaaatgagaaactgaagaaagcctagggtcttattttccacacccagtagccacttttgagaaactttaaaaactaatgcttctttttcttggaaattctgaaacattttttccctcattaaaaaaaatcttcttgatcagtagagctatacagatgtctttgctgcttattcatgccaactaagaagttttttttcaagctttattaacttttctgttttccagatagagaattctgtattgtatttacaaactccacatactgattatcccccatatcaatatcactgttataaagcagtgttcctaaaaacctatggccctagaaggttccacttggttattataagtgattcattaattcatatgagtaacaggcatcatttttcaagaacacatgatcttttaatgaataaaatgcaaattcatttttataaaatcttaccttagtatatcacaaaattggaacaatgtaaagggaaagtagataggaataaagcctccctaaccatgtccagtatgtgtatttctagtttaagcagtcttaattcatgtagattttaagttgtgtggtccactcttgaatacaaagcttagataccctcagactaaatggtaaaggcctgcttttggttacctgtgatagaataaactttcaagccttcttagaagccacagctcctggtcttttctgtgggaactggtgaccttttgagggaagaaaaatatttcttctaacttataatctcttcaagtatcctgaatacactgaaaaggatatccctcttcttcccaaaatacctgtttactggtaacttaaatacttctaatgtgatggttctcaatctttactggggtcaccgacatctttgagaatttcatgaaagctgtgggccccatcccagaaacatgcacttatttgttctcagataaaaatttttgtgtgtatagactttgcgtatctcctgaaggctatcatcaatttgtctgatggcaaattgagaaaggagagatgccagaataaaaggaaagtagaaacagaactaggaatcagaagccttaagaagttcttttttttttaagagcagaagatgcttaaaatgcaagaattgcataatagcaaaactaattgtggggtcattatcttccctaatatttgtaaaaggaaccgatgggggaaataggaaagatttagaattgaagatttggaagaggtgggcagacttgggagagttaaattgtcataaaagaataatttcacagattaaagttttgcccagaactgtcccagtttatcttctgttgggtaggttcaaataaattgtttaataatttttctgtgtcttcacttgtagataatttatgaagctgttttacttcctttccccgatcaatctttatcaaaatagactagaatcaaagggtttattttatatcctatattgtaaatttaaggcagacttcttattcaagagtttattctagttatttatggaatgcagtaatggtaggggttttttttttttttgagattttgttctctttaatgttttacatgctcatacagatttttttctggttaattttccatacagtttaatgagaacattatatagttttcattaaatattgaaattttataatgtagcttatattaattacttctggactttttattttactgattagctttttttgtgcctaatgttttaattaaatgatgtatttttatgctagccatattaagaacatagttctattaagttattaatggagtgactatacatactggtttaccttgttgtcacacctaagtactagtgcctcttttactctcataagtgtcctggattgaatgataaattaatcatcctggttattaaaattgctaaagcatttaaaattaaggtaaagcatattctatcaacctaatctgcaatcaggaaaaaaaatatattttgaggtcaaaataagagtgaatttcaacaggtagggaaagggaaatacagagtagagagaatgttgttaaaggaagtagatctgtcagatgaatgccacaatgcttttctatggtagatagcatgttgttatcttttgtaaagaagaaacaatgatggtagcagtcagcattttaattgagactttattttatatcttgaccacatgtacaaacttacattaatacaaacacacaattccttgtgtactcacctaaatgtactttaatattttcttttttattatattctttgttgtgaaaaattaatgctggtcatgagccagtaaattgatttgctacccacttaagaagtcactatcatagattgaagacactgccctaactgcctctttctcttaggggttggtactgaccaatggtagtagtatcttagatgtcataactcttctgtggcagcaggtgaattttctatactcattctatccacatttttctctctagatcacttttgtaaatcaaatgctaacctctgggacttaaagtaattggaaatttctagttactcatttaaaattaatgcaagaaaaatatttttatatttgggaggggcttcatttcattatcttcagaacaattttgtgtgtgtgtgtgtgagacggagtttcactctagttgcccaggctggagtgcaatggtgcagtctcggctcactgcaacctctgcctcccaggttcaagtgattctcctggctcagcctcctgagtagctgggattacaggcacacgccatcacgcccggctaattttgtatttttagtagagatggggtttctccatgttggtcaggctggtctcgaactcctgactttaggtgatccacccgcctgggcttcccaaagtgctgggattacaggcgtgagccactgcacccagcccagaacactttcttgatacgttttggaagtaaagcccaattgttgctattctacaacaaatgacttatccatcataattatttgacttttctgatgaggtcaataccactagtgcaatatattaacgtttttaaaaaatcaagtcagtgttttatttttcataccatttacttttaagtgtaatcgtagtaggtttcttttgcctgttttcagctttaatgatataattggccacacaggactgtaacaagtactaatgaacatatagcacagtatcaagtgctgaatgggtttgtaagccactagaaaagtcattcttatgttgtggaaagtgctatgggagcactttctgatgtgatagaaaaaatagtattgtgaaagcttcccaatgtgcattaaattatttgttcattcatgagtgtcactgtagtgtcttttaaaaataatatagtattgcatgtttgaaaaattgcatgttttcatagtggttcattcagactgaaagagtgtaagtagaaaattttgatcttcttattaagattaaactccaaatgagcaaacttgcttctgcttaaagcaaactccttgacaattcttccagactgggctgaggagggtatgtgaaaagtatgagacatgtctctgctgtcagagaaattaggaaaggattgttgacaacatacataaaactatcaaaaattgaaaactatgcaagatagtatacaactaaatggcatattggctttaagtgttgtaggagttcaggttgattattttagtctaagcctccttttgagggcagctgggaattgagattccttttttttctgatgcccttactgtttgtctcattgaattagagcttgtaaaaaacagaaaaaataaataaataaaagtagttcatgctggtatgcttcttgtgactttttaaatgcaagagaacaacaaaaccagcagccatacaaaattttattcattcaacaaaagtttgagttcttgtaccaagactgttcatcgctgagccagtaaagatactgcactccagctgcataaacataatataacccagtgggaaaagatcaagtatgccattacagaagggtttatatggtttcagccagaccctgaagttgaaggatgcagtagagttttaggaagacgagatgaagtgtagaatatttcaggcagagaagaacatagtgtggacacaaagggatgaaatttggacttcaagtgtcaggagtggaacttggagttcaagtgtcagaagatttggttacagatgtttggtaaaattgtagtgccagaaaggtggggttggtgctttgaatgcttggtaaaaaaaattaggaagtcattaaaggatgttttaaaaataaggaggccgggcgtggtggctcacacttgtaatcccattactttgggaggctgaggcaggcacatcacctgaggtcaggagcgtgagaccatcatggtcaacatggtgaaaccctgcctctactaaaaaaaaatacaaagaactagccaggcgtggtggtatgcgcctgtaatcccagctattcaggaggctgaggcaggaggattgcatgaacccagaagctggaggttgcagtgagccgagattgtgccattgcattccagcctgggcaacaagagcaaaactcctcaaaaaaaaaaaaaaaaaatcagcccagtgtggtggtgcgcgcctgtaatctgagctactcaggaggctgaggcaggagaattgcttgaacctgggaggtgcaggttgcagtgagccaagattgcgccactgcactccagcctgggcgacagagtgagactccgtctcataaataaatacaaaaggaaaataggccaggtgccgtggctaacacctgtaatcccaagcactttgggaggccgaggcaggcggatcacctgaggtcaggagtttgagaccagcctggccaacatggtgaaactccgtctctactaaaaaatacgaaaaagtagccaggcgtggtggtgggcgcctgtaatcccagctactcaggaggctgaggcaggagaatcgcttaaacctgagaggtggagattgcagtgagctgagatcatgctgttgcactccagcctgggcaacagagcaagactccatctccaaagaaggaaggaaggaaggaaagaaggaagtgaaggagggaggaagagagggagggcagagagagagagaagaaaaataagggaatggtatggttaaacttatattttaaaaagcctttcatgagacagagaaaagatgggtctttatatttcttagctataacttatttctatagtattgttcttcattaagagcatatatgtgtatacatttatctgcacagtaacgtatcatttataagtgattagcaaggtaacgaattatctgagttgagtaaattctctaggtgactgaagaatagtcctttaactgttaataacttgatttttcctaaccattttggtggttattgctccaaaatgttgttcttatttttgccttgagtagcttggatataatttaatcgagtattttgggtaacccttatagatactctactaattgttttattattccagcaagaattaggctatttctccaccatacaaaaaaatgatcggctgattttttcactaattcaacaagcacttttttcacctccaactgtgctaagtatgcagagatacattggatcttacaatacagtagaagcacatatatgcataactgtaatacaagacaaattgttaagtgccattggagaggtatgcgtgaaatactgtggaatttcagagaaagaggaagacactttcagctagactaggaactcccaaggcttttggaattagcatttgaatggaccctgatgtatagctaactgaaatggaaatgggggtcggggtggggaagagaaatgcctgaaagagggagcaaggtggaacaatgtgggaagtttataggaaatactaggaagtaggaggtaagggaattgagttggactggtaaagtgagtcagatagatgacatagaacgctagtctaagatgttggaattaactttgtagtggggaactatttgaatgcagaatttgtgtaatgcttttgaaattgctttttaaataaaggatttggcagagaggaggaaaaattgcagggtagatcattttaagagtcctgtaccaggtcagtgacattaagaatgtaaaggaggggtactagatgtatgggtaatattatggaaataaaataagcaggatatggtagattagagttaagagatgactcaagattttaaatctgagtgggaggaggatggttataccagtacagttaatcaatctgctaccatgctgtctggtagaagggcaggcttcattacttctctgtcatttactagcaacacttcaacatccagctatccactataacaaagtatcaccttaaaagcaggagatctacaaatttggaaaagagagctttatttcttaggaagcttgaagcctgcaggcttggaagtgtatcctcagacagagaccaaaagcaagcccttcaaaggaggaagggtgagacaggaagttatgttgaatgggttggctaagtatacatattcaacagattataggaggagctatgaatattcatgagggggtgcacacaagcttagtgtgcacactccatgttacatacatcccatgttcactttgagttggagacctaacatttaatcatagtaaaattaaggtttacatgtcaaaaggtgaaacagagttcataggcatcctatgtgcagccttcatggaccagctagaaccagttggtgatctcttatcagtaaggaatgctggtcagttcaaaaccacaaaaacagagtggagtctggcttctgagttaggcaattggttgatatcagtggggagcaagtcttttgaaagggttggtttctttttaactcttaggaaggaaagttttatggtggttagtgagggaggggacctaacgagacttgctttacctcctgtcccatcatggctgggaactcaatttttaaggtttctctggggtcaccttggcaaagaggagggtgtccattcagtctgctgtagaacttagaattttatttttatttctcaaaagcaaataaccacacttgttgaatcagtaagtttgtttttaggagaatatagcctaagagttacaccattgtagcataaaatacttaaattttatgatgcttgttttttgctgctcattggtttcataaggaaggtgatctattttgactgacatcttgtttttcatgcaagtcttatctagtttcctagcattactattggtttaattatttactaagtttctgggttttgcttttttttttttaatatatgtttgggaatcttaaatatatctaattatatcttcagttataatgtttgtgtttgctatgatttttattctctaagccttaaataatgagattcagaaaatatcattaggtatagagtttattcaagcccaaagcttgaggatggccacctgggagcataggttcaagttgccctggatatacactgtgattagcagcagttacaagtgaatttttaagaaaaaaagcggtttctatgtttatttaccaagaatttacattaagataacgtaagctatcgattggctatacattgttctttgtatcacagatttcaggaacataaaaataatgggtgaggcatcaggtcaggaacataatgaatgcctagtttaaacaattgccctccccccagtggggggcatgagagtcaagtgactgaagtcccctactccagtctttctgggcctggtaaatcttgcatactgtgcatagctgactgctgagctgctttccttctctctaacatgaatttcttgaatgcggtttgtaatctggattaagatagaattagcccttataatataacaaggcatgtggttggccagagctaaattttaggtaatgttttaattgactttacggaaataataaaataacactcagactttctctattggaggttagggcaaaaggatggcttattggtaggtagttcctcacttactgcagaagtagaaaaaagtagaaaagtagaatttacttttttttttggtatgcctagggtttgaagaatgaggttaattcttgttatccaaggtttatgtatttaattgtagcttagctggaagttggctaaaacagaaaatatctgatcaataccatgtttggttatagtttgaattttggctggaattacacgtgtaaggctcttgagaactataaaaagccaaatcagatccattgcgaccatggatttgtgccatttagatttactaatatattgttgtgagtcctatctaatttaaggtaaatatgattgtattgaaaataatttaaaggaaattttaaagtttggtggttttcttagctaattttatgatcaagaacaatttaattattgttactacatctgaaatgatatatcagaaatacggagattttagagggcagggactgtgattattttgtttgtaattctcaacaaaagtgacttaaagcagattgtcattatgtactttaatgtttattctaatttcagatgtgtcttacaaaagtggttgatgttgatggctaatgcctattttgcttaataaaacggcatacaagtccaacttacttgaaaagaaatttttaaatgttattttcttacctgtcaccacaaagaagtaatacgtttgctatcctatcaactcagctgaccagtaagccacttgtagttgtgatattgttagcttttttagctttgggtaagctgataaaactagcctgcctctaattcctgtttataaaaatgtgtgatgaagtatcatatttatgtccagcttttccctttatttacatagagaatacttgctcaaaataccctttagtaatcatcccctctactttgaaatagtggagtcttctacaaattgtactttttctttaactgaatccattcaagtttaaataaaaggctacttccatttcctttaactctttctctgaactataaggctgttgactatacttaatttaacttcctactttgtaggacaaactcaagcaaccagtccttgtggactaataattgtaaaaccacaaacctaattcttaaagcaaaggaaatctgctttccaggtattttgcatttcatcctcttccaggtaaattattaaaacaagcaggaactagttaactttgccactgattgctgtgtgattgagttacttatctttttttcagtcattgggagtggaaactctaaaaattaatgaaagttatttagggtactaaaaaattacccaattttagagtgaaaatatcaagggaaaatgttgatgaaaataaatacttttgaggtgaccaaatgtgtatctttatacttcatgcctgactgtaagggaaacattgctttttataatgtaaactactcatcttgggaataatgaagtggtatagctaggagcaaagaactgatgttgataggagtaggggagtccttttcaattttaatactgtgtagagtggggatttaacaatttttctcagcctttttttttccttttttgaatgggccgagagattgaggggtggaactgaatgcagcctttctcatttatgatagtagatactcaggtcccagggctgctatttgcaaagtccaatgcaaaatgagttatgtggtagacctcgttcaaaaattaatagtttcaaggctgcaacagtagagcattaaactgagtgtggggctctccctatgtgactgtgtaagttggacacccatgaagctggtctcctaggcactttgtacagaaagaaagataaaagctgaataaatgaaactttggcttctcagcaattggctttctctaccccattcctgttttacacaagctagcatgtttttgttgttgttgttgttttctaaaaaaaggccctgattctttttcatttgaggccaaaggaaagaaaattatatttgcagtctttttatatgcttggggcttatgaaccttgaaggattagtgacaacagttataattgaatttattactaacacaggaacagaaaaccaatactgaatgttttcacttataagtaggggctaaacaacgagaacacatggacacaaagaagggagcaacagactggggcctaccttaagggtggagggtaggaggagggagataataaaaaaaactacctatcaggtactgtgcttattgcctgggtgatgaaatagtctgtacaccaactcccgtgacaatttacctatataacaaacctgcacgtgtacccctgaagttaaaataaaggtttaaaaaaaagagttgagtttatttttcttacacttgtgtatcctttggcatgtgtgcatcctcttcccacctcaccactgccagcacgacctccagcaccaactttttaatagtgatagaatgatgatttacctgttcgtgtcatgtttattcctactgtagttctgaatgagctcatagctaatattgtccaccaaacttaacacaggccaaccacttagagaagaaattttcttccctctcgtaggggtatactgtgcctcttactttgggtatagataccccagttgtttcactttgtcctagagataccagcaaccaattagaaaagaaatggattaaacaagacttttaagttattgggcaggtgagaatgattacaaataaaaatacttcggtggcgaatgttaatttagttatggtgtgctttatcaaagaagttccagatgtttttatgaaatctcattctcttgggtcatttatatcgtgaaggaaaaagaaaatgaaactcattgaagcaattattgtataaaatgggcagaaaggtggaaagagcaaaagattttaatgtcaaagtcaaaagtaaattcttaatcttctttgtataaaactaaataatggctcagaaaacagacttgaatttttatgtgttgtgttatctatttatttgctttgcaccaatctggtttagtgctttggcatgttgttgtcgtcatggtcattggtcgtcgtattcatagcatagcagtgtggtgttctttttgaggactcatgagtttattgtatttctctttcatatttgtatttgaccaagacaaatatcttactgaaaggtatattctattttttttttttgcatttgaccttacagctcaatttattctccgtatgagtaaaatattctcagtagcaatttagatcttttataaatcaggtaacttgaaagataacagtcttttggttgaaattgatcacttaaacagtttctgcccaccgaatagtaatcttaggaaggtttggatgactggatttgtttctttctatagaagcttatgcttgagaagaaaattaatactttctaaaaataattttttaatatatttaaagtatagaaacaatgttagatttaaaatactttgtaaagagaaaagagtgtgtgggttttttgtttttaagttccttggagttttttggtcactaacaagtgcaaataaaatcctattacaaaaaaaggctttgtgtaacagttatctatttggcagattattcatataaacaactctgttaaagctttggctgtttatcacagatactgatgagctgcattatattaaaactgaatgtgttagtgatctgtatttaatgttctagtggctcctggtacagtccagaacaaaactacttttccctctagatataataaaatctcttaagtgagaatattggtataacagacatgtttctacctcatccttttcatttattgaaattttctgtgtaaatcatccttttatgtagaggatcctatatagatgtcccctttttgtgcagttttaatatgttaaatactcaattttaaacagattttcccaaaggtatgggcagtatcacaggagtgggtttggatattggcattagaaaaactattgtaaaatatgttcatgtttcacctgctcaaaaatataacatttcaggagataataaatctagaattgatgaagatattaaaacactgaggcatttagatttcaatttccaaagttcccagatttttaatattttaactttgtgaataagtttctagggattctcagtgcatgagattctgtaaccttaactttggagccctgggttctagagatgattgatcagtcataagctggcagagttgtcctgctttccaaggttataataccttcaaatactcattgctacaaaaatgatggcattctcatttcaagtttagatctgatcattcataaaacagcctaaacttaagagtttccacagtccataaagcatcaaaagccataaaataattcttttttccctattaaagaaaaagccaaaaatatttctgtattttagaataaacatttccagttccatttttaaaatattaacaacatgtaaatttaaatgcttttgtaactgataaaatgttcttttgcatatttccctaccatcctcctgcccttcttcctcaatttgctttacacccctaacattaacattctgtgaacaaatttttaagggttgttataatgtattctatttgtatcctacagtaatttatttgcattttaaaaggagtttgaatacagtgtggcaattttgacaaccagcaagctcatcaaagtaagattctacctgtaatcttatgatacaccaaatgcctgctctattctgcctaacacagacaaggatccatctttacagatggaaagaatagctgacatctagtagcacttactctttgagttccctgaactctatttctagtgtatgaatcactcataacccacttaaattcagattgctcaccaaagcgattaggaaaaaggtttttcctactgggtacaaagcataaggtatttcactcttgtagttgttgtgaataacctagtttctgtacataagctggctggtcagtgatttatatctaggataatgaagtatgtgtgactgcagcaacatatttaaacaaatgatgcacaatgttgtacaggaatattacctgtattaaataggagtaaaacattttcattcataggctgtctaaatatcaatggttaaattactgagttttgctttatttttactccagaagtatttgttgagttcctactacatgcgaggctcttgactgagataactaataagatccttataagatttttctattccagagtttggttgtttagctttgaattacccattctttaatacctaacttgacttctagtagttctttacttattagactcttcttctaaggataaacagaaaaagactgtgtcctagattttacttttgaataggcaggtgacaggaagctgaaaccagtggcttcaatgagatttaggtttcttgtggttttgaattttctatatgacatttctgttatcattgccatttgactaaggaactatgtttactggttttgtaatagtagcatctattcttttggaatctggactttgaacaattcgtttcacagagtcattgaacagccagttccttctctcttacttagaatttttccagggaatttttcacatggcaggataatggaagaaaagccatttgggtaactcttctgttacatttgtatccctccccccttggatccctacagataaattcttaccttctcttcctgctaattgaccagcagcaccctggattgctatcatccctttgtccaaagaaatggtgtagctgtattcaaagacctataaaatgttatgtgctatctattgctacctataaaaaatacctttttttctttttaaaatcaggttgttttagaataaataaaggaaaagtcaattaatggaaaaatttcaagaacagttcacataaaattttggtctattttaatttttttttttaccttttcaaatcacattttaaaataagcagttggagaaaatgtaaaatgaaaaatatgtaaagaatagttagcattaaacatcagatccaattgtaaacttacgtgagataatatggatttatatttattttctagtaaaataaaacttatatgattgcataattgattattgtatatgcaatacaaattaagttcaaaaatgaaagttgagctttttttgtcctttcaaatgtagggccagcatacaattttaagagctatttattataaaattcatggtgaatcactatgaaaattgatttttccttgagcttttaattacattatccatattcccttacgaagttttccaagtatagaagacctacttaatggagcagtaatcaaatgcaaacttaatttaatgatctcaaataaaaggttctacttttctggaaataagattaaaccagatattaaaattatgtatgattataaaagtaaagattaccattattgtaataattgaccaatttagtactttcaagttatttagttacattttctcagttctagtttggtgtggtaaagcattatttgaaaaggcagtataggaagaatacagatagtattcttcagtacagataataccgctgtacagtacagataatattactgctattacagaatcagcaagttgaatgcatgcttcagggaatagggaaatgaatgcggactttttctaactgatttagatggtctgtctgacctctctagaaaaatatgtgtgtatgtatattttgaaatatataaggaatgttaagtctttctcttcccctttttagccttagattgtaagcaaaagaaatcaaggtcaagatctggaagcaagaagaaaatgctaacattacctcatggtgctgacgaggtttacattctccgatgcaggtatatgcctatattgccaaatctgatcagtttcttcatactttgctttgaaacatattagctatttcatttgggatttttaatttgtggcagagtgcattctcaacaatcaagttataaatgaacttttggagataggcttaaaatcttaattcagctcacaatatccgtacttcaacaactaatgaatcaagttttttacattagccaatagtaatgtaaatctattatactgtgatttattaaagtagcttggccaggtgtggtggctcatgcctgtaattccagcactttgggtggccaagatgggtggatcacttgaggccaggagttcaagagcagcctggccaacatgatgaaacctcgtgtctactaaaaataccaaaattagccaggctttgtagcgggtgcctgtaatcccagctacttgggaggctgaggcaggagaattgcttgagcccaggaggcagaggttgcagtgggccgagatcgtgccactgcactccagcctgagcgacagagcaagactctgtctcagaaaaaagaaaaaaaaactggctttccttgtgtttatttggtttgtatggtttaattttgtttggtttgatgttttgttgtcttgagttctcgcttattgggaacacattttctctcccctcatagtcacgccttcttccgtactcacactcacacacaacacacatgaagaaacatagacacaatgccatttaaggaatgctaaactggggaagggtcttttctaaagaatgacatattttggagtaatagttgttgtttcaagtgaattaagatgtgtagatgttaattttaaaataataatgctcccacctatacaaagattactggagtttattatagctgttaataaacatatgaattgggagttttgatgttttattaaatcatttgactttagaaactttatcaattgctgtctttaaaatatgataaagtttattccttatgttttaggattttgtgtgaattagttttaaagaaagagaattggtcatgttaagagaattgttatctttctgtaggttttgtggcctagtctttcgaggacccttgtctgttcaggaagactggattaagcacttacaacgacatattgtaaacgctaatcttccacggactggagctggcatggtggaagtcacgtcactacttaaaaagcctgcctccattacagaaacttcattttctctactaatggccgaagcagcttcatagaaccaggaaaccttttaaatagccagtttgaattggatgtaaatttgaaattctttttttttaagccacattaaattatctgtttataaatactaaagcaggaaaatggggggaaagtgaattacagtgacatcagagcaaattgaatacttaaaacagtaagtagtctatatattttatatagggtggaagatgtgtttttaaggtttatgaagttttgttggttaactgtgttcactcagtaaaagagcagtacatgtaagcagccattaataaactgttgcacatggatacttatagacagacttattggacaattatgttttttgcagtgttaccagaatcaaggctctgtttattccccacaagacttgcatagaaaaataagatattatattttgtttgtatgtatttagtgttttgtataataccaagaaccgctgactaaatttactcaaattagggcattaaatatcatgtacttcatagtttgagactgttcactcaaatagggcagagtactattctatctagatgtgtaagtgttttttttaaaatcacatggaacggttttttttatactaaaaagtggagggagatttgtttaaacaagtatttctaaaagaaatatgtacatagttctggaaattatttgtggtaaggaaatattctttactccagttgcatttctcagacaataaagtggtgcatccatgctacctcctactttgtcaacaaagatgctatttaccctttacatttttgtatcataatagattttaaaaatctaatgttctttattgcaagacattcttttgttaacaggtttgtttctttttaatgttttacctaaaatttgacatgcttacaggacaggtttgcctcttactttatttaacattgtagaaatgtaattaataaacaatgctcactacacagtttagaatagacgttctcatttatattatcttccaaatttgatcagttagcaaaacttaatacaccaattaaaatatttctacatatgagaatgtttacaatttaaattttagaacttgttttggatgtgattatatgtacgaaaatcgtgtaacactatgctcatgctaagaaccgacataacagaattactgaaataaatgtgctgtgaggaatggaaaatatggtgcaggtgtcttggtcatgataaattgtgattctttttaaaaattttttccaaaaacaattaggtattttaatctgaaatcagattcctttacaaacaacaagtttttgtatgcaagcaccattttatttcatgtagtatggctaatactatagttgaaccaaggatatgcattgattctttgcttcgtatgtaaataaagttaaaaacagttaaaataaggagtattttggtagagtatatacatacctcactgccagtgaaattgctttcctatggtatatctccttaccagaaaaatctctaaataaaaaaaggtttaaagaaaattaaaatgtgaaa

SEQ ID NO: 6284 - DNA, 26018 bp, Homo sapiens
tctagactaaatgtgttaaatgggcttgccaacaatatggatgatttgaagataaacaccgatattactggtgctaaagaagaactcctagatgacaacaattttatctcagacaaagagagcggagttcataagccaaaagattgtcaaacatcatttcagaaaaataatacgttgactctgcctgaagaactgtcaaaggacaaatctgaaaacgccttaagtggaggccagtctagtctatttatacatgctggtgctcctactgtttctagtgaaaactttatcttgcctaaaggagctgctgttaatggaccagtttcacactcctccttaactaagacttccaatatgaataaaggcagtgtttcattaaccactggacagcctgtggatcagccaacaacagaatcttgttcaactttgaaggtagcagctgatcttcagctgtctacaccacagaaagcaagtcaacaccaagttttatttttgttatcagatgtagcacatgctaagaatcccacccattccaataaaaaactacctacctctgcttcagttggttgtgacattcagaattcagtagggagtaatataaagtcagatggcactttaataaatcaagtagaggtgggtgaggatggtgaagatttattggtgaaagatgattgtgtcaatacagtaacgggaatttcctcaggtacagatggatttaggtcagaaaatgatacaaactgggatccccaaaaagagttcattcaatttcttatgactaatgaggaaacagtagataaagctccacctcattctaaaataggtctagaaaaaaaaagaaagcgaaaaatggatgtaagcaagataactcgttataccgaggattgctttagtgattctaattgtgtacccaataaatcaaaaatgcaagaagtagactttctagaacaaaatgaagagctacaagcagtagactcacagaaatatgcattatcaaaagtgaagcctgaatcaactgatgaagacttagaatctgtggatgccttccaacatctaatttataacccagataagtgtggagaagagagttcacctgttcatactagcacttttctttcaaataccttaaaaaagaaatgtgaagagagtgattctgagtcacctgctactttcagtaccgaagagccatcattctacccctgtacaaagtgcaatgtgaattttagggagaagaagcacctccacaggcatatgatgtatcatttagatgggaatagtcactttcgccatcttaatgtcccaaggccatatgcttgtagagaatgtggacggacatttcgagatcgcaattcacttctaaaacatatgattattcaccaggagagaagacagaagttgatggaggaaattcgtgaattgaaagaacttcaggatgaaggaagaagtgcacgattacagtgtcctcagtgtgtgtttggtaccaattgccctaaaacatttgtgcaacatgctaaaacccatgaaaaagataaaaggtactactgctgtgaagagtgtaacttcatggcagtgacagaaaatgaattggaatgccatcgaggcattgcacatggggcagtggtaaaatgccctatggtcacttctgatattgcccagagaaaaacacaaaaaaagactttcatgaaagactctgtagtaggatcatccaaaaaatcagctacctacatatgtaagatgtgtccttttactacttcagccaaaagtgttttaaaaaagcacacggagtacttgcattcatcatcatgtgttgattcatttggtagtcctcttggacttgataaaagaaaaaatgacatccttgaagaacctgtagatagtgatagcactaaaacattaactaaacaacagtcaaccacatttccaaagaactctgctttaaaacaagatgtgaagcgaacatttggatcaacctcacaatcaagtagtttttcaaaaattcataagcggccacacagaatacagaaagctcggaaaagcattgcccaatcaggtgtaaacatgtgcaatcaaaacagctctcctcataagaatgttacaattaaaagcagcgttgaccaaaaacctaagtatttccatcaagcagcaaaagaaaagtctaatgccaaggcaaatagccactatttgtatagacacaaatatgaaaactataggatgatcaaaaaatcaggtgaatcatatcctgtgcatttcaaaaaagaagaagctagttcattaaattctttacacctgttttcatcatcaagtaattctcacaacaattttatttcagaccctcataagcctgacgccaaaaggcctgaaagcttcaaagatcacagacgtgtagctgtaaagagagtaattaaggaatctaagaaggaaagttctgttggaggggaagacttggatagctatccagattttttgcataaaatgactgttgtcgttttgcaaaaacttaattctgctgaaaagaaagatagttatgaaacagaagatgaaagttcctgggataatgttgagttaggagactacactacacaggccatagaagatgaaacctatagtgatattaatcaagagcatgtaaatttattccctttatttaagagcaaagtggaaggtcaggagcctggagaaaatgctactcttagttatgaccaaaacgatggcttttattttgaatactatgaagatactggaagtaacaactttttgcatgagatacatgatcctcagcatttagaaactgcagatgcttcattgtcaaagcatagttctgtttttcattggactgatttgtctcttgagaagaaatcgtgtccttactgcccagcaacatttgaaacaggtgttgggttatcaaatcatgtcagggggcatcttcacagagcaggattaagctatgaagcccgtcatgttgtatcaccagaacaaatagccacaagtgacaaaatgcagcatttcaaaagaactggcacaggaacacctgttaaacgagttagaaaaggtaagttctccatggggatgatttgggctgataggtctgtgttctaattctgaagatttaaaagttttttttgaatttagtctttattagaatcataattttatgtttcagaattaactcattttagggtggtcagtttatataagaaagtctgatattactcttaaaaatttttttctagctatagagaagtctgaaaccacttctgaacacacttgtcagctctgtggtggttggtttgatactaaaattggattatcaaatcatgttagaggccacttgaaaagacttggaaagacgaaatgggatgctcacaaatctccaatctgtgttctgaatgagatgatgcaaaatgaagaaaaatatgaaaaaatcttaaaggcattgaacagtcgtcgtattattcccagaccatttgtagctcaaaaacttgcatcaagtgatgactttatatctcaaaatgttatacctcttgaagcataccgtaatggcctaaagactgaagctctgtcagtgtctgcatcagaagaagaagggctgaatttcttaaatgaatatgatgaaacaaaaccagaactgcccagtgggaaaaagaatcagtctcttacactcatagaacttcttaaaaataaaaggatgggagaagaaaggaattctgctatttctcctcaaaagatccataatcagacagcaagaaagagattcgttcagaaatgcgttcttccattaaatgaggatagtccgttgatgtatcagccacaaaaaatggacttgactatgcactcaggtaagaggacgtttatgactatgctatacacagtttaaatgcagttcaattatgccttctttaatggaatctatgtggaaaatactttctcacaatcttcctgtttaagctgctttttttttttacagagcacagattggttattctactgtcatttctgtataactcatcaattgatgctcattagcactgagttctctgtgcctcttttcttggtctgaatgtaaggtgagaacaaaagcagaagaaaaccacacacacacacaataaaaacaacaaacaaaaagctgatctgtaaaaataaaacttgctctggctggaggatggttgtggatgggaggttgatgttcaaaagcatagcattattgaaaaggcatacctctgtcatatttttgccagttctccaaggtgatcatgttttcaagatttagctgttggtttttccactgcttaggtaaaacaaaacagactcttaaagctgaatggattggtgtctgttgtgattaacccaaagaaacatctccctctccaattcctcattgtattgcggaatagtttggttttggagaacagttgtgaacataaaacatatttgtttggggttttaggttttaagatagtgctctaatggaacaggacagatgatttagcttagtgctggtgcaccaatagttttttccttttgaaaggaatattttgtatgtattggcaaataatgtggcagataaagtagccaaactttattcagtattgccaagtgtggtttatacttttagactagaaaaattttaagtgttttttctagatttctttttgaaggttaatgttgaaggtttatgtaaatggtctcatgattagagctctaagttgaatgtgtcagaggtaatagttaatggattaataacgactaacattactgtaaagtaatgttgtttatttgctttggggcagacattgtgatatcccaaatagttgtaatgcagttttgatttaaggaaagataactttgtattgtaagtggtctggaaagcagtttatcttgtatgagcttctgtttaatccggctttttctttcgaataaagagtctctgaaagtcaatagctttcaatattttttcagaagggtaaaacgcagggaagatgtgttagctgtgttgaccaaggggtagtatacttcagagatggaaagcatatttgtggctatcacagtaatgctgaagaaaccagttgaaatgtgttgggggagtgaggattgtctgagaagttaggagtttcttattgtttgaacatgtttttcctgtgatgactaagatgttagcttgttgatcatttatttagcacaaagattttagcaaaaaactttaaatcattaactttcattattgattgcgcattcagagtaatgaacataaaataccctaaataaaatgttgtgtctaacagctgttcagtggtgtgttttaccaccttttctcccagccttcatcagaaagcctaatttagtattgagacttttacggttttgtgggtaaaacactttaattaccactttgtcaactagactttttaattctttttattggtaatgttgtaagctttgaaacttctcaacagaaccgtgttgttcaaatcacaggattgtattgtagtaggtttaagaaataatctgcgtaacacagaaatctgcaagaaagtaataataggtgtatatccagaggagctcaaaggttcaagtcactcctcgtctacctttccaaagagcatgagttgactctaaatactaactacaaactaataacagttaacttaatttcccctccttattttaagttaacctatttcattgaacgttttgaaaaccatctttattgtggtgcttttctacactctttaagctaagaaaatttcactttttgaagtgagaactggattatagttttcttttgaatgataggtatgcctgtgaagcttagaacatgtgtgcattgcaatacgacgtttacaagtgctgttagcctgtccaaccacttacgcgcttatgcacgaaagaagagtgctggacttttgactggtacaggtatgtttgaacagatatcacagcaagtctgtttgatacaatacactttttttttccccaccagactggtgttaattcagatcatatttatagctttctttggtaagctgcatttgagtctgaatacccattgaatttcagcaacttgtaaactgttagatgtaattctaagcaagttaatctttttcttttggctcttattgacttaatttgggggaaaaaaaattaacccaagaggtgtggaactttgagtctaccttaatcccatttattttttagaatactatttttgatttttaaattgattttagattccagtaaaacacctctctttatagttctagtcgggctcagtggtgtgcccctatagtcccagctactcatgaggctggcaggaggatcacttgagctcaagagttagcggctataatgtgctatgattgtgcctgtgaatagtcactgcactccagcctgggcaacatagcataaaaatattgtagttctagcttggggaaatcctttattagaaaaggaaattatagggaaatttcaaaatgtagacttgattaggaaactaagcaaactaatgaattttcattagtctatagattagatctttgaaggggtgagccttaataatggcttgtgttgacaagcgaatagatttttcttttaatacttcttaaatatattaaggattaataaatttagctatgcacataagtgttaacatgcacatttctgtgttatttttggttggttagcccaaccttgcagatacctcttaatactgctcatctgtgaaaattttattagcttacttatatgtaatacgcttcttataacctacaaaatgctttgcactttcatttgtagtcttttaagctaccctgcttcagcaaatctcatttccctcacatcttaaaatataccctctttttgacatagatctacataaattcttttgcctaaaattctttccaatcattttatttctcttgctcttttttagatcactgcctcctgctttcttctagttgttttcccagcttttttgttcttcctcatgtcctagaacttagatccaatatgttcttgctttcaaaaaaccacttatatttatactagtgtctttcttctgcttctttgcattcttccttaacttgatatacaaatgaccagggatgaatgttgacaatttatattaaaaagagaggagtggggtgagttttagtctactggattaggcctcctactctgagattataatttttatataccctcacctttatcaggcttggcaagtgattgcagacattagaggtggggaacaataaaaataagagactatacaagtaggaaatcattattgttaccatacttgctaacttttattgaacatttactatgtgtcaggcactatgctatgcaatttacatgcataacatttaatctttacaacagccatacaagttgtaggtactggaattctcttaacgttttataggaaactaggacttaaagaacttaatttgctcaaacttacacagttaataagtagcaaggttgtaattcaaatcagggctatcttacctaatctttgtttttaatcactattctctaccttacacaggcggtctatttttgaatttcttatttttaaaataagaaattgaaataaaaataagcaatggaaaattctaaaatgaaggtgggtttgtttatttatttatttattttgagacggagtctcgctctgtcacccagattggagtgcagtggcgcgatctcggctcactgcaacctccacctccctggttcaagcaattcccctgcctcagcctcccgagtagctgggattacagactcatgccatcatgcctggcaaatttttttgtatttttagtagagatggggttttaccatgttggacaggctggtctcgaactcctgacctcaggcagtctgcccgccttagcctcccaaagtgctgggattacagccgagagccaccgcacccagcctgaaggtgggtttaaaatggggactattctggtgaagactgaataaataagagtctaattaaaaagagcagagatccaagaagtgcttaggcctaaattagactttagaggagttaatgttccattctgattattcaagcagattatgcaaatatccaataaggcaagatatctccagtccagattttattagtccattaaaaaaatgcttttacttcatctgaaaattctgcaaaacacaggattaattacttataaataactggtagtaaatctccatttaccaagaatgcacttatgaagattatctaaaaaatcttcattatcagagagaaaagtaatgtaggatgactgggaatatgtttaggtcctgaagaataaaagagggtgttattttaaaaatatgattaagtactaccaaaatattagaagtactaggaaatagaaagcgtgtgtttggcagtcctaggcaaagaaaaggaaaatgagaaactgaagaaagcctagggtcttattttccacacccagtagccacttttgagaaactttaaaaactaatgcttctttttcttggaaattctgaaacattttttccctcattaaaaaaaatcttcttgatcagtagagctatacagatgtctttgctgcttattcatgccaactaagaagttttttttcaagctttattaacttttctgttttccagatagagaattctgtattgtatttacaaactccacatactgattatcccccatatcaatatcactgttataaagcagtgttcctaaaaacctatggccctagaaggttccacttggttattataagtgattcattaattcatatgagtaacaggcatcatttttcaagaacacatgatcttttaatgaataaaatgcaaattcatttttataaaatcttaccttagtatatcacaaaattggaacaatgtaaagggaaagtagataggaataaagcctccctaaccatgtccagtatgtgtatttctagtttaagcagtcttaattcatgtagattttaagttgtgtggtccactcttgaatacaaagcttagataccctcagactaaatggtaaaggcctgcttttggttacctgtgatagaataaactttcaagccttcttagaagccacagctcctggtcttttctgtgggaactggtgaccttttgagggaagaaaaatatttcttctaacttataatctcttcaagtatcctgaatacactgaaaaggatatccctcttcttcccaaaatacctgtttactggtaacttaaatacttctaatgtgatggttctcaatctttactggggtcaccgacatctttgagaatttcatgaaagctgtgggccccatcccagaaacatgcacttatttgttctcagataaaaatttttgtgtgtatagactttgcgtatctcctgaaggctatcatcaatttgtctgatggcaaattgagaaaggagagatgccagaataaaaggaaagtagaaacagaactaggaatcagaagccttaagaagttcttttttttttaagagcagaagatgcttaaaatgcaagaattgcataatagcaaaactaattgtggggtcattatcttccctaatatttgtaaaaggaaccgatgggggaaataggaaagatttagaattgaagatttggaagaggtgggcagacttgggagagttaaattgtcataaaagaataatttcacagattaaagttttgcccagaactgtcccagtttatcttctgttgggtaggttcaaataaattgtttaataatttttctgtgtcttcacttgtagataatttatgaagctgttttacttcctttccccgatcaatctttatcaaaatagactagaatcaaagggtttattttatatcctatattgtaaatttaaggcagacttcttattcaagagtttattctagttatttatggaatgcagtaatggtaggggtttttttttttttgagattttgttctctttaatgttttacatgctcatacagatttttttctggttaattttccatacagtttaatgagaacattatatagttttcattaaatattgaaattttataatgtagcttatattaattacttctggactttttattttactgattagctttttttgtgcctaatgttttaattaaatgatgtatttttatgctagccatattaagaacatagttctattaagttattaatggagtgactatacatactggtttaccttgttgtcacacctaagtactagtgcctcttttactctcataagtgtcctggattgaatgataaattaatcatcctggttattaaaattgctaaagcatttaaaattaaggtaaagcatattctatcaacctaatctgcaatcaggaaaaaaaatatattttgaggtcaaaataagagtgaatttcaacaggtagggaaagggaaatacagagtagagagaatgttgttaaaggaagtagatctgtcagatgaatgccacaatgcttttctatggtagatagcatgttgttatcttttgtaaagaagaaacaatgatggtagcagtcagcattttaattgagactttattttatatcttgaccacatgtacaaacttacattaatacaaacacacaattccttgtgtactcacctaaatgtactttaatattttcttttttattatattctttgttgtgaaaaattaatgctggtcatgagccagtaaattgatttgctacccacttaagaagtcactatcatagattgaagacactgccctaactgcctctttctcttaggggttggtactgaccaatggtagtagtatcttagatgtcataactcttctgtggcagcaggtgaattttctatactcattctatccacatttttctctctagatcacttttgtaaatcaaatgctaacctctgggacttaaagtaattggaaatttctagttactcatttaaaattaatgcaagaaaaatatttttatatttgggaggggcttcatttcattatcttcagaacaattttgtgtgtgtgtgtgtgagacggagtttcactctagttgcccaggctggagtgcaatggtgcagtctcggctcactgcaacctctgcctcccaggttcaagtgattctcctggctcagcctcctgagtagctgggattacaggcacacgccatcacgcccggctaattttgtatttttagtagagatggggtttctccatgttggtcaggctggtctcgaactcctgactttaggtgatccacccgcctgggcttcccaaagtgctgggattacaggcgtgagccactgcacccagcccagaacactttcttgatacgttttggaagtaaagcccaattgttgctattctacaacaaatgacttatccatcataattatttgacttttctgatgaggtcaataccactagtgcaatatattaacgtttttaaaaaatcaagtcagtgttttatttttcataccatctacttttaagtgtaatcgtagtaggtttcttttgcctgttttcagctttaatgatataattggccacacaggactgtaacaagtactaatgaacatatagcacagtatcaagtgctgaatgggtttgtaagccactagaaaagtcattcttatgttgtggaaagtgctatgggagcactttctgatgtgatagaaaaaatagtattgtgaaagcttcccaatgtgcattaaattatttgttcattcatgagtgtcactgtagtgtcttttaaaaataatatagtattgcatgtttgaaaaattgcatgttttcatagtggttcattcagactgaaagagtgtaagtagaaaattttgatcttcttattaagattaaactccaaatgagcaaacttgcttctgcttaaagcaaactccttgacaattcttccagactgggctgaggagggtatgtgaaaagtatgagacatgtctctgctgtcagagaaattaggaaaggattgttgacaacatacataaaactatcaaaaattgaaaactatgcaagatagtatacaactaaatggcatattggctttaagtgttgtaggagttcaggttgattattttagtctaagcctccttttgagggcagctgggaattgagattccttttttttctgatgcccttactgtttgtctcattgaattagagcttgtaaaaaacagaaaaaataaataaataaaagtagttcatgctggtatgcttcttgtgactttttaaatgcaagagaacaacaaaaccagcagccatacaaaattttattcattcaacaaaagtttgagttcttgtaccaagactgttcatcgctgagccagtaaagatactgcactccagctgcataaacataatataacccagtgggaaaagatcaagtatgccattacagaagggtttatatggtttcagccagaccctgaagttgaaggatgcagtagagttttaggaagacgagatgaagtgtagaatatttcaggcagagaagaacatagtgtggacacaaagggatgaaatttggacttcaagtgtcaggagtggaacttggagttcaagtgtcagaagatttggttacagatgtttggtaaaattgtagtgccagaaaggtggggttggtgctttgaatgcttggtaaaaaaaattaggaagtcattaaaggatgttttaaaaataaggaggccgggcgtggtggctcacacttgtaatcccattactttgggaggctgaggcaggcacatcacctgaggtcaggagcgtgagaccatcatggtcaacatggtgaaaccctgcctctactaaaaaaaaatacaaagaactagccaggcgtggtggtatgcgcctgtaatcccagctattcaggaggctgaggcaggaggattgcatgaacccagaagctggaggttgcagtgagccgagattgtgccattgcattccagcctgggcaacaagagcaaaactcctcaaaaaaaaaaaaaaaaatcagcccagtgtggtggtgcgcgcctgtaatctgagctactcaggaggctgaggcaggagaattgcttgaacctgggaggtgcaggttgcagtgagccaagattgcgccactgcactccagcctgggcgacagagtgagactccgtctcataaataaatacaaaaggaaaataggccaggtgccgtggctaacacctgtaatcccaagcactttgggaggccgaggcaggcggatcacctgaggtcaggagtttgagaccagcctggccaacatggtgaaactccgtctctactaaaaaatacgaaaaagtagccaggcgtggtggtgggcgcctgtaatcccagctactcaggaggctgaggcaggagaatcgcttaaacctgagaggtggagattgcagtgagctgagatcatgctgttgcactccagcctgggcaacagagcaagactccatctccaaagaaggaaggaaggaaggaaagaaggaagtgaaggagggaggaagagagggagggcagagagagagagaagaaaaataagggaatggtatggttaaacttatattttaaaaagcctttcatgagacagagaaaagatgggtctttatatttcttagctataacttatttctatagtattgttcttcattaagagcatatatgtgtatacatttatctgcacagtaacgtatcatttataagtgattagcaaggtaacgaattatctgagttgagtaaattctctaggtgactgaagaatagtcctttaactgttaataacttgatttttcctaaccattttggtggttattgctccaaaatgttgttcttatttttgccttgagtagcttggatataatttaatcgagtattttgggtaacccttatagatactctactaattgttttattattccagcaagaattaggctatttctccaccatacaaaaaaatgatcggctgattttttcactaattcaacaagcacttttttcacctccaactgtgctaagtatgcagagatacattggatcttacaatacagtagaagcacatatatgcataactgtaatacaagacaaattgttaagtgccattggagaggtatgcgtgaaatactgtggaatttcagagaaagaggaagacactttcagctagactaggaactcccaaggcttttggaattagcatttgaatggaccctgatgtatagctaactgaaatggaaatgggggtcggggtggggaagagaaatgcctgaaagagggagcaaggtggaacaatgtgggaagtttataggaaatactaggaagtaggaggtaagggaattgagttggactggtaaagtgagtcagatagatgacatagaacgctagtctaagatgttggaattaactttgtagtggggaactatttgaatgcagaatttgtgtaatgcttttgaaattgctttttaaataaaggatttggcagagaggaggaaaaattgcagggtagatcattttaagagtcctgtaccaggtcagtgacattaagaatgtaaaggaggggtactagatgtatgggtaatattatggaaataaaataagcaggatatggtagattagagttaagagatgactcaagattttaaatctgagtgggaggaggatggttataccagtacagttaatcaatctgctaccatgctgtctggtagaagggcaggcttcattacttctctgtcatttactagcaacacttcaacatccagctatccactataacaaagtatcaccttaaaagcaggagatctacaaatttggaaaagagagctttatttcttaggaagcttgaagcctgcaggcttggaagtgtatcctcagacagagaccaaaagcaagcccttcaaaggaggaagggtgagacaggaagttatgttgaatgggttggctaagtatacatattcaacagattataggaggagctatgaatattcatgagggggtgcacacaagcttagtgtgcacactccatgttacatacatcccatgttcactttgagttggagacctaacatttaatcatagtaaaattaaggtttacatgtcaaaaggtgaaacagagttcataggcatcctatgtgcagccttcatggaccagctagaaccagttggtgatctcttatcagtaaggaatgctggtcagttcaaaaccacaaaaacagagtggagtctggcttctgagttaggcaattggttgatatcagtggggagcaagtcttttgaaagggttggtttctttttaactcttaggaaggaaagttttatggtggttagtgagggaggggacctaacgagacttgctttacctcctgtcccatcatggctgggaactcaatttttaaggtttctctggggtcaccttggcaaagaggagggtgtccattcagtctgctgtagaacttagaattttatttttatttctcaaaagcaaataaccacacttgttgaatcagtaagtttgtttttaggagaatatagcctaagagttacaccattgtagcataaaatacttaaattttatgatgcttgttttttgctgctcattggtttcataaggaaggtgatctattttgactgacatcttgtttttcatgcaagtcttatctagtttcctagcattactattggtttaattatttactaagtttctgggttttgcttttttttttttaatatatgtttgggaatcttaaatatatctaattatatcttcagttataatgtttgtgtttgctatgatttttattctctaagccttaaataatgagattcagaaaatatcattaggtatagagtttattcaagcccaaagcttgaggatggccacctgggagcataggttcaagttgccctggatatacactgtgattagcagcagttacaagtgaatttttaagaaaaaaagcggtttctatgtttatttaccaagaatttacattaagataacgtaagctatcgattggctatacattgttctttgtatcacagatttcaggaacataaaaataatgggtgaggcatcaggtcaggaacataatgaatgcctagtttaaacaattgccctccccccagtggggggcatgagagtcaagtgactgaagtcccctactccagtctttctgggcctggtaaatcttgcatactgtgcatagctgactgctgagctgctttccttctctctaacatgaatttcttgaatgcggtttgtaatctggattaagatagaattagcccttataatataacaaggcatgtggttggccagagctaaattttaggtaatgttttaattgactttacggaaataataaaataacactcagactttctctattggaggttagggcaaaaggatggcttattggtaggtagttcctcacttactgcagaagtagaaaaaagtagaaaagtagaatttacttttttttttggtatgcctagggtttgaagaatgaggttaattcttgttatccaaggtttatgtatttaattgtagcttagctggaagttggctaaaacagaaaatatctgatcaataccatgtttggttatagtttgaattttggctggaattacacgtgtaaggctcttgagaactataaaaagccaaatcagatccattgcgaccatggatttgtgccatttagatttactaatatattgttgtgagtcctatctaatttaaggtaaatatgattgtattgaaaataatttaaaggaaattttaaagttaggtggttttcttagctaattttatgatcaagaacaatttaattattgttactacatctgaaatgatatatcagaaatacggagattttagagggcagggactgtgattattttgtttgtaattctcaacaaaagtgacttaaagcagattgtcattatgtactttaatgtttattctaatttcagatgtgtcttacaaaagtggttgatgttgatggctaatgcctattttgcttaataaaacggcatacaagtccaacttacttgaaaagaaatttttaaatgttattttcttacctgtcaccacaaagaagtaatacgtttgctatcctatcaactcagctgaccagtaagccacttgtagttgtgatattgttagcttttttagctttgggtaagctgataaaactagcctgcctctaattcctgtttataaaaatgtgtgatgaagtatcatatttatgtccagcttttccctttatttacatagagaatacttgctcaaaataccctttagtaatcatcccctctactttgaaatagtggagtcttctacaaattgtactttttctttaactgaatccattcaagtttaaataaaaggctacttccatttcctttaactctttctctgaactataaggctgttgactatacttaatttaacttcctactttgtaggacaaactcaagcaaccagtccttgtggactaataattgtaaaaccacaaacctaattcttaaagcaaaggaaatctgctttccaggtattttgcatttcatcctcttccaggtaaattattaaaacaagcaggaactagttaactttgccactgattgctgtgtgattgagttacttatctttttttcagtcattgggagtggaaactctaaaaattaatgaaagttatttagggtactaaaaaattacccaattttagagtgaaaatatcaagggaaaatgttgatgaaaataaatacttttgaggtgaccaaatgtgtatctttatacttcatgcctgactgtaagggaaacattgctttttataatgtaaactactcatcttgggaataatgaagtggtatagctaggagcaaagaactgatgttgataggagtaggggagtccttttcaattttaatactgtgtagagtggggatttaacaatttttctcagcctttttttttccttttttgaatgggccgagagattgaggggtggaactgaatgcagcctttctcatttatgatagtagatactcaggtcccagggctgctatttgcaaagtccaatgcaaaatgagttatgtggtagacctcgttcaaaaattaatagttgcaaggctgcaacagtagagcattaaactgagtgtggggctctccctatgtgactgtgtaagttggacacccatgaagctggtctcctaggcactttgtacagaaagaaagataaaagctgaataaatgaaactttggcttctcagcaattggctttctctaccccattcctgttttacacaagctagcatgtttttgttgttgttgttgttttctaaaaaaaggccctgattctttttcatttgaggccaaaggaaagaaaattatatttgcagtctttttatatgcttggggcttatgaaccttgaaggattagtgacaacagttataattgaatttattactaacacaggaacagaaaaccaatactgaatgttttcacttataagtaggggctaaacaacgagaacacatggacacaaagaagggagcaacagactggggcctaccttaagggtggagggtaggaggagggagataataaaaaaaactacctatcaggtactgtgcttattgcctgggtgatgaaatagtctgtacaccaactcccgtgacaatttacctatataacaaacctgcacgtgtacccctgaagttaaaataaaggtttaaaaaaaagagttgagtttatttttcttacacttgtgtatcctttggcatgtgtgcatcctcttcccacctcaccactgccagcacgacctccagcaccaactttttaatagtgatagaatgatgatttacctgttcgtgtcatgtttattcctactgtagttctgaatgagctcatagctaatattgtccaccaaacttaacacaggccaaccacttagagaagaaattttcttccctctcgtaggggtatactgtgcctcttactttgggtatagataccccagttgtttcactttgtcctagagataccagcaaccaattagaaaagaaatggattaaacaagacttttaagttattgggcaggtgagaatgattacaaataaaaatacttcggtggcgaatgttaatttagttatggtgtgctttatcaaagaagttccagatgtttttatgaaatctcattctcttgggtcatttatatcgtgaaggaaaaagaaaatgaaactcattgaagcaattattgtataaaatgggcagaaaggtggaaagagcaaaagattttaatgtcaaagtcaaaagtaaattcttaatcttctttgtataaaactaaataatggctcagaaaacagacttgaatttttatgtgttgtgttatctatttatttgctttgcaccaatctggtttagtgctttggcatgttgttgtcgtcatggtcattggtcgtcgtattcatagcatagcagtgtggtgttctttttgaggactcatgagtttattgtatttctctttcatatttgtatttgaccaagacaaatatcttactgaaaggtatattctattttttttttttgcatttgaccttacagctcaatttattctccgtatgagtaaaatattctcagtagcaatttagatcttttataaatcaggtaacttgaaagataacagtcttttggttgaaattgatcacttaaacagtttctgcccaccgaatagtaatcttaggaaggtttggatgactggatttgtttctttctatagaagcttatgcttgagaagaaaattaatactttctaaaaataattttttaatatatttaaagtatagaaacaatgttagatttaaaatactttgtaaagagaaaagagtgtgtgggttttttgtttttaagttccttggagttttttggtcactaacaagtgcaaataaaatcctattacaaaaaaaggctttgtgtaacagttatctatttggcagattattcatataaacaactctgttaaagctttggctgtttatcacagatactgatgagctgcattatattaaaactgaatgtgttagtgatctgtatttaatgttctagtggctcctggtacagtccagaacaaaactacttttccctctagatataataaaatctcttaagtgagaatattggtataacagacatgtttctacctcatccttttcatttattgaaattttctgtgtaaatcatccttttatgtagaggatcctatatagatgtcccctttttgtgcagttttaatatgttaaatactcaattttaaacagattttcccaaaggtatgggcagtatcacaggagtgggtttggatattggcattagaaaaactattgtaaaatatgttcatgtttcacctgctcaaaaatataacatttcaggagataataaatctagaattgatgaagatattaaaacactgaggcatttagatttcaatttccaaagttcccagatttttaatattttaactttgtgaataagtttctagggattctcagtgcatgagattctgtaaccttaactttggagccctgggttctagagatgattgatcagtcataagctggcagagttgtcctgctttccaaggttataataccttcaaatactcattgctacaaaaatgatggcattctcatttcaagtttagatctgatcattcataaaacagcctaaacttaagagtttccacagtccataaagcatcaaaagccataaaataattcttttttccctattaaagaaaaagccaaaaatatttctgtattttagaataaacatttccagttccatttttaaaatattaacaacatgtaaatttaaatgcttttgtaactgataaaatgttcttttgcatatttccctaccatcctcctgcccttcttcctcaatttgctttacacccctaacattaacattctgtgaacaaatttttaagggttgttataatgtattctatttgtatcctacagtaatttatttgcattttaaaaggagtttgaatacagtgtggcaattttgacaaccagcaagctcatcaaagtaagattctacctgtaatcttatgatacaccaaatgcctgctctattctgcctaacacagacaaggatccatctttacagatggaaagaatagctgacatctagtagcacttactctttgagttccctgaactctatttctagtgtatgaatcactcataacccacttaaattcagattgctcaccaaagcgattaggaaaaaggtttttcctactgggtacaaagcataaggtatttcactcttgtagttgttgtgaataacctagtttctgtacataagctggctggtcagtgatttatatctaggataatgaagtatgtgtgactgcagcaacatatttaaacaaatgatgcacaatgttgtacaggaatattacctgtattaaataggagtaaaacattttcattcataggctgtctaaatatcaatggttaaattactgagttttgctttatttttactccagaagtatttgttgagttcctactacatgcgaggctcttgactgagataactaataagatccttataagatttttctattccagagtttggttgtttagctttgaattacccattctttaatacctaacttgacttctagtagttctttacttattagactcttcttctaaggataaacagaaaaagactgtgtcctagattttacttttgaataggcaggtgacaggaagctgaaaccagtggcttcaatgagatttaggtttcttgtggttttgaattttctatatgacatttctgttatcattgccatttgactaaggaactatgtttactggttttgtaatagtagcatctattcttttggaatctggactttgaacaattcgtttcacagagtcattgaacagccagttccttctctcttacttagaatttttccagggaatttttcacatggcaggataatggaagaaaagccatttgggtaactcttctgttacatttgtatccctccccccttggatccctacagataaattcttaccttctcttcctgctaattgaccagcagcaccctggattgctatcatccctttgtccaaagaaatggtgtagctgtattcaaagacctataaaatgttatgtgctatctattgctacctataaaaaatacctttttttctttttaaaatcaggttgttttagaataaataaaggaaaagtcaattaatggaaaaatttcaagaacagttcacataaaattttggtctattttaatttttttttttaccttttcaaatcacattttaaaataagcagttggagaaaatgtaaaatgaaaaatatgtaaagaatagttagcattaaacatcagatccaattgtaaacttacgtgagataatatggatttatatttattttctagtaaaataaaacttatatgattgcataattgattattgtatatgcaatacaaattaagttcaaaaatgaaagttgagctttttttgtcctttcaaatgtagggccagcatacaattttaagagctatttattataaaattcatggtgaatcactatgaaaattgatttttccttgagcttttaattacattatccatattcccttacgaagttttccaagtatagaagacctacttaatggagcagtaatcaaatgcaaacttaatttaatgatctcaaataaaaggttctacttttctggaaataagattaaaccagatattaaaattatgtatgattataaaagtaaagattaccattattgtaataattgaccaatttagtactttcaagttatttagttacattttctcagttctagtttggtgtggtaaagcattatttgaaaaggcagtataggaagaatacagatagtattcttcagtacagataataccgctgtacagtacagataatattactgctattacagaatcagcaagttgaatgcatgcttcagggaatagggacatgaatgcggactttttctaactgacttagatggtctgtctgacctctctagaaaaatatgtgtgtatgtatattttgaaatatataaggaatgttaagtctttctcttcccctttttagccttagattgtaagcaaaagaaatcaaggtcaagatctggaagcaagaagaaaatgctaacattacctcatggtgctgacgaggtttacattctccgatgcaggtatatgcctatattgccaaatctgatcagtttcttcatactttgctttgaaacatattagctatttcatttgggatttttaatttgtggcagagtgcattctcaacaatcaagttataaatgaacttttggagataggcttaaaatcttaattcagctcacaatatccgtacttcaacaactaatgaatcaagttttttacattagccaatagtaatgtaaatctattatactgtgatttattaaagtagcttggccaggtgtggtggctcatgcctgtaattccagcactttgggtggccaagatgggtggatcacttgaggccaggagttcaagagcagcctggccaacatgatgaaacctcgtgtctactaaaaataccaaaattagccaggctttgtagcgggtgcctgtaatcccagctacttgggaggctgaggcaggagaattgcttgagcccaggaggcagaggttgcagtgggccgagatcgtgccactgcactccagcctgagcgacagagcaagactctgtctcagaaaaaagaaaaaaaaactggctttccttgtgtttatttggtttgtatggtttaattttgtttggtttgatgttttgttgtcttgagttctcgcttattgggaacacattttctctcccctcatagtcacgccttcttccgtactcacactcacacacaacacacatgaagaaacatagacacaatgccatttaaggaatgctaaactggggaagggtcttttctaaagaatgacatattttggagtaatagttgttgtttcaagtgaattaagatgtgtagatgttaattttaaaataataatgctcccacctatacaaagattactggagtttattatagctgttaataaacatatgaattgggagttttgatgttttattaaatcatttgactttagaaactttatcaattgctgtctttaaaatatgataaagtttattccttatgttttaggattttgtgtgaattagttttaaagaaagagaattggtcatgttaagagaattgttatctttctgtaggttttgtggcctagtctttcgaggacccttgtctgttcaggaagactggattaagcacttacaacgacatattgtaaacgctaatcttccacggactggagctggcatggtggaagtcacgtcactacttaaaaagcctgcctccattacagaaacttcattttctctactaatggccgaagcagcttcatagaaccaggaaaccttttaaatagccagtttgaattggatgtaaatttgaaattctttttttttaagccacattaaattatctgtttataaatactaaagcaggaaaatggggggaaagtgaattacagtgacatcagagcaaattgaatacttaaaacagtaagtagtctatatattttatatagggtggaagatgtgtttttaaggtttatgaagttttgttggttaactgtgttcactcagtaaaagagcagtacatgtaagcagccattaataaactgttgcacatggatacttatagacagacttattggacaattatgttttttgcagtgttaccagaatcaaggctctgtttattccccacaagacttgcatagaaaaataagatattatattttgtttgtatgtatttagtgttttgtataataccaagaaccgctgactaaatttactcaaattagggcattaaatatcatgtacttcatagtttgagactgttcactcaaatagggcagagtactattctatctagatgtgtaagtgttttttttaaaatcacatggaacggttttttttatactaaaaagtggagggagatttgtttaaacaagtatttctaaaagaaatatgtacatagttctggaaattatttgtggtaaggaaatattctttactccagttgcatttctcagacaataaagtggtgcatccatgctacctcctactttgtcaacaaagatgctatttaccctttacatttttgtatcataatagattttaaaaatctaatgttctttattgcaagacattcttttgttaacaggtttgtttctttttaatgttttacctaaaatttgacatgcttacaggacaggtttgcctcttactttatttaacattgtagaaatgtaattaataaacaatgctcactacacagtttagaatagacgttctcatttatattatcttccaaatttgatcagttagcaaaacttaatacaccaattaaaatatttctacatatgagaatgtttacaatttaaattttagaacttgttttggatgtgattatatgtacgaaaatcgtgtaacactatgctcatgctaagaaccgacataacagaattactgaaataaatgtgctgtgaggaatggaaaatatggtgcaggtgtcttggtcatgataaattgtgattctttttaaaaattttttccaaaaacaattaggtattttaatctgaaatcagattcctttacaaacaacaagtttttgtatgcaagcaccattttatttcatgtagtatggctaatactatagttgaaccaaggatatgcattgattctttgcttcgtatgtaaataaagttaaaaacagttaaaataaggagtattttggtagagtatatacatacctcactgccagtgaaattgctttcctatggtatatctccttaccagaaaaatctctaaataaaaaaaggtttaaagaaaattaaaatgtgaaa

SEQ ID NO: 6285 - DNA, 26006 bp, Homo sapiens
tgtgttaaatgggcttgccaacaatatggatgatttgaagataaacaccgatattactggtgctaaagaagaactcctagatgacaacaattttatctcagacaaagagagcggagttcataagccaaaagattgtcaaacatcatttcagaaaaataatacgttgactctgcctgaagaactgtcaaaggacaaatctgaaaacgccttaagtggaggccagtctagtctatttatacatgctggtgctcctactgtttctagtgaaaactttatcttgcctaaaggagctgctgttaatggaccagtttcacactcctccttaactaagacttccaatatgaataaaggcagtgtttcattaaccactggacagcctgtggatcagccaacaacagaatcttgttcaactttgaaggtagcagctgatcttcagctgtctacaccacagaaagcaagtcaacaccaagttttatttttgttatcagatgtagcacatgctaagaatcccacccattccaataaaaaactacctacctctgcttcagttggttgtgacattcagaattcagtagggagtaatataaagtcagatggcactttaataaatcaagtagaggtgggtgaggatggtgaagatttattggtgaaagatgattgtgtcaatacagtaacgggaatttcctcaggtacagatggatttaggtcagaaaatgatacaaactgggatccccaaaaagagttcattcaatttcttatgactaatgaggaaacagtagataaagctccacctcattctaaaataggtctagaaaaaaaaagaaagcgaaaaatggatgtaagcaagataactcgttataccgaggattgctttagtgattctaattgtgtacccaataaatcaaaaatgcaagaagtagactttctagaacaaaatgaagagctacaagcagtagactcacagaaatatgcattatcaaaagtgaagcctgaatcaactgatgaagacttagaatctgtggatgccttccaacatctaatttataacccagataagtgtggagaagagagttcacctgttcatactagcacttttctttcaaataccttaaaaaagaaatgtgaagagagtgattctgagtcacctgctactttcagtaccgaagagccatcattctacccctgtacaaagtgcaatgtgaattttagggagaagaagcacctccacaggcatatgatgtatcatttagatgggaatagtcactttcgccatcttaatgtcccaaggccatatgcttgtagagaatgtggacggacatttcgagatcgcaattcacttctaaaacatatgattattcaccaggagagaagacagaagttgatggaggaaattcgtgaattgaaagaacttcaggatgaaggaagaagtgcacgattacagtgtcctcagtgtgtgtttggtaccaattgccctaaaacatttgtgcaacatgctaaaacccatgaaaaagataaaaggtactactgctgtgaagagtgtaacttcatggcagtgacagaaaatgaattggaatgccatcgaggcattgcacatggggcagtggtaaaatgccctatggtcacttctgatattgcccagagaaaaacacaaaaaaagactttcatgaaagactctgtagtaggatcatccaaaaaatcagctacctacatatgtaagatgtgtccttttactacttcagccaaaagtgttttaaaaaagcacacggagtacttgcattcatcatcatgtgttgattcatttggtagtcctcttggacttgataaaagaaaaaatgacatccttgaagaacctgtagatagtgatagcactaaaacattaactaaacaacagtcaaccacatttccaaagaactctgctttaaaacaagatgtgaagcgaacatttggatcaacctcacaatcaagtagtttttcaaaaattcataagcggccacacagaatacagaaagctcggaaaagcattgcccaatcaggtgtaaacatgtgcaatcaaaacagctctcctcataagaatgttacaattaaaagcagcgttgaccaaaaacctaagtatttccatcaagcagcaaaagaaaagtctaatgccaaggcaaatagccactatttgtatagacacaaatatgaaaactataggatgatcaaaaaatcaggtgaatcatatcctgtgcatttcaaaaaagaagaagctagttcattaaattctttacacctgttttcatcatcaagtaattctcacaacaattttatttcagaccctcataagcctgacgccaaaaggcctgaaagcttcaaagatcacagacgtgtagctgtaaagagagtaattaaggaatctaagaaggaaagttctgttggaggggaagacttggatagctatccagattttttgcataaaatgactgttgtcgttttgcaaaaacttaattctgctgaaaagaaagatagttatgaaacagaagatgaaagttcctgggataatgttgagttaggagactacactacacaggccatagaagatgaaacctatagtgatattaatcaagagcatgtaaatttattccctttatttaagagcaaagtggaaggtcaggagcctggagaaaatgctactcttagttatgaccaaaacgatggcttttattttgaatactatgaagatactggaagtaacaactttttgcatgagatacatgatcctcagcatttagaaactgcagatgcttcattgtcaaagcatagttctgtttttcattggactgatttgtctcttgagaagaaatcgtgtccttactgcccagcaacatttgaaacaggtgttgggttatcaaatcatgtcagggggcatcttcacagagcaggattaagctatgaagcccgtcatgttgtatcaccagaacaaatagccacaagtgacaaaatgcagcatttcaaaagaactggcacaggaacacctgttaaacgagttagaaaaggtaagttctccatggggatgatttgggctgataggtctgtgttctaattctgaagatttaaaagttttttttgaatttagtctttattagaatcataattttatgtttcagaattaactcattttagggtggtcagtttatataagaaagtctgatattactcttaaaaatttttttctagctatagagaagtctgaaaccacttctgaacacacttgtcagctctgtggtggttggtttgatactaaaattggattatcaaatcatgttagaggccacttgaaaagacttggaaagacgaaatgggatgctcacaaatctccaatctgtgttctgaatgagatgatgcaaaatgaagaaaaatatgaaaaaatcttaaaggcattgaacagtcgtcgtattattcccagaccatttgtagctcaaaaacttgcatcaagtgatgactttatatctcaaaatgttatacctcttgaagcataccgtaatggcctaaagactgaagctctgtcagtgtctgcatcagaagaagaagggctgaatttcttaaatgaatatgatgaaacaaaaccagaactgcccagtgggaaaaagaatcagtctcttacactcatagaacttcttaaaaataaaaggatgggagaagaaaggaattctgctatttctcctcaaaagatccataatcagacagcaagaaagagattcgttcagaaatgcgttcttccattaaatgaggatagtccgttgatgtatcagccacaaaaaatggacttgactatgcactcaggtaagaggacgtttatgactatgctatacacagtttaaatgcagttcaattatgccttctttaatggaatctatgtggaaaatactttctcacaatcttcctgtttaagctgctttttttttttacagagcacagattggttattctactgtcatttctgtataactcatcaattgatgctcattagcactgagttctctgtgcctcttttcttggtctgaatgtaaggtgagaacaaaagcagaagaaaaccacacacacacacaataaaaacaacaaacaaaaagctgatctgtaaaaataaaacttgctctggctggaggatggttgtggatgggaggttgatgttcaaaagcatagcattattgaaaaggcatacctctgtcatatttttgccagttctccaaggtgatcatgttttcaagatttagctgttggtttttccactgcttaggtaaaacaaaacagactcttaaagctgaatggattggtgtctgttgtgattaacccaaagaaacatctccctctccaattcctcattgtattgcggaatagtttggttttggagaacagttgtgaacataaaacatatttgtttggggttttaggttttaagatagtgctctaatggaacaggacagatgatttagcttagtgctggtgcaccaatagtttttccttttgaaaggaatattttgtatgtattggcaaataatgtggcagataaagtagccaaactttattcagtattgccaagtgtggtttatacttttagactagaaaaattttaagtgttttttctagatttctttttgaaggttaatgttgaaggtttatgtaaatggtctcatgattagagctctaagttgaatgtgtcagaggtaatagttaatggattaataacgactaacattactgtaaagtaatgttgtttatttgctttggggcagacattgtgatatcccaaatagttgtaatgcagttttgatttaaggaaagataactttgtattgtaagtggtctggaaagcagtttatcttgtatgagcttctgtttaatccggctttttctttcgaataaagagtctctgaaagtcaatagctttcaatattttttcagaagggtaaaacgcagggaagatgtgttagctgtgttgaccaaggggtagtatacttcagagatggaaagcatatttgtggctatcacagtaatgctgaagaaaccagttgaaatgtgttgggggagtgaggattgtctgagaagttaggagtttcttattgtttgaacatgtttttcctgtgatgactaagatgttagcttgttgatcatttatttagcacaaagattttagcaaaaaactttaaatcattaactttcattattgattgcgcattcagagtaatgaacataaaataccctaaataaaatgttgtgtctaacagctgttcagtggtgtgttttaccaccttttctcccagccttcatcagaaagcctaatttagtattgagacttttacggttttgtgggtaaaacactttaattaccactttgtcaactagactttttaattctttttattggtaatgttgtaagctttgaaacttctcaacagaaccgtggtgttcaaatcacaggattgtattgtagtaggtttaagaaataatctgcgtaacacagaaatctgcaagaaagtaataataggtgtatatccagaggagctcaaaggttcaagtcactcctcgtctacctttccaaagagcatgagttgactctaaatactaactacaaactaataacagttaacttaatttcccctccttattttaagttaacctatttcattgaacgttttgaaaaccatctttattgtggtgcttttctacactctttaagctaagaaaatttcactttttgaagtgagaactggattatagttttcttttgaatgataggtatgcctgtgaagcttagaacatgtgtgcattgcaatacgacgtttacaagtgctgttagcctgtccaaccacttacgcgcttatgcacgaaagaagagtgctggacttttgactggtacaggtatgtttgaacagatatcacagcaagtctgtttgatacaatacactttttttttccccaccagactggtgttaattcagatcatatttatagctttctttggtaagctgcatttgagtctgaatacccattgaatttcagcaacttgtaaactgttagatgtaattctaagcaagttaatctttttcttttggctcttattgacttaatttgggggaaaaaaaattaacccaagaggtgtggaactttgagtctaccttaatcccatttcttttttagaatactatttttgatttttaaattgattttagattccagtaaaacacctctctttatagttctagtcaggctcagtggtgtgcccctatagtcccagctactcatgaggctggcaggaggatcacttgagctcaagagttagcggctataatgtgctatgattgtgcctgtgaatagtcactgcactccagcctgggcaacatagcataaaaatattgtagttctagcttggggaaatcctttattagaaaaggaaattatagggaaatttcaaaatgtagacttgattaggaaactaagcaaactaatgaattttcattagtctatagattagatctttgaaggggtgagccttaataatggcttgtgttgacaagcgaatagatttttcttttaatacttcttaaatatattaaggattaataaatttagctatgcacataagtgttaacatgcacatttctgtgttatttttggttggttagcccaaccttgcagatacctcttaatactgctcatctgtgaaaattttattagcttacttatatgtaatacgcttcttataacctacaaaatgctttgcactttcatttgtagtcttttaagctaccctgcttcagcaaatctcatttccctcacatcttaaaatataccctctttttgacatagatctacataaattcttttgcctaaaattctttccaatcattttatttctcttgctcttttttagatcactgcctcctgctttcttctagttgttttcccagcttttttgttcttcctcatgtcctagaacttagatccaatatgttcttgctttcaaaaaaccacttatatttatactagtgtctttcttctgcttctttgcattcttccttaacttgatatacaaatgaccagggatgaatgttgacaatttatattaaaaagagaggagtggggtgagttttagtctactggattaggcctcctactctgagattataatttttatataccctcacctttatcaggcttggcaagtgattgcagacattagaggtggggaacaataaaaataagagactatacaagtaggaaatcattattgttaccatacttgctaacttttattgaacatttactatgtgtcaggcactatgctatgcaatttacatgcataacatttaatctttacaacagccatacaagttgtaggtactggaattctcttaacgttttataggaaactaggacttaaagaacttaatttgctcaaacttacacagttaataagtagcaaggttgtaattcaaatcagggctatcttacctaatctttgtttttaatcactattctctaccttacacaggcggtctatttttgaatttcttatttttaaaataagaaattgaaataaaaataagcaatggaaaattcgaaaatgaaggtgggtttgtttatttatttatttattttgagacggagtctcgctctgtcacccagattggagtgcagtggcgcgatctcggctcactgcaacctccacctccctggttcaagcaattcccctgcctcagcctcccgagtagctgggattacagactcacgccatcatgcctggcaaatttttttgtatttttagtagagatggggttttaccatgttggacaggctggtctcgaactcctgacctcaggcagtctgcccgccttagcctcccaaagtgctgggattacagccgtgagccaccgcacccagcctgaaggtgggtttaaaatggggactattctggtgaagactgaataaataagagtctaattaaaaagagcagagatccaagaagtgcttaggcctaaattagactttagaggagttaatgttccattctgattattcaagcagattatgcaaatatccaataaggcaagatatctccagtccagattttattagtccattaaaaaaatgcttttacttcatctgaaaattctgcaaaacacaggattaattacttataaataactggtagtaaatctccatttaccaagaatgcacttatgaagattatctaaaaaatcttcattatcagagagaaaagtaatgtaggatgactgggaatatgtttaggtcctgaagaataaaagagggtgttattttaaaaatatgattaagtactaccaaaatattagaagtactaggaaatagaaagcgtgtgtttggcagtcctaggcaaagaaaaggaaaatgagaaactgaagaaagcctagggtcttattttccacacccagtagccacttttgagaaactttaaaaactaatgcttctttttcttggaaattctgaaacattttttccctcattaaaaaaaatcttcttgatcagtagagctatacagatgtctttgctgcttattcatgccaactaagaagttttttttcaagctttattaacttttctgttttccagatagagaattctgtattgtatttacaaactccacatactgattatcccccatatcaatatcactgttataaagcagtgttcctaaaaacctatggccctagaaggttccacttggttattataagtgattcattaattcatatgagtaacaggcatcatttttcaagaacacatgatcttttaatgaataaaatgcaaattcatttttataaaatcttaccttagtatatcacaaaattggaacaatgtaaagggaaagtagataggaataaagcctccctaaccatgtccagtatgtgtatttctagtttaagcagtcttaattcatgtagattttaagttgtgtggtccactcttgaatacaaagcttagataccctcagactaaatggtaaaggcctgcttttggttacctgtgatagaataaactttcaagccttcttagaagccacagctcctggtcttttctgtgggaactggtgaccttttgagggaagaaaaatatttcttctaacttataatctcttcaagtatcctgaatacactgaaaaggatatccctcttcttcccaaaatacctgtttactggtaacttaaatacttctaatgtgatggttctcaatctttactggggtcaccgacatctttgagaatttcatgaaagctgtgggccccatcccagaaacatgcacttatttgttctcagataaaaatttttgtgtgtatagactttgcgtatctcctgaaggctatcatcaatttgtctgatggcaaattgagaaaggagagatgccagaataaaaggaaagtagaaacagaactaggaatcagaagccttaagaagttcttttttttttaagagcagaagatgcttaaaatgcaagaattgcataatagcaaaactaattgtggggtcattatcttccctaatatttgtaaaaggaaccgatgggggaaataggaaagatttagaattgaagatttggaagaggtgggcagacttgggagagttaaattgtcataaaagaataatttcacagattaaagttttgcccagaactgtcccagtttatcttctgttgggtaggttcaaataaattgtttaataatttttctgtgtcttcacttgtagataatttatgaagctgttttacttcctttccccgatcaatctttatcaaaatagactagaatcaaagggtttattttatatcctatattgtaaatttaaggcagacttcttattcaagagtttattctagttatttatggaatgcagtaatggtaggggttttttttttttgagattttgttctctttaatgttttacatgctcatacagatttttttctggttaattttccatacagtttaatgagaacattatatagttttcattaaatattgaaattttataatgtagcttatattaattacttctggactttttattttactgattagctttttttgtgcctaatgttttaattaaatgatgtatttttatgctagccatattaagaacatagttctattaagttattaatggagtgactatacatactggtttaccttgttgtcacacctaagtactagtgcctcttttactctcataagtgtcctggattgaatgataaattaatcatcctggttattaaaattgctaaagcatttaaaattaaggtaaagcatattctatcaacctaatctgcaatcaggaaaaaaaatatattttgaggtcaaaataagagtgaatttcaacaggtagggaaagggaaatacagagtagagagaatgttgttaaaggaagtagatctgtcagatgaatgccacaatgcttttctatggtagatagcatgttgttatcttttgtaaagaagaaacaatgatggtagcagtcagcattttaattgagactttattttatatcttgaccacatgtacaaacttacattaatacaaacacacaattccttgtgtactcacctaaatgtactttaatattttcttttttattatattctttgttgtgaaaaattaatgctggtcatgagccagtaaattgatttgctacccacttaagaagtcactatcatagattgaagacactgccctaactgcctctttctcttaggggttggtactgaccaatggtagtagtatcttagatgtcataactcttctgtggcagcaggtgaattttctatactcattctatccacatttttctctctagatcacttttgtaaatcaaatgctaacctctgggacttaaagtaattggaaatttctagttactcatttaaaattaatgcaagaaaaatatttttatatttgggaggggcttcatttcattatcttcagaacaattttgtgtgtgtgtgtgtgagacggagtttcactctagttgcccaggctggagtgcaatggtgcagtctcggctcactgcaacctctgcctcccaggttcaagtgattctcctggctcagcctcctgagtagctgggattacaggcacacgccatcacgcccggctaattttgtatttttagtagagatggggtttctccatgttggtcaggctggtctcgaactcctgactttaggtgatccacccgcctgggcttcccaaagtgctgggattacaggcgtgagccactgcacccagcccagaacactttcttgatacgttttggaagtaaagcccaattgttgctattctacaacaaatgacttatccatcataattatttgacttttctgatgaggtcaataccactagtgcaatatattaacgtttttaaaaaatcaagtcagtgttttatttttcataccatctacttttaagtgtaatcgtagtaggtttcttttgcctgttttcagctttaatgatataattggccacacaggactgtaacaagtactaatgaacatatagcacagtatcaagtgctgaatgggtttgtaagccactagaaaagtcattcttatgttgtggaaagtgctatgggagcactttctgatgtgatagaaaaaatagtattgtgaaagcttcccaatgtgcattaaattatttgttcattcatgagtgtcactgtagtgtcttttaaaaataatatagtattgcatgtttgaaaaattgcatgttttcatagtggttcattcagactgaaagagtgtaagtagaaaattttgatcttcttattaagattaaactccaaatgagcaaacttgcttctgcttaaagcaaactccttgacaattcttccagactgggctgaggagggtatgtgaaaagtatgagacatgtctctgctgtcagagaaattaggaaaggattgttgacaacatacataaaactatcaaaaattgaaaactatgcaagatagtatacaactaaatggcatattggctttaagtgttgtaggagttcaggttgattattttagtctaagcctccttttgagggcagctgggaattgagattccttttttttctgatgcccttactgtttgtctcattgaattagagcttgtaaaaaacagaaaaaataaataaataaaagtagttcatgctggtatgcttcttgtgactttttaaatgcaagagaacaacaaaaccagcagccatacaaaattttattcattcaacaaaagtttgagttcttgtaccaagactgttcatcgctgagccagtaaagatactgcactccagctgcataaacataatataacccagtgggaaaagatcaagtatgccattacagaagggtttatatggtttcagccagaccctgaagttgaaggatgcagtagagttttaggaagacgagatgaagtgtagaatatttcaggcagagaagaacatagtgtggacacaaagggatgaaatttggacttcaagtgtcaggagtggaacttggagttcaagtgtcagaagatttggttacagatgtttggtaaaattgtagtgccagaaaggtggggttggtgctttgaatgcttggtaaaaaaaattaggaagtcattaaaggatgttttaaaaataaggaggccgggcgtggtggctcacacttgtaatcccattactttgggaggctgaggcaggcacatcacctgaggtcaggagcgtgagaccatcatggtcaacatggtgaaaccctgcctctactaaaaaaaaatacaaagaactagccaggcgtggtggtatgcgcctgtaatcccagctattcaggaggctgaggcaggaggattgcatgaacccagaagctggaggttgcagtgagccgagattgtgccattgcactccagcctgggcaacaagagcaaaactcctcaaaaaaaaaaaaaaaatcagcccagtgtggtggtgcgcgcctgtaatctgagctactcaggaggctgaggcaggagaattgcttgaacctgggatgtgcaggttgcagtgagccaagattgcgccactgcactccagcctgggcgacagagtgagactccgtctcataaataaatacaaaaggaaaataggccaggtgccgtggctaacacctgtaatcccaagcactttgggaggccgaggcaggcggatcacctgaggtcaggagtttgagaccagcctggccaacatggtgaaactccgtctctactaaaaaatacgaaaaagtagccaggcgtggtggtgggcgcctgtaatcccagctactcaggaggctgaggcaggagaatcgcttaaacctgagaggtggagattgcagtgagctgagatcatgctgttgcactccagcctgggcaacagagcaagactccatctccaaagaaggaaggaaggaaggaaagaaggaagtgaaggagggaggaagagagggagggcagagagagagagaagaaaaataagggaatggtatggttaaacttatattttaaaaagcctttcatgagacagagaaaagatgggtctttatatttcttagctataacttatttctatagtattgttcttcattaagagcatatatgtgtatacatttatctgcacagtaacgtatcatttataagtgattagcaaggtaacgaattatctgagttgagtaaattctctaggtgactgaagaatagtcctttaactgttaataacttgatttttcctaaccattttggtggttattgctccaaaatgttgttcttatttttgccttgagtagcttggatataatttaatcgagtattttgggtaacccttatagatactctactaattgttttattattccagcaagaattaggctatttctccaccatacaaaaaaatgatcggctgattttttcactaattcaacaagcacttttttcacctccaactgtgctaagtatgcagagatacattggatcttacaatacagtagaagcacatatatgcataactgtaatacaagacaaattgttaagtgccattggagaggtatgcgtgaaatactgtggaatttcagagaaagaggaagacactttcagctagactaggaactcccaaggcttttggaattagcatttgaatggaccctgatgtatagctaactgaaatggaaatgggggtcggggtggggaagagaaatgcctgaaagagggagcaaggtggaacaatgtgggaagtttataggaaatactaggaagtaggaggtaagggaattgagttggactggtaaagtgagtcagatagatgacatagaacgctagtctaagatgttggaattaactttgtagtggggaactatttgaatgcagaatttgtgtaatgcttttgaaattgctttttaaataaaggatttggcagagaggaggaaaaattgcagggtagatcattttaagagtcctgtaccaggtcagtgacattaagaatgtaaaggaggggtactagatgtatgggtaatattatggaaataaaataagcaggatatggtagattagagttaagagatgactcaagattttaaatctgagtgggaggaggatggttataccagtacagttaatcaatctgctaccatgctgtctggtagaagggcaggcttcattacttctctgtcatttactagcaacacttcaacatccagctatccactataacaaagtatcaccttaaaagcaggagatctacaaatttggaaaagagagctttatttcttaggaagcttgaagcctgcaggcttggaagtgtatcctcagacagagaccaaaagcaagcccttcaaaggaggaagggtgagacaggaagttatgttgaatgggttggctaagtatacatattcaacagattataggaggagctatgaatattcatgagggggtgcacacaagcttagtgtgcacactccatgttacatacatcccatgttcactttgagttggagacctaacatttaatcatagtaaaattaaggtttacatgtcaaaaggtgaaacagagttcataggcatcctatgtgcagccttcatggaccagctagaaccagttggtgatctcttatcagtaaggaatgctggtcagttcaaaaccacaaaaacagagtggagtctggcttctgagttaggcaattggttgatatcagtggggagcaagtcttttgaaagggttggtttctttttaactcttaggaaggaaagttttatggtggttagtgagggaggggacctaacgagacttgctttacctcctgtcccatcatggctgggaactcaatttttaaggtttctctggggtcaccttggcaaagaggagggtgtccattcagtctgctgtagaacttagaattttatttttatttctcaaaagcaaataaccacacttgttgaatcagtaagtttgtttttaggagaatatagcctaagagttacaccattgtagcataaaatacttaaattttatgatgcttgttttttgctgctcattggtttcataaggaaggtgatctattttgactgacatcttgtttttcatgcaagtcttatctagtttcctagcattactattggtttaattatttactaagtttctgggttttgcttttttttttttaatatatgtttgggaatcttaaatatatctaattatatcttcagttataatgtttgtgtttgctatgatttttattctctaagccttaaataatgagattcagaaaatatcattaggtatagagtttattcaagcccaaagcttgaggatggccacctgggagcataggttcaagttgccctggcatatacactgtgattagcagcagttacaagtgtatttttaagaaaaaaagcggtttctatgtttatttaccaagaatttacattaagataacgtaagctatcgattggctatacattgttctttgtatcacagatttcaggaacataaaaataatcgggtgaggcatcaggtcaggaacataatgaatgcctagtttaaacaattgccctccccgcagtgggggcatgagagtcaagtgactgaagtcccctactccagtctttctgggcctggtaaatcttgcatactgtgcatagctgactgctgagctgctttccttctctctaacatgaatttcttgaatgcggtttgtaatctggattaagatagaattagcccttataatataacaaggcatgtggttggccagagctaaattttaggtaatgttttaattgactttacggaaataataaaataacactcagactttctctattggaggttagggcaaaaggatggcttattggtaggtagttcctcacttactgcagaagtagaaaaaagtagaaaagtagaatttacttttttttttggtatgcctagggtttgaagaatgaggttaattcttgttatccaaggtttatgtatttaattgtagcttagctggaagttggctaaaacagaaaatatctgatcaataccatgtttggttatagtttgaattttggctggaattacacgtgtaaggctcttgagaactataaaaagccaaatcagatccattgcgaccatggatttgtgccatttagatttactaatatattgttgtgagtcctatctaatttaaggtaaatatgattgtattgaaaataatttaaaggaaattttaaagttaggtggttttcttagctaattttatgatcaagaacaatttaattattgttactacatctgaaatgatatatcagaaatacggagattttagagggcagggactgtgattattttgtttgtaattctcaacaaaagtgacttaaagcagattgtcattatgtactttaatgtttattctaatttcagatgtgtcttacaaaagtggttgatgttgatggctaatgcctattttgcttaataaaacggcatacaagtccaacttacttgaaaagaaatttttaaatgttattttcttacctgttaccacaaagaagtaatacgtttgctatcctatcaactcagctgaccagtaagccacttgtagttgtgatattgttagcttttttagctttgggtaagctgataaaactagcctgcctctaattcctgtttataaaaatgtgtgatgaagtatcatatttatgtccagcttttccctttatttacatagagaatacttgctcaaaataccctttagtaatcatcccctctactttgaaatagtggagtcttctacaaattgtactttttctttaactgaatccattcaagtttaaataaaaggctacttccatttcctttaactctttctctgaactataaggctgttgactatacttaatttaacttcctactttgtaggacaaactcaagcaaccagtccttgtggactaataattgtaaaaccacaaacctaattcttaaagcaaaggaaatctgctttccaggtattttgcatttcatcctcttccaggtaaattattaaaacaagcaggaactagttaactttgccactgattgctgtgtgattgagttacttatctttttttcagtcattgggagtggaaactctaaaaattagtgaaagttatttagggtactaaaaaattacccaattttagagtgaaaatatcaagggaaaatgttgatgaaaataaatacttttgaggtgaccaaatgtgtatctttatacttcatgcctgactgtaagggaaacattgctttttataatgtaaactactcatcttgggaataatgaagtggtatagctaggagcaaagaactgatgttgataggagtaggggagtccttttcaattttaatactgtgtagagtggggatttaacaatttttctcagcctttttttttccttttttgaatgggccgagagattgaggggtggaactgaatgcagcctttctcatttatgatagtagatactcaggtcccagggctgctatttgcaaagtccaatgcaaaatgagttatgtggtagacctcgttcaaaaattaatagtttcaaggctgcaacagtagagcattaaactgagtgtggggctctccctatgtgactgtgtaagttggacacccatgaagctggtctcctaggcactttgtacagaaagaaagataaaagctgaataaatgaaactttggcttctcagcaattggctttctctaccccattcctgttttacacaagctagcatgtttttgttgttgttgttgttttctaaaaaaaggccctgattctttttcatttgaggccaaaggaaagaaaattatatttgcagtctttttatatgcttggggcttatgaaccttgaaggattagtgacaacagttataattgaatttattactaacacaggaacagaaaaccaatactgaatgttttcacttataagtaggggctaaacaacgagaacacatggacacaaagaagggagcaacagactggggcctaccttaagggtggagggtaggaggagggagataataaaaaaaactacctatcaggtactgtgcttattgcctgggtgatgaaatagtctgtacaccaactcccgtgacaatttacctatataacaaacctgcacgtgtacccctgaagttaaaataaaggtttaaaaaaaagagttgagtttatttttcttacacttgtgtatcctttggcatgtgtgcatcctcttcccacctcaccactgccagcacgacctccagcaccaactttttaatagtgatagaatgatgatttacctgttcgtgtcatgtttattcctactgtagttctgaatgagctcatagctaatattgtccaccaaacttaacacaggccaaccacttagagaagaaattttcttccctctcgtaggggtatactgtgcctcttactttgggtatagataccccagttgtttcactttgtcctagagataccagcaaccaattagaaaagaaatggattaaacaagacttttaagttattgggcaggtgagaatgattacaaataaaaatacttaggtggcgaatgttaatttagttatggtgtgctttatcaaagaagttccagatgtttttatgaaatctcattctcttgggtcatttatatcgtgaaggaaaaagaaaatgaaactcattgaagcaattattgtataaaatgggcagaaaggtggaaagagcaaaagattttaatgtcaaagtcaaaagtaaattcttaatcttctttgtataaaactaaataatggctcagaaaacagacttgaatttttatgtgttgtgttatctatttatttgctttgcaccaatctggtttagtgctttggcatgttgttgtcgtcatggtcattggtcgtcgtattcatagcatagcagtgtggtgttctttttgaggactcatgagtttattgtatttctctttcatatttgtatttgaccaagacaaatatcttactgaaaggtatattctattttttttttttgcatttgaccttacagctcaatttattctccgtatgagtaaaatattctcagtagcaatttagatcttttataaatcaggtaacttgaaagataacagtcttttggttgaaattgatcacttaaacagtttctgcccaccgaatagtaatcttaggaaggtttggatgactggatttgtttctttctatagaagcttatgcttgagaagaaaattaatactttctaaaaataattttttaatatatttaaagtatagaaacaatgttagatttaaaatactttgtaaagagaaaagagtgtgtgggttttttgtttttaagttccttggagttttttggtcactaacaagtgcaaataaaatcctattacaaaaaaaggctttgtgtaacagttatctatttggcagattattcatataaacaactctgttaaagctttggctgtttatcacagatactgatgagctgcattatattaaaactgaatgtgttagtgatctgtatttaatgttctagtggctcctggtacagtccagaacaaaactacttttccctctagatataataaaatctcttaagtgagaatattggtataacagacatgtttctacctcatccttttcatttattgaaattttctgtgtaaatcatccttttatgtagaggatcctatatagatgtcccctttttgtgcagttttaatatgttaaatactcaattttaaacagattttcccaaaggtatgggcagtatcacaggagtgggtttggatattggcattagaaaaactattgtaaaatatgttcatgtttcacctgctcaaaaatataacatttcaggagataataaatctagaattgatgaagatattaaaacactgaggcatttagatttcaatttccaaagttcccagatttttaatattttaactttgtgaataagtttctagggattctcagtgcatgagattctgtaaccttaactttggagccctgggttctagagatgattgatcagtcataagctggcagagttgtcctgctttccaaggttataataccttcaaatactcattgctacaaaaatgatggcattctcatttcaagtttagatctgatcattcataaaacagcctaaacttaagagtttccacagtccataaagcatcaaaagccataaaataattcttttttccctattaaagaaaaagccaaaaatatttctgtattttagaataaacatttccagttccatttttaaaatattaacaacatgtaaatttaaatgcttttgtaactgataaaatgttcttttgcatatttccctaccatcctcctgcccttcttcctcaatttgctttacacccctaacattaacattctgtgaacaaatttttaagggttgttataatgtattctatttgtatcctacagtaatttatttgcattttaaaaggagtttgaatacagtgtggcaattttgacaaccagcaagctcatcaaagtaagattctacctgtaatcttatgatacaccaaatgcctgctctattctgcctaacacagacaaggatccatctttacagatggaaagaatagctgacatctagtagcacttactctttgagttccctgaactctatttctagtgtatgaatcactcataacccacttaaattcagattgctcaccaaagcgattaggaaaaaggtttttcctactgggtacaaagcataaggtatttcactcttgtagttgttgtgaataacctagtttctgtacataagctggctggtcagtgatttatatctaggataatgaagtatgtgtgactgcagcaacatatttaaacaaatgatgcacaatgttgtacaggaatattacctgtattaaataggagtaaaacattttcattcataggctgtctaaatatcaatggttaaattactgagttttgctttatttttactccagaagtatttgttgagttcctactacatgcgaggctcttgactgagataactaataagatccttataagatttttctattccagagtttggttgtttagctttgaattacccattctttaatacctaacttgacttctagtagttctttacttattagactcttcttctaaggataaacagaaaaagactgtgtcctagattttacttttgaataggcaggtgacaggaagctgaaaccagtggcttcaatgagatttaggtttcttgtggttttgaattttctatatgacatttctgttatcattgccatttgactaaggaactatgtttactggttttgtaatagtagcatctattcttttggaatctggactttgaacaattcgtttcacagagtcattgaacagccagttccttctctcttacttagaatttttccagggaatttttcacatggcaggataatggaagaaaagccatttgggtaactcttctgttacatttgtatccctccccccttggatccctacagataaattcttaccttctcttcctgctaattgaccagcagcaccctggattgctatcatccctttgtccaaagaaatggtgtagctgtattcaaagacctataaaatgttatgtgctatctattgctacctataaaaaatacctttttttctttttaaaatcaggttgttttagaataaataaaggaaaagtcaattaatggaaaaatttcaagaacagttcacataaaattttggtctattttaatttttttttttaccttttcaaatcacattttaaaataagcagttggagaaaatgtaaaatgaaaaatatgtaaagaatagttagcattaaacatcagatccaattgtaaacttacgtgagataatatggatttatatttattttctagtaaaataaaacttatatgattgcataattgattattgtatatgcaatacaaattaagttcaaaaatgaaagttgagctttttttgtcctttcaaatgtagggccagcatacaattttaagagctatttattataaaattcatggtgaatcactatgaaaattgatttttccttgagcttttaattacattatccatattcccttacgaagttttccaagtatagaagacctacttaatggagcagtaatcaaatgcaaacttaatttaatgatctcaaataaaaggttctacttttctggaaataagattaaaccagatattaaaattatgtatgattataaaagtaaagattaccattattgtaataattgaccaatttagtactttcaagttatttagttacattttctcagttctagtttggtgtggtaaagcattatttgaaaaggcagtataggaagaatacagatagtattcttcagtacagataataccgctgtacagtacagataatattactgctattacagaatcagcaagttgaatgcatgcttcagggaatagggaaatgaatgcggactttttctaactgatttagatggtctgtctgacctctctagaaaaatatgtgtgtatgtatattttgaaatatataaggaatgttaagtctttctcttcccctttttagccttagattgtaagcaaaagaaatcaaggtcaagatctggaagcaagaagaaaatgctaacattacctcatggtgctgacgaggtttacattctccgatgcaggtatatgcctatattgccaaatctgatcagtttcttcatactttgctttgaaacatattagctatttcatttgggatttttaatttgtggcagagtgcattctcaacaatcaagttataaatgaacttttggagataggcttaaaatcttaattcagctcacaatatccgtacttcaacaactaatgaatcaagttttttacattagccaatagtaatgtaaatctattatactgtgatttattaaagtagcttggccaggtgtggtggctcatgcctgtaattccagcactttgggtggccaagatgggtggatcacttgaggccaggagttcaagagcagcctggccaacatgatgaaacctcgtgtctactaaaaataccaaaattagccaggctttgtagcgggtgcctgtaatcccagctacttgggaggctgaggcaggagaattgcttgagcccaggaggcagaggttgcagtgggccgagatcgtgccactgcactccagcctgagcgacagagcaagactctgtctcagaaaaaagaaaaaaaaaactggctttccttgtgtttatttggtttgtatggtttaattttgtttggtttgatgttttgttgtcttgagttctcgcttattgggaacacattttctctcccctcatagtcacgccttcttccgtactcacactcacacacaacacacatgaagaaacatagacacaatgccatttaaggaatgctaaactggggaagggtcttttctaaagaatgacatattttggagtaatagttgttgtttcaagtgaattaagatgtgtagatgttaattttaaaataataatgctcccacctatacaaagattactggagtttattatagctgttaataaacatatgaattgggagttttgatgttttattaaatcatttgactttagaaactttatcaattgctgtctttaaaatatgataaagtttattccttatgttttaggattttgtgtgaattagttttaaagaaagagaattggtcatgttaagagaattgttatctttctgtaggttttgtggcctagtctttcgaggacccttgtctgttcaggaagactggattaagcacttacaacgacatattgtaaacgctaatcttccacggactggagctggcatggtggaagtcacgtcactacttaaaaagcctgcctccattacagaaacttcattttctctactaatggccgaagcagcttcatagaaccaggaaaccttttaaatagccagtttgaattggatgtaaatttgaaattctttttttttaagccacattaaattatctgtttataaatactaaagcaggaaaatggggggaaagtgaattacagtgacatcagagcaaattgaatacttaaaacagtaagtagtctatatattttatatagggtggaagatgtgtttttaaggtttatgaagttttgttggttaactgtgttcactcagtaaaagagcagtacatgtaagcagccattaataaactgttgcacatggatacttatagacagacttattggacaattatgttttttgcagtgttaccagaatcaaggctctgtttattccccacaagacttgcatagaaaaataagatattatattttgtttgtatgtatttagtgttttgtataataccaagaaccgctgactaaatttactcaaattagggcattaaatatcatgtacttcatagtttgagactgttcactcaaatagggcagagtactattctatctagatgtgtaagtgttttttttaaaatcacatggaacggttttttttatactaaaaagtggagggagatttgtttaaacaagtatttctaaaagaaatatgtacatagttctggaaattatttgtggtaaggaaatattctttactccagttgcatttctcagacaataaagtggtgcatccatgctacctcctactttgtcaacaaagatgctatttaccctttacatttttgtatcataatagattttaaaaatctaatgttctttattgcaagacattcttttgttaacaggtttgtttctttttaatgttttacctaaaatttgacatgcttacaggacaggtttgcctcttactttatttaacattgtagaaatgtaattaataaacaatgctcactacacagtttagaatagacgttctcatttatattatcttccaaatttgatcagttagcaaaacttaatacaccaattaaaatatttctacatatgagaatgtttacaatttaaattttagaacttgttttggatgtgattatatgtacgaaaatcgtgtaacactatgctcatgctaagaaccgacataacagaattactgaaataaatgtgctgtgaggaatggaaaatatggtgcaggtgtcttggtcatgataaattgtgattctttttaaaaattttttccaaaaacaattaggtattttaatctgaaatcagattcctttacaaacaacaagtttttgtatgcaagcaccattttatttcatgtagtatggctaatactatagttgaaccaaggatatgcattgattctttgcttcgtatgtaaataaagttaaaaacagttaaaataaggagtattttggtagagtatatacatacctcactgccagtgaaattgctttcctatggtatatctccttaccagaaaaatctctaaataaaaaaaggtttaaagaaaattaaaatgtgaaa

SEQ ID NO: 6286 - DNA, 344 bp, Homo sapiens
gatatgcaagcttctaatgctaaattagggctttaaaaaattccagtctgggccaggcgcagtggctcacgcctgtaatcccagcactttgggaggccgaggcgggcggatcgcgaagtcgggagatcgagaccatcctggctaacacagtgaaaccccgtctctactaaaaatacaaaaaaattagcaggcgttgctgcgtgcgcctctagtcccagctgctggggaggctgaggcaggagaatggcatgaacctgggaggtggagcttgcagtgagccaagatggtgccactgcactacagcctgggtgacagagcaagactccgtctcaaaaaaaaaaaaa

SEQ ID NO: 6287 - DNA, 174 bp, Homo sapiens
cacgccattctcctgcctcagcctctcgagtagctgggactacaggcacccaccaccacgcctggctaattttttttatttttagtagagacggggtatcaccatgttagccaggatggtgtcaatctcctgatcttgtaatccacccgcctcggcctcccaaagtgctgggat

SEQ ID NO: 6288 - DNA, 122 bp, Homo sapiens
attctcctgcctcagcctctcgagtagctgggactacaggcacccaccaccacgcctggctaattttttttatttttagtagagacggggtatcaccatgttagccaggatggtgtcaatct

SEQ ID NO: 6289 - DNA, 191 bp, Homo sapiens
attctcctgcctcagcctctcgagtagctgggactacaggcacccaccaccacgcctggctaattttttttatttttagtagagacggggtatcaccatgttagccaggatggtgtcaatctcctgaccttgtaatccacccgcctcggcctcccaaagtgctgggattacaggagtgagccaccgcgccc

SEQ ID NO: 6290 - DNA, 344 bp, Homo sapiens; identical to SEQ ID NO: 6286

SEQ ID NO: 6291 - DNA, 1429 bp, Homo sapiens
gtagagatggggtttcaccatgttggccagcctggtctcaaactcctgacctcaggtgatccacctgccttggcctcccaaagtgctgggattacaggcatgagccaccgcacctggccccatttaatttatataataaaacaagtgcaggctttacctgattttattctcaccttctgttttcttcttctgcattatctgtcaccatgggttggctcctccccactttctcttttttattcttttctctcttttttgccacactaaattgtaatgtgtttgaacaactctgacttaatattacctctaacaaaaagctggaaactgcacaaatattctttgtaggctctaaaagtaggttggctgaagtatgatacctgaactaattattcatttgtatgcttgttttataagtttgacttccatttcatgatttttttggtagctttatgttatttctgttttcagcaatgggtactttgacatctttctgtctctgaattgaattttcattttgcaacggaagagaagacaacatatttattccataatgaaagagctaatgaagtagaataactattaaattgagatgttttagcaaaaaaacaaaaacacaaaccccaaacgggttgttttgttttatttttttctaaaacatttctaacaattcccagtaggaatgggtggggccagccttcctcatttacaatccagctgcagtgagtcaagatcctagcttattctcccaattgtgtaataaatgcagaaaaatgatgtgacggtcactattctcaaatccattgcattgtattccacaaaggatatcctggcggaaggtggaaatatgggagggtaccatgatgtaaagaattgcctggaaatttccttgagtcatgcattttgtaaaaccttacattactgctatgagttaataagagacaggttaaaccactcccctcaggatagtaagactggttaaaaacactgctctcagcccacacagttatagctacagcctaggttaaatgattcctcatcctggtgtttttattctcatgtttaattacttctttaaagattaagattatatatagaaaaaataattgtggtatcagagaatacaggtataatttttcatatatcaggactatgtgatgatacttaagcaatagtgtacatacagtaatatatgtttaatatcgagtatggataatgaaggacttttctttttcaccttgtttataatgacattttatccagggtttgaatcaaataaattcatgttaactgtactattttattgaaatgttctagtcttattattggataattagaaataaacattttaaagtctttatgaataaataaggatgttttcctatgtatacaactgtactattttcattagtaataaacatcactttcaaga

SEQ ID NO: 6292 - DNA, 1229 bp, Homo sapiens
atatacactatccttttttatgggttatggataaaggggaatttatttgataaatagggctccattttcaccattgcaatggtttaagggtgtttgttcacgtttatgtggcctgaagtcccatttttatcactattattatttgagatggagtctcgctctgtcacccaggctggagtgcaatggggcgatctcagctcctggcaacctctgcctcctgggttcaagcgattctcgtgcttcagcttcctgagtagctggggttacagacacccaccaccatgcccagctaatttttatatttttagtagagatggggtttcaccgtcaccatgttggccagcctggtctcaaactcctgacctcaggtgatccacctgccttggcctcccaaagtgctgggattacaggcatgagccaccgcacctggccccatttaatttatataataaaacaagtgcaggctttacctgattttattctcaccttctgttttcttcttctgcattatctgtcaccatgggttggctcctccccactttctcttttttattcttttctctcttttttgccacactaaattgtaatgtgtttgaacaactctgacttaatattacctctaacaaaaagctggaaactgcacaaatattctttgtaggctctaaaagtaggttggctgaagtatgatacctgaactaattattcatttgtatgcttgttttataagtttgacttccatttcatgatttttttggtagctttatgttatttctgttttcagcaatgggtactttgacatctttctgtctctgaattgaattttcattttgcaacggaagagaagacaacatatttattccataatgaaagagctaatgaagtagaataactattaaattgagatgttttagcaaaaaaacaaaaacacaaaccccaaacgggttgttttgttttatttttttctaaaacatttctaacaattcccagtaggaatgggtggggccagccttcctcatttacaatccagctgcagtgagtcaagatcctagcttattctcccaattgtgtaataaatgcagaaaaatgatgtgacggtcacaattctcaaatccattgcattgtattccacaaaggatatcctggcggaaggtggaaatatgggagggtaccatgatgtaaagaattgcctggaaatttccttgagtcatgcattttgtaaaaccttacat

SEQ ID NO: 6293 - DNA, 11639 bp, Homo sapiens
gcgccaacccgctagcgcctgaatccggcgtgctgcccgctcgccgcccgccatggcccgcgcagccccgctgctcgccgcgttgaccgcgctcctcgccgccgccgctgctggcggagatgccccgccgggcaaaatcggtgcgggaaggacgcggtggggttcccagctggggagggccggcgggtaaagggttctcagttctcagctaggtggggtataggagggcggctgggtgagggaggggtcctcggaaaaggagctgggtggaggagaggcgccgaaggggacgcggcagggaaggtcctgatggggccggggcatggcatgtgaagagggccacctaggacggaaaagaggcctgggcaggactggccgcggatctcaccgggaggtccagggtcgctgagcatctgccatggtcctggctgttggctaggcgcccgggtgacagaggacagagaggctgggcgatggcattcacagaggttggttgagggctctctgtgtagcagacgtggtgctgtagttcctgctggggtagagccctcacagtacagggaagtccgtgctgagctgaggaagtacggtgcatgcagaggaggggcgcttcaccctgtctttgcggccctgggagggcttcctggaagtaacatctaagccaaaccacccccaggtcgataggagacagtcctggcagagacagaacactaggtccgctggagatttgctgacagaacggggaacttttaacaacagtctttttgtttattgtgtgtgtggtttccccaatactttattttgaaaatgttcagatgtacagcaagaattttatagtggtcatctgtatacccaccacctacattctgccattaactgctgctatacttgctgtgtcacataactatcacgcactgttctagacatccacgaatccagcctacattttgatgcatctccaaataaattgcagacatcaggacacctcactaaatacgtcatcgtgcatatcattgactagagtgtcatatgtgtttacagttgcttttttttttcctccctcaacaactgtcattttaactacatgactcgtgaagattttcaagtccctcacacgtgatattcccacaggcagagatcctgggcttcggggtgggaggacaaagactctattccgctaggccactctccatgcaccccagttggcaggagtgcctggaacatctgatagaagcatcacaaacttacagggtccagtgcagtgctaaagcttcttgtgtagcagaaccacagcccaggccatacagggttaagaagactgaagcatgccagaaaccagtttgagactgagagtttagtgcttgccaagaaaagagaatcctgaggctagagtagccagagaagccctcatggagaaggtggagtttgagccaggcattgaaggatgtggaagagttaggcaggcagtatccatgagtgaccatgtgttctctctctgtccttagatcgtttgaatacagtgtggctaggagtaagcagagtgtgctgtgggaatatgcagggcactccccgttttcttaggaacaggcaacaggacaggacatttctcaccattggggaaggagcaggacctccacccagcagaattgctgcattgtggcaacatggagctctctgcctccttcctcccagctggcccttctggccccatccaagagtcatccagagcaggacacttggcaatgcctcactgcccttcagctttctagattttcctcagccctctgacgggagcctctgttcatccttggtggtttggactctacccacaacaagaatgcggattcctgttaggatggcttaatgcttgtgcttctgcaggaccaaatctgagaacccccaagtggcatcaggaccctctaaacccacccatatagttccatatgctgcccttctcatgctggtctctttgcagagtgtgcgtgtcctctcactgacaaagctgattgtcctccagcatcttgcatgaaatcttatttccccaagaaggctgtgtccccacaccctctggggcagaattcactgcttccccttcaggactccctggaaccctgttgcacttcatcatgggttgtcgttgctaattgcgcaggagtctgtctgcccattccatgctggggtcctgggggacagaagcctgtttgatttttctttgtgccccaggacatcttactgtaaattagagaattggtgtcagttgtgttaaatgagctggttcacaatgaagtggtgtcttctgcttcctgatcttgggcagcttctaggccttaatatcaatttctctggaaaaatgggtaatttgggactctttgcacatggaggggatgggagcacactggttaaaataaaatccaaagctgtcttggaagtggctttgtaagtactgtgagaggaagtggtttattctttcaacacagaaaaaatacttcatgaactctactgtccaccaggatctggggacatagtgatcatgcactctctctctgtccttaaataacttgactacagtacggctaagcagagtgtgctgtgggaatatgcaggaggaacacctgactcacctcaggtgggtcagtcaagccaagttataggtgacatctgagggctgttgaagccagtgagacacagggtgatggcactcctatcaaagggaacagctcggacaaaggcccaggcatgagagaacaaagctatgtgcccacaataagagaagcctagacagacaagaaggtggcatcttgggagggtaaagcaggaaatggaataagtaagcagaggccagatcatagagaacctggtgctgtctgaggattgcctgtgacttctggcaggaactggtactctgtgggtccaaatgggtccagtaaggacaaattacaccagatttatttaattttcttttggggtaaggcctctggactgtctgatgagaagagagtggtgtttcagatacatggtgagcaaaaattataggtagggtggtagtccagttcagtagcttcatagctggtttatagttctctcacaggactgtttaatgattagtgtcaggtgaggcacagtggctaatgcctgtaattccagcacttggggaggccaaggcaggaggatcacttgagctcaggagttcaagaccagcctgggcaacatggtgaaacctcatctctacgaaaaatatgtcgggcatggtggcatgtgcctgtagtctcagctacttgggagcctgggaggtttgcagtgagccaatatcatgccactgcactccagcctgggcaacagagccagatcctgtttgaaaaaaaactgattgatgtctgtccaggcagtggtttcctagcagcacctccaagccctgtcccaggaaacattcttatcagtgacttcgatgagaatagtgatggcatgtaaaccaagtttacaaataacaggaaggcaggaggtacagtaaagacagtgtatgataagacccaaaaaagctgaaactttgtaacaagatttcaaactggaatatagtgtcctgtagggtaatgaacaatccatcatagagtacattccagtctcttttttttgagatggagttttgctcttgtttcccaggctggagtgcaatggcacgatctcagctcaccacaacctccgcctcccaggttcaagcgattctcctgcctcagcctcctgagtagctgggattgcaggcatgcgccaccacacccagctaattttgtatttttagtagagacagggtttcaccatgtttgtcaggctggtctcgaactcctgacttcaggtgatctgcccccgctaggcctcccaaagtgttgtgattacaggcgtgagccaccgcgcctggcagatacattccagtcttgacaaacacagacataaggatgatttaggtgtccgatagtaggttggactagaccaggagttggcatacttttttctgtaaatggccagagagtaaatattttaggcttttcaggccatgcagtctctgttgcagctactcaactctgcctaaaatgaaaacagtcatagacaataattgaaagaaagagcatcatggctgtgtttcaataaaactctagtttgcaaaaacaggcatctttctggatttggcctgcaggctgtagtttgccaatccctggattaaggcctggtttccaaacactgatcactgaacagaactggtcagtaacttttaacaattcatagggaaataagaaagttagaagcaaggtagtgagttttatataaaactaaatttattctctttaattggtcatcctgactttcagtattctttgctggtcttttgctgcaaaatacctttttctttatgaaacgaaagtatagtaggcagcagttttcaggtttgcctttgcttattaatagctctactgacaactcagtccgcagatttccttttggaaatgttataagcctaggaaatttaagcacctgggaaccaccagcgcaggaggatacaaagtgtgaactacagcctctcactctcatgttctgtctctcttcttccctacctcccgggcctgctgacagcggtggttggggctgggattgggggctctgctgtggcccattttctccagcagcactttggacctcgggtgcagatcgacgtgtacgagaagggaaccgtgggtggccgcttggccaccatctcagtcaacaagcagcactatgagagcggggctgcctccttccactccctgagcctgcacatgcaggacttcgtcaagctgctgggtgagtggtcagtcctggggctccagtgcccagcgccctggggctggtgacagcactgggcccttctcagacttcccagaccatcaaggccagaaggtcatgtggcccaatctcattttacagatggagcaacagaaacaagagaggggaaggaacttgcctgaggttacacagtgagttagttgcagagccgggattagaactcaggtttgactcctaggccagtttctttccctttcaatttgctgcctctaaataatcgtgattatatcaccttccacatgctagtgcttgccaggcaccttctgggtggtatgtaggcattacctcagctcccctctaccaacctgcaagatgagtgttatatctcctcttaaggcaactgaggctcagaaaatgtatagatttaagctaaagccattacagcgagaggtgggattcaaacccagcagcatctgtccaatacacgttctgtttgatgcagaaactctgcttctcagaagtgatgctacaggtggtcttacagatgtgcaaagtagcatagataccaagttattcactacagcattgtttgtaatagcaaaaggctgaaagtatcctagctgcctatccactaggacctggggttaaacaaattattgtataactacacaataggctgttcagcagtcagaatggggaagtctttatgcccagatacagggcaatctccaagatacagtgtattgttaaagtggagagcagtgtgtgtagtatgtgggggtggggaaggaacaagtcatagcagctctgtctgtgtttaggagtccactgctctgtcaagttgcagagtgcaggatggctgtaaggagctaggataacttccaagtgatctcagtgcccaaggccaccatctccaaacaagcccagtggctgtcaccccctggacattctgggataaaatctgaatttccctcacttgtggatcctcctggggaaaaaaaatgtaaaatgttacattattttcattttcatttttttattgacttggtagtccaaacattttcccagtgcatctgtttactgtttattaacaagcagcacaaatgaacaaaccatagcatttgtgtttcctttaatggaccagtccatttgcatcaagagggccccaagtcttggaggggacctgaggggctcctctttgtctctgcagggctgaggcaccggcgcgaggtggtgggcaggagcgccatcttcggcggggagcacttcatgctggaggagactgactggtacctgctgaacctcttccgcctctggtggcactatggcatcagcttcctgaggctgcagatgtgggtggaggaggtcatggagaagttcatgaggtagggctggcagagctgtggggatggcgttccaggggaaccgagaagaggtgggggaggaaccagcttgcctgtactttgtgaaaaaggaaaaggtccttgctgaattgagccagcacaattcagtgcaggctcagagcaagcccctggcatgaggaatggccgtatttggtccagtaatggtctccctagtattgtcacattgactctcattttcttaccctctactacactgatactaataaaagcatgggttgcaaactcagtcgcttaacaagggctgaactgggatgcgagtcagtgaatcagcaggtggaagagagcagaacaaggccccctctgaaggaggcagccagccctccaccgcagccatctgcagccagccgtgtacaatgcccacctcatgtggctagatctactcacttttcagaagaagctggaaatccagagtcgtgtgtgaaatcttttcagtttttcaacatttgcaaccaattcatcttgtaagccaaatgaaacacttctgcagggcagatgcagcctgtggaccactcatttgcaaactttgttgtcctcatttttccatctagaataaacacctttcttcaccactcctcctatccctgggctccagccccctccccatcacctttggtcccagatgtggagggcaagtggtctgttccctccctgttcaccaagctgtcactccacctttccccaaagtccctcctgaaggtgctccctgcttccagcctaaggcgcaggggctgctccccggaccccatcactgtctgcctcccttcagtgtcactcaagtgtggcctgtgccctcctgccctggttcctggcacttctccactcccttcccattctataactctgctgtttatagcacttcttccttatattctccagatgtcacccaaagcttatttccttacctctctttctgatatttttctcccttatcaattatatccagaccaataatgttgacttctacgttttatgggaaatgacttctccctctcagccctagtttcctcttcacttccagacccacatttcaactttctggacacctccatctcgtgtcctattgataaccaaactcaacatgtttacaaaagaagccctagaatgggcaacatttcaaaggccagccagtcaggaaatccatcgatggttccaatccatgctagtgagattgcatgagtgatagagcgacaggacatgagcctgggggtgagtgggagccctgtcagatgaagcgagaggagaggacaggctggactggcagagaaggtgacagtatcagcatgaagttgcagtgtgtcatcaggtcctagaagctgtggcagaaccgacactgttggagaaggagatgtgtcagcaggggtgggccgtagccccagctgggtgaagaaagggttatgaactatgacctcaggcagggagtggctcagagcagtgatacagttgttactcagcacagccgtgatgtgaagccaggcctagaaggattccataccttcacactccctttaggtgggacaggcccgccacagtcagagaacaggtgccagggaacatgaccagcctcttctgccaccactccatgtagaggaagtgatgggttcctggtgggcctcccaggcactataacccaggggcaggtggtcaggcaaaaagccttcctgcacaaggactccagctctatgtgtcttctaggatctataagtaccaggcccacggctatgccttctcgggtgtggaggagctgctctactcactgggggagtccacctttgttaacatgacccagcactctgtggctgagtccctgctgcaggtgggcgtcacgcagcgctttattgatgatgtcgtttctgctgtcctgcgggccagctatggccagtcagcagcgatgcccgcctttgcaggtaagcgtccaacccttggcctgcccacctgcccctcctccacccaaggtgctcagaatgggctgggggtccccataataacctcacttttatccagctcattgcagtcacataggcactctgctgccccatcctgcctgattctgggactggccatgagttggcaggagatagtatcaccccacttcacagacagtgaaagcaaggctcagatcacaggtccagtgtgtttctaccactcccaattgcttcataatcccttgcatgtgtgtaaatgttagagctgagataatgctctgctctctacactttggtttcaagaactgccctgttgaggcctttgagccactgtgagagcacctcctcttcccagctcttcacgggagtggctgggcctgtgtgtagctcactgtctgctagcacagaccacaggagtggagaatgtaggcttcacaagagcaggaatccttgtctattgttccctgatacattgcaaacacagaacagtgcctaagtcatactaggcactgggtatatttttgttaaataaatgaatgcaaaggtttacaataacaagcacctccctcgtaccctcgatactgttcatctggctctgcacatgctggctccttcgcagccttcaggccctgcctcagtgtcccctcagtgttccttgctcactctttcagtatcttgtgtgtctccttcatagcatttttgtgtagagatatatagaattcacataccatataattcgcccatttaaattgcacaattcagtggtttttagcacattcggagttctaaaaccatcaccacaatcaattttaggacatttttatcaccccagaaagaaacccccttgccctttagccctcacctccccaacaccccccggcctcccagccctgggcagctacagatctgctttctgtttctgtggatttgcctagtctgggcattctgcataaatagacctcacaatatgtggtctctgggagctggctctttcgttgagcacagtgtcttccccccatagcattgtgcactttgttgtacttacttgtatgtttgccatctccccatgcccatggttgggagagttttgctctggcagggaggcccagtcgaatagtactggactccccagccctcctgccccacggccctgacaacctatcagcacccacttcccgctttgcccaggagccatgtcactagccggggcccaaggcagcctgtggtctgtggaaggaggcaataagctggtttgttccggtttgctgaagctcaccaaggccaatgtgatccatgccacagtgacctctgtgaccctgcacagcacaggtgagtagacagggcgggagtgggcaggcatgccattcccagccagtggacagacacttctgcctcctttgtacctcagccctggtctgtgatccccctggggagtatttccgaaaaagcattgagaagccccaaccctgccaggtgacactagagggtgctgtttccccaattcagatgtcagccagaaagctgagacttccatcgacccagccttttctgttgaccgatgaggactttgaatgacatccttgcccacgctcccccaactggccagcggcggaagcagagcagaaactgagtctcctgactccatgccccttgcttcttctgcagccgcatcagcatggagaggccaggacccaccatttagacagccctgctgcaccctgagcaccagggtctcgttgtacctcaatgctggaccccagtagggagttcagtgggtagaagccaagggaaagttgacttttgtgctcttttctttccagaggggaaagccctgtaccaggtggcgtatgagaatgaggtaggcaacagctctgacttctatgacatcgtggtcatcgccacccccctgcacctggacaacagcagcagcaacttaacctttgcaggcttccacccgcccattgatgacgtgcagggctctttccagcccaccgtcgtctccttggtccacggctacctcaactcgtcctacttcggtttcccagaccctaagcttttcccctttgccaacatccttaccacagatttccccagcttcttctgcactctggacaacatctgccctgtcaacatctctgccagcttccggcgaaagcagccccaggaggcagctgtttggcgagtccagtcccccaagcccctctttcggacccagctaaagaccctgttccgttcctattactcagtgcagacagctgagtggcaggcccatcccctctatggctcccgccccacgctcccgaggtttgcactccatgaccagctcttctacctcaatgccctggagtgggcggccagctccgtggaggtgatggccgtggctgccaagaatgtggccttgctggcttacaaccgctggtaccaggacctagacaagattgatcaaaaagatttgatgcacaaggtcaagactgaactgtgagggctctagggagagcctgggaactttcatcccccactgaagatggatcatcccacagcagcccaggactgaataagccatgctcgcccaccaggcttctttctgacccctcatgtatcaagcatctccaggtgacctactgtctgcctatattaagggtccacacggcggctgctgcttttttttaagggggaaagtaagaaaagagaaggaaatccaagccagtatatttgttttatttattttttttaagaagaaaaaagttcatcttcacaaggtgcttcagacttggtttcttagctagaaaccagaagactacgggagggaatataaggcagagaactatgagtcttattttattactgtttttcactacctactcccacaatggacaatcaattgaggcaacctacaagaaaacatttacaaccagatggttacaaataaagtagaagggaagatcagaaaacctaagaaatgatcatagctcctggttactgtggacttgatggatttgaagtacctagttcagaactccctagtcaccatctccaagcctgtcaacatcactgcatattggaggagatgactgtggtaggacccaaggaagagatgtgtgcctgaatagtcgtcaccatatctccaagcttcctggcaaccagtgggaaaagaaacatgcgaggctgtaggaagagggaagctcttccttggcacctagaggaattagccattctcttccttatgcaaagattgaggaatgcaacaatataaagaagagaagtccccagatggtagagagcagtcatatcttacccctagatgttcatcccagcagaagaaagaagaaggtgttggggtaggattcttcagaggttagcctggtactttctcatcagacactagcttgaagtaagaggagaattatgcttttctttgctttttctacaaacccttaaaaatcacttgttttaaaaagaaagtaaaagcccttttcattccttt

SEQ ID NO: 6294 - DNA, 422 bp, Homo sapiens
catagtgcaatggtatgatcttggctcactgcagtcttcgcctcctgggttcaagcaattcttgtgcctcagcctcccaagtagccgggattacaggcacctgccaccatgcctggctagttttttgtattttttgtagagatggggtttcgccatgttggctgggctggtctcaaactcctagcccaggtggtccacccgccttggcctcccaaagtgctgggattatagatgtgagccaccgcccccagccaagtaagaaggcttttgatgaagtggtaggaaaccaaattcaaattgacttaagcaataaaaagtttttattagttatcatggctttaaagtccaggcatagagcactgtgcagtcttacagttccatgatttctctcatagtcaaagatggctgccaacagctcccag

SEQ ID NO: 6295 - DNA, 624 bp, Homo sapiens
agagacggggtctcagagtctcattatgttgcccaggctggtctcaaactgctggcctaagcgatcctcccgcctgaccttccaaaatgctgggattacaggcttgagccacccccagcctccggattttctttattctgaaactcatccctaactttattttctgccagaggaagtctgtttttcacagcgtgataaactagcaagtctgagctgctgctcttgtcttcttagaggatgaaaatgggagtttatccctccttttctcctttctgaaaagagagtagatgaaaccttcccccgccttttggtttttaggaagcagaaagcagagatattaactatataaaaactgcaaacacataaataacagcagtatagaaagcatagggcttgtgtcagcatatgaatgaggtagcgtcttaccaccctggccgcatgcttggtcagcaatttccagcacttgcagacactgcaaaaggcttcccttatctcataagatggttacaaccacctagaaaggtggagcaggattcttcgtctgtgttataatagaggaaacagacacagagaagatacagagctaataacgcagaggctggacataaccgaggtcttcaaagc

SEQ ID NO: 6296 - DNA, 683 bp, Homo sapiens
gctgctttgtaattagtttcaattttaaaaagatccatgttttcctgaatagaaaatatctttcgaaatgaatagaaaacatgacattattaggaattcaattctggtgttttccaatacattaagttttgcctttatattttatgtaacaaagtaatagctttacaaaacactctaggtaattttaagatcacatactatctattgtatctggaatttgcagagtaatgaggatgcccttgaaatggcttcatacctctccgatttgctggaatattttaatatttttcttctaatctgtttcttgagaggcactatgacctgggttgaaagcgtggctggatgtttccatttccagcgatttgattttgggcaagtggcttaacttgtggggatttcgatttcattatctttaacctgagggtctgaggctaaatggtttctaaggtttctttcaattctaaaaatctgtttccaaaaaataattcctcagttttccaagtggcataactcacccttatctatactaaagaaataatacatgacagtagattcatagctcatggcaatatggctttctaatctattgaagaacattatgtggctgaagaccttcagaaaatttgtgtcctttcatgatattgtagaattgtttatttgtgttttcttttttgagaagaaca

SEQ ID NO: 6297 - DNA, 304 bp, Homo sapiens
ttttatcttaattcttttttttgagacggagtctcgctctttcgcccaggctggagtgcagcggcgcgatctcggcttactgcaaactctgcctcctgggttcatgccattctcctgcctcagcctcccgagtagctgggactacaggtgcctgccaccacgcctggctatttttttgtatttttagtagagacggggtttcaccgtgttatccaggatggtctggatctcctgacctcgtgatccacccgcctcagcctcccaaagtactgggattacaggccgtgagccaccatgcccggcc

SEQ ID NO: 6298 - DNA, 279 bp, Homo sapiens
ttttttttttttttttgagacagagtcttgctctgttgcccacgctggagtgcagtggcacgatctcggctcactgcaagctctgcctcccaggttcacgccattttcctgcctcagcctcccgagtagctggactacaggcaactgccaccacgcccaactaattttttgtatttttagtagagatggagtttcaccgttttagccaggatggtctcgatctcctgacctcgtgatccgcctgcctcagcctctcaaagtgctgggattacaggcatg

SEQ ID NO: 6299 - DNA, 892 bp, Homo sapiens
aagaattttaaaggaaggtgggtgccctaaaaatacatttatgccaactggattgaatcaccttgaatcacaatgagtacaacaactgctaatgagctaacacttaatgagtaatgaccaggcaccagacactgttctagcactttatacttactgatttctttactcttcatgataaccctatgaggaaagtgcttttttgttaagctccattttcagctgaagaagctgaggcctggagaagttacatagctttctcatggtgtctccactatgaagtagctgagctgagatctcacccaaggccctgctgggttcaggccacactcttaagtactcacagctgcatcacactgaatatcatctccctgcactgccatttcatttgagcagggctttgcctgtcaagaacattcatatcttttgataaacagtgcattttttccctgatagtctgtatgggacagcctccttgtttgcatctgaaggacagggacttcaggacctcctgctgtggtcaccaaggaatcacattcaaacttctcagcaaggtgttatggtccttctcagtttgcctacgatccattgaggcaaaggtttccttctctcaatacaccctctgctttagccagggggacctcccactgtcctctctatgtgttctatttgttcctgactgttagtacccgcttgtgtggtttccatgatccttcttctgcctggaatgaggctcctcttgagtcctgagagcttcatttctgtctgtcttttgggctgtgccaaagcccctctgccttcgtggactccccactgattcattaccaattttcctctcctctgggctcttcttagattgcaaatggtgcctctggattgggtaccaagacttgca

SEQ ID NO: 6300 - DNA, 1502 bp, Homo sapiens
agcagagctcagcagagttttatttatccttttaatgtttttgtttaatgtgctccccaaatttcctttcatctagactatttgattggaaatatgtcagctatgatgatgactttctgggaagcgattcctgtcacccgctttcccctcctccccaccccacgtcctggggctttagagagcgattgggagttgaatgggtctgatttcggagttagctggctgagtccgcgctggagcgattgctggcatgtgacttctgacagccggaaatttgtaggtgtcccgcgagtttaaaacaagccatatggaagcacaagtgcttaaaaataatctcctgccagcccagtgacaagcctgtcccacccggggagaatgccccggagtggcgtgcgggtcagccagggtctgcgcctcgcagccactgtggaaggagcgcggccggtccaggacacaggagaccactttgtgacttcaatggcgaaggttgtgtgtcctcattttaatttttttccctacaagaattgttctttctccctctcctctccctcccattttctcttgcccagtttctccttttgttttttgttttttgttttcctgatgggcctgcagagggattaggtgggcgcttctggtgaacaccttcctaggtggccacaggacaggtgtaccccggactgggtttggaagcttcagggcgccacatggctgggtcctgaattaggcatttcccaactgtacactggtatccggactggtgtccctatatctttctgccttgtaagccgtggaccagtttttgttcagtattctgtttccagggatatttatagcagaaggaaggggactaaagtgcagtttggccccagaggatactgaagggcagattctgggggtattcagtgtgcatcttcagccgccttggagaaatttagagcatcccacagccacgcagatccaagctgtctttactcaaaagacaaacaatgaacaagacttttaaaggttggcatatttcaaattaattttacttgttttaatttagggttaaaacagagaaaaaggatttcttctgcccacctttttttttttaaatggaagaacaaagtacagcgattaagtctaattccacacaacatttaaaactgcttgatgtgaaggaaggcactggtatgatgtgaattccataaccttatgatggactccagaaaccattttcttccctatttaattttcagttcttttattgcaaattaatgctgctgaatttcaatgggcactaatgagactgctccttggtagattatttactgccttgctaataattacaaagtgaacctggtcaaatacagaggggatcgcatcttattcaaaattgttcatcatcccagtgataagtggtatcagtgtaatatgccctatcttacactttctgcattacatgatattcaaacactcttagaataataaaaaaagagacaaggaacttaaaaattaaa

SEQ ID NO: 6301 - DNA, 3551 bp, Homo sapiens
gtcgcccggcttcaccggacccgcaggctcccggggcagggccggggccagagctcgcgtgtcggcgggacatgcgctgcgtcgcctctaacctcgggctgtgctctttttccaggtggcccgccggtttctgagccttctgccctgcggggacacggtctgcaccctgcccgcggccacggaccatgaccatgaccctccacaccaaagcatctgggatggccctactgcatcagatccaagggaacgagctggagcccctgaaccgtccgcagctcaagatccccctggagcggcccctgggcgaggtgtacctggacagcagcaagcccgccgtgtacaactaccccgagggcgccgcctacgagttcaacgccgcggccgccgccaacgcgcaggtctacggtcagaccggcctcccctacggccccgggtctgaggctgcggcgttcggctccaacggcctggggggtttccccccactcaacagcgtgtctccgagcccgctgatgctactgcacccgccgccgcagctgtcgcctttcctgcagccccacggccagcaggtgccctactacctggagaacgagcccagcggctacacggtgcgcgaggccggcccgccggcattctacaggtacccgcgcccgcgccgcccgtcggggtggccgccgcgcccggcaggagggagggagggagggagggagaagggagagcctagggagctgcgggagccgcgggacgcgcgacccgagggtgcgcgcagggagcccggggcgcgcggcccagcccgggggttctgcgtgcagcccgcgctgcgttcagagtcaagttctctcgccgggcagctgaaaaaaacgtactctccacccacttaccgtccgtgcgagaggcagacccgaaagcccgggcttcctaacaaaacacacgttggaaaaccagacaaagcagcagttatttgtgggggaaaacacctccaggcaaataaacacggggcgctttgagtcacttgggaaggtctcgctcttggcatttaaagttgggggtgtttggagttagcagagctcagcagagttttatttatccttttaatgtttttgtttaatgtgctccccaaatttcctttcatctagactatttgattggaaatatgtcagctatgatgatgactttctgggaagcgattcctgtcacccgctttcccctcctccccaccccacgtcctggggctttagagagcgattgggagttgaatgggtctgatttcggagttagctggctgagtccgcgctggagcggattgctggcatgtgacttctgacagccggaaatttgtaggtgtcccgcgagtttaaaacaagccatatggaagcacaagtgcttaaaaataatctcctgccagcccagtgacaagcctgtcccacccggggagaatgccccggagtggcgtgcgggtcagccagggtctgcgcctcgcagccactgtggaaggagcgcggccggtccaggacacaggagaccactttgtgacttcaatggcgaaggttgtgtgtcctcattttaatttttttccctacaagaattgttctttctccctctcctctccctcccattttctcttgcccagtttctccttttgttttttgttttttgttttcctgatgggcctgcagagggattaggtgggcgcttctggtgaacaccttcctaggtggccacaggacaggtgtaccccggactgggtttggaagcttcagggcgccacatggctgggtcctgaattaggcatttcccaactgtacactggtatccggactggtgtccctatatctttctgccttgtaagccgtggaccagtttttgttcagtattctgtttccagggatatttatagcagaaggaaggggactaaagtgcagtttggccccagaggatactgaagggcagattctgggggtattcagtgtgcatcttcagccgccttggagaaatttagagcatcccacagccacgcagatccaagctgtctttactcaaaagacaaacaatgaacaaaacttttaaaggttggcatatttcaaattaattttacttgttttaatttagggttaaaacagagaaaaaggatttcttctgcccacctttttttttttaaatggaagaacaaagtacagcgattaagtctaattccacacaacatttaaaactgcttgatgtgaaggaaggcactggtatgatgtgaattccataaccttatgatggactccagaaaccattttcttccctatttaattttcagttcttttattgcaaattaatgctgctgaatttcaatgggcactaatgagactgctccttggtagattatttactgccttgctaataattacaaagtgaacctggtcaaatacagaggggatcgcatcttattcaaaattgttcatcatcccagtgataagtggtatcagtgtaatatgccctatcttacactttctgcattacatgatattcaaacactcttagaataataaaaaaagagacaaggaacttaaaaattaaaaaaaaaacttgcacaaatgggactctgtgtggaaattcagttttagaatgatttttcctgtgttttatttcccggattatctttcctcttttgttagaattctgcctgttattatccagcaaggaaaagaagcatctatgcaagttcttcatatggacagatattatttagtatttttcccctctcagtttttctgcttaaatgactctgggtataaaggaaaggattgattgggctcttttaggaaactttaagtttcttaagtagttctcaaaagttttggggctgaaagcagtgttttcaaactgcttgtcatgacccagagggtcatgaactcagtttagtgagtctagaatattttttaaaaggactaaaatggaaaggaatataatagaaaatatcagagtgcatggtatttcgtaaggataagttttgtttcctgaaaatctgttttaattatatgtgcttctgtgtgctgattgtgatgtaaaatgtatttcttactgtggattgaattcaaagaaaaaattagaaagctaatggcctaaaatattatatgttcagtagaaaacaaaaaattcaggcaagtggctggttgtttttacctatacaaatcaaaaggctattttgattgtcttcattttccccttataaattaggttggtgtctttagtcatttaggctaagttttactatctgattcttaacttttctattgtagaatggtgctgtcatgtggactgtcctcccgagtgtcccactggatgttcagagaatttatgtgaaggtcacgtcatttagcattgagatgctgtggttaccttcttccatttcttccataatatgcagccacatctatgtgtgaagaaatgtaatagataaaatttctctggacgcataataatgtgagaaagattgtcacatgtcccagcaaattgttattaatataaatttgttacttggcaagctgagattttgcaagatgttactc

SEQ ID NO: 6302 - DNA, 650 bp, Homo sapiens
aaataacagatttaagtggtcaggaattttgttataaatatagaatgatgattatatgaaatcttttcctgtgaaagtcaaatttaagtaaaatctttatcaccatctgcaacatttgtctgcagcctggcttaccaggttatcataaagaacatttattttacagatacattaaagaaagtcaaaaccctgattatgtgtaaacaattttacataaggaaatatatgaattttaattatatttttctaaaatccgtactcagcatgaaattaatacatcttaacccctccctgtgacttcattattatttttaatgtaactttagaagaacccagtagagagagcagcgtgctaagtgtgtttctttcttttccagacaactttgaatggagaggagcaaattagtcttttggtttaattctgtctcagtttgcttatctaaagaaaggaaaacagagtggctacacttgtttagaaccatatgcatactccagagaaagatgctctattaatccaaaaaatacagccacttgaaaccagccaaagcgaaagtgtaagggacttcatggaaaggaggcagttcaccaaagttattgaggggttttatattttaaactccgccagtgaattgacgtgtaatgtcacttac

SEQ ID NO: 6303 - DNA, 32134 bp, Homo sapiens
cgcacgagcctcaagatccaaggtgcgcgcgtcggcgtccgaggcggttggtgtcggagaatttgttaagcgggactccaggtgactctgggggaagcacgcgacgaaaagatgatgccggggtctcttctaacaccagaagggccctgatgatggctgcgcgcagctttcggagccggatgcgcgagggccccggaggcccggcggcctggcggccgggcgggcccagtttggggacaaggacggggctggccagggaggggctgggcctggcgggaaggcagcgctgccccggactcggcccgcgcggccctcccaggcccccgtgccctggatccaggcccgtgcgtcccgtcagtcccaggcgctgggaggcgtcatcaggaaatcattgggtttacattaatcggaatacttgttaaacgtttacccgtcagttgctgccggctgcttagtgcattagcttagaaagcagcagaaattctgcagttaagagccctgatttgtcccgagtttggaaaaccggccccaccgcctgcaggggcccacccacgtggctctcactgatggagaagaaggggagacctttaatggcactggaatcttagggtttggttttttttgttttgttttttgtttttgtgttttcacttgcaggaaaacttaaaatcaagttcaggcagccccatgccatcattattattaccaaggtagtttatgcccatctgtaaagaccaaaagaatattaataatgaccttctggccgggcgcggtggttcacacctgtaatcccagcactttgggaggccaaggcgggaggatcacttgagttcaggagttcgagaccaggctggttaacatggtgaaaccccatctctacataagagacaaaaattagccaggcatggtggcgagcgcctgtaatcccagctactcgggaggctaaggctggaggattgcttgagcccgggaggtgcaggctgcagtgagccgagattgtgtcattgcactccagcctgggtgacagagtgagactgtttcaaaaaagaataataacgactttctaaaaacatcagagtaatacatgaacaggatttaacaatcaaatggcaaagaaaggtttatatgaaaaggaattttcctgctttatcttttcccattcccagcctctttccctgaggtgactatacttaaccataataataataacctcttaatgcccccaatctctctttgatacaatttgattcttaaaatttcttcctattgcttcaccttattacaatgtcttagcaattcattataagtatttttctaaaagtcatggttattgtgtaatgtataaatgttatgaaactagcttggacatttttgtcatgaataatttctagctaatgttccttagctgtatttaatttaggcatctgtttttggtgaagtggttagaatttcgaatactgtgtttactggtcaacttcaagtgtaattatgatttcactttaggacatgtgggatttagaaaggagcattgaaaattatgaaattatgaattttttttggatgttaatccattgcaccaagcatgagctgtgcctagagatcagcggtataactttgttttgctttgtttcacaatttggtttaataagagtgatttcatttacctcaagtgctatttcttcataatgctgtgtaatgctaaagctttgattatgtgcgtgtgtggtttttttctccaataggcaattatttccagtcagagaaggaaaccagtgcctggcattctcaccatctttctacctaccatgatcaagtgcttgtcagttgaagtacaagccaaattgcgttctggtttggccataagctccttgggccaatgtgttgaggaacttgccctcaacagtattgatgctgaagcaaaatgtgtggctgtcagggtgaatatggaaaccttccaagttcaagtgatagacaatggatttgggatggggagtgatgatgtagagaaagtgggaaatcgttatttcaccagtaaatgccactcggtacaggacttggagaatccaaggttttatggtttccgaggagaggccttggcaaatattgctgacatggccagtgctgtggaaatttcgtccaagaaaaacaggacaatgaaaacttttgtgaaactgtttcagagtggaaaagccctgaaagcttgtgaagctgatgtgactagagcaagcgctgggactactgtaacagtgtataacctattttaccagcttcctgtaaggaggaaatgcatggaccctagactggagtttgagaaggttaggcagagaatagaagctctctcactcatgcacccttccatttctttctctttgagaaatgatgtttctggttccatggttcttcagctccctaaaaccaaagacgtatgttcccgattttgtcaaatttatggattgggaaagtcccaaaagctaagagaaataagttttaaatataaagagtttgagcttagtggctatatcagctctgaagcacattacaacaagaatatgcagtttttgtttgtgaacaaaagactagttttaaggacaaagctacataaactcattgactttttattaaggaaagaaagtattatatgcaagccaaagaatggtcccaccagtaggcaaatgaattcaagtcttcggcaccggtctaccccagaactctatggcatatatgtaattaatgtgcagtgccaattctgtgagtatgatgtgtgcatggagccagccaaaactctgattgaatttcagaactgggacactctcttgttttgcattcaggaaggagtgaaaatgtttttaaagcaagaaaaattatttgtggaattatcaggtgaggatattaaggaatttagtgaagataatggttttagtttatttgatgctactcttcagaagcgtgtgacttccgatgagaggagcaatttccaggaagcatgtaataatattttagattcctatgagatgtttaatttgcagtcaaaagctgtgaaaagaaaaactactgcagaaaacgtaaacacacagagttctagggattcagaagctaccagaaaaaatacaaatgatgcatttttgtacatttatgaatcaggtggtccaggccatagcaaaatgacagagccatctttacaaaacaaagacagctcttgctcagaatcaaagatgttagaacaagagacaattgtagcatcagaagctggagaaaatgagaaacataaaaaatctttcctggaacatagctctttagaaaatccgtgtggaaccagtttagaaatgtttttaagcccttttcagacaccatgtcactttgaggagagtgggcaggatctagaaatatggaaagaaagtactactgttaatggcatggctgccaacatcttgaaaaataatagaattcagaatcaaccaaagagatttaaagatgctactgaagtgggatgccagcctctgccttttgcaacaacattatggggagtacatagtgctcagacagagaaagagaaaaaaaaagaatctagcaattgtggaagaagaaatgtttttagttatgggcgagttaaattatgttccactggctttataactcatgtagtacaaaatgaaaaaactaaatcaactgaaacagaacattcatttaaaaattatgttagacctggtcccacacgtgcccaagaaacatttggaaatagaacacgtcattcagttgaaactccagacatcaaagatttagccagcactttaagtaaagaatctggtcaattgcccaacaaaaaaaattgcagaacgaatataagttatgggctagagaatgaacctacagcaacttatacaatgttttctgcttttcaggaaggtagcaaaaaatcacaaacagattgcatattatctgatacatccccctctttcccctggtatagacacgtttccaatgatagtaggaaaacagataaattaattggtttctccaaaccaatcgtccgtaagaagctaagcttgagttcacagctaggatctttagagaagtttaagaggcaatatgggaaggttgaaaatcctctggatacagaagtagaggaaagtaatggagtcactaccaatctcagtcttcaagttgaacctgacattctgctgaaggacaagaaccgcttagagaactctgatgtttgtaaaatcactactatggagcatagtgattcagatagtagttgtcaaccagcaagccacatccttaactcagagaagtttccattctccaaggatgaagattgtttagaacaacagatgcctagtttgagagaaagtcctatgaccctgaaggagttatctctctttaatagaaaacctttggaccttgagaagtcatctgaatcactagcctctaaattatccagactgaagggttccgaaagagaaactcaaacaatggggatgatgagtcgttttaatgaacttccaaattcagattccagtaggaaagacagcaagttgtgcagtgtgttaacacaagatttttgtatgttatttaacaacaagcatgaaaaaacagagaatggtgtcatcccaacatcagattctgccacacaggataattcctttaataaaaatagtaaaacacattctaacagcaatacaacagagaactgtgtgatatcagaaactcctttggtattgccctataataattctaaagttaccggtaaagattcagatgttcttatcagagcctcagaacaacagataggaagtcttgactctcccagtggaatgttaatgaatccggtagaagatgccacaggtgaccaaaatggaatttgttttcagagtgaggaatctaaagcaagagcttgttctgaaactgaagagtcaaacacgtgttgttcagattggcagcggcatttcgatgtagccctgggaagaatggtttatgtcaacaaaatgactggactcagcacattcattgccccaactgaggacattcaggctgcttgtactaaagacctgacaactgtggctgtggatgttgtacttgagaatggtaagtacgtagtattcatgtgcatgagatgcttttgaagatgggaatgctggacaaggagtaagatcctcattatccaaagagattatctcaacagatagaacattttgaagaccacttataaaacatatgttgtattttcatgctatatgaagatttgctacgtccaacactacttttttttttttttttttttgagacggagtcttgctctgtcacccaggctggagtgcagtggtgcgatctcagctcactgcaacctctgcccccctggttcaagcgattctcctgcctcagcctccagtgtagcttggattacaagagcatgccaccatgcccagctaaatttttttattttcagtagagacaggatttcactatgttggccaggctggtctcaaactcctagcctcaagtgatccacctgcctcggcctcccagagtgttgggattataggtgtgagcccgcacgcagcctctaggtccaacactatttaaatggagaagtacagtgaaaggatgtcagtgtgtgtatatgtgtctatgggtgtgtgtatgtgtaagaaagggggtgatgggtatatacctagagcaacaacaaaaggggtgagactgtccaattttaataaaaatgatactattaatagttgggaagatccacagtactttcctaccttgttttcccttcctgttaaatgcccagctttcctagaaatgtgtctttaaaggcacctgcagtgtcagcatggtattttactggaagtttctctgcgtggcttccaggttaagggccagaatgattctgtaatcatcctaggtttcccagtaaactctatggcttagtacagtactacatttatgagctttttctttctagaaagtaggacttgtccatgaattttcaaaatataggtcaagtatatactttcatgactatacttttcaaatgtactttattataatgcatatggtaaaatctccttgatgtgtttatggtacaagtagctgttattcaggaagacaataatatggcatttatttatttgagacagagtttcactcttgttgcccaggctggagtgtagtggcgtgatctcggctcactataacctccgcctcccaggttcaagggatcctcctgcctcagcctcccaagtagctgggattacaggcacccgctaccacacccggctaattttttgtgtttttgtagagacagggttttaccgtgttggccaggcttgtctcgatctcctgacctcaggtgatccacctgcctcggcctcccaaagtggtgggattataggcgtgagccactgcacccaaccaatatagcttttagatcgtaccacagggctacattagagcctgcactaggactctgggttctcggtccacatttaaagtgatattgctttggcagtgtgttgagagccagatgttgggaggtgataaagctgatttccatctggctataatcttggctttgcactaggaggataaacattacatctgtatccgtatttaaaattttgaatgctgcagaagaatggaacatgtataaatgtagttataagtcaatttctaatttctcctgacgatgaatatctctagcagaaagctgtggtttctttaaggttaaatgaaacctttacttttcagtgtttttctgtttttccttgtgaaaaaaaaatcactgtagtaacttcagtagtatttcatagtattttgtagtattcattaggagaaaactcatttctttcactgttgttcctgagactatcaagttgctcttaaagccactttatgtgcttttcaatctatgtggttttatgtcctgacttacactgaaggcttttcagaggtaaatctacagcactgacacctcatcttcctgaaatgcaactgcttctgatatggtgccaaaaaataactggattacattatactgtgagatggctgttgctaaaagaaagggggaaatcttagctgccatattcaacgtaaatatttcttccttttgaatatagacgtttaaaacactttaacctacttaacattctggattagcatacttttttatgaacttttgagggtcatgttaactgatagtttcctaatgaaaaatatttttggtatagaaagaagttccatgaacagatggctcctcagtaccctgctacctttctggaaatggctgatatacatcatgacatcaggacattgtcaaactttacataaaagtgttacatgaaataaattgttaaaagacaattttttttttttgagacggagtttcgctcttgttgcccaggctaaagtgaaatggtgcgatctcggctcactgcaacctccgccttctgagttcaagcgattctcctgcctcagcctcctgagtagctggaattacaggcatgcgccaccatgcctggctaattttgtatttttagtagagacgggatttctccatgttggtcaggctggtctcaaactcccaacctcaggtgatctgcccgcctcggcctcccaaagtgctgggattacaggcgtgagccaccagcctaaaagatacattttaatgtacagaaggaggatctataaaggtgattttgaggagtagtgtcaagtccccaagccttggtaattttttctttaaaatatattttatgcagttctttctattgtagttataaaccttatttcacttcattatcttaattttatcattcttaacctctccaggtttagtccaacagatttatctctcatgttttcctcctgttctaaagctgtcaaattcagcattgtttctaaaactcaaatctgattatccttcatggagaagaacagcatttgggccagatcttactagactctggagtttgaattgagaacctttcatttgtctacctgttcactttttcatgcagcatttgttgatcatccacactgtgctaggtgctgtcacgttgcaggttaactgactttgcttttaggagttcacagtactattagggaagatagctatctaaatataattgtattataatgagacaaatgttaggatagagacatacattggagataagagacataagttggagatttgtgaaggttgcaccaagttatggctgacaagtactgctgtatgtctaacacagggcttctctgggtaattttttgttgtaaggtttgtcctatgcattgtagaatatttagcagcatccgtggcctttatctgctagatgctagtagaacgtagaaccctttactcaagttgtgacaatgaaaagtgtctcaagccgggcacagtggctcacgcctgtaatcccaacactttgggaggccgaggcgggtggatcacaaggtcaagagtttgagaccagcccggccaatatggtgaaaccccatgtctactaaaaatacaaaaaaattagccgggtgtggtgacgcatgcctgtaatcccagctactcgggaggctgaggcaggagaattgcttgaacccgggaggcggaagttgcagtaagccgagatcacgccactgtactccagcccgggcgacagagcgagacgccgtctcaaaaaaaaaaaaaagggtctcaagacattgccaatgtcccctcgtgcaaaattgccccccagtgagaatcacagtgacctattctaggtcttcattctgtctggtatgaatagataatggaactaagcattaatatagagtcctatatggacagcataatttcattaaaggatttctgattctcaatctagtgtttagtagtctgctttatgtcttgactcagtttgtgcagaaagaggttttatgtgattaaatttttaaagagtttacttgtattttaagttcacatttctaggtttttctttcttatatttagggtctcagtacaggtgtcaaccttttagaagcgaccttgttcttcctttccttccgagagctcgagcagagaggactgtgatgagacaggataacagaggtaagggtggcagagagtgctggggcacacagtacacatcgtaccacctaactcaaaaaacaaagcaggcttgcattaagcttgatcagtgccagctgtgctgtactggaatcaggaattccccacggccctgtttaacagcggaactaattaattcagcgcatgcatttaggtcagaaattacttttccagacttgaggtcaatatttgctgattatgcatagtctgtggtgtcttgtgattaggggacatgtttcttatttttaaaaaggctggacttgcactccaagttgctgtagttttatgtaagcaaaactcttcaaaaaaagctacagacatcaattttgtgtgtatgtttaaaaatagataaggtatattttgcttaaaggcagtaaggctataaatttgagccatagcttctctgtcagtattccacaatatctcttttaacagtttggagaaaagctgtaatgccagaagatacagtcaccaactctagtttaaaaagtaacagatcaaaataatttagagatacagcaaacactgaacatttgtagaacatagaaacaatgtacgtgacctttggtcttgaggctatggctcaccaaacaggaaatgccattccctcctttccctgtggttctggatgccaactttacctgttcccttttgccctagatactgtggatgatactgttagtagcgaatcgcttcagtctttgttctcagaatgggacaatccagtatttgcccgttatccagaggtgggtctgtagcagtttttctttgccttttttttttcttcttcttcttcttattttttaaattttgagatggagttttgctcctgttgcccagactgaaatgcaatggcatgatctcggctcacgtaaccttcgcttcccaggttcaagcaattctcctgcctcagtctctcgagcagctgggattacaggcacctgccaccacgcccagcgaattttgtatttttagtagagatggggtttctccatattggtcaggctggtctctaactcccaacctcaggtgatctgcccgcctcagcctcccaaagtcctgggattacaggtgtgagccatcacgcccagcctttctttgcctgttattttaaactttgagtttcaagatgggtacagtggcatgcacttatagtctcagctactcaggaggctgaggtgggaggatcacttgaggccagaagttcaaggctatatagtgtgctgattgcacctgtgactagccactgcacactatagcctgggcaacacagtgagactccatctcttaaaaaataagtaaattagttaaaaataaaatttgaattttatttaagctgggtatgggcatgcaagactatattaatttgtaattatgattggaaactgggcatatttccaaattatgtatttggaaattactgtttaatgtagaggggagaaataaaatttatagcatttgggaactcaggcattttggattaaacatgtataatcaatgtgagaacagtgaatgtgtttaccactctcagaaaccctgacttgtagctttggcacagtattcagggtggtgataatgaaattgttatcattagataaagccacacatcttctactggaggaacagttcctcattggccccgcatggatgttctctcctcagtgtattttcacagaatgtactgtgcatgttataaacagggtgtataatagatgagcatttgtttaccagttctttcctcaagatatcatttgaggacttgatcatggaacatagacaaattgttgttgtgaaacaattttttttgttttgtcagtaattttgtttataagcaaaaatttttatgtaagactcattattcataaattcttttgaatttttttttttttttttttttttttttttttttttgtgacagagtcttgctgtgtcgcccaggctgaagtgcagtggcgtgatctcagctcactgcaagctccgcctcccgggttcacaccattctcctgcctcagtctcccaagtagctgggactaaaggcgcctgccgccacgcccagctaattttttgtattttttagtagagatggggtttcaccatgttagccaggatggtctcgatctcctgacctcgtgatctgcccgcctcagcctcccaaagtgctgagattacaggtgtgagccaccacgcccggccgattcttttgaatttctataaattccctgaattaaacccacctctagtaggctaaataaaaatgaatgcttttaaagcactctgatatctttggtaaaacaattctgacacaaaaattaaaatttcaattatattttgctgagtctttctaggttgctgttgatgtaagcagtggccaggctgagagcttagcagttaaaattcacaacatcttgtatccctatcgtttcaccaaaggaatgattcattcaatgcaggtaaaagattaacttcaaaatctcataaatatatatatatatatatatatatatatatatatatggcctaactcttctaaaatttgatttatttaatgatatagaccaccttggtcaaggcacgtgtgtgtgtgtgtgtgtgtgtgtgtgttcttactagaacttttatcatcagaagaaaaagcaagggattaattataattacaaagaaagaaatatctttagtagtgtaagtaggtttggagggaatgaattatggattcaggctgacagtttcaaggattctcaaggttctcctgcagaagattatatattgactttatatttggcaataatttataaatcaaagtcctttagtgaccttgtccttaagtgtgcaacagtgcccttttagaaattaccttctattgtgtgagcctacacaggtttgggaaagcccatattgagaagtcatttcacaaaagggaccctttgtctgatctgcttttctattttgccttgtgtttaccaccatggctgtcttattccctttgttttcagtacggaaacaaattaggaggctaacaaatttgggtaaactcctaacctggcattgacctggtaccagagcaggcaagcagttgatccagaaatagaccctggggcagtggtataggctcgggggtattggagagcctcaagtacctagacagagaggaaccaccaaggtctaaagccaccagtggcttttaacttacttctttaatagactagcagccgggcgcgctggctcacgcctgtaatcccagcactttgggaggccgaggtgggtggatcatgaggtcaggagttcgagaccatcctggctaacacggtgaaaccccgtctctactaaaaatacaaaaaattagctgggcgtggtggcgggcacctgtactcccagctactcgggaggctgaggcaggagaatggcatggaggcaggagaatggcatgaacccaggaggcagagcttgcagtgagccgagatcacaccattgcactccagcctgggtgacaaagtgagactccgtctcaaaaaaaaaaaaattaaaaataaataaaaataaaaatagactagtttctccataatcgttttccttgctttcatataaattttaaaaatttatttcagcctgtatgttagcaatctctggtcacattacctattctcaagagtcactctgttgggaacatctcaggccttctctaaagtattgctagcacaccactctgagacgtgggagtctgtcttcccctgtcgcctccctccccttacatcttctgatcaactccacctgcccattctttcatccttcctagtgactttttctggttcatcagaaccttacccagtctcaaagaaaggagtgtgataaggcaaacaactctaaataaaatacagttctgtatctttctatgcaaataagcctttgttaatttttatttagtgttgtaccacttatttgaatgtctgacaggttctccagcaagtagataacaagtttattgcctgtttgatgagcactaagactgaagagaatggcgaggcaggtaagaatggagtttagcctgaatgattaaccagctggtcttcttgtaacctttttttaatgattatttttggtatataatatagtttcaatgatttggatggattagggaaagccaatctaaaactaagaatattatgaaggctgggtgcggtggctcacacctgtaatcccaacactttgggaggtgaggcaggtggatggcttgaggccaggagttcaggaccagcctgagcaacatggcaaaaccccgtctctactaaaaatacaaaaattagctgggcatggtggtgtgcacctgtagtcccagctactcaggaggctaaggcacaagaatcgcttgaacttgggaggcagaggatgtagtgagccgagattgcgctattacactccagcctgggcgacagacatttagttttatgttcatacacatacatatactcaggatgcacattaaactatcaagagtatttactttgggagtgaaaatgagggtgtgcaaaggagatatttcaacttttactctttttgtcttttttttttcctttttgtggagaacggggtctcgctatattgcccaggtaggtctcgaactcctgggcttaagctatccttccacctctgcctccctaacagctgggattacaggtgtaagccaccacgcccagcccatcttttattcttttaaatattttctattgtttgactttttaataatattttcatgttttccctttataataatagaaagtgtatataatgaactctgctaggtttgtcaatatttacacagaatctcttggtgacctgctctaatgaaacaataatagtttgtaaatatattaactcattcaacaagtattaattgagtgcccattgtatgccagggactgtaccaggccctagggatacaataatgagaaaagatatatatgcaagagaaaaaaataattacacaaacataaaattttagttctagcccctgtaatggagaaagagatacaagatgctctaagaacctgtattgggagatttgatttcatcagggagttcagggaagtgcttcttggtaaaatgaggtctgaatatgaatatgagttaactaagtaaagaaaggagggaacaaccatgcaatttgtgatttattctcctcagtgagtggaaacagggcaaggggaactggagatgaggctagagaagtaggtaggagtcagatcttaaatgccagctacaagctttgctttgtcccaatactgttggaaaccattgaaagcttttttttttcattttttatcatttgtattttgatgttgtttttggggtggtacatgtcacatcacatttgcattttaaaaagattgctctggttgtagtgtggagaatggagtaggagtaggggtggagtcccagttaactgtagattgactgttaaaagaatattgcaatatctgagacatggttagatgggaccagggtggactagagagcagtgaatgtattggaaagatatttaggagatagagtcagcagggcttggtgatggattggatatggggaaagtatgtaaaagatgacttctggtgttctggcctccatagctgagttgatgatgttgcaggacccgtgttgcaggcagagcagagaggatgaaaatcatgagttcagtctttgaaatgctccagaagagatgtcaaggtggccaggcacggtggctcacgcctgtaatcccagcactttgggaggccgaggtgggtggatcacctgaggtcaggagttgagaccagcctggccaacatgctgaaacgctgtctctactaaaaatacaaaaattagctggacatggtggcagatgcctgtaatcccagctactcgggaggctgaggcagagaattgctttaacccgggaggcggaggttgcagtgcgccaagatcgcaccactgcactccagcctgggtgacagagcgaaactctgtcaaaaaaataaaataaaaagatgtcaagaatgtggttggatattacaagtctggcctagacaagtgttctgacatggagatacaaatttgagccatcagatgcagaaaagtgatcactgaaaccctggatataaatgttatcacctagaaaaaagaagagtgaggagaggtcttgaatctagaataattctagcacttaagagctcggtagaagaggatgaaccagcaaaagagactgtgaaagaacagctagagaaataggaagaaaacagaagaatgttatgttggaaaaccaggatgtcatgccaaacgctgccaagacattaagtaagatgaggatcatctgattttgtgacagtagagattagggattttagcaagtgagagctgtttcagagaatagacaggacgagatgctgatggtgctaatggagactgcaaggagatactcagaaatgtgcccatgacacggaagagggactacagagggtgagggtgacagaggaccttttttttttaatgggagaaacttgagcacatttgcaagggatgcctgatgggataaagtccctgaaaaggcctgagtggctgagccctgagcagcagtggagggctggctccagcttgatagtacctgcaggcaagtgctaaagttttagagcatttattctctatgtatttcaaaatattccctttaccttgtttagtaaatgtcatagcagatcaaaggcaaattaacctaaagttctgtcagaattatcatgaatatagaatttgtgaagatcaaattcctatagttttactatttctagaaaagtaatagttttttgttgttgttgtttttgagacgaagtttcactcttgttgcccaggctggagtgcaatggtgcaatctcagctcactgcaacctccgcctcctgggttcaagcggttcaccagcctcagccttccaagtagctggaattacaggcacccgccacccacgcccagctaattttgtatttttagtagagacggggtttctccatgttggccaggctggtctcgaactcctgatctcaggtgatccgcccgccttggcctcccaaagtgctgggattacaggcatgagccaacccgcctggccaattttttttttaagttttcattatctggaattctttgttgtttttgagatcagaatctctactaatgatactcaagatgggtgtaactacaaaatctgcagatgttgaaagaagcaaaatggatctgttgaaatttctctttttttctttacttttttttttttttttttttttttgagatggagtcttgctctgtcgcccaggtgggattgcagtggtgcaatctcggctcactgcagtctccccttcccgagttcaaggaattcttctgcctcagcctcccaagtagctgggactacaggcacctgccaccacgcccggctaattcttgtatttttagtagagacagggtttcaccatgttggtcagctgatcttgaattcctgacctcaagtgatctgccctcctcagcctcccaaagtgttgggattacaggcatgagccacaggcccagccagaatctgtgttttaataagatccccagggggtatgtgatatgaacgtttgagaagcccaagtctaaggcaggataaacatggcccgaggggaatctgggcatcacctctttctgtacagccagggagatgggaatggtttttacattttttaatggttgggaaaaaaaaagaagactatttcttgacacattaaaattatatgaaattagtatttcagtgtccataaataaagttttattggaacacagctacgatattcacatattgtctatggctgctttggctcaaaaagaattgttgagtaggcatgacagaaatcgtgtggcccaaaaagcctaaaatatttatgatctggcccttcagaaaacgttctccggcttgtgatctaaagtgcactggaagtacattctttgtgggtttccaagtagcttgtacaccaaggttagctgattataacaatgtgttgtttaacgatcctttatcatattaaagttgaattaataaggcaaaatcagtatttaaacataagaattatatattcaagcttcaaacttgaggaaatgccactttgacttttttttttttttttaagatggagtctcactctgtcaccaggctggagtgcagtggtgcaatctcggctcactgcaacctacacctcctgggttcaagcgattctcctgcctcagcctcccaagtagctggaactacaggcgcgtgccaccacacccagctaatttttgtatttttagtagagacagggtttcaccatgttggccaggatgatctcgatttcttgacctcatgatccgcccgcctcagcctcccagtgtgctgggattacaggtgtgagacactgcacccagccctgactatgttttctaaatgagatgctggtgaactaaagagtttcttagtttaccttttgtttcctaaaaaatgaaattatggggaaaataataaaacttataggataaaaattagtaatactggtaatctctggagagagaaactagaaggggtgggggcaagagtataaaggagactttattaaattcccttttgtgcctttcagaattggatctgggattcaaacatatgggataagtttgctatcattttccccataatttcatgttttaggaaataaaagatacaattgttactcctcagaatgttttgtcttatgctgttgttagatagtttgaattaagtcttctctgtcctcaacacacatgatggttgtcgtcttgctctgagaatcaaagttcacaatccttgctcatctaggtgggaacctgctcgtgctggtggatcagcacgctgcccatgagcgtatacgtctggagcagcttatcattggtaaggatctgtttgcagccagaaaaaatttgagactcccagcagaatcagtacacctcaaagagcttttctaactgcaactgttgtgagaaagcacactttgtactgtatgttcaaaaattaaactaaagtcctgcagtttggcctgtgttataattgaaagaatgtggtagttcactaattgaaagatgtgaacttatttatgtggtcagaggcatatttgccagatgttattaacaacccagaagtacgcaaggataggctgcttactctgacatccagcacaaagctctgcccctccatatgcccggtgatcttggcatgccttcccacactccatcaggcagagaccagtggcagctcagaaggcccagtatgctgttttgattttaaaatttagtttgcttttgaatatgcagtataatcaaatagatccaattctgaaaggcacaaaagggaatataataaagtctcctttctatccttgtccccacccctcctagtttctctccccagagacaaccaatatctctggtttttaaatctatctttccaaagcaatatatgctttttaaatgtttttttttgctacccttttcctcatcatgaggcagtgtgttcaccaagtggtaaaataccaggaaagtctttactcctgtggccaatgagtaatgtcaaagagttaggcaaggacctaaggagtgcttcatggactagaatggcaatgatattactactgttttcacttttccttataaaatgacggcctaagagttgggaaagatatagtaaaaacagtgttagaaaaacttacctctacaggccctgcaccatttgagaatagtactaattctctccagagactgggagaccctgctcaaggaaagggaagccttctggagccataagactgtgtggtcaacccacatatgttcctggtaatccacattattcacctctgtcatcaaaacaacatttattaactacaggaacattggcttgttcatctgaatgtaagatgcaagtcttatatttcttattttgaaaaatactaccaaaattgttaataggctgaatatttattagtttgactttaaaaatggaaatccaaaatctaaaactgaacattaaacattctgctttgcattagaatgattatctcaaggccgtgctttatttttatctgaatctagaagacttcccttcctactcttaacccattcatctttctgccaatagattcctacgagaagcaacaggcacaaggctctggtcggaaaaaattactgtcttctactctaattcctccgctagagataacagtgacagaggaacaaaggagactcttatggtcagtaccaccatgagaatgtgatgttgatggtatcaattctcacaataattctgtgaggaataagcataactattgttccatttctcagatgagaccaagagaggttacaagacttgtctaaggtcatagcagttattaagtagtggagcaggcactcaaaggcaggtcgtctgactccacaggctgtttgtttccttttttaaaatatatttttttctgcatccaatcatccattaaaatatttattttgtgagacatggtctcactctgttgtccaggctggagtgcagtggcacaatctctgctcactgcaacctccaccttccaggctcaagcagtcctcccacttcagcctcccaagtacctggaactacaggtgagcaccaccatgctggactaatttttgtaattttttggtagagatgggttttcgccatgttacccaggctggtctgaactcctaggctcaagcgatcctcccactttggcctcccaaagtgctgggattacaggcgtgagccactggacccagcctattctttccactgtatcccagctgaagagtataggatagagtttccctgataattttttccagcagttggcttagaacactcttctcatttcttggaacagtctgtgtttatgccatgctttgtgaaagcaaagtttctgcagtaattggtcccattctgctttgctttggtgcattctagactcttagttttcattatcgtaatcataatgggaagaaagtaaaacattgggatgtaaggaaggggcgaatcatatagtgagtcacaagataggatatttttcctcttctaggcagcacaaattattgaaaatgaaaaagaaatttctcccaatatgtttcaggtttgggaatatgatactgccagtaaatctttttttccctatgacataatttatattagaggcagatctatttacttacatcccgttagtcaggacttctcaattccttgggctgttaattacctccctgctttaatgctgattcaaatcactctcagaccttttcttcatgccagactcccttaagtgccagcagccagaagttagcagttcctcaatgaagaaaacacacttagaaacaagacttagacacagattgattcccaatggaaaagagaaaaacaataaaggttactgtaattcaaaaaggaaatttgataataaaaaatcccaaacacccacacataagtgtgagaaaaacaatacggttgttaagccctgtggcagcttttgaaaaactattaagtagtatttggaaccagtagtgaagtgcaaatgaagtagcactctttttttttttaacatttgaggttatctctttaggtgttaccacaaaaatctggaagatctgggccttgaatttgtatttccagacactagtgattctctggtccttgtgggaaaagtaccactatgttttgtggaaagagaagccaatgaacttcggagaggaagatctactgtgaccaagagtattgtggaggtaagacacagctgcagatgttaaggaaattgctgagtgatggtaacctcatattttgtctgtagattctctgaattcatcttttcttcaacaagtattcatggtatttacctgcggtgtgccaggagctagaaattcagagatgagttagctcaaaataaggaagaagggcatttaaagaattatagtcagtgaactttggctagtagaggtatgtgttttgctttcttcccagtgataaaggtaatgaaaactaagagtctagaatgcaccaagatagtttttcagaagtgttatggaaacacagaatgacttgtgtgcctggggaggtgaagtcaatgaaaatgtcacagaaaagctgttttcttaagaaaagtttttacttttgagagaccaggtctcactctgttgcccaagctggagtgcagtggtgcaatcatagctcactgtagccttgatctcctgggcacaagcaatcttcctgcctcagcctcccaagtaactcggactacagacacgcaccaccatgcctggctaattttttccttttttttttttgtagagatgggggcctcactatgttgcccaggctggtcctgaacttctggcctcaagcaatccccttgcattggcttcccaaacccccggcactacaggcatgagccactgcacacagccagaaaagtcttacagaatagtgggaaactaggctgggcaaggtggctcacacctgtaatgccagcactttgggaggccgtggtgggtggttcacctgaggtcgggagttcgagaccagcctgacaagcatggaaaaaccccatctctactaaaaatagaaaattagccgggcgtggtggtgcatgcctataatcccagctactcaggaggctgaggcaggagaatggcttgaacctgggaggcggaggttgcattgagccaagattgcaccattgtactccagcctgggcaacaagagtgaaactctgtctcaaaaaaaaaaagaaaaaaagaatagtgggaaagtgctgagtacagaagaggggagaagggcattctagacagaggaatacatatcagagacttgagatacatcctatgtttagggaactatcaatagatatggctcaaattaagatctacagttgatccttggataacttgggtctgaactgcgcaggtacacttaaatgcagattttctttcacctctgccattcctgagacagcaagaccaacctttcctcttcttcctcctccttagcctattcaatgtgaaaatgatgagggtgaagacctttatgatgattcatttccacttaatgaataataaatatattttctgtttcttatgattttcttaacattttctttttctttctttctttctttctttcttttttttttttttttgcgatgcccaggctggagtgcaatggcacaatctcagctcactgcaacctccacctcccgggttaaagcgattctcctacctcagcctcccaagtagctgggattacaggcgcacaccaccatgccccggctaatttttgtatttttagtagagatggggtctcaccatgttggccaagctggtattgaactcctgacctcaaatgatccacctgccttggcctcccaaagtgctgggattacaggcatgagccactacgcctggccaacattttcttttctctagcttacttaattgtaagaatacagtgtgtaatatatacaacacacaaaatatgtgttaatcaactgtttatattattggtaatgcttctgatcaacgttaggctattggtagttaagatttggggaaatcaggccaggtgcagtggctcacgcctgtaatcccagcattttgggaggccaaggcgggcggatcatttgaggtctggagttcaagaccagcctggccaacatgatgagaccccgtctctactaaaaattaaaaaattagccaggcatgatggtatgtgcctgtaatcccagctacttgggaggctgaggcatgagaattgcttgaacccggaaggtggaggttgcagtgatccaagatcactgcactgcactccagcctgagtgacacagtaagactccgtctcaaaaaaaaaaaaaaaaaaattggggggaaatcagaagttatacttggatctttgactggatgggagttggctagatgggttgtcaaggtcaaatcataaaataatttagcatattctactaagtagtttgcattttatcctataggcagccagtgaaaacttttaagcaggagagtaaggtccattttagattgcattccaaatatgattactttacatatatgttttggtaaaggtttggaaagctactgctgggctgtggcattggaggtattagagagaactattactttttattttgattacttatatgtttctttttttatagcaaatatcatttattttgtctttattgtctttttcctctcctttcctgttttctattatagttttctgtatttctctttttttttttgctctactcgtttagaagttatatattccatttatatccttttagagattagccttaacttttagcatgcatacttatcaaagtttaaaagtaattcacttctctatcctcttcctaactgtaccaaaatcttacaaactgttcatctcccatcaccctcctcccatcttccatgttgctgtctagtactttaattccaccttgtttttaattccctggtggtcatttattttatagtcaatctttatttagattaaaaaaagtgttcaccagagtctttgttcaccattgcctcttgcatcctacttattctgtgttcttttgggttttttttttttttttttttttttttttttactgaagtaaatctcttacaagatcttttatccacaaacagatcttgagacaaaaaatacaaaaatataaaaataaatagaagttattttagtaagagtccgtgggccaggcatggtggctcatgcctgtaatcccagcactttgggaggccaaggcgggcagatcacctgaggtcaggagttttgagaccagcctggccaacgtggtgaaaccctgtctctaccaaaaatacaaaaattagctgggcatggtggcaggtacttgtaattccagctactcgggaggctgaggcaggagaatcacttgaacccgggaggcggaagttgcaatgagctgagatcacgccattgcaccccagcctgggtgacaagagtgaaactctgtctcaaaaaaaaaaaagtccgtgaatgataagctgtcttttaaagtatctttattttgtcttcatacttgcatgattatctagctaaaaacagaatttcacattgccagttatcccccccgcattttgaaaatatttcactacttttgactttctattttattttattttatttcattttttgagacagagtctcactctgttacccaggctggagtgcaatgggatgatctcagctcactgcaacctccgcctcccaggttcaagcgattctcctgcctaagcctacaaagtagctgggattacaggtgcccaccaccacacccagctaatttttgtatctttagcagagatggggtttcaccatgttggccaggctggtctcaaactcctgacctcaggtgatctgcctgccgtggcctcccaaagtgctgggattacaggtgtgagccactgcacccagcctgactttctgttttagccattgaagtccttagtcaatccaattattactctgtaggtaatctgattttccctctggttgcttttacgatggttcactttgtctttggtgttctgcaatttccctatgatgtatctttgtatggatttattttcatttccttctggagattcactatgcttcttcagtttggaaagtatgcagtcattatcacctcaaacgtttctttcccattctctctcttgtctcttggaaattttgtcagatatctactgggccttatctttctactctgcatgcctcttcaactctcttccatatttcccattgctttctctctgtgatacattctgtgaaatctcctcacttatcttccagtgaactaaagtatctcttcatcttctgtttaattatgtgtttagcttatccactgagttttttatttcagtgactaaattttttatttcaatggctatattttttatttccagaagttgtgtttttttccccaaatctcactcttccttttttatggtgtcctgcttttttcatgattgttccttctcctttatcagtagctttcttgatttggagcacaggcaaatccacacccacctcatctagaagtctgaagtgctttagtaatatctaaaatagtaaaatctaaaattagaggatagatgtagtagataaattgggggatggatttatgtgggaagatttgagtcagggagagcagctgacgggttattgcagtggttaaggtaagagaagatgaggattggactgagtcagtagcagagggagtagagaggagtgacatatctgagacagaatttgggaggcagaagcaagaggacttggtgagcaatcaaacgtgaaaggaataaaggagaaaacaaaagcaacagtgattctgagggttgtagcatggatggctggaaggatggtggtgccattgacagagaagggacacagatgaggaggaacaaacctgcctaggagttccatcgtgaaggtgggtttagacacagtgaatgtgcctgcaggtggaatgcccagtggataggcacacttaaaagatctggtacttggaaaataaatctgggctgtacatatctatctgagagttaacagtatatatatattgatagtatcagaagctggagaagggccttgaggaagtgaggttgtccagggagaatatggagagtgaaaaggaagagacaaaagagtggagcctgtggaacatcagcatccagggtgcgtatgctttggaaaaggtctggaaagctctgctgaaaagaggaaattctaaggatggctgaaaatacttggttagagagggaggaggaaaaccaggaaaaagcaatattgccaaaactaaggaaagttttaagcaaggagggaatggtcaataacggctatgaagtagagcctgaaacgctggacttgactgtcatgaggacattagttgtcttgtggaatcatttcctggggatgaggtggggcagaagataagagtgcagtgagtcaggagtgcgtgaagcaggaggaagtgaagctaagtagacaactctttcaggaactttggctacacacagaagaagagagatggggtgagagctaaaggttagaagtggttgggaagtgtggggtgggattcaaggctgaggaaaggtgtttgtttgctttaagacaaaaaagacgtaagcaggtttgcaggccaagggggaaacattcaagaggaagagcagctgtcagtcagctcttgggtcatcttggctttgccctttccagaatcgcctttggatcagacagatccaaagatttgctctgcttccagcaaagctctttcctccccacagacatgctttctctaagacccctgctccaaattgtcctaaatccaaaagataggatctgttagagtcttttattgtaattcaatccctaatatgtaaccagaaaattataagaaaaacttttcctgaaggaacttaaaagactactgttaaggagtttgcttcaaatggaaacaaacctctggtttcataaaatcttgattatcctatgtcaggctgatcaggagagactttgtgtgattctggaagaagctggaacagttttggtgttttgaggaggtagctatttgaatcctagcagttgaaagatcattaatacatccttctataaagctctatcttctagcctggtgaggaggtggaggctgcagtgagctgagatcgcgccatggcactccagcctgggcaacaacgagactacgtctcaaaaaattaaaaataataaataaatacggccaggtgcagtggctcacaactgtaatcccagcactttgggaggccgaggcaggcggatcatctgaggtcgggagttcgagaccagcctgaccaacatggagaaaccctgtctctactaaagatacaaaattagccaggcgtggtggtgcatgattgtaatcccagctactcaggaggctgaggcaggagaatcgcttgaacccagaaggcagaggttgcggtgagccaagatcgtgccattgcactccagcctgggcaacaagagtgaaactccatctcaaaataagtaactaactaactaaataaataaataaaaaataaaataaaaatattaaattatccagcattaaacagaccattggaatataaaatggactgagatgagacccatcaccccttcactaagcttacaaacagatgttttaccatcccagatgtacaaacacaagaatgtttgctctccatccacactaagctttgtcagtggattgagtcttatgagaccatctttctgtttaggtttgtttgggaaaacatgtgatttttaaattatatgtaatatagtatctactacctagctcttgataactgtgcccatttataggcatggcagactagagtatagatgaaggagggaagagaatttcctgagtctggttttaaaagaaaaggtaccatgttgtaatcttaggagcagatttacacatagccttttccaggagtaaagaaatgattttcttataaagaaatcattaaatgtgcaacaggtttttttctttttacctccagaggttaaacaaattggtagcatgaaatagtgtctgctttaaatttctttaagcttcttttgtaaatattaatatccacagggatataactattgaaaaggttaccccagggacagagacatgcaagggaggagaaatttctcaacaaagggcctcagaaaataaactttctgacctgaagggaattgtccccaaaaagcccgtgggaactaaagtgactgtttacttatgtttatgatatttaagcaagtgttatactgagcagtggttgtgttgatggttgttgtgtatttattctcagtttgtgtgtaatattacgcttgttctggctaagattacacacacaaacagacagccttttagtgagaagccttcctgatgttttgaattggttgaatcatcaaggctactctcaccagctacataacctcattagttgagaagctatctctggaggaagtctcagtagctaaatatattctgtgttcaataagagttctattcagttgcttggttttttcatattcaaagtgccttacaacaaataaatttgtacccaagtgctgtattgctggaactctttctttcaggaggcatgatttaaagaagaaaattgagatattttgtaaactatcaaagggcaagtaaaacataaccgtagattaaagccgattttccttttgctttgcaggaatttatccgagaacaactggaggtaagcttttcctttattttggggtttcacacagaagcaccacacataaaaggcttcgttgttccgttttcttttcctgttaataacgtgtttatgcattagctactccagaccaccggaggcatccaagggacattgccactgactgtccagaaggtgttggcatcccaagcctgccatggtaagcccttcaacatagcagtgatcaaacacctctgcatgcagagccctggcagggctgccgggattacaaaagaggcagagggtacatttactacttgactcttggagaatacaatttagatcaagaaactgaatatacccttttaaaaatcacttttacaaaaacaaaatcccaacacaaaaatttgactatagtgctgcctgacctatatgagtggaggaataactcctagaggagatgcattttgagatgaattttgaatgagctggggaacatgggttcatagcatggaaaggggaattcactatagggagagtaaacagcctgtgcagagaggcagaacagaaacaagttagttatatgagaagcagcaaagagtatcaagaaactaggcaggtaagagaacagaaacctagaaggtcacagcaaaacctttggatttgatacagaaggcattagaattagcaagcgttctttttttatctttccaactttcattttaggttcagggggtacatgtgcactttgtaacatgggtgagttgcatgtcgcaggggtttggtgtacagattattttgtcacccaggtaatgagcatagtacccaataggtagttctgatcctcacccacctcccaccctccaccctcaagtaggcccaggtgtctgttaccccttctttgtttctatgtgtattcaatgtttggctcccacttttaagtaagaacatgcagtatttggttttctaattcacttaggatgatggcctctagctctatgtttttgcaaaggatgtgatctcgttcttttttatggcgacatagtattccatgatgtatatgtaccacattttctttatccaatccaccattgatgagcattgaggttgattccatgtctttgctattgtaaatagtgctgcagtgagcataacacatgcatgtgtctttatggtagaatgatttctgtttctttgggcatattcccagtaataggattactgggttgaatggtagttttgctttaagttctttaagaaatctctaaactgttttccacagtggctgaactaatttatatttcccaccagcagtgtataagtgttctgttttctttgcagcctcaccagcatctgttattttttaactttttaataccagccattctgactggtgtgagatggtatgtcactgtgattttgatttgcatttctctaatgattagtgacattgaacattttttatatgcttgttggccatgtgtatgtcttcttttgagaagtgtgtgttcatgtcctttgcccattttttaatagggttttttggtttttgcttgttaatttatttaagttccttatagattctggatattagttccttatatagattctggatattagacctctgttggatgcagtttgcaaatattttctcccattctgtaagttgtccgtctattctgttgatagtttcttttgctgtggagaagctctttagtttaattaagtctcacttgtcaattttcgttttattgcagttgcttttagagtctttaccaggaaatctttgccaaggcctacgtccagaatggtatttctgaggttttcttctagggtttttgtaaaaagatggaatgcgcccaggcgcggttgcttacgcctgtaatcccagcactttgggagaccaaggcggatggatcacctgaggtcaggagttcgagaccagcctggccaacatggtgaaaccccatctctactaaaaacataaaaattagccaggcgtggtggcgggcacctgtaatcccagctactcaggaggctgaggcaggagaatcacttgaaaccaggaggtagaggttgcagtgagccaatatcacgccactgcactccagcctgggtgacagagtgagactccatctcaaaataataataataataataataataatgaagatggaatgcttcatgaatttgcatgtcatccttgtgcacggaccatgctaatcttctccgtatcactccaattttattatatgtgctgccaaagcgaacaccattgagggttcttgagcagggtaatatgatacaatatagaaaatggggagctgggtgaggccctgtgaggaaggtgcctgcttctccttcaccttccgccataattgtaagttttctgaggcctccccagccatgcagaactgtgagtcatttaaatggtctttcctttataaatgaccgagtcttggtcatttcttcatggcagtgtgagaacagactcatactcctctatcaccaaatgtcatcattgccaccttcaaaatgtatcttcggtccgtctgattcagtctgtctggctcctccctcatttttgccactgttgagctctcttacttagttcttcacatccactctggctccctttcaagctgctcttctctcagcacccagaggaatctttttgaaacatccctccaagcatgttgttcttctaactaaaatgtgtcaatgatgacccattgctcttgggatagaaatgtgattttttactgtggcccacaagggtcttcgtgatttggcccctgcctgcctctccagtgtcacgtcatatcactctccaccttgttctttacatcccagcctgcttttttggtcttctgcttcctgtgtgctaaacatttgtcagcgtcggggcctctgcactggccttctcctctacctgaaacacttttctctccttcttcaattagccacgtctttcttaacctaaagtctcagcttgaatactactttgccaggaaagccttccttaagctcctaaactgggtttggtcttcctattatatattcatatcctgtattttatagcacctatatttatcatttaaattattgtataattatctgcttcatgtttgtctcccctattagaccataagcgccatgaggatggaaattatctgtctcactaactgcctgacaaagctcccaatacaaagtatatacttaataaatatttgttgactgggtaaattgtgcataaaggcaggttataacaatatgagagtttagattaggaagattattatggaaattagaaaaaaagaagcaaataaaatgaacattgtaaggaaacaatcagagattgctattggacgatccatggagaaagataaccccaacttcacaaacccataaagagtaggcaaaaatactgctcttgcctcttggagaaaaactctgaaagccagatcctaacaagttaaggaatgcctcctacagagattagaaatacaaatactccgtaagaaaaagctgagagacagaaggtcagtcctgaagccttagtttcatccatggtcataagcactaatttatttccctctttttttttttttttttttttttttgagaacggagtctcgctttgttgcccaggctggagtgcagtggcgtgatctcggctcactgcaacccccgcctcctgggttcaa

SEQ ID NO: 6304 - DNA, 32191 bp, Homo sapiens
cttcagaagcgtgtgacttccgatgagaggagcaatttccaggaagcatgtaataatattttagattcctatgagatgtttaatttgcagtcaaaagctgtgaaaagaaaaactactgcagaaaacgtaaacacacagagttctagggattcagaagctaccagaaaaaatacaaatgatgcatttttgtacatttatgaatcaggtggtccaggccatagcaaaatgacagagccatctttacaaaacaaagacagctcttgctcagaatcaaagatgttagaacaagagacaattgtagcatcagaagctggagaaaatgagaaacataaaaaatctttcctggaacatagctctttagaaaatccgtgtggaaccagtttagaaatgtttttaagcccttttcagacaccatgtcactttgaggagagtgggcaggatctagaaatatggaaagaaagtactactgttaatggcatggctgccaacatcttgaaaaataatagaattcagaatcaaccaaagagatttaaagatgctactgaagtgggatgccagcctctgccttttgcaacaacattatggggagtacatagtgctcagacagagaaagagaaaaaaaaagaatctagcaattgtggaagaagaaatgtttttagttatgggcgagttaaattatgttccactggctttataactcatgtagtacaaaatgaaaaaactaaatcaactgaaacagaacattcatttaaaaattatgttagacctggtcccacacgtgcccaagaaacatttggaaatagaacacgtcattcagttgaaactccagacatcaaagatttagccagcactttaagtaaagaatctggtcaattgcccaacaaaaaaaattgcagaacgaatataagttatgggctagagaatgaacctacagcaacttatacaatgttttctgcttttcaggaaggtagcaaaaaatcacaaacagattgcatattatctgatacatccccctctttcccctggtatagacacgtttccaatgatagtaggaaaacagataaattaattggtttctccaaaccaatcgtccgtaagaagctaagcttgagttcacagctaggatctttagagaagtttaagaggcaatatgggaaggttgaaaatcctctggatacagaagtagaggaaagtaatggagtcactaccaatctcagtcttcaagttgaacctgacattctgctgaaggacaagaaccgcttagagaactctgatgtttgtaaaatcactactatggagcatagtgattcagatagtagttgtcaaccagcaagccacatccttgactcagagaagtttccattctccaaggatgaagattgtttagaacaacagatgcttagtttgagagaaagtcctatgaccctgaaggagttatctctctttaatagaaaacctttggaccttgagaagtcatctgaatcactagcctctaaattatccagactgaagggttccgaaagagaaactcaaacaatggggatgatgagtcgttttaatgaacttccaaattcagattccagtaggaaagacagcaagttgtgcagtgtgttaacacaagatttttgtatgttatttaacaacaagcatgaaaaaacagagaatggtgtcatcccaacatcagattctgccacacaggataattcctttaataaaaatagtaaaacacattctaacagcaatacaacagagaactgtgtgatatcagaaactcctttggtattgccctataataattctaaagttaccggtaaagattcagatgttcttatcagagcctcagaacaacagataggaagtcttgactctcccagtggaatgttaatgaatccggtagaagatgccacaggtgaccaaaatggaatttgttttcagagtgaggaatctaaagcaagagcttgttctgaaactgaagagtcaaacacgtgttgttcagattggcagcggcatttcgatgtagccctgggaagaatggtttatgtcaacaaaatgactggactcagcacattcattgccccaactgaggacattcaggctgcttgtactaaagacctgacaactgtggctgtggatgttgtacttgagaatggtaagtacgtagtattcatgtgcatgagatgcttttgaagatgggaatgctggacaaggagtaagatcctcattatccaaagagattatctcaacagatagaacattttgaagaccacttataaaacatatgttgtattttcatgctatatgaagatttgctacgtccaacactacttttttttttttttttttttgagacggagtcttgctctgtcacccaggctggagtgcagtggtgcgatctcagctcactgcaacctctgcccccctggttcaagcgattctcctgcctcagcctccagtgtagcttggattacaagagcatgccaccatgcccagctaaatttttttattttcagtagagacaggatttcactatgttggccaggctggtctcaaactcctagcctcaagtgatccacctgcctcggcctcccagagtgttgggattataggtgtgagcccgcacgcagcctctaggtccaacactatttaaatggagaagtacagtgaaaggatgtcagtgtgtgtatatgtgtctatgggtgtgtgtatgtgtaagaaagggggtgatgggtatatacctagagcaacaacaaaaggggtgagactgtccaattttaataaaaatgatactattaatagttgggaagatccacagtactttcctaccttgttttcccttcctgttaaatgcccagctttcctagaaatgtgtctttaaaggcacctgcagtgtcagcatggtattttactggaagtttctctgcgtggcttccaggttaagggccagaatgattctgtaatcatcctaggtttcccagtaaactctatggcttagtacagtactacatttatgagctttttctttctagaaagtaggacttgtccatgaattttcaaaatataggtcaagtatatactttcatgactatacttttcaaatgtactttattataatgcatatggtaaaatctccttgatgtgtttatggtacaagtagctgttattcaggaagacaataatatggcatttatttatttgagacagagtttcactcttgttgcccaggctggagtgtagtggcgtgatctcggctcactacaacctccgcctcccaggttcaagggatcctcctgcctcagcctcccaagtagctgggattacaggcacccgctaccacacccggctaattttttgtgtttttgtagagacagggttttaccgtgttggccaggcttgtctcgatctcctgacctcaggtgatccacctgcctcggcctcccaaagtggtgggattataggcgtgagccactgcacccaaccaatatagcttttagatcgtaccacagggctacattagagcctgcactaggactctgggttctcggtccacatttaaagtgatattgctttggcagtgtgttgagagccagatgttgggaggtgataaagctgatttccatctggctataatcttggctttgcactaggaggataaacattacatctgtatccgtatttaaaattttgaatgctgcagaagaatggaacatgtataaatgtagttataagtcaatttctaatttctcctgacgatgaatatctctagcagaaagctgtggtttctttaaggttaaatgaaacctttacttttcagtgtttttctgtttttccttgtgaaaaaaaaatcactgtagtaacttcagtagtatttcatagtattttgtagtattcattaggagaaaactcatttctttcactgttgttcctgagactatcaagttgctcttaaagccactttatgtgcttttcaatctatgtggttttatgtcctgacttacactgaaggcttttcagaggtaaatctacagcactgacacctcatcttcctgaaatgcaactgcttctgatatggtgccaaaaaataactggattacattatactgtgagatggctgttgctaaaagaaagggggaaatcttagctgccatattcaacgtaaatatttcttccttttgaatatagacgtttaaaacactttaacctacttaacattctggattagcatacttttttatgaacttttgagggtcatgttaactgatagtttcctaatgaaaaatatttttggtatagaaagaagttccatgaacagatggctcctcagtaccctgctacctttctggaaatggctgatatacatcatgacatcaggacattgtcaaactttacataaaagtgttacatgaaataaattgttaaaagacaattttttttttttgagacggagttttgctcttgttgcccaggctaaagtgaaatggtgcgatctcggctcactgcaacctccgccttctgagttcaagcgattctcctgcctcagcctcctgagtagctggaattacaggcatgcgccaccatgcctggctaattttgtatttttagtagagacgggatttctccatgttggtcaggctggtctcaaacccccaacctcaggtgatctgcccgcctcggcctcccaaagtgctgggattacaggcgtgagccaccagcctaaaagatacattttaatgtacagaaggaggatctataaaggtgattttgaggagtagtgtcaagtccccaagccttggtaattttttctttaaaatatattttatgcagttctttctattgtagttataaaccttatttcacttcattatcttaattttatcattcttaacctctccaggtttagtccaacagatttatctctcatgttttcctcctgttctaaagctgtcaaattcagcattgtttctaaaactcaaatctgattatccttcatggagaagaacagcatttgggccagatcttactagactctggagtttgaattgagaacctttcatttgtctacctgttcactttttcatgcagcatttgttgatcatccacactgtgctaggtgctgtcacgttgcaggttaactgactttgcttttaggagttcacagtactattagggaagatagctatctaaatataattgtattataatgagacaaatgttaggatagagacatacattggagataagagacataagttggagatttgtgaaggttgcaccaagttatggctgacaagtactgctgtatgtctaacacagggcttctctgggtaattttttgttgtaaggtttgtcctatgcattgtagaatatttagcagcatccgtggcctttatctgctagatgctagtagaacgtagaaccctttactcaagttgtgacaatgaaaagtgtctcaagccgggcacagtggctcacgcctgtaatcccaacactttgggaggccgaggcgggtggatcacaaggtcaagagtttgagaccagcccggccaatatggtgaaaccccatgtctactaaaaatacaaaaaaattagccgggtgtggtgacgcatgcctgtaatcccagctactcgggaggctgaggcaggagaattgcttgaacccgggaggcggaagttgcagtaagccgagatcacgccactgtactccagcccgggcgacagagcgagacgccgtctcaaaaaaaaaaaaaagggtctcaagacattgccaatgtcccctcgtgcaaaattgccccccagtgagaatcacagtgacctattctaggtcttcattctgtctggtatgaatagataatggaactaagcattaatatagagtcctatatggacagcataatttcattaaaggatttctgattctcaatctagtgtttagtagtctgctttatgtcttgactcagtttgtgcagaaagaggttttatgtgattaaatttttaaagagtttacttgtattttaagttcacatttctaggtttttctttcttatatttagggtctcagtacaggtgtcaaccttttagaagcgaccttgttcttcctttccttccgagagctcgagcagagaggactgtgatgagacaggataacagaggtaagggtggcagagagtgctggggcacacagtacacatcgtaccacctaactcaaaaaacaaagcaggcttgcattaagcttgatcagtgccagctgtgctgtactggaatcaggaattccccacggccctgtttaacagcggaactaattaattcagcgcatgcatttaggtcagaaattacttttccagacttgaggtcaatatttgctgattatgcatagtctgtggtgtcttgtgattaggggacatgtttcttatttttaaaaaggctggacttgcactccaagttgctgtagttttatgtaagcaaaactcttcaaaaaaagctacagacatcaattttgtgtgtatgtttaaaaatagataaggtatattttgcttaaaggcagtaaggctataaatttgagccatagcttctctgtcagtattccacaatatctcttttaacagtttggagaaaagctgtaatgccagaagatacagtcaccaactctagtttaaaaagtaacagatcaaaataatttagagatacagcaaacactgaacatttgtagaacatagaaacaatgtacgtgacctttggtcttgaggctatggctcaccaaacaggaaatgccattccctcctttccctgtggttctggatgccaactttacctgttcccttttgccctagatactgtggatgatactgttagtagcgaatcgcttcagtctttgttctcagaatgggacaatccagtatttgcccgttatccagaggtgggtctgtagcagtttttctttgccttttttttttcttcttcttcttcttattttttaaattttgagatggagttttgctcctgttgcccagactgaaatgcaatggcatgatctcggctcacgtaaccttcgcttcccaggttcaagcaattctcctgcctcagtctctcgagcagctgggattacaggcacctgccaccacgcccagcgaattttgtatttttagtagagatggggtttctccatattggtcaggctggtctctaactcccaacctcaggtgatctgcccgcctcagcctcccaaagtcctgggattacaggtgtgagccatcacgcccagcctttctttgcctgttattttaaactttgagtttcaagatgggtacagtggcatgcacttatagtctcagctactcaggaggctgaggtgggaggatcacttgaggccagaagttcaaggctatatagtgtgctgattgcacctgtgactagccactgcacactatagcctgggcaacacagtgagactccatctcttaaaaaataagtaaattagttaaaaataaaatttgaattttatttaagctgggtatgggcatgcaagactatattaatttgtaattatgattggaaactgggcatatttccaaattatgtatttggaaattactgtttaatgtagaggggagaaataaaatttatagcatttgggaactcaggcattttggattaaacatgtataatcaatgtgagaacagtgaatgtgtttaccactctcagaaaccctgacttgtagctttggcacagtattcagggtggtgataatgaaattgttatcattagataaagccacacatcttctactggaggaacagttcctcattggccccgcatggatgttctctcctcagtgtattttcacagaatgtactgtgcatgttataaacagggtgtataatagatgagcatttgtttaccagttctttcctcaagatatcatttgaggacttgatcatggaacatagacaaattgttgttgtgaaacaattttttttgttttgtcagtaattttgtttataagcaaaaatttttatgtaagactcattattcataaattcttttgaatttttttttttttttttttttttttttttttttttttgtgacagagtcttgctgtgtcgcccaggctgaagtgcagtggcgtgatctcagctcactgcaagctccgcctcccgggttcacaccattctcctgcctcagtctcccaagtagctgggactaaaggcgcctgccgccacgcccagctaattttttgtattttttagtagagatggggtttcaccatgttagccaggatggtctcgatctcctgacctcgtgatctgcccgcctcagcctcccaaagtgctgagattacaggtgtgagccaccacgcctggccgattcttttgaatttctataaattccctgaattaaacccacctctagtaggctaaataaaaatgaatgcttttaaagcactctgatatctttggtaaaacaattctgacacaaaaattaaaatttcaattatattttgctgagtctttctaggttgctgttgatgtaagcagtggccaggctgagagcttagcagttaaaattcacaacatcttgtatccctatcgtttcaccaaaggaatgattcattcaatgcaggtaaaagattaacttcaaaatctcataaatatatatatatatatatatggcctaactcttctaaaatttgatttatttaatgatatagaccaccttggtcaaggcacgtgtgtgtgtgtgtgtgtgtgtgtgttcttactagaacttttatcatcagaagaaaaagcaagggattaattataattacaaagaaagaaatatctttagtagtgtaagtaggtttggagggaatgaattatggattcaggctgacagtttcaaggattctcaaggttctcctgcagaagattatatattgactttatatttggcaataatttataaatcaaagtcctttagtgaccttgtccttaagtgtgcaacagtgcccttttagaaattaccttctattgtgtgagcctacacaggtttgggaaagcccatattgagaagtcatttcacaaaagggaccctttgtctgatctgcttttctattttgccttgtgtttaccaccatggctgtcttattccctttgttttcagtacggaaacaaattaggaggctaacaaatttgggtaaactcctaacctggcattgacctggtaccagagcaggcaagcagttgatccagaaatagaccctggggcagtggtataggctcgggggtattggagagcctcaagtacctagacagagaggaaccaccaaggtctaaagccaccagtggcttttaacttacttctttaatagactagcagccgggcgcgctggctcacgcctgtaatcccagcactttgggaggccgaggtgggtggatcatgaggtcaggagttcgagaccatcctggctaacacggtgaaaccccgtctctactaaaaatacaaaaaattagctgggcgtggtggcgggcacctgtactcccagctactcgggaggctgaggcaggagaatggcatggaggcaggagaatggcatgaacccaggaggcagagcttgcagtgagccgagatcacaccattgcactccagcctgggtgacaaagtgagactccgtctcaaaaaaaaaaaaattaaaaataaataaaaataaaaatagactagtttctccataatcgttttccttgctttcacataaattttaaaaatttatttcagcctgtatgttagcaatctctggtcacattacctattctcaagagtcactctgttgggaacatctcaggccttctctaaagtattgctagcacaccactctgagacgtgggagtctgtcttcccctgtcgcctccctccccttacatcttctgatcaactccacctgcccattctttcatccttcctagtgactttttctggttcatcagaaccttacccagtctcaaagaaaggagtgtgataaggcaaacaactctaaataaaatacagttctgtatctttctatgcaaataagcctttgttaatttttatttagtgttgtaccacttatttgaatgtctgacaggttctccagcaagtagataacaagtttattgcctgtttgatgagcactaagactgaagagaatggcgaggcaggtaagaatggagtttagcctgaatgactaaccagctggtcttcttgtaacctttttttaatgattatttttggtatataatatagtttcaatgatttggatggattagggaaagccaatctaaaactaagaatattatgaaggctgggtgcggtggctcacacctgtaatcccaacactttgggaggtgaggcaggtggatggcttgaggccaggagttcaggaccagcctgagcaacatggcaaaaccccgtctctactaaaaatacaaaaattagctgggcatggtggtgtgcacctgtagtcccagctactcaggaggctaaggcacaagaatcgcttgaacttgggaggcagaggatgtagtgagccgagattgcgctattacactccagcctgggcgacagacatttagttttatgttcatacacatacatatactcaggatgcacattaaactatcaagagtatttactttgggagtgaaaatgagggtgtgcaaaggagatatttcaacttttactctttttgtcttttttttttcctttttgtggagaacggggtctcgctatattgcccaggtaggtcttgaactcctgggcttaagctatccttccacctctgcctccctaacagctgggattacaggtgtaagccaccacgcccagcccatcttttattcttttaaatattttctattgtttgactttttaataatattttcatgttttccctttataataatagaaagtgtatataatgaactctgctaggtttgtcaatatttacacagaatctcttggtgacctgctctaatgaaacaataatagtttgtaaatatattaactcattcaacaagtattaattgagtgcccattgtatgccagggactgtaccaggccctagggatacaataatgagaaaagatatatatgcaagagaaaaaaataattacacaaacataaaattttagttctagcccctgtaatggagaaagagatacaagatgctctaagaacctgtattgggagatttgatttcatcagggagttcagggaagtgcttcttggtaaaatgaggtctgaatatgaatatgagttaactaagtaaagaaaggagggaacaaccatgcaatttgtgatttattctcctcagtgagtggaaacagggcaaggggaactggagatgaggctagagaagtaggtaggagtcagatcttaaatgccagctacaagctttgctttgtcccaatactgttggaaaccattgaaagctttttttttttcattttttatcatttgtattttgatgttgtttttggggtggtacatgtcacatcacatttgcattttaaaaagattgctctggttgcagtgtggagaatggagtaggagtaggggtggagtcccagttaactgtagattgactgttaaaagaatattgcaatatctgagacatggttagatgggaccagggtggactagagagcagtgaatgtattggaaagatatttaggagatagagtcagcagggcttggtgatggattggatatggggaaagtatgtaaaagatgacttctggtgttctggcctccatagctgagttgatgatgttgcaggacccgtgttgcaggcagagcagagaggatgaaaatcatgagttcagtctttgaaatgctccagaagagatgtcaaggtggccaggcacggtggctcacgcctgtaatcccagcactttgggaggccgaggtgggtggatcacctgaggtcaggagttgagaccagcctggccaacatgctgaaacgctgtctctactaaaaatacaaaaattagctggacatggtggcagatgcctgtaatcccagctactcgggaggctgaggcagagaattgctttaacccgggaggcggaggttgcagtgcgccaagatcgcaccactgcactccagcctgggtgacagagcgaaactctgtcaaaaaaaaaaaataaaaagatgtcaagaatgtggttggatattacaagtctggcctagacaagtgttctgacatggagatacaaatttgagccatcagatgcagaaaagtgatcactgaaaccctggatataaatgttatcacctagaaaaaagaagagtgaggagaggtcttgaatctagaataattctagcacttaagagctcggtagaagaggatgaaccagcaaaagagactgtgaaggaacagctagagaaataggaagaaaacagaagaatgttatgttggaaaaccaggatgtcatgccaaacgctgccaagacattaagtaagatgaggatcatctgattttgtgacagtagagattagggattttagcaagtgagagctgtttcagagaatagacaggacgagatgctgatggtgctaatggagactgcaaggagatactcagaaatgtgcccatgacacggaagagggactacagagggtgagggtgacagaggaccttttttttttaatgggagaaacttgagcacatttgcaagggatgcctgatgggataaagtccctgaaaaggcctgagtggctgagccctgagcagcagtggagggctggctccagcttgatagtacctgcaggcaagtgctaaagttttagagcatttattctctatgtatttcaaaatattccctttaccttgtttagtaaatgtcatagcagatcaaaggcaaattaacctaaagttctgtcagaattatcatgaatatagaatttgtgaagatcaaattcctatagttttactatttctagaaaagtaatagttttttgttgttgttgtttttgagacgaagtttcactcttgttgcccaggctggagtgcaatggtgcaatctcagctcactgcaacctccgcctcctgggttcaagcggttcaccagcctcagccttccaagtagctggaattacaggcacccgccacccacgcccagctaattttgtatttttagtagagacggggtttctccatgttggccaggctggtctcgaactcctgatctcaggtgatccgcccgccttggcctcccaaagtgctgggattacaggcatgagccaacccgcctggccaattttttttttaagttttcattatctggaattctttgttgtttttgagatcagaatctctactaatgatactcaagatgggtgtaactacaaaatctgcagatgttgaaagaagcaaaatggatctgttgaaatttctctttttttctttacttttttttttttttttttttttttgagatggagtcttgctctgtcgcccaggtgggattgcagtggtgcaatctcggctcactgcagtctccccttcccgagttcaaggaattcttctgcctcagcctcccaagtagctgggactacaggcacctgccaccacgcccggctaattcttgtatttttagtagagacagggtttcaccatgttggtcagctgatcttgaattcctgacctcaagtgatctgccctcctcagcctcccaaagtgttgggattacaggcatgagccacaggcccagccagaatctgtgttttaataagatccccagggggtatgtgatatgaacgtttgagaagcccaagtctaaggcaggataaacatggcccgaggggaatctgggcatcacctctttctgtacagccagggagatgggaatggtttttacattttttaatggttgggaaaaaaaaagaagactatttcttgacacattaaaattatatgaaattagtatttcagtgtccataaataaagttttattggaacacagctacgatattcacatattgtctatggctgctttggctcaaaaagaattgttgagtaggcatgacagaaatcgtgtggcccaaaaagcctaaaatatttatgatctggcccttcagaaaacgttctccggcttgtgatctaaagtgcactggaagtacattctttgtgggtttccaagtagcttgtacaccaaggttagctgattataacaatgtgttgtttaacgatcctttatcatattaaagttgaattaataaggcaaaatcagtatttaaacataagaattatatattcaagcttcaaacttgaggaaatgccactttgactttttttttttttttaagatggagtctcactctgtcaccaggctggagtgcagtggtgcaatctcggctcactgcaacctacacctcctgggttcaagcgattctcctgcctcagcctcccaagtagctggaactacaggcgcgtgccaccacacccagctaatttttgtatttttagtagagacagggtttcaccatgttggccaggatgatctcgatttcttgacctcatgatccgcccgcctcagcctcccagtgtgctgggattacaggtgtgagacactgcacccagccctgactatgttttctaaatgagatgctggtgaactaaagagtttcttagtttaccttttgtttcctaaaaaatgaaattatggggaaaataataaaacttataggataaaaattagtaatactggtaatctctggagagagaaactagaaggggtgggggcaagagtataaaggagactttattaaattcccttttgtgcctttcagaattggatctgggattcaaacatatgggataagtttgctatcattttccccataatttcatgttttaggaaataaaagatacaattgttactcctcagaatgttttgtcttatgctgttgttagatagtttgaattaagtcttctctgtcctcaacacacatgatggttgtcgtcttgctctgagaatcaaagttcacaatccttgctcatctaggtgggaacctgctcgtgctggtggatcagcacgctgcccatgagcgtatacgtctggagcagcttatcattggtaaggatctgtttgcagccagaaaaaatttgagactcccagcagaatcagtacacctcaaagagcttttctaactgcaactgttgtgagaaagcacactttgtactgtatgttcaaaaattaaactaaagtcctgcagtttggcctgtgttataattgaaagaatgtggtagttcactaattgaaagatgtgaacttatttatgtggtcagaggcatatttgccagatgttattaacaacccagaagtacgcaaggataggctgcttactctgacatccagcacaaagctctgcccctccatatgcccggtgatcttggcatgccttcccacactccatcaggcagagaccagtggcagctcagaaggcccagtatgctgttttgattttaaaatttagtttgcttttgaatatgcagtataatcaaatagatccaattctgaaaggcacaaaagggaatataataaagtctcctttctatccttgtccccacccctcctagtttctctccccagagacaaccaatatctctggtttttaaatctatctttccaaagcaatatatgctttttaaatgtttttttttgctacccttttcctcatcatgaggcagtgtgttcaccaagtggtaaaataccaggaaagtctttactcctgtggccaatgagtaatgtcaaagagttaggcaaggacctaaggagtgcttcatggactagaatggcaatgatattactactgttttcacttttccttataaaatgacggcctaagagttgggaaagatatagtaaaaacagtgttagaaaaacttacctctacaggccctgcaccatttgagaatagtactaattctctccagagactgggagaccctgctcaaggaaagggaagccttctggagccataagactgtgtggtcaacccacatatgttcctggtaatccacattattcacctctgtcatcaaaacaacatttattaactacaggaacattggcttgttcatctgaatgtaagatgcaagtcttatatttcttattttgaaaaatactaccaaaattgttaataggctgaatatttattagtttgactttaaaaatggaaatccaaaatctaaaactgaacattaaacattctgctttgcattagaatgattatctcaaggccgtgctttatttttatctgaatctagaagacttcccttcctactcttaacccattcatctttctgccaatagattcctacgagaagcaacaggcacaaggctctggtcggaaaaaattactgtcttctactctaattcctccgctagagataacagtgacagaggaacaaaggagactcttatggtcagtaccaccatgagaatgtgatgttgatggtatcaattctcacaataattctgtgaggaataagcataactattgttccatttctcagatgagaccaagagaggttacaagacttgtctaaggtcatagcagttattaagtagtggagcaggcactcaaaggcaggtcgtctgactccacaggctgtttgtttccttttttaaaatatatttttttctgcatccaatcatccattaaaatatttattttgtgagacatggtctcactctgttgtccaggctggagtgcagtggcacaatctctgctcactgcaacctccaccttccaggctcaagcagtcctcccacttcagcctcccaagtacctggaactacaggtgagcaccaccatgctggactaatttttgtaattttttggtagagatgggttttcgccatgttacccaggctggtctgaactcctaggctcaagcgatcctcccactttggcctcccaaagtgctgggattacaggcgtgagccactggacccagcctattctttccactgtatcccagctgaagagtataggatagagtttccctgataattctttccagcagttggcttagaacactcttctcatttcttggaacagtctgtgtttatgccatgctttgtgaaagcaaagtttctgcagtaattggtcccattctgctttgctttggtgcattctagactcttagttttcattatcgtaatcataatgggaagaaagtaaaacattgggatgtaaggaaggggcgaatcatatagtgagtcacaagataggatatttttcctcttctaggcagcacaaattattgaaaatgaaaaagaaatttctcccaatatgtttcaggtttgggaatatgatactgccagtaaatctttttttccctatgacataatttatattagaggcagatctatttacttacatcccgttagtcaggacttctcaattccttgggctgttaattacctccctgctttaatgctgattcaaatcactctcagaccttttcttcatgccagactcccttaagtgccagcagccagaagttagcagttcctcaatgaagaaaacacacttagaaacaagacttagacacagattgattcccaatggaaaagagaaaaacaataaaggttactgtaattcaaaaaggaaatttgataataaaaaatcccaaacacccacacataagtgtgagaaaaacaatacggttgttaagccctgtggcagcttttgaaaaactattaagtagtatttggaaccagtagtgaagtgcaaatgaagtagcactctttttttttttaacatttgaggttatctctttaggtgttaccacaaaaatctggaagatctgggccttgaatttgtatttccagacactagtgattctctggtccttgtgggaaaagtaccactatgttttgtggaaagagaagccaatgaacttcggagaggaagatctactgtgaccaagagtattgtggaggtaagacacagctgcagatgttaaggaaattgctgagtgatggtaacctcatattttgtctgtagattctctgaattcatcttttcttcaacaagtattcatggtatttacctgctgtgtgccaggagctagaaattcagagatgagttagctcaaaataaggaagaagggcatttaaagaattatagtcagtgaactttggctagtagaggtatgtgttttgctttcttcccagtgataaaggtaatgaaaactaagagtctagaatgcaccaagatagtttttcagaagtgttatggaaacacagaatgacttgtgtgcctggggaggtgaagtcaatgaaaatgtcacagaaaagctgttttcttaagaaaagtttttacttttgagagaccaggtctcactctgttgcccaagctggagtgcagtggtgcaatcatagctcactgtagccttgatctcctgggcacaagcaatcttcctgcttcagcctcccaagtaactcggactacagacacgcaccaccatgcctggctaattttttcccttttttttttgtagagatgggggcctcactatgttgcccaggctggtcctgaacttctggcctcaagcaatccccttgcattggcttcccaaacccccggcactacaggcatgagccactgcacacagccagaaaagtcttacagaatagtgggaaactaggctgggcaaggtggctcacacctgtaatgccagcactttgggaggccgtggtgggtggttcacctgaggtcgggagttcgagaccagcctgacaagcatggaaaaaccccatctctactaaaaatagaaaattagccgggcgtggtggtgcatgcctataatcccagctactcaggaggctgaggcaggagaatggcttgaacctgggaggcggaggttgcattgagccaagattgcaccattgtactccagcctgggcaacaagagtgaaactctgtctcaaaaaaaaaaagaaaaaaagaatagtgggaaagtgctgagtacagaagaggggagaagggcattctagacagaggaatacatatcagagacttgagatacatcctatgtttagggaactatcaatagatatggctcaaattaagatctacagttgatccttggataacttgggtctgaactgcacaggtacacttaaatgcagattttctttcacctctgccattcctgagacagcaagaccaacctttcctcttcttcctcctccttagcctattcaatgtgaaaatgatgagggtgaagacctttatgatgattcatttccacttaatgaataataaatatattttctgtttcttatgattttcttaacattttctttttctttctttctttctttctttttttttttttttttgcgatgcccaggctggagtgcaatggcacaatctcggctcactgcaacctccacctcccgggttaaagcgattctcctacctcagcctcccaagtagctgggattacaggcgcacaccaccatgccccggctaatttttgtatttttagtagagatggggtctcaccatgttggccaagctggtattgaactcctgacctcaaatgatccacctgccttggcctcccaaagtgctgggattacaggcatgagccactacgcctggccaacattttcttttctctagcttacttaattgtaagaatacagtgtgtaatatatacaacacacaaaatatgtgttaatcaactgtttatattattggtaatgcttctgatcaacgttaggctattggtagttaagatttggggaaatcaggccaggtgcagtggctcacgcctgtaatcccagcattttgggaggccaaggcgggcggatcatttgaggtctggagttcaagaccagcctggccaacatgatgagaccccgtctctactaaaaattaaaaaattagccaggcatgatggtatgtgcctgtaatcccagctacttgggaggctgaggcatgagaattgcttgaacccggaaggtggaggttgcagtgatccaagatcactgcactgcactccagcctgagtgacacagtaagactccgtctcaaaaaaaaaaaaaaaaaattggggggaaatcagaagttatacttggatctttgactggatgggagttggctagatgggttgtcaaggtcaaatcataaaataatttagcatattctactaagtagtttgcattttatcctataggcagccagtggaaacttttaagcaggagagtaaggtccattttagattgcattccaaatatgattactttacatatatgttttggtaaaggtttggaaagctactgctgggctgtggcattggaggtattagagagaactattactttttattttgattacttatatgtttctttttttatagcaaatatcatttattttgtctttattgtctttttcctctcctttcctgttttctattatagttttctgtatttctctttttttttttgctctactcgtttagaagttatatattccatttatatccttttagagattagccttaacttttagcatgcatacttatcaaagtttaaaagtaattcacttctctatcctcttcctaactgtaccaaaatcttacaaactgttcatctcccatcaccctcctcccatcttccatgttgctgtctagtactttaattccaccttgtttttaattccctggtggtcatttattttatagtcaatctttatttagattaaaaaaagtgttcaccagagtctttgttcaccattgcctcttgcatcctacttattctgtgttcttttgggttttttgttttttttttgtttttttttttttttactgaagtaaatctcttacaagatcttttatccacaaacagatcttgagacaaaaaatacaaaaatataaaaataaatagaagttattttagtaagagtccgtgggccaggcatggtggctcatgcctgtaatcccagcactttgggaggccaaggcgggcagatcacctgaggtcaggagttttgagaccagcctggccaacgtggtgaaaccctgtctctaccaaaaatacaaaaattagctgggcatggtggcaggtacttgtaattccagctactcgggaggctgaggcaggagaatcacttgaacccgggaggcagaagttgcaatgagctgagatcacgccattgcaccccagcctgggtgacaagagtgaaactctgtctcaaaaaaaaaaaagtccgtgaatgataagctgtcttttaaagtatctttattttgtcttcatacttgcatgattatctagctaaaaacagaatttcacattgccagttatcccccccgcattttgaaaatatttcactacttttgactttctattttattttattttatttcattttttgagacagagtctcactctgttacccaggctggagtgcaatgggatgatctcagctcactgcaacctccgcctcccaggttcaagcgattctcctgcctaagcctacaaagtagctgggattacaggtgcccaccaccacacccagctaatttttgtatctttagcagagatggggtttcaccatgttggccaggctggtctcaaactcctgacctcaggtgatctgcctgccgtggcctcccaaagtgctgggattacaggtgtgagccactgcacccagcctgactttctgttttagccattgaagtccttagtcaatccaattattactctgtaggtaatctgattttccctctggttgcttttacgatggttcactttgtctttggtgttctgcaatttccctatgatgtatctttgtatggatttattttcatttccttctggagattcactatgcttcttcagtttggaaagtatgcagtcattatcacctcaaacgtttctttcccattctctctcttgtctcttggaaattttgtcagatatctactgggccttatctttctactctgcatgcctcttcaactctcttccatatttcccattgctttctctctgtgatacattctgtgaaatctcctcacttatcttccagtgaactaaagtatctcttcatcttctgtttaattatgtgtttagcttatccactgagttttttatttcagtgactaaattttttatttcaatggctatattttttatttccagaagttgtgtttttttccccaaatctcactcttccttttttatggtgtcctgcttttttcatgattgttccttctcctttatcactagctttcttgatttggagcacaggcaaatccacacccacctcatctagaagtctgaagtgctttagtaatatctaaaatagtaaaatctaaaattagaggatagatgtagtagataaattgggggatggatttatgtgggaagatttgagtcagggagagcagctgacgggttattgcagtggttaaggtaagagaagatgaggattggactgagtcagtagcagagggagtagagaggagtgacatatctgagacagaatttgggaggcagaagcaagaggacttggtgagcaatcaaacgtgaaaggaataaaggagaaaacaaaagcaacagtgattctgagggttgtagcatggatggctggaaggatggtggtgccattgacagagaagggacacagatgaggaggaacaaacctgcctaggagttccatcgtgaaggtgggtttagacacagtgaatgtgcctgcaggtggaatgcccagtggataggcacacttaaaagatctggtacttggaaaataaatctgggctgtacatatctatctgagagttaacagtatatatatattgatagtatcagaagctggagaagggccttgaggaagtgaggttgtccagggagaatatggagagtgaaaaggaagagagaaaagagtggagcctgtggaacatcagcatccagggtgcatatgctttggaaaaggtctggaaagctctgctgaaaagaggaaattctaaggatggctgaaaatacttggttagagagggaggaggaaaaccaggaaaaagcaatattgccaaaactaaggaaagttttaagcaaggagggaatggtcaataacggctatgaagtagagcctgaaacgctggacttgactgtcatgaggacattagttgtcttgtggaatcatttcctggggatgaggtggggcagaagataagagtgcagtgagtcaggagtgcgtgaagcaggaggaagtgaagctaagtagacaactctttcaggaactttggctacacacagaagaagagagatggggtgagagctaaaggttagaagtggttgggaagtgtggggtgggattcaaggctgaggaaaggtgtttgtttgctttaagacaaaaaagacgtaagcaggtttgcaggccaagggggaaacattcaagaggaagagcagctgtcagtcagctcttgggtcatcttggctttgccctttccagaatcgcctttggatcagacagatccaaagatttgctctgcttccagcaaagctctttcctccccacagacatgctttctctaagacccctgctccaaattgtcctaaatccaaaagataggatctgttagagtcttttattgtaattcaatccctaatatgtaaccagaaaattataagaaaaacttttcctgaaggaacttaaaagactactgttaaggagtttgcttcaaatggaaacaaacctctggtttcataaaatcttgattatcctatgtcaggctgatcaggagagactttgtgtgattctggaagaagctggaacagttttggtgttttgaggaggtagctatttgaatcctagcagttgaaagatcattaatacatccttctataaagctctatcttctagcctggtgaggaggtggaggctgcagtgagctgagatcgcgccatggcactccagcctgggcaacaacgagactccgtctcaaaaaattaaaaataataaataaatacggccaggtgcagtggctcacaactgtaatcccagcactttgggaggccgaggcaggcggatcatctgaggtcgggagttcgagaccagcctgaccaacatggagaaaccctgtctctactaaagatacaaaattagccaggcgtggtggtgcatgattgtaatcccagctactcaggaggctgaggcaggagaatcgcttgaacccagaaggcagaggttgcggtgagccaagatcgtgccattgcactccagcctgggcaacaagagtgaaactccatctcaaaataagtaactaactaactaaataaataaataaaaaataaaataaaaatattaaattatccagcattaaacagaccattggaatataaaatggactgagatgagacccatcaccccttcactaagcttacaaacagatgttttaccatcccagatgtacaaacacaagaatgtttgctctccatccacactaagctttgtcagtggattgagtcttatgagaccatctttctgtttaggtttgtttgggaaagcatgtgatttttaaattatatgtaatatagtatctactacctagctcttgataactgtgctcatttataggcatggcagactagagtatagatgaaggagggaagagaatttcctgagtctggttttaaaagaaaaggtaccatgttgtaatcttaggagcagatttacacatagccttttccaggagtaaagaaatgattttcttataaagaaatcattaaatgtgcaacaggtttttttctttttacctccagaggttaaacaaattggtagcatgaaatagtgtctgctttaaatttctttaagcttcttttgtaaatattaatatccacagggatataactattgaaaaggttaccccagggacagagacatgcaagggaggagaaatttctcaacaaagggcctcagaaaataaactttctgacctgaagggaattgtccccaaaaagcccgtgggaactaaagtgactgtttacttatgtttatgatatttaagcaagtgttatactgagcagtggttgtgttgatggttgttgtgtatttattctcagtttgtgtgtaatattacgcttgttctggctaagattacacacacaaacagacagccttttagtgagaagccttcctgatgttttgaattggttgaatcatcaaggctactctcaccagctacataacctcattagttgagaagctatctctggaggaagtctcagtagctaaatatattctgtgttcaataagagttctattcagttgcttggttttttcatattcaaagtgccttacaacaaataaatttgtacccaagtgctgtattgctggaactctttctttcaggaggcatgatttaaagaagaaaattgagatattttgtaaactatcaaagggcaagtaaaacataaccgtagattaaagccgattttccttttgctttgcaggaatttatccgagaacaactggaggtaagcttttcctttattttggggtttcacacagaagcaccacacataaaaggcttcgttgttccattttcttttcctgttaataacgtgtttatgcattagctactccagaccaccggaggcatccaagggacattgccactgactgtccagaaggtgttggcatcccaagcctgccatggtaagcccttcaacatagcagtgatcaaacacctctgcatgcagagccctggcagggctgccgggattacgaaagaggcagagggtacatttactacttgactcttggagaatacaatttagatcaagaaactgaatatacccttttaaaaatcacttttacaaaaacaaaatcccaacacaaaaatttgactatagtgctgcctgacctatatgagtggaggaataactcctagaggagatgcattttgagatgaattttgaatgagctggggaacatgggttcatagcatggaaaggggaattcactatagggagagtaaacagcctgtgcagagaggcagaacagaaacaagttagttatatgagaagcagcaaagagtatcaagaaactaggcaggtaagagaacagaaacctagaaggtcacagcaaaacctttggatttgatacagaaggcattagaattagcaagcgttctttttttatctttccaactttcattttaggttcagggggtacatgtgcactttgtaacatgggtgagttgcatgtcgcaggggtttggtgtaccgattattttgtcacccaggtaatgagcatagtacccaataggtagttctgatcctcacccacctcccaccctccaccctcaagtaggcccaggtgtctgttaccccttctttgtttctatgtgtattcaatgtttggctcccacttttaagtaagaacatgcagtatttggttttctaattcacttaggatgatggcctctagctctatgtttttgcaaaggatgtgatctcgttcttttttatggcgacatagtattccatgatgtatatgtaccacattttctttatccaatccaccattgatgagcattgaggttgattccatgtctttgctattgtaaatagtgctgcagtgagcataacacatgcatgtgtctttatggtagaatgatttctgtttctttgggcatattcccagtaataggattactgggttgaatggtagttttgctttaagttctttaagaaatctctaaactgttttccacagtggctgaactaatttatatttcccaccagcagtgtataagtgttctgttttctttgcagcctcaccagcatctgttattttttaactttttaataccagccattctgactggtgtgagatggtatgtcactgtgattttgatttgcatttctctaatgattagtgacattgaacattttttatatgcttgttggccatgtgtatgtcttcttttgagaagtgtgtgttcatgtcctttgcccattttttaatagggttttttggtttttgcttgttaatttatttaagttccttatagattctggatattagttccttatatagattctggatattagacctctgttggatgcagtttgcaaatattttctcccattctgtaagttgtccgtctattctgttgatagtttcttttgctgtggagaagctctttagtttaattaagtctcacttgtcaattttcgttttattgcagttgcttttagagtctttaccaggaaatctttgccaaggcctacgtccagaatggtatttctgaggttttcttctagggtttttgtaaaaagatggaatgcgcccaggcgcggttgcttacgcctgtaatcccagcactttgggagaccaaggcggatggatcacctgaggtcaggagttcgagaccagcctggccaacatggtgaaaccccatctctactaaaaacataaaaattagccaggcgtggtggcgggcacctgtaatcccagctactcaggaggctgaggcaggagaatcacttgaaaccaggaggtagaggttgcagtgagccaatatcacgccactgcactccagcctgggtgacagagtgagactccatctcaaaataataataataataataataataatgaagatggaatgcttcatgaatttgcatgtcatccttgtgcacggaccatgctaatcttctccgtatcactccaattttattatatgtgctgccaaagcgaacaccattgagggttcttgagcagggtaatatgatacaatatagaaaatggggagctgggtgaggccctgtgaggaaggtgcctgcttctccttcaccttccgccataattgtaagttttctgaggcctccccagccatgcagaactgtgagtcatttaaatggtctttcctttataaatgacccagtcttggtcatttcttcatggcagtgtgagaacagactcatactcctctatcaccaaatgtcatcattgccaccttcaaaatgtatcttcggtccgtctgattcagtctgtctggctcctccctcatttttgccactgttgagctctcttacttagttcttcacatccactctggctccctttcaagctgctcttctctcagcacccagaggaatctttttgaaacatccctccaagcatgttgttcttctaactaaaatgtgtcaatgatgacccattgctcttgggatagaaatgtgattttttactgtggcccacaagggtcttcgtgatttggcccctgcctgcctctccagtgtcacgtcatatcactctccaccttgttctttacatcccagcctgcttttttggtcttctgcttcctgtgtgctaaacatttgtcagcgtcggggcctctgcactggccttctcctctacctgaaacacttttctctccttcttcaattagccacgtctttcttaacctaaagtctcagcttgaatactactttgccaggaaagccttccttaagctcctaaactgggtttggtcttcctattatatattcatatcctgtattttatagcacctatatttatcatttaaattattgtataattatctgcttcatgtttgtctcccctattagaccataagcgccatgaggatggaaattatctgtctcactaactgcctgacaaagctcccaatacaaagtatatacttaataaatatttgttgactgggtaaattgtgcataaaggcaggttataacaatatgagagtttagattaggaagattattatggaaattagaaaaaaagaagcaaataaaatgaacattgtaaggaaacaatcagagattgctattggacgatccatggagaaagataaccccaacttcacaaacccataaagagtaggcaaaaatactgctcttgcctcttggagaaaaactctgaaagccagatcctaacaagttaaggaatgcctcctacagagattagaaatacaaatactccgtaagaaaaagctgagagacagaaggtcagtcctgaagccttagtttcatccatggtcataagcactaatttatttccctctttttttttttttttttttttttgagaacggagtctcgctttgttgcccaggctggagtgcagtggcgtgatctcggctcactgcaacccccgcctcctgggttcaagtgattcttctgcctcagcctcccaagtagctgggactataggcgcgtgccaccacacccggctaatttttgtatttttagtagaggcgggatttcaccatattggccaggctggtcttgaactcctgacctcatgatctgcccgcctcagcctcccaaagtgctgggattacaggtgtgagacaccatgcccggcctataagcaccaatttcaagcaggattaaagcttcattaaagaagcctaagaaacatgttactttttccagatatttggcagtgacccaaggtcagcattggtttcccactatatacactataaccttcttgtttctgtctttcatttaggggccattaagtttaatgatggcctgagcttacaggaaagttgccgccttattgaagctctgtcctcatgccagctgccattccagtgtgctcacgggagaccttctatgctgccgttagctgacatagaccacttggaacaggaaaaacaggtacattaatgactaacaggagcaggagggagcaaagtttatcttctctttcttttctggcttttactatgcaactgtaatctgtcttaacctttccaaaataggagagttttgcaaaatctgcattggaagtttcacataaagcctcacccatttcattttccagctcaaatccaaaatggaacttagactgaactgtcaggtcacctacataatggctttgtattttaaaacttaacacatgtacagacttatgtaccctgaatatctattgcctgctggctctaggtttcataatatgcagttctttctgaagctactgaaagttggtagaagcacagcaaattcactgttggcaatatagagcctcaacttccagtttcttgatagtacctgctggaaacggtgatctgtgactgtagctggccatccccaaggatcttgagttatggtttgaggatcatcagacagggacccaagcttggggatctctacattatgctttggccctaattacccagcaacctgcaaactacaatgtggataatgcagaaaaggcacagaatggcttaaatgaagaacttctgtccttgttataatcttcagtgaaggagaacatggagaacataacaggaatgtccctgttgctgctttccaaaatctttcctttttttttgttttttgagacggagttttgctgttgttgcgcaggctggagtgcaatggtgcgatcttggctcaccgcaacctctgcctcccgggttcaagcaattctcctgcctcagcctcccgagtagctgggattacaggcatgcgccaccacgcccggctaattctgtatttttagtagagacagcgtttctccatgttggtcaggctggtctcgaactcccgacctcaggtgaactgtccaccttggcctcccaaagtgctgggattataggcatgagccactgcgccctgcccaaaatcttttcttttgctaacctttccctgctaagggatataaaatcttttcttgcatggagttttcaggtactaatgttgtctgactcaactagctgattttacttcattaaaacctctttgtttcacaaagaaaaatatgaagaaagtttttctccattgctgagagctgggaatctagacttaaagttctgagtccccttggatccttaaaacaatctgtaatctctattgaatccagaagttagaaatctaaacagattataacagccagactttggaaatatttgtatgctacctacattttcaattttttttttttgagacggagtctcactctgtcgcccaggctggagtgcagtggcatgatcttggctcaccacaacctccgcctcccaggttcaatcaattctcctgcctcagcctcctgagtagctgggattataggcatgcgccaccacacccggctaatttttttttgtatttttagtagagacagggtttcaccgtattggccaggctggtctcaaactcctgaccttgtgatccgcctgccttggcctcccagagtgctgggattacaggtgtgagtcacctcgcccagcctgtatgctacctaccttttcatattgctaattgaagttattctttcttcccatagattaaacccaacctcactaaacttcgcaaaatggcccaggcctggcgtctctttggaaaagcagagtgtgatacaaggcagagcctgcagcaatccatgcctccctgtgagccaccatgagaacagaatcactggtctaaaaggaacaaagggatgttcactgtatgcctctgagcagagagcagcagcagcaggtaccagcacggccctgactgaatcagcccagtgtccctgagcagcttagacagcagggctctctgtatcagtctttcttgagcagatgattcccctagttgagtagccagatgaaattcaagcctaaagacaattcattcatttgcatccatgggcacagaaggttgctatatagtatctaccttttgctacttatttaatgataaaatttaatgacagtttgattggttgcttggtttgttatttgaagggtgtgatttttgtttttgtacagttttttttcaagcttcacatttgcgtgtatctaattcagctgatgctcaagtccaaggggtagtctgccttcccaggctgcccccagggtttctgcactggtcccctcttttcccttcagtcttcttcacttccctatgctgctgcttcatgtgctacatctcagacttaaagagtttctctactacagtgaaaacattctctagggtctttcatcaggcctttagttattttagggataaaaactattgataaaaaggacaaggatagaacagagaaaatttaaagtcctgttccgggttttttgttatgttttctttaaaaactcagagactgatgttcaatatcccaaaccagtaaaatggtgaaaatactatgagcttgttttttaaaatatgattttttttggtactttataaa

SEQ ID NO: 6305 - DNA, 4747 bp, Homo sapiens
ttttgagacagagtcttgctctgttgcctaggctaaagtgcagtagtgcgatctcggctcactgcaacctccacttcctgggttcaagcaattctcctgcctcagcctcctgagtagctgggattacaggcacccaccactgcgcccggctaatttttgtatttttaatagacggcgtttcaccgtcttggccaggctgatctcgaactcctgacctcatgatccccccacctcggcctcccaaagtgctgggattacaggtgtgagctaccacgcctggtcctcaggtagttctttatagcaacacgaaatggtctaagccactatccttatgccagtaccacactgtctcagttactgcagctttgtagtaagttttgaaattgggaagtgtgaatccttcaactttgtttttccttttcaagattatttctagctatcctgggtcccttatgtttccatgtaaattttagtatcaatttttcgatttctgcaaaagcactgggattttgatagagattgagttgaatctgtagatcaattgggtagtaatatcatcttaacaatgttaagtatttcaatacatcagtaagggatgtctttccatttatttagatactctttaatttctttcaagaatgttttgtagatttccatatatgtcgtgcaattcttttgttaaatttattcctagacactctatctttttgatgctattataaatggaattgtttcctaatttcattttcagtttttcattgctagtgtatagaaatacaattgatttttgtatatcaatcttatatcctacaaccttgtgagactgttaattagctctagtgtgtgcctgtgtatgtttcttaggactttttgtatacaagatatgtcatctacaaatagaggtagttctgctttttcctttccaatctgaatgccttttctttctcctgctgtggatagaccctcaagtataatattgagtagagtggtaacagcagacatccttgtcttgttcctgatcttcgtgggaacgtttttaatctttcaccattaagtatgatgttagcagtgggtttttcacagattccctttatcaggttgaggaagtttccttctgttcctagtttgttgagtgttttgatcataaaagaggtattggtttttgtcaaatgcttttttgccatctattgagatgatcatatagcttttgttttattaatatggtgtattaaattgattacttcttgtatattgaaccaaccttgaaagaaatcctagtttgtcatggtatacaattctttttctgtgttgcctgatttggtttgctagtattttgctgatgatttttgcatctctgttcataagagatattggtctatggttttttggttgttttttctcgtgacagctttgtttttgggaggctgaggaaggaggatcatttgagcctgggaggttaaggctgcaataagctgtgactgtgccaccatccttcagaaaaaaaaaagaaaaaggaaaagaggtattgacaattcacattcatgtttcaaagattccttccaggttagaatttgaattttaagtaccacagtcccaggaatgagacacttatttttcatttttattttttagctttagttttagtatgaggataatgctggcttaataaaatgtgttgggaagtgtttcctcttcttttttttaacccttaattcttggtttggatcttcttctattttttggaagagtttgtgaagggttggtaaaggatttttttttaaacatttggtagaatttacccatgaagccatctggtcctgggctttttatctgtgggaagtttttgattacaaattccatctcttggtataggtctattcagactttctatttcttcttgattcagttttggttgtttgtctttctaggtattaggtttgttttcatccaaaaaaatttaatctaattttttggcatataattgttcatagaattcccttttatcctttttatctttgtaaggttggtggtaatgtctccttttatttctgattttagtaatttgaggctttcatccgtttttctttatcagtctagctaaaggttgtcaattttgttgatcctgtcaaagaagcaacttttgttttattgattttctctattcttctgctttccattaatttctgctctaatctttatttccttctttctgctcattttgaattcagtttgctcttctttttctagtatcctaaggtggaaatcttgattattgatttgaagagagtttctttttagattgcaactagaggtggtgattacagtccttgaaatgttgtcagatgattgtttaagcaaaaatatggttatgaggtagaattcactttttggaattttcttaggggagaaaaaccctgttggtgcaatagatattcaaaactgaacatgagtcaataacattatgtcatcattaaaaaaataagaacagagttgagcacacaaatgaaaccagtaggaaacgcccattctcaacactggtcaaattttggagtgttctgttcaactctcaagagttcagataaggccaggtgcagtggctcatgcctgtaatcccagcactttgggaggccgaggcaggcggatcatgaggtcaggagatcgagaccatcctggctaacacagtgaaaccccatctctactaaaaatacaaaaaaattagccgggagtggttgcgggcgcctgtggtcccagctactggggaggctgaggcaggagaatggcataaacctgggaggcggagcttgcagtgagctgagatcacgccactgcactccagtctgggcgacagagcgagactccgtctcaaaaaaaaaaaaaaaaaaaaaaaaagagttcagataaatcacattgcaaatttttaaagatttatttgactgtgacaacctcctgtttaaaactgcacattcttacagctatttaccatataagataactcttaagaactggagatagtcagctcccctgggttaatttgaagcagaagagggcagttgttatactgccctgtcagttggatgcggagtcttactcaaaattcattctcagcattcttcttttatggtatcttctttggcacttagcagcgcatcaggtaggcatcttctatttttcttcattccttaatttcctttgtatccctcaaatggttatttatttggctggagtctgttttgttcattaagcaaacatgtctttgctttgaacatgtctttgatttgatggatacttaaattcctcatcaaacattttgttgctatgcataacgttttctttggccaactccagcaatttcccacattttgacatgcaatcatgttaactcccattttcttttgtaatccaacatcttctatttagataattactttaacaatcaatgacttaatattctaatcataaatttatacaaaaataaaattacctccaaaacattgctacctttcctaaacattcagtcttgccacagtttaataaaaggaaagaacattaaaaaggataagacactgtaatgattagatgctttttataagcctaaaggcattgtgattatttagacagaagagaagaaagtgaagtgaaaacctgatagttatgtagtctcatggtttgctgttgagaggctgaacaccagctgctttccttttctaggaagataataaagtgggctttggctacaacataaagatgttgggttagacagtttcactacagtaagaacaacgggatgagttgcccaggaaattgtgaaatactttctaatgatctttaaagatataatgaacactaattcatctggatttgtttacgtgtggtcctggttaaaggcaaagggaaggatcagataacttcatgttttttccatttaacatacccaatagattcttgattaggggaagggaaaatgagcaagatacagtccagtattctaaaaacaatcagccttaggggatcatttcaaaagcatctgttttggacttaagtctttgatacttaaccaaattgactacacagtgaaaaattctagtgcctgggttttatagggtagaagaaagacatgcagtcaagtggccaatacttcatgtgaagataagcaatgagatccttcttgctgtctttcttttgactgttctgggcaatatcaaattagtttcagtggcttgattctaggccaagattctggcaacagattgtagtcttaccttgttttcttcaatctcactggatctctctctctttttaccccccttaggctgagggtaaaaagctgggattggtaggctgggtccagaacactgaccggggcacagtgcaaggacaattgcaaggtcccatctccaaggtgcgtcatatgcaggaatggcttgaaacaagaggaagtcctaaatcacacatcgacaaagcaaacttcaacaatgaaaaagtcatcttgaagttggattactcagacttccaaattgtaaaataatggcctgaatttaagttttctaagataaactcagtggtttggtttttattattaatagagatagaactattgtgtgttaatattagcattagtcaataagttattttaatgtcagatttttgaatgttattatatattacctgtatgatggaaggattaccactgtacacaaatctaatcaataaaaacgttagaaccttctgcttagagtacttttaaaaa

SEQ ID NO: 6306 - DNA, 1091 bp, Homo sapiens
gccagctggtaatgtttattgcaactggggtgctatacaattagtaagatgatgcaatgagaatttctacttttgtatttcctgaccagcctgctcaaagtggcttttatatcaattgaatgattttcctcattttttaatacaggaaaccaattcgtgctcatggaagaaaagttcctttgccagcagccttgaagtgaatcttacaggagcaatgaaagtattgcattcattagcgtctgccccagagaaggttcagagaaaaccttcacttgttttcaaggggatccttgtagatttacgtaattggaatcctgaagaacaggccctactgtctaaaaaatggcttttattcttctaaatacatataaacggatgttttatagatgggaagacatgaccttagaaaggagagagttttcagaggatttgccaggctgtcaggggctctgcctccaggcccagtgtggcagtgtggcctcagggcctccgcctccctgcttgagggctgcatggaggccaactgtcctgggagttgtaaaaatcttttaaggccagaccaatttgagggattttaaaaagtgtctcagtgcctcttatgatttcagaaggttttgctatatgtaatcccaactactgttttcttgagagtagcagaggattagaaaaagtcctccataaattatgtaaccggccttcctgactagcctgactcaagcaatgtaagagataattattctgttttcataatttataagtgtgggggcatgcctcagcataaaaacaacctattagggaaaaatatctaatagattacctttatcgcctgttagggttttatgttgtttttaactcagatgccataagaacaaagatacatgtaatttataatagtaatcattaatacctatattgtgctttaaggtttacaaaataatttttctcatactttatcttagtttagtttcttgacagtccatgaggtaaggtggtagctttatcaccattttacaaagtgggaaacgaaggttcctcttaggaacctagttgtcacctttgtataataaaacttcgaagctcggagctgttaa

SEQ ID NO: 6307 - DNA, 1090 bp, Homo sapiens
gccagctggtaatgtttattgcaactggggtgctatacaattagtaagatgatgcaatgagaatttctacttttgtatttcctgaccagcctgctcaaagtggcttttatatcaattgaatgattttcctcattttttaatacaggaaaccaattcgtgctcatggaagaaaagttcctttgccagcagccttgaagtgaatcttacaggagcaatgaaagtattgcattcattagcgtctgccccagagaaggttcagagaaaacttcacttgttttcaaggggatccttgtagatttacgtaattggaatcctgaagaacaggccctactgtctaaaaaatggcttttattcttctaaatacatataaacggatgttttatagatgggaagacatgaccttagaaaggagagagttttcagaggatttgccaggctgtcaggggctctgcctccaggcccagtgtggcagtgtggcctcagggcctccgcctccctgcttgagggctgcatggaggccaactgtcctgggagttgtaaaaatcttttaaggccagaccaatttgagggattttaaaaagtgtctcagtgcctcttatgatttcagaaggttttgctatatgtaatcccaactactgttttcttgagagtagcagaggattagaaaaagtcctccataaattatgtaaccggccttcctgactagcctgactcaagcaatgtaagagataattattctgttttcataatttataagtgtgggggcatgcctcagcataaaaacaacctattagggaaaaacatctaatagattacctttatcgcctgttagggttttatgttgtttttaactcagatgccataagaacaaagatacatgtaatttataatagtaatcattaatacctatattgtgctttaaggtttacaaaataatttttctcatactttatcttagtttagtttcttgacagtccatgaggtaaggtggtagctttatcaccattttacaaagtgggaaacgaaggttcctcttaggaacctagttgtcacctttgtataataaaacttcgaagctcggagctgttaa

SEQ ID NO: 6308 - DNA, 269 bp, Homo sapiens
cactttgggaggccgaggcgggcagatcacctgaggtccggagttcgagaccagcctgaccaacatggagaaacccccgtctctactaaaaatacaaaattagccgagtgtggtggcgcatgcctgtaatcctagctactcgggaggctgaggcaggagaatcacttgaaccctggaggcggaggttgcagtaagctgagatcgcaccactgaattccagcctgggcaacaagagctaaactccgtctcaaaaaaaaaaaaaaaaaaaa

SEQ ID NO: 6309 - DNA, 649 bp, Homo sapiens
aacttgcagtgccacagacaagcaccagagggatcgagagattacaagcaactgaaaagaaactggcagacctctctaattgggacattccatgtacaagcccagagaagattcatccccagaaaaggtttgagaggccccagaatctctagctgagctgattggtgaagttcttctcctgtaccaagccagtccataaagactgggagaggtggctgttttttcagataccccaaatcccagcaaaaaaataatgagacatatgaagaaacagagaaatatggcccaattaatggaacaaaataaatctccagaatttgaccctagagaaacagagataaatgaattatctgacaaagaattcaaaatgatcatcttaaagaagcttagtatgctgtgagagaacagagatagtcaagcaaatgaaatcagaaaaaatgcaataacaagaatatcaacaacaagacagaactataaaaaaagaaccatacaaattctgcatctgagaaataactgaattgaaaaattaactagagggattaaaaagctgacccagtcatgcagaagaatcgtcaaactcaacagctcatttaaattcatcaaatcagaaaaaaaaaatgaaaagtaaagcctaagggatttatggcac

SEQ ID NO: 6310 - DNA, 10093 bp, Homo sapiens
ggctaaacgcaaccaggaacacattggcaaacttttgcgcctgcgcccaccgggcgtgcacctgtaggctgaagtcgcgcatgcgctagatgggaacgttgtttcttctcccctaccccttttctgtggggctgttttagggacagactgcttccgggtcgaagggcttgcttccggagagcgggaaggctaaaacgcggtagctaaactgcagccaactttggttgtgtgtggaaaaggctttagccatggacaggtcagtactgatggtggcagctgagcccgaagtcttgcccgtctcgcctgttggcgaaacgaaataggtgaaactagactcccagaagaagccaaggaggtcccgggtgcttcccctaaggctccttccccatgccgggaaatttggccacaaatggggaaaaagccgcttggcgtgcgtcggggtggggtacagatcataatagtcccttactttcccactacgttctgcgatctattcggcgctttggggcagcaacactgttcgctcctggggtgggcggggtaggtagcgcggcgttcgaaatgctaagtgaccagcctgagatcacaaagccagtcagtgaagatactgggatctcagcccagactttctgattacaagtgccagcatcagattctgagttccctctatgatctgggtactgtgctagccgcctacaacaaagatcagttattcaagatccttcccctcggggaattagttgtgtaatggagacaaccaagcagtgtaaagtggtaagtgtttgggggcgattaagtctccttgtcactgtaactatcaggaagacccctcaaagaaggtaactttctagctggtctttgaataataagagtacattattcgtactccaaacattgagtacctactatgtgactgccattgttctaaaggcgttgaatatatattattagcttatttaatcttcagaacaagaaaaatcctatgagatgggtactgttatccttttttcatatataacactgagactaaaagaggttaaggaacttgctgaaagttcggaagctaataaatacaagaaccaaattgccaacctgcatctgtgtgtctccagcctacctgaggctctttgaggagtaagtagttgttgaccaggtgctcaagggggcaaatgtaggtctttgtaaaagaagcatattcagaggtgctaggatatgaaaaaaaagtacgtgtagctcagtggtcacatgcagtatacgtttaaagtgatgtttgtggctgaatagaagactgaacccctaaactggggtcacattgtaaatatcattttaggaaatttttacttctatagaccagagagctatctgaaggttttttttttgtttttaattttaattgttaaacgtttaaaattgtttctatgtggttgtttcccatactttcctgctgaaggaatatctgaaggttttaagtggaggaaaagcatattagattcttgtcttaaacacaggccttttagtccgcacaatttagtttctagacctttgagtgaaactgacagggagtgttgtgatgggacaggagacctcctgggttgaaataacttgaagggtcattttgctccaatttaccacaattcttttacttacccttctatctcacaagctctgtttgttgttgttgttgcaagctctgtttgttgttgttgttgtttgtttgttttttaatagtacccatggtttaaagcattttggagactgcagaaaatcttttaagagagaattcctgcagttaggtaactcctcaatccaacaagggaaataagattcactttcatgaagcaattatctaaaacagtgttataatatagattccaagtgttgaaataattccttaggagaaaataacatagtgagtactagaaagtcagagaagtctttgtgcaggtaagatttgagtaaggctttgaagaataagcaggatttggagccaggagtgcgttctcaacaaaagatctaagacttggctactagaatgactataccttaacttactcagggtcctttactccagctgtgatgataaaattctttataaatgctatattctcgtttcacttatataagcttgattatactactttaggagtggctttggagagatatcatcccctgtaatccgggaggcagaggtgacacggactgcacgaaaacagagtgctcagaaaagagttttacgtatcctttgcgatttaagcatcattataaaaattgtaacatgtttggaatcagtgttgtagaattttctttttataagagtattaaatggtagctataataaaatcctgtagaaactttttttcactccacagagctgtcatttggtaaatataatgcaaaaatttaatgagatcgtatttccctaaaaataaagatatttcttactgctgacagcttctgctgagattagatttctttttattatttgaaaactgactaaaaacatttagttcagtgtgtagttatctaagactgacatctgatcatttaaatggcagaagcaatgaattatttaccctttgcattgaaaaatggtagccctaaaatacttgttcttgaaaaatgtattcacataatttgtgtagtaaaaagatggttaattctcattttagtgatctcttttctacatggaaaacttttcttaactcgttgtacagttcaggcatctcaagatgaaaattttggtaatactacaccaagaaaccaggttatccctcgaactcctagctcatttcgacagccttgtaagattttttgcttttaaagcatttaataataacggtaattataatagcaactaacatttattgtaacataattagtatagtatttggttacgatatcaataagcactaataataatgattgcagttattattcgtttgaactcttgccatgtacaaggtactgtactttccataaacacacggtaactatgacatgggtattgttggccctgttttaccaaaactgaaagtgagacttagagaagttaactaatatatacaataagtatgtaaataggctggatgcagtggcccatgcctataatctcaacactttgggaggccaaggtgggtggatcacttaaggccaggagttcaagactagcttggccaacatggcgaaaccctatctctactaaaaatacaaaaattagctggcgtggtggcacatgcctgtaatcccagctactccggagggtgaggcaggagaattgcttgaacccggaaggcagaggttgcagtgagctgagattgtgccactgtactccagctggggcgacagagcaaaaaaaaaaaaatcccagttccattatttacatactctttttttgttctgagacagaaaaaaaagagtatgtaaataatggaactgggattcaaacaatgatctgtttactccaaagtttatgcccactacactgcactgcctcagtatgccttataaaattaaaatatgaagaatccgttgactgattagtgtctttaactgctcagttattctataatgaaagcatctgtaattgcagtaaaatgtttcctgttaggctcagtagtacctacagctcaaatttagaaaaataagttaaatccttgtatcatggaaatgttaacatttaaagtatttatttggttagagtctaaataatggaaaactgaaaaatttattcttcattgtttgtttgcttactttgttttgataatgaatgctcacgcactttaggttctttctaccaaccttttgtttatagttaccccaacaagccgaagcttactaaggcagccagatatttcctgcattcttggaacaggagggaagtcgccccgacttacgcagtcttcagggttctttggaaatctctccatggtatgtagaaaaatagggctaagaactccttttgggtcgagtgtggtggctcacatctgtaatctcagcactccctgaactcctgacctcaagtgattctcccgccttggcctcccagaagtcaggagtttgagactagcctgcttagcatgataaaaccctgtctctactaacaataaaaaaattagctgggagtggtggcttacgcctgtaatcctagctgctcgggaggctgaggtgtgagaattgcttgaacccaggaggcagaggttgcagtgacctgtgattgcaaaagaaaaaaaaaagagaaaaaagaacttctccctttttataaaaatatgatatttgatgtaaaagtcttttaacaaatattgagtcagaatcatcataacagtaactttaggttatatggattgaaataattagacagtaaaaaaactgaaaaccttatgcatctgatatcacagatggaaactgtgacaccagcaacctttagatgaaaataagatgttttaatctgtcagtttgctgaccagaagaagtacatgctgtggttggttgctgatggctataaaatctgatccctgttttgaagcatacaagagtaggaatcagaggttaacagatgaagaatatcttaaggaagagataaaatgtattaaaggggataaaagagaaaattggaaaaagtaggtgagatactctttaggaatcactatggaacagtattaaaaatagcaaaagaaatgttatgtaagctgtgatgcagaatgacttcacctaagtattaaaaatacactatagtagccgggcatggtggctcacatctgtaatcccagcattttgggaggctgaggcaggtggatcacatgaggccaggaatttgagaccagcctggccaacatggtgaaaccccatacctaccaaaaatacaaaaattagccaggcgtggtggcacgtgcctgtagtcccagctacttgggaggctgaagtgggaagatggcttgagcctgagaggcaaaggttgcgttgagccatgatcgtgccactgaactccagcctgggcaacagatccagaccttatctcaagaagggaaaaaaaaaaaaaaagacgcatacatacatataatttttagaaaccttatttgtttttaaagtatccactcagtgacaataactccatcacttttctgtatttttacttttttgtttttttttaaggttactaatctggatgacagtaactgggcagctgcattttcatcacagcgttccgggctgttcacaaacacagagccccacagtataacagaagatgtaactatcagtgctgttatgttacgtgaggatgatcctggagaagctggtaaaatggcattgagctttgtgacaagtagcttttcactttagcaagatgaaggaaaccatttcttcctgtttctgaacgtcattatgtttttcttttctttctttctgtctttttttcttgagagagtagcttaaacaacagatttttgtgtgtgtgttttttgagacaagagtctcactctgttgccgggcgcggtggctcatgcctataatcctagcactttgagaggccgaggcgggcagatcacgaggtcaggagttcaagaccagcctggccaacatggtgaaacctcgtctctactaaaaatacaaaaattagttgggtatggtggtgcacacctgtaatcccagctacttgagaggctgaggcaggagaatcgcttgaacccgggaggcagagtttgcagtgagctgagatcgcaccattgcactccagcctgggctacagagcaagactccgtctaaaaaaaaaaaacaaaaaaaaaaacagtcactctgtcacccaggctaaatgcagaaatgcagtggcacaatcatggctcactgcagccttaacctcccaggcttaagcaattctgcagcctcagcctcctgaatagttgggactgcaggcatgtaccaccatgcctagctaatttttttttttttttttttgagatggagtctcgctctgtcacccagactggagtggagtgatgggatcttggttcactgcaacctccgcctcccaggtttaaatgattctcctgcctcagtctccagagtagctgggattataggcgtctgctaccacacccggctaatttttgtatttttagtagaaacggggttttgccatgttggccaggcttgtctcaaactcctgaccatgggtgatccacccgccttggcctcccaaagtgctgggattacaggtgtgagccactgcgcctggccgccagctaattttttatttatttatttatttatttttttttttttttagacggagtctcactctgttgcccagactggagtgcagtggtgcaatctcggctcactgcaacctctacctgctgtattcaagtgattctcctgcctcagtctcctgagtagctgagattacaggtgcccaccaccacgcctggctaatttttgtatttttagtagagagaggtttcaccattttggccaggctgatctcgaactcctgacctcaagtgatccgtcctcctcagcctcccaaagtcctgagattacaggcgtaagccactgtgcccagcctaattttttatttctttatagagacagggtctacaaagaccagcccaggctggtctcaaactcctggacacaagtgatcctaccgcctcagcctctcaaagtgctgggattataggcaacaacataaatttattttctcacaattctggagcctagatgtctgagttaaaggtcttggcagggttggttttctctgaagcctcttctcttggcttacagatggctgtcttcctcctgtgtcttcatctggtcttctgtctataatatatttttccttaagctaattagttgtggttatggcaatggtatttgatacagtatcactagaaggttgagaacctcaccttggttctcagtctgagcagcatcttgccattttatcttttaatgtaaatagcagcctgttacgttattagacaagtctcatattgtaatttttttcttatttgtgctgttgaaagagcatctctttctttaggtttagttcttaatctaacattgttgatgtgttttgttttctcctggaccgtaatgctgttattttttttcagatagtgttatgaccactgtacaagcattaactcatgtaatccttatggtggtccattaaatagttacaataattattcccattttagagaaaaggaaactactgctcaaagtggttaagtaacttacctcaaaccacctggctaggaagtagtggtaccaggatttgaaactaagcagtttagctccagagccctgctcttaacactttggtaactactactttcttgtagtatctgtcaaaaacaggtactcgtattaagtgactcaaaatactttctacttaggccaagtgcctgtattttcccagagtggaacatgccatttagtatgtattataactttctccactactttgtaatggtgtgcttaaaatataattcagatatttttaaatctggctcaatttcttaagtaattgtttataaaataactagtatatctttgagatcttaaaagacctttaggtatcaaaagaaaaaatagataaattgggctacatcaaaattttaaacttttgtgcacgaaagaatacaatcagcaaagtgaaaaggcaacccacagaatgagagaaaatatttgcaaatcatatatctgcttaggggttaatatccaaaatgtataaaaactgctacaactcaacaacaaaaaaacaacccaatttaaaaatgagcaaagaaatagaatagacagaggctggacgcagtggctgatgcctgtaatcccagcaatttgggaggctgacgcgggtggatcacctgaggttgggagttcgagaccagcctgaccaatatggagaaaccctctccctactaaaaatacaaaattagctgggcatggtggcgaatgcctgtaatcgcagctactcgggagactgaggcaggagactcgcttgagcccgggaggcagaggttgcggtgagctgagatcatgccattgcacctccagcctgggcaacaagagcgaaacttcatctcaaaaaagaaagagagaaagaaagaaatagaatagacactgttctaaagaagattcacaaatgaccagtaagcacatgaaaatatactcaaatgtcactaatcattaggaaaatccaaatcagaactacagtgagttacaagatactgccttacacccgttagtgtggctactgaaaaacaaacaaaccaacaacaagaacaaaaacccagaaaataacaagtattgacaacaatgtggagaaattcaaatccttgtgcactattggttggaatgtaaaatagtacagctgctatggaaaacagtatggcagttcctcaaaaaattaaaaatagaattaccatatgatccagcaaacctgcctctgggtatatatccaaaagattggaaagcagagtctcaaagaaatatttgtacatgcatgttcatagcatgattcatagtagccaaaaggtagaagcaagccaagtacctgttgatagatgaatgggggaaacaaaatgtgatctatacatacagtggaatattattcagccaaatatgaaggacattctgacacatgctacaacatggatgaaccttgagaacattatgctaagtgaaataaaccagtcacaaaagggcaatactctatggttccacttacatgagatatttagaatagtcaacacatgtagggacagaaagtagatggatagttgtcaggggctggggtaagtggagagtggggagttaatgtttattaagtacagagtttcagtattacaagatgaaatagttctgtggatacatagtggtgatggtagcacaacaatgtgaatgtacttactgacactgaactatacacttaaaaatgattaagccagggatagtggctcatgcctttaatcctaccactttgggatgctgagacaggagttagcaagaccctgtctctacagactaataaaaaattagctgggcatggtggctggtatatacctatagtcccagctactggggaggctgaggtgggaggatcacttgaacctaggagtttgaggctatagtgagccatgattgcaccactgtactccagcctaggtgacagagcaagatccccctctcttaaaaaaaaaaaaaagaaaaatgattaagataaattttatattatgtgtatcttgccaattaaaaaaaattttgaggctgggtgcggtggctcacgcttataatcccaacactttgggaggccaaggtgggcggatcatgaggtcaggaaatcaagaccatcctggctaacacagtgaaacctcgtctctactaaaaatacaacaagttggctgggcatggtggcacgcacctgtagtcccagctacttgagaggctgaggcaggagcaccgcttgaacctgggaggtggaggttgcagtgagctgagattgcgccactgcactccagcctgggtgacagagtgagactctgtctcaatttttttttttttaatatagcagtgaatttataaaagacttgtagccatttaaattttcaaacaggctgggtgcggtggctcacgcctgtaatgccagcactttgggaggctgaggcgagcagatcacctgaggtcaggagtttgagaccagcctggccaatatggtgaaaccccatctctactaaaaatacaaaaattagccgggcatggtggtacatgcctgtaatcccagctagttgggagggtgaggcaggaggatcacttgaacctgggaggtggaggttgcagtgagctgagaccgtgccattgcactccaccctggacaacaagagtgaaactccatctcaaaaaataaataaacaaataaatacattttcaaacaaacggaattacctagaagtacgtcacttaacttttctttattccttttttttttttttgatgtgttctagcatccatgagtatgttttctgatttcctgcagtcttttctgaagcactcttcgagtacagtttttgatcttgtggaagagtatgaaaacatc

SEQ ID NO: 6311 - DNA, 83 bp, Homo sapiens
tgttgcaacttcttcactttccccagatcttcaatggcagctttgttaaactcaacaaggcttcagttaacacgctgaggatt

SEQ ID NO: 6312 - DNA, 396 bp, Homo sapiens
ttacttgctaaaaataattaaaccctccagctattgctctgtaactatttaccttaatgtgtaagcttcaaaacagatagataacgttgtaaattgttgtgttagaaatgatgagacagagtggaaagtaactgggggaggcagctctatctagagttgtcacagatgtcccagatgtatgtttgccagtttatagatgtaatttctcaaatttaaaagcaggatatttgaggataagttgcatgtgcataatcttcctcctgtgtaattaaggaatttgggggggcattatttttaattttactatattgtacttactagctttaatgttgttgtgtagagcagtgtcacctttagataaacagcatgtacttaaaacagaaggctatgtttaaa

SEQ ID NO: 6313 - DNA, 322 bp, Homo sapiens
caaaatgtcatctgtggatggcagcatgggcatcactgggaacttgttagaatgcagaaccttaggagctactctgggggtcacagaattaagagtcttcattttcatgatatttccagttgatgtgcatgcacattagggtttgagagacactgatctagaattcactgtgcatttctgcttcccttctctctcccttctccccctgaccctccttttttttctgactagagtgcggtggtaccaccatagctcaaaggacctttgaactcctgggctcaagctatccttctgcctcagcctcccaagtagttagacctgc

SEQ ID NO: 6314 - DNA, 401 bp, Homo sapiens
gatcaattagaacagagatgacaggcacaaagcactcgtattcttccctcactgtgtgtcctgaacatgcttgtttttcaacacagatctttcccctactgagctcagacttggtgctagttcctctgtcagcagggcacaccaggcagatatggtcaattacttaagatgcaactattttgaaatttctttttcccagagtagcatcatttactgctctcgttgtgagtcttgagttttgtcccacagcttccaagttctcagatcacatctctgagatgccatcagaccttcgcctcatcccaccatgcatggggccactctctaggccctcacaggcagttggtgaaatgagtgtgtgtttctccttgaggttttcatccacggctctcttccataga

SEQ ID NO: 6315 - DNA, 316 bp, Homo sapiens
ttgttgttgttgttgttgttgttgtttttgagacggagtctcgatctgttgcccaggctggagtgcagtggcacgatctcggctcactgcaagctccgcctctcgggttcacgccattctcctgcctcagcctcccgagtagctgggactacaggcgcccaccaccacgcccggctaatttttttgtatttttagtagaggtggggtttcaccatgttagccaggatggtctcgatctcctgacctcgtgatccgcccgcctcagcctcccaaagtgctgggattaaggtgtgagccaccgcgcccggccggcagc

SEQ ID NO: 6316 - DNA, 706 bp, Homo sapiens
cagtaataaaagattgttattgtcttcttaactaacttttcacatgattatcttttccacaatctcagaaatccaggaattgaaagaatctcaaaagtcttccactctatttttatggggaagtaggagaccaagaaaactgttttacctagaattatacaactgagatcaatcgtcattatttttaaaggatcttgaaactttataagattaaaagggatgccaatggtgtggagtaaaaagatcctggacttaggagttaggcatcggccgggagctgtggctcatgcctgtgatcccagcactctgggagacctaagcaggtggatcacttgaggccaggagttcaagaccagcctggccaacagggagaaacctcatctccatgaaaaatgtaaaaattagccagatgtgatggtataagttcgaattctgggttgctcgttccctaggtaattgagttatctaatctcctgagcccaaatttctccagatgtaaaatgtgaattttaatgtccagagttgcagtaatgtcatgagtataacattcattcagttattttttgcaactattatatataaggactttattagatgtcagaatttgagtatatgagacatagtcctcaagaagctcgtaagtccaattgaggggatgcgattttttaaaaaatacaaggtgagaagtgctttaataacgttttca

SEQ ID NO: 6317 - DNA, 509 bp, Homo sapiens
gaaaaaacaaagtagctagaagaggggacttgaaatgtacccaacacatagtaataccgaatattcaaggtgatggacaccacaaacaccctgattgatcaccacacattctgtgcatgtaagaaatgctcaaatgtactccataaatatgtaaaatgttttatatcaacaagaaaataccttgcctagtgtttccatccaaatgggaataaatccagggcttgatgtacacatttcacccatgagggcatgggtccctgaagccccttggccctgcctggcctggaatggcaatgagcaggccatcttgccagctgagacatgaagcccaggctgggcctctgtgccaggtcacacccctctcaggatgtgctagcgcctgcctcaggttggtttccaaagcctcatccagtaaaaccaggtctctcaaagcaattcctccaacaaaagggaattctctgcctacttcagagttttttaaagtgtgggtggtagcatgctagaactga

SEQ ID NO: 6318 - DNA, 401 bp, Homo sapiens
taaagatatgtttaacctctctgatactgacttgctcatgagaagaaagagagagggccaggcatcttgcccactactacccactatcaacacttaggcctgacatcagtctctcaattaatattctgggccaggtgcggtggctcacgtctgtaatcccagcactttgggaggctgaggcgggtggatcacgagatctggagatcgagaccatcctggtgaaaccccctctctactaaaaatacaaaaaattagctgggtgtggtggcaggtgcctgtagtcccagctactcaggaggctgaggcaggagaattgtttgaacccaggaggtggaggttgcagtgaaccgagaccatgccactgctctcctgcctgggcaacagagtgagactccgtctta

SEQ ID NO: 6319 - DNA, 1251 bp, Homo sapiens
aagataataaaatagaacatgaagggctgtcagtcagtgtaggtatttccatcccctcacttttcaagtgaggtcacggaggctcagagcgataaggagacttgtccaaggccacacaccggctggtgctcaagccgggacttgaacccacgcagtctgactctagagcccaagctcctaactatgacatcctatttgatacactgttttactggagaaacagatcatttgacagacattctttctgttagcaatttgacaactctttccccagttgtctgtactgaacctggcgctgtgctccgtaatggtgacctagctgtgaataagatagaatcaccttaaactcagaggggtaatgttctgttggggagggagaacctagttttgcatgctaagtagaatgatgaatgaagtatttacaaagggagcatgatgactgatatgattcattggtattatgtattaagagcctatatcatttcactcattcaaagacttagtgaattaagaatagaagcatgggaacaagtaaagatattgctcttgcagaacattttccactgaaagctcatcatattttcctcttttgtgaggataaagaaaaagtattatttctacatggaaatttgatgtaatacatttcaaccctaaaggcttttaatgattgctggaatctctaaaacccacttatgaacttctcctttaggaggcaggactcagaataacaatagtaccacttaaaaaaaaaaaagcaaaaccagcatgccaggatgtttctttaaagaagattaatgctaagcactgcatttctctatcataatgtatcaatagttgcagtgcctcccactgccccatccccctccacaccagcttttgtgtgagtccaggcaacctataggcagaaggcaattccatttattattgaggggactctccaggcagttgttccagacctgtgaagccagcaggcagagcggcctgagagggggtggggagcaccgggcgagggaggtggggaagggccacattatgttccagatgactgagtaacgatttatatatcactcgccttttttacatgaagaagaaaagtaataacagcccaaacccaggcatttgaaacagtcagctgtccgatgaataatgggataggtgggaaggagcgctctgattggatgtcttaatgagcacatttcgcacagagtttgggctgcagttccccttgacctttgccctttattgaccaaa

SEQ ID NO: 6320 - DNA, 405 bp, Homo sapiens; identical to SEQ ID NO: 6196

SEQ ID NO: 6321 - DNA, 530 bp, Homo sapiens
gcagaatccatgcccccttcagtctgtctcaaagcccttgcgtcctggtggtagttcttgctgccggttcactttaccctaagaaagagaatcgagataggagcaactctctgggcctctaggatttgaggactactcatgatgaaataaacctctcaagccttcagtctagtgcagtgagttatctaggagggaattcagtgatggggtctctgtgcatagcatgcctccaccagataggaagttgggtggaagcttagtacgcacatcccaaaggggtctctcgagggtgcccagtcaaggcatggggaagaccccgtgtacgattttgcttttgcagtaggcatccccttttcatgcctttaccaatgtctctaccttacagtggccattactgctttgttgagtgtccctttggcttcccactgcttgaaaagctctttatgccagcaggccagggatatctgaagaactcgctgtgcccgtgttggtgagaggctgtgtgtgtgtgtgtgtgtgtgtgtgtgtgt

SEQ ID NO: 6322 - DNA, 6063 bp, Homo sapiens
tgttagttatctgtaagttttagatattgaaaacattgtctcctagtaatctgaacagaaatgtgtaacaattttgccacacattaattcttctatattatcttaacagctttattttccatcctgagtctattttttagtctaatgatattgagtagatacttaattatgtcagtctattatgtcagtttttaaactccaatgttcatcttttcttgatttatgctaccaactttattatgtattacattcttataagtagatgagtctgtttctgacgcttgccctctgttctgttctacttgtccatttaaatgttcttgctcgaaattgtttctatgacagtggctttgtagtacatccatggatttggttgggacactccctcccctacttctacttttctcctctttctcaacgtttatttagttatttgtggacctttatttttccatgtagattatagaggttttcagagatcctcagaaaacccaactgaaatcttacttgaggttaatttgggggagaattgagattttatgataataaaccacccttcccaaaagtatagactgtctccccaattattcttctcatcttatatgttctttagactaatttaaaactttttctttatttttttattaaataaggttatcaatactttatagatttttatgctattgtgaattagatcttatttttgaattctgtttttctagtgagttttccttgtctagagaaatgttcttgattttaatttattcgctatgctgtgtttctcaagagcagaggctgcatctttcgtctctgtattcccagtgtttaaaacattgcatggtaagtgatcaatgaatgtttgtttgttgaatgaatgaatgaatgagcaggatacataaagcagaatgggctgctatgatatttgggtccatatagaggcttcatggcaacatccacgacagttccagtagacaccccaccacaaggaccaagggaaggggcagccaattcctttacatggctatcttcctcggtgtgatcaattaattccccaaagtggctcaattagccttagttggtaccctccccagttttcctcagaccacatagatgtttttgaacatagctttttgctatttactatggcttcttctggacacccactcttagctcaaatttacacatgcattttggaagccttcactgccagagtggtggtcagactaaaaagcttgacttgggtctccaagccatagttatgaagtaccataggattggttgtcttcctggtactttcttctcctcagaaatgaagcaagcacttagacctcttaactgctgatgagctgagcttggatccctaaaagcggaaaagagaatttgaataccaagacccagctacccttaggactggagcaagattggacacaggtataggtgctcttggtaatgttagacaaaggcaaaggcaacacacaaggaaagttaggcttttaaaatgacagttcatttattttacaaaaattgtactgagtgcaatataaaggcctttcacagtctgactcctgccttcattcccaggcttccccttggtcactatctttttctgtctctaccatacatgctttgtgctcaagccatacctgattgtttgtcaaaccattatatgccagttctttttttattcctggatcttgctagacagtattctctgtgtctaaaatgctcttcctacctttctctgtctatttatcaaacctctattaattcttttcaatgatgaattcatgttaccttatctctgaaacttttcctgacttctccaagtagaatggttatctttcattctgtggcaccttaacgtattcagtatagccttctgttagtacatttttaatgctgtgatattgtaactaatttatttttattttcttgtctgcttattttccattgcaagcttcttaagatttgggaccatacattctctatctttgtgactgaaagctgagcatagcttctagtatgcagtaggtgatcagttagcaaataattgattaagttgaacaaataattgagtaagttcaccatgaagagaatgagattttgatcctatactggtcatgtggttctagaaaagcaactaatctttctattcatctgtaaaataaatttatatatgtatttgctgaattgtgaagatgttatattagtcatcttgggttgctgtaaccaaatcccataggctggttggctcaaacaacagacgcttatttctcacagttctggaggctagtaagtccaagatcaagatgccaatagatttgactcatgatgggggctctcttcctggcttgcagatggctgccttctcatattctgcagagagaaaggtctggtgtctcttcctctagttataagggcactaatcccatcaagggggatctaccctcctgacctcatctaagcacaattattttccaaatgccccacctcccaataccattgcattgaggttagagcttcctatgtgaatgggagggtggaggaaagaacacaaacattcagtttattacatatcttataaaatattatgaatctggttaaagtattttcaaagaaatgttttaactatggagaccagatgagtgaacaatgaaccttgccataaatatgacagcagagaaaaaatgactatccttgatatggtttggctatgtccccacccaaatctcaacttgaattgtgtctcccagaattcccacatgttatgggagggacccacggggaggtaattgaatctgaaatgctcttcctatctttctatgcttatttatcagtcctctgctaattcttttcaatgattgattcaatgatgaattcccatgctattctcatgatagtgaattaagtctcacgagatctgatgggtttatcaggggtttgcacctttacttctctctcgttttctcttgccactgccatgtaagaagtgccttttgcctcccaccatgattctgaggcctccccagccatgtgcaactgtaagtccagttaaacctctttttcttcccagtcttggatatgtctttatcagcagtatgaaaactgactaatacagtaaattggtaccagtggagtggggcgctgctgaaaagatacctgaaaatgtggaagcgactttggaactgggtaacaggcagaggttgaaacagtttggagggctcagaagaagacaagaaaatgtgggaaagtttggagcttcctaaagacttgttgaatggctttgacaaaaatgcggatactgctatggacaataaggtccaggctgaggtggtctcagatggagatgaggaacttgtagggaactggagcaaagatgactgttgttatgttttagcaaagagactggtggcattttgcccctaccacagagatttgtggaactttgatcttgagagagatgatttagggtatctggctgaagaaatttctaagcagcaaagcattcaagaggtgatttgggtgctgttaaaagcatttcattttaaaagggaaacagcataaaaatttggaaaatttgcagccagttgatgcagcagaagagagaaacctgttttttgaggagaaattcaagctggctgcagaaatttgcataagttacagggagctgaatgttaatctccaagacaatggggaaaatgtctccagggcatgtcacaggtcttcatggcagcccctcccatcacagaccctgaagactaggaggaaaaaatggttttgtgggccaggcccagggtccccatgctgtgtgcagcctagggacttggtgccctgcatcccagctgctccagccattgctaaaagggccgaggtacagctctgcccgtggtttcagagggtgcaagccccaaaccttggcagcttccatgtggtgttgagcctgcaggtgcatggaagtcaagaattgaggtttgggaacctccatctagatttcagaagatgtatggaatcacctggatgctcaggcaaaagtttgctccaggggcagagccttcatggagaacctctgctagggcagtgtgaagggaaatgtggggttggagcccccacacagaatccctactggggcaccacctagtggagctgtgcaaagaaggccaccgtccttcagaccccagaatggtagatccaccgacagcttgtaccgtgcacctggaaaagccacagaccctaaacgccagcccgtgaaagcagccaggagtggggactataccctgtgaagccacaggggcagagctgcccaagactaagggaacctacctcttgcatcattgtgacctggatgtgagacatggagtcagaggagatcattttggaacgttataattggactgcctcgctggattttggacttgcatggggcttgtaacgcctttgttgtgggcactttctcccatttggaatggctgtatttacccattacctgtatccccattgtatgtaggaagtaactagcttgcttttgattttacaggatcatgggtagaagggacttgccttgtttcagatgagactttggactacggacttttgggttaatgctgagatgagttaagactttgggggactgtttggaaggcatgattggttttgaaatgtgagaacatgagatttggaggggccaggggcagaatgatatggtttggctgtgcccccacccaaatctcaacttgaattgttatctcccagaattcccaggtgttgtgggagggacccagggggaggtaattgaatcatgggggccggtctttcccatgctatttttgtgatagtgaataagtctcaggagatctgatgggtttatcaggagtttctgcttttgtttctctctcattgtctcttgccgctgccatataagaagtaccttttgcctcccactgtgattctgaggcctccccagccatgtgcaactgtaagtccaatgaaacctctttttctcctcagttttgggtatgtctttatcagcagcgtgaaaatggactaatacgatcaccctcttctttgttctcctttctatttcatcgctaattttttttggcatttggagggtgctatacattgcaaaagttggggactcactaattccactgctcactgtatatcaaggtaatctgtcaggggtttggttttatataagaaacaaatgagtccccagaacatacaagttaagattattcaatcaagggaggcagtcattaccctttaacctctgaaagaaaactgcaagtaggcatcaaactaaccctgagatgggagagagtagaagttcccacacccagtgaattgtaggacattaggtaattattggtgggaagtaaatttgagtggggaactgaatttcaactgacttttatccttgaagatggtgcttctattttctcaaattagaaggttatgaaaattgcatctgaacaacaagttgtattagcataagttctagaagaaactgagaaagcaaggctagtctgaggaaaatttataccgctcacatttcccttctgaattggagaatagaattgaatagcaaaattgtaacctacctttcaaagatgcattttatagtgaagtatattttgtgaacttttatatcttctattcttatttttctattgccctattttaaaatctatcttgaatttattaaatgtatatgtctctgtttatatatttatgagtaatatggtagtctttttggtatcagatgagaacccaacacacacaaatacatactgacacatacaaagatgtttatactgcctcttacatctgtcggaagagagagggttccaagaattcctgtgatgagggcttaaagccaaatatttttgttatcattttatacatatatattttattttttttctatttgggagaagctagaaaacacacattacttttttttgtatcttttctgttttagactaaaatctgctgctattcaaagaataaattgtatctttgtgtattctgatagacataataagtaagttgtgtaagttataa

SEQ ID NO: 6323 - DNA, 6063 bp, Homo sapiens
tgttagttatctgtaagttttagatattgaaaacattgtctcctagtaatctgaacagaaatgtgtaacaattttgccacacattaattcttctatattatcttaacagctttattttccatcctgagtctgttttttagtctaatgatattgagtagatacttaattatgtcagtctattatgtcagtttttaaactccaatgttcatcttttcttgatttatgctaccaactttattatgtattacattcttataagtagatgagtctgtttctgacgcttgccctctgttctgttctacttgtccatttaaatgttcttgcttgaaattgtttctatgacagtggctttgtagtacatccatggatttggttgggacactccctcccctacttctacttttctcctctttctcaacgtttatttagttatttgtggacctttatttttccatgtagattatagaggttttcagagatcctcagaaaacccaactgaaatcttacttgaggttaatttgggggagaattgagattttatgataataaaccacccttcccaaaagtatagactgtctccccaattattcttctcatcttatatgttctttagactaatttaaaactttttctttatttttttattaaataaggttatcaatactttatagatttttatgctattgtgaattagatcttatttttgaattctgtttttctagtgagttttccttgtctagagaaatgttcttgattttaatttattcgctatgctgtgtttctcaagagcagaggctgcatctttcgtctctgtattcccagtgtttaaaacattgcatggtaagtgatcaatgaatgtttgtttgttgaatgaatgaatgaatgagcaggatacataaagcagaatgggctgctatgatatttgggtccatatagaggcttcatggcaacatccacgacagttccagtagacaccccaccacaaggaccaagggaaggggcagccaattcctttacatggctatcttcctcggtgtgatcaattaattccccaaagtggctcaattagccttagttggtaccctccccagttttcctcagaccacatagatgtttttgaacatagctttttgctatttactatggcttcttctggacacccactcttagctcaaatttacacatgcattttggaagccttcactgccagagtggtggtcagactaaaaagcttgacttgggtctccaagccatagttatgaagtaccataggattggttgtcttcctggtactttcttctcctcagaaatgaagcaagcacttagacctcttaactgctgatgagctgagcttggatccctaaaagcggaaaagagaatttgaataccaagacccagctacccttaggactggagcaagattggacacaggtataggtgctcttggtaatgttagacaaaggcaaaggcaacacacaaggaaagttaggcttttaaaatgacagttcatttattttacaaaaattgtactgagtgcaatataaaggcctttcacagtctgactcctgccttcattcccaggcttccccttggtcactatctttttctgtctctaccatacatgctttgtgctcaagccatacctgattgtttgtcaaaccattatatgccagttctttttttattcctggatcttcctagacagtattctctgtgtctaaaatgctcttcctacctttctctgtctatttatcaaacctctattaattcttttcaatgatgaattcatgttaccttatctctgaaacttttcctgacttctccaagtagaatggttatctttcattctgtggcaccttaacgtattcagtatagccttctgttagtacatttttaatgctgtgatattgtaactaatttatttttattttcttgtctgcttattttccattgcaagcttcttaagatttgggaccatacattctctatctttgtgactgaaagctgagcatagcttctagtatgcagtaggtgatcagttagcaaataattgattaagttgaacaaataattgagtaagttcaccatgaagagaatgagattttgatcctatactggtcatgtggttctagaaaagcaactaatctttctattcatctgtaaaataaatttatatatgtatttgctgaattgtgaagatgttatattagtcatcttgggttgctgtaaccaaatcccataggctggttggctcaaacaacagacgcttatttctcacagttctggaggctagtaagtccaagatcaagatgccaatagatttgactcatgatgggggctctcttcctggcttgcagatggctgccttctcatattctgcagagagaaaggtctggtgtctcttcctctagttataagggcactaatcccatcaagggggatctaccctcctgacctcatctaagcacaattattttccaaatgccccacctcccaataccattgcattgaggttagagcttcctatgtgaatgggagggtggaggaaagaacacgaacattcagtttattacatatcttataaaatattatgaatctggttaaagtattttcaaagaaatgttttaactatggagaccagatgagtgaacaatgaaccttgccataaatatgacagcagagaaaaaatgactatccttgatatggtttggctatgtccccacccaaatctcaacttgaattgtgtctcccagaattcccacatgttatgggagggacccacggggaggtaattgaatctgaaatgctcttcctatctttctatgcttatttatcagtcctctgctaattcttttcaatgattgattcaatgatgaattcccatgctattctcatgatagtgaattaagtctcacgagatctgatgggtttatcaggggtttgcacctttacttctctctcgttttctcttgccactgccatgtaagaagtgccttttgcctcccaccatgattctgaggcctccccagccatgtgcaactgtaagtccagttaaacctctttttcttcccagtcttggatatgtctttatcagcagtatgaaaactgactaatacagtaaattggtaccagtggagtggggcgctgctgaaaagatacctgaaaatgtggaagcgactttggaactgggtaacaggcagaggttgaaacagtttggagggctcagaagaagacaagaaaatgtgggaaagtttggaacttcctaaagacttgttgaatggctttgacaaaaatgctgatactgctatggacaataaggtccaggctgaggtggtctcagatggagatgaggaacttgtagggaactggaacaaagatgactgttgttatgttttagcaaagagactggtggcattttgcccctaccatagagatttgtggaactttgatcttgagagaggtgatttagggtatctggctgaagaaatttctaagcagcaaagcattcaagaggtgatttgggtgctgttaaaagcatttcattttaaaagggaaacagcataaaaatttggaaaatttgcagccagttgatgcagcagaagagagaaacctgttttttgaggagaaattcaagctggctgcagaaatttgcataagttacagggagctgaatgttaatctccaagacaatggggaaaatgtctccagggcatgtcacaggtcttcatggcagcccctcccatcacagaccctgaagactaggaggaaaaaatggttttgtgggccaggcccagggtccccatgctgtgtgcagcctagggacttggtgccctgcatcccagctgctccagccattgctaaaagggccgaggtacagctctgcccgtggtttcagagggtgcaagccccaaaccttggcagcttccatgtggtgttgagcctgcaggtgcatggaagtcaagaattgaggtttgggaacctccatctagatttcagaagatgtatggaatcacctggatgctcaggcaaaagtttgctccaggggcagagccttcatggagaacctctgctagggcagtgtgaagggaaatgtggggttggagcccccacacagaatccctactggggcaccacctagtggagctgtgcaaagaaggccaccgtccttcagaccccagaatggtagatccaccgacagcttgtaccgtgcacctggaaaagccacagaccctaaacgccagcccgtgaaagcagccaggagtggggactataccctgtgaagccacaggggcagagctgcccaagactaagggaacctacctcttgcatcattgtgacctggatgtgagacatggagtcagaggagatcattttggaacgttataatttgactgcctcgctggattttggacttgcatggggcttgtaacgcctttgttgtgggcactttctcccatttggaatggctgtatttacccattacctgtatccccattgtatgtaggaagtaactagcttgcttttgattttacaggatcatgggtagaagggacttgccttgtttcagatgagactttggactacggacttttgggttaatgctgagatgagttaagactttgggggactgtttggaaggcatgattggttttgaaatgtgagaacatgagatttggaggggccaggggcagaatgatatggtttggctgtgcccccacccaaatctcaacttgaattgttatctcccagaattcccaggtgttgtgggagggacccagggggaggtaattgaatcatgggggccggtctttcccatgctatttttgtgatagtgaataagtctcaggagatctgatgggtttatcaggagtttctgcttttgtttctctctcattgtctcttgccgctgccatataagaagtaccttttgcctcccactgtgattctgaggcctccccagccatgtgcaactgtaagtccaatgaaacctctttttctcctcagttttgggtatgtctttatcagcagcgtgaaaatggactaatacgatcaccctcttctttgttctcctttctatttcatctctaattttttttggcatttggagggtgctatacattgcaaaagttggggactcactaattccactgctcactgtatatcaaggtaatctgtcaggggtttggttttatataagaaacaaatgagtccccagaacatacaagttaagattattcaatcaagggaggcagtcattaccctttaacctctgaaagaaaactgcaagtaggcatcaaactaaccctgagatgggagagagtagaagttcccacacccagtgaattgtaggacattaggtaattattggtgggaagtaaatttgagtggggaactgaatttcaactgacttttatccttgaagatggtgcttctattttctcaaattagaaggttatgaaaattgcatctgaacaacaagttgtattagcataagttctagaagaaactgagaaagcaaggctagtctgaggaaaatttataccgctcacatttcccttctgaattggagaatagaattgaatagcaaaattgtaacctacctttcaaagatgcattttatagtgaagtatattttgtgaacttttatatcttctattcttatttttctattgccctattttaaaatctatcttgaatttattaaatgtatatgtctctgtttatatatttatgagtaatatggtagtctttttggtatcagatgagaacccaacacacacaaatacatactgacacatacaaagatgtttatactgcctcttacatctgtcggaagagagagggttccaagaattcctgtgatgagggcttaaagccaaatatttttgttatcattttatacatatatattttattttttttctatttgggagaagctagaaaacacacattacttttttttgtatcttttctgttttagactaaaatctgctgctattcaaagaataaattgtatctttgtgtattctgatagacataataagtaagttgtgtaagttataa

SEQ ID NO: 6324 - DNA, 93 bp, Homo sapiens
tgagacagagtctcgctctgtcacccaggctggagtgcagtggtgtgatctcagcacactgcaacctccacctcccaggttcaagcgattctc

SEQ ID NO: 6325 - DNA, 1213 bp, Homo sapiens
cgtccgtgtgaagagaccaccaaacaggctttgtgtgagcaacatggctgtttatttcacctgggtgcaggcgggctgagtccgaaaagagagtcagtgaagggagataagggtgggaccgttttataggatttgggtaggtaaaggaaaattacagtcaaagggggtttgttctctggtgggtaggagtgggggtcgcaaggtgctcagtgggcaggagtgggggtcgcaaggtgctcggtgggggtgcttttgagccaggatgagccaggaaaaggactttcacaaggtaatgtcatcagttaaggcaaggaccggccatttacacttcttttgtggtggaatgtcatcagttaaggtggggcagggcatattcacttcttttgtgattcttcagttacttcaggccatctgggcctatacctgcaagtcacaggggatgtgatggcttggcttgggctcagaggcctgacattcctgccttcttatattaataagaaaaatgaaacaaaatagtgttgaagtgttggggtggcaaaaatttttggggggtgatatggagagagaatgggcgatgtttctcagggctgcttcaagcgggattaggggcggcgtgggaacctagattgggagagattaagattttagtttcctgactccggacgtgttgagtaaagctaatttgccagtcctgggtgggggcaaatcctcgagcttgctgtgtagggaaggaagggggcctgaataatccctgaggaatagtagaatagcagatggaacactgagaaattatttccttgaggatagatttccatgatggaaaggaaatgagaggttctgaaaggcgggctagtggcttgtactatagcatagcctgcctttgctggtgtgtggcgattaggcctggtggagctgccatcagtaaatgaagcgtgatcagggtgaggaacaggaaagatatggtaaatgtttcttatcaggccttaggtctgtgttgatgttagtgccggtcggctcttcctgaattccaaaaaagaggagggcataatgaggcatgtctgacccccacttccatcacagcctgaaacagtttttcagcttaactttggaatcgctttggcctagaggaggtgtcctttcagatggttgggaggtctcagaattttgtctttgatttctgaaagtatatatatataaaacctgagaatgacct

SEQ ID NO: 6326 - DNA, 1213 bp, Homo sapiens
cgtccgtgtgaagagaccaccaaacaggctttgtgtgagcaacatggctgtttatttcacctgggtgcaggcgggctgagtccgaaaagagagtcagtgaagggagataagggtgggaccgttttataggatttgggtaggtaaaggaaaattacagtcaaagggggtttgttctctggtgggtaggagtgggggtcgcaaggtgctcagtgggcaggagtgggggtcgcaaggtgctcagtgggggtgcttttgagccaggatgagccaggaaaaggactttcacaaggtaatgtcatcagttaaggcaaggaccggccatttacacttcttttgtggtggaatgtcatcagttaaggtggggcagggcatattcacttcttttgtgattcttcagttacttcaggccatctgggcctatacctgcaagtcacaggggatgtgatggcttggcttgggctcggaggcctgacattcctgccttcttatattaataagaaaaatgaaacaaaatagtgttgaagtgttggggtggcaaaaatttttggggggtgatatggagagagaatgggcgatgtttctcagggctgcttcaagcgggattaggggcggcgtgggaacctagattgggagagattaagattttagtttcctgactccggacatgttgagtaaagctaatttgccagtcctgggtgggggcaaatcctcgagcttgctgtgtagggaaggaagggggcctgaataatccctgaggaatagtagaatagcagatggaacactgagaaattatttccttgaggatagatttccatgatggaaaggaaatgagaggttctgaaaggcgggctagtggcttgtactatagcatagcctgcctttgctggtgtgtggcgattaggcctggtggagctgccatcagtaaatgaagcgtgatcagggtgaggaacaggaaagatatggtaaatgtttcttatcaggccttaggtctgtgttgatgttagtgccggtcggctcttcctgaattccaaaaaagaggagggcataatgaggcatgtctgacccccacttccatcacagcctgaaacagtttttcagcttaactttggaatgcctttggcctagaggaggtgtcctttcagatggttgggaggtctcagaattttgtctttgatttctgaaagtatatatatataaaacctgagaatgacct

SEQ ID NO: 6327 - DNA, 93 bp, Homo sapiens; identical to SEQ ID NO: 6324

SEQ ID NO: 6328 - DNA, 529 bp, Homo sapiens
ctaccacacctggcccagttaattttttgatgagtgaatggtttcacaaggtaggtgttgtttctgtgttggcttccttgatcaagataaggaaattcatgacacttttcccttgaaaacaattatgttcaaaggaaaagagctggaatttggcagaatctgaatttgaattcacatttgtctgattatagagcttcttaaccttttttgtgttatggatccttttggcagtctggtgaagcctatagaccccatctgagcataacattttaaaatgcatacgtggccgggtatggtggcttacgcctgtaatcccagcactttgggaggccaaggtgggtggatcacctgaggtcaggagtttgagaccagcctggccaattagctgggcgtgatggtgtgtgcctgtaatcccagctcctcggaaggctgaggcaggaaaatcccttgaacctggaggttgccatgagctgagattgcgccactgcactgcagactgggccacagagcaagactctgtctcaaaaaa

SEQ ID NO: 6329 - DNA, 529 bp, Homo sapiens
ctaccacacctggcccagttaattttttgatgagtgaatggtttcacaaggtaggtgttgtttctgtgttggcttccttgatcaagataaggaaattcatgacacttttcccttgaaaacaattatgttcaaaggaaaagagctggaatttggcagaatctgaatttgaattcacatttgtctgattatagagcttcttaaccttttttgtgttatggatccttttggcagtctggtgaagcctatagaccccatctgagcataacattttaaaatgcatacgtggccgggtatggtggcttacgcctgtaatcccagcactttgggaggccaaggtgggtggatcacctgaggtcaggagtttgagaccagcctggccaattagctgggcgtgatggtgtgtgcctgtaatcccagcacctcggaaggctgaggcaggaaaatcccttgaacctggaggttgccatgagctgagattgcgccactgcactgcagactgggccacagagcaagactctgtctcaaaaaa

SEQ ID NO: 6330 - DNA, 529 bp, Homo sapiens; identical to SEQ ID NO: 6329

SEQ ID NO: 6331 - DNA, 290 bp, Homo sapiens
tggaattttaggcatttttcttaagtaagaggagagtgacgtcctgttggaattgtggggtagaggatattctgggcacttctaaaggggtggagaaacctgaatgtcctgggatgggaaccctaagggtgtagatttgtaaaaattgctgcagtcagttgccatgaggactgggtatctgggctagagacaggtgggcgacatcagaaagctgtgagtggatatcctggaagaccactgagaggaggagccaggaatggcaccagacatttctgaaggtggggggccca

SEQ ID NO: 6332 - DNA, 290 bp, Homo sapiens; identical to SEQ ID NO: 6331

SEQ ID NO: 6333 - DNA, 290 bp, Homo sapiens; identical to SEQ ID NO: 6331

SEQ ID NO: 6334 - DNA, 988 bp, Homo sapiens
ttctgagtatgataaactaaggacatgccttaagtctaagaaaatctgtttactgcaggcttttctgcacaaattttcctttatcatcaaggttgctatagccatccctctttcggattccttttcttctttaaaattagaggctttgctttacactgttatttttaaatggctggatacctgccatagatctaataattggttgtaaaaatccagacaaacatcaatttttaattcttaatttttaatcttgtttgaaacaaacatgtaaactaaaataaaaacttaataaagccaggttcaaatcttgcctgttttagtatataagtcaaatttttattaaattaacttcagatcctattaattatgaaagcaagaggttatatttctaatgaatactaagatcttattagaaattccttctccatcactttgtttttctcttcattagatatacccgcacaaatgacctaaaattcaacccactttgaaaataaattttcaaggcttagtgaaaaaagcctaatttctgtagccactggcctgtttctagagccatcgttgactgatggcttataaagcctttttatacagcactgacattttaaagatactggccagtctgaactttccatctggcgtgcttgatttcctttgtcccactttcccatagtgacttattctgtccttgagctctaaaactactttgatttaatttaggcctgggggtgtgaagacatggtgaaatttatttaaacaagagacgatagtaatgcctccaacagtgcatagtaataggaaagcaaataactgacttcctggcatttatttgtgtaataacttcaccaccaagtgcaaccagagaggtattccagaactttccatgcaattacataaaactagcaagagctagtcagcacttgtaaaatcaagtgggagataaaggaaattattttatctcaggccaaaaaaaaaaaaaaaaaaaaaa

SEQ ID NO: 6335 - DNA, 994 bp, Homo sapiens
ttctgagtatgataaactaaggacatgccttaagtctaagaaaatctgtttactgcaggcttttctgcacaaattttcctttatcatcaaggttgctatagccatccctctttcggattccttttcttctttaaaattagaggctttgctttacactgttatttttaaatggctggatacctgccatagatctaataattggttgtaaaaatccagacaaacatcaatttttaattcttaatttttaatcttgtttgaaacaaacatgtaaactaaaataaaaacttaataaagccaggttcaaatcttgcctgttttagtatataagtcaaatttttattaaattaacttcagatcctattaattatgaaagcaagaggttatatttctaatgaatactaagatcttattagaaattccttctccatcactttgtttttctcttcattagatatacccgcacaaatgacctaaaattcaacccactttgaaaataaattttcaaggcttagtgaaaaaagcctaatttctgtagccactggcctgtttctagagccatcgttgactgatggcttataaagcctttttatacagcactgacattttaaagatactggccagtctgaactttccatctggcgtgcttgatttcctttgtcccactttcccatagtgacttattctgtccttgagctctaaaactactttgatttaatttaggcctgggggtgtgaagacatggtgaaatttatttaaacaagagacgatagtaatgcctccaacagtgcatagtaataggaaagcaaataactgacttcctggcatttatttgtgtaataacttcaccaccaagtgcaaccagagaggtattccagaactttccatgcaattacataaaactagcaagagctagtcagcacttgtaaaatcaagtgggagataaaggaaattattttatctcaggccaaaaaaaaaaaaaaaaaaaaaaaccaac

SEQ ID NO: 6336 - DNA, 601 bp, Homo sapiens
aggtgatgaaatacacattgaactagaggttacgaagatagtcagggctggagatgtggatctgaagccacagaagccagtagaaagagtgagactggtacatttagagaggtgcggggaaaagaaagtggctggagaaggagaccacgatataaatcagtcttaggagataaagaaaaatctttctgcacattggagatgacagatttgtaggccatgcttcagacacatacctatacatattcatgtttgtatacatattcatgtacatatttatatatgtattcctatatacattcatatgtattactgtgtgtgtttgtatatgtatcttattcatgagcatgcgctgttctcttatgctcacatatgtattcttgggagcctttcccacctcagcaagtggggagaggaagagtggggtaggcgtcagtctctccccagagcagctgattggggcaggttctgctccctgctgctgcagtttgagagcagtagagggaaaatggggtttactttgtgtacgtgtggttcaggccaacatgcagaattttatacccctcaaaatgcattcctccacagaagcctggcaactttaaat

SEQ ID NO: 6337 - DNA, 601 bp, Homo sapiens
aggtgatgaaatacacattgaactagaggttacgaagatagtcagggctggagatgtggatctgaagccacagaagccagtagaaagagtgagactggtacatttagagaggtgcggggaaaagaaagtggctggagaaggagaccacgatataaatcagtcttaggagataaagaaaaatctttctgcacattggagatgacagatttgtaggccatgcttcagacacatacctatacatattcatgtttgtatacatattcatgtacatatttatatatgtattcctatatacattcatatgtattactgtgtgtgtttgtatatgtatcttattcatgagcatgcgctgttctcttatgctcacatatgtattcttgggagcctttcccacctcagcaagtggggagaggaagagtggggtaggcgtcagtctctccccagagcagctgattggggcaggttctgctccctgctgctgcagtttgagagcagtagagggaaaatggggtttactttgtgtacgtgtggttcaggccaacacgcagaattttatacccctcaaaatgcattcctccacagaagcctggcaactttaaat

SEQ ID NO: 6338 - DNA, 515 bp, Homo sapiens
ctcagactgccagtgatatgaaattcacctgaaccctttacagttggtgacaattgttttaggaaaatatatgtgataagatgctgcaggtcctcataccagtgtcaactcagaatgtcgttcacatttcttctgagagtctccaattggccacattactgagagctttgtcataatgctttaagtcatttatcagctgaggtcactttgacttttgagattctaataaaattggcttgaacttttatcttataccctgtgggaattccaatgagcatttctggaggctttgttttcgtggtggatttttgttagagaactcttgatattccttgtttccgttgcttttctctcttctctcagagttagaaattagcttctttccacaatttccttccacacagctcacacagaccgtggaagtttagggagttggaggaagtttgcatcagagaaatttggaaggatgtttaacagcctgtttgtttgttggtttgtttgtttgtttgtttgtt

SEQ ID NO: 6339 - DNA, 515 bp, Homo sapiens; identical to SEQ ID NO: 6338

SEQ ID NO: 6340 - DNA, 1072 bp, Homo sapiens
catccccggggaccttgcttacttctccctcccagcaccacttaagagaagaggaggtggcctccctctccccaacctcagagccctcaaagcccttgatagtgagcctgagcacttgttaggaggtgacttctacctggggtgtgctggggtccacatgtgccagtctctctgccctgctccccgtgagcggctctttatttgtggcccttgaggccccattgttgtggccaccaaaacctgaattggaagctgtgtgacaatgctggtccccctccctgcactgcttcctgctgggggcagaacaaagagagcgggcattgtctctggcataaatgaacctctatcaaaacaaacacccagagagaggggcagcctggttacagctgcctgtgtgagcctcgacagtgggcctcattcctcacaaagggagctttgaggcccggaagaggcctttccttgatgatcgagctgtgcacagggagcaaaccccaagccgactgcttgtctgtgccaccctcaaacaatgatttccccaaattggacagcctgggtttgtatccttgagcacggttttgggaagagcattctgcatgaggcattgtagctatgtgtatggagtataattctgttttcaggttgctctgccacagaggttaagaactccctcttccaaggtagacattgagaacagagacgaccacactgggttttcactgcagcttttaaacaggatgactcccagcccccatccccgtggctagcagcaagcagggactctgaaacactgcaagccaatggactgagcatcttacttttgctgtccgtgttttggtgttttgtaaacccatctggtaatgaccctgatgccccatgtcccagcaagggcataggtacctgccattgtgcaccaaagtccctttcctcatggccctggctgttctcctgcatggggtcatgtgtgtcccgttaccaagttgtggccccttttcaaccttgagtgccacatctgggctgttgtaggcatgggtagtacaagctgggtttgttactctaaaaatgaaagggagga

SEQ ID NO: 6341 - DNA, 1072 bp, Homo sapiens; identical to SEQ ID NO: 6340

SEQ ID NO: 6342 - DNA, 383 bp, Homo sapiens
gataggaattgtgctaccaaaaatgaaaagtaaacgtaatatgtaatgttctactggtaattgtttccattttaggttgacaccgaactaatgatatttaaattgtagctgacttgaaacacagtgaaaaaatggtttcctgctgtttttttaaagctggattcagtaacatgaaggtaattaaaaatgtacagatctcagtaatagacagtcatatgttgcttaatgacagggatatgttctgagaaatgcattgttaggtaattggattttatcattatgccagcatcatacagcgtactttcacaaacttagttgatacagcctactacacacctagggtccatggtatagcctgttgctcgtaggctgcaaacccgtgg

SEQ ID NO: 6343 - DNA, 383 bp, Homo sapiens; identical to SEQ ID NO: 6342

SEQ ID NO: 6344 - DNA, 584 bp, Homo sapiens
gcaacctaaggtaaaattttttaaccaaatttaacccattcccaatcagattgaataaatgcctagcagcttatgtgttgtgctaaaacacgatatattatctgccaataaaaaacagtattttgtatttatatagttttattaccaagaagcttactcagctttatgatttcccctttgtaatctgattaaccttcatagtatcttgaagtaatgtatagtgtagcaatcagacacttaggtagtgacttcgtgagctctgacaatgagtcaatataatgcaagaggctatgtatgaagtccaacctgggtgcgtccacaccacaccaagaggacaagttaaaattaccatatggccaaaaattaatattttctgacttatttttgtttaccattccaaccatagtactgtataaaatgtttgctattcattatagacccaggaatggaatattcctaatattaaaacaaaaatttcaacagctatagaaaatgaaagtgagtgtgagatagagatactggacataatgttctataggttttaaaagacttaagtagaagaaatggaaacaatgtctttactt

SEQ ID NO: 6345 - DNA, 105 bp, Homo sapiens
atcccagcactttggggggccgaggcagatgggtcatgaggtcaggagatcgagaccatcctggctaacaaggtgaaatcccgtctctactaaaaatacaaaaaa

SEQ ID NO: 6346 - DNA, 199 bp, Homo sapiens
gttgcccaggctggagtgcaatggcacgatctcagctcactgcaacctccgcctcctggattcaagtgattctcctgcctcagcctccccagtagctgggattataggcatgcgccaccacgcccggctaattttgtatttttagtataggcggggtttctccatgttggtcaggctggtctcaaactcccgacctcag

SEQ ID NO: 6347 - DNA, 592 bp, Homo sapiens
  SITE (585): n equals a,t,g, or c
gtactgacatgtacataaggtatacacataaggatgtctatcatagcagtgtttttattaggaagatccaaacaaaacaaaatagaagtggaaagctcttaagtgttttgcagtattcggaggactagttaaattagggtacatctgtggaatagaatactttttccagttcttaagcagaatgtattagattggcttgcatgcatatggaaagctctttgaaacatattacgaataaaagcaagaaatagtatagcttgtggggtaagtgtccgtttgtgttttaacaaaatatataaactagaatttatacatgttgtctggaaggatgcacaggaaactgttgatggttatctctgggagcttgaagtgtgggatggataatgggctgttttaatcttatagtcccttttgaacagtttgaattctgtttattatgggcatgtacaattttcacaataaaaaacaaaggttttttgttttatgtgcattacttatatttttttcttggattttttccagatttctcttgcactttgttttgttgtgatgtttgggaactcaatgttattattatgctgcttntttggta

SEQ ID NO: 6348 - DNA, 612 bp, Homo sapiens
gtactgacatgtacataaggtatacacataaggatgtctatcatagcagtgtttttattaggaagatccaaacaaaacaaaatagaagtggaaagctcttaagtgttttgcagtattcggaggactagttaaattagggtacatctgtggaatagaatactttttccagttcttaagcagaatgtattagattggcttgcatgcatatggaaagctctttgaaacatattacgaataaaagcaagaaatagtatagcttgtggggtaagtgtccgtttgtgttttaacaaaatatataaactagaatttatacatgttgtctggaaggatgcacaggaaactgttgatggttatctctgggagcttgaagtgtgggatggataatgggctgttttaatcttatagtcccttttgaacagtttgaattctgtttattatgggcatgtacaattttcacaataaaaaacaaaggttttttgttttatgtgcattacttatatttttttcttggattttttccagatttctcttgcactttgttttgttgtgatgtttgggaactcaatgttattattatgctgcttctttggtaattatttgggtaaatattcc

SEQ ID NO: 6349 - DNA, 446 bp, Homo sapiens
tagttgatccattaacatttcatttgttgtttaccctaagagtcagtaatttttagctaaaggaaaatcttatgcctgtatgcaattctgaaaatgttatatacctcatggctcagagataaatcagatatgtcaaatcagtgatagacatttacatatggtgattcctttttcaactttaaaaagtcacgctttcacctaattgactttggataatagggctataccttgaagtcactgactatagacatgagcatgtggatggtatgtggaaagttgactgtttgctcaattttagatacttgagaatcttatcatttagaagaattttttggtacttgaatttatgtctgtaagtattaactgtgtatactatgttatttttctctactcagggtattctggcaatgaaaccacatttcctgaaaataaatgtatctgaactt

SEQ ID NO: 6350 - DNA, 173 bp, Homo sapiens
cctctccagcatctgttgtttcctgactttttaatgatcaccattctaactggtgtgagatggtatctcattgtggttttgatttgcatttctctaatgaccagtgataatgagctttttttttcatatgtttgttggccacataaatgtcttcttttgagaagtgtctgttc

SEQ ID NO: 6351 - DNA, 421 bp, Homo sapiens
gtggaccagaactgagtctccatttcttactgccctgtggtagtcttgggtctaaatatataccatgaaatgccctggccttgcatattttttttacttcttgataatagaatcttaaattgttttgatcttgttatcaaggtctgggagacaagtctccacatcttttcatttaatctttattaaacctgtttttcctttttttaacaaaaaatgataaccactttttgaactttaattttactatatgaggcttgactgtctacactggcataatcaatcaattcaatcagaaatccaattaaatttgttctttgcatcatagaaacaattcatctgataatcattgtgaatttttactaaattgatgagctattatgttgtttagatgaagtcagagggtcactacatctttgactgt

SEQ ID NO: 6352 - DNA, 420 bp, Homo sapiens
gtggaccagaactgagtctccatttcttactgccctgtggagtcttgggtctaaatatataccatgaaatgccctggccttgcatattttttttacttcttgataatagaatcttaaattgttttgatcttgttatcaaggtctgggagacaagtctccacatcttttcatttaatctttattaaacctgtttttcctttttttaaaaaaaaatgataaccactttttgaactttaattttactatatgaggcttgactgtctacactggcataatcaatcaattcaatcagaaatccaattaaatttgttctttgcatcatagaaacaattcatctgataatcattgtgaatttttactaaattgatgagctattatgttgtttagatgaagtcagagggtcactacatctttgactgt

SEQ ID NO: 6353 - DNA, 295 bp, Homo sapiens
tagtggcttctttttgtcctgagcatttaaatagcatgtggatacagatctggatatattttttcttctttaaaaaaaagtcagaattcttaccagataagaattctgtaccctgtgatttacaccaattttaattacagtccatctgcaatagaaaccactttccctccaaatttagtggtctgttatgatactatttgctattgaagagataccagtttttaaatgaccaggacagtgcaagacaagcattgaattgtgaaataactttagctaaatgctgaagggtttgcag

SEQ ID NO: 6354 - DNA, 294 bp, Homo sapiens
tagtggcttctttttgtcctgagcatttaaatagcatgtggatacagatctggatatattttttcttctttaaaaaaaagtcagaattcttaccagataagaattctgtaccctgtgatttacaccaattttaattacatccatctgcaatagaaaccactttccctccaaatttagtggtctgttatgatactatttgctattgaagagataccagtttttaaatgaccaggacagtgcaagacaagcattgaattgtgaaataactttagctaaatgctgaagggtttgcag

SEQ ID NO: 6355 - DNA, 697 bp, Homo sapiens
caaagactcaccaataggtaattaaaacaacagggagactataatgtgcacagaagtttgctgtggctgccagctccagctcttctctcccccatcccagctcttactcagatcaccatcacacaccatgtcctttgattactggagcaggtaacagccttcctgctgaattgagtttgatacatttccagcagggaaaagtactacagtccagtggctgaacaaggagaaatctacaaaagttgttttgtttaaaacgggtccaggcatcctgaggacgctttcattggataaagttggtgtctgatatataacttattcttggacaggaaagagtagaaattaggagaagatactgcttctttgccagccaactttcagactatcaagggaaaactagtcagtatttatatggataaaacttattgactaaggtgcttataaacatgacccaagtaagggtttgatattaactatttcctccacgaagtactgtttcatgcctcccactcagtcatcctagtgaaagccacccagaaggctcattgggaccatgatgtcaaagtctgttcttgtgctcatttgccagacattgttgagtgtcagtagatgagtgcgccatgtgggttaggcagcacatggttgaacacttaacctagtgccttctgcatcagaggaactcagttaatagtagctt

SEQ ID NO: 6356 - DNA, 309 bp, Homo sapiens
tttgaatagataaatcatatgaactagcccacccctttcctgagtagacttccggggatttggtggcttagtttgaaaaaatctttttgtaaaagtattttctttgctactttgatatttccagcccaaactaatgggacttactctttgataagatgctaattgtataggattaaaaactgcctatgaaatattcaatacctgcagaatgtacttagtaaatatgtctttattgactgggtaattgagattatatacctagccaatttagttaatataggatcaaaaattctgtccatatctctgagc

SEQ ID NO: 6357 - DNA, 32134 bp, Homo sapiens
agaaaaggacaagttactcgctgctgtgaaggaagatgctgctgctacaaaggatcggtgtaagcagttaacccaggtgaagacattcttatgtacgagggatatacttcccaaatcagaagcaacaaaagattttagaaattgtccataatcagtagtttaattatttgtaatttatgtccaacaaaagtaactttcctttagagttttgggagggtagatagagctgtctctctcttttgtgatattatagcctatagttgaattatttaaaataagagtacttacagatatcctagcttcagaataacaaaagcactctgtacagaagcatgggaatttgttttaattggatctgacctagatctgttctcaatagaaacacagaatttggtgtgatcttgtttaagtctgattaatggaataagtgtgaaactcttaacataggtaatttatttatggagcttcttgtgataagtataattttttgtcaagttcttcacatctcagaaattttactttgagaggttaatagtaaaaaataccagaaaagccaatctttaaaacatcatgaaactgagagaacagaattgaaactatagaaaatatggtttaattattcctgaagtgcttgtttctctttctagggattaaatgcagtagaatacatgatgtttatttatgagtcattcacctagccacttgatgacattgtaagagtgaatggctttgtttgaatataaatcctttatgtgaatttgaagtaaataaaaaaagtcaatggaaaaagttggcaagattaattaaagttgttaataaaattagaaactttaacatagttttttgtgactatatgactatataaaaaattaaaaattaggataactaatttgataattcattgagccgcatacttatgatgtgtatacttctaagtatgttatacaggagtataacaatttgtaaagatgaatgaacaaactcaggcagccataaattatgtaatatctcaaattttgtcatacaattgctttagagcaggaacatgattagtcctaatgatacctgcagctaactttaaaattgcttggctttcatgtactttgataattaatatttgttctaggagttcatagtaccggcaaaacaaaatgaaatccctcatttaagatttgacttagtggccgggcgcagtggctcatgcctgtaatcccagcactttgggaggctgaggcgggtgaatcatgaggtcaggagatcgagaccatcttggctaacagggtgaaaccccgtctctaataaaaatacaaaaaaaattagccgggcatggtggtgggtgcctgtagtctcaactactcgggaggctgaggcaggagaatggtgtgaatctgggaggcggagcttgtagtgagccgagatcacgccactgctctccagcctgggcgatggagtgagactccgtctcaaaaaaaaaaaaaaaaaaaaaaagatttgacttaggaagatgataaaactttgctttctgaatttgctttcccttgtttcaaactttgactctgctatagacatcttatccctatttttttcccttaggaaagagaattatttccttctaggccttttttccctgaaagagaacgtgtacctgggaatgatagagaatgaactgttgtgctttaaaatgttctttcgtgtaatcaagttagaatgtaggatttattctaggttcatagtctttaactcataataaactagaaagtgcatttgaattaagagtaaacaacagtggcaaagtgtttatgaagggaattggcgtgaagagcagatgagatgcagaagactgtttttaaaatcttttgaccttgctttttttaagcaagtacttaatgttttatcattcatgattattttactgatgttaaataacatcattgtttatcattgttgcaggcttatgatacttattaaataacaagtttttaaatttctgggatattcttttaggaaatgatgacagagaaagaaagaagcaatgtggttataacaaggatgaaagatcgaattggaacattagaaaaggaacataatgtatttcaaaacaaaatacatgtcagttatcaagagactcaacagatgcagatgaaggtatattttcattctttggaaacaagatgaaatggttgcattcactttattagcaaacttttaagtggctagtatgtacaaggccctttcttgggccatcaacatacagtggctagtgaagttcactctgcgtcctaagtaaaacaacttttctaggtggggatgaggtagggaggccggatgcagataaatatgatgatagagataagtattggcgactttagagcaatggtgatgggaggtaaggaagaaaaggatttgatagggaagactttttagaagtgatatgcagactgtgttaaatcttttaaatcaattaggcattatcaagtaagagagtaaagaaatgggcactgaggataagagttacttggtgtgatttcttagtccatctctggaggtgatagttcagtgggtatattttgggacccaggactgagctttttaatgagtgcactccaggtgttaccagtacagattgtctagagtaactgctctatgagaaatacagtaagagttgtggtatttggtaatgagggctggaatgaagaagggatattgagaagtagatagaggccccatcttaaagggccttgtatacctgaagactggggagccagtgaaggagtttaagcaacgcagcagtcgctggaattatactactattttaaattttcaccttggtagcagtggggaaagtggagcaagggatagttggaacactttgctagaattcaagtcaaagaacaagggcctgaaattagatgttgacaatgagagaatgagtttgagtatacaaagagttagttagatagggcttggtgttagtgtgaaggggagaggtgatagtgaagaatgacttccaaggttttggcctgagtgattttgtctgttgttgcttcctaccctttcacctgtcttctgtcagaaggctcagtttttacagtctgtcttttgtatatattttccattttcatgattctagttaggactagaccagtgaattttttttttcttatttttgaaaagattgaaatatctttattactgctaaagaggttattgaagaatatggcttgagtctgcttgcttggtggtcatgtaataccttccttaatttaactttcttgaccagtgactttttgaaattgttacttccatctgctggctgatccttcaatttggaaggtctgtcattacctcagatttaatatatgtctaaaactcacctattgataaggttgatatatatatatatatatatatatatatgtattttttttcaggccaatcatgagcaatgatgtttttaatattttgaggcattattatctttatgcttgaatcctgtgacttttctctgcctggcttaggctacaatttgttctgaaatcttaaagacactttatttctatggctaggtgccgtggctcatgtctgtaatcccagccgaggtgggaggatcacttgaacccaggaatttgagaacagcctgggcaacatagtgggaccccattctataaaaaaattaaaaagtttgccaggcatggtggcatgcccatggtcccaattactcaggaggctgaggtgggaggcttgagcctggaaggatgaggttgcagtgagccatgatcacactattgcactgcagcctgggtgacagggtgagaccctgtctcaaaaaacaaaaaactccaaacctctttatttctagttactcttgcattcaattcttagacatgtctttagtttattattacatactgggataattatggctgatattaataggtttgtcattttcattccgtcttgtatttggtaccagatttttttttggtaaaatattgctttgataatatcgctagtctgctaaaaattttaaaatattctttgctgctttcagagtcccagtgttttcctctgaaatgccactaatagcaaaaaagaagtgaatgatgctgttttcatgttcttaccctatccactgcttttagcatttgtttaactcattccttcatcttctcatcccccagcaatttgagttagtgaagaactgattttcctagcctcaagtgatcttttcttcttaattcctaattcctgttaatttgaaaattaggcagatacttgtagcagcatcttttgttgaaggtgaaaggtatttaagtgattcatcctgttttacttgattacttacagaggtcaggatatagattccatatgataacttctgtgaaaaatagaaatgtataccttaatttcccttaataagcaacagtttcttttgaaagaattattaataagattatttcatacaaaaacatgttcttatgagaatataagagtcagtgtgcctttatctttagattctttaatccaaaatttaaaaattagaagaagaaagttagagtggtggtcgccaggggctgcagggagaggaatgggagttattcgttaaaaggtgtagaaggtgttttacacaatgaagagagttatggagagatgaatggtggtcatgattacacagcattatggatatatttaataccagtgaactgtatacttgaaaatggttagaatggtacgttttatgttatatgtattttataatgtaaaaacttggaaaaaaaattaagaggtcagaatattttagcaagcaggtttttgtgttatctatatgattatggcccaatttgtaacttaatataaagtgtaccaaacatattttcagtttttaaactttggcttactaaagactttaagaatattgctaatgtataattgacataagatcaggacaagcttaattttgtatgaatctattcggtaggaaagaaatcctaaatcatatttagttctgaaacatcatctctaagcatgtttatcttgtatttcaaatatgatagcagctagcatctacttgtattcttgaatgtggtgacagtttgtatttgatttgcattcatcactaacaaaatataattcttttaaatttgtttatatttatttgagaagaatgattcaaacttcattctattgatgttttttatattctcattttaataaagtttattttaaaagttagctttgacagtctttgttttctaagttttatgtgtgtaaaataattttagtttcagcaagttcgtgagcagatggaggcagagatagctcacttgaagcaggaaaatggtatactgagagatgcagtcagcaacactacaaatcaactggaaagcaagtatgtttccaaataccttattttttaattgaatggcagagtattttcttgaatcatcaaaatattaatagcgtttgatagtaattggttagacttttgtgtttttacatttgtttctaaaatgagttacttttaaaaacaattctcttttgctttgtgaagaacttcttcagttatacatatgtaaactatgttatattaatgtcatactattatatacttatacaaatacattaatatatatcatatattacatatttatataaacatgtatgtgtatattgtatataaactatgtaataaatactagtaccaccaatggaatggtctacaagcttatgagtttataagttttaaaccatctgtcccctttcacagtagctcccaaacttcagtgttctgaagaacacctggcattctaattaaaaggtgtattcttgagtcctccccttaaaagattatgattcactgactctgaggtagagcccaggagtctacatattaagacactttcgggccgggtgtggtggttcatgcctgtaatcctggcactttgggaggccgaggcaggcggatcacctgaggtcaggagttcgagaccagcctggccaacgtggtgaaacccctgtctctactaaaaatacaaaaattagctgggcttggtggcacacacctgtaatctcagctactcgggagacaggagaatcgcttgaacctgggaggtagaggttgcagtgagcccagattgtgccactgtactccagcctgggtgacagagtcacactccgtctcaaaaaaaaaagacactttccttgtgatagtgattggctctgaggccatactttgagaaatagtaccttagagagactagtaataccggtacacagtaccctgactggctgatttttaatacgttttcagaagaccagtttgaaggtgacactatttatggtcatccatttttcttgatattttacagtgattttagaatttgaataactcattagaattatataggaattatacaactaaactttattgttagtagtcacttgtgttctgtttcagttgggctgtaaatggaactactagctcagctcagcaaaactaacaaagtatgttttgtttatttcttatatatatttgtaataacggaaggctcctaatccagttactgttttcaggcagtctgcagaactaaataaactacgccaggattatgctaggttggtgaatgagctgactgagaaaacaggaaagctacagcaagaggaagtccaaaagaagaatgctgagcaagcagctactcagttgaaggtgatatattctcacctttatttgtcatttcatgaataatataggcgtattagttcgttttcatactggtatgaagaactgcccgagactgggtaaatttttaaggaaagaggtttaattgactcacggttcaacatggctggggaggcctcaggaaacttacaatcatggcagaaggtgaagaagcagcaaagcatcttcttcacgaagcagcaggaaggagaaatgccgagcgagggggaagactcccttataaaaccattagatcttgtgagatctcactattacaagaacagcatgggggaaaccatgcctatgattcagttacctccacgtggtctctcccttgacacgtggagattatggggattacaattcgagatgaggtttgggtggggacacaatgcctaaccatatcagtaggtatttaatttgatgacttaaatgtgtatataggtttgaaaaatatagtttgaagcttaatgggacctgtagtctaaatgctatgccctgatgaaagaaaaagaagcatgtgccctattgaaagaattgaatataggcttgaatttgaagttaaagaccgtttgaagatatggtaaatgatgttagctgattgacagatataaattgtagaattttatcatatatatgggggttagggtctacagtatagggcagaaatcatgtagttaaaaattacccttaataccactttatcacccatagcttggatttttcagtaggtccagcagaacctagttttctttcagcactggaataggtagtttttcctttgcttcagcacaagactaagtagtgttccagtggcttgcactcgacccatgatgtacaaaaagtcacatactgtatctttagacgccagagtgtcacttggtccagtgagatgcttatactatgaagagatgcatggctttgctcaggctgactgagggaggagcagattcatttatctcattttatatgcattctgaagcatatgtacattgaatagaatgatgagtataattctctattcctgcttttattgaagaggaaatttgttgaaagtatagttcaatttgtgtaagttaaatgctacctcattataatagattcctacctaggtcattgatagaattgtactttgataccagttccagagtaggagttaaaaaggcttcaagagtaattgagtatggaaaatagtgtttttcttaagtcttgttgggagattgatataagtatcctttcttttatttaatattgatcttgctggtgggtttactactggcatagatacggaagtctgttctctgtggatatggataaataaatgacattaaagattatagtcatgattggagtgttgtgttataaaaatacctcaaaataagaatttttagctacttagatttagcaataaagacaccatcctgtcttcggaagcttatcagctaaaggaaggttagtgggaaacaggttattgctaagtggatcagatgtatatagtagtagctatcttgatagaaactcagcacaaatattgagtctgaaataatctccaaactgtaaaccctgtaatgttggaggataggatggctatggctgataaataaatggcttttagactgtgtgtatctgcttgtcttattgaaatgtaggagactagttgcaataagcagttttatgatacaacagtaaaggtagaggatgctttttttccctctttttcaaagtagaaattctgtgtttgtgctaatttatcctttctcccttttaaaataccaaggttcaactacaagaagctgagagaaggtgggaagaagttcagagctacatcaggaagagaacagcggaacatgaggcagcacagcaaggtaaggggaagaagtattcatgtaaactttgtatataattttgggtaaaatttcctctctcttccatctgtgaagaaagtataatttggcattttggttatagctcaataaaaatagcttttatactttcagaatatctttctttctttgacatttgttagggttttaaaataagttacctactagctttgcctgaagcattaaagttgcaggcaaaattatagtacatgataggttaatgggatcctggctgtgtgtgtttcttttctgtagttattctctttggttctttggttaattctttttttttttcccaagaaaatactcacttcttattttgaagagaaaaacagagcattaccatcccaggtagtttacttaaaactgcccatttaatacatgctaacgtttactcatttactcttaatttgatggatccatctgggagataatggagtacgtgttatgtgtattgtttatttctctactactccctttctcccatgaaacgcaagtatagcctgctacaggagcatgcaagaatggaagcaggagagattcaaagaaggttttctagaggagagaatgcctacacgaaagatgagtatgagtaactaggcaaagaaagagacctctgtaaaatgtaatgttttattacagatttacagagtaaatttgtggccaaagaaaatgaagtacagagtctgcatagtaagcttacagataccttggtatcaaaacaacagttggagcaaagactaatgcagttaatggaatcagagcagaaaagggtgaacaaagaagagtctctacaaatgcaggttcaggtattttttcttctttttttttttttaaaaaaatacaggtggtcacttattagatctgtgtgtctagaagagagactaaagtctaccttatcctaattctgaaatgatgatgaataattataactttgtcttttgagcacttgtcacaatatggtgtgtttgaaggtgtgctcacccacagtcttaggctctttgtgttagattaggaatagcacaaacatatctttaacttctgtcttataagctaactcagattgtctaatcattgtttaaaataatgccttttggaatctaagaatgccttaaaaaaaaaaaagaaaaagataaacaaatgtacctataatacattgtgttcatatacatggggttatttattagcatgctttttctctttttggttgctatttatgaaaggatattttggagcagaatgaggctttgaaagctcaaattcagcagttccattcccagatagcagcccaggtaatgatgctttcttattgcttatgattaataacttgcagccatttaaacactcacctgaatgtctgttgagtgccaattactggattaatagctgggagactagtcaatgaatcaacaaatgatgatcctgagtgctaaacacttgctaattatgtacggtgctgagggaaaacactaagaaagaaatccataccaactaattggatgaggggaaggttagagagcttttattatacaaaaatgtccccaatcctgtcacaaaacaaggagagagaattggccaaatcctatctagaatagtggcttatgtattacagatgttcattaaatatcagctagctctggaaaatcctaatatatcagcagggggaacagtatggtaaccatagatcacagattatatttgcaaaatgatcaattgaaaatttgtacctcagtttagtgactcagccttccaaagttttcaagtgatagtgtaagacctgttattctttgatgtgacatacatgtctttataaataatataaagaaaatcaaataaaaacaagtattgtgaattttgagcttcagtttttcaacttgaaaattctgagagttatttgtagcaaaaagtattggcttagaagtctgacatttctgtataaaaagtggtttttaacattaaaattttgtttttaaggttcggagaagttcagactcccaaagctttgaccatataaatatatttttcccagttgctttatctgtagaaattatagtctaaagtaattgaggaagaattaatgcaggaaagggtgctggtgtggatgtgtatgtatatgtgaattaccaactcagattgaattgtgatctttagttatcagctgagaagtagctctaaaaaatttatcaggagttaaatacatagagaatgctgtaagaatcttttaaatagtaaacatgaacatgggtattactaaactatattagtcatggaatggataattttattattaaaagttgttactaaggagaagaaacacaggatgacaaatggcctttctggctgtttttcctactcatttgttgcttgtcaattatttagtttccaggcctgtcaacttgttttattctaaatgtcttgtgatatgtaattcgtgactactggctgttggtgatcaaacttgctttcagaatgatagttactctttattgaacacttaccatgggccagatactttcataacaatttatatacattaacttctcttaaaatttaaagctgttatgattattgtatagctataaagctttctcttaaatacttttatgttgacactatttttctttcttagacctccgcttcagttctagcagaagaattacataaagtgtaagcctaccttttcacactcttataattgtgtagtcaccactaactgatacttgttagatgcgacacttatgattaactttatacctctgacgacctgttcagaaaatactctgaactagatttggagcaacttttgctttttttttttttttttcctttttcccattagtgagttgggtccctaaacattatatattctgcttttatttatgtttttattataacaagagttggggagactttcatttgagtgttagcaattatgtggaagaggtaattgtttagaaagtagtggaagtaaattagtttttgtgtcttataagtagttgtagttcttctgtgtccagctctgtggtagtatacccaaaacaaagttatatgctttttttgtgccgtataattttgcatggacactgatcacttgagttcggaagatctgaaatctggttttgacatagctagctttaacaaattaacctcttttatctcgagttttaaaacagggttatgtattttaaggagttatagtaatgtgtgtgacagttgttagtaaactgaaaggggctatagaaatggaaggtatatgagaactactgaagtaaggatgatgctttttaaggctttaaatccttttgatttgtgacttctgaatgtttattgaatgtacaaatgtctttccttctaaaggattgcagaaaaggataagcagataaaacagactgaagattctttagcaagtgaacgtgatcgtttaacaagtaaagaagaggaacttaaggtatagtaatttgtataaatggctgcaatattttacagaactgaaatttaaattactttgatgcacataatcagtaagtgtatatgaaaaatggaaaatagtctagaattcatttgaaataactgtttttctaaactacaaaattctctagctctctacgaggaaaaattcaaagggcttctctcatgtgatataatttacaataatttgataggaatatgctaaataacaggaattggtggtttctcttgattatttgggaaattttgtaagttgagacatttgcttaactcttttgtagaaaagatgctttacaaactttaaaatcagttgtattaagtattttaaatgctatttttccttgttctaggatatacagaatatgaatttcttattaaaagctgaagtgcagaaatttacaggccctggcaaatgagcaggtagatctttattgcttttgagcattgatctcagaatttcaatttgcgtattcttattttcattgatattgtgagccccaatttgattgtgtaagtaaaaaatataatggtttatcatctttggctgcatgatttgatgttactgtttttatgttgaaataaatgtttgatccagtgaattaatcacttcaagatatcacaggaggcagttaaaattatcttactatgctggtttgtttgagtcttttatttgagccatttaattcaaaaaggatatacctttttgttagtgtatatgaagaatggaaaatagtctagaataaaagaagtaaaaaatatcgaacagcaaaacatgttacagaaatatacagtattgctgtaacttcaaatatatggaaatacagctttttaatatgtaaaaattagtgaaaaaaatagttttgagcacttcctgtgaagtgatatcattttcttctcattccacacacaggctgctgctgcacatgaattggagaagatgcaacaaaggtgactaaagtattgtacatctagtcgttcatacatttatgtttaattataattgttgcagaaaatattgctgcttataactgatagttgtgcccataattcttgtagattttctgaatgtatgaagtattttaattttttttttcaccctcatagtgtttatgttaaagatgataaaataagattgctggaagagcaactacaacatgaaatttcaaacaaaatggaagaatttaaggtgtgtgattaagcttgtacactcaggtttcttagaacaaccttgtatacttttcagttgagtgattccagaaatactacgttttgtatgaagtcactctgaaacagtgtttctgtagtttattaggggacttatgcaaaccatgaattttatcatagactttccccctagattatctgttcttttagtggagcttggagatttatttttggcccccaatcttttctcagctgatagtttctatttgggactgtcttatttgtctccactgttgctgtagttctagtttctggtcatggccaaccaagtgctagggtgcatctctgtgtccagtgaaatttgaattatgtcagtgtataattcacctgtcactttgaggactgaaagctgagataaaggtttgattgttcaaaaacccattcaaatgattgctttattaccttttttcttaataaaacagtaaattgagactctttcttccagattctaaatgaccaaaacaaagcattaaaatcagaagttcagaagctacagactcttgtttctgaacaggtaaggcttttcctaaattacaaagtagaaatacttgttatataacaagatctggttcttcttatttaggtaccaaattactaattgagaaattttgcttaagcttagatatggctgttattgcctttctattcatcctgtatctaaattcaggaaattttttctccctgaggtgaagctaatgccaatctgctcaaaagcacattccagaaaaataaaaatgtgtaataggatgcataaaaataatttaagccattttgatacatttgactttcagaataaatgtcctgccttagacttggagcctcagctttttcttttagggagcatggtgtctttaaaggttgaaacttattactagcacttaaaagcagtgtgatgttgatcaaatagcttaacctttgtgacacctctcattccaagcctttcacatggagattatattatatttacaccataaagttgttagatttgaaaggagaagcttatgtatggtgcctagtctagtgctttgtttatgacaggtatctaaaccttaattcttttcccttagagtatttattttatccatctcatctccatcccctgccaccatcactattcattttatatttatagcaagacatcaaaactatatcagctttgaataagcatggttccataaattagagcccagtggtatctgttctctgcctattcctcagtgctgccttcgtactcttcttctacgcagctcttacaattacaatttattaataaaacacaaactcttgatgacacattagaataggaagtttgcgtttgttcctaatattaagtttttgaattgtacttttattggaagccgaaatgtaaagccattgcaaatgatagcacttctttagcaaatgcatgcgttctttcatttattttaaaattcacatttatgcagatattgagctggtgtaagtagctgtgcctctggaagtattttgttaacttgtcaagaaataatccatttattctacctccccgtatgatattaagtgcattattacatagtcttactacttactttgtatttgctttacccttgtaaactaaaggtaatagaggagacagtgctgaagggatgatatttagtttaaatggcatttaaggcttattcttttttttttttttcttcttgagacagagtcttcctctgttgcccaggctggagttcagtagcactatcttggctcactgtatcctccacctcccaggttaaagccattctcgtgcctcagtctcctgagtagctgggactacaggcatatgccaccatgctccgctgatttttgtatttttagcagagacggggttttgcaatattagccaggctggtcttgaactcctggccttaagtgatctgcctgcctcggcctcccaaagtgctgggattacagatgtgagccactgtgcccagctaaggcttatttttgtcttatttccttttctggtatagcttacaaaaaagatatgataccaattataagatttctctccccccaccctcccttaccatctctgaaataagaatgtatcttgtagtctctggttacagtttagttgtttagttggcaacatttttaatttttactgttaaatagcagtggtgagatataacattggtgacttggattagataaaatgtaatagatttttgtgtgtgtgttcttacttggaaaagcagagtatagtttctgtgtgttagttaccagagatttttgaaatgctgataaccagtgtatgaagttttaaactttaaaattaacttcatggaggtaaaacaaatgcttagaaacttctgaaactgtcctagaattcttatattctagtagtatccaggtgctggcgactcttatttaaacagaaaacttctgttctttgctaaaaatggtattttccatcattagataaaagtaaaaccaccagccttaaatttttcttttcctttaaaatcatgtaataccttgagaaatgccattgtaataccttatgtaaaattcccaatcatatttatgaaagttaatattattgctatcttattaagtcagccttttattataatgtttctacgtacttttagatgttttgttaaagtgacaacttttagtatgagatgtgcttttgttatgaagaataattcacaggataaaattttatagccacattttttgatttatttaaaagaattatttgataagggggaaactcattttgtgatactaatttaagatctgttgggtaattcttagaattgttcttctgactctgaaagctttttattaatagtctagaaagcatatgactgaggttttggttatagttgagacttctttcatcttggcagacaaagaatcatttctgtggcttttcctctagtcgtttttattgttgctgctagtgaaagaagagaaaagattggtataatcttaatttctgtcatttccacttttctttaacccctttctatcccacagtcagaattccaagtgacagttgagagattgaacagtttagttatgtaaaaatttcagtccttttaccccatggatttttattctggaggaaaagattgagcgtataaaagcagaaaccaataatggtgccaagttgttgtttcttcaggtgtaggaagcagaaagacaacaggtaccaagtaagttaacctgttgataccctaaaggagggaaggctgcatttggatttaggcttgcagatggtcagataatgcaaataaatcatttactaatatttcatttactcagaataagactttttttttttttttttttgctgtgggggagcacattttgacttttagtgaaggagcagcatgacattcttattccagtagatttttaagattcagtgatcaagattattaagtgaaaactataagaagtttcttctttttgccctactgccttgttaaattgtattgcagaatatattgtatatggtttagttttggaaatcatctaggggaggaaacagtaggattggattaaaccaataaagtatgaagtaaagtaaaaatgttggaggagatgcaaactaagctgagtcaggtttatgcaatagagtatttgatgagctgcagaccaagaatactttctaaactggaacttcattaaaaaaaattcatcaaatacttatttactagttgagtatatgctagttgcttacctacatgctgaggttgcagagatgaatgagacttgattcttgccctcctaatatggagatagatatgttaaacagaaagttatggtgaatgaagtttctgaactctatacaggtttagaggaagagataatgcattctattaatatttgaaggaggtggggaggtaacacagggaacaactaaacctcgttttgaaaaatgagcatgaatttgccaaagagctaagagacagttcaggctgagggaatacaatgttcaaagacatgacagtgtggcaagattggcatattcagagtattggtatattgcagaagtacaaaatacaggaaggatgtaaggagtagagaaagatttgctaagacctaattatgaagggctttgtatgctgtgtcaggaccatgaacctgatgcagcatgtgggtaagccactaaagagtgttgcaaggataaatgagcatttagcctaacattttagaaagaatactctggtaggtaggagtaactaaaggtacaatacagtaaatggttaaggtgcaggtaacttagacttaatagtgttatgtctttttgtgagatggcattcattgaaaatatagatggacaaaagccatcttcatgaatgatttaaaggcttaatgcatgatttgtttttcatagtataaacctgatttaatgtacttttgacaactcctatttcccttctcatgtttggattattttttcccattgggaagttttttcctgtgcctcctacaaaacaattcttatgaactagaagcagagagaagaattagggtattatgatatttgagatgagtaagctgagggccaaaacttaggcattaaagagaagggtttaatttcataaatatgtacagagtggaattttaggacttggatagggcagtggaaaaattaatatcatttgtaaaaaatgattgtaataagattgggaaaaacaaaaaaatgggaaaaaagtaagaaactagcaagattgggaaagaggtgcacagaagagaatgttctaggagaaagaccctaaatctttttggtcaggctgcttggctgtctgaagataagggaagataagggaatactgagggagaaatcccactttggacataagataaattttaacattggggacttgtgtgtgtaccagaggatgccaggagaagtttcaaaggggactcatcttacatgtcatgttctaatgctttataaatagaatgtattcctgttgcttttgcaatttacaatcagttttaaaacattttatatcttgatctggttggtagttacataatatctatctaccaaaattcactgagctgtgaacaggatttatgcacttgtctacgtaaatgttacaccttagtatagaaaaaaaatcaattaaaagagcccatgtttgtctgtctttctttctttcttcctttttttcctttctttccttcctttcctttccttttccttttccttttccttttcctttcctttcctttcctttcctttcctttcctttcctttcctttcctttcctttcctttcctttcctttcctttcctttccttctctctttctctctctttttctttctctttccttctcttttcttcttttctttctttttttttggacttgcgaggtcttagagtctggattctttgtatttgaagaattgaattaatgtaaaggaagtgaggcagattgtcttaaggttatcttttctagtgattaagatttttttcataagatactaattcattttgccagcccattttacactgctactttttctgtgtctcttgtgtagatgtatctctttgttttgtgttttctgaattttttaattatcaagtcttcagataagttattgtcctaaattttgtatctatttaataaccctaaacaattttcacaaaattacatttctcatctggttttacttcatgcaaatttggtaaagttaaactttttttggtgatttttattttagcctaataaggatgttgtggaacaaatggaaaaatggtaagagtttagttttctttttatattttgatgagttacttctaccaaattaactacattaattagagttttaaaattctctttaaactttgtaatggaagaaatgtagtatgctgttgatttgggattacattaccgtttgtgggtttcacgtgtggcagtaattttacttgttgaggctagcatataagaatgaattacttgagtacattttacttgtaaagaggaagtatcctcagaccatgatcaaagatccctagaagcctttctagaattaaaagtttataagaaatgatggacaaaagagttgatccatttaaaatgattagaaataatatcattaactgctgggcgtggtggctcacacctgtaatcccagcactttgggaggctgaggcgggtggatcacctgaggtcaggggtttgaaaccagcctggccaacatggcaaaccctgtctgtaccaaatgtacaaaattagccaggcatggtggtgcatgcctgtaatcccagctacttgggaggctgaggcaggagaatcacttgaacctgggaggcagaggttgcagtgagccgaaatcatgccattgcactccagcctgggcgacaagagtgaaactctgcctcaaaaaaaaaaaaaaaaaaaaaaaaaaagagccaggcatggtggctgatgctggtaatccccagcactttgggaggccaaggcgggtggatcatgaggtcaggagatcgagaccatcctggctaacatggtgaaaccccatctctactaaaaatacaaaaaattagccaggcgtggtggcgggcgcctgtagtcccagctactcgggagggtgaggcaggagaatggcatgaacccgggaggcggagcttgcagtgagctgagattgcaccactgcactccagcctgggcgacagagcgagtttctgtctcaaaaaaaaataataattataataataatatcattaactttgaaaaatagttaatacatgtgttacaaatttataatttcagcattcaagaaaaagatgagaagttaaagactgtggaagaattacttgaaactggacttattcaggtggcaactaaagaagaggagctgaatgtaaagcattttgtagttttgttttccttgtgattattcagtgacataaaaggatttctctgtaatttgtgtaaggtttttcccatagatcttaaacttaatagtacctctcacatttataaatttatataatgcttttttaattaaagtttttttagaagttaaaaatgcataacattgactgccttaatgaggtagatactattgttatagtttgtcagtttccccacttgcaccaaaattataaccaaatgataactagcagacttaattcatgaaatagtactggaggccagagaagagattgccattctattttatggttgtcattagctttacctaacttgattgggaaaaggttgcgggaagaagtaagttaaaagatgtatttgaatgtagggagaggagtagcttaactaacaagttgtatactgtatatttttgaggttgtccagacatgagtggaaatatatgtggatgtaattgaattaaaaatttgtttggatagctatagaagttacagaattatagacattacagaattatagacatggaaaaaagtgagagttttgggccttccagagtagaaaagaagcagctaaagaaatgagaaactaatgtattttgaagctagctatatttttcagagagtaaaatcatgttttgcttatgtgtctttgaaaaaggcaataagaacagaaaattcatctctgacaaaagaagttcaagacttaaaagctaagcaaaatgatcaggtaatgtaaatttttacaactgttctttgtctctgtgttttttgtttgtttgtttgttgtttttaaattaaaagaaacggggtcttgctcttttgcccaggctggagtgcagtggtacaatcataactcaccgtaacctcgaactcctgggctcaaccgataactcctccctcagtcttctaagtagctaagactgtaggctcatgccacaatgctcggcttttattttatttttttgtagagatagggtctcgacatgttgtccagactggtcacaaactcctggcctcaagtggtgctcccaccttagcttcctaaagtgttggaattataggcatgaggcactgtgcccagcccattctcttttaaacagtgggcaaactgttgcataaaaacaagtctgttgtttctcttcctccaggttggaatatgtcaattatagttttaatttatgaatgataatcagtaatagaggctgcaatttaatactgattgccaggtactgtgacaaatactccagatagggtgccattgcctcttactagagtgataaaaaggttctaagtatacaaatataaagtaagactctagtaaaagaggccgcctgaaattaggcagtttcttagttgtgttttctctatggttggaattattgattaaataattttaacatttatctaatgattttttcttttggcatatttataagtgaccttaaagctacctatgttcaaaatgctatttgttgtcattattatgacattaaaaaagtctcgaaagaatgcctgggcttttcccatttggattttgattgtattggaaaatctaaggataatgtgcatttctatttctgacccatttctattttgaacaaattactaagtaggatactttcctatttccaggtttcttttgcctctctagttgaagaacttaagaaagtgtaagtgataacattattataaactggtttttcttctttggtccattttttttttgtgtgtgcttagaaatctagttttattgtgcagttgggacagctgatgtatgtttaactttcactctataatttttcttaatggaataagagaacttagctgtgctttcccaaattcagtataattaaaaaaaaaaaaacaaaaaaaaactatttccagaggatgggagtcagtatagttgaatggaacttgattctcctctgtattcctcagggtacaaatcttatatttctgatgtacttctgaagcacttaactgacttcttgtgtgcataggcttcagctgtctgttaggaggagctttatgttcaccctggccattctacaaagacatgttgctattttatttaaaatgggaaagggttgatttggagagccatttcattatttggtgctatttttatatcttggtgggtcttggtgatttctaatcaaattatactgcatttctttattgaaggatccatgagaaagatggaaagatcaagtctgtagaagagcttctggaggcagaacttctcaaagttgctaacaaggagaaaactgttcaggtattgggagacagagaactgtgttttatgtttttgtttatcaactttagttaatatcatttaatttcgtgtgtttttgtctgtgcattgcattttatgtcaatttctgtgtttccattgtccaatcttgtctgttttgtcattgtcaaggatttgaaacaggaaataaaggctctaaaagaagaaataggaaatgtccagcttgaaaaggctcaacaggtaaaaatcccagagccatagcatgacagatttattagttgtgttatttatgagctatttgattttttttcttgttactcagaaaaaacttagtatgctgtaggtatattgggttatgtgcttttaattttattttttgcctgatttgagaaagtattcttgatattttaatctgtatatcttaaaaattttaactgttaatggttattttctagaacattttttgtgttaatgtttcattttagtttgccaattacaaatgaaacacgaaacagtttggcaatttttttaatccccctgcccccttctaaaagaaaactgcatggaccaaaatgttatttgaatatacattgctctatctctgccttagaacaaagtacaagtttcattgggatttcagacatagatgtgattactggaaattgatgagttttgctgattttaatctgataaggctttcttgaaaaaatagtgagatttcattgaagagatgattcattcatctcatagattcattcagcaatatttattgtcaaagcagtacttgtcaaagcactgtactcgtgattggtggatcactagctagtgattggagataatgtgttgaatgaaacaggtaggatgaaaagatcatacttttctaatatagattgagagttcaggaaagtcttctcctgaggaactgacatctaagccaagaatctgaagggcctgtgagaagagagtggaggataaaaggtattatcagactgtgtatgattaagaaaaaattaaaaaaggacatcatagagtactgttgagtagttggccttgaaaactgggatggagaagagctctgatacagtagggaggtgtgtggagagttaatattctaattttcagtactgtagaagtatgactggtctgagtgcagtggtgtttacaactgattgatcacaaccagttacagatttctttattccttctccatcccactgcttcacttgactagcctaaagaaaaaaagcatcacattagttagacttattattcataactattttccttgtccctcccccttattatttttagtttattaattttcctgttattggagtcaagaggaggtaaactcaaaacacatctcattttgtcatgaaaaattcagctagtttctttgtaatttgaagtgtacacattataaagacttataaagcttaataagttaaattgaaaggattattaattgatttttctgtcctttgtatttcagttatctatcacttccaaagttcaggagcttcagaacttgtaagtaccatttatctcatttccttttactatttctttttcatgagttaaatagaagtataatgaaaattatagcttcttgatttcaagtggtgttttagaaaatacgaaaatactgattatctcaaaactcctaagggccctaagtttcttatttggctttaacctattaagtttttttgtgggaaggaggtaggaagtcttttcatgatttataatctgaatataacctcaaattgagatgttgctctttgcctattttaatagccatgtgaaattggtatcttccacatccagatcaattgtagtaagttttccaaatttgtttgtattgacttaaacaaggtgatacagggtagaggtacagctaaactaacttactcatgtctggatattcagtgatagaatggttttccttaatcatcctatgcttcctgatttgattgtctccaaaatcttaaatgcctttttttttttttttttttttttgagatggaatctcgctctgtcgcccaggctggagtgcagtggcatgatctcggctcactgcaacctccacctcccgggttcaagtgattgtcttgcctcagcctcccgagtagctgggactacaggcgcgtaccaccacgcccggctaatttttttgtatttttagtagagacggggtttcaccgtgttagccaggatggtcttgatctcctgaccttgtgatccgcccgccttggcctcccaaagtgttgggattacaggcgtgagccactgcgcctggccttgtatgcctttatacttgataagttttagtttagttcaatcagctggtctgtgagtactacccaaaatatacttttttcagtgtctaagatttttgctttttatggtcatgtaacattttcatttagagttctgattaatttattatcagattaaaaggaaaagaggaacagatgaataccatgaaggctgttttggaagagaaagagaaagacctagccaatacagggaagtggttacaggtgagaaattaaaaacaataaaaaatagcctttttatacttgactatcaatttaatttacacctattctttttaaggatcttcaagaagaaaatgaatctttaaaagcacatgttcaggaagtagcacaacataacttgaaagaggtatagtataaacaaattaccaacatgttacataaggaatgataaatctttgtttaaggcattagaaagtaaagatgttaatatgttctgagtttctttgccagaaaaattatgttgtaccatagttttgttgttgtttaaataagttagcttttatttctggcaagtcatacttaactgcttaatctgtcaacctgagcctacaagcatttccttatctctaccttttcaaatagactcttagttcatccttaactatctgtttaaagtattagtctttaatcttttaataagtatgaaaaattgtttaataaaactcattctgtccttgctttataaatgacccaatcttaaatttactgcatataattatgtttttgtttttattggtgggtgattccatatatatgttttagcacctacaacataacatttaatgctaacagcattaaaaatatgattctgtttctcaggcctcttctgcatcacagtttgaagaacttgagattgtgtaagtatgctttaagaccacattttgaagagaaacaaacgtctcattattttccagggtgtgcttgaatataatgatgagtttcctgtacatcattaactttattgttaagtggaaattataattccagacgcaaataggctaagtctctgttgggtaaaataaaggttatttaaatgctttcagatacctggagactttatcctttccaaatccatcaaacccattttttcaattattctttctgcaaatataggctggttttaagttattttttaaaacaaaatatgcaattattatagagattaaacttatttcaaatgaaaattagtatttgaattagatgttagtaacatctctgaattaaccaaaagataatcttagccataatcttgataatgaattttaaacctttctgtaattttaatttatttatagggaaaatggaacttgtcatattatcctgtgctgaataggaaaactgaatctagtcagcataagaggtgtcagtttctgtagatattaatcttagaaaatgttttattctagagagtctgttgtcttaaggtacagcaggttacaatggtgggaaagggtatctggacctgatctttttggccccctttaaaattgcttttaacaaatttttcttggtgataccattactctttattgatatttgttttaaagaagtgccccgttttaaactgtcaagatattgaggatatttattaggttattatctttctaaaagggagattactctgttcttggaagattactcatttgtacaattattgtttgtcttttggctatggtgtaactgtcgaggtgcttatctcttatttgcttggaaagcttagggcctcatttctggcctgtttatagtagagatatgtagaccattaaagtaggtaattttaggtatatttctgccttacattttttttttttttgccattttcttttttaaattaatagattttattttttgtggtggagaactttttatatttataggaaaaagagaaataccaattctccctattaacatcttgcattagcatggtacatttgttacaagtgatgagccaatagcagtacattgttatcgttgttattaactgaagttcatagtttccattaggaaactatgtgggttttaacatgtataatgacatgtatctatcattacagtatcatacaaaacagttttactgccttaaaaatctcctgtgttctacctgtgtatccctccctcccttcctccacatcccggcagcaccccccggcaaccaatgatcttactgtcttcagagttttaccttttccagaatatcgtagttgaaatcatacagtatatggcttttctggtttggctcttttcttttctttttttttgggacagagtctttctctgtggcccaggctggagtacatggagtgcagggctgtgatcatggctcactgcagccaggacatcctgggctcaagcgatcctcccacctcagcctttcgagtagctgggactacaggcacatgccaccatgcctggctaattttttagaaacagagtctccctgtgttgcccaggctggtcttgatctcctgggcttgagtgatcctcccaccttggcctcccaaaatgctgggattacaggcatgagccaccatgctcacccttggattgccttcttttacttagcaatatgcatttgagtttttccctttttatacatttatctcactcttcatgtatgctgttttgtcatttttttcatatagatttataagcatcttgaaattctggatcaaggtgtggtaaaaataagtgttcagctcaacgaatacttgagactctattatgtgctttctggcattggggataccgaaatggataagatttcctatcctgaggaaacagttaaacacatcattttgatggtggtgttatgctagcggtctattgcttaggatgaccagggcaattgagattcacttgggctagatagagtaagatttacgtcagcattgggtaagggaaaaacagattaaattatccatagcatctcttcagtacaaaggttagacatattttgtaatttccagggtcaacaaattatgactaagattcttgggggcaaaactccttgcttttgaagtggtaatttttgcaacaatttgataaaatatagttttgttcttagtttttgttttagagtttcttcctagataaagccacatttgcttaagaaatgttaagtatgactgagtagaatgatcctagaaatatctttttaaacaaacttctaagttggtataatatgggggaaaaaaagctggtatgtattgtttctgccatcttttttcttaggggtgatattggagtctggttttccttttttatgtactttagttaatgcagatctttgtaaaaaattctaggttgaaagaaaaggaaaatgaattgaagaggttagaagccatgctaaaagagagggagagtgatctttctagcaaaacacagctgttacaggtgaatatggtgacttaaaattaattattttgtaaattattgtctttgcatgctttaaaataatttttaactgctgccaaaaaatagagtacagaatgagtctccctcccacccagatactaggtgtcattattggcatgttttttgagtaagtacccatgcataaaatgtgtgtatgtatgtatacttgtttattaaatactctgttgaactatactaacttgtatattttgctttcttcacaattaacagtgttttcaagatctttccatataaagcacatttctgccttaacttttaatagttttatgatattggatggttatatcatttattttatttttatttttgagacagagtcttgctgtgttgctcaggctggagtacagtggcgtgatctcggctcgctgcaacctcctcctcctgggttcaagccattctccttgccttagcctctagagtagctgggactacaggcatgcaccactatgcccagctaatttttgtattttttagtagagatggggtttcagcatgttggccagactggtctcgaactcctgacctcaggtgatcctcccacctcggcctcccaaagtgctgagattataggtgtgagccaccgcagccagcatatatcatttatataaccaattccagttgatggatacctagattatttagggctgttttttctgcacaaacagtgcagcagtgaatatccttgcacatgttttgaatacttttactagtgttatctgtatcctagaagtgaaattctggatcaaggcttatgtagcttttttgtttgttaaaagagatagttaaatagaaaatcaatatcttaccttcatgcagttagtattcaacttacttacagaagattgatttgaagtcatagcaaatgtgtagatgcctacattgtcttggattaatcttgctcacattacatgcttcaaggtttgagtctaccacattccttctccctctcatgtaggttcattttaaattttgttagacaatgctagatagacctgcaaaagtgttttcactaattgacactctcaccaactaagggccatttcaccttcttcctttccaacattgacaaggataaaaatttttgatattatacttgaaagatggtaagattatttttaatttgcatttgactgcgagagaagttaagcatttttcgtatgttcaagccatttttatatgaattgtcctttaatttttcccacactttttccactgagttgacgttttttttttttttactaatttgtaagatcctttttatgtaataagggaaattaaataaccttttgttattatatgaggtgatttattttccccattttttcttctgacttcatttgtgtttttcccctttttgggaaatttgaaacttttatgtactcaaatataagtaatttctagagttttaagtctctggaagaaaggtatctctctacgatcataaaaatgtattcggctgggtgtggtagttcacagtagtaatcccagcactttgggaggctgagacaggtggatctcttgaggtcaggggttcgagaccaaacatggccaacgtggtgaaaccccgactctactaaaaaaatacaaaaattagccgggcatggtggcaggtgcctgtagtcccagatactcgggaagctgagacaggagaatcacttgaacccgggaggcagaggctgcagtgagttaagatcacaccactgcactccagcctgggtaacacagcaagactgccatctttaaaaaaaaaaaattacattttcttctaatgtgtttataattctttttgtttgtttgtttgtttagcttatttagtgtaacttatttcagtaagctgtaacaataacattgtaaccattaaaaagagaaggctagccacattattaaataatccatcataacagtagtaattccgttccccagggggacatttgtcaatatctgaagacatttttggttgtcacagctggggcaggcgggctggggcatctagtggatgggtgccatggatgcttctaaatgtccagcagtgcataggataaaacccccacaacaaagaaaaatatgaaacccaaaatgttactagagttgaggttgatttgaaatgtcacttcatactaaattcttagagctatttcggtatatttctggattctattttgttccattgagacatgcaaactccgcagctagtactaatataaatactctaatttcatcatatgttttaataaagagcttattacaccctttaaaattattgctattttggaatttttctagcttgtatgatctgtttctagcttgtatgatctaagtttatgtggaaaaaatctgtttagatactgatgtttaatttttatttaattaggatgtacaagatgaaaacaaattgtttaagtcccaaattgagcagcttaaacaacaaaactaccaacaggtaggtattattagatgtcttgcctttcacttacgtggcaaaaaaattatataaccagtgacatatgagtatttttgccatttctgcattttcattgagaatgaagtatgttttatttatgtttatcaaattttatataaaagaaagcaacttgctatgtcatatccaaagtaaaacaaatctataaagtatacacaaataatattattgccggtattccagctctgttttgtattcatgtgtgttttctgatcctagaattcttagcaagtcagtttaaatactgtagaggttgggttaaagatatgtgtacacactcttatctcccctcttcccaaatgaaacattagtaactggagagaaactaacaaatgtatcataagcaatagtctactactatttaaaagaggttttcaagttataattctgcttggtaaatcaaaagtgtgtttttataaaagatgctacccaaaatagcctgtaaattaatttatgcatgtatatggatagacttgatagtattttgagaaacaaatgaattggagtccttgcaaacaagaagcttgagagattattgtcaccaaggaataaataccatatatgaagggctgtgtacctttgcatgttgatgtataaataactttgttaaacgtgaggaaacataacttgtcctagttttgcttttgatttctgttttttttttttttttttaacttggaagcttaacagttttatgtagtcaaatttgaattgtgcagtttgaaaatgtaaggtgtgcttccatgcacatagtgggaaattgataaatacttattaaatgaagagttcaagtacgttgcgacagtagagattggatttagcattccatacattttacagatttgtacatgtttttattaaaatcacttgattaaagtcagggttactggcatatgaaatatatactatttttacttttgttgttttcttaatttatatttgagaaaagcttcaatgtttttaagtctcctgaaaagttttgttctgaaataacatttaactcttttgataggcatcttcttttccccctcatgaagaattattaaaagtgtaagtaataagtttgagtcacagtttataaagtcgtaactatttttatgtggtaaaccattctcaaataagcaatttagtgtaactgcaaatggcacctgatttttacagttctatttggatatcttgaattgcagtttagagttgagtagtacctttggctaagatgctttttttatggtatttggatttgaatattttgttgagggagatgtttgtttttgtttttttaggcattcagaaaacatcaaatcaagttaaactatactttgcagggttttctaaatcaccttctattatgtcagttatcttactgggtcttctttcttctagatgtgattgtgtaattgaatgatgcaaattttgtcttagcttcatttttta

SEQ ID NO: 6358 - DNA, 1149 bp, Homo sapiens
ttatgaggcacttgagagtgtggttaagatcctgagctctggagtcagacttcccaaattccagtctggactctgccacttgcagctttgtggccttagataagttacttagcttcagtgactcagttttcccatggctaaaatgggaatgatcaagttttgagaattaaatgctagtgcatgttaggtgctataaatagcatataataactgctgaaaagtgtaaactattattgtaattattagtaagaaaatgtttaattattaattttttatcattgacctttaaatatacttgcttcagttatattttaaactttaaattattaacaatttgggccccatgctgtgtagcaggaggaactactgttataccacttaaatttttttcctagcttctttcttccaccagtctcaactttcattaataatagtttttctgtttgtcagatacttgtaatatttaacatcttttctgtgattataattttcatgttttagttttaattttatagtttaatggtgggtccagatctcaatgttagtacttttgtcatagcttctttattcatctcttggttagctgaagttgtttttcctgggattttgtcaaaaaattttcgaaattttggcaagttaacatgcttttcttgtatttgtactcaaataatagtttggtggggtataacattccagaatttcatttttttttccttgaaacattttatgcatttgttgtttcactgttctctttattcatattgctggtagaggtctgacgccagcctgcattttgcacccttttcatgtatttttgttaaactgcactctcacaataaaacattctttgaataatcaatcacgtgtttattatttactggatttttttcagtgtctgacctactctacacacatcaagggattcaatttctttggcattcagtaattgtactataatatggcttgacattgactgctctgttaaacttcccttggacacagtatgccttttcagtcattagattcaagttagcttttattactgggaagttatatataatgttcttgaaataagtaaaataatggagatcagttaaatacatatgggctctccactgcctaccttcgttgtcttttcatatctttaac

SEQ ID NO: 6359 - DNA, 644 bp, Homo sapiens
gggaggctaaagtgagagaattgcttgagcccaggaggtcgagggtgcagtgagctgtgggcacaccactgcactccagcctggacaatagaacaagaccctgtcaaaaaaaaaaaaaagatggatcttgacatgggcgttaaataaacctttgctaaggtgagccactgagattttgagatttattggctactgaagcgtagtatatcccatcttaacagaaatactgtaataatatttataaagtcttaaattatttatcaatggtttataagtaacaaaaaggtaaacattagtcaaatgcctgtcagattttttcagatctccaggttgaccatgcttcactagagttgctgatgcttgatgggagcagcttccaaaaacattagcaggaggtattctaatttatttcttatgaagcacattttatcagtactctaaacatattcatcatggccctctctaaaccacaaaatcgttcaggaatagctctcaggtgtagacagtgcttattagtaggaataggttgaccccaaactcacgactcgtgcaacccactctagctgagctcctagctggcacaggggcactgtgctgcagggagcacacagtctgggctctgtcctgctagggctcacagcagc

SEQ ID NO: 6360 - DNA, 644 bp, Homo sapiens
gggaggctaaagtgagagaattgcttgagcccaggaggtcgagggtgcagtgagctgtgggcacaccactgcactccagcctggacaatagaacaagaccctgtcaaaaaaaaaaaaaagatggatcttgacatgggcgttaaataaacctttgctaaggtgagccactgagattttgagatttattggctactgaagcgtagtatatcccatcttaacagaaatactgtaataatatttataaagtcttaaattatttatcaatggtttataagtaacaaaaaggtaaacattagtcaaatgcctgtcagattttttcagatctccaggttgaccatgcttcactagagttgctgatgcttgatgggagcagcttccaaaaacattagcaggaggtattctaatttatttcttatgaagcacattttatcagtactctaaacatattcatcatggccctctctaaaccacaaaatcattcaggaatagctctcaggtgtagacagtgcttattagtaggaataggttgaccccaaactcacgactcgtgcaacccactctagctgagctcctagctggcataggggcactgtgctgcagggagcacacagtctgggctctgtcctgctagggctcacagcagc

SEQ ID NO: 6361 - DNA, 477 bp, Homo sapiens
gaagtagtaacactgttttgggcttggtgtagtggaaaagcccagctgggctttggaatcagacagagctggtgaggatgctaactagacccagtctacatgtgtaacctcctcagtttcttcacagctctgagcatcaatcgcctcaagtgtgaaatggggtgaaatggcacccacctctttggatttttgtgaggattaataagatgtgaataaagtgcttggtccatggtaagtactctgtgggtagcagttaatcacatgctgataggtaatcaatgtggcagatactgttagtgcccacccaatatccatggaagtatatcctctactccccagcttctcttgcagtttggggccatgagactggttctggcaatgagacaggagcaggtctgataaaagcttcagggactcccagcccatcatctccaacaccctcagcacagttcaagatggaccatgaggctgggtgtg

SEQ ID NO: 6362 - DNA, 244 bp, Homo sapiens
aaattccagaacaaaaagtcactaagagttgatcctaggacacacaaggaatgtatgtacaatggattgatccataagtaaagtgcagggttgtttcaagtattcgaagcaaatagaaggtgtaatttaaatcattccagtcaaaagattgccttaagtaaatacacaattcttatattaaagttaggagaaggagaaccaggctcaaactgcagtttaaaggattttaaatgagatacatgaa

SEQ ID NO: 6363 - DNA, 663 bp, Homo sapiens
tcaaaagtaggttgtggaagagtaggaagcattgcacctaaacttccatgattaactccatgtgttttactcaaagcatcaggttgctctttagacttcttggttgctttggaaattttgatggtgctttttggagagtggcttgggaagccaaaaaagagttgagggcaattactgctttaaccaaaacaatagaacagcaggaagttcagtgcagtcccctagcttctccccttctttactcatttaatactggagaagtctgtgaattatggtatacactgaatttccaacttcgtggacattggcccttttcattatcttaagctcttttcattgctccgtttctgggccttatgggaaatgattcaagcactccatggaagatgatcaattctcaagctaaccccaggcaagtatgaagaattctcccaaaatcacatgatagcaagctgataagatttctctcatcttcagtcagtgagaagaccaaactgcttcaacaagtttgcttcctcagggatgggtgtggtggctcactcctgtaatcccggcactttgggaggcccaggcaaaaacatcacttgagcccaggagttcgagaccagcttgggcaacagagtgaaaccccatctcaaaagaaaaagaaaaagaaaaaaaaaa

SEQ ID NO: 6364 - DNA, 663 bp, Homo sapiens
tcaaaagtaggttgtggaagagtaggaagcattgcacctaaacttccatgattaactccatgtgttttactcaaagcatcaggttgctctttagacttcttggttgctttggaaattttgatggtgctttttggagagtggcttgggaagccaaaaaagagttgagggcaattactgctttaaccaaaacaatagaacagcaggaagttcagtgcagtcccctagcttctccccttctttactcatttaatactggagaagtctgtgaattatggtatacactgaatttccaacttcgtggacattggcccttttcattatcttaagctcttttcattgctccgtttctgggccttatgggaaatgattcaagcactccatggaagatgatcaattctcaagctaaccccaggcaagtatgaagaattctcccaaaatcacatgatagcaagctgataagatttctctcatcttcagtcagtgagaagaccaaactgcttcaacaagtttgcttcctcagggatgggtgtggtggctcactcctgtaatcccagcactttgggaggcccaggcaaaaacatcacttgagcccaggagttcgagaccagcttgggcaacagagtgaaaccccatctcaaaaagaaaagaaaaagaaaaaaaaaa

SEQ ID NO: 6365 - DNA, 663 bp, Homo sapiens; identical to SEQ ID NO: 6364

SEQ ID NO: 6366 - DNA, 340 bp, Homo sapiens
attgaaactcttagcatttgtgaactggaaaatttggtggtgacagaactgtgtttctgtattagataagagatgttctaatagaatcctgctgctccttttgatggaataccgttctgaaattgcatccaaggatgaaaaagttggtaccgtggcaccctgtcaagtagctcctgttgctgtgaggtgtgattaaaagacacataagccagcagaaaatgtgacacaaagggcatctatataaaaaattaacagactacgtgatatcatttaggccagatttagaatcacaataaagaccttgttttagtctgttttgtgctactatcacagaatacca

SEQ ID NO: 6367 - DNA, 340 bp, Homo sapiens; identical to SEQ ID NO: 6366

SEQ ID NO: 6368 - DNA, 340 bp, Homo sapiens; identical to SEQ ID NO: 6366

SEQ ID NO: 6369 - DNA, 176 bp, Homo sapiens
cttctgttcggggaggcgctgccaggaataacccggtgcgtccacagcccgggaggggaggcggccgctgcggctcccgcacgcagacagctgcggcccgggcctcgcggctcccgcctgagcccggcggcccctgccccgggcccatctccgtacagtgtcagaaaaataaataa

SEQ ID NO: 6370 - DNA, 176 bp, Homo sapiens; identical to SEQ ID NO: 6369

SEQ ID NO: 6371 - DNA, 90 bp, Homo sapiens
cttttccctccctccgcgcccgccctccctctgtccttaaggaaatgctaccagacaccccccaccagacacgctcagccttggcgagga

SEQ ID NO: 6372 - DNA, 90 bp, Homo sapiens; identical to SEQ ID NO: 6371

SEQ ID NO: 6373 - DNA, 408 bp, Homo sapiens
tttgtaatgcactcatttttaatgaaaagagaaggggatattttatatgtcctcacatttggtccctttccgcgaaatttgaaactggagacacaaaacattccgcagttgctggtgaaatacctgctttaaaagcagaaccacagttattgtctttggcccggaattccagagactcatttccacccctcccacggagtcacctgctcagggggaaccccggccagaaagccgggtcgcgccaggtcaaatcttgcgcgtctcttgtttactccgccccgggcagggcggcggcgcggccagggggtggggaggaccgctggggcccgcggcgtcctgggcgctcggctctgctccgcagggtgcgggggctggggcgcccgcgaggtgctgcgcgcggtccccgct

SEQ ID NO: 6374 - DNA, 642 bp, Homo sapiens
ggttcatcaaggataatctcagctgggacaaaacagctctgttccatgtggtgtctcatttaccagcagactagcttggacttgttctcataatgatgacaaggtccaagagagaatggaagtttgtgagatgcgagcctatactcagatgttgtaggatgtcacttatgctgaattctactgtctaaagcaagtcacaaaactggcctagacttaaagtgtgagctaattccacctcctgataggaagacttatacaggtgcattgcagagggtatagataaagggaagagtagggaagtgtggctggttttgtaatctaccatactgactgcagtatagtttggtaagtgtggtgaggaaggcaacatctagattctaaaaagcattaaacaaatttcaacttagttaattcaatttcagcttagttttcctataacagggatgctactaaaggaaaaaagaaaaactgggttgtttatcttatattaggatcctactgtgtgttttctaaaatcattaagttatcaccagatgatgctgttttgcctacttaatacattactcagtttcatcctgagcccataaggaagttgtttactagtgtcgtcttatggcataggaagttgacgcataatacttt

SEQ ID NO: 6375 - DNA, 642 bp, Homo sapiens; identical to SEQ ID NO: 6374

SEQ ID NO: 6376 - DNA, 520 bp, Homo sapiens
agtatcgtgccttggaaacccagcttcctcaacccctacaaaccctgaactcaggctcctctgattatttcgctcacggtagtctgcataggttatctctcccatgccatggtctgcaaagtgcccacgagcagaaagccagagccttcaaggactcacctctttggttcctttctctcagaaatcacagtgctaactgttcttcactgcctgaagtcattgtttcatatgttttgtccaattttctagttgtttataatgggagggcaagtctggtagtagttgcttcatcgtggcctgaagcagaagttgagatctcattcaattcccactgctgacctttaccttgcatatcttttcttatagtaaccattaaaatttttatttctgaatcacacatacggtgattcagtattttgcatttgctgggctacaagcagtttttcattgcttttactctgtttgatgggacttgaatacaggtatctttaaaaaaaaccctttattacacaagtaataa

SEQ ID NO: 6377 - DNA, 567 bp, Homo sapiens
gaccacttacatttatgtcattttcaatatggttgggtttaagtttatcattttgctgtttgttttctatttatcccatctgttttctgtttattctttcctcttttcctggcttctttttgattacttttttactattccatctcctctgttagctataaacctttgttttacttttataacagttgctttatggcttaaaatatgcatctttaacttatgcagtctgccttaaaataatatgccacttcatttatagtgtaaaaacttcaaaaagtgcactttcattttcccattatatctttggactattgtcatacattttacttcgacatgttaaatgtcccacaattcattgttaccaattttgcttttaatgacaaaaagcctgaaaaagaaaagtattttccatttacccacatatttgccatttccaatgccctttattcttttgtttagatctgagttcccatccgtattattttatttagcctgaaaagcttcaccgttttttgtactaaagatttcttctaggctgtgcacggtggctcacgcctgtaatcccag

SEQ ID NO: 6378 - DNA, 429 bp, Homo sapiens
cagctcactgcaacctccacctcccaggttcaagtgattcccgtgcctcagcctcccaaatagctgggattacaggtgtgcaccaccatgcctagctaatttctgtatttttagtagaaacagggtttctttgccaggtgcggtggctcgtgcctgtaatcccagcagtttgggaggccgaggtgggtggatcacctgaagtcaggagttcaagaccagcctgcccaacatggtgaaaccctgtctctaccaaaaatacaaaaattagctgggcgtggtggtgggagcctataatctcagctacttgggaggctgaggcaggagagtcgcatgaactcgggaggcagaggttgcagtgagccaagatcacaccattgcactccagcctgggcgacaagcatgaaactctgtctcaaaaaaaaaaagaaa

SEQ ID NO: 6379 - DNA, 414 bp, Homo sapiens
ggcaaagtggagcacatgaaccagacactcaaacagccactgaagaaatattgccaagagacccatctaaggtgggatcaggtcctacccatggtcctcctccgagtcaggtgcacccttaccaaacaactgggtattcaccctatgaaatcttgttcagccagccacccccaatcataggtcaaattaagggtgatctccgggagctaagggacttaaccttaagaaagcaaatgcagggcttagggatagccatgcaagatgtctatggctgggtacgggaaagaatgcccataagcctggcagacccagcacacccctttaaacccggggactctgtttgggtcaagaaattgaatccaaccactttgggacccctatgggatgggccccatactgtaatcttgtccactc

SEQ ID NO: 6380 - DNA, 10445 bp, Homo sapiens
gagtactccagcatgtacacatcccgtgaatttttggaaatcagggtctttaatatgtgttgttagattttcataggaaagctaaaataagacgttttaagtggcttacgttttttagtgttcgctgcaggttctgggccatgttgtgatgtatactagatcaccaataaatatttgattacatcgaatacctaccccttaacaaatgagttcaaggtgccatctggccgcacaggtaaattcttggctcctagcactaccaaacaaagttgaccatgaagtgatggctgatctgtccctggaaggaaagccagtattcactgtcaaaccatgtctcctgatacgttagtatgcagtaccaccaccccaaaaccgagagctcagctagagaatctgctacagccctcagaccccgagagagcagatgggagtggtgcagtgggctctgctggccctgcccacaggctgtggcgctgcccacaccgtgccgctctgtggtcaggtggaggacaggatggagggattactaagatcctagaaaagagtaaagaggaacgcaaggagagggaagatgccgaagtttgagtctagttgtagccagaagtttgggggaaagtgagagccccgagaccctgtctaggaggttgggatggccatggggcacttgctgctggtctgctggtgaccccgtgaacttgggtagcagaatttcctcttctagccaaatagggagtcagcaaaatacacaacagaaatgtgcattctgggccgggcgtggtggctcacgcctgtaatcccagcactttgggaggccaaggtgggcggatcatgaggtcaggagatcgagaccatcctggctaacatggtgaaaccctgtctctacttaaagaaaaaaaacaaaaaattagccgggcatggtggcaggtgcctgtagtcccaggtactcgggaggctgaggcaggagaatggcatgaatcagggaggcgaagcttgcagtgagccaagatcgggccactgcactccagcctgggtgacagagcaaaactctgtctcaaaaaaaaaaaaaaaaaaagaaatgtgcattctcccagtcctccttccccgccctcctcctcctccaccctcctgctttccacacgccccacgttattgaaggagtaaaatctccatagggtccctgaggaccctccctcctgacctacttcttttgctgggcagcagctacccacatgcctgggggcggggatttatctcgtctgagccctgcaggtaccagtgctcttggctccacattgtcatggagcctctgctcttcaggaggggccacggtttccccagagaccatccaatctgcccctgggaggaaggcctagggcagtgtccttagaggagcgtagagagggcatcagaggccttgtctgcttctggtcacccgtttcccccactacgggctccagagaacctctcccgggctcgctgcatggctcagaaagaagagctgctggagctgggcacggggacgtagaaaggaaatgctagaaaactttcaccccacctcagtctgcctgcagcaccaggctctgcagacaatgacacagacaatgtccagggagctggaggccactgaccttcttgagcctcttggagttttctgggccgtgaagggagaaccagcttagcccggactgtgagctctccattactctgaggaacgctgtcttcgtatttctccgcctggggacaagaggcagagcttagggacaggattccccaagtcccaagaaccttctgggttcctctggttgtctcagcttcgtccacagatgcttccccctggcccctgcaaggccctgggtggagcaggtgtgtccgtggcaggactggtcttccttccatctatggtttcactcccaccctccccaaccccagcatggggaggaacagcttggccaccccagcgaaccagagccagatgagcctgaggaagtgaagggactcaagggcactgcacactccctaagacatttctacgaaaacccagacacagcctgagtttgaaaaacagaaatgaactcaagcctccaccccatccaccccacccaggtcagtagagattcacgctgcccttccatgccaaggactggcacagacactggggacagcatggggtgtagtctctgtccagagccacagggggtggcccctcagggtgtggtgagtctgaggacacctccctgcccaccgaggcacttctgtcatgagtggttttaccagaaagtgagtgaagagagggccgggaaagagatgagcctgaaatccacaccatccttctcccagtggggtgggaggagagtattgggaagagtctagagcagggtgtgtccagtcttttggcttccctgggccacactggaagaattgtcttgggccacacataaaatacactaacaacagctgatgagcttaaaaaaaaaatcacaaaaaaactcatgttttaagaaagtttatgaatttgtgttgggttgcattcaatgccatcctgaggccaagcatggtgactcatgcctgtaatcccagcactttgggaggccaaggtgggatcacctgaggtcaggagttcgagaccagcctggccaacatggtgaaaccccatgtctaccaaaaatacaaaaaaattagccaggtgtggtgacgggcgcctataatcccagctactagggaggctgaggcagagaatcacttgaacccaggggacagaggttgcagtgagccaagatcacgccacttcactccagcctggacgacagagcaaaactccgtctcaaaataaacaacaacaaccaaaaaacagagccgtcccgggctgcaggttggacaagtttggtcttgacacatccggtccaccatggctcctgccagcactgagaagcagccctctcagttaccctcagaggcctcaggactcctgggagcccgcgtggccagcccgtcttcctggccctcgggtgccaaatgaggtatggctgcctccagcctcagcggccagaaaccgaggcggaacagagcccaggggcgggtctgtgggcggactccccaccctactggctttaggagggatgccttgcagctctgtgccacctgcagctctgtgccacctgcagctctgtgccacctgctcctcacccacttgccagagcaggctcagtctgatgaggcctggtggccgcctgtcctatgccaagccctgtgcttgttccaggccttgtcttcgagctgatgacagaggtgtgggagaggcagggtgcacgggggattcagcctcggacagaaggagttcaggctggaaactcagggcgtcccggaggagccaatgctgttctgagagatgacagagcgggggtgagaggaaggcacggaaggcatggaagccagatgcttcacccacccgcaacgtggctggggcaggagcaaagggacactgaggctaaagatcaggccgagatggcaggcgtcctgagctccgggtcctggaagggaggccacttctggtaggggtaatcaggaatggcttcctggaggaggtgggttttgggtcgtcttgggctgaccttggataggggatgcattccaggtaggcactgggaaggggaggtctaagcccggactctagcttgggggagtcagcacaggcagtgggagagtgggcattgcctggaggagcagggagggggcaggtggctcaccaggaggcctcagctgaaacctgagaagcttccaggcagagataatgcgaatcccagctgcgctggctccggagaggaaaagaagccagatggcccttgtgccttatgtccaggtcggagcagaaggctgggcctgccgtgggcccttggctgaggggagtagtccatcccgctgggttttttttttttttttgagacagagtctcgctctgttgccaggctgaagtgcagtggtgcaatctcgactcattgcaacctctgcctcccaggttcaagtgattcttctgcctcagcctccagagcagctgggactacaggcgtgcaccaccacacccagctaatttttgtatttttagagagacggggtttcactgtgttagccaggatggtctcaatctcctgaccttgtgatctgcccgcctcggcctcccaaagtgctgggattacagtcaagagccaccgtgtccaggctccccactggggtttttaaagagatggcagaagcccacgtttttcatccctcgtggtctcacatgaactctctcccagtccgggatctggacacagcaaagtacaaagcagcgtctccgagaaatgctaacctctctcccaggcctctcctcctacctgcatagcctgggggacacggatcctaaatggagtccatcagctcctctgacccacccccagcccacgtgctatctatctcccgccgtgcaattccaaaccaggagctggagccccacatcctagccagggcggcctctgccttcctcacagcatcgggtccagccatttgtcacctattactgttagttattgtcacctattattgagagtgcctggggttgaaaggttagaaacaacacactgtagccccctgggggaccgcatagctgcgggcggtgcccccagggaaaggcatggccagcttccagcaggtcagccaccagcaaagggaggcctccgccaggggaagccacaggacctgatccagtctggtctgtgtatgatgctgaggcgggggctgttcgggtacctgaacagagctgagccagttaaaacaaaccctccgcccaccccacccacaagaaagtaactatttcaaagtcacagcgccaggccggcgaacacacagtcttgggtccaagtcttgccaggtacgttttctcttctgggatctctctgaaaagttatttatctatcacagtggggatggagggcactcagtccaaaaccagacatcaccttggcccggagcggatgccagcggaaggactgtgttgtgctgtcttcaaagtcccacgtggccagaggaatgatcacttctccaagaaacactctccgggccagcgtgcccagatgccacaccgagacctgcagctgccgggtcaccagctgggcaggggccacctgatactgcagaggcaaggaagagatggtcagctgggctcccggggcccgcactcctaggatccccatctctggaccccaccttccagggccccacttcccggggcctggcgcaggcctccctcccacaggctgagtccaagatgcggatgcagccagggacctgatgtggttagggtgggtcaaggtgcttacagccagggtggggcgggggggtcctctctctgctcaagaacccctccccctactccccaggtgcccagtgctctgcctggggacaggcaagggtagccctggtagcctcccacccccaattcctagaacaagacaaggatgaaagtccttgtccagctcacgcctactagaaatcaagccaaagtctatgctcgcacaggatttgaacttgcatctaaacactgcacccagccaggcttggccaaaaataatgataacaggcccaaaaatactaaaaaaaaaaaaaaaaaaaaaaaaaaaaatttttttttgagacaggatctcgctctgtcaccaggctggagtgcagtggcacgatcttggctcactgcaacctctgcctcctgggttcaagcgattctcctgccttagcctcctgagtagctgggactatagacgcccaacaccacgcccggcttgtttttttgtatttttagtagagacagggtttcaccacgttggccaggttggtctcgaactcctgacctcaaatgacccacctgcctcggcctcccaaattgctgggattacaggcgtgagccactgcaccagcctgcatttatttatttattttttaaagcaaagcatgaactcccccctcctccattccccgcaacaccacgtgtttgccctggagggacggtgcctgtgctcaggcatgcagggcctgtgctggcttggcagaggccaacacgatgttcttactgtccacacagggggctcccaacacacccaagagtgacgagggaacccattccccagccaagcatgggttctgccccatagagactagaggccgaaggcccctcagtggcacccagcccttcccaaggtgtggctgactccacctcagcctctgagggcctcactttaagcttattagttggattttctcaataatgaacaaaccctacaagttattgaacacttatttatttcacaccaggctttctagatgcattgatctttttagctttcacacgcaccctatgaggtcagtataattcaaaccatgttgcaggtgaaaaaaaagcagcttggaaattcagtgaccctccctcccttggtctggtagccgacactgcaggccagattcacgtgcactgactgtgtccaggcccgagtctcgctgctgacctctgtggcccatgctgcccccactccggcgcttgtttggggtttgaatggtgactcctcgtgacacggctgttgctgtgaggctggacacttgcacccatttgcagcagctgtgcggtttgtttgctttggggttcatctcctcatgcccacctttacccatctttccaatcgaggaacgagatggaataaaacaggaactgagacacggtaatttccctccttcagcctctgcaaacagaggggaggcgcagcagggccgtcccctgctctgttgggggctgcctgtaggctctgtccacacttctgatgtctgcgggccaggcacaaatggcttggctggccaggttagcttcctcagttcattcctccttttcctccccgctggggtggcttgtggccatggagatgggcatttcttgggtcacattcccttttctcctgcctttgggtaacttttagccagttttccctcaagtctatgggtccatatcttttttggggggacaggatctcactctgtcacctagactggagtgcagcagtgccatctcagctcactgcagcctgcacctcccaggctcaagcgatcctcccacctcagcttcccaagtagttgggactacaggtaggcgtcgccatgcccggctaatcttttaatttcttgtagagatggggtctctctacattgcccaggctggtctcgaactcctgggctcaagccctccacccgtctcagcctctcaaagttctgggattacaagcgtgagcctccacacccagcccatgggtccatttccgactctgccccacattcaatctctgtctataaactctggattgatgtgattattccccatattccagctacactccttatcagttagtccaggcagctggccagctgcatctgctgccctctgagaaatgaagcggttactagaacgccacgccacttagcagggtcgggctcgggcccccaggcagctctctcatctccagctgtgtgtgggcgacgctcagccacttctcctgggtccttacccattgctcgcccctttctgtcaataggactactccctgctacatacagaatctacctttgctttgttttgttttgtttgttgagacggagtctcgctctgtcgcccaggctggagtgcagtggtgtgatctcagctcactgcaagctccgccttccaggttcacgccattctcctgcctcagcctcccgagtagctgggactacaggtgcccgccactgtgcccagctaattttttgtatttttagtagagacggggtttcaccgtgttagccaagatggtctcgatctcctgacctcatgatccgcctgcctcggcctcccaaagtgctgggattacaggcgtgagccaccacacccagcctagaatctaccttttcaaaccagacctattttccatagccctgttaggtccacaaggcttgctccaggctcagctgggaatgaggtgtaaggatcatttgagagcagggccaggcaatgaccaatgtcacccagtgagatcacttcatcctctccaggcccccaggacagtggtgtcaaatggggtacaagtctccctgggtccagaaaggcttgccaagaagtactctgctcagaaaaatttgaggatcaatttctagatcctcgcatttgatgtgcacttctctcaaaactggctggagacagttctcacagcctcatccacctgaatcgtactctgatggctcacctcaggtcgcacaaagcctgggtgctgcacaaaggtgtgattgtgattggaaatactggcttctagcgagacttttaatgctggatcggcctccccggcttcccatccttcgcatcttatgcatatttctattaaggatgaggctggccggtgttgggttattttgcatttaggatcaattagagatgccgattattttaattgtaactggaaagtttcccaggactataaaatattcacaatatactagataagacccatggataaaaattttaagtgatatctttgagattctgtgtacattttaaggtaggtaaccttttaactccaattatataactacatttttttttttttttttgagacggagtctcgctctgtcacccaggctggagtgtagtggcgctatctcggctcactgcaagctctgcctcccgggttcacgccattctcctgcctcagtctcccaagtagctgggactacaggcgcccgccaccacgcccggctaattttttgtatttttagtagagacggggtttcaccatgttagccaggatggtctcgatctcctgacctcatgatccacccgcctcagcctcccaaggtgctgggattacaggcgtgagccaccgcgcccggcccagaatctgcattttaaaaaaatccccagttctaagtacaggggcatcttagaaaataagaaatttaggcctggcgtggtggctcaagcctgtaatctcagcatttgggaggccggggtgggcagattacctggggtcaggagttcaagaccagcctggtcaacatggtgaaaccccatctgtactaaaaacacaaaaaatttgctggccatcgtggtgggtacctttaatcccagctactcaggaggctgaggcaggagaatcgcttgaacctgggaggtggaggttgcagtgagccaagatcatgtcactgcactccagcctgggcgaccaagagtgaaactccatctcaaaaaaaaaaaaaaaaaaaagaaaagaagaaatgttttaaaaatgtaaatccccatgggattttacgcacacaaattttgagaactgccagtcctttgtggctttgagctgtatttctaaggactctctaggtctcagtttccccgtgggtaaatgaggattctaataattaccccaggctgtatataaagcacttggccacagtagggacccaggaaacaagggctattattatttaatgaactcagggctctgtgccagctgcccagatggcccctggctggcagctcacagacaccccctacttgccaagaaaggcaaacaaagccctctcctgtcataggcatgagacgaggggacctctggctgcccagccccggcagggtagcctctgcagctctgggctacccccctcaccctgcaccaagattggggccaccacagccagctctctgcagataccagacctcagctgcagccttccacccgacatcagagcgcatggccccatctctgccctcaaccatcaatcacatttcctagtatcatagaaagtgaaaacccaaacaattcctttgtaagatttttcataaaaggattcatttaaaaaaaataaaattagaagaaacctgagtttgtcagaaatacaataaaggggcacttttacaaagacagtaactcaggagtttaattttcagggcactctgtctgagagcacctctttgacagaaacattcactaagacaaactaatgtttaaaattatcctgtgccccggtgttagcccgagacaaagaggcagccaggttctttttcaccatcttctcagaaatcattaatcaaaagccattcctgagtctggcagactctgcacttttcctgtacaaaggctgacatttattttctaccaacttaacactgattgacagagctgcgaagaaacatataggtgtctgtattatatctaactgagtcaagagtttgaaagcaccatccactggactctgccccaggcgctccacccgggctcgggaggactctgcacaggaatatctgtccagcaagtaccttcaaggtctcctgaaaggtcgggtccacggtgttcctttggactccagtcttgcgctttccctgggaggatctgtcgggcaacaggtaggtcttcacatac

SEQ ID NO: 6381 - DNA, 1673 bp, Homo sapiens
ttctgagctcaagccatccactgcagcctcccaaagttgctgggattacaggggggagttaccatgcccaccagccggccttttacctcatttgataagcactggaggacatgggtaacaacgtttattaaaatctggccattttctacatctcaaagaggagataacccaccagaggcttaggtaacataattgtgtttaacgtaaatatacacagataccaataggcggttaagccatgggacagggccgcagatggagactgctcaaggtcaaaggggtctccagctgggaccctgcacctggttcgtagcccctctgcagacgcacagtgcctcacgcctgctgcaacctggaaccttgaggccttcatgtcagtgcaggacaagagtcatgtctgtccatagattggggctggaaaggactttctgccactggagcttcgatagtgagcatgcatccccgccaacagctgtgtctccctctgtaagagaggaagacaatttagccatggtcggggagggcaccacttcatcccctctcatccctttaaaaatgatgaccagccagaagtttttcacctcaagtccacattaaaaggccaaccactgatgacagacgccgccaccaccactcccaccccaacaaagctggtgttgagactgggattcacgcaggcatcctctgctctgcgaggctctaacagcctggagttctgtagtttgaaagtgaggcgaggactctggtttggtgggctgggtcttcaccaagggagtggatagttgcacaccagcatggctagctgggtggggccgtctcagactgggggctgggcttgcccatgggaagggattcttagaggaagacagtatgctttggacaaaatatctttgaaaagcaatggagcagtgaagcttatttctcttcagtcactggttctcagttggaggtccttggagatgtgtgcaggtgtttttggttgtcatcatgtcagggacactgctggcagccagaagcagtgccaggcacagaacctcacagcagagggctgtccacctaccatgccggcggtgccctgccgagcggctctggacagcactgctgttctgaccacttttgatgaagtactttctgaattgccatttgtttaagaagatattttcatttaagaaaataatccttttatgattgacgccagaaacaaaagcaaatactgtacctagcccgtttggaggcctataatttttgtttctttagcagatctaaatctgatttaaattgtcaaaatacttggctgtattatggctcagctgtagagtaaaaactagacttaggcatttccaattaaggcaggctaggcaatttcaaaaccagttaagtcactgccctggtggaagcattttctttgcacggtacccattaggataatcacaaagtataaacgtttgggctcaatgtctcagacttacttgaaccaagtctggttcctccaagcaagcggtcgttcattccaaagagggcctgatcccagacagttaactccaagcttgactgcctcagctgagctggggttacgccactgaagacaaatgagtgtttccactgggggcaagcctgcttcctcaggactggcgacttcagtctcagtttttgttggtctggcagagtgagac

SEQ ID NO: 6382 - DNA, 576 bp, Homo sapiens
gtctctactaaaaatacaaaaattagccaggcatgatggcatgtacctgtaatcccagctactcaggaggctgaggcaggagaatcgcttgtacctgggagatggaggttgcagtgagccgagatcgcgccactgcactccagcctgggcaataaagcgaaattccatctcaaaaaagaaaaacaaaacaacccaaaaactggccaggcacctggctcagggaggattccataagccaggaatttgagaccagcgtgggcaatacacagggagaactcatctccacgaaaaatttaaaagtcaactgggtgtggtggtgtgcacctgtagtcccagctactcgacgcccgaagttggaggatcacctgagcccaggaggtcaaggctgaagtgagccatgataacatcactgcattccagcctagacggcaaagcaagactctgtctcaaaaaatcaaaccaaaacaaaaaatccctcaaaactccatctctaattcttcacagttcatttactcttaagttactgagcattacacattcatgcaatctcaaatatgtaaaacagaatatataaaa

SEQ ID NO: 6383 - DNA, 2236 bp, Homo sapiens
  SITE (242): n equals a,t,g, or c
  SITE (243): n equals a,t,g, or c
  SITE (244): n equals a,t,g, or c
  SITE (245): n equals a,t,g, or c
  SITE (246): n equals a,t,g, or c
  SITE (247): n equals a,t,g, or c
  SITE (248): n equals a,t,g, or c
  SITE (249): n equals a,t,g, or c
  SITE (250): n equals a,t,g, or c
  SITE (251): n equals a,t,g, or c
  SITE (252): n equals a,t,g, or c
  SITE (253): n equals a,t,g, or c
  SITE (254): n equals a,t,g, or c
  SITE (255): n equals a,t,g, or c
  SITE (256): n equals a,t,g, or c
  SITE (257): n equals a,t,g, or c
  SITE (258): n equals a,t,g, or c
  SITE (259): n equals a,t,g, or c
  SITE (260): n equals a,t,g, or c
  SITE (261): n equals a,t,g, or c
  SITE (262): n equals a,t,g, or c
  SITE (263): n equals a,t,g, or c
  SITE (264): n equals a,t,g, or c
  SITE (265): n equals a,t,g, or c
  SITE (266): n equals a,t,g, or c
  SITE (267): n equals a,t,g, or c
  SITE (268): n equals a,t,g, or c
  SITE (269): n equals a,t,g, or c
  SITE (270): n equals a,t,g, or c
  SITE (271): n equals a,t,g, or c
  SITE (272): n equals a,t,g, or c
  SITE (273): n equals a,t,g, or c
  SITE (274): n equals a,t,g, or c
  SITE (275): n equals a,t,g, or c
  SITE (276): n equals a,t,g, or c
  SITE (277): n equals a,t,g, or c
  SITE (278): n equals a,t,g, or c
  SITE (279): n equals a,t,g, or c
  SITE (280): n equals a,t,g, or c
  SITE (281): n equals a,t,g, or c
  SITE (282): n equals a,t,g, or c
  SITE (283): n equals a,t,g, or c
  SITE (284): n equals a,t,g, or c
  SITE (285): n equals a,t,g, or c
  SITE (286): n equals a,t,g, or c
  SITE (287): n equals a,t,g, or c
  SITE (288): n equals a,t,g, or c
  SITE (289): n equals a,t,g, or c
  SITE (290): n equals a,t,g, or c
  SITE (291): n equals a,t,g, or c
  SITE (292): n equals a,t,g, or c
  SITE (293): n equals a,t,g, or c
  SITE (294): n equals a,t,g, or c
  SITE (295): n equals a,t,g, or c
  SITE (296): n equals a,t,g, or c
  SITE (297): n equals a,t,g, or c
  SITE (298): n equals a,t,g, or c
  SITE (299): n equals a,t,g, or c
  SITE (300): n equals a,t,g, or c
  SITE (301): n equals a,t,g, or c
  SITE (302): n equals a,t,g, or c
  SITE (303): n equals a,t,g, or c
  SITE (304): n equals a,t,g, or c
  SITE (305): n equals a,t,g, or c
  SITE (306): n equals a,t,g, or c
  SITE (307): n equals a,t,g, or c
  SITE (308): n equals a,t,g, or c
  SITE (309): n equals a,t,g, or c
  SITE (310): n equals a,t,g, or c
  SITE (311): n equals a,t,g, or c
  SITE (312): n equals a,t,g, or c
  SITE (313): n equals a,t,g, or c
  SITE (314): n equals a,t,g, or c
  SITE (315): n equals a,t,g, or c
  SITE (316): n equals a,t,g, or c
  SITE (317): n equals a,t,g, or c
  SITE (318): n equals a,t,g, or c
  SITE (319): n equals a,t,g, or c
  SITE (320): n equals a,t,g, or c
  SITE (321): n equals a,t,g, or c
  SITE (322): n equals a,t,g, or c
  SITE (323): n equals a,t,g, or c
  SITE (324): n equals a,t,g, or c
  SITE (325): n equals a,t,g, or c
  SITE (326): n equals a,t,g, or c
  SITE (327): n equals a,t,g, or c
  SITE (328): n equals a,t,g, or c
  SITE (329): n equals a,t,g, or c
  SITE (330): n equals a,t,g, or c
  SITE (331): n equals a,t,g, or c
  SITE (332): n equals a,t,g, or c
  SITE (333): n equals a,t,g, or c
  SITE (334): n equals a,t,g, or c
  SITE (335): n equals a,t,g, or c
  SITE (336): n equals a,t,g, or c
  SITE (337): n equals a,t,g, or c
  SITE (338): n equals a,t,g, or c
  SITE (339): n equals a,t,g, or c
  SITE (340): n equals a,t,g, or c
  SITE (341): n equals a,t,g, or c
  SITE (342): n equals a,t,g, or c
  SITE (343): n equals a,t,g, or c
  SITE (344): n equals a,t,g, or c
  SITE (345): n equals a,t,g, or c
  SITE (346): n equals a,t,g, or c
  SITE (347): n equals a,t,g, or c
  SITE (348): n equals a,t,g, or c
  SITE (349): n equals a,t,g, or c
  SITE (350): n equals a,t,g, or c
  SITE (351): n equals a,t,g, or c
  SITE (352): n equals a,t,g, or c
  SITE (353): n equals a,t,g, or c
  SITE (354): n equals a,t,g, or c
  SITE (355): n equals a,t,g, or c
  SITE (356): n equals a,t,g, or c
  SITE (357): n equals a,t,g, or c
  SITE (358): n equals a,t,g, or c
  SITE (359): n equals a,t,g, or c
  SITE (360): n equals a,t,g, or c
  SITE (361): n equals a,t,g, or c
  SITE (362): n equals a,t,g, or c
  SITE (363): n equals a,t,g, or c
  SITE (364): n equals a,t,g, or c
  SITE (365): n equals a,t,g, or c
  SITE (366): n equals a,t,g, or c
  SITE (367): n equals a,t,g, or c
  SITE (368): n equals a,t,g, or c
  SITE (369): n equals a,t,g, or c
  SITE (370): n equals a,t,g, or c
  SITE (371): n equals a,t,g, or c
  SITE (372): n equals a,t,g, or c
  SITE (373): n equals a,t,g, or c
  SITE (374): n equals a,t,g, or c
  SITE (375): n equals a,t,g, or c
  SITE (376): n equals a,t,g, or c
  SITE (377): n equals a,t,g, or c
  SITE (378): n equals a,t,g, or c
  SITE (379): n equals a,t,g, or c
  SITE (380): n equals a,t,g, or c
  SITE (381): n equals a,t,g, or c
  SITE (382): n equals a,t,g, or c
  SITE (383): n equals a,t,g, or c
  SITE (384): n equals a,t,g, or c
  SITE (385): n equals a,t,g, or c
  SITE (386): n equals a,t,g, or c
  SITE (387): n equals a,t,g, or c
  SITE (388): n equals a,t,g, or c
  SITE (389): n equals a,t,g, or c
  SITE (390): n equals a,t,g, or c
  SITE (391): n equals a,t,g, or c
  SITE (392): n equals a,t,g, or c
  SITE (393): n equals a,t,g, or c
  SITE (394): n equals a,t,g, or c
  SITE (395): n equals a,t,g, or c
  SITE (396): n equals a,t,g, or c
  SITE (397): n equals a,t,g, or c
  SITE (398): n equals a,t,g, or c
  SITE (399): n equals a,t,g, or c
  SITE (400): n equals a,t,g, or c
  SITE (401): n equals a,t,g, or c
  SITE (402): n equals a,t,g, or c
  SITE (403): n equals a,t,g, or c
  SITE (404): n equals a,t,g, or c
  SITE (405): n equals a,t,g, or c
  SITE (406): n equals a,t,g, or c
  SITE (407): n equals a,t,g, or c
  SITE (408): n equals a,t,g, or c
  SITE (409): n equals a,t,g, or c
  SITE (410): n equals a,t,g, or c
  SITE (411): n equals a,t,g, or c
  SITE (412): n equals a,t,g, or c
  SITE (413): n equals a,t,g, or c
  SITE (414): n equals a,t,g, or c
  SITE (415): n equals a,t,g, or c
  SITE (416): n equals a,t,g, or c
  SITE (417): n equals a,t,g, or c
  SITE (418): n equals a,t,g, or c
  SITE (419): n equals a,t,g, or c
  SITE (420): n equals a,t,g, or c
  SITE (421): n equals a,t,g, or c
  SITE (422): n equals a,t,g, or c
  SITE (423): n equals a,t,g, or c
  SITE (424): n equals a,t,g, or c
  SITE (425): n equals a,t,g, or c
  SITE (426): n equals a,t,g, or c
  SITE (427): n equals a,t,g, or c
  SITE (428): n equals a,t,g, or c
  SITE (429): n equals a,t,g, or c
  SITE (430): n equals a,t,g, or c
  SITE (431): n equals a,t,g, or c
  SITE (432): n equals a,t,g, or c
  SITE (433): n equals a,t,g, or c
  SITE (434): n equals a,t,g, or c
  SITE (435): n equals a,t,g, or c
  SITE (436): n equals a,t,g, or c
  SITE (437): n equals a,t,g, or c
  SITE (438): n equals a,t,g, or c
  SITE (439): n equals a,t,g, or c
  SITE (440): n equals a,t,g, or c
  SITE (441): n equals a,t,g, or c
  SITE (442): n equals a,t,g, or c
  SITE (443): n equals a,t,g, or c
  SITE (444): n equals a,t,g, or c
  SITE (445): n equals a,t,g, or c
  SITE (446): n equals a,t,g, or c
  SITE (447): n equals a,t,g, or c
  SITE (448): n equals a,t,g, or c
  SITE (449): n equals a,t,g, or c
  SITE (450): n equals a,t,g, or c
  SITE (451): n equals a,t,g, or c
  SITE (452): n equals a,t,g, or c
  SITE (453): n equals a,t,g, or c
  SITE (454): n equals a,t,g, or c
  SITE (455): n equals a,t,g, or c
  SITE (456): n equals a,t,g, or c
  SITE (457): n equals a,t,g, or c
  SITE (458): n equals a,t,g, or c
  SITE (459): n equals a,t,g, or c
  SITE (460): n equals a,t,g, or c
  SITE (461): n equals a,t,g, or c
  SITE (462): n equals a,t,g, or c
  SITE (463): n equals a,t,g, or c
  SITE (464): n equals a,t,g, or c
  SITE (465): n equals a,t,g, or c
  SITE (466): n equals a,t,g, or c
  SITE (467): n equals a,t,g, or c
  SITE (468): n equals a,t,g, or c
  SITE (469): n equals a,t,g, or c
  SITE (470): n equals a,t,g, or c
  SITE (471): n equals a,t,g, or c
  SITE (472): n equals a,t,g, or c
  SITE (473): n equals a,t,g, or c
  SITE (474): n equals a,t,g, or c
  SITE (475): n equals a,t,g, or c
  SITE (476): n equals a,t,g, or c
  SITE (477): n equals a,t,g, or c
  SITE (478): n equals a,t,g, or c
  SITE (479): n equals a,t,g, or c
  SITE (480): n equals a,t,g, or c
  SITE (481): n equals a,t,g, or c
  SITE (482): n equals a,t,g, or c
  SITE (483): n equals a,t,g, or c
  SITE (484): n equals a,t,g, or c
  SITE (485): n equals a,t,g, or c
  SITE (486): n equals a,t,g, or c
  SITE (487): n equals a,t,g, or c
  SITE (488): n equals a,t,g, or c
  SITE (489): n equals a,t,g, or c
  SITE (490): n equals a,t,g, or c
  SITE (491): n equals a,t,g, or c
  SITE (492): n equals a,t,g, or c
  SITE (493): n equals a,t,g, or c
  SITE (494): n equals a,t,g, or c
  SITE (495): n equals a,t,g, or c
  SITE (496): n equals a,t,g, or c
  SITE (497): n equals a,t,g, or c
  SITE (498): n equals a,t,g, or c
  SITE (499): n equals a,t,g, or c
  SITE (500): n equals a,t,g, or c
  SITE (501): n equals a,t,g, or c
  SITE (502): n equals a,t,g, or c
  SITE (503): n equals a,t,g, or c
  SITE (504): n equals a,t,g, or c
  SITE (505): n equals a,t,g, or c
  SITE (506): n equals a,t,g, or c
  SITE (507): n equals a,t,g, or c
  SITE (508): n equals a,t,g, or c
  SITE (509): n equals a,t,g, or c
  SITE (510): n equals a,t,g, or c
  SITE (511): n equals a,t,g, or c
  SITE (512): n equals a,t,g, or c
  SITE (513): n equals a,t,g, or c
  SITE (514): n equals a,t,g, or c
  SITE (515): n equals a,t,g, or c
  SITE (516): n equals a,t,g, or c
  SITE (517): n equals a,t,g, or c
  SITE (518): n equals a,t,g, or c
  SITE (519): n equals a,t,g, or c
  SITE (520): n equals a,t,g, or c
  SITE (521): n equals a,t,g, or c
  SITE (522): n equals a,t,g, or c
  SITE (523): n equals a,t,g, or c
  SITE (524): n equals a,t,g, or c
  SITE (525): n equals a,t,g, or c
  SITE (526): n equals a,t,g, or c
  SITE (527): n equals a,t,g, or c
  SITE (528): n equals a,t,g, or c
  SITE (529): n equals a,t,g, or c
  SITE (530): n equals a,t,g, or c
  SITE (531): n equals a,t,g, or c
  SITE (532): n equals a,t,g, or c
  SITE (533): n equals a,t,g, or c
  SITE (534): n equals a,t,g, or c
  SITE (535): n equals a,t,g, or c
  SITE (536): n equals a,t,g, or c
  SITE (537): n equals a,t,g, or c
  SITE (538): n equals a,t,g, or c
  SITE (539): n equals a,t,g, or c
  SITE (540): n equals a,t,g, or c
  SITE (541): n equals a,t,g, or c
  SITE (542): n equals a,t,g, or c
  SITE (543): n equals a,t,g, or c
  SITE (544): n equals a,t,g, or c
  SITE (545): n equals a,t,g, or c
  SITE (546): n equals a,t,g, or c
  SITE (547): n equals a,t,g, or c
  SITE (548): n equals a,t,g, or c
  SITE (549): n equals a,t,g, or c
  SITE (550): n equals a,t,g, or c
  SITE (551): n equals a,t,g, or c
  SITE (552): n equals a,t,g, or c
  SITE (553): n equals a,t,g, or c
  SITE (554): n equals a,t,g, or c
  SITE (555): n equals a,t,g, or c
  SITE (556): n equals a,t,g, or c
  SITE (557): n equals a,t,g, or c
  SITE (558): n equals a,t,g, or c
  SITE (559): n equals a,t,g, or c
  SITE (560): n equals a,t,g, or c
  SITE (561): n equals a,t,g, or c
  SITE (562): n equals a,t,g, or c
  SITE (563): n equals a,t,g, or c
  SITE (564): n equals a,t,g, or c
  SITE (565): n equals a,t,g, or c
  SITE (566): n equals a,t,g, or c
  SITE (567): n equals a,t,g, or c
  SITE (568): n equals a,t,g, or c
  SITE (569): n equals a,t,g, or c
  SITE (570): n equals a,t,g, or c
  SITE (571): n equals a,t,g, or c
  SITE (572): n equals a,t,g, or c
  SITE (573): n equals a,t,g, or c
  SITE (574): n equals a,t,g, or c
  SITE (575): n equals a,t,g, or c
  SITE (576): n equals a,t,g, or c
  SITE (577): n equals a,t,g, or c
  SITE (578): n equals a,t,g, or c
  SITE (579): n equals a,t,g, or c
  SITE (580): n equals a,t,g, or c
  SITE (581): n equals a,t,g, or c
  SITE (582): n equals a,t,g, or c
  SITE (583): n equals a,t,g, or c
  SITE (584): n equals a,t,g, or c
  SITE (585): n equals a,t,g, or c
  SITE (586): n equals a,t,g, or c
  SITE (587): n equals a,t,g, or c
  SITE (588): n equals a,t,g, or c
  SITE (589): n equals a,t,g, or c
  SITE (590): n equals a,t,g, or c
  SITE (591): n equals a,t,g, or c
  SITE (592): n equals a,t,g, or c
  SITE (593): n equals a,t,g, or c
  SITE (594): n equals a,t,g, or c
  SITE (595): n equals a,t,g, or c
  SITE (596): n equals a,t,g, or c
  SITE (597): n equals a,t,g, or c
  SITE (598): n equals a,t,g, or c
  SITE (599): n equals a,t,g, or c
  SITE (600): n equals a,t,g, or c
  SITE (601): n equals a,t,g, or c
  SITE (602): n equals a,t,g, or c
  SITE (603): n equals a,t,g, or c
  SITE (604): n equals a,t,g, or c
  SITE (605): n equals a,t,g, or c
  SITE (606): n equals a,t,g, or c
  SITE (607): n equals a,t,g, or c
  SITE (608): n equals a,t,g, or c
  SITE (609): n equals a,t,g, or c
  SITE (610): n equals a,t,g, or c
  SITE (611): n equals a,t,g, or c
  SITE (612): n equals a,t,g, or c
  SITE (613): n equals a,t,g, or c
  SITE (614): n equals a,t,g, or c
  SITE (615): n equals a,t,g, or c
  SITE (616): n equals a,t,g, or c
  SITE (617): n equals a,t,g, or c
  SITE (618): n equals a,t,g, or c
  SITE (619): n equals a,t,g, or c
  SITE (620): n equals a,t,g, or c
  SITE (621): n equals a,t,g, or c
  SITE (622): n equals a,t,g, or c
  SITE (623): n equals a,t,g, or c
  SITE (624): n equals a,t,g, or c
  SITE (625): n equals a,t,g, or c
  SITE (626): n equals a,t,g, or c
  SITE (627): n equals a,t,g, or c
  SITE (628): n equals a,t,g, or c
  SITE (629): n equals a,t,g, or c
  SITE (630): n equals a,t,g, or c
  SITE (631): n equals a,t,g, or c
  SITE (632): n equals a,t,g, or c
  SITE (633): n equals a,t,g, or c
  SITE (634): n equals a,t,g, or c
  SITE (635): n equals a,t,g, or c
  SITE (636): n equals a,t,g, or c
  SITE (637): n equals a,t,g, or c
  SITE (638): n equals a,t,g, or c
  SITE (639): n equals a,t,g, or c
  SITE (640): n equals a,t,g, or c
  SITE (641): n equals a,t,g, or c
  SITE (642): n equals a,t,g, or c
  SITE (643): n equals a,t,g, or c
  SITE (644): n equals a,t,g, or c
  SITE (645): n equals a,t,g, or c
  SITE (646): n equals a,t,g, or c
  SITE (647): n equals a,t,g, or c
  SITE (648): n equals a,t,g, or c
  SITE (649): n equals a,t,g, or c
  SITE (650): n equals a,t,g, or c
  SITE (651): n equals a,t,g, or c
  SITE (652): n equals a,t,g, or c
  SITE (653): n equals a,t,g, or c
  SITE (654): n equals a,t,g, or c
  SITE (655): n equals a,t,g, or c
  SITE (656): n equals a,t,g, or c
  SITE (657): n equals a,t,g, or c
  SITE (658): n equals a,t,g, or c
  SITE (659): n equals a,t,g, or c
  SITE (660): n equals a,t,g, or c
  SITE (661): n equals a,t,g, or c
  SITE (662): n equals a,t,g, or c
  SITE (663): n equals a,t,g, or c
  SITE (664): n equals a,t,g, or c
  SITE (665): n equals a,t,g, or c
  SITE (666): n equals a,t,g, or c
  SITE (667): n equals a,t,g, or c
  SITE (668): n equals a,t,g, or c
  SITE (669): n equals a,t,g, or c
  SITE (670): n equals a,t,g, or c
  SITE (671): n equals a,t,g, or c
  SITE (672): n equals a,t,g, or c
  SITE (673): n equals a,t,g, or c
  SITE (674): n equals a,t,g, or c
  SITE (675): n equals a,t,g, or c
  SITE (676): n equals a,t,g, or c
  SITE (677): n equals a,t,g, or c
  SITE (678): n equals a,t,g, or c
  SITE (679): n equals a,t,g, or c
  SITE (680): n equals a,t,g, or c
  SITE (681): n equals a,t,g, or c
  SITE (682): n equals a,t,g, or c
  SITE (683): n equals a,t,g, or c
  SITE (684): n equals a,t,g, or c
  SITE (685): n equals a,t,g, or c
  SITE (686): n equals a,t,g, or c
  SITE (687): n equals a,t,g, or c
  SITE (688): n equals a,t,g, or c
  SITE (689): n equals a,t,g, or c
  SITE (690): n equals a,t,g, or c
  SITE (691): n equals a,t,g, or c
  SITE (692): n equals a,t,g, or c
  SITE (693): n equals a,t,g, or c
  SITE (694): n equals a,t,g, or c
  SITE (695): n equals a,t,g, or c
  SITE (696): n equals a,t,g, or c
  SITE (697): n equals a,t,g, or c
  SITE (698): n equals a,t,g, or c
  SITE (699): n equals a,t,g, or c
  SITE (700): n equals a,t,g, or c
  SITE (701): n equals a,t,g, or c
  SITE (702): n equals a,t,g, or c
  SITE (703): n equals a,t,g, or c
  SITE (704): n equals a,t,g, or c
  SITE (705): n equals a,t,g, or c
  SITE (706): n equals a,t,g, or c
  SITE (707): n equals a,t,g, or c
  SITE (708): n equals a,t,g, or c
  SITE (709): n equals a,t,g, or c
  SITE (710): n equals a,t,g, or c
  SITE (711): n equals a,t,g, or c
  SITE (712): n equals a,t,g, or c
  SITE (713): n equals a,t,g, or c
  SITE (714): n equals a,t,g, or c
  SITE (715): n equals a,t,g, or c
  SITE (716): n equals a,t,g, or c
  SITE (717): n equals a,t,g, or c
  SITE (718): n equals a,t,g, or c
  SITE (719): n equals a,t,g, or c
  SITE (720): n equals a,t,g, or c
  SITE (721): n equals a,t,g, or c
  SITE (722): n equals a,t,g, or c
  SITE (723): n equals a,t,g, or c
  SITE (724): n equals a,t,g, or c
  SITE (725): n equals a,t,g, or c
  SITE (726): n equals a,t,g, or c
  SITE (727): n equals a,t,g, or c
  SITE (728): n equals a,t,g, or c
  SITE (729): n equals a,t,g, or c
  SITE (730): n equals a,t,g, or c
  SITE (731): n equals a,t,g, or c
  SITE (732): n equals a,t,g, or c
  SITE (733): n equals a,t,g, or c
  SITE (734): n equals a,t,g, or c
  SITE (735): n equals a,t,g, or c
  SITE (736): n equals a,t,g, or c
  SITE (737): n equals a,t,g, or c
  SITE (738): n equals a,t,g, or c
  SITE (739): n equals a,t,g, or c
  SITE (740): n equals a,t,g, or c
  SITE (741): n equals a,t,g, or c
  SITE (742): n equals a,t,g, or c
  SITE (743): n equals a,t,g, or c
  SITE (744): n equals a,t,g, or c
  SITE (745): n equals a,t,g, or c
  SITE (746): n equals a,t,g, or c
  SITE (747): n equals a,t,g, or c
  SITE (748): n equals a,t,g, or c
  SITE (749): n equals a,t,g, or c
  SITE (750): n equals a,t,g, or c
  SITE (751): n equals a,t,g, or c
  SITE (752): n equals a,t,g, or c
  SITE (753): n equals a,t,g, or c
  SITE (754): n equals a,t,g, or c
  SITE (755): n equals a,t,g, or c
  SITE (756): n equals a,t,g, or c
  SITE (757): n equals a,t,g, or c
  SITE (758): n equals a,t,g, or c
  SITE (759): n equals a,t,g, or c
  SITE (760): n equals a,t,g, or c
  SITE (761): n equals a,t,g, or c
  SITE (762): n equals a,t,g, or c
  SITE (763): n equals a,t,g, or c
  SITE (764): n equals a,t,g, or c
  SITE (765): n equals a,t,g, or c
  SITE (766): n equals a,t,g, or c
  SITE (767): n equals a,t,g, or c
  SITE (768): n equals a,t,g, or c
  SITE (769): n equals a,t,g, or c
  SITE (770): n equals a,t,g, or c
  SITE (771): n equals a,t,g, or c
  SITE (772): n equals a,t,g, or c
  SITE (773): n equals a,t,g, or c
  SITE (774): n equals a,t,g, or c
  SITE (775): n equals a,t,g, or c
  SITE (776): n equals a,t,g, or c
  SITE (777): n equals a,t,g, or c
  SITE (778): n equals a,t,g, or c
  SITE (779): n equals a,t,g, or c
  SITE (780): n equals a,t,g, or c
  SITE (781): n equals a,t,g, or c
  SITE (782): n equals a,t,g, or c
  SITE (783): n equals a,t,g, or c
  SITE (784): n equals a,t,g, or c
  SITE (785): n equals a,t,g, or c
  SITE (786): n equals a,t,g, or c
  SITE (787): n equals a,t,g, or c
  SITE (788): n equals a,t,g, or c
  SITE (789): n equals a,t,g, or c
  SITE (790): n equals a,t,g, or c
  SITE (791): n equals a,t,g, or c
  SITE (792): n equals a,t,g, or c
  SITE (793): n equals a,t,g, or c
  SITE (794): n equals a,t,g, or c
  SITE (795): n equals a,t,g, or c
  SITE (796): n equals a,t,g, or c
  SITE (797): n equals a,t,g, or c
  SITE (798): n equals a,t,g, or c
  SITE (799): n equals a,t,g, or c
  SITE (800): n equals a,t,g, or c
  SITE (801): n equals a,t,g, or c
  SITE (802): n equals a,t,g, or c
  SITE (803): n equals a,t,g, or c
  SITE (804): n equals a,t,g, or c
  SITE (805): n equals a,t,g, or c
  SITE (806): n equals a,t,g, or c
  SITE (807): n equals a,t,g, or c
  SITE (808): n equals a,t,g, or c
  SITE (809): n equals a,t,g, or c
  SITE (810): n equals a,t,g, or c
  SITE (811): n equals a,t,g, or c
  SITE (812): n equals a,t,g, or c
  SITE (813): n equals a,t,g, or c
  SITE (814): n equals a,t,g, or c
  SITE (815): n equals a,t,g, or c
  SITE (816): n equals a,t,g, or c
  SITE (817): n equals a,t,g, or c
  SITE (818): n equals a,t,g, or c
  SITE (819): n equals a,t,g, or c
  SITE (820): n equals a,t,g, or c
  SITE (821): n equals a,t,g, or c
  SITE (822): n equals a,t,g, or c
  SITE (823): n equals a,t,g, or c
  SITE (824): n equals a,t,g, or c
  SITE (825): n equals a,t,g, or c
  SITE (826): n equals a,t,g, or c
  SITE (827): n equals a,t,g, or c
  SITE (828): n equals a,t,g, or c
  SITE (829): n equals a,t,g, or c
  SITE (830): n equals a,t,g, or c
  SITE (831): n equals a,t,g, or c
  SITE (832): n equals a,t,g, or c
  SITE (833): n equals a,t,g, or c
  SITE (834): n equals a,t,g, or c
  SITE (835): n equals a,t,g, or c
  SITE (836): n equals a,t,g, or c
  SITE (837): n equals a,t,g, or c
  SITE (838): n equals a,t,g, or c
  SITE (839): n equals a,t,g, or c
  SITE (840): n equals a,t,g, or c
  SITE (841): n equals a,t,g, or c
  SITE (842): n equals a,t,g, or c
  SITE (843): n equals a,t,g, or c
  SITE (844): n equals a,t,g, or c
  SITE (845): n equals a,t,g, or c
  SITE (846): n equals a,t,g, or c
  SITE (847): n equals a,t,g, or c
  SITE (848): n equals a,t,g, or c
  SITE (849): n equals a,t,g, or c
  SITE (850): n equals a,t,g, or c
  SITE (851): n equals a,t,g, or c
  SITE (852): n equals a,t,g, or c
  SITE (853): n equals a,t,g, or c
  SITE (854): n equals a,t,g, or c
  SITE (855): n equals a,t,g, or c
  SITE (856): n equals a,t,g, or c
  SITE (857): n equals a,t,g, or c
  SITE (858): n equals a,t,g, or c
  SITE (859): n equals a,t,g, or c
  SITE (860): n equals a,t,g, or c
  SITE (861): n equals a,t,g, or c
  SITE (862): n equals a,t,g, or c
  SITE (863): n equals a,t,g, or c
  SITE (864): n equals a,t,g, or c
  SITE (865): n equals a,t,g, or c
  SITE (866): n equals a,t,g, or c
  SITE (867): n equals a,t,g, or c
  SITE (868): n equals a,t,g, or c
  SITE (869): n equals a,t,g, or c
  SITE (870): n equals a,t,g, or c
  SITE (871): n equals a,t,g, or c
  SITE (872): n equals a,t,g, or c
  SITE (873): n equals a,t,g, or c
  SITE (874): n equals a,t,g, or c
  SITE (875): n equals a,t,g, or c
  SITE (876): n equals a,t,g, or c
  SITE (877): n equals a,t,g, or c
  SITE (878): n equals a,t,g, or c
  SITE (879): n equals a,t,g, or c
  SITE (880): n equals a,t,g, or c
  SITE (881): n equals a,t,g, or c
  SITE (882): n equals a,t,g, or c
  SITE (883): n equals a,t,g, or c
  SITE (884): n equals a,t,g, or c
  SITE (885): n equals a,t,g, or c
  SITE (886): n equals a,t,g, or c
  SITE (887): n equals a,t,g, or c
  SITE (888): n equals a,t,g, or c
  SITE (889): n equals a,t,g, or c
  SITE (890): n equals a,t,g, or c
  SITE (891): n equals a,t,g, or c
  SITE (892): n equals a,t,g, or c
  SITE (893): n equals a,t,g, or c
  SITE (894): n equals a,t,g, or c
  SITE (895): n equals a,t,g, or c
  SITE (896): n equals a,t,g, or c
  SITE (897): n equals a,t,g, or c
  SITE (898): n equals a,t,g, or c
  SITE (899): n equals a,t,g, or c
  SITE (900): n equals a,t,g, or c
  SITE (901): n equals a,t,g, or c
  SITE (902): n equals a,t,g, or c
  SITE (903): n equals a,t,g, or c
  SITE (904): n equals a,t,g, or c
  SITE (905): n equals a,t,g, or c
  SITE (906): n equals a,t,g, or c
  SITE (907): n equals a,t,g, or c
  SITE (908): n equals a,t,g, or c
  SITE (909): n equals a,t,g, or c
  SITE (910): n equals a,t,g, or c
  SITE (911): n equals a,t,g, or c
  SITE (912): n equals a,t,g, or c
  SITE (913): n equals a,t,g, or c
  SITE (914): n equals a,t,g, or c
  SITE (915): n equals a,t,g, or c
  SITE (916): n equals a,t,g, or c
  SITE (917): n equals a,t,g, or c
  SITE (918): n equals a,t,g, or c
  SITE (919): n equals a,t,g, or c
  SITE (920): n equals a,t,g, or c
  SITE (921): n equals a,t,g, or c
  SITE (922): n equals a,t,g, or c
  SITE (923): n equals a,t,g, or c
  SITE (924): n equals a,t,g, or c
  SITE (925): n equals a,t,g, or c
  SITE (926): n equals a,t,g, or c
  SITE (927): n equals a,t,g, or c
  SITE (928): n equals a,t,g, or c
  SITE (929): n equals a,t,g, or c
  SITE (930): n equals a,t,g, or c
  SITE (931): n equals a,t,g, or c
  SITE (932): n equals a,t,g, or c
  SITE (933): n equals a,t,g, or c
  SITE (934): n equals a,t,g, or c
  SITE (935): n equals a,t,g, or c
  SITE (936): n equals a,t,g, or c
  SITE (937): n equals a,t,g, or c
  SITE (938): n equals a,t,g, or c
  SITE (939): n equals a,t,g, or c
  SITE (940): n equals a,t,g, or c
  SITE (941): n equals a,t,g, or c
  SITE (942): n equals a,t,g, or c
  SITE (943): n equals a,t,g, or c
  SITE (944): n equals a,t,g, or c
  SITE (945): n equals a,t,g, or c
  SITE (946): n equals a,t,g, or c
  SITE (947): n equals a,t,g, or c
  SITE (948): n equals a,t,g, or c
  SITE (949): n equals a,t,g, or c
  SITE (950): n equals a,t,g, or c
  SITE (951): n equals a,t,g, or c
  SITE (952): n equals a,t,g, or c
  SITE (953): n equals a,t,g, or c
  SITE (954): n equals a,t,g, or c
  SITE (955): n equals a,t,g, or c
  SITE (956): n equals a,t,g, or c
  SITE (957): n equals a,t,g, or c
  SITE (958): n equals a,t,g, or c
  SITE (959): n equals a,t,g, or c
  SITE (960): n equals a,t,g, or c
  SITE (961): n equals a,t,g, or c
  SITE (962): n equals a,t,g, or c
  SITE (963): n equals a,t,g, or c
  SITE (964): n equals a,t,g, or c
  SITE (965): n equals a,t,g, or c
  SITE (966): n equals a,t,g, or c
  SITE (967): n equals a,t,g, or c
  SITE (968): n equals a,t,g, or c
  SITE (969): n equals a,t,g, or c
  SITE (970): n equals a,t,g, or c
  SITE (971): n equals a,t,g, or c
  SITE (972): n equals a,t,g, or c
  SITE (973): n equals a,t,g, or c
  SITE (974): n equals a,t,g, or c
  SITE (975): n equals a,t,g, or c
  SITE (976): n equals a,t,g, or c
  SITE (977): n equals a,t,g, or c
  SITE (978): n equals a,t,g, or c
  SITE (979): n equals a,t,g, or c
  SITE (980): n equals a,t,g, or c
  SITE (981): n equals a,t,g, or c
  SITE (982): n equals a,t,g, or c
  SITE (983): n equals a,t,g, or c
  SITE (984): n equals a,t,g, or c
  SITE (985): n equals a,t,g, or c
  SITE (986): n equals a,t,g, or c
  SITE (987): n equals a,t,g, or c
  SITE (988): n equals a,t,g, or c
  SITE (989): n equals a,t,g, or c
  SITE (990): n equals a,t,g, or c
  SITE (991): n equals a,t,g, or c
  SITE (992): n equals a,t,g, or c
  SITE (993): n equals a,t,g, or c
  SITE (994): n equals a,t,g, or c
  SITE (995): n equals a,t,g, or c
  SITE (996): n equals a,t,g, or c
  SITE (997): n equals a,t,g, or c
  SITE (998): n equals a,t,g, or c
  SITE (999): n equals a,t,g, or c
  SITE (1000): n equals a,t,g, or c
  SITE (1001): n equals a,t,g, or c
  SITE (1002): n equals a,t,g, or c
  SITE (1003): n equals a,t,g, or c
  SITE (1004): n equals a,t,g, or c
  SITE (1005): n equals a,t,g, or c
  SITE (1006): n equals a,t,g, or c
  SITE (1007): n equals a,t,g, or c
  SITE (1008): n equals a,t,g, or c
  SITE (1009): n equals a,t,g, or c
  SITE (1010): n equals a,t,g, or c
  SITE (1011): n equals a,t,g, or c
  SITE (1012): n equals a,t,g, or c
  SITE (1013): n equals a,t,g, or c
  SITE (1014): n equals a,t,g, or c
  SITE (1015): n equals a,t,g, or c
  SITE (1016): n equals a,t,g, or c
  SITE (1017): n equals a,t,g, or c
  SITE (1018): n equals a,t,g, or c
  SITE (1019): n equals a,t,g, or c
  SITE (1020): n equals a,t,g, or c
  SITE (1021): n equals a,t,g, or c
  SITE (1022): n equals a,t,g, or c
  SITE (1023): n equals a,t,g, or c
  SITE (1024): n equals a,t,g, or c
  SITE (1025): n equals a,t,g, or c
  SITE (1026): n equals a,t,g, or c
  SITE (1027): n equals a,t,g, or c
  SITE (1028): n equals a,t,g, or c
  SITE (1029): n equals a,t,g, or c
  SITE (1030): n equals a,t,g, or c
  SITE (1031): n equals a,t,g, or c
  SITE (1032): n equals a,t,g, or c
  SITE (1033): n equals a,t,g, or c
  SITE (1034): n equals a,t,g, or c
  SITE (1035): n equals a,t,g, or c
  SITE (1036): n equals a,t,g, or c
  SITE (1037): n equals a,t,g, or c
  SITE (1038): n equals a,t,g, or c
  SITE (1039): n equals a,t,g, or c
  SITE (1040): n equals a,t,g, or c
  SITE (1041): n equals a,t,g, or c
  SITE (1042): n equals a,t,g, or c
  SITE (1043): n equals a,t,g, or c
  SITE (1044): n equals a,t,g, or c
  SITE (1045): n equals a,t,g, or c
  SITE (1046): n equals a,t,g, or c
  SITE (1047): n equals a,t,g, or c
  SITE (1048): n equals a,t,g, or c
  SITE (1049): n equals a,t,g, or c
  SITE (1050): n equals a,t,g, or c
  SITE (1051): n equals a,t,g, or c
  SITE (1052): n equals a,t,g, or c
  SITE (1053): n equals a,t,g, or c
  SITE (1054): n equals a,t,g, or c
  SITE (1055): n equals a,t,g, or c
  SITE (1056): n equals a,t,g, or c
  SITE (1057): n equals a,t,g, or c
  SITE (1058): n equals a,t,g, or c
  SITE (1059): n equals a,t,g, or c
  SITE (1060): n equals a,t,g, or c
  SITE (1061): n equals a,t,g, or c
  SITE (1062): n equals a,t,g, or c
  SITE (1063): n equals a,t,g, or c
  SITE (1064): n equals a,t,g, or c
  SITE (1065): n equals a,t,g, or c
  SITE (1066): n equals a,t,g, or c
  SITE (1067): n equals a,t,g, or c
  SITE (1068): n equals a,t,g, or c
  SITE (1069): n equals a,t,g, or c
  SITE (1070): n equals a,t,g, or c
  SITE (1071): n equals a,t,g, or c
  SITE (1072): n equals a,t,g, or c
  SITE (1073): n equals a,t,g, or c
  SITE (1074): n equals a,t,g, or c
  SITE (1075): n equals a,t,g, or c
  SITE (1076): n equals a,t,g, or c
  SITE (1077): n equals a,t,g, or c
  SITE (1078): n equals a,t,g, or c
  SITE (1079): n equals a,t,g, or c
  SITE (1080): n equals a,t,g, or c
  SITE (1081): n equals a,t,g, or c
  SITE (1082): n equals a,t,g, or c
  SITE (1083): n equals a,t,g, or c
  SITE (1084): n equals a,t,g, or c
  SITE (1085): n equals a,t,g, or c
  SITE (1086): n equals a,t,g, or c
  SITE (1087): n equals a,t,g, or c
  SITE (1088): n equals a,t,g, or c
  SITE (1089): n equals a,t,g, or c
  SITE (1090): n equals a,t,g, or c
  SITE (1091): n equals a,t,g, or c
  SITE (1092): n equals a,t,g, or c
  SITE (1093): n equals a,t,g, or c
  SITE (1094): n equals a,t,g, or c
  SITE (1095): n equals a,t,g, or c
  SITE (1096): n equals a,t,g, or c
  SITE (1097): n equals a,t,g, or c
  SITE (1098): n equals a,t,g, or c
  SITE (1099): n equals a,t,g, or c
  SITE (1100): n equals a,t,g, or c
  SITE (1101): n equals a,t,g, or c
  SITE (1102): n equals a,t,g, or c
  SITE (1103): n equals a,t,g, or c
  SITE (1104): n equals a,t,g, or c
  SITE (1105): n equals a,t,g, or c
  SITE (1106): n equals a,t,g, or c
  SITE (1107): n equals a,t,g, or c
  SITE (1108): n equals a,t,g, or c
  SITE (1109): n equals a,t,g, or c
  SITE (1110): n equals a,t,g, or c
  SITE (1111): n equals a,t,g, or c
  SITE (1112): n equals a,t,g, or c
  SITE (1113): n equals a,t,g, or c
  SITE (1114): n equals a,t,g, or c
  SITE (1115): n equals a,t,g, or c
  SITE (1116): n equals a,t,g, or c
  SITE (1117): n equals a,t,g, or c
  SITE (1118): n equals a,t,g, or c
  SITE (1119): n equals a,t,g, or c
  SITE (1120): n equals a,t,g, or c
  SITE (1121): n equals a,t,g, or c
  SITE (1122): n equals a,t,g, or c
  SITE (1123): n equals a,t,g, or c
  SITE (1124): n equals a,t,g, or c
  SITE (1125): n equals a,t,g, or c
  SITE (1126): n equals a,t,g, or c
  SITE (1127): n equals a,t,g, or c
  SITE (1128): n equals a,t,g, or c
  SITE (1129): n equals a,t,g, or c
  SITE (1130): n equals a,t,g, or c
  SITE (1131): n equals a,t,g, or c
  SITE (1132): n equals a,t,g, or c
  SITE (1133): n equals a,t,g, or c
  SITE (1134): n equals a,t,g, or c
  SITE (1135): n equals a,t,g, or c
  SITE (1136): n equals a,t,g, or c
  SITE (1137): n equals a,t,g, or c
  SITE (1138): n equals a,t,g, or c
  SITE (1139): n equals a,t,g, or c
  SITE (1140): n equals a,t,g, or c
  SITE (1141): n equals a,t,g, or c
  SITE (1142): n equals a,t,g, or c
  SITE (1143): n equals a,t,g, or c
  SITE (1144): n equals a,t,g, or c
  SITE (1145): n equals a,t,g, or c
  SITE (1146): n equals a,t,g, or c
  SITE (1147): n equals a,t,g, or c
  SITE (1148): n equals a,t,g, or c
  SITE (1149): n equals a,t,g, or c
  SITE (1150): n equals a,t,g, or c
  SITE (1151): n equals a,t,g, or c
  SITE (1152): n equals a,t,g, or c
  SITE (1153): n equals a,t,g, or c
  SITE (1154): n equals a,t,g, or c
  SITE (1155): n equals a,t,g, or c
  SITE (1156): n equals a,t,g, or c
  SITE (1157): n equals a,t,g, or c
  SITE (1158): n equals a,t,g, or c
  SITE (1159): n equals a,t,g, or c
  SITE (1160): n equals a,t,g, or c
  SITE (1161): n equals a,t,g, or c
  SITE (1162): n equals a,t,g, or c
  SITE (1163): n equals a,t,g, or c
  SITE (1164): n equals a,t,g, or c
  SITE (1165): n equals a,t,g, or c
  SITE (1166): n equals a,t,g, or c
  SITE (1167): n equals a,t,g, or c
  SITE (1168): n equals a,t,g, or c
  SITE (1169): n equals a,t,g, or c
  SITE (1170): n equals a,t,g, or c
  SITE (1171): n equals a,t,g, or c
  SITE (1172): n equals a,t,g, or c
  SITE (1173): n equals a,t,g, or c
  SITE (1174): n equals a,t,g, or c
  SITE (1175): n equals a,t,g, or c
  SITE (1176): n equals a,t,g, or c
  SITE (1177): n equals a,t,g, or c
  SITE (1178): n equals a,t,g, or c
  SITE (1179): n equals a,t,g, or c
  SITE (1180): n equals a,t,g, or c
  SITE (1181): n equals a,t,g, or c
  SITE (1182): n equals a,t,g, or c
  SITE (1183): n equals a,t,g, or c
  SITE (1184): n equals a,t,g, or c
  SITE (1185): n equals a,t,g, or c
  SITE (1186): n equals a,t,g, or c
  SITE (1187): n equals a,t,g, or c
  SITE (1188): n equals a,t,g, or c
  SITE (1189): n equals a,t,g, or c
  SITE (1190): n equals a,t,g, or c
  SITE (1191): n equals a,t,g, or c
  SITE (1192): n equals a,t,g, or c
  SITE (1193): n equals a,t,g, or c
  SITE (1194): n equals a,t,g, or c
  SITE (1195): n equals a,t,g, or c
  SITE (1196): n equals a,t,g, or c
  SITE (1197): n equals a,t,g, or c
  SITE (1198): n equals a,t,g, or c
  SITE (1199): n equals a,t,g, or c
  SITE (1200): n equals a,t,g, or c
  SITE (1201): n equals a,t,g, or c
  SITE (1202): n equals a,t,g, or c
  SITE (1203): n equals a,t,g, or c
  SITE (1204): n equals a,t,g, or c
  SITE (1205): n equals a,t,g, or c
  SITE (1206): n equals a,t,g, or c
  SITE (1207): n equals a,t,g, or c
  SITE (1208): n equals a,t,g, or c
  SITE (1209): n equals a,t,g, or c
  SITE (1210): n equals a,t,g, or c
  SITE (1211): n equals a,t,g, or c
  SITE (1212): n equals a,t,g, or c
  SITE (1213): n equals a,t,g, or c
  SITE (1214): n equals a,t,g, or c
  SITE (1215): n equals a,t,g, or c
  SITE (1216): n equals a,t,g, or c
  SITE (1217): n equals a,t,g, or c
  SITE (1218): n equals a,t,g, or c
  SITE (1219): n equals a,t,g, or c
  SITE (1220): n equals a,t,g, or c
  SITE (1221): n equals a,t,g, or c
  SITE (1222): n equals a,t,g, or c
  SITE (1223): n equals a,t,g, or c
  SITE (1224): n equals a,t,g, or c
  SITE (1225): n equals a,t,g, or c
  SITE (1226): n equals a,t,g, or c
  SITE (1227): n equals a,t,g, or c
  SITE (1228): n equals a,t,g, or c
  SITE (1229): n equals a,t,g, or c
  SITE (1230): n equals a,t,g, or c
  SITE (1231): n equals a,t,g, or c
  SITE (1232): n equals a,t,g, or c
  SITE (1233): n equals a,t,g, or c
  SITE (1234): n equals a,t,g, or c
  SITE (1235): n equals a,t,g, or c
  SITE (1236): n equals a,t,g, or c
  SITE (1237): n equals a,t,g, or c
  SITE (1238): n equals a,t,g, or c
  SITE (1239): n equals a,t,g, or c
  SITE (1240): n equals a,t,g, or c
  SITE (1241): n equals a,t,g, or c
ccttgttttttttttttttttttgagatagagtctcgctctgtcacccaggctggagtgctagtggcatgatctcgggctcactgcaatttccgtctcctggattcaagcaattctcctgcctcttccccagtagctggaattacaggcacatgccaccatgcccaactaatttttgtatttttagtagagacaggtttcaccatgttggccaggatggtgttgaacttctgtactcaggtnnnnnnnnnnnnnnnnnnnnnnnnnnnnnnnnnnnnnnnnnnnnnnnnnnnnnnnnnnnnnnnnnnnnnnnnnnnnnnnnnnnnnnnnnnnnnnnnnnnnnnnnnnnnnnnnnnnnnnnnnnnnnnnnnnnnnnnnnnnnnnnnnnnnnnnnnnnnnnnnnnnnnnnnnnnnnnnnnnnnnnnnnnnnnnnnnnnnnnnnnnnnnnnnnnnnnnnnnnnnnnnnnnnnnnnnnnnnnnnnnnnnnnnnnnnnnnnnnnnnnnnnnnnnnnnnnnnnnnnnnnnnnnnnnnnnnnnnnnnnnnnnnnnnnnnnnnnnnnnnnnnnnnnnnnnnnnnnnnnnnnnnnnnnnnnnnnnnnnnnnnnnnnnnnnnnnnnnnnnnnnnnnnnnnnnnnnnnnnnnnnnnnnnnnnnnnnnnnnnnnnnnnnnnnnnnnnnnnnnnnnnnnnnnnnnnnnnnnnnnnnnnnnnnnnnnnnnnnnnnnnnnnnnnnnnnnnnnnnnnnnnnnnnnnnnnnnnnnnnnnnnnnnnnnnnnnnnnnnnnnnnnnnnnnnnnnnnnnnnnnnnnnnnnnnnnnnnnnnnnnnnnnnnnnnnnnnnnnnnnnnnnnnnnnnnnnnnnnnnnnnnnnnnnnnnnnnnnnnnnnnnnnnnnnnnnnnnnnnnnnnnnnnnnnnnnnnnnnnnnnnnnnnnnnnnnnnnnnnnnnnnnnnnnnnnnnnnnnnnnnnnnnnnnnnnnnnnnnnnnnnnnnnnnnnnnnnnnnnnnnnnnnnnnnnnnnnnnnnnnnnnnnnnnnnnnnnnnnnnnnnnnnnnnnnnnnnnnnnnnnnnnnnnnnnnnnnnnnnnnnnnnnnnnnnnnnnnnnnnnnnnnnnnnnnnnnnnnnnnnnnnnnnnnnnnnnnnnnnnnnnnnnnnnnnnnnnnnnnnnnnnnnnnnnnnnnnnnnnnnnnnnnnnnnnnnnnnnnnnnnnnnnnnnnnnnnnnnnnnnnnnnnnnnnnnnnnnnnnnnccccttttttttttttttttttaaattggtgtgaacccagtatctacctcataagactgttgggaggcttaaataaatgtatagttattagagaaaaatgatattatcatatcaataaatgtagaagcatttgataaaattcaacatccattcatgattttaaaaaagaaaactctcggcaaactagaactagaaggaaactttcttaacttgataaaagacatctacaaaaaaccacccaaaactaggccaggcacagtggctcacacctgtaattccagcactttgggaggccgaggcgggcagatcacttgaggtcaggagttcaagaccagactggcaaacatggtgaaaccctgtctctactaaaaatacaaaaattagctgggtgtggtggtgtacactgtagtcccagatactcgggaggctgaggcaggaggattgcttgaacctgagaagtggaggttgtagtcagtcaaaattgtgccactgcactccagcctgggtaacagagcaagactctgtctcaagcaaaccaaaaaaataataataataacacccaaaactacagcgaatcttatccttcctggtgggagtgggaagtggaatgtttttctcctaagatcaggaacaaggaagggatgtctgcgtgctgtcaccatgcctattcagtgctgtactggaggccctagccaatgcaataaagcacggaaaagaaataaaaggcacacaaattagaaaggaaggaataaagtgctcagagtagtgcctggcatgtagcaaatctattagcaatcacatacatttctaggcattgaccctaagctcagagaggacagggaggggcatacctgcatagatcctgacaatttggaatgaatggcttccactgctccttgaattaaacctcagattcttttttttttttttttcgagatggagtctcactctgtcacccaggctggaatgcagtggcgcgatctcagctccctgca

SEQ ID NO: 6384 - DNA, 5088 bp, Homo sapiens; identical to SEQ ID NO: 5623
  SITE (5): n equals a,t,g, or c
  SITE (6): n equals a,t,g, or c
  SITE (7): n equals a,t,g, or c
  SITE (8): n equals a,t,g, or c
  SITE (9): n equals a,t,g, or c
  SITE (10): n equals a,t,g, or c
  SITE (11): n equals a,t,g, or c
  SITE (12): n equals a,t,g, or c
  SITE (13): n equals a,t,g, or c
  SITE (14): n equals a,t,g, or c
  SITE (15): n equals a,t,g, or c
  SITE (16): n equals a,t,g, or c
  SITE (17): n equals a,t,g, or c
  SITE (18): n equals a,t,g, or c
  SITE (19): n equals a,t,g, or c
  SITE (20): n equals a,t,g, or c
  SITE (21): n equals a,t,g, or c
  SITE (22): n equals a,t,g, or c
  SITE (23): n equals a,t,g, or c
  SITE (24): n equals a,t,g, or c
  SITE (25): n equals a,t,g, or c
  SITE (26): n equals a,t,g, or c
  SITE (27): n equals a,t,g, or c
  SITE (28): n equals a,t,g, or c
  SITE (29): n equals a,t,g, or c
  SITE (30): n equals a,t,g, or c
  SITE (31): n equals a,t,g, or c
  SITE (32): n equals a,t,g, or c
  SITE (33): n equals a,t,g, or c
  SITE (34): n equals a,t,g, or c
  SITE (35): n equals a,t,g, or c
  SITE (36): n equals a,t,g, or c
  SITE (37): n equals a,t,g, or c
  SITE (38): n equals a,t,g, or c
  SITE (39): n equals a,t,g, or c
  SITE (40): n equals a,t,g, or c
  SITE (41): n equals a,t,g, or c
  SITE (42): n equals a,t,g, or c
  SITE (43): n equals a,t,g, or c
  SITE (44): n equals a,t,g, or c
  SITE (45): n equals a,t,g, or c
  SITE (46): n equals a,t,g, or c
  SITE (47): n equals a,t,g, or c
  SITE (48): n equals a,t,g, or c
  SITE (49): n equals a,t,g, or c
  SITE (50): n equals a,t,g, or c
  SITE (51): n equals a,t,g, or c
  SITE (52): n equals a,t,g, or c
  SITE (53): n equals a,t,g, or c
  SITE (54): n equals a,t,g, or c
  SITE (55): n equals a,t,g, or c
  SITE (56): n equals a,t,g, or c
  SITE (57): n equals a,t,g, or c
  SITE (58): n equals a,t,g, or c
  SITE (59): n equals a,t,g, or c
  SITE (60): n equals a,t,g, or c
  SITE (61): n equals a,t,g, or c
  SITE (62): n equals a,t,g, or c
  SITE (63): n equals a,t,g, or c
  SITE (64): n equals a,t,g, or c
  SITE (65): n equals a,t,g, or c
  SITE (66): n equals a,t,g, or c
  SITE (67): n equals a,t,g, or c
  SITE (68): n equals a,t,g, or c
  SITE (69): n equals a,t,g, or c
  SITE (70): n equals a,t,g, or c
  SITE (71): n equals a,t,g, or c
  SITE (72): n equals a,t,g, or c
  SITE (73): n equals a,t,g, or c
  SITE (74): n equals a,t,g, or c
  SITE (75): n equals a,t,g, or c
  SITE (76): n equals a,t,g, or c
  SITE (77): n equals a,t,g, or c
  SITE (78): n equals a,t,g, or c
  SITE (79): n equals a,t,g, or c
  SITE (80): n equals a,t,g, or c
  SITE (81): n equals a,t,g, or c
  SITE (82): n equals a,t,g, or c
  SITE (83): n equals a,t,g, or c
  SITE (84): n equals a,t,g, or c
  SITE (85): n equals a,t,g, or c
  SITE (86): n equals a,t,g, or c
  SITE (87): n equals a,t,g, or c
  SITE (88): n equals a,t,g, or c
  SITE (89): n equals a,t,g, or c
  SITE (90): n equals a,t,g, or c
  SITE (91): n equals a,t,g, or c
  SITE (92): n equals a,t,g, or c
  SITE (93): n equals a,t,g, or c
  SITE (94): n equals a,t,g, or c
  SITE (95): n equals a,t,g, or c
  SITE (96): n equals a,t,g, or c
  SITE (97): n equals a,t,g, or c
  SITE (98): n equals a,t,g, or c
  SITE (99): n equals a,t,g, or c
  SITE (100): n equals a,t,g, or c
  SITE (101): n equals a,t,g, or c
  SITE (102): n equals a,t,g, or c
  SITE (103): n equals a,t,g, or c
  SITE (104): n equals a,t,g, or c
  SITE (105): n equals a,t,g, or c
  SITE (106): n equals a,t,g, or c
  SITE (107): n equals a,t,g, or c
  SITE (108): n equals a,t,g, or c
  SITE (109): n equals a,t,g, or c
  SITE (110): n equals a,t,g, or c
  SITE (111): n equals a,t,g, or c
  SITE (112): n equals a,t,g, or c
  SITE (113): n equals a,t,g, or c
  SITE (114): n equals a,t,g, or c
  SITE (115): n equals a,t,g, or c
  SITE (116): n equals a,t,g, or c
  SITE (117): n equals a,t,g, or c
  SITE (118): n equals a,t,g, or c
  SITE (119): n equals a,t,g, or c
  SITE (120): n equals a,t,g, or c
  SITE (121): n equals a,t,g, or c
  SITE (122): n equals a,t,g, or c
  SITE (123): n equals a,t,g, or c
  SITE (124): n equals a,t,g, or c
  SITE (125): n equals a,t,g, or c
  SITE (126): n equals a,t,g, or c
  SITE (127): n equals a,t,g, or c
  SITE (128): n equals a,t,g, or c
  SITE (129): n equals a,t,g, or c
  SITE (130): n equals a,t,g, or c
  SITE (131): n equals a,t,g, or c
  SITE (132): n equals a,t,g, or c
  SITE (133): n equals a,t,g, or c
  SITE (134): n equals a,t,g, or c
  SITE (135): n equals a,t,g, or c
  SITE (136): n equals a,t,g, or c
  SITE (137): n equals a,t,g, or c
  SITE (138): n equals a,t,g, or c
  SITE (139): n equals a,t,g, or c
  SITE (140): n equals a,t,g, or c
  SITE (141): n equals a,t,g, or c
  SITE (142): n equals a,t,g, or c
  SITE (143): n equals a,t,g, or c
  SITE (144): n equals a,t,g, or c
  SITE (145): n equals a,t,g, or c
  SITE (146): n equals a,t,g, or c
  SITE (147): n equals a,t,g, or c
  SITE (148): n equals a,t,g, or c
  SITE (149): n equals a,t,g, or c
  SITE (150): n equals a,t,g, or c
  SITE (151): n equals a,t,g, or c
  SITE (152): n equals a,t,g, or c
  SITE (153): n equals a,t,g, or c
  SITE (154): n equals a,t,g, or c
  SITE (155): n equals a,t,g, or c
  SITE (156): n equals a,t,g, or c
  SITE (157): n equals a,t,g, or c
  SITE (158): n equals a,t,g, or c
  SITE (159): n equals a,t,g, or c
  SITE (160): n equals a,t,g, or c
  SITE (161): n equals a,t,g, or c
  SITE (162): n equals a,t,g, or c
  SITE (163): n equals a,t,g, or c
  SITE (164): n equals a,t,g, or c
  SITE (165): n equals a,t,g, or c
  SITE (166): n equals a,t,g, or c
  SITE (167): n equals a,t,g, or c
  SITE (168): n equals a,t,g, or c
  SITE (169): n equals a,t,g, or c
  SITE (170): n equals a,t,g, or c
  SITE (171): n equals a,t,g, or c
  SITE (172): n equals a,t,g, or c
  SITE (173): n equals a,t,g, or c
  SITE (174): n equals a,t,g, or c
  SITE (175): n equals a,t,g, or c
  SITE (176): n equals a,t,g, or c
  SITE (177): n equals a,t,g, or c
  SITE (178): n equals a,t,g, or c
  SITE (179): n equals a,t,g, or c
  SITE (180): n equals a,t,g, or c
  SITE (181): n equals a,t,g, or c
  SITE (182): n equals a,t,g, or c
  SITE (183): n equals a,t,g, or c
  SITE (184): n equals a,t,g, or c
  SITE (185): n equals a,t,g, or c
  SITE (186): n equals a,t,g, or c
  SITE (187): n equals a,t,g, or c
  SITE (188): n equals a,t,g, or c
  SITE (189): n equals a,t,g, or c
  SITE (190): n equals a,t,g, or c
  SITE (191): n equals a,t,g, or c
  SITE (192): n equals a,t,g, or c
  SITE (193): n equals a,t,g, or c
  SITE (194): n equals a,t,g, or c
  SITE (195): n equals a,t,g, or c
  SITE (196): n equals a,t,g, or c
  SITE (197): n equals a,t,g, or c
  SITE (198): n equals a,t,g, or c
  SITE (199): n equals a,t,g, or c
  SITE (200): n equals a,t,g, or c
  SITE (201): n equals a,t,g, or c
  SITE (202): n equals a,t,g, or c
  SITE (203): n equals a,t,g, or c
  SITE (204): n equals a,t,g, or c
  SITE (205): n equals a,t,g, or c
  SITE (206): n equals a,t,g, or c
  SITE (207): n equals a,t,g, or c
  SITE (208): n equals a,t,g, or c
  SITE (209): n equals a,t,g, or c
  SITE (210): n equals a,t,g, or c
  SITE (211): n equals a,t,g, or c
  SITE (212): n equals a,t,g, or c
  SITE (213): n equals a,t,g, or c
  SITE (214): n equals a,t,g, or c
  SITE (215): n equals a,t,g, or c
  SITE (216): n equals a,t,g, or c
  SITE (217): n equals a,t,g, or c
  SITE (218): n equals a,t,g, or c
  SITE (219): n equals a,t,g, or c
  SITE (220): n equals a,t,g, or c
  SITE (221): n equals a,t,g, or c
  SITE (222): n equals a,t,g, or c
  SITE (223): n equals a,t,g, or c
  SITE (224): n equals a,t,g, or c
  SITE (225): n equals a,t,g, or c
  SITE (226): n equals a,t,g, or c
  SITE (227): n equals a,t,g, or c
  SITE (228): n equals a,t,g, or c
  SITE (229): n equals a,t,g, or c
  SITE (230): n equals a,t,g, or c
  SITE (231): n equals a,t,g, or c
  SITE (232): n equals a,t,g, or c
  SITE (233): n equals a,t,g, or c
  SITE (234): n equals a,t,g, or c
  SITE (235): n equals a,t,g, or c
  SITE (236): n equals a,t,g, or c
  SITE (237): n equals a,t,g, or c
  SITE (238): n equals a,t,g, or c
  SITE (239): n equals a,t,g, or c
  SITE (240): n equals a,t,g, or c
  SITE (241): n equals a,t,g, or c
  SITE (242): n equals a,t,g, or c
  SITE (243): n equals a,t,g, or c
  SITE (244): n equals a,t,g, or c
  SITE (245): n equals a,t,g, or c
  SITE (246): n equals a,t,g, or c
  SITE (247): n equals a,t,g, or c
  SITE (248): n equals a,t,g, or c
  SITE (249): n equals a,t,g, or c
  SITE (250): n equals a,t,g, or c
  SITE (251): n equals a,t,g, or c
  SITE (252): n equals a,t,g, or c
  SITE (253): n equals a,t,g, or c
  SITE (254): n equals a,t,g, or c
  SITE (255): n equals a,t,g, or c
  SITE (256): n equals a,t,g, or c
  SITE (257): n equals a,t,g, or c
  SITE (258): n equals a,t,g, or c
  SITE (259): n equals a,t,g, or c
  SITE (260): n equals a,t,g, or c
  SITE (261): n equals a,t,g, or c
  SITE (262): n equals a,t,g, or c
  SITE (263): n equals a,t,g, or c
  SITE (264): n equals a,t,g, or c
  SITE (265): n equals a,t,g, or c
  SITE (266): n equals a,t,g, or c
  SITE (267): n equals a,t,g, or c
  SITE (268): n equals a,t,g, or c
  SITE (269): n equals a,t,g, or c
  SITE (270): n equals a,t,g, or c
  SITE (271): n equals a,t,g, or c
  SITE (272): n equals a,t,g, or c
  SITE (273): n equals a,t,g, or c
  SITE (274): n equals a,t,g, or c
  SITE (275): n equals a,t,g, or c
  SITE (276): n equals a,t,g, or c
  SITE (277): n equals a,t,g, or c
  SITE (278): n equals a,t,g, or c
  SITE (279): n equals a,t,g, or c
  SITE (280): n equals a,t,g, or c
  SITE (281): n equals a,t,g, or c
  SITE (282): n equals a,t,g, or c
  SITE (283): n equals a,t,g, or c
  SITE (284): n equals a,t,g, or c
  SITE (285): n equals a,t,g, or c
  SITE (286): n equals a,t,g, or c
  SITE (287): n equals a,t,g, or c
  SITE (288): n equals a,t,g, or c
  SITE (289): n equals a,t,g, or c
  SITE (290): n equals a,t,g, or c
  SITE (291): n equals a,t,g, or c
  SITE (292): n equals a,t,g, or c
  SITE (293): n equals a,t,g, or c
  SITE (294): n equals a,t,g, or c
  SITE (295): n equals a,t,g, or c
  SITE (296): n equals a,t,g, or c
  SITE (297): n equals a,t,g, or c
  SITE (298): n equals a,t,g, or c
  SITE (299): n equals a,t,g, or c
  SITE (300): n equals a,t,g, or c
  SITE (301): n equals a,t,g, or c
  SITE (302): n equals a,t,g, or c
  SITE (303): n equals a,t,g, or c
  SITE (304): n equals a,t,g, or c
  SITE (3943): n equals a,t,g, or c
  SITE (3944): n equals a,t,g, or c
  SITE (3945): n equals a,t,g, or c
  SITE (3946): n equals a,t,g, or c
  SITE (3947): n equals a,t,g, or c
  SITE (3948): n equals a,t,g, or c
  SITE (3949): n equals a,t,g, or c
  SITE (3950): n equals a,t,g, or c
  SITE (3951): n equals a,t,g, or c
  SITE (3952): n equals a,t,g, or c
  SITE (3953): n equals a,t,g, or c
  SITE (3954): n equals a,t,g, or c
  SITE (3955): n equals a,t,g, or c
  SITE (3956): n equals a,t,g, or c
  SITE (3957): n equals a,t,g, or c
  SITE (3958): n equals a,t,g, or c
  SITE (3959): n equals a,t,g, or c
  SITE (3960): n equals a,t,g, or c
  SITE (3961): n equals a,t,g, or c
  SITE (3962): n equals a,t,g, or c
  SITE (3963): n equals a,t,g, or c
  SITE (3964): n equals a,t,g, or c
  SITE (3965): n equals a,t,g, or c
  SITE (3966): n equals a,t,g, or c
  SITE (3967): n equals a,t,g, or c
  SITE (3968): n equals a,t,g, or c
  SITE (3969): n equals a,t,g, or c
  SITE (3970): n equals a,t,g, or c
  SITE (3971): n equals a,t,g, or c
  SITE (3972): n equals a,t,g, or c
  SITE (3973): n equals a,t,g, or c
  SITE (3974): n equals a,t,g, or c
  SITE (3975): n equals a,t,g, or c
  SITE (3976): n equals a,t,g, or c
  SITE (3977): n equals a,t,g, or c
  SITE (3978): n equals a,t,g, or c
  SITE (3979): n equals a,t,g, or c
  SITE (3980): n equals a,t,g, or c
  SITE (3981): n equals a,t,g, or c
  SITE (3982): n equals a,t,g, or c
  SITE (3983): n equals a,t,g, or c
  SITE (3984): n equals a,t,g, or c
  SITE (3985): n equals a,t,g, or c
  SITE (3986): n equals a,t,g, or c
  SITE (3987): n equals a,t,g, or c
  SITE (3988): n equals a,t,g, or c
  SITE (3989): n equals a,t,g, or c
  SITE (3990): n equals a,t,g, or c
  SITE (3991): n equals a,t,g, or c
  SITE (3992): n equals a,t,g, or c
  SITE (3993): n equals a,t,g, or c
  SITE (3994): n equals a,t,g, or c
  SITE (3995): n equals a,t,g, or c
  SITE (3996): n equals a,t,g, or c
  SITE (3997): n equals a,t,g, or c
  SITE (3998): n equals a,t,g, or c
  SITE (3999): n equals a,t,g, or c
  SITE (4000): n equals a,t,g, or c
  SITE (4001): n equals a,t,g, or c
  SITE (4002): n equals a,t,g, or c
  SITE (4003): n equals a,t,g, or c
  SITE (4004): n equals a,t,g, or c
  SITE (4005): n equals a,t,g, or c
  SITE (4006): n equals a,t,g, or c
  SITE (4007): n equals a,t,g, or c
  SITE (4008): n equals a,t,g, or c
  SITE (4009): n equals a,t,g, or c
  SITE (4010): n equals a,t,g, or c
  SITE (4011): n equals a,t,g, or c
  SITE (4012): n equals a,t,g, or c
  SITE (4013): n equals a,t,g, or c
  SITE (4014): n equals a,t,g, or c
  SITE (4015): n equals a,t,g, or c
  SITE (4016): n equals a,t,g, or c
  SITE (4017): n equals a,t,g, or c
  SITE (4018): n equals a,t,g, or c
  SITE (4019): n equals a,t,g, or c
  SITE (4020): n equals a,t,g, or c
  SITE (4021): n equals a,t,g, or c
  SITE (4022): n equals a,t,g, or c
  SITE (4023): n equals a,t,g, or c
  SITE (4024): n equals a,t,g, or c
  SITE (4025): n equals a,t,g, or c
  SITE (4026): n equals a,t,g, or c
  SITE (4027): n equals a,t,g, or c
  SITE (4028): n equals a,t,g, or c
  SITE (4029): n equals a,t,g, or c
  SITE (4030): n equals a,t,g, or c
  SITE (4031): n equals a,t,g, or c
  SITE (4032): n equals a,t,g, or c
  SITE (4033): n equals a,t,g, or c
  SITE (4034): n equals a,t,g, or c
  SITE (4035): n equals a,t,g, or c
  SITE (4036): n equals a,t,g, or c
  SITE (4037): n equals a,t,g, or c
  SITE (4038): n equals a,t,g, or c
  SITE (4039): n equals a,t,g, or c
  SITE (4040): n equals a,t,g, or c
  SITE (4041): n equals a,t,g, or c
  SITE (4042): n equals a,t,g, or c
  SITE (4043): n equals a,t,g, or c
  SITE (4044): n equals a,t,g, or c
  SITE (4045): n equals a,t,g, or c
  SITE (4046): n equals a,t,g, or c
  SITE (4047): n equals a,t,g, or c
  SITE (4048): n equals a,t,g, or c
  SITE (4049): n equals a,t,g, or c
  SITE (4050): n equals a,t,g, or c
  SITE (4051): n equals a,t,g, or c
  SITE (4052): n equals a,t,g, or c
  SITE (4053): n equals a,t,g, or c
  SITE (4054): n equals a,t,g, or c
  SITE (4055): n equals a,t,g, or c
  SITE (4056): n equals a,t,g, or c
  SITE (4057): n equals a,t,g, or c
  SITE (4058): n equals a,t,g, or c
  SITE (4059): n equals a,t,g, or c
  SITE (4060): n equals a,t,g, or c
  SITE (4061): n equals a,t,g, or c
  SITE (4062): n equals a,t,g, or c
  SITE (4063): n equals a,t,g, or c
  SITE (4064): n equals a,t,g, or c
  SITE (4065): n equals a,t,g, or c
  SITE (4066): n equals a,t,g, or c
  SITE (4067): n equals a,t,g, or c
  SITE (4068): n equals a,t,g, or c
  SITE (4069): n equals a,t,g, or c
  SITE (4070): n equals a,t,g, or c
  SITE (4071): n equals a,t,g, or c
  SITE (4072): n equals a,t,g, or c
  SITE (4073): n equals a,t,g, or c
  SITE (4074): n equals a,t,g, or c
  SITE (4075): n equals a,t,g, or c
  SITE (4076): n equals a,t,g, or c
  SITE (4077): n equals a,t,g, or c
  SITE (4078): n equals a,t,g, or c
  SITE (4079): n equals a,t,g, or c
  SITE (4080): n equals a,t,g, or c
  SITE (4081): n equals a,t,g, or c
  SITE (4082): n equals a,t,g, or c
  SITE (4083): n equals a,t,g, or c
  SITE (4084): n equals a,t,g, or c
  SITE (4085): n equals a,t,g, or c
  SITE (4086): n equals a,t,g, or c
  SITE (4087): n equals a,t,g, or c
  SITE (4088): n equals a,t,g, or c
  SITE (4089): n equals a,t,g, or c
  SITE (4090): n equals a,t,g, or c
  SITE (4091): n equals a,t,g, or c
  SITE (4092): n equals a,t,g, or c
  SITE (4093): n equals a,t,g, or c
  SITE (4094): n equals a,t,g, or c
  SITE (4095): n equals a,t,g, or c
  SITE (4096): n equals a,t,g, or c
  SITE (4097): n equals a,t,g, or c
  SITE (4098): n equals a,t,g, or c
  SITE (4099): n equals a,t,g, or c
  SITE (4100): n equals a,t,g, or c
  SITE (4101): n equals a,t,g, or c
  SITE (4102): n equals a,t,g, or c
  SITE (4103): n equals a,t,g, or c
  SITE (4104): n equals a,t,g, or c
  SITE (4105): n equals a,t,g, or c
  SITE (4106): n equals a,t,g, or c
  SITE (4107): n equals a,t,g, or c
  SITE (4108): n equals a,t,g, or c
  SITE (4109): n equals a,t,g, or c
  SITE (4110): n equals a,t,g, or c
  SITE (4111): n equals a,t,g, or c
  SITE (4112): n equals a,t,g, or c
  SITE (4113): n equals a,t,g, or c
  SITE (4114): n equals a,t,g, or c
  SITE (4115): n equals a,t,g, or c
  SITE (4116): n equals a,t,g, or c
  SITE (4117): n equals a,t,g, or c
  SITE (4118): n equals a,t,g, or c
  SITE (4119): n equals a,t,g, or c
  SITE (4120): n equals a,t,g, or c
  SITE (4121): n equals a,t,g, or c
  SITE (4122): n equals a,t,g, or c
  SITE (4123): n equals a,t,g, or c
  SITE (4124): n equals a,t,g, or c
  SITE (4125): n equals a,t,g, or c
  SITE (4126): n equals a,t,g, or c
  SITE (4127): n equals a,t,g, or c
  SITE (4128): n equals a,t,g, or c
  SITE (4129): n equals a,t,g, or c
  SITE (4130): n equals a,t,g, or c
  SITE (4131): n equals a,t,g, or c
  SITE (4132): n equals a,t,g, or c
  SITE (4133): n equals a,t,g, or c
  SITE (4134): n equals a,t,g, or c
  SITE (4135): n equals a,t,g, or c
  SITE (4136): n equals a,t,g, or c
  SITE (4137): n equals a,t,g, or c
  SITE (4138): n equals a,t,g, or c
  SITE (4139): n equals a,t,g, or c
  SITE (4140): n equals a,t,g, or c
  SITE (4141): n equals a,t,g, or c
  SITE (4142): n equals a,t,g, or c
  SITE (4143): n equals a,t,g, or c
  SITE (4144): n equals a,t,g, or c
  SITE (4145): n equals a,t,g, or c
  SITE (4146): n equals a,t,g, or c
  SITE (4147): n equals a,t,g, or c
  SITE (4148): n equals a,t,g, or c
  SITE (4149): n equals a,t,g, or c
  SITE (4150): n equals a,t,g, or c
  SITE (4151): n equals a,t,g, or c
  SITE (4152): n equals a,t,g, or c
  SITE (4153): n equals a,t,g, or c
  SITE (4154): n equals a,t,g, or c
  SITE (4155): n equals a,t,g, or c
  SITE (4156): n equals a,t,g, or c
  SITE (4157): n equals a,t,g, or c
  SITE (4158): n equals a,t,g, or c
  SITE (4159): n equals a,t,g, or c
  SITE (4160): n equals a,t,g, or c
  SITE (4161): n equals a,t,g, or c
  SITE (4162): n equals a,t,g, or c
  SITE (4163): n equals a,t,g, or c
  SITE (4164): n equals a,t,g, or c
  SITE (4165): n equals a,t,g, or c
  SITE (4166): n equals a,t,g, or c
  SITE (4167): n equals a,t,g, or c
  SITE (4168): n equals a,t,g, or c
  SITE (4169): n equals a,t,g, or c
  SITE (4170): n equals a,t,g, or c
  SITE (4171): n equals a,t,g, or c
  SITE (4172): n equals a,t,g, or c
  SITE (4173): n equals a,t,g, or c
  SITE (4174): n equals a,t,g, or c
  SITE (4175): n equals a,t,g, or c
  SITE (4176): n equals a,t,g, or c
  SITE (4177): n equals a,t,g, or c
  SITE (4178): n equals a,t,g, or c
  SITE (4179): n equals a,t,g, or c
  SITE (4180): n equals a,t,g, or c
  SITE (4181): n equals a,t,g, or c
  SITE (4182): n equals a,t,g, or c
  SITE (4183): n equals a,t,g, or c
  SITE (4184): n equals a,t,g, or c
  SITE (4185): n equals a,t,g, or c
  SITE (4186): n equals a,t,g, or c
  SITE (4187): n equals a,t,g, or c
  SITE (4188): n equals a,t,g, or c
  SITE (4189): n equals a,t,g, or c
  SITE (4190): n equals a,t,g, or c
  SITE (4191): n equals a,t,g, or c
  SITE (4192): n equals a,t,g, or c
  SITE (4193): n equals a,t,g, or c
  SITE (4194): n equals a,t,g, or c
  SITE (4195): n equals a,t,g, or c
  SITE (4196): n equals a,t,g, or c
  SITE (4197): n equals a,t,g, or c
  SITE (4198): n equals a,t,g, or c
  SITE (4199): n equals a,t,g, or c
  SITE (4200): n equals a,t,g, or c
  SITE (4201): n equals a,t,g, or c
  SITE (4202): n equals a,t,g, or c
  SITE (4203): n equals a,t,g, or c
  SITE (4204): n equals a,t,g, or c
  SITE (4205): n equals a,t,g, or c
  SITE (4206): n equals a,t,g, or c
  SITE (4207): n equals a,t,g, or c
  SITE (4208): n equals a,t,g, or c
  SITE (4209): n equals a,t,g, or c
  SITE (4210): n equals a,t,g, or c
  SITE (4211): n equals a,t,g, or c
  SITE (4212): n equals a,t,g, or c
  SITE (4213): n equals a,t,g, or c
  SITE (4214): n equals a,t,g, or c
  SITE (4215): n equals a,t,g, or c
  SITE (4216): n equals a,t,g, or c
  SITE (4217): n equals a,t,g, or c
  SITE (4218): n equals a,t,g, or c
  SITE (4219): n equals a,t,g, or c
  SITE (4220): n equals a,t,g, or c
  SITE (4221): n equals a,t,g, or c
  SITE (4222): n equals a,t,g, or c
  SITE (4223): n equals a,t,g, or c
  SITE (4224): n equals a,t,g, or c
  SITE (4225): n equals a,t,g, or c
  SITE (4226): n equals a,t,g, or c
  SITE (4227): n equals a,t,g, or c
  SITE (4228): n equals a,t,g, or c
  SITE (4229): n equals a,t,g, or c
  SITE (4230): n equals a,t,g, or c
  SITE (4231): n equals a,t,g, or c
  SITE (4232): n equals a,t,g, or c
  SITE (4233): n equals a,t,g, or c
  SITE (4234): n equals a,t,g, or c
  SITE (4235): n equals a,t,g, or c
  SITE (4236): n equals a,t,g, or c
  SITE (4237): n equals a,t,g, or c
  SITE (4238): n equals a,t,g, or c
  SITE (4239): n equals a,t,g, or c
  SITE (4240): n equals a,t,g, or c
  SITE (4241): n equals a,t,g, or c
  SITE (4242): n equals a,t,g, or c
  SITE (4243): n equals a,t,g, or c
  SITE (4244): n equals a,t,g, or c
  SITE (4245): n equals a,t,g, or c
  SITE (4246): n equals a,t,g, or c
  SITE (4247): n equals a,t,g, or c
  SITE (4248): n equals a,t,g, or c
  SITE (4249): n equals a,t,g, or c
  SITE (4250): n equals a,t,g, or c
  SITE (4251): n equals a,t,g, or c
  SITE (4252): n equals a,t,g, or c
  SITE (4253): n equals a,t,g, or c
  SITE (4254): n equals a,t,g, or c
  SITE (4255): n equals a,t,g, or c
  SITE (4256): n equals a,t,g, or c
  SITE (4257): n equals a,t,g, or c
  SITE (4258): n equals a,t,g, or c
  SITE (4259): n equals a,t,g, or c
  SITE (4260): n equals a,t,g, or c
  SITE (4261): n equals a,t,g, or c
  SITE (4262): n equals a,t,g, or c
  SITE (4263): n equals a,t,g, or c
  SITE (4264): n equals a,t,g, or c
  SITE (4265): n equals a,t,g, or c
  SITE (4266): n equals a,t,g, or c
  SITE (4267): n equals a,t,g, or c
  SITE (4268): n equals a,t,g, or c
  SITE (4269): n equals a,t,g, or c
  SITE (4270): n equals a,t,g, or c
  SITE (4271): n equals a,t,g, or c
  SITE (4272): n equals a,t,g, or c
  SITE (4273): n equals a,t,g, or c
  SITE (4274): n equals a,t,g, or c
  SITE (4275): n equals a,t,g, or c
  SITE (4276): n equals a,t,g, or c
  SITE (4277): n equals a,t,g, or c
  SITE (4278): n equals a,t,g, or c
  SITE (4279): n equals a,t,g, or c
  SITE (4280): n equals a,t,g, or c
  SITE (4281): n equals a,t,g, or c
  SITE (4282): n equals a,t,g, or c
  SITE (4283): n equals a,t,g, or c
  SITE (4284): n equals a,t,g, or c
  SITE (4285): n equals a,t,g, or c
  SITE (4286): n equals a,t,g, or c
  SITE (4287): n equals a,t,g, or c
  SITE (4288): n equals a,t,g, or c
  SITE (4289): n equals a,t,g, or c
  SITE (4290): n equals a,t,g, or c
  SITE (4291): n equals a,t,g, or c
  SITE (4292): n equals a,t,g, or c
  SITE (4293): n equals a,t,g, or c
  SITE (4294): n equals a,t,g, or c
  SITE (4295): n equals a,t,g, or c
  SITE (4296): n equals a,t,g, or c
  SITE (4297): n equals a,t,g, or c
  SITE (4298): n equals a,t,g, or c
  SITE (4299): n equals a,t,g, or c
  SITE (4300): n equals a,t,g, or c
  SITE (4301): n equals a,t,g, or c
  SITE (4302): n equals a,t,g, or c
  SITE (4303): n equals a,t,g, or c
  SITE (4304): n equals a,t,g, or c
  SITE (4305): n equals a,t,g, or c
  SITE (4306): n equals a,t,g, or c
  SITE (4307): n equals a,t,g, or c
  SITE (4308): n equals a,t,g, or c
  SITE (4309): n equals a,t,g, or c
  SITE (4310): n equals a,t,g, or c
  SITE (4311): n equals a,t,g, or c
  SITE (4312): n equals a,t,g, or c
  SITE (4313): n equals a,t,g, or c
  SITE (4314): n equals a,t,g, or c
  SITE (4315): n equals a,t,g, or c
  SITE (4316): n equals a,t,g, or c
  SITE (4317): n equals a,t,g, or c
  SITE (4318): n equals a,t,g, or c
  SITE (4319): n equals a,t,g, or c
  SITE (4320): n equals a,t,g, or c
  SITE (4321): n equals a,t,g, or c
  SITE (4322): n equals a,t,g, or c
  SITE (4323): n equals a,t,g, or c
  SITE (4324): n equals a,t,g, or c
  SITE (4325): n equals a,t,g, or c
  SITE (4326): n equals a,t,g, or c
  SITE (4327): n equals a,t,g, or c
  SITE (4328): n equals a,t,g, or c
  SITE (4329): n equals a,t,g, or c
  SITE (4330): n equals a,t,g, or c
  SITE (4331): n equals a,t,g, or c
  SITE (4332): n equals a,t,g, or c
  SITE (4333): n equals a,t,g, or c
  SITE (4334): n equals a,t,g, or c
  SITE (4335): n equals a,t,g, or c
  SITE (4336): n equals a,t,g, or c
  SITE (4337): n equals a,t,g, or c
  SITE (4338): n equals a,t,g, or c
  SITE (4339): n equals a,t,g, or c
  SITE (4340): n equals a,t,g, or c
  SITE (4341): n equals a,t,g, or c
  SITE (4342): n equals a,t,g, or c
  SITE (4343): n equals a,t,g, or c
  SITE (4344): n equals a,t,g, or c
  SITE (4345): n equals a,t,g, or c
  SITE (4346): n equals a,t,g, or c
  SITE (4347): n equals a,t,g, or c
  SITE (4348): n equals a,t,g, or c
  SITE (4349): n equals a,t,g, or c
  SITE (4350): n equals a,t,g, or c
  SITE (4351): n equals a,t,g, or c
  SITE (4352): n equals a,t,g, or c
  SITE (4353): n equals a,t,g, or c
  SITE (4354): n equals a,t,g, or c
  SITE (4355): n equals a,t,g, or c
  SITE (4356): n equals a,t,g, or c
  SITE (4357): n equals a,t,g, or c
  SITE (4358): n equals a,t,g, or c
  SITE (4359): n equals a,t,g, or c
  SITE (4360): n equals a,t,g, or c
  SITE (4361): n equals a,t,g, or c
  SITE (4362): n equals a,t,g, or c
  SITE (4363): n equals a,t,g, or c
  SITE (4364): n equals a,t,g, or c
  SITE (4365): n equals a,t,g, or c
  SITE (4366): n equals a,t,g, or c
  SITE (4367): n equals a,t,g, or c
  SITE (4368): n equals a,t,g, or c
  SITE (4369): n equals a,t,g, or c
  SITE (4370): n equals a,t,g, or c
  SITE (4371): n equals a,t,g, or c
  SITE (4372): n equals a,t,g, or c
  SITE (4373): n equals a,t,g, or c
  SITE (4374): n equals a,t,g, or c
  SITE (4375): n equals a,t,g, or c
  SITE (4376): n equals a,t,g, or c
  SITE (4377): n equals a,t,g, or c
  SITE (4378): n equals a,t,g, or c
  SITE (4379): n equals a,t,g, or c
  SITE (4380): n equals a,t,g, or c
  SITE (4381): n equals a,t,g, or c
  SITE (4382): n equals a,t,g, or c
  SITE (4383): n equals a,t,g, or c
  SITE (4384): n equals a,t,g, or c
  SITE (4385): n equals a,t,g, or c
  SITE (4386): n equals a,t,g, or c
  SITE (4387): n equals a,t,g, or c
  SITE (4388): n equals a,t,g, or c
  SITE (4389): n equals a,t,g, or c
  SITE (4390): n equals a,t,g, or c
  SITE (4391): n equals a,t,g, or c
  SITE (4392): n equals a,t,g, or c
  SITE (4393): n equals a,t,g, or c
  SITE (4394): n equals a,t,g, or c
  SITE (4395): n equals a,t,g, or c
  SITE (4396): n equals a,t,g, or c
  SITE (4397): n equals a,t,g, or c
  SITE (4398): n equals a,t,g, or c
  SITE (4399): n equals a,t,g, or c
  SITE (4400): n equals a,t,g, or c
  SITE (4401): n equals a,t,g, or c
  SITE (4402): n equals a,t,g, or c
  SITE (4403): n equals a,t,g, or c
  SITE (4404): n equals a,t,g, or c
  SITE (4405): n equals a,t,g, or c
  SITE (4406): n equals a,t,g, or c
  SITE (4407): n equals a,t,g, or c
  SITE (4408): n equals a,t,g, or c
  SITE (4409): n equals a,t,g, or c
  SITE (4410): n equals a,t,g, or c
  SITE (4411): n equals a,t,g, or c
  SITE (4412): n equals a,t,g, or c
  SITE (4413): n equals a,t,g, or c
  SITE (4414): n equals a,t,g, or c
  SITE (4415): n equals a,t,g, or c
  SITE (4416): n equals a,t,g, or c
  SITE (4417): n equals a,t,g, or c
  SITE (4418): n equals a,t,g, or c
  SITE (4419): n equals a,t,g, or c
  SITE (4420): n equals a,t,g, or c
  SITE (4421): n equals a,t,g, or c
  SITE (4422): n equals a,t,g, or c
  SITE (4423): n equals a,t,g, or c
  SITE (4424): n equals a,t,g, or c
  SITE (4425): n equals a,t,g, or c
  SITE (4426): n equals a,t,g, or c
  SITE (4427): n equals a,t,g, or c
  SITE (4428): n equals a,t,g, or c
  SITE (4429): n equals a,t,g, or c
  SITE (4430): n equals a,t,g, or c
  SITE (4431): n equals a,t,g, or c
  SITE (4432): n equals a,t,g, or c
  SITE (4433): n equals a,t,g, or c
  SITE (4434): n equals a,t,g, or c
  SITE (4435): n equals a,t,g, or c
  SITE (4436): n equals a,t,g, or c
  SITE (4437): n equals a,t,g, or c
  SITE (4438): n equals a,t,g, or c
  SITE (4439): n equals a,t,g, or c
  SITE (4440): n equals a,t,g, or c
  SITE (4441): n equals a,t,g, or c
  SITE (4442): n equals a,t,g, or c
  SITE (4443): n equals a,t,g, or c
  SITE (4444): n equals a,t,g, or c
  SITE (4445): n equals a,t,g, or c
  SITE (4446): n equals a,t,g, or c
  SITE (4447): n equals a,t,g, or c
  SITE (4448): n equals a,t,g, or c
  SITE (4449): n equals a,t,g, or c
  SITE (4450): n equals a,t,g, or c
  SITE (4451): n equals a,t,g, or c
  SITE (4452): n equals a,t,g, or c
  SITE (4453): n equals a,t,g, or c
  SITE (4454): n equals a,t,g, or c
  SITE (4455): n equals a,t,g, or c
  SITE (4456): n equals a,t,g, or c
  SITE (4457): n equals a,t,g, or c
  SITE (4458): n equals a,t,g, or c
  SITE (4459): n equals a,t,g, or c
  SITE (4460): n equals a,t,g, or c
  SITE (4461): n equals a,t,g, or c
  SITE (4462): n equals a,t,g, or c
  SITE (4463): n equals a,t,g, or c
  SITE (4464): n equals a,t,g, or c
  SITE (4465): n equals a,t,g, or c
  SITE (4466): n equals a,t,g, or c
  SITE (4467): n equals a,t,g, or c
  SITE (4468): n equals a,t,g, or c
  SITE (4469): n equals a,t,g, or c
  SITE (4470): n equals a,t,g, or c
  SITE (4471): n equals a,t,g, or c
  SITE (4472): n equals a,t,g, or c
  SITE (4473): n equals a,t,g, or c
  SITE (4474): n equals a,t,g, or c
  SITE (4475): n equals a,t,g, or c
  SITE (4476): n equals a,t,g, or c
  SITE (4477): n equals a,t,g, or c
  SITE (4478): n equals a,t,g, or c
  SITE (4479): n equals a,t,g, or c
  SITE (4480): n equals a,t,g, or c
  SITE (4481): n equals a,t,g, or c
  SITE (4482): n equals a,t,g, or c
  SITE (4483): n equals a,t,g, or c
  SITE (4484): n equals a,t,g, or c
  SITE (4485): n equals a,t,g, or c
  SITE (4486): n equals a,t,g, or c
  SITE (4487): n equals a,t,g, or c
  SITE (4488): n equals a,t,g, or c
  SITE (4489): n equals a,t,g, or c
  SITE (4490): n equals a,t,g, or c
  SITE (4491): n equals a,t,g, or c
  SITE (4492): n equals a,t,g, or c
  SITE (4493): n equals a,t,g, or c
  SITE (4494): n equals a,t,g, or c
  SITE (4495): n equals a,t,g, or c
  SITE (4496): n equals a,t,g, or c
  SITE (4497): n equals a,t,g, or c
  SITE (4498): n equals a,t,g, or c
  SITE (4499): n equals a,t,g, or c
  SITE (4500): n equals a,t,g, or c
  SITE (4501): n equals a,t,g, or c
  SITE (4502): n equals a,t,g, or c
  SITE (4503): n equals a,t,g, or c
  SITE (4504): n equals a,t,g, or c
  SITE (4505): n equals a,t,g, or c
  SITE (4506): n equals a,t,g, or c
  SITE (4507): n equals a,t,g, or c
  SITE (4508): n equals a,t,g, or c
  SITE (4509): n equals a,t,g, or c
  SITE (4510): n equals a,t,g, or c
  SITE (4511): n equals a,t,g, or c
  SITE (4512): n equals a,t,g, or c
  SITE (4513): n equals a,t,g, or c
  SITE (4514): n equals a,t,g, or c
  SITE (4515): n equals a,t,g, or c
  SITE (4516): n equals a,t,g, or c
  SITE (4517): n equals a,t,g, or c
  SITE (4518): n equals a,t,g, or c
  SITE (4519): n equals a,t,g, or c
  SITE (4520): n equals a,t,g, or c
  SITE (4521): n equals a,t,g, or c
  SITE (4522): n equals a,t,g, or c
  SITE (4523): n equals a,t,g, or c
  SITE (4524): n equals a,t,g, or c
  SITE (4525): n equals a,t,g, or c
  SITE (4526): n equals a,t,g, or c
  SITE (4527): n equals a,t,g, or c
  SITE (4528): n equals a,t,g, or c
  SITE (4529): n equals a,t,g, or c
  SITE (4530): n equals a,t,g, or c
  SITE (4531): n equals a,t,g, or c
  SITE (4532): n equals a,t,g, or c
  SITE (4533): n equals a,t,g, or c
  SITE (4534): n equals a,t,g, or c
  SITE (4535): n equals a,t,g, or c
  SITE (4536): n equals a,t,g, or c
  SITE (4537): n equals a,t,g, or c
  SITE (4538): n equals a,t,g, or c
  SITE (4539): n equals a,t,g, or c
  SITE (4540): n equals a,t,g, or c
  SITE (4541): n equals a,t,g, or c
  SITE (4542): n equals a,t,g, or c
  SITE (4543): n equals a,t,g, or c
  SITE (4544): n equals a,t,g, or c
  SITE (4545): n equals a,t,g, or c
  SITE (4546): n equals a,t,g, or c
  SITE (4547): n equals a,t,g, or c
  SITE (4548): n equals a,t,g, or c
  SITE (4549): n equals a,t,g, or c
  SITE (4550): n equals a,t,g, or c
  SITE (4551): n equals a,t,g, or c
  SITE (4552): n equals a,t,g, or c
  SITE (4553): n equals a,t,g, or c
  SITE (4554): n equals a,t,g, or c
  SITE (4555): n equals a,t,g, or c
  SITE (4556): n equals a,t,g, or c
  SITE (4557): n equals a,t,g, or c
  SITE (4558): n equals a,t,g, or c
  SITE (4559): n equals a,t,g, or c
  SITE (4560): n equals a,t,g, or c
  SITE (4561): n equals a,t,g, or c
  SITE (4562): n equals a,t,g, or c
  SITE (4563): n equals a,t,g, or c
  SITE (4564): n equals a,t,g, or c
  SITE (4565): n equals a,t,g, or c
  SITE (4566): n equals a,t,g, or c
  SITE (4567): n equals a,t,g, or c
  SITE (4568): n equals a,t,g, or c
  SITE (4569): n equals a,t,g, or c
  SITE (4570): n equals a,t,g, or c
  SITE (4571): n equals a,t,g, or c
  SITE (4572): n equals a,t,g, or c
  SITE (4573): n equals a,t,g, or c
  SITE (4574): n equals a,t,g, or c
  SITE (4575): n equals a,t,g, or c
  SITE (4576): n equals a,t,g, or c
  SITE (4577): n equals a,t,g, or c
  SITE (4578): n equals a,t,g, or c
  SITE (4579): n equals a,t,g, or c
  SITE (4580): n equals a,t,g, or c
  SITE (4581): n equals a,t,g, or c
  SITE (4582): n equals a,t,g, or c
  SITE (4583): n equals a,t,g, or c
  SITE (4584): n equals a,t,g, or c
  SITE (4585): n equals a,t,g, or c
  SITE (4586): n equals a,t,g, or c
  SITE (4587): n equals a,t,g, or c
  SITE (4588): n equals a,t,g, or c
  SITE (4589): n equals a,t,g, or c
  SITE (4590): n equals a,t,g, or c
  SITE (4591): n equals a,t,g, or c
  SITE (4592): n equals a,t,g, or c
  SITE (4593): n equals a,t,g, or c
  SITE (4594): n equals a,t,g, or c
  SITE (4595): n equals a,t,g, or c
  SITE (4596): n equals a,t,g, or c
  SITE (4597): n equals a,t,g, or c
  SITE (4598): n equals a,t,g, or c
  SITE (4599): n equals a,t,g, or c
  SITE (4600): n equals a,t,g, or c
  SITE (4601): n equals a,t,g, or c
  SITE (4602): n equals a,t,g, or c
  SITE (4603): n equals a,t,g, or c
  SITE (4604): n equals a,t,g, or c
  SITE (4605): n equals a,t,g, or c
  SITE (4606): n equals a,t,g, or c
  SITE (4607): n equals a,t,g, or c
  SITE (4608): n equals a,t,g, or c
  SITE (4609): n equals a,t,g, or c
  SITE (4610): n equals a,t,g, or c
  SITE (4611): n equals a,t,g, or c
  SITE (4612): n equals a,t,g, or c
  SITE (4613): n equals a,t,g, or c
  SITE (4614): n equals a,t,g, or c
  SITE (4615): n equals a,t,g, or c
  SITE (4616): n equals a,t,g, or c
  SITE (4617): n equals a,t,g, or c
  SITE (4618): n equals a,t,g, or c
  SITE (4619): n equals a,t,g, or c
  SITE (4620): n equals a,t,g, or c
  SITE (4621): n equals a,t,g, or c
  SITE (4622): n equals a,t,g, or c
  SITE (4623): n equals a,t,g, or c
  SITE (4624): n equals a,t,g, or c
  SITE (4625): n equals a,t,g, or c
  SITE (4626): n equals a,t,g, or c
  SITE (4627): n equals a,t,g, or c
  SITE (4628): n equals a,t,g, or c
  SITE (4629): n equals a,t,g, or c
  SITE (4630): n equals a,t,g, or c
  SITE (4631): n equals a,t,g, or c
  SITE (4632): n equals a,t,g, or c
  SITE (4633): n equals a,t,g, or c
  SITE (4634): n equals a,t,g, or c
  SITE (4635): n equals a,t,g, or c
  SITE (4636): n equals a,t,g, or c
  SITE (4637): n equals a,t,g, or c
  SITE (4638): n equals a,t,g, or c
  SITE (4639): n equals a,t,g, or c
  SITE (4640): n equals a,t,g, or c
  SITE (4641): n equals a,t,g, or c
  SITE (4642): n equals a,t,g, or c
  SITE (4643): n equals a,t,g, or c
  SITE (4644): n equals a,t,g, or c
  SITE (4645): n equals a,t,g, or c
  SITE (4646): n equals a,t,g, or c
  SITE (4647): n equals a,t,g, or c
  SITE (4648): n equals a,t,g, or c
  SITE (4649): n equals a,t,g, or c
  SITE (4650): n equals a,t,g, or c
  SITE (4651): n equals a,t,g, or c
  SITE (4652): n equals a,t,g, or c
  SITE (4653): n equals a,t,g, or c
  SITE (4654): n equals a,t,g, or c
  SITE (4655): n equals a,t,g, or c
  SITE (4656): n equals a,t,g, or c
  SITE (4657): n equals a,t,g, or c
  SITE (4658): n equals a,t,g, or c
  SITE (4659): n equals a,t,g, or c
  SITE (4660): n equals a,t,g, or c
  SITE (4661): n equals a,t,g, or c
  SITE (4662): n equals a,t,g, or c
  SITE (4663): n equals a,t,g, or c
  SITE (4664): n equals a,t,g, or c
  SITE (4665): n equals a,t,g, or c
  SITE (4666): n equals a,t,g, or c
  SITE (4667): n equals a,t,g, or c
  SITE (4668): n equals a,t,g, or c
  SITE (4669): n equals a,t,g, or c
  SITE (4670): n equals a,t,g, or c
  SITE (4671): n equals a,t,g, or c
  SITE (4672): n equals a,t,g, or c
  SITE (4673): n equals a,t,g, or c
  SITE (4674): n equals a,t,g, or c
  SITE (4675): n equals a,t,g, or c
  SITE (4676): n equals a,t,g, or c
  SITE (4677): n equals a,t,g, or c
  SITE (4678): n equals a,t,g, or c
  SITE (4679): n equals a,t,g, or c
  SITE (4680): n equals a,t,g, or c
  SITE (4681): n equals a,t,g, or c
  SITE (4682): n equals a,t,g, or c
  SITE (4683): n equals a,t,g, or c
  SITE (4684): n equals a,t,g, or c
  SITE (4685): n equals a,t,g, or c
  SITE (4686): n equals a,t,g, or c
  SITE (4687): n equals a,t,g, or c
  SITE (4688): n equals a,t,g, or c
  SITE (4689): n equals a,t,g, or c
  SITE (4690): n equals a,t,g, or c
  SITE (4691): n equals a,t,g, or c
  SITE (4692): n equals a,t,g, or c
  SITE (4693): n equals a,t,g, or c
  SITE (4694): n equals a,t,g, or c
  SITE (4695): n equals a,t,g, or c
  SITE (4696): n equals a,t,g, or c
  SITE (4697): n equals a,t,g, or c
  SITE (4698): n equals a,t,g, or c
  SITE (4699): n equals a,t,g, or c
  SITE (4700): n equals a,t,g, or c
  SITE (4701): n equals a,t,g, or c
  SITE (4702): n equals a,t,g, or c
  SITE (4703): n equals a,t,g, or c
  SITE (4704): n equals a,t,g, or c
  SITE (4705): n equals a,t,g, or c
  SITE (4706): n equals a,t,g, or c
  SITE (4707): n equals a,t,g, or c
  SITE (4708): n equals a,t,g, or c
  SITE (4709): n equals a,t,g, or c
  SITE (4710): n equals a,t,g, or c
  SITE (4711): n equals a,t,g, or c
  SITE (4712): n equals a,t,g, or c
  SITE (4713): n equals a,t,g, or c
  SITE (4714): n equals a,t,g, or c
  SITE (4715): n equals a,t,g, or c
  SITE (4716): n equals a,t,g, or c
  SITE (4717): n equals a,t,g, or c
  SITE (4718): n equals a,t,g, or c
  SITE (4719): n equals a,t,g, or c
  SITE (4720): n equals a,t,g, or c
  SITE (4721): n equals a,t,g, or c
  SITE (4722): n equals a,t,g, or c
  SITE (4723): n equals a,t,g, or c
  SITE (4724): n equals a,t,g, or c
  SITE (4725): n equals a,t,g, or c
  SITE (4726): n equals a,t,g, or c
  SITE (4727): n equals a,t,g, or c
  SITE (4728): n equals a,t,g, or c
  SITE (4729): n equals a,t,g, or c
  SITE (4730): n equals a,t,g, or c
  SITE (4731): n equals a,t,g, or c
  SITE (4732): n equals a,t,g, or c
  SITE (4733): n equals a,t,g, or c
  SITE (4734): n equals a,t,g, or c
  SITE (4735): n equals a,t,g, or c
  SITE (4736): n equals a,t,g, or c
  SITE (4737): n equals a,t,g, or c
  SITE (4738): n equals a,t,g, or c
  SITE (4739): n equals a,t,g, or c
  SITE (4740): n equals a,t,g, or c
  SITE (4741): n equals a,t,g, or c
  SITE (4742): n equals a,t,g, or c
  SITE (4743): n equals a,t,g, or c
  SITE (4744): n equals a,t,g, or c
  SITE (4745): n equals a,t,g, or c
  SITE (4746): n equals a,t,g, or c
  SITE (4747): n equals a,t,g, or c
  SITE (4748): n equals a,t,g, or c
  SITE (4749): n equals a,t,g, or c
  SITE (4750): n equals a,t,g, or c
  SITE (4751): n equals a,t,g, or c
  SITE (4752): n equals a,t,g, or c
  SITE (4753): n equals a,t,g, or c
  SITE (4754): n equals a,t,g, or c
  SITE (4755): n equals a,t,g, or c
  SITE (4756): n equals a,t,g, or c
  SITE (4757): n equals a,t,g, or c
  SITE (4758): n equals a,t,g, or c
  SITE (4759): n equals a,t,g, or c
  SITE (4760): n equals a,t,g, or c
  SITE (4761): n equals a,t,g, or c
  SITE (4762): n equals a,t,g, or c
  SITE (4763): n equals a,t,g, or c
  SITE (4764): n equals a,t,g, or c
  SITE (4765): n equals a,t,g, or c
  SITE (4766): n equals a,t,g, or c
  SITE (4767): n equals a,t,g, or c
  SITE (4768): n equals a,t,g, or c
  SITE (4769): n equals a,t,g, or c
  SITE (4770): n equals a,t,g, or c
  SITE (4771): n equals a,t,g, or c
  SITE (4772): n equals a,t,g, or c
  SITE (4773): n equals a,t,g, or c
  SITE (4774): n equals a,t,g, or c
  SITE (4775): n equals a,t,g, or c
  SITE (4776): n equals a,t,g, or c
  SITE (4777): n equals a,t,g, or c
  SITE (4778): n equals a,t,g, or c
  SITE (4779): n equals a,t,g, or c
  SITE (4780): n equals a,t,g, or c
  SITE (4781): n equals a,t,g, or c
  SITE (4782): n equals a,t,g, or c
  SITE (4783): n equals a,t,g, or c
  SITE (4784): n equals a,t,g, or c
  SITE (4785): n equals a,t,g, or c
  SITE (4786): n equals a,t,g, or c
  SITE (4787): n equals a,t,g, or c
  SITE (4788): n equals a,t,g, or c
  SITE (4789): n equals a,t,g, or c
  SITE (4790): n equals a,t,g, or c
  SITE (4791): n equals a,t,g, or c
  SITE (4792): n equals a,t,g, or c
  SITE (4793): n equals a,t,g, or c
  SITE (4794): n equals a,t,g, or c
  SITE (4795): n equals a,t,g, or c
  SITE (4796): n equals a,t,g, or c
  SITE (4797): n equals a,t,g, or c
  SITE (4798): n equals a,t,g, or c
  SITE (4799): n equals a,t,g, or c
  SITE (4800): n equals a,t,g, or c
  SITE (4801): n equals a,t,g, or c
  SITE (4802): n equals a,t,g, or c
  SITE (4803): n equals a,t,g, or c
  SITE (4804): n equals a,t,g, or c
  SITE (4805): n equals a,t,g, or c
  SITE (4806): n equals a,t,g, or c
  SITE (4807): n equals a,t,g, or c
  SITE (4808): n equals a,t,g, or c
  SITE (4809): n equals a,t,g, or c
  SITE (4810): n equals a,t,g, or c
  SITE (4811): n equals a,t,g, or c
  SITE (4812): n equals a,t,g, or c
  SITE (4813): n equals a,t,g, or c
  SITE (4814): n equals a,t,g, or c
  SITE (4815): n equals a,t,g, or c
  SITE (4816): n equals a,t,g, or c
  SITE (4817): n equals a,t,g, or c
  SITE (4818): n equals a,t,g, or c
  SITE (4819): n equals a,t,g, or c
  SITE (4820): n equals a,t,g, or c
  SITE (4821): n equals a,t,g, or c
  SITE (4822): n equals a,t,g, or c
  SITE (4823): n equals a,t,g, or c
  SITE (4824): n equals a,t,g, or c
  SITE (4825): n equals a,t,g, or c
  SITE (4826): n equals a,t,g, or c
  SITE (4827): n equals a,t,g, or c
  SITE (4828): n equals a,t,g, or c
  SITE (4829): n equals a,t,g, or c
  SITE (4830): n equals a,t,g, or c
  SITE (4831): n equals a,t,g, or c
  SITE (4832): n equals a,t,g, or c
  SITE (4833): n equals a,t,g, or c
  SITE (4834): n equals a,t,g, or c
  SITE (4835): n equals a,t,g, or c
  SITE (4836): n equals a,t,g, or c
  SITE (4837): n equals a,t,g, or c
  SITE (4838): n equals a,t,g, or c
  SITE (4839): n equals a,t,g, or c
  SITE (4840): n equals a,t,g, or c
  SITE (4841): n equals a,t,g, or c
  SITE (4842): n equals a,t,g, or c
  SITE (4843): n equals a,t,g, or c
  SITE (4844): n equals a,t,g, or c
  SITE (4845): n equals a,t,g, or c
  SITE (4846): n equals a,t,g, or c
  SITE (4847): n equals a,t,g, or c
  SITE (4848): n equals a,t,g, or c
  SITE (4849): n equals a,t,g, or c
  SITE (4850): n equals a,t,g, or c
  SITE (4851): n equals a,t,g, or c
  SITE (4852): n equals a,t,g, or c
  SITE (4853): n equals a,t,g, or c
  SITE (4854): n equals a,t,g, or c
  SITE (4855): n equals a,t,g, or c
  SITE (4856): n equals a,t,g, or c
  SITE (4857): n equals a,t,g, or c
  SITE (4858): n equals a,t,g, or c
  SITE (4859): n equals a,t,g, or c
  SITE (4860): n equals a,t,g, or c
  SITE (4861): n equals a,t,g, or c
  SITE (4862): n equals a,t,g, or c
  SITE (4863): n equals a,t,g, or c
  SITE (4864): n equals a,t,g, or c
  SITE (4865): n equals a,t,g, or c
  SITE (4866): n equals a,t,g, or c
  SITE (4867): n equals a,t,g, or c
  SITE (4868): n equals a,t,g, or c
  SITE (4869): n equals a,t,g, or c
  SITE (4870): n equals a,t,g, or c
  SITE (4871): n equals a,t,g, or c
  SITE (4872): n equals a,t,g, or c
  SITE (4873): n equals a,t,g, or c
  SITE (4874): n equals a,t,g, or c
  SITE (4875): n equals a,t,g, or c
  SITE (4876): n equals a,t,g, or c
  SITE (4877): n equals a,t,g, or c
  SITE (4878): n equals a,t,g, or c
  SITE (4879): n equals a,t,g, or c
  SITE (4880): n equals a,t,g, or c
  SITE (4881): n equals a,t,g, or c
  SITE (4882): n equals a,t,g, or c
  SITE (4883): n equals a,t,g, or c
  SITE (4884): n equals a,t,g, or c
  SITE (4885): n equals a,t,g, or c
  SITE (4886): n equals a,t,g, or c
  SITE (4887): n equals a,t,g, or c
  SITE (4888): n equals a,t,g, or c
  SITE (4889): n equals a,t,g, or c
  SITE (4890): n equals a,t,g, or c
  SITE (4891): n equals a,t,g, or c
  SITE (4892): n equals a,t,g, or c

SEQ ID NO: 6385 - DNA, 115 bp, Homo sapiens
tagtagagatggggtttcaccatgttggccaggatggtctcgatctcctgacctcgtgatccacccaccttggcctcctaaagtgctgggattacaggcgtgagccactgcgccc

SEQ ID NO: 6386 - DNA, 228 bp, Homo sapiens; identical to SEQ ID NO: 5626

SEQ ID NO: 6387 - DNA, 12304 bp, Homo sapiens
cagatgttttgttttttttttttgtttttttttttgagacggagtctcgctctgtcgcccaggctggagtgcagtggcgggatctcggctcactgcaagctccgcctcccgggttcacgccattctcctgcctcagcctcccaagtagctgggacgacaggcgcccgccactacgcccggctaatttttttgtatttttagtagagacggggtttcaccgttttagccgggatggtctcgatctcctgacctcgtgatccgcctgcctcggcctcccaaagtgctgggattgcaggcgtgagccaccgcgcccggccactcagatgttatttaagaaagttttttttttaaaactgtaacaggaagattacttgaggaacctttaatgctactttaatgcttcatgctgatttgtgtgtgtgtgtgtgtgtgtgtgtgtacagtagcacagtctcagctcactgcagcctccacctcctaggctcaagtgaacctcccacatcagcctccgaagtagctgggaccacaggcacgtaccaccatgcgcggctaatttttttgtattttttgttagagacagggttttaccatgttgcccaggctggtctcaaactcttgagctcaggagattcacccgcctgggcctcccaaattgctaggattacaggtgtgagctatcacgcctggactgatttttactgttttgatttttctttttctttttgagacagagtctcaccctgtcgcccaggctgaagtgcaatggtgcgatctcggctcactgcaacctctgcacccagagttctagtgactctcctacctcagcctccccagtagctgggattacaggtgcctgccactacacccagctatttttttttgtatttttagtagagacagggtttcgcatgttggccaggcaggtcttgaactcctgatttcaggtcatctacccacctcggcctcccaaagtgctaggattacagttgtgagccagcaggcctggccactggtttgattttatttaccaaattagttgagcactatttgtatggcaagcatggatataaaatttaaaaataaaacataattgttggttttatgaaacttatatgtggtgttcaaaaaaaatctgtaatctgtccatatgagttaagcagcccaactgtaaatatgatcaatcctagtatgtagaaagtagtttggcagccagccttggtgcctcacagctgtaatcccagcactttaggatgctgtaccagcttgaggccaggagtttgagacagcctgggcaacatggtgagaccccatctctatttaaaaaaaaaaaaaatagttcaggatttaaaaaaaaatgaaaaacaagtcttgacagaatttaagttgtttttaattgatacaaactttttgtagtaagctaacttaaatttcagttgttcttttttaatgcctgaaacaattattttctgtgtacggctcagtaatttgtaatggaatgcacttactgataattaattcatagatgttttgtttaagagctttgctagggctgatttctatagaacatttaataactttttctttgattttttttattgtggtgaaatatatttatacaacattaaatttgccattttaaccacttgaaatgtacaattgaaggccattaattacattcacaatgttgtgcaacgattactaccatctattctttcccaatccctagtaacttctaatctactttctgtctctaccaatttacctcttctagatatttaatgtaagtggaataataaaatatttgtatttttgtgtctgactactttcatttagtataatattttcaaggttcatctgtgttgcagtatgtaccagaatttcattcctttttaatgctcagtaatactctattcaggtggacattttgcaccttttggctaaactggatactgcagtgaacattggcatacaattattggtttaagtccctatttgcaattcatctgggtatgttccttggaatggaattgctgggttgtttttgtaattcgctgtggttagcttcttcaggaactgccatattgtttttcacagaacctgcaatattttacattcctaccagcaatgtacacatgtcaatttctctacctccttgcccacacttgctattttctttcttttcttatcccatcttagttggtgtccttttggtttgtatttctctaaccagtaatgatattaagcatcttttcatgtgcttattggccatttgtatgtctttatagaaatgtctattcaaattcattgcccctttttaaattagttatttatttatttatttgagatgaagtcttgctgttgtcccccaggctggagtgtgatggtgtgatctaggctcactgcaacctctgcctcctgggttcaagcaattctcctgcctcggccccatgagtagctgggattacaggcacctaccaccatgcctggctaatttttaggtttttaatagagacggggtttcaccatgttggccaggctggtctagaactcctgacctcaggtgatccacccccgcctcggctttccaaagtgctgggattacaggcgtgagccactgcgcctggaccattgcccattttttaatttggttgtttgtgtttttgatgttgagttttaggagatccttattatatattcttgatattagacctttatccaatatatgatttgcaaatattttctctcatttaaacccaatcaaaagtttatctttttagtttcttgataatgtcctctgatgaacgaaagtttttaattttgacgaagtcagatttatctgttttttctttcattgtcttgtgctttttgtgtcagatcttaagaattcattgccaaatccaaggtcatgaggatttgcccctatgttttcttctaagagatttatggttttagctcttatatttaggtcattgatatattttcagttaatttttgtgtttggtatgagttaggagtccaacgtcattcttttgcttgtggaaatccagttgtcccagcaccatttgttgagcagggtcttatttctccattgaatggacttggcacaaatcagttggtcatagatgtatcagtttattttggtatgctcagttttatgctgttggtctatatgtctatgctttttcagtaccatattattttgattactgtagcattgtagtaagttctgaagtcagaaagtgtgagtgttccaacttttttttttcttgattgttttggcttttcagtgtcccttgcagctctgtgaatttgagggtcagcatttccgtttctgcaagaaaagattttggaattttgatagagattgcatcgaatctgtacattgctctaggtagtattgatgtcaacaatattaagtcttcctactcaataactcagaatggcttttaatttattttggttattttaaattttctgcagcagcgtattgtagttttcagggtaaaactcacctccttggttaaatctctttctaggtactcttttagatgttattgttcttttcaatgttaaatggaattgcattcctaatttctttttcagattattcattgcatatgcatagaaacacaactacttaaattttttttttaagttatttatttttttgagacagggtctcgccctgtcacccagactggagtgcagtggcgtgatcacagctaactgtagcctcaacttcctgggctccagcaatcttcccatctcagcctcctgagtagttgggactacaggtgcatgccaccacaccacacatcacactggctaatttttgtatttttggtaagacagggttttgccttgttggccaggatggtcttgaactcctctgctcaagtgatccaccagcctcagcctcccaaagtgctgggattatgggcgtgagctaccatgcccggccgcaccagtctttcttttccagaatctatataacctgatcttctggacttcaaaatccttgttgtttcccctcacctataacccttttaaaacgaagcggaattcttcttttttttttttttttttttttttttgagatggagtcttgctctgttgcccaggctggagtgcagtagtatgatcacggctctctacagccttggcctcctgggttttagtgatcctcctacctcaacctagtctagctgagtagctaggactacaagtgtgtaccaccacacccacctaattttttttcccctttggtaaagatgaactctcattatgttgcccacactggtcttgaactcgtaggctcaagctatcctcctgccttagcctcccaaagtgctgggtttacaggtatgagctaccacaccgggccaaagtggcactttttttttttttttttttttttgagacagagtctcgcactgtcacccgggctggaatgcaatggcatgatctcagctcactgcaacctctgcctcccaggttcaagtgattctcctgcctcagcctcccgagtagctgggattatggggcctgccaccacgcctggctaatttttgcatttttagtagagatggggtttctccatgttggtcaggctggtctcgaactcctgacctagtgatccgcccacctcagcctcccaaagtgctgggattacaggcatgagccactgagcctggcctaaagtagtactttttaattaaaaaaagaatcaaaatgaaactcaatacataggcaggtcataaaaaatgattttttcttttgctcaagcagtgagtagcattaagctgttccctcaccttcacctggtgttacctggagtacatttgggaagtcctcaactttgaaaaccctttttccctatatactgctggtaattaaaagcaaaaaattattctgaagtttgtcaagcattttatgaaggagacattgctagtttgttttctgtttttttttaagtatattttaaacatttccttatactcctaatataaatgttgctttgtcagaaatttcaacatttggaacaaaatttttatagtttctaaataaatataattcaaaccaggtatagttaggatgggtgcctataatgctgtcaggatacgtataatgctatgcataaagtttatttctgtatcatctagttgttcaacagttgatctaggcataataatgaaactacttttgcagtttgatatagtttggatatttgacccctccaaatttcatgttgaaatttgtccacctccaatctcacgtctcagtgttagacagtgggggcctggtgggaagtgtttggggtcatggggcaggtccctcatgaatgggttggtaccatccttgtcccagaggtaatgtgtgaattcctgctctattcgttcatgtgagaattggttgttcagaagagtgtgacacacttcccctctctcttgccatgtgacacatttgctccccctttggctctgccatgattggaaacctcctgaggtccttaccagaagcagatgctagcggcacgcttcttgtacagcctgcagaactgttagccaagtaaaactctttactttataaattacccagcctcaggtatttctttatagcaatgcaaatagactaaaagacagttaaacacatttttgtttttgtttttctccatgtctccttgctgtattttattatttttctgagacaaggtctcactctgttgcccaagctggagtgcagtggtgcagtctcggcacactgcaacctccccctcctgggcttaagtgatcctccctcctcagcctctcaagtagctaggactaaaggtgtgtaccaccacacccagctatttttctttaaattttttgtagagacagggtctcactgtgttgcctaggctggtcttgaactcttagtctcaaggaatcctcctgccttggcttcccaaactgcttggatcacaggtatgagtcaccacgcctggcctgctcttttgtttctatatgttagactttttgcagatttccatatataagcgatgtcatcagtattttctttcagtgtctggcttattttactgagtgtaatgtcctctgggtttattatccgtgtagttgcaaatggcagtatctcattttttaaggctgaatgatattccattgtgtgtatctgtgtgtatcacaatttcttttttcattcatctgtcagttgacacattgtttccataacttggctattgtgactaatactgcaatgaacacagtagcacagatatctctaccaggtgctgatttcatttcctttgagtacatacccagctaggtcatatggtagttctatttttaagtttttgaggaacctccattactgttttccataatggctgtgccaatttatattcccatccacagtctacaagggtttccttttctccacaccctcaccaacacttgttatctcttaccaaaagagtcattctaacaggtgtgagatgatatctcattgtggttttgatttgcatttctctgatgattagtgatgttgagtaccttttcatatacctgtttgtcattagtatgtcttcttcagaaaaaaacagtcttggccgggcacagtggctcatgcctgtaatcccagcactttgggagggcgaggcaggtggatcacttgaggtcaggagtttgagaccagcctggccaaaatggggaaaccccatctctactaaaaattagcagggcccgtaatcccggctactccagaggctgaggcaggagcatcacttgaactggggaggtggaggttgcagtgagtcaagatcgtgccacttcactccagcctgggcacagagtgagactctgtctccaaaacaataaaaaaagatatatggtttgtaaacattttctcccagtctgtagggtgccttttcattgtgttgattgtttcctttgctgtgcagaagctttttagtttgatgtagtccaagttgtttatttttgcttttgttgcctgggcttttggtatgccatacaaaaaaatatcaaggaactagtattaacctatacaattcagtagtttttagtatatttacagagctgtgcaactattgcacaatcaattataaatcattttcatcacctcagaaagaactccataccctttagccatcatcctccaaacctccagccccaggtaaccattaatctattttctgtctttatggatttgtctgttctggacatttcatataaagggactcataatatgtagtctttcatgactgccttttttcacttagcaaaatgttttcaaggttcatccatattttagcatgtatcagtacttcatttctacgactaaatagtattgtgttgcattgatgtatactacattttgcttatacattcatcaatagatgaacatttgggttgtttctacctattggctattaagaatagctgcatattttcattcccactagcagtgtggaaggctttcagtttctatattttcaccaacacttgtcttttttattctagccatcttagtggatatgaggtgatatctcattgtggttttcatttgtattaccctaataattgatgatgaacattttttcatgtgcatattgaacatttgtagatcttgtttgaagaaatatctgttcagatcctttgcccattttaaaattgggttgtctttttactgttgagttgtaagaatattttttttttgaggtgtggtctcgctttgttgccctggctggagtgcagtggcacaatcttggctcactgcaacctccaccttccgggttcaggcaattctcctgcctcagcctcctgagtagctgggaccacaggcgcctgccaccacacctgggtaattttttgtatttttagtagagatggggtttcaccgtattagacaggatggccttgatctcctaacttcgtgatctgcctgcctcggcctcccaaagtgctgggattacaggcgtgagccaccgcacccggccaaattttttatatattctgaatgtaagttccttatcaaatatatgaatcgcaagtattttttcccattatgtgaagtgaagtcttcttatagatatagtattgtgattaataacaaatagttaatttaggagagtagagtacaagctgtagcagtgggagttttgtcagcacacgcttttagaaggtttcttccactgtatgaccgtgtattgatgaaaggaatgtgcctgaaactgtaaccaaaggagacatgcttccagaaaaatctcaaggaaaagtattgtaagcaacagtagatgttggatcagactctaaagtaaagggtggagagttaaccagttaacatgtaagttggagatagagttctcccagaatatgtaggcaccaaagtagttctagacaacaaggattacttctcatttaaagatggtgacattcttgcaaactatatagactgaaataaatcatattgaaatggcatcaacatgaagctgcccattctgtaattctgaaatcttctatcatgtaaaataattttcatgtctttcttttgtaataaactaatgatatctaaactaatgatgcccagtgtttctaaaatttagttttgctgtattgatataaacatttcctaataaaaatatgtaaatttaaaaatagttaatttaaagcttatatagattccaagaaataataatgttcagcacttaaactgttttaatcaagggttaagaattaacttcactgggcaaagtggctcacacctgtaatcccagcactttgggaggccaaggcacgtggattgcttgagctcaggagttcaagacatgcctgggcaacatggtgaaactccatccctaccaaaaatgcaaaaaattagctgggcatgatggtgcatgcctgtaatcccagctactggggaggctgggatgggagaatcacttgagcccaagcctgggaggcagaggttgcaatgagctgagatggcgctgctgtactccagcctgggtgacagagcgagaccccatctcaataaaaaaaaaaaaagaaaaaaaagaggtcttgtgctttagatcagtggttgccaaactttatcaagcatcagaatcacttggacagcttgttaaaacattctttgctagcctgcattcccagagtttctgaatcagaaagtcttgagtggggcatccaggaatttacatttttaacagaacatgttgatgctttggttcatggaccgcttccttaatggtccctataactgtcataaagaattaggtatatgctgatatgtaggaaattctacctgataaaaatgacaaaattttaatttatagctcatatttgcatctcttcaatttgcatatatttgtatatataaagtgttatatagtcatggttggtgcctaaattgttggatttcttttaaaactcttgccatacataaagtctacttttttccgtaggcttgtctcctgtcagatcctcatgaatttccttgagtttaagaaaatagtaaagaatgttacagcttaaagagattttatagatcatccaactcttcccatccctcatagagattggttaaatctcttaatccaagattgtgtagctaattattggtaggtataggtagctcttagggattttatttctggcaattctttatattgcttgaagaaaagtaaatatgtatttcagccaagattttttttttttttgagatggagtctcgctctgttgcccaggctgtagtgcagtggcgcgatctcggctcactgcaagctccacctcctgggtttacaccattctcctgtctcagcctcccgagtagctgggactacaggcgcccgccaccacatccggctaatttttttgtatttttagtagagacggggtttcaccatgttagccaagatggtctcgatctcctgacctcgtgatccgcctgccttggcctcccaaagtgctgggattacaggcgtggaccaccgtgcccggccagccaagatatttttagtgactttcaaatacagatctctttggtaacattttattaggtaataaataagcttaagatatttgaaatgacttgattctgtgctaaatgctatttgattattttacaccaaagtaatacatgaatatagcctgataaataatttttaaaaagtatgtctcataggcatctcttttattctggtcttaaaacatatgagaaagaagatagttgaagagtatgtgctagtgagatggggcacagatttccatcaataaacttatgtaaaattgagtagaatgaacaggttgtttcctagagatgtcttaaacctattagaaagtttagagggaatgatgaggaagggatatgtaatgtaaaaatataaggctatcctcttccttcttttaaaaactttatctctagccaagtctgcttaaggagaaagtcttgctttcccctgtctaggttatagcttgtagatgttcattttaatacttactgaattattaaaatctttttttccttagcccttcaccttagtagtcaatcaaggtttgtttttctaaattagatgatctgcgttgtttcttttataggaggaatttgggtagccaaatagctccacataaacatctagcttctcaggtatcaactgtaaaatgcatagaaaatgctattaaacactaaaaagagattgaaagcaccgttgactgacttgtgaaattatttcctaattgcctttggtcagcacatacctagacttctacacacccaacagtctatctcaaccattctgtaatgttactaaaataattttcctgcttcattgttaaaactctaatgattcctctctgtcctctttgcacatggctctatcctatataaatttcagaatatgtggaactgaaataatttttatctcagaagcaagtactcctattaaggcttggtgtgttttcatcattttaattttgactagaatagagaactcattagagtaggaaacgcacttctgccccagattcaggagaatgaggacttatttcagtgtctcaaacacaaactttcgaatgtagcctgcagaactctggtacttatgagccacattttgcctggctgttagttctcttgataacctaggaaatatgccttaccttagcttttcctaactgaatctctcttctctgcactaagacttttcccctagcttaatcatagtgtgtcttcctacaggaagccttttcaggttgacctgtacccatctaccagtcctcaagtagtttctcaaactggagtctctagatattctcaggagtctgagaattctctgagatataaacagttttgtggttctctgtgtagatgcaaacaccatacatctggtgtctactggagggtggagttgaaaatgatcattgtgaaacaatgccagaatctttctgaaacttttgcaagcagcaaatttgaacagctggtttgtaactgaggtttttaaacttcattcagtctaactgtatgaagtgccttacgtggctgttatggtagctgagaggaaggatgaactggagactgaggacaccacccccattttaacctggttggccctacttttatttgtattatatattgtggctcagtgaagatttctcttgggagcttctctccatctaaaagttttgaaaaccactggactaacaggtttatggcttgtggttttggtaggggaatagggaaaagtagcaatgtatccttataaagaggctgtatgtggctaagttatttgtaaatagatttttcatagttaaccaaacaaagagtccttagaaatttttactgctaattgggaatgttattccagggttatcttagattggtagatagtagttctcaagtttttcggtctcagaaccccctcacagtctttatttatttatttatttatttatttgagacggagtcttgctctgtcgtccaggctggagtgcagtggtacagtctcggctcactgcagcctgcgcctcccagcctcccgggttcaagcagttctctgcctcagcctcctgagtagctgggattacaggctctcgccaccacacctggctaatttttgtatatttagtagagacggggtttcaccatcttggtcaggctggtcttgaactcctgacctcgtgatccacctgcctcggcctcccaaagagctgggattacaggcgtgagctactgcacccggcccccttcacactcttaaaaaattatcgaggctccccaaaagtactgtttgtat

SEQ ID NO: 6388 - DNA, 5165 bp, Homo sapiens
attacattcacaatgttgtgcaacgattactaccatctattctttcccaatccctagtaacttctaatctactttctgtctctaccaatttacctcttctagatatttaatgtaagtggaataataaaatatttgtatttttgtgtctgactactttcatttagtataatattttcaaggttcatctgtgttgcagtatgtaccagaatttcattcctttttaatgctcagtaatactctattcaggtggacattttgcaccttttggctaaactggatactgcagtgaacattggcatacaattattggtttaagtccctatttgcaattcatctgggtatgttccttggaatggaattgctgggttgtttttgtaattcgctgtggttagcttcttcaggaactgccatattgtttttcacagaacctgcaatattttacattcctaccagcaatgtacacatgtcaatttctctacctccttgcccacacttgctattttctttcttttcttatcccatcttagttggtgtccttttggtttgtatttctctaaccagtaatgatattaagcatcttttcatgtgcttattggccatttgtatgtctttatagaaatgtctattcaaattcattgcccctttttaaattagttatttatttatttatttgagatgaagtcttgctgttgtcccccaggctggagtgtgatggtgtgatctaggctcactgcaacctctgcctcctgggttcaagcaattctcctgcctcggccccatgagtagctgggattacaggcacctaccaccatgcctggctaatttttaggtttttaatagagacggggtttcaccatgttggccaggctggtctagaactcctgacctcaggtgatccacccccgcctcggctttccaaagtgctgggattacaggcgtgagccactgcgcctggaccattgcccattttttaatttggttgtttgtgtttttgatgttgagttttaggagatccttattatatattcttgatattagacctttatccaatatatgatttgcaaatattttctctcatttaaacccaatcaaaagtttatctttttagtttcttgataatgtcctctgatgaacgaaagtttttaattttgacgaagtcagatttatctgttttttctttcattgtcttgtgctttttgtgtcagatcttaagaattcattgccaaatccaaggtcatgaggatttgcccctatgttttcttctaagagatttatggttttagctcttatatttaggtcattgatatattttcagttaatttttgtgtttggtatgagttaggagtccaacgtcattcttttgcttgtggaaatccagttgtcccagcaccatttgttgagcagggtcttatttctccattgaatggacttggcacaaatcagttggtcatagatgtatcagtttattttggtatgctcagttttatgctgttggtctatatgtctatgctttttcagtaccatattattttgattactgtagcattgtagtaagttctgaagtcagaaagtgtgagtgttccaacttttttttttcttgattgttttggcttttcagtgtcccttgcagctctgtgaatttgagggtcagcatttccgtttctgcaagaaaagattttggaattttgatagagattgcatcgaatctgtacattgctctaggtagtattgatgtcaacaatattaagtcttcctactcaataactcagaatggcttttaatttattttggttattttaaattttctgcagcagcgtattgtagttttcagggtaaaactcacctccttggttaaatctctttctaggtactcttttagatgttattgttcttttcaatgttaaatggaattgcattcctaatttctttttcagattattcattgcatatgcatagaaacacaactacttaaattttttttttaagttatttatttttttgagacagggtctcgccctgtcacccagactggagtgcagtggcgtgatcacagctaactgtagcctcaacttcctgggctccagcaatcttcccatctcagcctcctgagtagttgggactacaggtgcatgccaccacaccacacatcacactggctaatttttgtatttttggtaagacagggttttgccttgttggccaggatggtcttgaactcctctgctcaagtgatccaccagcctcagcctcccaaagtgctgggattatgggcgtgagctaccatgcccggccgcaccagtctttcttttccagaatctatataacctgatcttctggacttcaaaatccttgttgtttcccctcacctataacccttttaaaacgaagcggaattcttctttttttttttttttttttttttttgagatggagtcttgctctgttgcccaggctggagtgcagtagtatgatcacggctctctacagccttggcctcctgggttttagtgatcctcctacctcaacctagtctagctgagtagctaggactacaagtgtgtaccaccacacccacctaattttttttcccctttggtaaagatgaactctcattatgttgcccacactggtcttgaactcgtaggctcaagctatcctcctgccttagcctcccaaagtgctgggtttacaggtatgagctaccacaccgggacaaagtggcacttttttttttttttttttttttttttgagacagagtctcgcactgtcacccgggctggaatgcaatggcatgatctcagctcactgcaacctctgcctcccaggttcaagtgattctcctgcctcagcctcccgagtagctgggattatggggcctgccaccacgcctggctaatttttgcatttttagtagagatggggtttctccatgttggtcaggctggtctcgaactcctgacctagtgatccgcccacctcagcctcccaaagtgctgggattacaggcatgagccactgagcctggcctaaagtagtactttttaattaaaaaaagaatcaaaatgaaactcaatacataggcaggtcataaaaaatgattttttcttttgctcaagcagtgagtagcattaagctgttccctcaccttcacctggtgttacctggagtacatttgggaagtcctcaactttgaaaaccctttttccctatatactgctggtaattaaaagcaaaaaattattctgaagtttgtcaagcattttatggaggagacattgctagtttgttttctgtttttttttaagtatattttaaacatttccttatactcctaatataaatgttgctttgtcagaaatttcaacatttggaacaaaatttttatagtttctaaataaatataattcaaaccaggtatagttaggatgggtgcctataatgctgtcaggatacatataatgctatgcataaagtttatttctgtatcatctagttgttcaacagttgatctaggcataataatgaaactacttttgcagtttgatatagtttggatatttgacccctccaaatttcatgttgaaatttgtccacctccaatctcacgtctcagtgttagacagtgggggcctggtgggaagtgttcggggtcatggggcaggtccctcatgaatgggttggtaccatccttgtcccagaggtaatgtgtgaattcctgctctattcgttcatgtgagaattggttgttcagaagagtgtgacacacttcccctctctcttgccatgtgacacatttgctccccctttggctctgccatgattggaaacctcctgaggtccttaccagaagcagatgctagcggcacgcttcttgtacagcctgcagaactgttagccaagtaaaactctttactttataaattacccagcctcaggtatttctttatagcaatgcaaatagactaaaagacagttaaacacatttttgtttttgtttttctccatgtctccttgctgtattttattatttttttgagacaaggtctcactctgttgcccaagctggagtgcagtggtgcagtctcggctcactgcaacctccccctcctgggcttaagtgatcctccctcctcagcctctcaagtagctaggactaaaggtgtgtaccaccacacccagctatttttctttaaattttttgtagagacagggtctcactgtgttgcctaggctggtcttgaactcttagtctcaaggaatcctcctgccttggcttcccaaactgcttggatcacaggtatgagtcaccacgcctggcctgctcttttgtttctatatgttagactttttgcagatttccatatataagcgatgtcatcagtattttctttcagtgtctggcttattttactgagtgtaatgtcctctgggtttattatccgtgtagttgcaaatggcagtatctcattttttaaggctgaatgatattccattgtgtgtatctgtgtgtatcacaatttcttttttcattcatctgtcagttgacacattgtttccataacttggctattgtgactaatactgcaatgaacacagtagcacagatatctctaccaggtgctgatttcatttcctttgagtacatacccagctaggtcatatggtagttctatttttaagtttttgaggaacctccattactgttttccataatggctgtgccaatttatattcccatccacagtctacaagggtttccttttctccacaccctcaccaacacttgttatctcttaccaaaagagtcattctaacaggtgtgagatgatatctcattgtggttttgatttgcatttctctgatgattaatgatgttgagtaccttttcatatacctgtttgtcattagtatgtcttcttcagaaaaaaacagtcttggccgggcacagtggctcatgcctgtaatcccagcactttgggagggcgaggcaggtggatcacttgaggtcaggagtttgagaccagcctggccaaaatggggaaaccccatctctactaaaaattagcagggcccgtaatcccggctactccagaggctgaggcaggagcatcacttgaactggggaggtggaggttgcagtgagtcgagatcgtgccacttcac

SEQ ID NO: 6389 - DNA, 1408 bp, Homo sapiens
ttccaaggatttgtggtagcttggaggccaagaggaactcagcatttttggagttctgagtagctgaagtctggagtgggggccagatcgtgtgaatcaaattattgcattttatcttgtcagcagtggggagcaactgcagggttttaagcagggaactgacacacatgaattttgaaggactgctgtagactgtatggagcatggattaaatgggaactgaactgtaggcaggaaagccagttgaggagattttgcagtagttcatggaagggatgataggtggctttgattagagcagtagctgtggggatggagaaaagtggacaaattaattagagagatttagaggcagattggtgattgaattgagcagggcagtgagaggattcccaggtttctgactgaggtgtctaagtggggatggtgatgaaagggggaatattgggagaggatcacgtttggagggagactaaggcaccatcagtattctagagattagagggctgtgagagaattgtgataggagggatttactctttggcagatatccaagcgtggaaggcctgtttgatggactgtccttgataatcacaggcaggtatagcctcaaggctttgaggatggctctaaagtacatttcaaacaccacctcctccacaaagcctttctactacaactccatcccctgagtagagtgaatctcttcatattcttagtacctacagaattttggaatagtcatgtttagtatattttgttttagcaaatagggaagcaaatactatattttagaaatagttaatgtaaaatggctaggttttttttttttttttttctttttagtgtgatgcttcaaggggagcctttgtcattgtattagtccaggacctcttagaagcagatgccaagatgggattaagcacataagaaatttgttaggtgaaatgcttgtgaggggggaaaaggaaggagacagggagagttgtcagactgatgaaagtctgactccaagttaaaagagaggtaaggaaggaaggaactttgagtgaaagtgtcttagactgtagtgcaatactaaggaaagtttgcaaggcctcagaaagtctttgagtgaaaggtgcctgttggaaaaatgatgtgtctcccgggaacaggcctgccatgctcagtcagtgactgggaggagctagtgagaaactggcctcgacacaaacacagtgatggatttgagtgcagctgctgcagcactcagtctattatccttcctgtagtcagagatctgagaggctcgttctcatgatcaattagggtcatctctggctatgaattgcctaattcgggataaagtacagtttttccccatttcaggtgggtaatttgttcccaaaaaacccctgtatttaaa

SEQ ID NO: 6390 - DNA, 175 bp, Homo sapiens
ctcatttcttaacaaatagattagatattgtgttaaataatcttaatttagtgaagacctaccagaatatatttgttgagtgtgaaaattatctctgaacagaactgcttatatacttggcaatggcattgtaatcagaaagactcaacacctttatgtcggactctgaccctct

SEQ ID NO: 6391 - DNA, 356 bp, Homo sapiens
ataccctttagccatcatcctccaaacctccagccccaggtaaccattaatctattttctgtctttatggatttgtctgttctggacatttcatataaatggactcataatatgtagtctttcatgactgccttttttcacttagcaaaatgttttcaaggttcatccatattttagcatgtatcagtacttcatttctacgactaaatagtattgtgttgcattgatgtatactacattttgcttatacattcatcaatagatgaacatttgggttgtttctacctattggctattaagaatagctgcatattttcattcccactagcagtgtggaaggctttcagtttctatat

SEQ ID NO: 6392 - DNA, 345 bp, Homo sapiens
cagatgttttgtttttttttttgtttttttttttgagacggagtctcgctctgtcgcccaggctggagtgcagtggcgggatctcggctcactgcaagctccgcctcccgggttcacgccattctcctgcctcagcctcccaagtagctgggacgacaggcgcccgccactacgcccggctaatttttttgtatttttagtagagacggggtttcaccgttttagccgggatggtctcgatctcctgacctcgtgatccgcccgcctcggcctcccaaagtgctgggattacaggcgtgagccaccgcgcccggccactcagatgttatttaagaaagttttttt

SEQ ID NO: 6393 - DNA, 570 bp, Homo sapiens
atttcctgcatgaagaattggtatcttcaggatgctgtagcttttatcttgtataattgccttaaaatttgcatctctgccctcagaatgaatccagtttgactgggttggtaaaccaaagacaactgcagtgctcagggggatgggtttgggtgtacatgtgggagtggacgccttagagaagtgttgaggttccaagcccttttcctctggcatgtaaatatctctgacttcccctccctctcccgctcctggtgatttgaggcaaaacccccagtccccagctctccaggcagaaggggctgggggcctgcctgtctcctttgggaaacttcctctctcctactaaaccctcaggccctttcctaagtagatacaaatcattgagtttttccgtttctagtttgttaactttgatttgcatgataccatttggatcaaagcactgaaagaaaaattaaccaagctccctagtattttcacgttcttatttactttttccctgttcattcaaactcaaaggcagctaaggtgaaagagatgagagagatcctgaagcagggatgaggg

SEQ ID NO: 6394 - DNA, 570 bp, Homo sapiens; identical to SEQ ID NO: 6393

SEQ ID NO: 6395 - DNA, 5966 bp, Homo sapiens
attccagcactttgggaggccgaggcaggcagatcacgaggtcaggagatcgagaccatcctggctaacacggtgaaaccccgtgtctactaaaaatacaaaaaattagctgggtgtggtggcacacgcctgtagtcccaggtactcgggaggctgaggcaggaggattgcttgaacccaggaggcagaagctgcagtgagccaagatagtgccactgcactccagcctgggcaacagagcgagactccgtctcaaaaaaaacaacaacaaaaaagaaaatggggactaagacacagaagaatatagctgtggggagtagcttcagggaactgaaataggtccagaggaagctcgaagtggccattctgaagtttatgcaaactgctggccaggagaggcgaaaaaaaaaaaaatagagaagggacatgacagtggggaaggggagataggaggggatttgttactctcactcgaggctgcaagttgcctctccacaattaatctcaccttttagtagagaacccaaattttcaggcctggcgcggtagctcacacctgcaatcccagcactttgggaggccgaggcaggtggatcacttgaggtcatgagctcaagaccagcttggccaacatggcgaaaccctgtctctactaaaatacaaaaattggccgggtgtggtggcgcatgctataatcccagctactcaggaggccaaggcaggagaattgcttgaacccaggaggcggaggttgcagtcagctgagattatgccactgcactccagcctgggtgacagagcaaggctcagtctaaaaagaaaaaaaaaaaatttagatgggcttaatgcttcccagtaagactgcgtgtcctaacctccctggcagctaagtgtgaccttgaagctaagtattaactaaggacttttaggaggtttctttaaagggaggtggaatagggctgggcctctttgtctggctacttagaaataaaatcaagggtgagaggtaaaatgggtaataggaggcagcgtccttcccccacgcaccacaaccctgtgctggagctcccaagagcacatggcatagcagtgcattctgccattccgctgtgtaccaccctctgtcctgtcttccctttccctttctcttcagttcttcattctgtttccttttatttcttttccttcttgtgtgtctttacctaccctgcataaaaatgctggttaggacctttgggttcctcattctggttacctgttggagtgagtctgtatcctgagaaattcatggagatcaccatgattagaagtcatggctgctgagccaagcatcatagacttgaggcctagcagcttccaggggctccaggaccatcaggtgggaaggccctgggggggtccaggacagctccagcctagctccacaggggcagaagtgtaccagtgcctacttgctgctccaccacaggctaggccacttgtctcccaccacgtctctgggtttacgcgtccctcgacttttgctgcccataccaaaggctcagttctgagcctcaagttccatttcctctcacgagaggatgtgacgctctcattcagccactctgccctgtttgggagctttttcccacagtcaagccggtctattgcccatccttggatcatgtggtaggagctgatgttttaccacccgcctctgtccatcttcttgtggttacagtgccctggttttccacaggaaagccatgcctccctcacccttattttgtatggtccaaatagtctcatatgatccaccatcctcagtgtctagtaatgcagagatgggtccactccccaatccaagccaatgagatgcttaagaaaggcgcacttcctttatccctgaacttggttgtagtgatgttaaccagggtccagcagtcatgctgtcagcaccagagacaacctacctacagatgcagccaatgtggagggacaggagccaataggtgaaagagaggtggggcctctgtggcactgtttgagcctccacagccagctaggcattaccgctaggtaagtcaataggcctcttttctttgctcaaatcaggttaagagggttttccatcacctgtaactgaaaatgtcctaactggtccaggtcaggtggccaccctggtccaatcagcagtggctggagtagcaggccagatgtcacttgcagaacaaagtgtgctcaagtcagcccttgaaatggggctgtgggacgggcagtgtgaagctgagtctttccactataaataaggctgtgcaaggccaagttaatagatgtttggagttcataaatcatggtggctgtggttatcaaattaaaaaaaaaaaatcaaaccaaaaccaccagtagcctcaaaaagcacatgattggaaatgtgagaggctgtcaggagccctggcccgtggcgaaccttgctggaagtgctgtgaccatgtgtgtgtttgaacctggacaaaccactgatgtagacatctccccagatccattcctcaaaactccctgaagtgattagatattgaatcccatgcctaagacagagtagcagtgtctgtttgctgaatgagattcttcccccaaatatgagtttggatttgtgtccttgcccccatctcagttcaaattgtaatcccagtgttggaggaggggcttggtgggaggtgattagatcattgggggcggacttccctcttgctgttgttgtgatagtgagtgagttctcatgagatctggttgtttaaaagtgtgcagcacctcccccttctctctgtcttcctcctctggccacgtaagacggggcagcttccccttcaccttccatcatgattgttaagtttccagaggcctccccagccatgcttcctgtacagcctgtggaactgtgaatcagttaaagcctcttttctttataaattacccaggttcaggtagttctttatagcaatgcaagaacaggctaatacaccacccttctcaaagactgccacttctatattctgtattttaggagtcagcactatttgaggaattgaaatgaaacctaaggtaaaataaagctagcaaacaaaggagagatttgtgtagacagcctagacaagtttacattccgcattaaacacttggatttatttaacagtttcatttatgactttacagttgtttaataaatattacggcattccagctaggaagatagtatcacccctttaaacatgagaaaatcaaatgaatggcttaaggcaaaaaattcttttattagtacccaaaagtgtagactttgttattactttaaatttagaaaagtacattttcaatagttagtggctagcaaaactggtattattcatctttttctttttttttttttttttgagacggagtcacgctctgtcgcccaggctggagtgtggtggcgccatcttggctcactgcaagctccgcctcctgggttcataccattctcctgcttcagcctcccgagtagctgggactacaggcgcccaccaccacgcccggctaatttttttgtatttttagtagagacggggtttcaccatgttagccaggatggtctcaatctcctgacctcgtgatccacccacctcggactcccaaagtgctgggattacaggcgtgagccaccacacccagccccaaaactgatatttttgtgtgaactaataaataatttagttaggtttatttagaaaataaactttaaggatttagggatttgcaaacttcagtttgaaataggtttagacagctaaagatctttggattttgtaaagagaaaattaattgaagaaagaatttaaggtaaatatgatttatgactattctgttttagatgtgaagcggtaaacaatattgggccacagattgggagtagagtgggggaaggaagacaggaagacagcagtgaggtaaaggagagtttgtaagtcattcataaccaacactacccatttagcatgatagttatgaatataccaaggccttttagaccactctgaaatgcacattgaccctctcttttaaatcatgaatttctgtttttttgtttgtttgtttgttctttgttttagctggaatctgcctctgtcacccaggctggagtgcagtggcgcaatctcagctcactgcaacctccaccctcccaggttcaagcagttctcctgcctttgcctcccgagtagctgggagtacaggtgcccgccaccacgcctggctaatttttgtatttttgatagagacgcatttcaccatgtttcccacgctcccctcaaactcccgacctcaggtgatccacccgccttggcttcccacagtgctgggattacaggcatgacccaccacacctgacctaaatcatgaatttctcccttaatttgtgcaaaatttagtgtacctggatttccttctgtgttcttctctatccttaagatttttcagttcagaaatattcttgtttgggatagatattaaaagatgaaactggaagccaggcgcggtggctcatgcctgtaatcccagcactttgggaggctgaggcaggcggatcatctgagttcaggagtttgagaccagcctggccaacatggggaaaccctgtctctacgaaaaatacaaaattagccaggcatgttggcgcatgcctgtaatcccagctactttggaggctgaggcaggagagtcccttgaacccgggaggcggaggttgcaatgagctgagattacgccattgtactccagcctgggtaacgagagcgaaactccatctaaaaaaaaaaaaaaagacaaaactggtaattgggaggatgaaaaggaagtaaaacaggagtaagaactttgcattgcggccccagggggttgtggtggagggaaggaagcggaagcaggtacctgagaccataggactgtacttccatgggacatgtatgatccaggtggatacaagccaggtcttgatgcactgctgtgtttaaggtgtgctgtgagctaagcctctgcagcatagtttatgctcgtcctacccccttgtaaaaattatcttttcaactcgcccattgtcacctctatccttcattcagcctttgcttatgctactcctccacttggaacacgctttccccaatctttgcctagtcattcatcctgttagatctgcctgcatctctgccaagaatccccttaacttggcctttttcaggagtgagtttgaggagaaagcttaggaaataataagccaaatttttgtgtcttaaacatccagttaactctggatagtgacagccaacaacatggagtcataaaagcaaaggtaaaaacttgaataagcaacaagacattgaagaaaatatctcgacatgatcagcaacaggcaacatcagtttcttagcatctcttaaagactgatagaggagagacaatttcttttctagcaaacaagagatggtgaatggaaattagcctcttctaatgtaagctgtgtagactaaacactgtaagagcctaatgttcagcgtgcacatggtcatgaatccagcttttagtacaatgccaagcacagtgtgaactcagtacatatttgttgcattaataaatattagtcctatttgctgttggattaaaagcaagtatagaagtcaggcgctgtggctcatgcctataatcctagcactttgggaggctgaggctagtggatcacctaaggtcaggagttccagaccagcctggccaacatggtgaaatcccgtctctactaaaaatacaaaaaattagctgggcatggtggcaggtgcctgtaatctcagctacttgggaggctgaggcaggagaatcacttgaacccgggaggcggaggttgcagtgagccgagatcacaccattgcactccagcctggacaacaagagcgaaactctgtctc

SEQ ID NO: 6396 - DNA, 5932 bp, Homo sapiens
cgaggtcaggagatcgagaccatcctggctaacacggtgaaaccccgtgtctactaaaaatacaaaaaattagctgggtgtggtggcacacgcctgtagtcccaggtactcgggaggctgaggcaggagaattgcttgaacccaggaggcagaagctgcagtgagccaagatagtgccactgcactccagcctgggcaacagagcgagactccgtctcaaaaaaaacaacaacaaaaaagaaaatggggactaagacacagaagaatatagctgtggggagtagcttcagggaactgaaataggtccagaggaagctcgaagtggccattctgaagtttatgcaaactgctggccaggagaggcgaaaaaaaaaaaaatagagaagggacatgacagtggggaaggggagataggaggggatttgttactctcactcgaggctgcaagttgcctctccacaattaatctcaccttttagtagagaacccaaattttcaggcctggcgcggtagctcacacctgcaatcccagcactttgggaggccgaggcaggtggatcacttgaggtcatgagctcaagaccagcttggccaacatggcgaaaccctgtctctactaaaatacaaaaattggccgggtgtggtggcgcatgcctataatcccagctactcaggaggccaaggcaggagaattgcttgaacccaggaggcggaggttgcagtcagctgagattatgccactgcactccagcctgggtgacagagcaaggctcagtctaaaaagaaaaaaaaaaaatttagatgggcttaatgcttcccagtaagactgcgtgtcctaacctccctggcagctaagtgtgaccttgaagctaagtattaactaaggacttttaggaggtttctttaaagggaggtggaatagggctgggcctctttgtctggctacttagaaataaaatcaagggtgagaggtaaaatgggtaataggaggcagcgtccttcccccacgcaccacaaccctgtgctggagctcccaagagcacatggcatagcagtgcattctgccattccgctgtgtaccaccctctgtcctgtcttccctttccctttctcttcagttcttcattctgtttccttttatttcttttccttcttgtgtgtctttacctaccctgcataaaaatgctggttaggacctttgggttcctcattctggttacctgttggagtgagtctgtatcctgagaaattcatggagatcaccatgattagaagtcatggctgctgagccaagcatcatagacttgaggcctagcagcttccaggggctccaggaccatcaggtgggaaggccctgggggggtccaggacagctccagcctagctccacaggggcagaagtgtaccagtgcctacttgctgctccaccacaggctaggccacttgtctcccaccacgtctctgggtttacgcgtccctcgacttttgctgcccataccaaaggctcagttctgagcctcaagttccatttcctctcacgagaggatgtgacgctctcattcagccactctgccctgtttgggagctttttcccacagtcaagccggtctattgcccatccttggatcatgtggtaggagctgatgtttttaccacccgcctctgtccatcttcttgtggttacagtgccctggttttccacaggaaagccatgcctccctcacccttattttgtatggtccaaatagtctcatatggatccaccatcctcagtgtctagtaatgcagagatgggtccactccccaatccaagccaatgagatgcttaagaaaggcgcacttcctttatccctgaacttggttgtagtgatgttaaccagggtccagcagtcatgctgtcagcaccagagacaacctacctacagatgcagccaatgtggagggacaggagccaataggtgaaagagaggtggggcctctgtggcactgtttgagcctccacagccagctaggcattaccgctaggtaagtcaataggcctcttttctttgctcaaatcaggttaagagggttttccatcacctgtaactgaaaatgtcctaactggtccaggtcaggtggccaccctggtccaatcagcagtggctggagtagcaggccagatgtcacttgcagaacaaagtgtgctcaagtcagcccttgaaatggggctgtgggacgggcagtgtgaagctgagtctttccactataaataaggctgtgcaaggccaagttaatagatgtttggagttcataaatcatggtggctgtggttatcaaattaaaaaaaaaaaatcaaaccaaaaccaccagtagcctcaaaaagcacatgattggaaatgtgagaggctgtcaggagccctggcccgtgggcaaccttgctggaagtgctgtgaccatgtgtgtgtttgaacctggacaaaccactgatgtagacatctccccagatccattcctcaaaactccctgaagtgattagatattgaatcccatgcctaagacagagtagcagtgtctgtttgctgaatgagattcttcccccaaatatggtttggatttgtgtccttgcccccatctcagttcaaattgtaatcccagtgttggaggaggggcttggtgggaggtgattagatcatgggggcggacttccctcttgctgttgttgtgatagtgagtgagttctcatgagatctggttgtttaaaagtgtgcagcacctcccccttctctctgtcttcctcctctggccacgtaagacggggccagcttccccttcaccttccatcatgattgttaagtttccagaggcctccccagccatgcttcctgtacagcctgtggaactgtgaatcagttaaagcctcttttctttataaattacccaggttcaggtagttctttatagcaatgcaagaacaggctaatacaccacccttctcaaagactgccacttctatattctgtattttaggagtcagcactatttgaggaattgaaatgaaacctaaggtaaaataaagctagcaaacaaaggagagatttgtgtagacagcctagacaagtttacattccgcattaaacacttggatttatttaacagtttcatttatgactttacagttgtttaataaatattacggcattccagctaggaagatagtatcacccctttaaacatgagaaaatcaaatgaatggcttaaggcaaaaaattcttttattagtacccaaaagtgtagactttgttattactttaaatttagaaaagtaaattttcaatagttagtggctagcaaaactggtattttttttctttttcttttttttttttttttttgagacggagtcacgctctgtcgcccaggctggagtgtggtggcgccatcttggctcactgcaagctccgcctcctgggttcataccattctcctgcttcagcctcccgagtagctgggactacaggcgcccaccaccacgcccggctaatttttttgtatttttagtagagacggggtttcaccatgttagccaggatggtctcaatctcctgacctcgtgatccacccacctcggactcccaaagtgctgggattacaggcgtgagccaccacacccagccccaaaactgatatttttgtgtgaactaataaataatttagttaggtttatttagaaaataaactttaaggatttagggatttgcaaacttcagtttgaaataggtttagacagctaaagatctttggattttgtaaagagaaaattaattgaagaaagaatttaaggtaaatatgatttatgactattctgttttagatgtgaagcggtaaacaatattgggccacagattgggagtagagtgggggaaggaagacaggaagacagcagtgaggtaaaggagagtttgtaagtcattcataaccaacactacccatttagcatgatagttatgaatataccaaggccttttagaccactctgaaatgcacattgaccctctcttctaaatcatgaatctctgttgttttgtttgtttgtttggtctctgtcttagctggaatctgcctctgtcacccaggctggagtgcagtggcgcaatctcggctcactgcaacctccacctcccaggttcaagcagttctcctgcctttgcctcccgagtagctgggagtacaggtgcccgccaccacgcctggctaatttttgtatttttgatagagacgcatttcaccatgttggccaggctggtctcaaactcccgacctcaggtgatccacacgccttggcttcccacagtgctgggattacaggcatgacccaccacacctgacctaaatcatgaatttctcccttaatttgtgcaaaatttagtgtacctggatttccttctgtgttcttctctatccttaagatttttcagttcagaaatattcttgtttgggatagatattaaaagatgaaactggaagccaggcgcggtggctcatgcctgtaatcccagcactttgggaggctgaggcaggcggatcatctgagttcaggagtttgagaccagcctggccaacatggggaaaccctgtctctacgaaaaatacaaaattagccaggcatgttggcgcatgcctgtaatcccagctactttggaggctgaggcaggagagtcccttgaacccgggaggcggaggttgcaatgagctgagattacgccattgtactccagcctgggtaacgagagcgaaactccatctaaaaaaaaaaaaaaagacaaaactggtaattgggaggatgaaaaggaagtaaaacaggagtaagaactttgcattgcggccccagggggttgtggtggagggaaggaagcggaagcaggtacctgagaccataggactgtacttccatgggacatgtatgatccaggtggatacaagccaggtcttgatgcactgctgtgtttaaggtgtgctgtgagctaagcctctgcagcatagtttatgctcgtcctacccccttgtaaaaattatcttttcaactcgcccattgtcacctctatccttcattcagcctttgcttatgctactcctccacttggaacacgctttccccaatctttgcctagtcattcatcctgttagatctgcctgcatctctgccaagaatccccttaacttggcctttttcaggagtgagtttgaggagaaagcttaggaaataataagccaaatttttgtgtcttaaacatccagttaactctggatagtgacagccaacaacatggagtcataaaagcaaaggtaaaaacttgaataagcaacaagacattgaagaaaatatctcgacatgatcagcaacaggcaacatcagtttcttagcatctcttaaagactgatagaggagagacaatttcttttctagcaaacaagagatggtgaatggaaattagcctcttctaatgtaagctgtgtagactaaacactgtaagagcctaatgttcagcgtgcacatggtcatgaatccagcttttagtacaatgccaagcacagtgtgaactcagtacatatttgttgcattaataaatattagtcctatttgctgttggattaaaagcaagtatagaagtcaggcgctgtggctcatgcctataatcctagcactttgggaggctgaggctagtggatcacctaaggtcaggagttccagaccagcctggccaacatggtgaaatcccgtctctactaaaaatacaaaaaattagctgggcatggtggcaggtgcctgtaatctcagctacttgggaggctgaggcaggagaatcacttgaacccgggaggcggaggttgcagtgagccgagatcacaccattgcactccagcctggacaacaagagcgaaactctgtctc

SEQ ID NO: 6397 - DNA, 499 bp, Homo sapiens
gcacatccatgtaatagtaccgcggtgaggagcattcaggagtgattctgccgtaatgcttaggtgtgtatctgatttatggaagataggctgtaggctgtataacccgtgtacatatatgttaggggccgaattatgtctccccccaaaaagatagttggaagtcctaacgctgagtaccacagactgtgaccttatttagaaacaaggtcattgcagatgaaattagttaaaatgagatcctgctaaagtagcatgggccccttatccaatactactggtgtccttatgtgaagacagacacacagaaagccatgtgatgatgaaggcagagattggagggatgcagcaaaaattgccaaagattttcagcaaactagcagaagctaagaagagacttcttccccttcagaaggaaggagcatggccttagtaacaccgcgattttggacttctatccccagaatcgtgagaaataaattcgtgttgttttaagcca

SEQ ID NO: 6398 - DNA, 314 bp, Homo sapiens
agaatacaaaaatggcacaaagcaaggaagtaaggcaggaagggttttatgtaggttgtgactatatgatatgaatctcaaaagttatattttacagagtaaagaagtagggagctggaataattctaggcaggagggattcattttagcagtcagtgaattgtgatactatagttgggaagtacagtgatgtgctgaaatgtagggcatagtcagtggctagtatgagatgatgctgaaggagagatggacaggggtcactccttggccttctatgccaccccaaggatttgggccatggggaagaaaaaggg

SEQ ID NO: 6399 - DNA, 314 bp, Homo sapiens; identical to SEQ ID NO: 6398

SEQ ID NO: 6400 - DNA, 499 bp, Homo sapiens; identical to SEQ ID NO: 6397

SEQ ID NO: 6401 - DNA, 509 bp, Homo sapiens
atttaaagggtagaaaaatatcaacaataatcaacatcaaacaagaatcttggagatactagagcacagccaagttgtcagtaaatatgaaaatagatgatcagaatgatataattaaagttaaactcaacgaatcaatatggtttgacaggaagatgggttgacatacaaaacaattttgaattaatatatttctaatggtggatgtatttcttgaagctggggcacatttctaggcattgaaaggattctttcatgaaaaacaatgttcatttcactttataatcctgaaatgataattttaggatttactgtttttgctcatgtaaatattttagaaatagagaaattggctaatttatatgagaaaattttagtatgttatttattattaatattagaaggcttatatattattattaatgtttgcaagcatcattttacagctgctttctcgggaatattatcttttacatcaattgaattaaagaactaaaaatctctttaaa

SEQ ID NO: 6402 - DNA, 509 bp, Homo sapiens; identical to SEQ ID NO: 6401

SEQ ID NO: 6403 - DNA, 705 bp, Homo sapiens
gcactggtgaggcagagagcaaagtgatgaacaggacatgtagaaaatggagacctggagagtaagaagagaaaggacaatgagactcaaacatacagaaggacaggggcatgcactgacaaaaacatcagaccctcctccaagagccacgtctccaatgacagcagcaacagaacgacctcagacaggctgtgggtggaggtgggaaacaggtccatcttaccttgcaaggggacagggcttgagtaaagaatagaagatggaaaattaactccgtacagaacacacgttggaaacgagcagcggagagaatgcctaaatccagaaaagtgcaaagaggccaggggacatcatcagacacagaactggaccttggctctgctggggatctgcattcactctgcccagaacaattccaccactcagctaagggcccgttctcaatgtattctgggtgttagcagcaaatcttgggctctaatattctgaatgaaaatgttttcaaagctactcggcccacagtcaatctaccgaggctgcctttttgataggaggtaaaggcattattactgctctcatctcttggtcttagaacctagcataactgaagacttgaagaatgaatagccacgaagcatatgggacacagctgaaaactctatggctgcctctaaactctttaatacccaaaggtttctttctctc

SEQ ID NO: 6404 - DNA, 3866 bp, Homo sapiens
acatttatttattttcgtatattgaaccagccttgcatcccagtgatgaagaccacttgatcatggtggataagctttttgatatgctgctagattcggtttgccagtattttattgaggatttttgcatcgatgttcatcaagaacgttggtctaaaattctcttttttggttgtgtctccgccaggctttggtatcaggatgatgctggcctcataaaatgagttagggaggattccctctttttctattgattagagtagtttcagaaggaatggtaccagttcctccttgtacctctggtagaattcggctgtgaatccatctggtcctggactctttatggttggtaagctattgattattgccacaatttcagagcctgttattggtctattcagagattcaacttcttcctggtttagtcttgggagggtgtatgtgtcaaggaatttatccatttcttctagattttctagtttatttgcgtagaggtgtttgtagtattctctgatggtagtttgtatttctgtgggatcggtggtgatatcccccttatcattttttattgcgtctatttgattcctctctcttttcttctttattagtcttgctagcagtctatcaattttgttgatcctttcaaaaaaccagctcctggtttcattcattttttgaagggttttttgtgtctctatttccttcagttctgctctgattttagttatttcctgccttctgctagcttttgaatgtgtttgctcttgtttttctagttcttttaattgtgatgttagggtgtcaattttggatctttcctgctttctcttgtgggcatttagtgctataaatttccctctacacactgctttgaatgtgtcccagagattctggtatgttgtgtctttgttctcgttggtttcaaaaaacatctttatttctgccttcatttacttatgtacccagtagtcattcaggggcaggttgttcagtttccatgtagttgagcggttttgagtgagtttcttaatcctgagttctagtttgattgcactgtggtctgagagacagtttgttataatttctgttcttttactttagctgaggagagctttacttccaactatgtgttcaattttggaataggtgtggtgtggtgctgaaaaaaatgtatattctgttgatttggggtggagagttctgtagatgtctattaggtccacttggtgcagagctgagttcaattcctgggtatcgttgttaactttctgtctcattgatctgtctaatgttgacagtgaggtgttaaagtctcccattattattgtgtgggagtaagtctctttgtaggtccctcaggacttgctttatgaatctgggtgctcctgtattgggtgcatatatatttaggatagttagttcttcttgttgaattgatccctttaccattatgtaatggccttctttgtctgttttggtctttgttggtttaaagtctgttttatcagagactaggattgcaacccctgcctttttctgttttccatttgcttggtagatcttcctccatccttttattttgagcctatgtgtgtctctgcacatgagatgggtttcctgaatacagcacactgatgggtcttgactctttatccaatttgccagtctgtgtcttttaattggagcatttagtccatttacatttcaagttaatattgttatgtgtgaatttgatcctgtcattatgatgttagctggttattttgctcgttagttgatgcagtttcttcctagtctcgatggtctttacattttggcatgattttgccgcggctggtaccggttgttcctttccatgtttagtgcttccttcaggagatcttttagggcaggcctggtggtgacaaaatctctcagcatttgcttgtctgtaaagtatttcatttctccttcacttatgcagtttagtttgggtggatatgaaattctgggttgaaaattcttttctttaagaatgttgaatattggcccccactctcttctggcttgtagagtttctgccgagagatccgctgttagtctgatgggcttccctttgtgggtaacccgacctttctctctggctgcccttaacattttttccttcatttcaactttggtgaatctgacaattatgtgtcttggagttgctcttctcgaggagtatctttgaggcattctctgtatttcctgaatctgaatgttgtcctgccttgctagattggggaagttctcttggataatatcctgcagagtgttttccaacttagttccattctccccgtcactttcaggtacaccaatgagacgtagatttgatcttttcacatagtcccatatttcttggaggctttgttcatttctttttattcttttttctctaaacttcccttctcgcttcatttcattcatttcatcttccatcactgataccctttcttccagttgatcgcatcggctcctgaggcttctgcattcttcaagtagttctcgagccttggctttcagctccatcagctcctttaagcacttctctgtattggttattctagttatacattcatctaaatttttttcaaagtttttaacttctttgcctttggtttgaatttcctcctgtagctcggagtagtttgatcatctgaatccttcttctctcaactcgtcaaagtcattctccgtccagctttgttctgttgctggtgaggaactgcattcctttggaggaggagaggtgctctgctttttagagtttccagtttttctgctctgttttttccccatctttgtggttttatctactttttgtctttgatgatggtgatgtacagatgggtttttggtgtggatgtcctttctgtttgttagttttccttctaacagacaggaccctcagctgcaggtctgttggagtttgctagaggtccactccagaccctgtttgcctgggtatcagtggcggtggctgcagaacagtgggttttcatgaaccgcgaatgctgctgtctgatcgttcctctggaagttttgtctcagaggagtacccggccatgtgaggtgtcagtctgcccctgctggggtgcctcgcagttaggctgctcaggggtcaggggtcagggacccacttgaggaggcagtctgcccgttctcagatctccagctgcgtgccaggagaaccactgctctcttcaaagctgtcagacagggacattaaagtctgcagaggttactgctgtctttttgtttgtctgtgccctgcccccaaaggtggagcctacagaggcaggcaggcctccttgagctgtggtgggttccacccagttcgagcttcctggctgctttgtttacgtaagcaagcatgggccatggcaggcacccctcccccagcctcgctgccgccttgcagtttgatctcagactgctgtgctagcaatcagtgagactccgtgggcgtaggaccctctgagccatgtgcgggatataatctcgtggtgcgccgttttttaagcccgtcggaaaagcacagtattcgggtgggagtgacccgattttccaggtgccatctgtcacccctttctttgaataggaaagggaactccctgaccccttgcacttccagagtgaggcaatgcctcgccctgctttggctcgtgcatggtgcgctgcacgcactgtcgtgcgcccactgtgtggcactccatagtgagatgaacccggtacctcagatggaaatgcagaaatcacccgtcttctgcgtcgctcacgctgggagctgtagaccggagctgttccatttcggccatcttggctgccttccccaatttttt

SEQ ID NO: 6405 - DNA, 2116 bp, Homo sapiens
ggttcttcaaagctgcacagcattcattgagagatatggcatcgtggatggaatctatcgcctttctggtgttgcctccaatatccagagactacggtaaaatcttatatggcactttttcactccttcttaactaattaaaatgcaaatattttaaaacagattcacttactttgataacctattttcattaaagataatttagataaaataggaaataatatacatgttattgtctctgtatacttttctaaatggcatttttttcatctgtagtatcagagaaccatgcaccttaatctcttcagtacttgtattttgcctctttatagtgtttgaagattttaacaaattgagtttgaaccgatgacagccatgagagaggaaatttgcattataataaaattattctttaggtgttaattaaaatggatgggaatggaacattttctaatctcctttgaccctgattctgtgtttatgttcaagtatgcatctctacatatttcacatcctccccaaatcttctctgagacaaaaacagtgacaaactctgtgcctgcaatattttatttttgcttaatctcttggattctagactattcttgacatgccattaccctttcttttttactgtagtacatgataactgccattattctgtagagattttaatactttaacagatcatagagcccatctcagttttgggaaatacatgcttgaaaaatacataaattagtccttgtactaaagacagtttcagtcttcagtttaagacaaagtaaatctcatattgtacacacacattaatcctctaggtagatgataagtggtctcatgcccgtggatgaatattaattaacctcctggagagtgagcttactctgccttactattctgcgtacaacttttattttactcattctaatgatacagattttcctgcctattaaaatttgttgttagctaggaattgctttatgttgtttctgacttttttatcctgcttcgggaaagcatttctgtgttgtacaatctgtatctgaggaatttctgctcataattgttcatagatcaattgccattcaacactagtctctggaattgccaaaatattggatattcaagtcattagcaattaggagtcctgttttcagactgttgtactataagagctgttcattcatatgtatctcagaggctattgtccattttaatattaaagctgtgcccttaatttccacatagaaagacatctatcttgtactaagacatccagttgttgctgaagtccaaacacaacttaaatgaaatataattaatggaagataatagcaactcactgagatagagctgaacacttttggagcttatgctttctgtttttaagacacatatttgctctcctcaatcaaatgatttgcttgtcctcttctgtctacgtcagccatgaatttgactctgagcacgtccccgacctgacgaaagaaccgtatgttcaggacatccattctgtgggttccctatgtaagctgtacttccgggaactcccaaaccctctgcttacctaccagctgtatgagaaattttctgtgagtacaggctacttttgaatctaattctttgtggaactttgctgtgcttttgttcaaaacacatgaactttggtttggtcacatgtaagaaatagttctgtgactgaaatgactccttaaaaaaacaaatattgccagctagtcggtggtctttgctgttttcacattgtcattcttgtgctttctgactttgagctgctagtcttgtcacacttaatactgatgaccatcaagcctttttaaaattagtttcgtagatctcagtgttcacactgtgtggaaacagtttacttcctgaatacaatgttgtgtttcctcgccatttcacatccaagagcaaagcaagttgatctcagagtgaaaactgaattgtaagtgaactttcatttttactaacagagctcactagtttattttgtactgtgactcttctaggatgcagtttcagcagcaacagatgaagaaaggctgataaaaatccacgatgtcatccagcagctccccccaccacactacag

SEQ ID NO: 6406 - DNA, 369 bp, Homo sapiens
ggcacatatataccatggaatactatgcagccataaaaaaggatgagttcatgtcctttgcagggacatggatgaagttggaagccatcattctcagcaaactatcacaagaacagaaaaccaaacaccacatgttctcactcataagtgggagttgaacaatgagaacacatggaatagggaggggaacatcacacaccagggcctctcggggggttggggggctaggggagggataacattaggagaaatactcaatgtagatgatgggttgatgggtgcagcaaaccaccatggcatgtgtatacttacgtaacaaaactgcacattctgcacatgtaccccagaacttaaagtataataaaaaaa

SEQ ID NO: 6407 - DNA, 731 bp, Homo sapiens
atgcctttctagctgtcattcctagccattgtttctacatgtccacagaccccatgcctccatcctgagccttttggacttatagagtttaggttaagcaatatactatgaataggcacatgggttacagagaacaagagaaaaggatattctcttaggaagagccaagagagaaatgggacacaacagcatgacacagcggtcaacacaggccttggatcagttgactaaccttgaaaggttccctgtgaaataagaagctccaggttaataccacattgcccctttaggccaataatgaattctgatcaattccacttaagaatcgttcattgtttctttgtcactgctctaacctcatggcaaatgctgagatatgtcttgaggtgatttatcacaagggtttctgaatcatgatatatcacattcattgcatccttcacttaccaggcacccatttccaaaatattacatatttatctccatttttaacactacagattaggtcaatggtgagtgcctttttttaaaagtccctactaattagcggtgatgagaaatagtgttgtttattttttaaccttcaagacgtagctattgtttcttcctcaatttcctagttcagtttggcaaactggaccactgaaagtccactaggcgtttatctagtgatttctctaagcatggctgggtgagagcaagttgaaaatgacgtctgtcagcagaaattc

SEQ ID NO: 6408 - DNA, 731 bp, Homo sapiens
atgcctttctagctgtcattcctagccattgtttctacatgtccacagaccccatgcctccatcctgagccttttggacttatagagtttaggttaagcaatatactatgaataggcacatgggttacagagaacaagagaaaaggatattctcttaggaagagccaagagagaaatgggacacaacagcatgacacagcggtcaacacaggccttggatcagttgactaaccttgaaaggttccctgtgaaataagaagctccaggttaataccacattgcccctttaggccaataatgaattctgatcaattccacttaagaatcgttcattgtttctttgtcactgctctaacctcatggcaaatgctgagatatgtcttgaggtgatttatcacaagggtttctgaatcatgatatatcacattcattgcatccttcacttaccaggcacccatttccaaaatattacatatttatctccatttttaacactacagattaggtcaatggtgagtgcctttttttaaaagtccctactaattagcggtgatgagaaatagtgttgtttattttttaaccttcaagacatagctattgtttcttcctcaatttcctagttcagtttggcaaactggaccactgaaagtccactaggcgtttatctagtgatttctctaagcatggctgggtgagagcaagttgaaaatgacgtctgtcagcagaaattc

SEQ ID NO: 6409 - DNA, 562 bp, Homo sapiens
attaatactagttcttgagctattgctgttactaataaaccattatacatttgcaatcagttacattgttttgtgggaatgaatttcatttatagaacaacatgcaaatgggtagcatgagttctaatagtaaatgtgccattttatgtaaggaagaaattggtatataatagtgtattaatccctaaaaggaaaccaaattaattacatagctaataaaaggaagtgcatacattgctataatcttcttcaatggcatattaaattttgccatatattttatattacacacatatttgtgtttgtagtgcaactagtttttgatggtctgttatttcatattccaaatctctgggtttcttccttctattgaaaatatagtaatatagttttttaccttcatgccattcagtaggtttgttttaagaaattaacactgattttcatgctaaattacaagaaatattttaagaagacaaatcgttcaataacaagttacaatataagtcagaaattaattctaattaaagtgagggaataaatttcaaggagggaacaaata

SEQ ID NO: 6410 - DNA, 562 bp, Homo sapiens; identical to SEQ ID NO: 6409

SEQ ID NO: 6411 - DNA, 562 bp, Homo sapiens; identical to SEQ ID NO: 6409

SEQ ID NO: 6412 - DNA, 485 bp, Homo sapiens
gcgatcctgtgagggcacttctaggcacagtgagcatgatgaacaaaagtgggtgacatatgaaatcgcagctcttatttgatgatcagatagctagggcttgagtgagaaggattatagtgataaagctaggaaagtagaaaagttgcattaagttctggagggctttctatgttgtaccaaagaatttgtactactctttgtagttatggaacaatggccaagaattcttaaggagggcataatgattaaattttggctatagtaataactttaagggaagttaaagttattactgaatactgaactagatatgagagaggctgaaggcaacaacttcttttggaaaaattttaggcaaagactctgagctaagatcctgttgctgaaaatgggagagaagggagggggatgtgttagggacacattatggaggtagaactagtgtttagtaaaacaatgagatgtattaagggtaacacatg

SEQ ID NO: 6413 - DNA, 409 bp, Homo sapiens
gccctattggattttggacctgcatggggcttgtagcttcttcattttggccagtttcttccatttggaatgggtttattaacccaatgcctgtacccccattgtatctaaaaagtaactaacttgcatttgattttacaggctcatagtcagaagggacttgccttgtttcagatgagactttggacttggaattttgggttaaagctggaatgagttaagtctttggggaactgttgggaaggcataaatgtgttgtgaaatttgagaaggatgaaatttgggaggtgcccagggtggaatgatgtggcctgactctgtgtccccatccaaatttcatcttgaattgtaatccctatgtgttgggagcagtccccctctgctgcccatgctgttctcatgatagtaa

SEQ ID NO: 6414 - DNA, 409 bp, Homo sapiens; identical to SEQ ID NO: 6413

SEQ ID NO: 6415 - DNA, 485 bp, Homo sapiens
gcgatcctgtgagggcacttctaggcacagtgagcatgatgaacaaaagtgggtgacatatgaaatcgcagctcttatttgatgatcagatagctagggcttgagtgagaaggattatagtgataaagctaggaaagtagaaaagttgcattaagttctggagggctttctatgttgtaccaaagaatttgtactactctttgtagttatggaacaatggccaagaattcttaaggagggcataatgattaaattttggctatagtaataactttaaggaaagttaaagttattactgaatactgaactagatatgagagaggctgaaggcaacaacttcttttggaaaaattttaggcaaagactctgagctaagatcctgttgctgaaaatgggagagaagggagggggatgtgttagggacacattatggaggtagaactagtgtttagtaaaacaatgagatgtattaagggtaacacatg

SEQ ID NO: 6416 - DNA, 485 bp, Homo sapiens; identical to SEQ ID NO: 6415

SEQ ID NO: 6417 - DNA, 409 bp, Homo sapiens; identical to SEQ ID NO: 6413

SEQ ID NO: 6418 - DNA, 17904 bp, Homo sapiens
cacacacacacaatttgtggttataatcgaacaagtccagttcaaacttataaacttaagtctatgacaaaaaccaagacatcacagtaggaacacaacactaaaggataagataaaatctacaaccaaacaattttcaaaaccttcctacagtgtggaattccagttgcttaaataatgccagttccatgaatttcaactgtgctctaatctatttctatacacacaggtacagagaaaagtggagatgtccttatgccgtgaagaagacattttgcttctggtctgcttaggtgcagttctttgttccaggcagattccaatcttcctgtttctagcatgaaataggacaaaagattctgtgagttgctcagtaactggatgaattttgtaatcatcatctcaatgataatacaaaggtttcctttccctaagtgataacaaagaaaacctctctttgtaattctttttgcaaggatccataagcctgaattctaaaaggagaggccaataaaaaggaaatgaagaatgttttaaaggtaaggggtttttttggtttgtttgtttgagacggagtcttgctcttgttgcccaggctggagtacagtggtgtgatctcagctcactgcaacctccgcctccatgttcaagtgattctcctacctcagcctcctgagtagctggggttacaggtgcccgccaccacgcctgggtaatttttgtatttttggtagagatgggatttcaccatgtttgccaggctggtctcgaactcctgacctcagatgatccatgcgcctcggcctcccaaggtgctgggattacaggcatgagccacctcgcccagccctgttttcatttttgagatgaggtctaactctgccatccaggccggagtacaggcacaatcacggctcactgcagcctcaactttccaggcccaagcgagcctctcacctcagcctctagaatagctgtgacaataggtatgtatcactacgcctggctaacttttttattttttgtagagatggggtctcactatgttgcccaggcttgatctcaaactcctgacctcaagtgagcctcccaactcggcctcccaaagtgccgggattacaggtaggagccaccacatccagcctgaagaatgttctatcatacgcttatccataaatagataaatgtatccaccaatagatgatgaactgcacaagaaaaatgggatccccaattcaacatgcttcctcagagaaccttacagcaagacagaaaatattttattacaaagtaaaataaaagacatagtgagtcagttctcttaaattcctcctccacattcagaaaggcatacagggtgattcaaacaaagatgaacggctacagcatagtttctaagctgccctcaagtgcagtgattcatctgaactggtgtcttatttacaggagaagatttggcttcatgaagaaatatcttcctgcataaaattcctgcaactaatcgctcgttgctgaaaatgccagggatgtgtttggtgtgcaaattacttgataaaattactaagacggattaaaatattgcatctgggccaggcacagtggctcatgcctgtaatcccagcactttgggaggccgaggtgggcagattgcctgagttcaggagttcaagaccagcctggccaacatggcaaaacccatctctactaaaaatacaaaacaattagcctggtgtggtggcaggcacctgtaatcccagctactcgggaggctgaggcaggagaatcacttgaacccaggaggcggaggttgcagtgagctgagatcgcaccactgcaatccagcctgggcaaccgagcgagactctgtctcaaaaagaaaaaaaaattcattaaacagagccccaaccactagccaaactatattaaaaatgattccacttagcaaaaataatacttacttacacatactttctcaacaatgcataccagatggagaaaggttattcctacgtgtggaatctttttcagggaaagtaggggcagctggggacaggatgtaatgaaattgttcactgattatatgacaaaaatccatcaaatggaagcttttttgttctttaagtaaattttacaattgaggggtctctattagagaaaggttctatttttgtggcttatcaactaggggtccttcatactaaagcaaaccaagtctttacatcattttaaagatttcctggagagacacaatttgtaagatgttatgggcgagtcagctaaaatgtaagccccagagtagagcagagaaacaaaaagaagtaaacacattcaggaacatcttatgatttttaaaacccgcaactggatttcatgagcgtttatgaagttggtaaagttacacgctctcatgttaatacaaaccagtcaccactgtgaaagcgttcatcacacactgagaggtgaagccatgccatggagacaggttatcttctcgaggtcatagccacctattcctctatcattttgttgtctattatttcaatttgtatccagctttcctcttggtacatccatgtaaacacctgcccaggatggagggctctcattcaccacgtctttcagcaggttggttcctctccccagtcagcaattgtgacatttggtgtctgtttcgaatggtgttggttagccaattggctttccacttcacataactgggaagactacaggaaaattacgggaatggaaatcaaaatgggaaaaacaagctatgtcaatgaatagacacatcactgacaatattttgcttcactggtatgtttcttgctcgtgtgttacaggaagaaagatctaattgaagccatataaccgagcaatttagaattgaggagtaactgaaagctctttttaatccatacttaaaaactaataatagattttcaaaggctcaaggaaataacacagtcaaaaccctttttcagtcatcttaaattaaagcttagcaaatttcatgagggattctaaaaaatattattattatttaaaaactaataatagaccttcaaaggctcaaagaagtaatagactcaaaatccttttccagtcatcttcaattaagcttagcaaatttcctatgagggcatatttcttcttcttattttttaaccaaaggagacctaaagagacttttgaaaatacttgttaattattctaaggaagctcgcctgtcactcagggtttctggaacagggaccagaggagctgggcttctcaaatattcaggcacacacaaaccacctagcggtcttatttagacatgcaggttctgatgcagaacatggattctggactgtcatgctgatgcctctgacggtcacatgctgacctggagtcacaggcatggctgtgtttatttcgctgacccttgcaatcaatcccctttgctctgcttcactgctgacctctgtgtgcatgaggttaagccccactcagtaaacgcagcctcacctggatgtggggtcgagtcagtctcattttttgggaattactaaatataaagatataccttccagatgtgagctcctgtcctcagaaattcttgaagatttctaaatccttctgcggcacgggcgcggctgtgtcccagtcattctcagggtaagtttcgaagttggaagtgtcgccgtcaccagctatcttgggcacgatgggaggctgtgagacatggccgaagcacaaaggcatggttagaaagggacgggacacttggatgctgcacacaccgctttatttctgtcactgtacctaaaaatgaaaatgatttgcaaaacactaaagctgtcttcccttcatttatgaaagcggcaatctttgaattaaaatattgtgaatgaggctgcgtgtggggactcacacctgtaatcccaacactttaagaaggtgaggcgggagggttgcttgagcctcagaagtttgagaccagcctggggaacacagggagtcccctgtctctacaaaaaatacaactagccgggtgtggtgctgtgtgcctgcagtctcagctactcagtaggctgaggtgggagaactgcttgagcccaggaggtcgatactccaagtgagccatgattgcaccactgcattccagcctgaatgactgagtgagatcctgtctcaaaatatatatatatagtattaagtaagctatggtacagtcatgtgatggaatacaatgcagtattttttaaaatgaggaagctggctaggcgcagtggctcatgcctgtaatcccagcactttgggaggccaaggtgggaggatcatctgaggtcaggagttcgagaacagcctggcccatggagaaaccctgtctctaccgaaaagacaaaaattagccgggcatagtggtgggtgcctgtaatcccagctacttgggaggctgaggcaggagaatcgcttgaacctgggaggcggaggttgcagtgagccgagatcgcaccactgaactccagcctgggcaacggagcaagacttcgtctcaaaaaaaaaaaaaaaaaaaaaaaaaaaaaaaaaaaaatgaggaagctagccaggtatgtagacaggtctccagattatatagtcaagtgcaaaaagcaagactataataatgtacatactacgctactctagatttgtataaatgagtggcaaaaataagaatgcatgtatccatgtgggtttttattagcacaaagaaactctagaaggatacacagaaaaacaataaaaggtgattacctacaggtggcttggagggggtaagagggagacttggcaatatatctgttttaatattgacttggtttttgaccaatgtggatagataaaacgtattcaaattgtttttttaatgcaatttaatacaataaagtatttgaaaaggtaaaactttgaacaaaatgatgcatcagcccaggcccagtggctgacacctgtaatcccagcactttgggaggccgaggagagtggatcatttgaggtcatgagttcgaaaccagcctggccaacatagtgaaaccccatctcttctaaaaacacacaaaaaaattagctggatgtggtggcgcacacctgtaatcccagctacttgggaggctgaggcagaagaatcacttgaatccaagaggtggaggttgcagtgagttgagatcactccactgcactacaccccgagcctgagcgacaaagtgagactccatctcaaaaaaaaaaaaaaaaaaaaaaaaaagaagcgtatcatcccaggctccagccccagaaactctggtctgagctgaggactaggaataagcatttctaagcattctccattcttttaactctgaagtgcaaaggtgaaaacactaccattgaccactcccatcagtaacatatgcagttcagagtgttcacaaaagccaagatatggaatcaacctaagtgtccaccaatggatgaaaggataaagaaagtgtggtccatacacacaatgaaaaactatccggccataaaatggaatgaaatcctgtcatttatagcaccacgaatggaatgggagaccatcatgttaagtaaactaagccaggccgggtgcagcggctcatgcctgtaatcccagcacttctttgggagactgaggctggtggatcacttgaggttaggagattgagaccagcctggccaacatggtgaaaccccgtctctagtaaaaatacaaaaattagctgggcgtctgtaatcccagctactcagggggctgaggcatgagaactgcttgaagccaggaggtggaggctgcagtgagcaagatcgtgccactgcactccagcctgggcaacagagcaagacgctgtctcaaaaaataaataataaataataaactaagccagacgcagaatgagaaacacagcgtgttcccactcatatgtgggagctaaaaaaatggatgtcatgaaggttgagagtagaatgatagttaccagagggtgggaagtgtgtatagctaggggatgaaggggagatgaagaaatattgcataaacataatgttagataaaaggaataagttccagtgtttgacagcatagttgggtgggcagagttaacaatatattgtatatttcagaatagctagatttgcaatattcccaacccataaaaatgataaatgtttgagctgatggataccctggttaccctcagttgatcattacacattctatgcgtgtgtcaaaatataacatgtacccccataaatatgtacctgtgatagttacactgcttagcagctgtgtaaccttccacacattgcttaacttctctgagcacagtctcctcatttataaaatggacaagtattatacattgaaaaaaatgccagatttttttttttttttttttttttttgagacagggtctggctctgtcgcccaggctggagtgcagtggcataatcttggctcactgcaacctccgcctcctggtatcaagcaattcttgtgcctcagcctcccaagtagctggtaccacaagcatatgccaccacgcctggctaattttggtattttctgtagaggcgggatttcaccatattgcccaggctagtctcaaactcgtgggttccagtgatctgcctgagttggcctctcaaagtactggaattataggcgtgagccacagcacccagccaaaaagccagatgtttaaaaataggcagtttggccagaaacgttccaaagaatattctccatgtaatacaccaccatcactgaacgatgaccatggtgctagacgcttgcttatctctgtaatcctgttgaccgctttccactaaagaggagggagtagggtttagcagtcacagagctagtcaggaatcaggccaggtctcctaaaatctgcttcaaaatctgggataagtgtccatccagggatgaatggacaaagaacatgtggtatatgactgggtgtggtggctcctgcctttgtgggagctaggtagatggttagcactaagacactcaaagagtggggaacttggcttatgaacagttttagacaaatagttgtattatataaattaatcacatgtcagccatcaataaagaagtcccaggattcagaggcagtccctgctaatggaagagctcgggcatactgagtcacccactgatatgtgttgtaccttcagttttctctgcggaacagcttcccagtccacggagcggaaccaccgatgatgcttcacatcattcgccccgttcttcaaaagaaacaacacatgtcgtcagtgtacagaattttgacagggcaggaaagaaaaataccccaaagaatctctacattattttagtattgaaacaaacagaccaagtttgctgcattttggagaactgtgcctggagggtgagctgccaggaaaacctgcaagcaaagctgttagtgttttgtttgcccttttttgccgcagaaacaaatccagtcattctgctcctgtgcaatgcatttgcattccggaccaaagacgaaaaaggtaaatacgattccatctctcgacataaaattggacagccagtagtttctcagtttgtctcctgttttcatcttggcaaacttactcagtattttacagacatagaaactagggttcaaggaatgatgttaatttgctccgtaggacccagcaagtaaataacaagactgggaactcaaaccaaggatgtccagtttaagagaccttaggaacgacattgcacggcctggcaattaacaaggtgcgttcaagtcggcctgcttcatgctcaagggtagcaccaggcatcgctggctcacactgtggccatcacgacctctgaaatccctcccaagtgctcatccgtaaacctcactctgcttccttttcttatacttgtagtgatgtcgttatcaattaaatgtgggacagcagaagaaataaacgtaggttccatgaaacagaagccagtacatctgaatttaacgcgtctatcagttagcattactgtagtttcaaatttcttatccttaaagaggaatacgtccacaaccatatcttcaaaaggaaacagtaatgtgaattttttctattgttttcccatccagttgttttgacaactttttcttttcttattgcaaaacaggtatttttgatctatagctaagtcaggcaacaaacaatagctgttgagttttcccttcagcaatgttgtgaataagaataaataagagtgctgtgaataagagaataaaataaattttatccatcagataaaattctaatttggatactaaaggatgtgtgtgtctgtatatactcacatgcatacatagtaatatatacacacacacatacatatatacacacatagattgatatatacatacttatacacatacacacattaatatatacacatacttatagacatacacacgttaatatatacatacttatacacatatacacgttaatatatacacacatatatttatatatacacatacttatatacatacacgttaatatatacacattaaatatacacatacttatatacatacacgttaatatatacacatgtattatatatatatatacacatatacatatgtactttacacactttatatgtagagtacaaagtatatgtatataccgagattcacattagtatccaaactagtgtgtgtgtgttatataaagtgtgtgtgaggggggtgggagcagtggctcacgtttatattccagcactttgggaggccgaggcaggaggactgcttgaacccaggagtttgagactaacctgggcaacaaagtaagacctggtctctacaaaaaaacataaaaaattagccagccttggtggtgcatgcactgagtcccagctactcgggaggcggaggtgggaggatcacttgacgccaggaggtcaaggctgcagtgagctgtgatcgcaccactgcactccagcctggatgacagagcaagatcctgtcttgaaaaaataaaaataaaaaaagtgtgtgtgtgggtgtgtatctacagtcatgagcctcaaaatgatgcttcagtcaacaatggatgacatatacagtgttgctcctgtaagattataatgatcttaaaaactcctatcccctagtgacgccatggccattgtaaccacaggacaatgcatccctcctgttacgctgccaggcgtgtaacagtctaacacatacgttacctacggcacctaatacttggtaatgataataaatgactatgtccctggtttatctatttactatactctatgttctttttgggggggcggggcaatggacagagtttcactccatcatccaggctggagggcatggcgccatcttggctcactgcaacctccgccttgctgtgtctcaaaaaaaaaaaaaaaaaagagagagagagagagagaaataagccaggcacagatagacaaatacagtctgacctcacttacatgggaaatctaaaaaagttgaactcatagaagcagagagtagaatggtggataccaggggctgggaaggggctgagatgggaagtcattggtcaaaagagacaaagtgagagagacaggaggaacaagttcagtcagtggcttgcacagctcggtgactataactaatgatgtattctcaagaatctctggaagagtagatcttgctgggtgcagtggctcttgcctgtaatcctagcactttgtgaggccaaggtgggcggatcacttgagctcaggagctcgagaccagcctgggcaacacatcaagaccccaactcttaaaaacaatttttttcttagatcttaagtgttctcaccacaaataaatggtaattatgtgaggtaaggcatatgttaatgaactcaatggacccattccacaatgggtacatatttcaaaacttcatgttgtacatgctaaataataccattttcatgtgttaatttaaaaaaaaaataaaataaagtcagtgttttcttgagtctctttcagtttatctccatatcaggaagctttaactagactttaagacctagcttgggagtttgtgagcttttccccaattcctttgattgggaaacttgttcttcccccttggaaggtacctatgatggtcactacgccattcccagcagattctagatatgggtcgtctgtgattccctgcagtcccagcaagagacccagctcttttctaaatggctgtggcattaaaacaggactcgtccaatcttatgaagagccgtggcacagatgagtccacaccgtgcaacctggctggataggctcctcggagacctgaaggtatccgttgctgtccgcaaataatgtaaaggacagaagcttgactactgttatagggtaaacaatgtccctcaaaaagatatgtgcacatcctatcccccagtgcctgtgaatatcactttatttggaaatagggtctttgcagatgtaactaaattaaggttcttgagatgacatcatcctggagaagggtgggccctaaatccagtgacaggtgtcctcataagagacagaggaggagacacaaacatagagaaggccatgtgaaaatggaggtggagactgcagtggtgtggccacaagcctagggatgcctggagcccccaggagctgggagaggcaggaaggatcccccactagagcctctagcaggaagcagacacaattatcacacattgggcagtggccctcaaaatatatgcccatgtcctgactcccagtacctgggaatggaaccctacatgcaaatagggtctttgtaaatgtaattaagggaaggctcttgagaagagataatcctgcattaggatgaccctaaacccaatgacaggcatccttctgagagacagaagaggagacacagacacagagaaggccacgtgaagaaagacagagactggagtgatgcggccataagcccagggatgcccggagcccccaggggctgggagaggcaggaatgatcctcccctagagcctctggaggcctgagacaccttgatctcagactcctcgtctccaggatggggaaagcagaaattcctgttgtttaagcccctagtttgtggtcagttcttatggcagctactggagactcgtaaaccacacagagggccccaagagagccaagtggttcaagcctcacaccccggtgtactgtgtctctccagactgtaatttacagggtcaagacgtatatggaagttcctccatgtataagtccctctgaggttgtccagagctagaaatggccaacaaaaagtccatgaattctgtcaaattcagggatgtcaaaacacgcatatcaggtatgatactacttaaggaatagtctgtttgtcaattatatacttgcctccacacaaaaagtttgtggaaatcatacctgatgcacaacttttaaaatcatcacctgcgcacacaaaacacctactctcatgtccatggcagaaccattcacaaaagccaaaaggtggaaacagcccagatgtccatccatagatgaatggataaacaaaacgaggtctgcccacacaatcgaatactatgcagtcaggaaaaggaaggaagctctgacacgggctacagcctggatgaaccttgaagacatcgtgctcagagaaagaagccagaggcaaaagcttacattttgtacaattccatttttagcagagcccagaacaccgaaccctacagagaaagtcagtagattagtggctgcttagggtaggggtccccagcccctgggccacaaactggtagtggtccacggcctatgaggaaccaaaatgggccgcacaccaggaggtgagcagcaggcaggtgagcgaagcttcacctgtactgacagctgctccccatggctggcattagcacctgagctccgcctcctgtcagatcagcagtggcattagattctcataggagcacacaccctattgtgaactgcgcaactaagggatttaggttgtgcggtctgtggaaaaactgtcttccacaaaactggcccctggtgccaaaaaggtcggggaccgctggcttagggcaagagaggatgaaagaatagcacagtgataactgaagggtgcagggtttctttttttgaactgatgaagatgttctaagattaaccacaggggtggctgtacataatcgtgtgtatactaaaagccaccgaattgcacattttagatgggtaaatggcatggcgtgtgaattcactctccgtaaaactgtttaaaaaataaaataaataagtaaacaaaataatgagtaataacttatgcattgttattgctctattaaccttgcttgaggggaggggagatacggtgtagacccagtttgacgttgtgggcccagaaaccgagatttgatagatctttcctggcagtttcaagtaaaatttaaaaaaataaataaaacaccagatttgaaatttgggcagtgattaaatacgaccgctaagccttggtttatacctgcacatgccaatgtgggtgttagacggcagacacgcacatcgggtaccactgaatacccacgggatcaaatactgaccttcatgtttcctaatcgccttgttctgtcaaccacgagcagtttcttaatgaggtctctatgttggggaaggagacaaaaaaaaaaaaagtacacagattatatatcaacatcagcaaacgcagcatggcaacagagataagatctatctgacatgaggaccgcagttcaatttccactttggcaaaacactttctagtgcttatttcctaccatcaccggctcttaaatcacctatgcaaggctgggttgccccgtgcaaggctgaagctaagggaagggggttgattacatctttgtaaagaaaatacacctctgagtagaaaagggtgaaatttatatgtgcctgcagggaggatccagacacttaacgtaaacatgcctgtcaggctgtccctgcaaaatagaagacatctgctttcaccaacatcaacactcacgcgctgtcctgggggtctgcttattgatgggattcctgttttaaaaggctggctttcccataagcacacacattaggatgagtctcctaagtctgcttcttcacttataatcttccttttaaataacagaccatgtcagaagtacagcaggtggggaggttgggcatactggctcacaccagtaatcccagcactgtggggaggccgaggcgggtggatcacttgacgtgaggagtttgagaccagcctggccaacatggtgaaaccccatctctacaaaaaaaaagaaaaagaaattcgctgggcatgctggcacacaactgtggtcccagctacttgggaggctgaggcacaagaaccgcttgaacccaggaggcgaaggttgcagtgagctgagactgagccactgcactccagtctgggtgacagaggtagagtcagtctcaaaaaaaaacaaaaacaaacaacaacaacgacaacaaaaaacagcaagctgcttcaattaggatgggtagttggagatgatgttgaagacttccaggagattaggtgagttctaaaagatgcatatttatggaagtagaaatgatcatgtgtgtctgtgtgtacacataaaatacacagagtacattatgtataataacatacataatatgatataataatataatatattgaagtcccccaaaacaatccaatacccatgaccccggtgtaagcgtctaggctttcccagcataaactatgccccaaggtaagtagcacgaacttggactgagccactcccaggttctgtgacagactgtggagtctccgacaagccaggtgacgtcctagggtcagactccaccatctagattgtgaatctcgccagtgctgtctgatcggaaattttacagtttcctgccaccatgctttctgaattaggatgggatgcttgtcagacttcaccgcttctctgccacaaagtaaaactcagagaccatctgtccgcccacctaaggctaggattttgtatccatcctgtaaggctgaaaagctttgagcaggatggggaatataaaaatcacctaaaagttagaaacctttccactacttagtgagtttctccttcattattttgacatgctcccccctgccaaaaaaaaatcaaggttatcaaacactatacccccaaaacattcccaaataaatgtggggcttcgtcccccacgtgatttacaccactgcctgcccccttaccacacacacttaaagctcactggagtgcaattataagacaggtttatttatgcttttatattttagataaacctttgttttcttataatcccagtccaatcagctttaagtgtatacgctaatggggcaggcagtggtgtaaattataggggggaaaaaaagccctatgtttatttcagaatgttttggtgatcacctgataaatttcaacgtgtgtgtgtgtgtgtgtgtgtgtgtgtgtgtgtgtcatgtaagaaaacaaaatgtttgatgaccttgaatttttttttaaatttttttggtgtttggcatgtaagaaaatgaagatttatttaaaatacaggggacagtggcttgtaatcccagctatgcagtgggctgaagtgggaagaccacgtgagaccaagagttcgaaaccagcatgggcaacatagtaagaccctcgtttctacaaaatatcaaaacattggccaggcatggtggtgcatgcctgtagcaccagttactcgggaggctgaggtgggagtgtcatttgagcccaggacgtcgaggctgcagtgagctatgattgtgccactgcactccagccggggtgacagagcaagacacccgtctctttaaaagaaaaagtaaaataccaaagcaaactcttataaagcagtctagaaagtaaagagtatggatgagaagaggcccctgaagatgcaaagccctataaaggaacgacagaagtgtccacagctgtagatgggtcccttgaccccgggataagcgacacatctgccggcactcttttgatgcactgtagccaaaattctacattttatttacgatcctggcaccagctggctcctctcagatgcaggtactttcaggtgttgtaaaaaacaccggcagataatacctctactgaattggcaacaagtcccaaagctttgttttggtgttttgttttaaatgatatttatttctataaggaatgtcaatcctgatgtgccatttgcccaggcgacatgtttacctggtcaaatgataaaagttgcaggaaccaacatatgactttaaaaagcagagaatcaaaattctagcatcatggacaaccagggacagtgatttggataagaaaaatgcctcattaaggccaggtgcagtggttcacgcctgtaatcccaacacttggggaggacaaggcaggaggatcagttgagcccaggagttcaaaagcagcctaggcaatgcagcaagatccccatacccatctctaccaaaaaaaggaaagatatgagtcattgaggtcttgcttctcagccaatttgataagatttaacaaataatgggaagaagtgaactgtcagttcacttctatctatcactgtttctgctcttggggaacccacactgggtatgtaaagaaacaggggcactgtggggaacactggaaggggctgggagctgcataaagagaggcatgttagatcagacagtaccaagatggtcgctgctggttccctactctcaaagaagataaactaggagagaaagaaggacaagtggcaagagaccagactttgattacgcttctggtttattctatttctgcaattcctttttttgttgttgtttccacagaacattggaaaccccccccatatatatatataattatatcttttaattttattattttttcttttcttgacacagagtttcactctttcatccagtctggagtgcagtggtgcaatcataggtcactgcagcctcgacttcctgggctcaagcagtcctcccatctcagcctccctagtagctgggactacaggcacttgctaccatgcccagctaatttttaaattttttgtagacatggggtcttgctacattgtccaggctggcctcaaactattggattggccccaagcaatcctcccacttcggattgctcctgaagtgctgggattacaggcatgagcacctcacctggccaaactcgatcataaaagtgctttgccatccacttaatataatgtcactcaactcagatgggatttggggcctgagagagaggttctatataatcctttctatttccttccagagcagtcggcttctgaggtgctgtttcccctgacacctccctgtcttaccattcactggacagggtgtcccttctaggcgactcattgttaagcggagcctcgttttcttgctaaagtcttttaaagcctgcctcttagtgtgtcaaacacaacacatgctcaagccaataaaacacgaccttatcttctgttcagactaagaacctctggttaggatggggtgcgttcaccaccaagaaactcaactgaacgtagccagtggccccataaggggcatattcaaaacaacctgctccatcgccctgaaataagtcttctctgaactgaacttccaccggctcataagaaaatagaccatggaaaagaaaagtttaattctcaactagatgcatttagctctagtttgtgcccagggggctggtgcacccatcaactcatctgaaaaatacagtgaaacaaacagaaatcagtgcttattacagtaaaaatggctaccagttgaccagattgggtaaggtagccagaaaaccaaaagcattcttttttttttgagacagaatcttgctctgtcgcccaggctggaatgtagtggtgcgatctcagctcactgcaacctccgcctcctgggttcaagcgattccgctgtctcagcctcccaagtagctgagactacaggcgcccaccaccacacccagctaattttttatattttcagtagagccgaggtttcaccgtgtttcccaggatggtctcgatctcctgacctcgtgttccacccacctcaacctcccaaagtgctgggattacaggcatgagccaccacgcccagccgcgttcttatatttaagaaaataatatattttttccctactgccacgacctttataaaatgtgcatccaaagttgccaatatccagcaactgtaaatatccttgaagcaacatgctcagaactgaaaatgttgacgttaaaaaggacttagaggttgagcataatttaagcaggagagaaaggataaaactctgctaaacccatcaacagttctgttagccacagaactaggaggatccttcttgtcaaattccaaaactgctctcttataaaatacgatgacaaactcgttcattggctcattttaaatataacataccaccaaaagaacacaatacggccaagactcattaaaatgtgaagctatcattaaagtagaatactgaaaatctttttcttttcttgtggaaaagacaactgtccaaaatagtttatgcgcagcacatttaataacacaatatggtatcctgctgagtgcgtgctttcacggtgattttagacactttaaaaataaacacacctcatgatgaggcaaacggtttacttactttacatggaaatccaaatgtctggggaaatctattttgcctgcaagaattttctgataaatgccaaacgggttgtcatcaaaaaacggaggaaacc

SEQ ID NO: 6419 - DNA, 160 bp, Homo sapiens
agaggatattgaatgttcctaacacaaagaaatggtaaataattgaaatggatatgctaattaccctgatctgattactccattctttgtatcaaagcatcactgtctaccccatgaatatgtacaattattatgtgtcaatttaaaaaataaaataagc

SEQ ID NO: 6420 - DNA, 4507 bp, Homo sapiens
ctgacagatttttctaatttttgtagagatcgggtcttgctacgttgcaggctggtctgaaactcctgggctcaagcgatcctcctgccttggtctcccaaagcactggaattacaagcgtgcacctccgtgcctaattatagcagcttttttgcactctgtgcaacagagactgtgtgtcccacaatgcagaaaatatctgccatgtggcccctacagataattgcccatccctcgattagaccaaaggagaaaagccacagcttgtttggagacagaagcagatgaaactcagacttctgaaaagatacaaagttttattaaacaaacctggaatcaacagtattattacataaattagacagcagtaaaattttcctagggcatatgtacaaatcacagtgatttccattgtgcaacaaacagacaggattaaaaataggcactcccctccccgaccccccatgagaaggggtcaccccgcggggttcccagttctggctcgccaaggggtgcacaaacctgccaaggcactctgcctgtgtgcgcggcatccggcggcagtgacaggggccccagaagcacgttggcaacatggtgaggctgcccagtgttcagcgcaaagaaagaattcagctacgacagttgagcagagctcaacagccatctcagagcacaaggactgtggaaaggcttcaagtctcatctgctaaaacacaattgtaatgccttttacatacagaacagacgtgtccaccatggaagatcaaactaagcctcaacagaacttcccaacacacgataatttacagaaaaccatgacagagcatccctgctattaggaagggactgttctgcggggtgcaaggccataaggtttgcaaagcaaacttgattatgaaaaggcttggtgaaaatacagcccctcaccttcaccaagacacacacacacacacacacacacacacacacacacacacacacacaccccgcaaagaaactatccaaatgcattaagacacctgttcgtgtgcttttcttcttgcttttgttaagtgaatcccatccgtttaagttagactaattagaaggcctgcttgcctccatcagcaacagaaaaacagtgcatacgactcctccaatgtgtgtaaaatgcatgctaggtagattgaaggaaaaacgagaggaacccgggcaccccatttcaaatctctacaactggagaaatcaaaggctgcaaggactgtgtagacctgatgcaaagttaactggctgcaaaaatacaacccaagccagtgctgtcttgcaccctgttcactcagtagctggagcaatgaatgattgtgacattctggtggggtatttgtgcagcctgaggtgcacctggctacagagtggagccttggggtctttaacagtattaagccatagtttcacagttacaatggtccaaagaattagaggccatgtaggtcaaacacagaaatggcgaacacatcccaaaccactcaactgtttagttccactggtgattttttttaatggacagtgatttcaaatgatttggtgtttttgttcttgtttttgctttttcttcaaagcaaacaaatgatttggtctttaagtatggacagaaagaaacaaaacgctgaatgggaaattcagtaacaagtgattgtgcagttgtttgatgggcatggagagggagtggggctgaactgcattttgaggggatgaagcgcgcaatcttaccccactgctggggggtttctgcttcttattctatcatgctgacagcaaatataatttgcccatcgctggctatagatatgtttaggctaagcaggatttagacttctgttgcgaaggaattagaagaattcagtagagacagtgtatactatttggttgtgactttatttccttcctggctttatcaatgcctatgaaagcaggccggtggcatttcccttcagaaaaacaagacttgccccaatacacttcttcttgtaacatatccatgtcctattctcttagagtattccaatttaagaaaatattgccaactcgtaaaattacatgaagcaaagtaaatttgtaatgtttttctgatacaaatgttgtgattatggtaatgaattttcctccacattttgcgcagtgattgtttgtcatgatcatccatacggacattctgcaccgtgattgtttcgtgatcatccatgcggacatttcgcaccgtgattgtttcgtgatcgtccatgcggacattttggaatgcccacccgggtcagctatttgtattttttttatttttatgttttgagacggagtcttgctctgtggcccaggctggagtgcagtggcacgatctcggcttactgcagcctctgcctcccgggttcaagcgattctcctgcctcagcctcccgagtagccaggattacaggtgcccgccaccacacctaatttttgtattttagtagagatgggggttttgccatgttggccaggctggtctcgaactcctgacctcaggtgatccacctgcctcggcctcccaaagtgctgggattacaggcgtgagccaccatgcctggccaggtaaactattttaaaattatacagtgattgctccatgtttatagctcattttgattaaattaacctctacatgacattgggccatttaaactatgaccccgccatgggcagttaccaggtagcttgtgtcacttcaaatgctgaaatgtgtgtgatggtccaaagtgggtttcacaccatcacacgttcttggaatcgcttctaatttctcatttgttctgtatggctggaggctgatcacgacgtctgtaaagaacaaggtcaccaatgtgcttgcatatttcattttcctgcatatcagttcacaattaaggcatttcaggctttcctgatgctaattctcatctgagtatgaaatcctggataataaaacagacaacctaaaaataggcatatggactcatggatttatgtactttttaaagtgtgctcaagtgtttcatttatggttttattaataatttttaaagtagaatgttcaatattattactatgatttatttttatagtcagcaaacatgagacttaaaagcttttccttctagctccacatgtcggtgcacagtgtaaccttttcttaaaaaaatatggaatgctgcatgaatctgcagatcttcctcgcgcagggggccatgctaatctcctctgtgtcattccaattttagtatacctgctgccgaagtcagcaccagtttcaccttttcacattcacggtaaaactgatgggaaaccgcacgctaaatgtttaggcagcgatggccctcaactgttaatcccaacaggatggtgagtgagaagcacaggctgaaaatagagttgtctaaaacatttccacatttcaccatctgaacatcattttccactgagttattaattgtaaagagtttattctgctgaacctactaattattctcacctactgagttgacctccacgtgaagaaaaggtcactgatgaaaaagggtggctatgttctgtttctgtaatttcactgttttaacatctttttttttatatagagatggggtctcgctatgctgcccaggtcggtctcgaactcctaggctcaatcttcctgcctcagcttcccaaagtcccagggttacaggagtgcaccaccgcacccagcttcactgtcttttaaagccttaaggtggacgttctcttcaatccatcttcaaaagcacaaagccattgccttctttttttttttttttttttttggacagggtctcactctgtcacccaggctggaatgcagtggtgtgatctcggatcactgcggcctggacctccccaggctcaagtgatcctctcatctcagcctcctgagtagctgagactacactcacgtgccaccatgcccggctaatttttttgtattttgtagagatgaggtctcaccacgtttcccagactggtctccaactcctgggctcaagcaatccacccacctcagcctcccaaagtgctgggactataggaacaagccactgcatccagctcagatgaaatttttgaatgtgtcacagaaggtttttttaaatacagtacattcctccaacaacttcaatgtcattgtagattcttggaataaattcgctcccatatcttcccctctttgtttcttcttttaaagtctcaagttaccaggtaagaagcactaaagatactgaaggtagacctccccatgatattttcttccccaaaactataaaatgcatgtgagatgattttttttaatgcatgcaacatacccttcagatgttgtccccgagaagagatttttgaaaaaacaaattgaaaaataaaaattataggctctgtaaagtatgaacatttacatcactgcacaatttctgtgcatctgccataatgacttctatatatacacacaggcata

SEQ ID NO: 6421 - DNA, 1687 bp, Homo sapiens
agatgatttcttaaacaaaatacaagatacaaaaatcttaaacgagatacaaaaaaaaaaaagaaaagaaaaaattgataaatttcccagtataaaaattttaaaattagaatgtgggccagatgcagtggctcacgcctgtaatcctagcactttgggaggctgaggcgagcaaattgcctgagctcaggagtttgagaccaggctcggcaacatggtgaaaccccttctctactaaaatacaaaaaaattaggctgggcatggtggctcacgcctgtaatcctagcactttgggaggccgaggcgggcaggtcacctgaggtcaggagttcgagaccagcctggctaacatggtgaaaccccgtttctactaaaaatacaaaaagtaagccaggtgtggtggcgcacgcctgtagtcccagctagtcgggagcctgaggcaggagaatcgcttgaatccgggaggcggaggttgcagtgagccgagattgcgccattgcacaccagcttgggcaacaagagcaaaacttcatctcaaaaaaaagaaaattagctgggcatggtgttacacacctataatcccagctacttgggattgggaggctgagacacaagactcgcttgaaaccgggaggtagaggttgcagtgagtcgagatcacgccactgcacttcagcctgggtgacagagcaagactttgtctcaaaaaaaaaaagacctactctataggaaagcaattcagaaaagagtaaacaactatatgaatatgttagtttcagtagtaatcaggacagtgcaaaatcaaataacagtgagatcaagtgtctccttattggtaaaaattaaaacttttttttttcttttttggagatgccttctcactttgtcacccaggttggagtgcagtggtgcaatctgcgctcattgcaacctctgcctcccaggctcaatcagtctgcccacctcagcctcccaagtagctgtgactacaggtcctccccaccacgcctggctaattttcttgcatttttgatagagatggagtttcgccaggttgcccaagctggtctcaaactcctgagctcaagcaatccgcccaccttggcctcccaaagtactgggcttacaggcgtgagccaccggacccagcaaaaaaattaaaactgataataataagtaatgtaaacatatgaggcgatggaaggtcactgttgtttgaagtataaactggtatagcctttttggaaaataatcacaatatctcaaaaaattaaaaatgaagattgaaaatacctccaacattttcacttctatgcatataaactagaggaatttctcaaggagattgggtaagaatgtttgttgtgttatttgtaacagtggaaaaagtatactgtaaatctgttcaagactaggtaaatgtaatatccataaaatggataacagtgaaactatatgtattgttttctttttcaagccattaacatggattattttggttgtaggttaaatatgttctgtattataaccctctccaactgtgtaggaacagatttgctaatttacatttgtagagttttcccttaagtgatcattattactgatatttccctaaattcaagatttttttccttaaacattgacttctcttaatctattcaaggaaaatagtagtattcaaaaatt

SEQ ID NO: 6422 - DNA, 1688 bp, Homo sapiens
agatgatttcttaaacaaaatacaagatacaaaaatcttaaacgagatacaaaaaaaaaaaaagaaaagaaaaaattgataaatttcccagtataaaaattttaaaattagaatgtgggccagatgcagtggctcacgcctgtaatcctagcactttgggaggctgaggcgagcaaattgcctgagctcaggagtttgagaccaggctcggcaacatggtgaaaccccttctctactaaaatacaaaaaaattaggctgggcatggtggctcacgcctgtaatcctagcactttgggaggccgaggcgggcaggtcacctgaggtcaggagttcgagaccagcctggctaacatggtgaaaccccgtttctactaaaaatacaaaaagtaagccaggtgtggtggcgcacgcctgtagtcccagctagtcgggagcctgaggcaggagaatcgcttgaatccgggaggcggaggttgcagtgagccgagattgcgccattgcacaccagcttgggcaacaagagcaaaacttcatctcaaaaaaaagaaaattagctgggcatggtgttacacacctataatcccagctacttgggattgggaggctgagacacaagactcgcttgaaaccgggaggtggaggttgcagtgagtcgagatcacgccactgcacttcagcctgggtgacagagcaagactttgtctcaaaaaaaaaaagacctactctataggaaagcaattcagaaaagagtaaacaactatatgaatatgttagtttcagtagtaatcaggacagtgcaaaatcaaataacagtgagatcaagtgtctccttattggtaaaaattaaaacttttttttttcttttttggagatgccttctcactttgtcacccaggttggagtgcagtggtgcaatctgcgctcattgcaacctctgcctcccaggctcaatcagtctgcccacctcagcctcccaagtagctgtgactacaggtcctccccaccacgcctggctaattttcttgcatttttgatagagatggagtttcgccaggttgcccaagctggtctcaaactcctgagctcaagcaatccgcccaccttggcctcccaaagtactgggcttacaggcgtgagccaccggacccagcaaaaaaattaaaactgataataataagtaatgtaaacatatgaggcgatggaaggtcactgttgtttgaagtataaactggtatagcctttttggaaaataatcacaatatctcaaaaaattaaaaatgaagattgaaaatacctccaacattttcacttctatgcatataaactagaggaatttctcaaggagattgggtaagaatgtttgttgtgttatttgtaacagtggaaaaagtatactgtaaatctgttcaagactaggtaaatgtaatatccataaaatggataacagtgaaactatatgtattgttttctttttcaagccattaacatggattattttggttgtaggttaaatatgttctgtattataaccctctccaactgtgtaggaacagatttgctaatttacgtttgtagagttttcccttaagtgatcattattactgatatttccctaaattcaagatttttttccttaaacattgacttctcttaatctattcaaggaaaatagtagtattcaaaaatt

SEQ ID NO: 6423 - DNA, 399 bp, Homo sapiens
tttaaattttttttttaatagaaatgggatctcactatgttgcaggttggtagaactcctggcctcaagcaatcctccctcctcagcctcccaaagtgctgggattataagcatgagccactgttcctggccagtagctctattacctaaagtgtttattacatgccagatactgtctgctaagtgcttaaattgatttttttttaattttaaatcttcgcaacaagtctttgagatagatatattaaaaatctggttttatgaataaaataaggcttagcaaagttaattaacttgctcaaagtgatatagtcagtagtacagcagtagtaaatccaggcagtagtgctgcagttgcattcttaatcactatgctatattgcttctctgttatctttt

SEQ ID NO: 6424 - DNA, 399 bp, Homo sapiens
tttaaattttttttttaatagaaatgggatctcactatgttgcaggttggtagaactcctggcctcaagcagtcctccctcctcagcctcccaaagtgctgggattataagcatgagccactgttcctggccagtagctctattacctaaagtgtttattacatgccagatactgtctgctaagtgcttaaattgattttttttaaattttaaatcttcgcaacaagtctttgagatagatatattaaaaatctggttttatgaataaaataaggcttagcaaagttaattaacttgctcaaagtgatatagtcagtagtacagcagtagtaaatccaggcagtagtgctgcagttgcattcttaatcactatgctatattgcttctctgttatctttt

SEQ ID NO: 6425 - DNA, 1362 bp, Homo sapiens
gaaaggaggagggaacagcgtggagcaattcatctggaattacctcggtgtgcagaggctgtcccttggctccacttgggataaacattgtgaaacatcgtgggcctctttcttctcaagctcctcctgacagcctcctggcaacactagaggcctcaagactatggagatcagaattgcaatggctttgtcatctcagcattgaccactcctgagacccaaggttcctcctgggagcaggagacaaggagtttgtgatgttggatggaaaataggatatatgaatgcagaagggctgtgctggacccctcttttcgcttctctccctgctgtcagcagtgtctctggcatggaggcgaatctgttgtgggtgaaacagaagcccctggggtaggaccagaccccaggcctgaaaaggatgcaaagcctgctgtttcaggctgtcaggaagaatcgtgggtaccgagtgattatgatgaaatgcaacccagagaggaaatgaatgggccctcactaagaagtgggtctgacatgtctctggcagcccaccggcaagagcacgacatgccctgcagccccaccatccacactacatgatgtgggagggctgtctgttcattcttacactggggacccaagcctgctctgaggagtgagtcacagccctgacgtgcgccttgcattactgtttcctgagatgtgcccggagactcaagcttgctcatttctgtcctgacacagctcactgttccttaggtggtcatagtcctcccgtgctgtgtcagctcctacatagcattagtctttcacgtgataaagtgcaagcacttttccattttacagtatttggggaaattctaacacactccccagggatttgtgcatgtccttctgcctccccggtgggtcattctgtggattccgcacctggcagtcggtcttcccccttggaagcccctaggatccctgtttctacgggcctggtccttggtttctaccccagtcccttttggccggcacctgcctggaactgcctggagcgccatggtatggggaaggacaggtggaaccctgaccacaacagatccttctaaaacaacagtcacattgatgatgatgagtgcagtggggtgaatgtcgtcacagcatgcatgctgggagctgccaagggcttacaacaaaagcagttcttcctaaggcaccctttgcatcttcccatccacgcctctcagtgcatttggaacttgcttatgcattggaataacttgagtcagctgctcgtttctgtgcctctgcactcacaggttccttcattaacattttaaataagtggttaaaaactcctctggaggttgtttttga

SEQ ID NO: 6426 - DNA, 720 bp, Homo sapiens
tgtgtgcacaggcgagcctaagtgtgtgtactcatacacacagataaaccgaaaggacactgggctttgtgctggcaaaggctgtgatgctgctgtggctttctatgggccctggggagtgtcagatgggaagtgctttgatggcatgttgttcagtgtatttaatggggtctcccatggcccgaggacccactgtgagcactccacccactgtggcgcagaacacggctggagtcatcatagcccaggtctttattgaaagggagtgttgacccagaagcctcatatagaaaccatttggcaaggtctggaccatctctctgcaactgacctgccttggccgcacagagggacccaaacccaaaaggcccagacccaagggagactgaatcacatttaccattacaccagctttcatttatttgtttccatatgatcatagggactgtattactaagtatgcttataaatgctatttacagactgttcccttttataaggtgaaagattaataaagaacaaaaaattgcctgtagaaaaccatgcctgaggccaggagcagtggctcatgcctgtaatcccagcactttgggagaccaagacaagcagatcacccaaggtcaggagttcaagaccagcctggccaacttggagaaaccccagctctacaaaaatacaaaaaaaaaaaaaaaattagctggcatgatggtgggtgcatgt

SEQ ID NO: 6427 - DNA, 1408 bp, Homo sapiens
atctttaacatattaaaatagacatgagaaaaatgtgtcatttgataaaatgggggaaatgtaataaatgattaccagaaatataaaattaagccgtatatgctcttaagtaaatcgaatctaggcatccttaaaatgtaaaaaaggatgcaacaagagtaaggagcccagaatgatgtaaattacaggaatggggtgtaatgtaacctctagaggaggtgatgtttagaagaagcaaagagaatgcaatgagaagcaaacttgttttaggcaaattctcctggagtggaccaggcagccccctcttccagactcagttccagagattcccttatgtgggtatttgttttattattcctttgaggactgcatttggtgtttagttcatcctcatgtggaccctatggaatttccaagatgcggggccttagcactgtggcaccttcctgccacacgtacataattcacagcattaccaagtcaccacaagccccacgctcacctctgtcagcccaggacccagccaggcagtgccacgtggtctcccaggctcgcttctccaagccgaactgcgaaagttattgaggcactggcccagggaactgagccttgggcctgtcctaaagctccataggtgactgcactgcagcccacatggagagctgcagctctaacacagggattttgagaggcctcagtgccatttaagtggcacttccaggacacccatcctgagctcccacaaagggcgccaccttcccaagaacgtctaattgtcattggaacagccagtgtcaggcagcttctgctcaggctgatgtggcgtctgacccttggtgggttgccagacattccttcctgtttctgccatgggaagttggcactgggaatggtatggagcccccacttctaccctgagccttgggtgtctgctgcttccaggtgaaaaatggacatttctgatactgcccagccactacggcaccacaacccatgctcatagtctccagggatgtgtagaacggcaatggcaggacagcaaacaactggcgatttccccaggtcccacgctcttgcggagtgagtatgttgggtccctgtcccagtgtgttccagccttacccaggtgcacagagtaccctggggccagcacagggcttgtccagtgatgctcctggtgttcacaaaatggctccagagatacctgcattttgaaaagcctgccgagccagcaagtgtagggcaggacccggatttctttggcaaatctgaaggtgagagggccacttgcctgctgagtagaagctgcctttacctggccagtgtatgcaacttgagagaaaatgacagctgcatggggcgctctggtgggactgggaagtctgatcttccggggagctgtagatag

SEQ ID NO: 6428 - DNA, 4873 bp, Homo sapiens
  SITE (4820): n equals a,t,g, or c
caaccagagcatatccctgcgccggcctcgcctcgcttctcagtatgtatggcttctacttctgtgaggcatatttcctttgagttttagcattgggtagcatgtaagctaaaaagctatcaggttgaaccaaatgaaattgccaatactcagccatttttcacctacaaaaaaacagtaataagcagcaattccatatgatacaacctatgactgtctaaatgagcacatagagtaaatgtcatcagtgcataacctagtaatttggcactaaagatccactgtctggaggaaaaggttgttggagagtgatttattaatacttgactcttctgtgtgttgtgtatgcaaataatttttatgttataaactttaggaatcctgccatctatgccttgaccaaatgacttaatttctgttttctgcccccatctgtaaattgaaattaatatggttcttgcttatagggaggttaagtggattatattcattattacatagaacttggaccagttccctcacagaaagagcctactaagaataaactattactatttttatcttcttattaaatacctacaacaatatttttatcagtcattgactacgtatgttgctaaaagttaccataaatgtacagtatatggtgactgcatatgaaatttagagacaatagatagcacagtagattggaatgaaggaggcttaggttgaggatgaacggttttctaaaggataagggagtgaatagactagagacacagtaaagaacataaaggtagaaatgaagtgcagaaagaaaaaccatgtgactagaattatagtaagaataattttgctgaatagatgaagtatgattgtaaaaggctgaaaatgcaaacttgatcttgtaggcaggaatgagtcacagataattttttttttttgagatggagtctcgctctgttgcccaggctggagtgcagtggtgcaatctccactcactgcaagctgcacctcctgggttcacgccattctcctgcctcagcctcccgagtagctgggactacaggcgtccgctaccacacgcagctaattttttgtgtttttggtagagatggggtttcaccatgttagccaggatggtctcgatctcctgacctcgtgatccgcccgcattggcctcccaaagtgctggcattacaggcatgagccaccgcacccagccacgagtcacagagaatttttctgtagaagaatgacattgtgaaagtagtatcctaggaagttttaatagcactgtgtaagatatattaggcaagggaaaaactgaaggccagaaagccagatgaaaagctatgcagtacttcaatgtatggggcagtgaaaattcagatcaggatgcttactgttggaccagaaggaacataaggagatgttttgaaggaagtaagaaacaggaggtagtatcagtaactcattggatatagaggagtagagtagaacctgctgaactttaaatagagatttggaagttctctgaagaaggcagagaaaagcagagagcagggaactgagtcttaatccctggctcaaccatagtagccagggaacaaacacagacaagagaaaaaaagaaaataaacaaaagaggtaggaatagtcagggaggtaataggaagagcatcaaaacaaagcatggttggtgctgtgatcccaaggaagcagagtttgaagaagctggggcaggggagcactgagtgggtcagtgagataagtgccacaaagggctggaagaaaatgctaagtgtgattggtgacctcattgagctcctgattttgaagtctaattatccttgttagttaccagcagagggcaatctaaacatatactatttctgcttaaagaaggggctctttggcaatagattattctgttccatttcaggtgtttaacggagaaactctgggaaaccagattgcaccaagagtaagacattaggaatggaacagttggtgtacagcggagagagcagggaatccaaaataagatctgagtttcagtactgactttatcactcatgcaacctttagcatatccttaatgtgtgtggtttttttgtttgtttgtttttttgaaacagtatctcgctccgttgcccaggttggctcaatgcagcagcacgatcatgactcactgcagcttcaacctcctgggttcaagcactcctcccacctcagcctcccaagtagttggcactacacgcctgcacccctctgcccagctaattttttattttttatagagacagggtcttactatgttgcccaggctagtctcaaactcctagcctgaagaagtcttccctccttggcctcccaaagtgctgggattacaggcaagagccaccacactcagccacctgattttattgttggtatttatagtggtaaatggtttatgttgggctgaaatgtgcttcactgtaatttcactataactttaacaatttgatcctatttgggctctctcacataacttataatgagtctcctccctcttctgcattgtatgttgtcaactctttgaagagaaataactgttatgcctctccttaggtcttctcttctgctggctaactcttttggtttctcatgtatgcctcaagtggtgttttatcttatcctcatcatccttatcacaatttcttatatttgttttttgggggttggttgtttttttttggagacatggtctcagtctgtcacctaggctggagtgcagtggtgtgatcataccttactgcagccttgaactcctgggctgaaatgatcctccttcctcagcttcctgagtagctggggctacaggtttgcactatcatacctggctttttttttttttttttttttttaagacagggtctcactgtgatgctcagactggtctcaaactgccgggctaaggcgatcctcttatgtcagcctcccaaggagctgggattacaggaaccagccagtttcttaagtttgtttaatgcttttttcatccatgttctcacttgatatgcatactgtctccatgaggtgaaagtggtattcagtgaaatcggtgttaccattcctgccttacagagatggaaacgggcactcaaagggttaaatagatgcatcataaaatcaaagtcaggtggccaggtgcagtgactcacacctgtaaacctaacactttgggaggccaaggcgggcagattacctgaggtcaggagtttgagaccagcctggccaacatggtgaaagcccatctctactaaaaatacaaaacttcgccaagcgtggtggcacatgcctgtaatcccagctactcaggaggctgaggcaggagaattgcttgagcctgggaaacggaggttgcagtgagctgagattatgccactgcactccagcctggcgacagagcgagactctgtctcaaaaaaaaaaaaaaaaatcaaagtcagtactcaaacccagatcactaccttctgcgttgcacataccctgccattgttcttgttaccttcctctggttgtgatctagtttcttagtgtttttccaatagtatctgaaattgaataggaaactctagaataatccgtctggtacagcagatagtccctgtttaggatgtatgtttaatgatggtaagactggaaatgtgtctaatactgtgaaagtgtttatatttgggtaatggactaagtgctttttgtcccccttgttaccactagatccaaggctcgtgacactaaggtattgatagaagacacagatgatgaagctaacacttgaattttctgaagtctagcttaacatctttggttttcctactctacaatcctttcctcgaccaacgcaacctctagtacctttccagccgaaaacaggagaaaacacataacacattttccgagctcttccggatcggatcctatggactccaaacaagctcactgtgtttcttttcttttcttctggtttaattttaattttctattttcaaaacaaatatttacttcatttgccaatcagaggatgttttaagaaacaaaacatagtatcttatggattgtttacaatcacaaggacatagatacctatcaggatgaagaacaggcattgcaaggaccctctgatgggacggtactgagatatctcggcttccgctcagcccggttttgactggttgaaaccggacattggtttttaaattttttgtcagtttatgtggagaatttttttctttccttcatacccagcgcaaaggcactggccgcacttgcaggaaaagtgcaacttaaagcagtaccttcattcatgaagctactttttaatttgatgtaacttttcttattttgggaagggttgctgggtgggtgggaaatatgatgtatttgttacacatagttttctcattatttatgaaacttaaccatacagaatgatataactcctgtgcaatgaaggtgataacagtaaaagaaggcaggggaaacttacgttggatgacatttatgagggtcagtcccacatacctctttcaggagacaacttgcaccagtttgaccttttcttttctttgtttttattttaagccaaagtttcattgctaacttcttaagttgctgctgctttagagtcctgagcatatctctcataacaaggaatcccacacttcacaccaccggctgaatttcatggaagaggttctgataatttttttaacttttaaggaacagatgtggaatacactggcccatatttcaaccttaacagctgaagctatgccttattatgcatncacatggtatggttccctggtagcgtgacctttactagctctgaatcagaaga

SEQ ID NO: 6429 - DNA, 10024 bp, Homo sapiens
caaccagagcatatccctgcgccggcctcgcctcgcttctcagtatgtatggcttctacttctgtgaggcatatttcctttgagttttagcattgggtagcatgtaagctaaaaagctatcaggttgaaccaaatgaaattgccaatactcagccatttttcacctacaaaaaaacagtaataagcagcaattccatatgatacaacctatgactgtctaaatgagcacatagagtaaatgtcatcagtgcataacctagtaatttggcactaaagatccactgtctggaggaaaaggttgttggagagtgatttattaatacttgactcttctgtgtgttgtgtatgcaaataatttttatgttataaactttaggaatcctgccatctatgccttgaccaaatgacttaatttctgttttctgcccccatctgtaaattgaaattaatatggttcttgcttatagggaggttaagtggattatattcattattacatagaacttggaccagttccctcacagaaagagcctactaagaataaactattactatttttatcttcttattaaatacctacaacaatatttttatcagtcattgactacgtatgttgctaaaagttaccataaatgtacagtatatggtgactgcatatgaaatttagagacaatagatagcacagtagattggaatgaaggaggcttaggttgaggatgaacggttttctaaaggataagggagtgaatagactagagacacagtaaagaacataaaggtagaaatgaagtgcagaaagaaaaaccatgtgactagaattatagtaagaataattttgctgaatagatgaagtatgattgtaaaaggctgaaaatgcaaacttgatcttgtaggcaggaatgagtcacagataattttttttttttgagatggagtctcgctctgttgcccaggctggagtgcagtggtgcaatctccactcactgcaagctgcacctcctgggttcacgccattctcctgcctcagcctcccgagtagctgggactacaggcgtccgctaccacacgcagctaattttttgtgtttttggtagagatggggtttcaccatgttagccaggatggtctcgatctcctgacctcgtgatccgcccgcattggcctcccaaagtgctggcattacaggcatgagccaccgcacccagccacgagtcacagagaatttttctgtagaagaatgacattgtgaaagtagtatcctaggaagttttaatagcactgtgtaagatatattaggcaagggaaaaactgaaggccagaaagccagatgaaaagctatgcagtacttcaatgtatggggcagtgaaaattcagatcaggatgcttactgttggaccagaaggaacataaggagatgttttgaaggaagtaagaaacaggaggtagtatcagtaactcattggatatagaggagtagagtagaacctgctgaactttaaatagagatttggaagttctctgaagaaggcagagaaaagcagagagcagggaactgagtcttaatccctggctcaaccatagtagccagggaacaaacacagacaagagaaaaaaagaaaataaacaaaagaggtaggaatagtcagggaggtaataggaagagcatcaaaacaaagcatggttggtgctgtgatcccaaggaagcagagtttgaagaagctggggcaggggagcactgagtgggtcagtgagataagtgccacaaagggctggaagaaaatgctaagtgtgattggtgacctcattgagctcctgattttgaagtctaattatccttgttagttaccagcagagggcaatctaaacatatactatttctgcttaaagaaggggctctttggcaatagattattctgttccatttcaggtgtttaacggagaaactctgggaaaccagattgcaccaagagtaagacattaggaatggaacagttggtgtacagcggagagagcagggaatccaaaataagatctgagtttcagtactgactttatcactcatgcaacctttagcatatccttaatgtgtgtggtttttttgtttgtttgtttttttgaaacagtatctcgctccgttgcccaggttggctcaatgcagcagcacgatcatgactcactgcagcttcaacctcctgggttcaagcactcctcccacctcagcctcccaagtagttggcactacacgcctgcacccctctgcccagctaattttttattttttatagagacagggtcttactatgttgcccaggctagtctcaaactcctagcctgaagaagtcttccctccttggcctcccaaagtgctgggattacaggcaagagccaccacactcagccacctgattttattgttggtatttatagtggtaaatggtttatgttgggctgaaatgtgcttcactgtaatttcactataactttaacaatttgatcctatttgggctctctcacataacttataatgagtctcctccctcttctgcattgtatgttgtcaactctttgaagagaaataactgttatgcctctccttaggtcttctcttctgctggctaactcttttggtttctcatgtatgcctcaagtggtgttttatcttatcctcatcatccttatcacaatttcttatatttgttttttgggggttggttgtttttttttggagacatggtctcagtctgtcacctaggctggagtgcagtggtgtgatcataccttactgcagccttgaactcctgggctgaaatgatcctccttcctcagcttcctgagtagctggggctacaggtttgcactatcatacctggctttttttttttttttttttttttaagacagggtctcactgtgatgctcagactggtctcaaactgccgggctaaggcgatcctcttatgtcagcctcccaaggagctgggattacaggaaccagccagtttcttaagtttgtttaatgcttttttcatccatgttctcacttgatatgcatactgtctccatgaggtgaaagtggtattcagtgaaatcggtgttaccattcctgccttacagagatggaaacgggcactcaaagggttaaatagatgcatcataaaatcaaagtcaggtggccaggtgcagtgactcacacctgtaaacctaacactttgggaggccaaggcgggcagattacctgaggtcaggagtttgagaccagcctggccaacatggtgaaagcccatctctactaaaaatacaaaacttcgccaagcgtggtggcacatgcctgtaatcccagctactcaggaggctgaggcaggagaattgcttgagcctgggaaacggaggttgcagtgagctgagattatgccactgcactccagcctggcgacagagcgagactctgtctcaaaaaaaaaaaaaaaaatcaaagtcagtactcaaacccagatcactaccttctgcgttgcacataccctgccattgttcttgttaccttcctctggttgtgatctagtttcttagtgtttttccaatagtatctgaaattgaataggaaactctagaataatccgtctggtacagcagatagtccctgtttaggatgtatgtttaatgatggtaagactggaaatgtgtctaatactgtgaaagtgtttatatttgggtaatggactaagtgctttttgtcccccttgttaccactagatccaaggctcgtgacactaaggtattgatagaagacacagatgatgaagctaacacttgaattttctgaagtctagcttaacatctttggttttcctactctacaatcctttcctcgaccaacgcaacctctagtacctttccagccgaaaacaggagaaaacacataacacattttccgagctcttccggatcggatcctatggactccaaacaagctcactgtgtttcttttcttttcttctggtttaattttaattttctattttcaaaacaaatatttacttcatttgccaatcagaggatgttttaagaaacaaaacatagtatcttatggattgtttacaatcacaaggacatagatacctatcaggatgaagaacaggcattgcaaggaccctctgatgggacggtactgagatatctcggcttccgctcagcccggttttgactggttgaaaccggacattggtttttaaattttttgtcagtttatgtggagaatttttttctttccttcatacccagcgcaaaggcactggccgcacttgcaggaaaagtgcaacttaaagcagtaccttcattcatgaagctactttttaatttgatgtaacttttcttattttgggaagggttgctgggtgggtgggaaatatgatgtatttgttacacatagttttctcattatttatgaaacttaaccatacagaatgatataactcctgtgcaatgaaggtgataacagtaaaagaaggcaggggaaacttacgttggatgacatttatgagggtcagtcccacatacctctttcaggagacaacttgcaccagtttgaccttttcttttctttgtttttattttaagccaaagtttcattgctaacttcttaagttgctgctgctttagagtcctgagcatatctctcataacaaggaatcccacacttcacaccaccggctgaatttcatggaagaggttctgataatttttttaactttttaaggaacagatgtggaatacactggcccatatttcaaccttaacagctgaagctatgccttattatgcatccacatgtatggtccctgtagcgtgacctttactagctctgaatcagaagacagagctatttcagaggctctgtgtgccctcactagatagtttttcttctgggttcaaccactttagccagaatttgatcaaattaaaagtctgtcatggggaaactatatttttgagcacatggaacaaattatacttcctcattcatattatgttgatacaaaagaccttggcagccatttctcccagcagttttaaaggatgaacattggatttcatgccatcccatagaaaacctgttttaaaattttagggatctttacttggtcatacatgaaaagtacactgcttagaaattatagactattatgatctgtccacagtgcccattgtcacttctttgtctcatttcttccctttgttccttagtcatccaaataagcctgaaaaccataagagatattactttattgaatatggttggcattaaatttagcatttcattatctaacaaaattaatataaattccaggacatggtaaaatgtgttttaataacccccagacccaaatgaaaatttcaaagtcaataccagcagattcatgaaagtaaatttagtcctataattttcagcttaattataaacaaaggaacaaataagtggaagggcagctattaccattcgcttagtcaaaacattcggttactgccctttaatacactcctatcatcagcacttccaccatgtattacaagtcttgacccatccctgtcgtaactccagtaaaagttactgttactagaaaatttttatcaattaactgacaaatagtttctttttaaagtagtttcttccatctttattctgactagcttccaaaatgtgttccctttttgaatcgaggtttttttgttttgttttgttttctgaaaaaatcatacaactttgtgcttctattgcttttttgtgttttgttaagcatgtcccttggcccaaatggaagaggaaatgtttaattaatgctttttagtttaaataaattgaatcatttataataatcagtgttaacaatttagtgacccttggtaggttaaaggttgcattatttatacttgagatttttttcccctaactattctgttttttgtactttaaaactatgggggaaatatcactggtctgtcaagaaacagcagtaattattactgagttaaattgaaaagtccagtggaccaggcatttcttatataaataaaattggtggtactaatgtgtatccagagacatttgaattattaactttattctttattagtgaatctctatgatggcacacataaaatcttacagttgacttctgctgtttgaattccccagtgtttttacattaatgtatcctatggccagtttagtctttcttcaactgttacagttctaggccctaatcggtcttattctttcacatatgatgcaatgatagatgtaatccttttctgaagtgtttgtcggattggcatagtctattcaaaaataaggcttatgtaactttcagcttgctatgtgacagaagtttaaatgtgtatttaagtacacagctttatgttcctcttaaagctgtaaagagaaaagaggacttttcctcatcaagagagcttgggagacaaagcatacatttaatttttttctttcaaaaaaggcaatgtgcactttcctctcctaaattttatatgccctagcagttgcgaatgttgtgtccaccttacaatttgattggaggctcccatacactgaaactctcaatagaattcttaaaaatgaacatcagctgggcgcagtggctcacgtctgtaatcccagcactttgggaggccaaggtgggcagatcacgagctcaggagttcgagaccagcctgaccaacatggtgaaaccccgtctctactaaaaatacaaaaattagctgggcgtggtggcgcatgcctgtaatcccagctactcaggagactgaggcaggagaattgcttaaacctgggaagcagaggttgcagtgagactagatcatgccactgcactccactgccactgcctgggcaacagagcaagactccatctcaaaaacaaacaaaaaaaatcacagactcattttaaaggagcagcaacctaaccaaatacaaacttcatttgattttaggtttagaaattctagttttattttggagaatcactcagtttttaatatcaattaaaatagtcctcaaaggaatgaagaggaagtctaaataaatgaataaaactcatttttcattttatggtagtatagaaagcattgatgtgtgtagagaaattaaaagacaagagtggtttactgtctatgcacaaatgagtgcctatatttaaggctgcctataccattacagtggcgtaattggtgatttcatagcatacagagaaacaatgaaatcaaagattaaatcattaggttatgatggtcatttgtaagattggaaagtagtcaaaaacccatgtgcaactttttttcagcactctaccattaggctccttaggcaagctgcttaacttccgtcagaagcaaaggtgtgggagaacaccattcacctcagtagtaacttataaaaaccgtttaaagaaggaaaatgggccccagcccctaggatccctgacttcctgatattctaaacatgagagttctgtgactttaactgagctctttaccagaagtaacgtgttgatgtatattatctttccaccatgctttgaccaaagtacattcacagtaactagagaaagcagatcatccatttctggataggtgaactacggcaaggtaagaacagaaaaaagtaaagtagtattgagtcatgcaggtatcagattaacagacattcattgaagataagtgaaataactttggagatagcagagaagagcaagaagatgttggacgttggcagtaagccgcagcaaggcagttaggaaagtacgtgagcctgatgacgcgaaggtgatgcctccatctgtccgcttagtggttattaaattgctgggaaagacctgcctttattttcctatcatcttttccccattactttgcattattcaggaaataattatttattcccaaatgcagttttctaagcagtgaccacaaaaatttcttattctaaggaaaataattaagaaaataaccctatctgtggcattgttttaaaatgtgggatacaaatctggtaagcagatttcaggtcattattgttttcttttaatggtttacatgaaattttcctctcaaaaaacaagtacctcttactgtataacatttgagtttttaaaattgagatagcttctgagagaaaaaaagaaagttgaatttgtagctctctcaactacaaaatcaccacacttttctcaaatctaataggaattcagtgtcattacagatacggtctctagtgaccaggtgaagacaattgaagctttggtagaacttctgcaaaagttaggtaaagaagaataaatccaatttatcagctttgttcatattctttttctgagtgatctaaatttttcttgcttgtgatcattagctaagacaaggagtgttaaaggttttctaaatgcaaacacatacgtttctgcatttcagaagtcagtcttgatagtaaatcctacaaactctcaactttctgcattgtattttaagtctatacaatgttagagcacatggtaatgtgggacagagttgattatatgatagcatgagaaatttgcactggttggtgttacaaaccaatgatctaaccagcatactctccaaatatgaaaaagtaaaaacatctcattaggtttggaagagcctaaggtagtccatacaggaagtttgcctgagaacagagaggagcctgttgattggcatggctcatgatgcctttcttgtatgaattatcaaaactgatactgagttgcccctagaaaacagccttccagaatatgtttgcttatttatggtggaagaggaagtgagaacaagatgagagtttcccttaaagtgaggagaatcattatacaactttgcaactgaagtatgtttccttgtagcaaacctttggtttattttatcgtcaaatcaaagccaccctcagttttttgtatggtgccatcaacctaaggaggacaatcaaataacctattgtttgccttggattcagtatatctactaagtacacagtctcgtataccttcaaaccagttacttgactaaacttccaccatattaccttagttcttcctatgccctttcctctgtgccaccacaaatcagagggaaagactgcagtacttctagaaagttgtggacttctaagaaagagccaggcttccatctcactatcccttgatcattatctctgaagtccctacctgcacttccctgattgccctgtagcaacaccagcatggtgggaattggagggaaagattgtggaaaatccctaaagggtcattgttcatgacgttattttgaattgtaaaattgtgagccactcacatttcaattacaaaaagaacagaactcttaatcacgttgtgaagattaatttcttgccattttctggattagcacagaagcttgtatcaatgaagagtatttaggaggggaatagggggaaaattgtatttttctgttcaaactctctccttctatttgtgtttccttcacccctctccctccaccacactgtgttggtcaaatgatactattctatgaaaccctgagctatagttgtcaaaagtaactatggattgtgattagtcctctgtgggtgcttccttccctcttttttctccctcactctctttctcagtctccactctggtaaatggaaaaggtgatgtcgaagaattgatgcttgcttggactcatgttgtatctgtgactatgctattagctgtctcctttttccttcctatatgggtagaattcttatgacttatgaagttcccttcttgataagtaggttaaatgcacaatgtggtactgttttatagtttctagatggttgtataaagcaaaaagttaatgtggttatgtgtttttaaagaaaataagtgattggtcactaaactctgtccttttttcattattacaatttctctctgttttccaacagtttgctgactcctttgtcactggtgaa

SEQ ID NO: 6430 - DNA, 188 bp, Homo sapiens
gtgtccaattacattttggagaggtggacactgctatcactgcatacccatgccctgtgagggaacataggacttttctgcagaattcctggactaattattattccttatatatatctaggaaagattacaaaattaactgaccctaagatgaatatacccacaatgcaaagggaaaaataatttat

SEQ ID NO: 6431 - DNA, 2068 bp, Homo sapiens
acagtgaaagtcagaaattattaaaatgaaatctttaatgtgctgaaagaaaataactgcttacctagactctgcccagtgtagatatctttcacaaataagacgatataaagatattttcagataggtgtataacattcgtctaagtcaagatcgacaaacactgcctgttaaaataagacagaagctggaaacggaagataaacctgagagagaaagcatgactctggaatccacctgccatcagagctctctccagaccagtgctccttcccttcctcaccttcctgaatgcctcggcctggcacctgaactccccatcgctgctgccaccttcccccacccacttctttctctttcatgtgtgctacttcatcaattttttaaaagaaattctagtaaaaaaagaaaaatacctcatgacgattttctttttaaaatcatttgcttactaactaaatcaaatgttctatcccatttaaaacaaacaaaaaaaccatctttagatcagctttctctctccaactactgcccatctttctgctgtcctttatagcaaaactcttcaagaggcgtctgcacttgctgtctccactctcacttctctcccattctctttttcattcaagtatgtattcccaatactcaaactaaaccacttttgttaataatctataataataatattgtagtgcctactatgtagctgacagcgttctaagccttttacctttattaaatcctcacaacaatcttaggaagtaggtgctgttatcatgtcttttactgatgacactgaagcataggttaagtaactcatccaaggtcattacagctagcaagtggtagagccatgatttgaatctagacagtctcccagagcctgtgcttttagatcgtactgcccattttgctaaatccccttgtcagttctctgtacttatttaccttactttacttcccagcaaagcactttcttcacttgacttctcagaaactacagtctcctgtctcactagctattccttgtccactcctttactggttcttcctcctccccccaaacttttaagtgttagagtgttccaggatttaatcttctgccctcttgtctcctctagttgtattattcctaaacctattatgtgaaatactgtctttatgctatctccagccataaactttcccttgaactgcagactctcgtccacctctctactgaattctcccatatctaatgattagctctaacctaacaggaacagccctgcatctctgatcttagtaaatggtgtcacctttcccttagaccaaaaaccctaagacgactcacatcgcatgtcagtaagtcctgtcagctccatctttataaataaatcctttgtctgtctgcttctcatcacttctgttattaccacctttaagtcaccatcatctcttttctggactgctgcaacagcccttctaattggtctgtcttcagctgttcttgtctccctttgatctcttcaccattcagcaggacctttttcaaacaaatcacttcattctcctgttgttctctcattgttctccattagacctaaaatttaaactatgggttataaggccctctgtgggtgggccctcttccacccctccatcattatctcctgctattttaacctcacttattcttagcccccactgaccttgctgttgtttccaacttgcctttttatacttgccattttcctctgcctgggatgctttcctccaggatttttacatgacttgcttctttgtatcagtcaggttttcaatagctgccatgtcttcaaagaagctttccctaaccagtcttaatgatggcatactctattcccttgtcctgctttattttcttcacagtagttatcattagccgattgattgtttacttgctcattgtctgtctccaccactagaaattacaccccataagggcaaaaaggctttgagtcattctgtgcctttactgccttatggcagacattcagtaaatatttgtcaaataagttgaaagaatgagcactctaaaactgcattg

SEQ ID NO: 6432 - DNA, 2068 bp, Homo sapiens; identical to SEQ ID NO: 6431

SEQ ID NO: 6433 - DNA, 301 bp, Homo sapiens
cattttccagccctgtgtgagctttgaggattgttttgcttccttctactggtggttcattttttctgaggcgggagtttattttctcacatgcttagatcagtagtcagccaaacccttagggaacccccacttgaggtggctggagctctctctctgttcagcttcctcctttctgacactctggcacatagattctaaatacctgatctccctgaactcagaggttgtctcaattaagtggaaacttcaggctcttggtttcttctccctgtcatttggcctggagactgcttacagg

SEQ ID NO: 6434 - DNA, 301 bp, Homo sapiens; identical to SEQ ID NO: 6433

SEQ ID NO: 6435 - DNA, 301 bp, Homo sapiens; identical to SEQ ID NO: 6433

SEQ ID NO: 6436 - DNA, 483 bp, Homo sapiens
cttatgacatgcctttatgtggtttttgtttatttatttatatttttaattttaatttttatttttgagacagggtctcactttgttgctgaggctgttgtgatcatagctcactgcaaccttggactcctgggctcaagcgaacctcctgcctcagcctcctgaatagctgggattacaggtgtgcaataaaaagtattcctggctaatttttactttttttttttttttttggtagagacaaggtcttgctatattgcccagctgatcttgaacttcttggccttgaacagtcctcctgccttagcctcccaaagtgctgggactgcaggcatgcactaccatgcctaattttcttttattttttatattcatataataaatacgatttatttatttatttattttgtttgagacagggtcttgctctgttgcccaggctggagtgtggtggcacgatcatagcttactgcagctttgact

SEQ ID NO: 6437 - DNA, 483 bp, Homo sapiens; identical to SEQ ID NO: 6436

SEQ ID NO: 6438 - DNA, 483 bp, Homo sapiens; identical to SEQ ID NO: 6436

SEQ ID NO: 6439 - DNA, 935 bp, Homo sapiens
ctgtggttgcagatagtaaatgctattaaaagaaagagcgtctgtaatactggagcttgacaacagcagcagataaggaattttcctgaatttttatttcctgctagtgtggggacaggagtggtggctggatgtcaggggagagttcgggtttgttggtctcattttctgtcttatgtggctgaggaagcggttgtctgtatgtttttgatgcagtcatatgtcatagtttggacgttctcttgcagggagggcaccgctagtcaatgagtggaacctcgatttaaaggtctttttatgaaacggattttcatgtgaagcgtgtaactcttacagatatttgagtaaacctcaggctcattgttggtgtcctgtgtggtcatctcatatagcacggttttgcttacagaacttgccttcttttttatgaaacggtttcactttcacagaaccccagtgttgcacgtgatacagattgagaaacactgtcctatatgtttagcattttgatacttgctactactttttactttcagtggcacaaaattatggtgtcattggtttattgggatggttttccattgtatccagcactgatgggctcttttcttatttctggaagtctgtgtgccaccgttgtatttttttgtgcgtcagaacgtcaacttcataagcttaaaatactcgtcagagagccatatagaagtgtgtaattgaacacaaaatcatagaataagtttgacctggaaaccataaaactccttcctagtgacattttacagctggtccatttaaagagacatccttcattcccaataaattattctgccctaaaaataatgcttatgctttggtaaggtgctgttagctaccttacagccctcattgtctactagttgggacaaagaacgaaaaagtaaaaaataaaaaaaaaa

SEQ ID NO: 6440 - DNA, 935 bp, Homo sapiens
ctgtggttgcagatagtaaatgctattaaaagaaagagcgtctgtaatactggagcttgacaacagcagcagataaggaattttcctgaatttttatttcctgctagtgtggggacaggagtggtggctggatgtcaggggagagttcgggtttgttggtctcattttctgtcttatgtggctgaggaagcggttgtctgtatgtttttgatgcagtcatatgtcatagtttggacgttctcttgcagggagggcaccgctagtcaatgagtggaacctcgatttaaaggtctttttatgaaacggattttcatgtgaagcgtgtaactcttacagatatttgagtaaacctcaggctcattgttggtgtcctgtgtggtcatctcatacagcacggttttgcttacagaacttgccttcttttttatgaaacggtttcactttcacagaaccccagtgttgcacgtgatacagattgagaaacactgtcctatatgtttagcattttgatacttgctactactttttactttcagtggcacaaaattatggtgtcattggtttattgggatggttttccattgtatccagcactgatgggctcttttcttatttctggaagtctgtgtgccaccgttgtatttttttgtgcgtcagaacgtcaacttcataagcttaaaatactcgtcagagagccatatagaagtgtgtaattgaacacaaaatcatagaataagtttgacctggaaaccataaaactccttcctagtgacattttacagctggtccatttaaagagacatccttcattcccaataaattattctgccctaaaaataatgcttatgctttggtaaggtgctgttagctaccttacagccctcattgtctactagttgggacaaagaacgaaaaagtaaaaaataaaaaaaaaa

SEQ ID NO: 6441 - DNA, 493 bp, Homo sapiens
taggaaacacagaggctgagaagcagcaatgtatatcgaataaatgacatcagtgagaaagtagagagaatcaggcaaaggtaatagtcaaagaaataactaagaattctctacaattaaagaaaaacataaattctcagattttagacatagagattcaaagcaagatgaattacacgttgatccatacctaggccgatgcaatggaggccgcggagcaccaggcccagggtgaatctcccgagagcaactggagagaaaacatggctgcctacacaggaaccgctattccactgacccacaggctgggggcgggttctcaaagcgaagaaggacgtggctcttttaacctgagcggccacgtccagcaaagtacagtcctttagaaagggcgatgggccgcaggaggcagagcgggggagcttgctgcccatagaatctaaggaaatagttaatgatgcactcgctgcagggaagagcacactgaaccacg

SEQ ID NO: 6442 - DNA, 493 bp, Homo sapiens; identical to SEQ ID NO: 6441

SEQ ID NO: 6443 - DNA, 317 bp, Homo sapiens
gcatagatccaaatggtggttttaccatttactagtcatatgattttatgctgcccataattcaatatcatcaagctttgttttattcatgcaatatagataaaacagtatctatctcatttaaaccattgcaaaattaaatgggatattctagataaagctccttttatagtgcctgaaacataacatggacttaaataagaaagggtaattattcttgattatgataaaactatcaagattctggatgtattttagccaaggcagagtaaaaagagaactgagacaagaggcagaaaatttacatttgaatcaaa

SEQ ID NO: 6444 - DNA, 318 bp, Homo sapiens
ttcggcccggcccggtggctcacgcctgtaatcccagcactttgggatgctgaggcgggtggatcacgaggccaggagatcgagaccatcctggctaacacggtgaaaccccatctctactaaaaatacaaaaaattagccgggcgtggtggcgggcgcctgtagtcccagctactcgggaagctgaggcaggagaatggcgtgaacctgggaggcggagcttgcagtgggctgagatcgtgcctctgcactccagcctgggcgacagagcaagactccgtctcaaaaaaaaaaaaaacaacaagaaacaaaaaaaaa

SEQ ID NO: 6445 - DNA, 532 bp, Homo sapiens
aataggcacagtcctgaaagagcacagtcctgaaagagcacttctaattgggcatacaagcaagctcataataaagttctcctaggaagttttcctcatgttttgaagatgatacacttagtccctgactggggatggtttcgcttacactttttcaactttacgatggtgtgaaagtgatacacgttcagtacgttcctcaattaacaatgaagctatgtcccgataaacccatcataagttgaaaatatcctaagtccataatgcacttctgatataatggtattttcaacttacagtggctttaccaagatgtggcgcattgtaagtcgaggagcatccatccctgatgggatatataaggatgagatttatgcacagatgttcctcagcttatgatgggatcatgtcccagtaaagacactgtaagttggaaacatctgaagtcgaaaatgcatttgatatacctaagctatcaagcatcatagcttagcctcacctgccttcattgtgctcagagacttaaacgtta

SEQ ID NO: 6446 - DNA, 1502 bp, Homo sapiens
ggagaactatttcctgtgactaaaagtggtttacatattggtgctttagcaggaattttggagggtggcttaagtgaataattaaaacagaaatcttcctagacgatgtttatcacactcaagacattaaaaattagagtcaagggactgctaagacttggggtgctggtgggtgaggctgcctttcagggaggccatgctgtgagttgagaatcctaggccaccttgcctgcactgccagctttgcagctgtgggcacatctggatccccatttctgtgcgggtgcagacaggtgaatgttacctgcgtgcatcataaaatgctgtgaaaggggtcacaggtattgcccaggcttgggcagactcattcatagggctcactggcttgcatgagaagggatgctgggcacggtaaacacagaaggagaaggcaggctctgctgccaggagcttgcaccctgagccacgtggaactggtttgcctgtgaagcaataggcacagtcctgaaagagcacagtcctgaaagagcacttctaattgggcatacaagcaagctcataataaagttctcctaggaagttttcctcatgttttgaagatgatacacttagtccctgactggggatggtttcgcttacactttttcaactttacgatggtgtgaaagtgatacacgttcagtacgttcctcaattaacaatgaagctatgtcccgataaacccatcataagttgaaaatatcctaagtccataatgcacttctgatataatggtattttcaacttacagtggctttaccaagatgtggcgcattgtaagtcgaggagcatccatccctgatgggatatataaggatgagatttatgcacagatgttcctcagcttatgatgggatcatgtcccagtaaagacactgtaagttggaaacatctgaagtcgaaaatgcatttgatatacctaagctatcaagcatcatagcttagcctcacctgccttcattgtgctcagagcacttaaacgttagcctgcaattgggcaagtcatatccaaacaatgctgacagcaccgcacactgtagggtatcagttgtttaacttcgtgaccgtgtggctgactgagagctgtgaatcactgacattgcccggcattgtcagagactatccgaccgcatatcgctagcccaggataagagcagaattccagatttgaagtacagtttctactgaaggcatattgctttcgcaccatcgtgaagtcagaattgttaagtcgagccatggtaagttggagaccatctgaataacaggatgagatgtagagcaggatatatatgttagaaacaaagtttcgcgaacagtgcaaacgttttctagatggactatcctactcttctctatctcattaaacactttgctggcagcaactcactgagttgaattcccgctccaccagtagcctcccctgggcgttggaaggctctgccctctgatgggggtctccc

SEQ ID NO: 6447 - DNA, 1502 bp, Homo sapiens; identical to SEQ ID NO: 6446

SEQ ID NO: 6448 - DNA, 615 bp, Homo sapiens
ccttgcctttgcaggtgagcgggtgcagggaggtgcggggtggggtggcggctgcagcagtggtggttgggggccctgcaggctccctcggggtgtagcagggacatggtgtggtggttaacaggagtaggccactcatgtgggacgtcaggactagtgccacaaaggcagccctgtcacacgaacaggttcttgggggacagaggtctgtctgggactggctaatgacctggaaagactggagaggcaccattgtccaccaccagatgtatggctgcagggtaggagtagacttaagaaggaacactgttggctgggcgcagtggctcacgcatgtaatcccagcacttcgggaggccgaggcaggtggatcacctgaggtcagaagttcaagaacagcctggtcaacatggtgaaaccccatctctactaaatatacaaaaattagctgggcgtggtggcaggtgcctgtaatcccagctactctggaggctgaggcagaagaatcacttgaacctgggaggcggaggtcgcagtgagttgagagatcacgccattgccctccagcctgggcaacaagagcgaaacttcgtctccaaaaaaaaaaaaaagaag

SEQ ID NO: 6449 - DNA, 615 bp, Homo sapiens; identical to SEQ ID NO: 6448

SEQ ID NO: 6450 - DNA, 669 bp, Homo sapiens
ccgcctagcatttttcattggaaaggtaatggcaaaacagtatgaaagaaccttaaaagctcatacttttgttcattcaacaaacatttcttctgttctgtattacgctttctgctagatatgaaatggatactgccatcatttctcaggtcttttcattctgatatatttctttttattctttatccatatgcaggcatagtctattcattctaaggcatagtggacatacggtttgctttgcctttctgtttggttatattgagaatgtttttctgggttactgtaaggtgtctcattatcatttataatggctatataatgaccctttgagtttcagtatctaaccaaaagttccaaaattggggtaatgattatttattttgaattcttaaaaaaacccagcattgtgttaggttggttacccgataacattgtacttgtcaaaaatgcttagggttctagtcatggccgaagtaaatcatttccacctattaagttgcagtgagttaattgcccagtagatgctggaggctggctttatctctaaggctgatcttgatgacttcttcccctctgagttggtgttctttggcattcttcagaaaggtcggtttgtgttatatcttaacattatgtctcagaacacatcgccactaggtggcaggc

SEQ ID NO: 6451 - DNA, 669 bp, Homo sapiens; identical to SEQ ID NO: 6450

SEQ ID NO: 6452 - DNA, 18820 bp, Homo sapiens
tttctcccataggctgtagagggcttactaaatccacaagtggtgctgatgctaccttctgctgcgctacagggaatgccacctcttggtcctaaaagctctgcaggatggccgggcatatgggtctccatggtgcaacaaacagatcacaaggtcagtagccatcttcgaaaagtagtgagtattggactgcgactgccttttgacatagatagtactgtttatgtccaggggtttcccttttttctagtaggtaggtcggacacttagacttcctacttctgagaggtgagaattgttaagtagttgttttccatctggtctctaccttctccccatgttggatatagaaaaccagtaccttgttttggggaataaattgtaggtcattgttttaaaaggttacagtgatttctcagaagtggtattcgtgtataagtattttaatgtcttaaatggaatactctgtatcctaggatttgaaaggaaagcttgggctatctgttctatttcattactggctgtttttaaatttggacactgatttggagttgaatctcaaggcattcttagtttggagcaaatttccattgagtaaaatgggcccttttacagtatggttaagcctatatgagtaaagatattgaactttttctaggtgcctaattgaatgtcgagatgaatataaatataatgtggaggctgtggagctgctaattcgcaatcatttggttaatatgcagcagtatgatcttcacctagcgcaggtatggaaggaatttacttgcacggacaaaaggactcagggaagtacgtttgctcttaagtgttttccctctcacattatgttttctgtgttgccagtcaatggagaatggcttaaactacatggctgtggcatttgctatgcagttagtaaaaatcctgctggtggatgaaaggagtgttgctcatgttactgaggcagatctgttccacaccattgaaaccctcatgaggattaatgctcattccagaggcaatgctccagaagggtgaggatgaaatgctttgagatccctgtgcatttagtagtcttctaatatctttaggaatgaatatgcagacttactaacattacttgttataactgctttaccaaccacatatgggtgggtagctttggtaagggctaatattgtcacttgaagtatgaaagcctaattgactgccaagtcttcttggcacagagcagtacatacggtaccagacttagtgtcagagtcctatgtttaagccctggtcatgccacttaaaagctttctgattttaggcaaattgacttatcctccttaaacctattctttatagaaaaatggaacataatttctcaaagaactattggaaatcaagagaagtaacgtaaagaaagcatggtacatagtaggcaaacagtgaatatttgtcgactctgaacatcagtttcatttaaatgaacacgttttttgggcaagaagtagcttaactgagggcagttgtttgtgtgttgtatgctcatgagcaagcggataagagactaagtatagttttgtttcagtgtggaagtggtaaagcgaagtggtaaaccactctggtggttgctgttaaataagcaaactatacatgcgtatgtctgtaaaatcacaactacgaggagactgattttcaccctttatttattgtgctagattgccccagctgatggaagtagtgcgatccaactatgaagcaatgattgatcgtgctcatggaggcccaaactttatgatgcattctgggatctctcaagcctcagagtatgatgaccctccaggcctgagggagaaggcagagtatcttctgagggaatgggtgaatctctaccattcagcagcagctggccgcgacagtaccaaagctttctctgcatttgttggacaggtagagcttttggaaagaaaggtgctttttattcaacataagtagggtgtgatgcctccaatattaaagctcagtattgcgtacatgtggtcagacagttacctccatactcatgcaaacccaaactgtcatcattatatggttaaattacagcctgttttctcatggttgatcactaagcagtaaaggcaacattccctcccaccgttggttctgtatattccatttcagttgtcacagctacaaagtacaatgggtcagataatgaataataaaactaccaaatgtatttttactagcactgatgggactgtgggctaataaatatgtaaaattctcacagtagcccacattaaaaaaaaatgacaaaacaaaaatgcttatttaaatggtagagtgttttattgtattttctaatttaaatatctacctaaacgtagtgacatgttcctttggaaaatacttcccagtattttcattagatttgatgcaagttggactttgacttaaaagggttaggaacaaagcacctaactgaaaatcaagtttggcaggaatgtttgtgaataggatgaacaggaaaaatgtcggaaccgagccatagtaccatttagcattcgttttttattatcactggttgctttcagcgactgtgagggaatcagacacaataagtccatgtgtcctaatttataatataacttggcaagagtggtacttttcctgaattgaccttggaatttcctttattagaactgttgtaattttttttcagggtgagttgtctgcttatttctgcagattgaccattatatttcttcaaactgaacccaaaacttttaggtatattgctaaagaaagattacaaattaggtctcttttcaaattaatgacaattgaatgtggaagaactgacttcaattctagaagttatttgaaactaggtttacttttcagccaggtgctgtggctcacgcctgtaatcccagcactttgggaggccgaggcaggcggatcacgaggtcaggatatcgagaccatcctggctaacacagtgaaaccctgtctctactaaaaatacaaaaaaattagccgggtgtggtggcgggtgcctgtagtcccagctactcgggaggctgaggcagaagaatggcgtgaacccaggagatgaagcttacagtgagccgagattgcaccactgcactccagcctgggcgacagagcgaggctccgtctcaaaaaaaattaaaaaaaaaaaagaaattaggtttacttttcaaaatgaatgttactcagtaaatcataccgagtatatttctcccctaaaagaatccagggaattacaaagcataccctactgaaaagctattactgcatgttttatagtctgatttataatttgaatggaagaaattggaatccattggtctttctgatcattgctatttcgtgggtatggatgtggcacctgtctcagcccttcctgctggcttatttgctctcatttcatctttctcttgaaaaagatagtgtattatacttttctgtgctgttttgtatccttttgaaaattctttccttcttgcgctcctccttgaccatagtactcagtcctaatattcctcactctctgttagttttacagataccagtgtagacaaaaagtccctttgccatgctggcattctgtcccagcagggtacagtattatcgtagtccaaccagttcagttgtctttactgcttatcaggaacagttaagttgtttcaaaaatttcaagataaccttgaagttttttttttcggaacttggtttctgtgtttagtaagtagtgaactgttcttcctctgtagccttaatgcatattttactgttgtctttttttgtttgtttgtttaaagggttgaggggaactagccaaataacattcccactgtgcttcacttctagttcatatgtcatatagtttctaatttttcctttcttttaaataaacttgtgtttcccacattattttaacttaatgtaacattttattacattaaaatacctagatcagatttgtatttccatttggtacttacctgttgtacaaattattgatttttctgggggtagcttgttggagttttaaaatctttgttattggttaattcagtttgaggaaattatcttcaaatccttcagaagtaaattaccttaaattctgtgagaaagtaaaatatgtgcaatttagtcttctccttggagtccacaatgtcttaacatgacttacagttaacgaacagtttgttttatttgcatggttaatttttcacattatttggtggggacctactgttcaaaattgccatgataatctgtctgtcagtttccatcttccctgttctacattaaacttaaaactggaggaattctgtcatggcaccttaatgggaaaataattctgataatacatttattacaatgtaagaattagaaatatgacagtaggaacaaatgagaatatctcttaagcctgaaaattaaaggtatatgaagtttatttgtgtgtgttacctcattgtgtctttattttttgttcctgttgtagatgcaccagcaaggaatactgaagaccgatgatctcataacaaggttctttcgtctgtgtactgaaatgtgtgttgaaatcagttaccgtgctcaggctgagcagcagcacaatcctgctgccaatcccaccatgatccgagccaagtgctatcacaacctggatgcctttgttcgactcattgcactgctcgtgaaacactcaggggaggccaccaacactgtcacaaagattaatctgctgaacaaggtctgaaatcctttcttgccttagtcttggtctacatcagtggggtgttttatttatttatttattattattattttttatattgtttctttgagagagtctcactctgtcacccaggctggagtgcctccgaagtagctgggaatacaggcatgagccacgattcctggagcttttctatttttagtagagtcttaccatgttgcccaagctggtctcaaacttctggcctcgagtgatccacctgccttggcttcccgtagtgctgggattacaggcatgaaccaccatgcctggccacatcagtggtttctttttatttgagatggagtctcgctctgtcgcccagactggagtgcagtggtgcaatctcggcttactgcaaactccgcctcctaggttcacaccgttctcctacctcagcctcgtgagtagctgggactacaggcacttgccaacatgcccggctaatttttcttgtattttttgttttgtttgttttctgttgttttgagacggagtctcactctgtcacccaggctggagtgcagtggcgggatctcagctcctgcaagctccgcctcccagattcacgccattctcctgcctcagcctcccgagtagctgggactacaggcacccgccaccgcgcccggctaattttttatatttttagtagagacagggtttcaccatgttagccaggatggtctcgctctcccaaccttgtgatccgcctgcctcagcctcccaaagtgctgggattataggcgtgagccacagcgcccggccacgtcagtggttcttaaccctattgggtccctcaagtgacccgcctgcctcgacttcccaaagtgctgggattacaggcatgagccaccatgcctggccacataagtggttcttaaccctattgaggccaacccttcccccaaacattttgttaatgtctcttttctgtcctgaaattaaatttgtaaataatatgtaaacatacccgctctgtcttagaatatagtgccttaaccgaaatacaaaaagagatcataatgtatttcagtatgttaatgcttggtagtatgaatttgccccatatacagaatcactgtgagtgggtggctagacgtgcctcctgctgatagattggcaactcaagtacatgagtgatattagtcattggcttgatttacacagtggagttcctggaaatttgaatattaaaacaatgcaaaaatacttgtaaaaatggactgtgattttggatttgggaaattagagatgtgttcttcaagcccctcactgttcagtgggcaagtcaagtggaatgggatctctgcagcctaacagctttcctggcccctgcctactaaatgccaagataggagtaaatcattcccacatgtcaacttcatgtcagaccagacaaattagattgttatattgtgttaacatggtgaaatgtgaggggccttgctgatttctagagctgaagaagaaccattgggcatttgtggagaatattcaggtgtggtccaaggatgttgaaatgcaaagaaacacacaaaacactgaaggcggagtcagaccaatttatgaccctatcggctgccagcatgtaattttgtattcaaattgtatatatgctttcctttaatgttgggtttaagaatgcaaagtttaaaaagcatgacatcgaagtggtgagtggattatctgaatgatttacaagctctgatttgtgttttacgtaggtccttggtatagtagtgggagttctccttcaggatcatgatgttcgtcagagtgaatttcagcaacttccctaccatcgaatttttatcatgcttctcttggaactcaatgcacctgagcatgtgttggaaaccattaatttccagacacttacagctttctggtgagtattgtgtttgcgattttgtgttaaggtttgctggattaatgtagtaaaattttgggagtagaactcttgagcattttgagcctacattcatgtgctgttcactgtatttaagttggactgtgcttctgactaaggtttttcttctttcagcaatacattccacatcttgaggcctaccaaagctcctggctttgtatatgcctggcttgaactgatttcccatcggatatttattgcaagaatgctggcacatacgccacagcagaaggtgtggctgcagtttatctcctgtagatgaagactataactacctgggcttatttattagcattgcctatagatttctattagtcatttagtagtaattgtacttcttccaaacttagttgggaatgctatttagtgttcactcaagtcaattacttgactgcctctgcctgaaagccattcctcagtgattaggtgttgctgcttcaactcagttgtgggccacctgtgtcagtctctcaagtttttttttattgttttttcctttctttcttttaaaatgttttgcttctttatatacaggaatgatttattttacatatttgtcagttaagggtttttttgggggtaggggtgttgtttttaaagttgaaatccatgtgtgccctcataaatatctgaataaatctctgggtaacagggctctggagcttgttggttttacagactctcactttaaatgcggaaggctctcaaactaaggttgaggactactggctatgttattttgaaggattatgatcaagttctatttaagagttcattatctaattggtaatacaacacagttaacatgataagtttttttcctcccatcttggaattaaattggcaaatgagtactgcagaaagtaccattctttggcccctcagatcagaagaaatgtgactgctatgtaatggagtgaacttgacaaagaaggtgaaatagctcttaaatgaagttttgtttggtggagaagggcattctaggaggaaggaacacaacatattaaatgcaattatccaagaattaattgaacataattggtatagttgggggagggtgagcaggctgacattggctgaaaatagagaattcatgtcgtggactgaacaaggttatttgcgaagagttgagctggaagagagaaaggaaatggctgagacttaataaggaattaagaaaacacatttctagttgtcagtttctgcagttgactgttttgtgttctctcggaagtttactcctctccctttttaaattttgctacaggtacacagggaccattatgtcttgaaatctctggagccagtttttttcaaatattatttcccactatctccataataacttggtcctttttaatctttttaatgccagtcttttttcttttcttttctttttttttttttgatggagttttgctcttgttgtccaggctggagtgcagtgccacgacctcggctcactgcaacctctgcctcccaggttgaagcaattctcgtgcctcagcctccagagtagctgggattataggtgcccgccacctcgcctggctaattttttgtattcttagttgagacaggatttcaatatgttggccaggctggtctcgaactcctgacttcaagtgatccactggccttggcctcccagagtgctgggattacaggcgtcagccaccgtgcctggcctttaatgccgatcttttgtaaaagtacttaacattagtattctctacttatattagcatgaagaagataagtcagtgtagctgcttgggcgacttgtagtggctgaaaaacagctgagtataattatgactcatgtacatttctttctttcaggggtggcctatgtatgcacagctactgattgatttattcaaatatttagcgcctttccttagaaatgtggaactcaccaaacctatgcaaatcctctacaaggtaattaacttggatttattataaattaaaataactgagatcttaagaaaatacactttaggaatctgaggccttattttgtttttattaagcctttgaggcatgatatacattcagaaaagtgtaaaaatcaagtgtacttgcataactagcacccaaattgtacagtgtttgtatatgttcaactgtagaagatactacagttttacaaagcgtttgtaccagtttatacttgtaaacagcttggaggagttactggttttcccccatcttcatcttgccatacctggtattatctgtttttcattttaaccattttggcagttgtactgtgagatctcattgtggatggaattttgtttgttggtgatttatctttttttttttttttttttttttttttttgagacagagtctcactctgaaacccaggctggagtgcagtggcgcgatctcagcttactgcaacctccacctcccaggttcaagtgattcttgtgcctcagtctccctagtagcagagactacaggcatgtgccaccatgcctggctaattttttgtatttttagtatacatgggggatctcattacattggctacgctcgtctcaaactcctgaccttaagtgatcagtctgcctcagcctcctgaagtgctgagattacaggcgtgagccactgcacccaccctccttgatgacttcttaatgaggttttcatgtgtagatcagccatggatatcacctttttgtgatgctcctcttccagtcttttggctcttgtttgtatttttatttattaaataattctttatatgttttaaatacaagccctttgttgttactatatattcaaacatctcccactctcacagcttgcccttttactcccttaaaggaagggggaggtgtcttttgaggatcagaagctttaaaatttattgtagtcaaaattgcagatttttaaacttatattaaaagttgctttttgtgacttgtgtaggaaatctttgcgtgtctcagtgtgctaaggtgttctatttccactgatctgaattgtcagatttatgagcataaagtcgtttaatgttctgaaactattttttatgactgtaggatctgtaatgtcattcctgacattaataatttttgtgttttctctgtcagccttggttagggtttatcaatttattttttctaataactaacttgggccctgattttctcccttttcagtactttaaaaaatttattatatgcttttactctactttctttggttttcattagttcttttttttttttagcttctgaagatagacgcttacatcattgtatttttattttttgtccagtctcctcttctagcatattcatttcagcctgtaaactcttgatgcctagtttttcatgatacctaaatggaaatatttgataaatcatctgtgataatgttaattaaagcctaaaactttttaagaaatgttactaaagtatacttcattcttttgaggggggtggggggcttaagttacaataggaaaatgttactccattttccttagtgtggaaatatttttcttgttttttaaaaatagggcactttaagagtgctgctggttcttttgcatgatttcccagagttcctttgtgattaccattatgggttctgtgatgtgatcccacctaattgtatccagttaagaaatttgatcctgagtgcctttccaagaaacatgaggctccccgacccattcactcctaatctaaaggtaaggttccaactagttaaaggaaaacttatgtcttaatatttcagtcctttctctgataagtagactgttcagcactttcctacccaacataacacgcacactattagttaagggtactctttaaaggaaataatgttattaagcctgatagaaggtatgatattgttgctattgctgttgctggtgaatattggttcacagcatttttctagttgctagttttcatattaattttgatattaaatttagctctatttacagaaccacagcttaggtgttggggcagtcatttgctgggtgtgccccacatggcaaagaattgcagaacaaacagacctttgtaatctttttctttttttgaggcagagtcttactctgtgacccaggctggagtgcagtggtgcagtctcggcttactgcaacctccccttcgctggttcaagctattctcccgcctcagcctcccaagtagctgggattacaggcactcgccaccacacctggctaattatgtgtttagtggagatggggtttcgccatgtcagccaggttggttttgagctcctcacctcaagtaatctgcctgcttcggcctcccaaagtgctgggattacaggtgtgagccaccacgccctgccatagtctccatatttcacagttttgtgtctgtgcacttgtgcagttgttccttggtcccttgctattcttggaggattggttctaggacccactgggacaccaaattttaagtatgcttaagtcctgtatgtaaagtggcatataacctttgcatatccccttaaatgacatctgtagtgcttatgatacctaatgtagtgtaatgctattatggaaataactattttaaactatattaataactttttaaaatttgtgttttttattgttgtattattatttatttgtatttatttatttatttttgagacagagtctcactctgtcacccaggctggagtgcagtggcgcaatctcagctcactgcaacttccgcctcctggggtccagtgattctcctgcctcagcctcccaagtagctggtactacaggtgccctgccaccatgcctggctaatttttttttttgtatttttagtagtgacggggtttcactagttggccaggctggtctcaaactcctgacctcacgatctgcctgccttggcctcccaaaatgctgggattacaggcatgagccactgcacccggcctttattgttgtattattttttattgaccccatcatctacctctaccttcaccccccatattttcgatttgaggttaattagatatggaacctaagggtatggagaacccactgtatttttttgtaagttgttggaataaaggagagagaggaccacttaaaatctcaccaccctgacatggctactatagtttgtttaagagacaggggtctcgttgttttgcccaggctgaagggcagtgactattcacaggtgtgaacatagtgcacttcagcctcaggctcctgtgctcaagccgtcctcctgcctcagcctccagagtagctgtgactagaggtgcacaccactagaagtgcccagctatagtttagatgtagtctctactctttctgacacatgcatttttttttttttttttttttttgagacggagtttcgttcttgttgcccaggctggagcgcaatggcgcgagctgtggctcactgcaacctctgcctcctgggttcaggcgattctcctgcctcagactcccgagcagctgggattacaggcaccacacccagctaattttatatttttagtagagatggggtttctccatgttggtcagggtggtcttgaactcccaacctcaggtgatccgcctacctcggcctcccaaagtgctgggtttacaggcgtgagccactgcgcccggcttcaattttttttttttttttttttttttttaaggagtaagtgtgatgtctggtcttgctggggcttcttttcaaagactcttggtgagtgaggaatcttattccggattattattttgaaaccgaagtccaagaaaaatcagttagttgtgcaaattagacctttgcccaaaaggtatcttgcctctgggaaggaaatacattatagagtgggaaatttttatcattttgaaccagattctttaaagaaagaaagactgattaataaaatgtggcagctgtgctcttcaaggcatttatagtgtatatagttttagaaaaacagtcccaccacttaagcatagatgtaatttactaataaaaatgattctgcttgtgattcttgcattttatctgtggcaggtggacatgttgagtgaaattaacattgctccccggattctcaccaatttcactggagtaatgccacctcagttcaaaaaggatttggattcctatcttaaaactcgatcaccagtcactttcctgtctgatctgcgcagcaacctacaggttaattggtttggcttaaaactcatctacgtcttccatataaagcactttctatgtatggtcctgtgtgtggtccatttgggagttagtcttttattgtcatttccatcaattgggtgaggttgattaactggatttacgtattttactagttcatttaatcagtgatattttgctacagctttggacaagacagcactagaagagtagaccacagacagtcattagctgttggtactcctaggatttttctgaatacctggatgctgatttacatttctctataggatattttggaaagttatatatttacagtctgtatatgccatgcaactacaactttctctccaaatctttaattggcacagtgcatattttgattttataaactttactttagagctgtgccttgagcttcggcttcctgagggaaatcacatttctcttattgatacaaccacctttggagcatctgtgtgtttgttaaataacctcacaaattcaagcaagtgaatcacaataaatgtttggcctttccatgaaggtgtaagaagggtttagaaatactggtgctagaattggtcctctgcaggagtaagcataaggagttctgttttgctcattttaaggtatccaatgaacctgggaatcgctacaacctccagctcatcaatgcactggtgctctatgtcgggactcaggccattgcgcacatccacaacaagggcagcacaccttcaatgagcaccatcactcactcagcacacatggatatcttccagaatttggctgtggacttggacactgagggtgagtgaagcctgccagttttcagagtagagttctctgtgctttttgctacaatctgatcacaaaaatgtaaaaatgcttcaagccacaatagtgaaggaatgttctgtcagtatatttattcacaggtctagctgattattttatctttaattggacattatctgctcagtgcaggaaatacaaaaaagcataaaggaaagaattatccagaatcgtgcagtatcagttttggtgtatgtgactgaagttttttagtgtgaaaataaacttaaagtccctttaaacatagcctcttgttacattgttttgttaggctgccttatataagcatttttattggtgcgtgtttggcaggcatcttgttaaatgttcatgtataaagattaatgaataggactctcctgttctgcaaaaagctcacagtataactcctgttgcaggttgcagcttttctgcttgagctacatttcatttggtcctctatatttatcttataaaatagagaccccagttaggtgctaactagttgtacagtcctgtccagttttgcatacatatattttagggggacactactctttaactttgctattgattcttgagagatgaattgatgttgcatatatgctgcatgcctatatgtgggatggatttaagacagcttaaattcaagatataacaaaattgaataccatcacgtccaagagctcggcaataaaaggacggcagcctttagagaaacgtgtcactgtgacagactcacaaacacgaataatgtcaagcagaggcaaacaaccaaacccaattaagataatacttattccagtgtagtttagactaatcaaaatgtgggctgggtacccttagggtgtcaagacctttttaggagggctgtgaggtcaaaacttttttttttttttttttttgcgatagagtcttgctctcacacccaggctagaaggcagtggcgcaatatcggctcaccataacttccgcctcaggggttcaagcgattctcctgcctcagcctcccgaggagctgggattacaggcacacgccaccatgcccagctaatttttatgtatttttagtagagatggggtttcaccatgttggccacgctggtcttgaacccctgacctcaagtgatccacttgcctcagcctcccaaagtgctgggattacaggcgtgagccaccgtgcccggcccaaaactgttttcatcataaaacaacatttacatttttgggtctattctgtcatgagtgtacagttgaatttctcagaggttacatgaaatatactgtaacaagttgaacacagaagcagaaatgagaatccagctgtcttttattaagcaagacttagagatctgcaaaatgtagaaagacttagtgatgagtgtcaccagaaaatagttcatgtttcttacattagcacatagtgggtctgtttttaaaaatgaatatttttaaaatctaatttctaatgtggaaaattctgaaataaaacgcacagaaatgagaactctttggggtcccaagaaccactgctttaaaccaaagattaatttgaaagcctctgtcagaaacccaaaccctagccagttagaactgtcttcccatgttggcctttcagactaagtcctaagtcaaggtttcttaatttctaggtcgctatctctttttgaatgcaattgcaaatcagctccggtacccaaatagccacactcactacttcagttgcaccatgctgtacctttttgcagaggccaatacggaagccatccaagaacagatcacaaggtaagcgagcaggcttattttttaaatgcttcaaaaggatctcctccctttcatcttttttttttcctctttatgctttcagtgttcagtgaaaatccgtttggttggttttttttttgtttttttgagacggagtgttgctctgtcactcagtctgcagtacagtggcgccatcttggctcactgcaacctccgcctcccaggttcaagcgattctcgtgccttagcctctcaagtagctgggattacaggcgcctgccaccacgcccagctaatttttgtattttagtagagacggggtttcaccatgttggccaggctgatcttgaactcctgacctcaagtgatccacccgcctcagcctcccaaagtgctgggattacaggcgtgagccactgcacccggccttcagtgaaaatcttttacatgtccaataatgtgttaaatgtgggatacaattgtgagcaaaatggatggttcctgccctcttaatactcattctgatggacatttatcacaagatagggaattataaatcgcaatcatggcttaaatgaaaagtagtttaccacaaggcacattttgattaaaggtcaggagtttctctgaggtggtggtgataaccagtcctaaatcatgcaggcctatgaagtctatgttaaggaacttggacttttcctcattacctcgtgggttgaaagcagtagcaataacaggatcatactgcattttcctaacaatagttaggaatctgttgccagattgcctagactacatatagcattagagagattgtgatacacacacacacacactttaaaaattgggccagactcttaaaacttgctcatttgcctaattagtcacctatggtgctaaagtatggtattcctttgatttgtgtactaaaatttaatatcttattggatgcttagatgatgatgatccattttgtttatataaagctgcagtaagtctccttggacttgtaatctttgttatgcttcatgtacagcttggtacgtgaaaggatataaagttaagccaatgcttactgtgcattcggcaaaacttttcaccaagtttacactgtgacactcagcaactgttacgcttttttttttttttttttttttttttttttgagacagtctcgctttgtcgcctcctgagtagctgggattacaggcacctgccaccacgtccggctaattttttgtatttttagtagagacggggtttcaccatcttggccaggctggtcttgaactcccgacctcgtgatccacccgtcttggcctcccagagtgctgggattacaggcgtgagtcactgtgcccagcctgcagtgttagaatacttaattcttattttctgtttcctttttattgagagtgagcttatttatttatttaatttatctgtttatttgagacagggtctcactctgtctcccaggctggagtgcagtggcaccatctcggctcaccacaacctccacctactgggttcaagcgattctcctgcctcagcgtccgactgctgggattacaggcatgtggccaccatgtctgactaatttttatatttgtagcagagatggggtttcaccatgttggccaggctggtctcgaactcctgacctcaggtgatccacctgcctcggcctcccaaagtgctggattacaggcatgagccactgtgcccggcctgggagctcattctggaaattactactttttgtactaactttgtgtgccatgtactctgggctttatgtggcttcctctcccccatcaccccttattctgaacagctgtgaggtagataccattatctgcactttatataaatacttagtcttctacggctaagagcagggttcaaacccaggtattccaacctgtgctatttggagtatattaatccacctgtctttactaaaggtgaaaacttttgcatgtggttcaatagtcagggagaagttagaaaaaaagtaatggaagaataatcatgaatttgtatgcttctatacattaactagctctttctccctttttccagagttctcttggaacggttgattgtaaataggccacatccttggggtcttcttattaccttcattgagctgattaaaaacccagcgtttaagttctggaaccatgaatttgtacactgtgccccagaaatcgaaaagtgagttcaaagtaatttttaattgtctaggaatgagactggagactgaaaaccatctgtctctaggttgggtcagctgaatgagatgcaaggtattgttaggcctactctttaatcagagatttgtaactgtcttcatccttcaggttattccagtcggtcgcacagtgctgcatgggacagaagcaggcccagcaagtaatggaagggacaggtgccagttagacgaaactgcatctctgttgtacgtgtcagtctagaggtctcactgcaccgagttcataaactgactgaagaatcctttcagctcttcctgactttcccagccctttggtttgtgggtatctgccccaactactgttgggatcagcctcctgtcttatgtgggcacgttccaaagtttaaatgcatttttttgactcttggccaaaatttagaagatgctgtgaatatcattttgaacttgtgtaaatacatgaaagagaaaaccttgtctggaacttcttggctttgtgcaagctgtgtccaaggcaagtacataaactggtaccttgtaatgaagaggcagctgatgccatgcacttgtctgagggcatagctccatgtcttctgacattcctggtgtcccaaagaatagcaaaaagccagtttgaatattatgtaacttatttttttaatgtggacaggggacccttgaaaatcactaagttattaaaaatgtggatgtgctagaattggatatgtccaggaacatgggaagggctcactattggaatcccatgagtttccattttgtctctacccaaacgtattccaaagctgactgcatttgtaccatcttatttcttttggggattatacacctcagccgcctgagatgggggtcagctctttatataaagggaaaccagaccaggcgctaagcccacccctaccctcacccccccaatcctctcctgaaacttaaatacagtgggaatataggaaagggaaccaaatctcattaattaactgttctcccccattaccccactgaatgaatggccatacaggctaagctgtata

SEQ ID NO: 6453 - DNA, 10377 bp, Homo sapiens
attttatctgtggcaggtggacatgttgagtgaaattaacattgctccccggattctcaccaatttcactggagtaatgccacctcagttcaaaaaggatttggattcctatcttaaaactcgatcaccagtcactttcctgtctgatctgcgcagcaacctacaggttaattggtttggcttaaaactcatctacgtcttccatataaagcactttctatgtatggtcctgtgtgtggtccatttgggagttagtcttttattgtcatttccatcaattgggtgaggttgattaactggatttacgtattttactagttcatttaatcagtgatattttgctacagctttggacaagacagcactagaagagtagaccacagacagtcattagctgttggtactcctaggatttttctgaatacctggatgctgatttacatttctctataggatattttggaaagttatatatttacagtctgtatatgccatgcaactacaactttctctccaaatctttaattggcacagtgcatattttgattttataaactttactttagagctgtgccttgagcttcggcttccttgagggaaatcacatttctcttattgatacaaccacctttggagcatctgtgtgtttgttaaataacctcacaaattcaagcaagtgaatcacaataaatgtttggcctttccatgaaggtgtaagaagggtttagaaatactggtgctagaattggtcctctgcaggagtaagcataaggagttctgttttgctcattttaaggtatccaatgaacctgggaatcgctacaacctccagctcatcaatgcactggtgctctatgtcgggactcaggccattgcgcacatccacaacaagggcagcacaccttcaatgagcaccatcactcactcagcacacatggatatcttccagaatttggctgtggacttggacactgagggtgagtgaagcctgccagttttcagagtagagttctctgtgctttttgctacaatctgatcacaaaaatgtaaaaatgcttcaagccacaataatgaaggaatgttctgtcagtatatttattcacaggtctagctgattattttatctttaattggacattatctgctcagtgcaggaaatacaaaaaagcataaaggaaagaattatccagaatcgtgcagtatcagttttggtgtatgtgactgaagttttttagtgtgaaaataaacttaaagtccctttaaacatagcctcttgttacattgttttgttaggctgccttatataagcatttttattggtgcgtgtttggcaggcatcttgttaaatgttcgtgtataaagattaatgaataggactctcctgttctgcaaaaagctcacagtataactcctgttgcaggttgcagcttttctgcttgagctacatttcatttggtcctctatatttatcttataaaatagagaccccagttaggtgctaactagttgtacagtcctgtccagttttgcatacatatattttagggggacactactctttaactttgctattgattcttgagagatgaattgatgttgcatatatgctgcatgcctatatgtgggatggatttaagacagcttaaattcaagatataacaaaattgaataccatcacgtccaagagctcggcaataaaaggacggcagcctttagagaaacgtgtcactgtgacagactcacaaacacgaataatgtcaagcagaggcaaacaaccaaacccaattaagataatacttattccagtgtagtttagactaatcaaaatgtgggctgggtacccttagggtgtcaagacctttttaggagggctgtgaggtcaaaactttttttttttttttttttttgcgatagagtcttgctctctcacccaggctagaaggcagtggcgcaatatcagctcaccataacttccgcctcaggggttcaagcgattctcctgcctcagcctcccgaggagctgggattacaggcacacgccaccatgcccagctaatttttatgtatttttagtagagatggggtttcaccatgttggccacgctggtcttgaacccctgacctcaagtgatccacttgcctcagcctcccaaagtgctgggattacaggcgtgagccaccgtgcccggcccaaaactgttttcatcataaaacaacatttacatttttgggtctattctgtcatgagtgtacagttgaacttctcagaggttacatgaaatatactgtaacaagttgaacacagaagcagaaatgagaatccagctgtcttttattaagcaagacttagagatctgcaaaatgtagaaagacttagtgatgagtgtcaccagaaaatagttcatgtttcttacattagcacatagtgggtctgtttttaaaaatgaatatttttaaaatctaatttctaatgtggaaaattctgaaataaaacgcacagaaatgagaactctttggggtcccaagaaccactgctttaaaccaaagattaatttgaaagcctctgtcagaaacccaaaccctagccagttagaactgtcttcccatgttggcctttcagactaagtcctaagtcaaggtttcttaatttctaggtcgctatctctttttgaatgcaattgcaaatcagctccggtacccaaatagccacactcactacttcagttgcaccatgctgtacctttttgcagaggccaatacggaagccatccaagaacagatcacaaggtaagcgagcagcttattttttaaatgcttcaaaaggatctcctccctttcatcttttttttttcctctttatgctttcagtgttcagtgaaaatccgtttggttggttttttttttgtttttttgagacggagtgttgctctgtcactcagtctgcagtacagtggcgccatcttggctcactgcaacctccgcctcccaggttcaagcgattctcgtgccttagcctctcaagtagctgggattacaggcgcctgccaccacgcccagctaatttttgtattttagtagagacggggtttcactatgttggccaggctgatcttgaactcctgacctcaagtgatccacccgcctcagcctcccaaagtgctgggattacaggcgtgagccactgcacccggccttcagtgaaaatcttttacatgtccaataatgtgttaaatgtgggatacaattgtgagcaaaatggatggttcctgccctcttaatactcattctgatggacatttatcacaagatagggaattataaatcgcaatcatggcttaaatgaaaagtagtttaccacaaggcacattttgattaaaggtcaggagtttctctgaggtggtggtgataaccagtcctaaatcatgcaggcctatgaagtctatgttaaggaacttggacttttcctcattacctctgggttgaaagcagtagcagtaacaggatcatacttgcattttcctaacaatagttaggaatctgttgccagattgcctagactacatatagcattagagagattgtgatacacacacacacacactttaaaaattgggccagactcttaaaacttgctcatttgcctaattaaatagtcacctatggtgctaaatatggtattcctttgatttgtgtactaaaatttaatatcttattggatgcttagatgatgatgatccattttgtttatataaagctgcagtaagtctccttggacttgtaatctttgttatgcttcatgtacagttggtacgtgaaaggatataaagttaagccaatgcttactggcattcggaaaaattttaccaatttacatgtgaactagcaatgttagcttttttttttttttgagacagtctcgctttgtcgcctcctgagtagctgggattacaggcacctgccaccacgtccggctaattttttgtatttttagtagagacggggtttcaccatcttggccaggctggtcttgaactcccgacctcgtgatccacccgtcttggcctcccagagtgctgggattacaggcgtgagtcactgtgcccagcctgcagtgttagaatacttaattcttattttctgtttcctttttattgagagtgagcttatttatttatttaatttatctgtttatttgagacagggtctcactctgtctcccaggctggagtgcagtggcaccatctcggctcaccacaacctccacctactgggttcaagcgattctcctgcctcagcgtccgactgctgggattacaggcatgtggccaccatgtctgactaatttttatatttgtagcagagatggggtttcaccatgttggccaggctggtctcgaactcctgacctcaggtgatccacctgcctcggcctcccaaagtgctggattacaggcatgagccactgtgcccggcctgggagctcattctggaaattactactttttgtactaactttgtgtgccatgtactctgggctttatgtggcttcctctcccccatcaccccttattctgaacagctgtgaggtagataccattatctgcactttatataaatacttagtcttctacggctaagagcagggttcaaacccaggtattccaacctgtgctatttggagtatattaatccacctgtctttactaaaggtgaaaacttttgcatgtggttcaatagtcagggagaagttagaaaaaaagtaatggaagaataatcatgaatttgtatgcttctatacattaactagctctttctccctttttccagagttctcttggaacggttgattgtaaataggccacatccttggggtcttcttattaccttcattgagctgattaaaaacccagcgtttaagttctggaaccatgaatttgtacactgtgccccagaaatcgaaaagtgagttcaaagtaatttttaattgtctaggaatgagactggagactgaaaaccatctgtctctaggttgggtcagctgaatgagatgcaaggtattgttaggcctactctttaatcagagatttgtaactgtcttcatccttcaggttattccagtcggtcgcacagtgctgcatgggacagaagcaggcccagcaagtaatggaagggacaggtgccagttagacgaaactgcatctctgttgtacgtgtcagtctagaggtctcactgcaccgagttcataaactgactgaagaatcctttcagctcttcctgactttcccagccctttggtttgtgggtatctgccccaactactgttgggatcagcctcctgtcttatgtgggcacgttccaaagtttaaatgcatttttttgactcttggccaaaatttagaagatgctgtgaatatcattttgaacttgtgtaatacatgaaagagaaaacctttgtctggaacttcttgggctttgtgcaagctgtgtccaaggcaagtacataaactggtaccttgtaatgaagaggcagctgatgccatgcacttgtctgagggcatagctccatgtcttctgacattcctggtgtcccaaagaatagcaaaaagccagtttgaatattatgtaacttatttttttaatgtggacaggggaccttgaaaatcactaagttattaaaaatgtggatgtgctagaattggatatgtccaggaacatgggaagggctcactattggaatcccatgagtttccattttgtctctacccaaacgtattccaaagctgactgcatttgtaccatcttatttcttttggggattatacacctcagccgcctgagatgggggtcagctctttatataaagggaaaccagaccaggcctaaagcccaccccctaccctcacccccacaatcctctcctgaaacttaaaaacagtgggaatataggaaagggaaccaaatctcattaattaattgttctcccccattaccccactgaatgaatggccatacaggctaagctgaataatgacaaagttgaaaggaccaatacagccccttttataaggattttgaatgttttgcaaatgtattggtccctgtgttgtattttgtagccttttcctgggcttcagctcccctacttcttgtatgtgtatgcatactgtagctaaccattaaagtcatgacacacacatgagtccactgtgcctttctcagtagcagcagccagtgctggtggtgaggaggaaaagtggacaatccagccctgcagaccttggggccatggggaaccaccaactaacttcttgctgaatgattgatttgattgattgattgataggtcattcctactactaagctggcatgtttaaggaaattgtatttttcttcctatttatttcaacactggacaaatgctggagcaggtttatctggttaagctgagtttaaaatacccagttttaatatccttttcccccaggtattttttttttttttaaagaaaatgagtagatacgtatttaaaaacttaacccacttaaaatttgccttacctttcatgactgtcaagttttatggccagagaggacaaaacagttcaaaattaaataattgaagtcctccttgagtgatgtcttagggtttattccctgagaggtggtttgtgccatctagactgaactttgggtaactatcgagtgccagttacacagcttattaaatccagagtcttttcaataaaggttaagtgacttcctcaaactagacttagatttaaaccaggggtctacctccaaagtctattattaaatgctgaaacacaacaagacttacttattactaccgtatgtccactggctttggttaaaactgagaacaaaacagctgtaacatgctttaagtaacaattagcagtgattcccaagtctgctgttctcaatcctaaaacacatcacccttacctgagttaatcctagcacaccaactttgctacttttcctcttggtgtttagtaagcaaaagaaagatccaaattttcctctttttcaaacatcaatgagtattagcttagaataaagttcttattgctgttccttcagggaacagggaaactgctaacttgtcagttccaacaactgatgtaagatcatcttctgaccatagcgaacctgtaaggcttgctgttccctccagctgagtttcgcatagacttccttattactgagtaaaccttggtcagtttttaagtctgtggcataggtctgcaaagtcagtagaacactgttttgaagcagctgtctccacgatgctttgagcttgggaatatttgtgatcgtcaggctgccctcttcccttttatcatctccccctccatcctggtctttaagctctctgaactcctcagcaggcatgcacagtacctagaagcaaccacagagctctttaattagatgtactgcttttgtacttctgaaatgactcaggagactaaactcatcttagcatttattaaaaatcccacatttcctctctcatcttctagctattttgctttaaatacttagattatcagcattaaatggccattttcagccgtttacctttagtgtggtggtcagctcctcttcagtcagcacctcctccctccctatcacaaaggctccctcttcccctaccatctccagtttgcataggaaatcccagcgctcgtacactaggtgcctttcagcttcagtttttgttcctgtagatgaaacagcaatgtgaaagtctcagtacacccaagggttcatttcttctttagtctgccacccagtctacaaagtcaactgctatttagcaaagctatttaacctgaggcatgggtatagacacaccatcagtgtcaaatattgagttaatgatacactcaccctgtaatgctgcctcacgaactgtcaccatctgaatgtcagctgtgtcatctgtgttgtcaggatatggttcaacaaaaccgtacatatgaatcagttgccagttagccatttgcccataagtgttgaaaatctcatggcctttaggaatgggctgagtggctaccatccgaagacaattctgaggtgaaagggagaagctggggccatgcctttcacgggccagccccatgaagattatttccacttaagaagagccttcagcaggtgtagttcagccatgactgatgctgttaactaccaaagttctacctttagttcctgttagaccctaaactgtgaaacaaaaaagggttgggctaactttaaaaggccagcttcatgtttaactgggtggatttctgcacagtcctcttcagcacttaaaaagttgctagctttaaaaacgaaattttcggccaggcgcagtggctcacacctgtaatcccagcacttagggaggtcaaagtgggcagatcacctgagatcaggagttcaagaccagcctggccaacacggagaaaccccatccctactaaaaaatacaaaaattagccgggcatggtggcaggagcctgtaattccaactactcgggaggctgaggcagggagaattgcttgaacccaggaggcggcagttgcagtgagccgagatcacgccactgcactccagcctgggcgacacagtgagactccgcctcgggggggaaaaaatggaactttcgcagatcaaagtcggaaaggaaaatggaggcaaggattaagaaataaccatacttactaatttctgatcctataaatgtgccatcttttcaggctactttttatatagaatagagctggtataaacacagctttatatcagttctaggatcgtcttagacctttggcctgtgaatgtcctcatccctccaaaacacggagactatcactgttccaggctgctatccacagagccacacacagtctgggctcactgatgtgatcagccagaaaggaatgaaacatggctatgcagaccactcaatgtctagcactaaataaatgatggtagtatagtttatcagaggattaaccacaacttactttgaggactttaaaatgtttcgcattcaaatgattctacagtaatatgcatactaaaaggacatacaggaggagctgatttcacctactcattttgtagcactagtaagagaatggagcctaagacacaatggcttgaatcatgctcaatcagtgcaccaagagaaactccactcaccgcagagtattctagattggcgttgtgattggctaagtggtttagtatgtctgcagcaggcaccatcacgggggagttgggctccttttcatcctcttcttcctccagtggttcctgaaagctgccattgacagaacctggctaaggccctgtcttgggtgagggactgggggtggatttcactgtttttccacttttgtccctctatagagttgtaaagaaaagggttccgtcctcagaggccccacccactgacctataggccatcacaagggccaccagctggtggtagagttctagggagcgaacccctgaggctgaagagatcggggtgggcttccatgaagggcagcacgatggactggtactcgctgcggatgttggccaaatccttctccacggcctcaggtacgcctgtgccctggagcaggcaccggcgctcctcctctggcctgcagggacacccacacccaggttcccttcattccttcacacactttactgggtaggactggtgcaggggcggggaaactgttcttgcagcaggctacggtgcaggcgctccccaacccctcccaaggctctcaccagaacatcgggtgctccaagcggcccagctcgggccagagcgcaaagtagggcctccagcgtgaggccggggcctgcagctcgtggagcagcgccagcagcagtggcacccagcccgactggctctgcagcgcaactcgctctgaggaagacacaggtgtgagcgccccggcgcggcctcgcgggccgggcccgaaccgccccgccccgccccgccccgccccgccccagggccctagcccgccgccgtgcccacctcgctccagcaggccgccgatggagcaggtgtgctgcgacaggagcgcggcccgcggcaccacgaacagcagctctccggcctgcacgctctcccgggccaccatgccgtagccggccaccgtgccctgccggctgaccgccacctgagcaggagggctggtcagggcagcccgcgccccgccgcgggtcctccgcccgccggctcgctcgctcaccttgggactcagctccagccccacccgccggcaccagctcaggaagcaggccacaggatccaggtcgccgccgtccacgggccccgccacctgaga

SEQ ID NO: 6454 - DNA, 32191 bp, Homo sapiens
tgtgttctttttgaattttgtgcaatgtgtttgtacctattttgaaaaaataaaatgtaaagacttcttcaaggtaaaaatagcactgttgaatcataaacacagcaaaatgatattgagaatgatatacagagtaattctactttggggcctgttcttagaaatgatgacttgtctttaggataggataatggaattctcaaatacttagttgagttttctttcataagcttattctcatatctttcttaatcttacactatttcaggtgctcctgacctctgataaagctgcagccaatttctcagatcgttctttgctgaagaacttgggacattggctaggaatgatcacattagctaaaaacaaacccatcttacacactgtgagtttcatctaaatgtgtaaaaattgagaatcttcagcacattatgattacaagtattggctgtttggagctatttaatgattattggggttttgtaagattttggcccacgttttgagttgttaacccctttttgtaaggcaaggactagacattatgttgattcctgttttggggataagcttggcaaaatacttttctttggttttgttataccattttggggggtatattccccgcttttgaaagtatttttcttattctaggacttggatgtgaaatcattgctgctagaggcttatgttaaaggacaacaagaattgctctatgtagtgccctttgttgccaaagtcttagaatctagcattcgtagtgtggtagagtagattttaatattttatttatgactaatttctaagcattgctttgttttagcatgaggtcaagagattatattcttagttcttgtgaggtaaagctagttaagtctgttttcctctatggcacttggatttccaatttgagaggctagggtagaaataagaaagattataatggttggctttggtttttggttttttgttttgttttgtttttgaaatgtgatataggtgagaaggctaggggttttgttatggctacagaggtataagtgtttaactatgtttaactgtttttggttattttttaatccttgttttttgttttttatttgtttgactcccccctacccccttatgttgtattgaattgttttaaataatccaaattaaagggcacattttgggccagcttaacataatagcttttctttaggtttttaggccaccaaacccttggacaatggcaattatgaatgtattagctgagctacatcaggagcatgacttaaaggtaatttactgcttccttgtcctctggaacattctttgccttcacgttattaaaacgtacagtgaaggcagggtatttcgggggaagtactataataactgaaagtagagtatattatgagtaaaactaaagttttcttttaaaaattctaatccaactctggaactgtgcagttaaacttgaagtttgaaatcgaggttctctgcaagaaccttgcattagacatcaatgagctaaaacctggaaacctcctaaaggataaagatcgcctgaagaatttagatgagcaactctctgctccaaagaaagatgtcaagcagccagaagaactccctcccatcacaaccacaagtaagtgtgctaattagtcaaggaaggcttctgttagctaggatactatcttaaatggtacttgtccatgtatatcgcaaactataatttcccacataatgtagtggtgaaactttgtatacgttttggtgagccttctaattatcaagcagaagtaatgactaggccttgtgttaccatcttagattccatcctgacagttcatgcatattattaactaaatgtgatttaatcagttgcctctcataccccagctaggccaggttatctcctttgttgtgtgaagtcccagaaataactgcatactatgatggcctgttaacccctcaaatctgggtgtggccagacctgctagatctgccaagggaatgggactgttttatctacatgaagaagatgggagaagggtatgggagtgttgaatgattgggagttgtggttagaataaattgagcttttctttctttctcagtcctcagcagctgagaatccccagataaacctaggaacaggctaggttgaaaacatacatttataatatagactaagtttataggacttgggcctgacaatatggcatggctgctcagttgatttctgtgctgtggggcactggcactgacatagttaacatacttcgtgtatatctctgttataacaacagaatttccctttcagggtgggaaaaataggacctgctacatccttccctcctctcccaatttaattcgtttaattagataatgaccacttaatgatattaagctaattttataataagagtcaacaaatgtactttttaaatctctttttattacttgacatttagcaacttctactacaccagctaccaacagcacttgtacagccacggttccaccacagccacagtacagctaccacgacatcaatgtctattcccttgcgggcttggtaccacacattactctaaatccaacagtaagtaaacactgctccattctcccagcttctagtttgtgataaggtaaattttgtttggccaccttttcttcagctctttgcccttccctctggattcctaggtggtagagtttgtcagagaggatggagatctagaactgctgtgtagttcagttgggattgttcttcttcccttaagagatagagtgactagatgttagttatattggttcctcatatccaaacccatgatactaaaatttagctagcaataaaatcacaatctccaggaattccttacacagagtaaaagatgcttaatgtatatcatagctttttattttctttatcttgtcactttagccttctgcagtaagccatttcttccacctgaaggctggaaatgagctgattgtgggtgtgtatacaatttctaggctaagatcttgaagtaggacttagcactttgagttatgttgttgtggcctggttccagaaggaggtctgatacaatatggtcatgtaagatgacctctgatcagtcctttttcctatagttagtatttgctttgtacattcaaggggacattttattgttatctttagtcttttattctacttaacagaatatataatacagaatcaggtgagtggagttttcattgtccttactttttagaaactgaaaatgttcacaaatacaagagtaacattaatacattgaactttttattaaaaggaattgaaagggtatcagagaaatcattttatccttgtccccccatccccactcctatagacatggtacttagttttagaggggtggagtgagaggcagtgggacacctagatccagaaattgtgattcatctttagaatactcttagtgttgtgaacactattatatgctagtttaatttttttttttttaattcaacaagttaaagggaccaagtaagttttggggcataatttacacctgcaataaaagattagaaacagcctttcaaatgaagccagatacttcagtgggcactgtaaaatgctcactattctgatgaattaattttaatagtttttgtaagaagtcttttttctataaactttattctttttacattttcccaagctagtggagaagttgctttcttttaagagcacttgagccacaaattttaaataagccagcaatgtgtctttaagtagttaatgcatattgtaatgaacagtttgtccattaaacttggatttaaaaaaaagacatatctattattgtgtatcacagggtatactgaatacatttccctgtatggagctcagtttctgttacccgaattttccattggttaactttaagtagaaactggtagtttttggttaatcttgatttacaaaatcatgaatgtgattgccagtaggaattggattgtcttatttaaacaaggtgttgactttgtcctccccaaccccccagattcccttgtttcaggcccatccacagttgaagcagtgtgtgcgtcaggcaattgaacgggctgtccaggagctggtccatcctgtggtggatcgatcaattaagattgccatgactacttgtgagcaaatagtcaggaaggattttgccctggattcggaggaatctcgaatgcgaatagcagctcatcacatgatgcgtaacttgacagctggaatggctatgattacatgcagggaacctttgctcatgagcatatctaccaacttaaaaaacagttttgcctcagcccttcgtgtaagttggctatttccttggtataggtacaaaacgtattactgcttgtctgtaataatttttttctttgtctatatatggcactgggcattaccacttattcttaataatcaccatatttgtttgatgtcttccatcattttagattgtaattctgtgaggcaaagcatcatgtctgtgtgttttttttttttctgttatattctcaacacgatgtttgacagatagtagatacccaaatatttgttggtttaaataaattaagatttaaaaaggaaatgtgatatctgacaatctcatttctgttaaccaggaaggatgaaagctgtttgagaaggccgatacaaaatgacttaaagtgatgttgcatgggcacacacttttcaaataattcacttactagttttgagtctcagatatcatggttaataattcaggtatcatgattaataatttgtttactgctttaatgattttttttggttgttttttgccttttttttaatgtttcatgagacagggtctcactctgtagcttaggctagagtacagtggtgcagtcttggctcactgcatcctccacctctgaggttcaactgattctcgtgcttcagcctcccaagtagctgggattacaggcatgtgctaccacgccccactaatttatgtatttttttagtagagaagtggcttcaccatgttggctaggctggtctcaaactcctggcctcaagtgatctacctgccttggcctcccaaagtgctgggattagaggtgtgagccaccgcgtctggcctgctttactgattttaaggcatgttcacaataaactgataaggtgtctaggatatttttgtcttaaaagtgaggaagctgttaagactgtttcaagatcacagcttgttcataagtagagtcagaacttaaaatgcatttgccaaatgcactgcattttctactatcctgtctgtccacatcaactttcaagtctttttccttctattccccccacccccccacccacctccattaatagactgcttccccactaacaaagagaaatgatggatcaggcagctgctcaattagctcaggacaattgtgagttggcttgctgttttattcagaagactgcagtagaaaaagcaggccctgagatggacaagagattagcaactgtaagtgtttagaatttgccttttaagattttcttttttaatttagggaagtgccttataacaagaacctcagtgactttttttgtttgcaggaatttgagctgagaaaacatgctaggcaagaaggacgcagatactgtgatcctgttgttttaacatatcaagctgaacggatgccagagcaaatcaggctgaaagtgagaattggggctctgtctttccccgtcccatctttgttttatttttaatgttgttgttgattgaactccttactggaattaggacagcagggttaaatattgtttatgagaaaacatcttaacttgatagcatttcactgaatggctgcctgtggaggaggtatggaaatagctctaaattcccttgctcctccagagttgttgaagtgttattactctaaggagttcatgtgcctgctagttttcatgtttcccaacttgggcttctcacattaatggttgcttattgttcccagtgagacagtgagaaatctgataatatttaccagcttcaagggagaattgcactggcatcgtcccatgtgaggcattttccaagagaaactctcagttaatttataaatgaggtgactcttagcaggattcagggaaatgagaagccctcttctgaactgcatttgtgtgtgcgtgcatgcttaatcatgctgttatatgttgtaatgactcttgtgtccctgagcttacccacatgcagactttccactttcaaaacagtttattttgattattgagtgaattctgtcaaaataggttttcttctttcaaggttggtggtgtggacccaaagcagttggctgtttacgaagagtttgcacgcaatgttcctggcttcttacctacaaatgacttaagtcagcccacgggatttttagcccagcccatgaaggtaaatgtgttttagattaaattgagtgttttgccaattaatttaaatgtttttgacatttaatatatgtttttgacttgcttcctgggagaataatttacaggggaaaaaacacctatagtttttgagttgtaggtattctttgtgtccaattaagtatgacatacaggggattaaagaaaaattgacatgggtgtgggtgatttaactttaatgttcggcctaattaggggaattctcatggtaacataataactttcggttttttatttttaaattttattatttatttttttgagacagggtctttctctgtcacccaggctggagtgcagtggcgcgatctcagctcattgcaacctccacctcccagactcaagcgatcctcccacctcagcctcctgaggagctaggactacaggcgtgtgccaccatgctcagctaatttttgtattttttgtaaagatggggttttgccatgttgcctagactagactcaaactgctgacctcaagtgatcgcctaccttggcctcccaaagtgctgggattacaggcctgagccattgtgcccagccttcccattttttaaataaaagaattttctaaaattttcaaaggtgtttacagaaaacttggaaatatagggaaaaatattttcccccgaaccggtcgatagtaagttgctgacctgatacccccatcgctcctgaatcctttggtttgtatttcttacaaaacctttttcctttggtttgtatttcttaaaaaacccttttcctgtgtgaccatggtacaaccattaaggtcagaaatgaatactaataaccttactccatctaattcatagacctcactcgagtttcaccatgtatcccaataatgtatagtaaaagacctgttttagaatcacacatttcttcagttgtcatatttttaaagtctccctcagttctagctggtgtaggtaactcagtttttcctcatctttcatgaccataacacttctgaatattataggctaattattttctaaatgacttgatttgtttgtccagtgtattctcatgactaggttcaggtaatgtgtttttaaaaataggaatagctcagaagtaatgctgtattcttactctatcctatcaggctttggcagttggactgagtactgtatttttcatggtttgaaacacttactttcttaggatatagagggcttagtagatggtacaagtggtgctgccctcagtctgtctcattgttactaatgctctcttttatcacttgattatgctgctgtctgccaggttttcctctctcaaatgaaacacctcttcccttatgcctgccttgtactgtgccacttgatggtattaattctgaatagctcaggaagaaggaaaagaagaggccctccatgtttgaatgtaaaaataagaaaaagggagtaaacatactaatagacctctatttgatacatgtgtcaataaaaaaccttaacatttttttgtctcttgttggttgtttccttctgtaaaacagcaagcttgggcaacagatgatgtagctcagatttatgataagtgtattacagaactggagcaacatctacatgccatcccaccaactttggccatgaaccctcaagctcaggctcttcgaagtctcttggaggttgtagttttatctcgaaactctcgggatgccatagctgctcttggattgctccaaaaggttggttcttaagctattacttttagaaaatgctaggtgtgtaaacatttattgacctgcaccaccatctacatatttatgcagttatgcttaagatttcataatataaatcaagttctgtaagtaggtgatttttttttttttccaacgtagaatgtagtcatggcagttttgaatggtaaacttggaaatcttcattttttttcttaaagatattctggaaatgtgatttgaagaaactttaaaaggtagccctttagaggggtgtgtgtgtctgtgtgtgtgtgtctgtgtgtgtgtgtgtgtgtgtgtgtgtgtgtgtgtaagagacagggtctctctctgtcaggcttgagtgcagtgatgtgatcatgggcttaagtgaacctcccacatcaccttctcgagtagctggtattacaggtgctcactgccaagccaagctaatttttaatttttttgtagagacaggtcttgctttgttgtccaggtcgttctcaatctcctgggctcaagtggccctccctcctgagcctcccaaagcgctgggattatagacatgagccactgagcccagctgccctttagattttgagggacaagttgatccaataatttggatcagggtaggtagggagccctggattttaactacagcagagccttttatgacaatgaagagcacagaatgaacttaaatcagatagaatttagagtgtgtgtgataggcaactgaaagggatgtttggagagtggaaaggacagggaggctttggaaggtatttggtacttggcattgagatttggtttctggctgtgatagttgggccaagcactgtatttttcatggttttgaacgctttctttctcccataggctgtagagggcttactagatgccacaagtggtgctgatgctgaccttctgctgcgctacagggaatgccacctcttggtcctaaaagctctgcaggatggccgggcatatgggtctccatggtgcaacaaacagatcacaaggtcagtagccatcttcgaaaagtagtgagtattggactgcgactgccttttgacatagatagtactgtttatgtccaggggtttcccttttttctagtaggtaggtcggacacttagacttcctacttctgagaggtgagaattgttaagtagttgttttccatctggtctctaccttctccccatgttggatatagaaaaccagtaccttgttttggggaataaattgtaggtcattgttttaaaaggttacagtgatttctcagaagtggtattcgtgtataagtattttaatgtcttaaatggaatactctgtatcctaggatttgaaaggaaagcttgggctatctgttctatttcattactggctgtttttaaatttggacactgatttggagttgaatctcaaggcattcttagtttggagcaaatttccattgagtaaaatgggcccttttacagtatggttaagcctatatgagtaaagatattgaactttttctaggtgcctaattgaatgtcgagatgaatataaatataatgtggaggctgtggagctgctaattcgcaatcatttggttaatatgcagcagtatgatcttcacctagcgcaggtatggaaggaatttacttgcacggacaaaaggactcagggaagtacgtttgctcttaagtgttttccctctcacattatgttttctgtgttgccagtcaatggagaatggcttaaactacatggctgtggcatttgctatgcagttagtaaaaatcctgctggtggatgaaaggagtgttgctcatgttactgaggcagatctgttccacaccattgaaaccctcatgaggattaatgctcattccagaggcaatgctccagaagggtgaggatgaaatgctttgagatccctgtgcatttagtagtcttctaatatctttaggaatgaatatgcagacttactaacattacttgttataactgctttaccaaccacatatgggtgggtagctttggtaagggctaatattgtcacttgaagtatgaaagcctaattgactgccaagtcttcttggcacagagcagtacatacggtaccagacttagtgtcagagtcctatgtttaagccctggtcatgccacttaaaagctttctgattttaggcaaattgacttatcctccttaaacctattctttatagaaaatggaaataatttctcaaagaactattggaaatcaagagaagtaacgtaaagaaagcatggtacatagtaggcaaacagtgaatatttgtcgactctgaacatcagtttcatttaaatgaacacgttttttgggcaagaagtagcttaactgagggcagttgtttgcgtgttgtatgctcatgagcaagcggataagagactaagtatagttttgtttcagtgtggaagtggtaaagcgaagtggtaaaccactctggtggttgctgttaaataagcaaactatacgtgcatatgtctgtaaaatcacaactacgaggagactgattttcaccctttatttattgtgctagattgccccagctgatggaagtagtgcgatccaactatgaagcaatgattgatcgtgctcatggaggcccaaactttatgatgcattctgggatctctcaagcctcagagtatgatgaccctccaggcctgagggagaaggcagagtatcttctgagggaatgggtgaatctctaccattcagcagcagctggccgcgacagtaccaaagctttctctgcatttgttggacaggtagagcttttggaaagaaaggtgctttttattcaacataagtagggtgtgatgcctccaatattaaagctcagtattgcgtacatgtggtcagacagttacctccatactcatgcaaacccaaactgtcatcattatatggttaaattacagcctgttttctcatggttgatcactaagcagtaaaggcaacattccctcccaccgttggttctgtatattccatttcagttgtcacagctacaaagtacaatgggtcagataatgaataataaaactaccaaatgtatttttactagcactgatgggactgtgggctaataaatatgtaaaattctcacagtagcccacattaaaaaaaaatgacaaaacaaaaatgcttatttaaatggtagagtgttttattgtattttctaatttaaatatctacctaaacgtagtgacatgttcctttggaaaatacttcccagtattttcattagatttgatgcaagttggactttgacttaaaagggttaggaacaaagcacctaactgaaaatcaagtttggcaggaatgtttgtgaataggatgaacaggaaaaatgtcggaaccgagccatagtaccatttagcattcgttttttattatcactggttgctttcagcgactgtgagggaatcagacacaataagtccatgtgtcctaatttataatataacttggcaagagtggtacttttcctgaattgaccttggaatttcctttattagaactgttgtaattttttttcagggtgagttgtctgcttatttctgcagattgaccattatatttcttcaaactgaacccaaaacttttaggtatattgctaaagaaagattacaaattaggtctcttttcaaattaatgacaattgaatgtggaagaactgacttcaattctagaagttatttgaaactaggtttacttttcagccaggtgctgtggctcacgcctgtaatcgcagcactttgggaggccgaggcaggcggatcacgaggtcaggatatcgagaccatcctggctaacacagtgaaaccctgtctctactaaaaatacaaaaaaattagccgggtgtggtggcgggtgcctgtagtcccagctactcgggaggctgaggcagaagaatggcgtgaacccaggagatgaagcttacagtgagccgagattgcaccactgcactccagcctgggcgacagagcgaggctccgtctcaaaaaaaattaaaaaaaaaaaagaaattaggtttacttttcaaaatgaatgttactcagtaaatcataccgagtatatttctcccctaaaagaatccagggaattacaaagcataccctactgaaaagctattactgcatgttttatagtctgatttataatttgaatggaagaaattggaatccattggtctttctgatcattgctatttcgtgggtatggatgtggcacctgtctcagcccttcctgctggcttatttgctctcatttcatctttctcttgaaaaagatagtgtattatacttttctgtgctgttttgtatccttttgaaaattctttccttcttgcgctcctccttgaccatagtactcagtcctaatattcctcactctctgttagttttacagataccagtgtagacaaaaagtccctttgccatgctggcattctgtcccagcagggtacagtattatcgtagtccaaccagttcagttgtctttactgcttatcaggaacagttaagttgtttcaaaaatttcaagataaccttgaagttttttttttcggaacttggtttctgtgtttagtaagtagtgaactgttcttcctctgtagccttaatgcatattttactgttgtctttttttgtttgtttgtttaaagggttgaggggaactagccaaataacattcccactgtgcttcacttctagttcatatgtcatatagtttctaatttttcctttcttttaaataaacttgtgtttcccacattattttaacttaatgtaacattttattacattaaaatacctagatcagatttgtatttccatttggtacttacctgttgtacaaattattgatttttctgggggtagcttgttggagttttaaaatctttgttattggttaattcagtttgaggaaattatcttcaaatccttcagaagtaaattaccttaaattctgtgagaaagtaaaatatgtgcaatttagtcttctccttggagtccacaatgtcttaacatgacttacagttaacgaacagtttgttttatttgcatggttaatttttcacattatttggtggggacctactgttcaaaattgccatgataatctgtctgtcagtttccatcttccctgttctacattaaacttaaaactggaggaattctgtcatggcaccttaatgggaaaataattctgataatacatttattacaatgtaagaattagaaatatgacagtaggaacaaatgagaatatctcttaagcctgaaaattaaaggtatatgaagtttatttgtgtgtgttacctcattgtgtctttattttttgttcctgttgtagatgcaccagcaaggaatactgaagaccgatgatctcataacaaggttctttcgtctgtgtactgaaatgtgtgttgaaatcagttaccgtgctcaggctgagcagcagcacaatcctgctgccaatcccaccatgatccgagccaagtgctatcacaacctggatgcctttgttcgactcattgcactgctcgtgaaacactcaggggaggccaccaacactgtcacaaagattaatctgctgaacaaggtctgaaatcctttcttgccttagtcttggtctacatcagtggggtgttttatttatttatttattattattattttttatattgtttctttgagagagtctcactctgtcacccaggctggagtgcctccgaagtagctgggaatacaggcatgagccacgattcctggagcttttctatttttagtagagtcttaccatgttgcccaagctggtctcaaacttctggcctcgagtgatccacctgccttggcttcccgtagtgctgggattacaggcatgaaccaccttgcctggccacatcagtggtttctttttatttgagatggagtctcgctctgtcgcccagactggagtgcagtggtgcaatctcggcttactgcaaactccgcctcctaggttcacaccgttctcctacctcagcctcgtgagtagctgggactacaggcacttgccaacatgcccggctaatttttcttgtattttttgttttgtttgttttctgttgttttgagacggagtctcactctgtcacccaggctggagtgcagtggcgggatctcagctcctgcaagctccgcctcccagattcacgccattctcctgcctcagcctcccgagtagctgggactacaggcacccgccaccgcgcccggctaattttttatatttttagtagagacagggtttcaccatgttagccaggatggtctcgctctcccaacctcgtgatccgcctgcctcagcctcccaaagtgctgggattataggcgtgagccacagcgcccggccacgtcagtggttcttaaccccattgggtccctcaagtgacccgcctgcctcgacttcccaaagtgctgggattacaggcatgagccaccatgcctggccacataagtggttcttaaccctattgaggccaacccttcccccaaacattttgttaatgtctcttttctgtcctgaaattaaatttgtaaataatatgtaaacatacccgctctgtcttagaatatagtgccttaaccgaaatacaaaaagagatcataatgtatttcagtatgttaatgcttggtagtatgaatttgccccatatacagaatcactgtgagtgggtggctagacgtgcctcctgctgatagattggcaactcaagtacatgagtgatattagtcattggcttgatttacacagtggagttcctggaaatttgaatattaaaacaatgcaaaaatacttgtaaaaatggactgtgattttggatttgggaaattagagatgtgttcttcaagcccctcactgttgggcaagtcaagtggaatgggatctctgcagcctaacagctttcctggcccctgcctactaaatgccaagacaggagtaaatcattcccacatgtcaacttcatgtcagaccagacaaattagattgttatattgtgttaacatggtgaaatgtgaggggccttgctgatttctagagctgaagaagaaccattgggcatttgtggagaatattcaggtgtggtccaaggatgttgaaatgcaaagaaacacacaaaacactgaaggcggagtcagaccaatttatgaccctatcggctgccagcatgtaattttgtattcaaattgtatatatgctttcctttaatgttgggtttaagaatgcaaagtttaaaaagcatgacatcgaagtggtgagtggattatctgaatgatttacaagctctgatttgtgttttatgtaggtccttggtatagtagtgggagttctccttcaggatcatgatgttcgtcagagtgaatttcagcaacttccctaccatcgaatttttatcatgcttctcttggaactcaatgcacctgagcatgtgttggaaaccattaatttccagacacttacagctttctggtgagtattgtgtttgcgattttgtgttaaggtttgctggattaatgtagtaaaattttgggagtagaactcttgagcattttgagcctacattcatgtgctgttcactgtatttaagttggactgtgcttctgactaaggtttttcttctttcagcaatacattccacatcttgaggcctaccaaagctcctggctttgtatatgcctggcttgaactgatttcccatcggatatttattgcaagaatgctggcacatacgccacagcagaaggtgtggctgcagtttatctcctgtagatgaagactataactacctgggcttatttattagcattgcctatagatttctattagtcatttagtagtaattgtacttcttccaaacttagttgggaatgctatttagtgttcactcaagtcaattacttgactgcctctgcctgaaagccattcctcagtgattaggtgttgctgcttcaactcagttgtgggccacctgtgtcagtctctcaagttttttttttattgttttttcctttctttcttttaaaatgttttgcttctttatatacaggaatgatttattttacatatttgtcagttaagggtttttttgggggtaggggtgttgtttttaaagttgaaatccatgtgtgccctcataaatatctgaataaatctctgggtaacagggctctggagcttgttggttttacagactcactttaaatgcggaaggctctcaaactaaggttgaggactactggctatgttattttgaaggattatgatcaagttctatttaagagttcattatctaattggtaatacaacacagttaacatgataagtttttttcctcccatcttggaattaaattggcaaatgagtactgcagaaagtaccattctttggcccctcagatcagaagaaatgtgactgctatgtaatggagtgaacttgacaaagaaggtgaaatagctcttaaatgaagttttgtttggtggagaagggcattctaggaggaaggaacacaacatattaaatgcaattatccaagaattaattgaacataattggtatagttgggggagggtgagcaggctgacattggctgaaaatagagaattcatgtcgtggactgaacaaggttatttgcgaagagttgagctggaagagagaaaggaaatggctgagacttaataaggaattaagaaaacacatttctagttgtcagtttctgcagttgactgttttgtgttctctcagaagtttactcctctccctttttaaattttgctacaggtacacagggaccattatgtcttgaaatctctggagccagtttttttcaaatattatttcccactatctccataataacttggtcctttttaatctttttaatgccagtcttttttcttttcttttctttttttttttttgatggagttttgctcttgttgtccaggctggagtgcagtgccacgacctcggctcactgcaacctctgcctcccaggttgaagcaattctcgtgcctcagcctccagagtagctgggattataggtgcccgccacctcgcctggctaattttttgtattcttagttgagacaggatttcaatatgttggccaggctggtctcgaactcctgacttcaagtgatccactggccttggcctcccagagtgctgggattacaggcgtcagccaccgtgcctggcctttaatgccgatcttttgtaaaagtacttaacattagtattctctacttatattagcatgaagaagataagtcagtgtagctgcttgggcgacttgtagtggctgaaaaacagctgagtataattatgactcatgtacatttctttctttcaggggtggcctatgtatgcacagctactgattgatttattcaaatatttagcgcctttccttagaaatgtggaactcaccaaacctatgcaaatcctctacaaggtaattaacttggatttattataaattaaaataactgagatcttaagaaaatacactttaggaatctgaggccttattttgtttttattaagcctttgaggcatgatatacattcagaaaagtgtaaaaatcaagtgtacttgcataactagcacccaaattgtacagtgtttgtatatgttcaactgtagaagatactacagttttacaaagcgtttgtaccagtttatacttgtaaacagcttggaggagttactggttttcccccatcttcatctgccatacctggtattatctgtttttcattttagccattttggcagttgtactgtgagatctcattgtggatggaattttgtttgttggtgatttatctttttttttttttttttttttttttgagacagagtctcactctgaaacccaggctggagtggagtgcagtggcgcgatctcagcttactgcaacctccacctcccaggttcaagtgattcttgtgcctcagtctccctagtagcagagactacaggcatgtgccaccatgcctggctaattttttgtatttttagtatacatgggggatctcattacattggctacgctcgtctcaaactcctgaccttaagtgatcagtctgcctcagcctcctgaagtgctgagattacaggcgtgagccactgcacccaccctccttgatgacttcttaatgaggttttcatgtgtagatcagccatggatatcacctttttgtgatgctcctcttccagtcttttggctcttgtttgtatttttatttattaaataattctttatatgttttaaatacaagccctttgttgttactatatattcaaacatctcccactctcacagcttgcccttttactcccttaaaggaagggggaggtgtcttttgaggatcagaagctttaaaatttattgtagtcaatattgcagatttttaaacttatattaaaagttgctttttgtgacttgtgtaggaaatctttgcgtgtctcagtgtgctaaggtgttctatttccactgatctgaattgtcagatttatgagcataaagtcgtttaatgttctgaaactattttttatgactgtaggatctgtaatgtcattcctgacattaataatttttgtgttttctctgtcagccttggttagggtttatcaatttattttttctaataactaacttgggccctgattttctcccttttcagtactttaaaaaatttattatatgcttttactctactttctttggttttcattagttctttttttttttagcttctgaagatagacgcttacatcattgtatttttattttttgtccagtctcctcttctagcatattcatttcagcctgtaaactcttgatgcctagtttttcatgatacctaaatggaaatatttgataaatcatctgtgataatgttaattaaagcctaaaactttttaagaaatgttactaaagtatacttcattcttttgaggggggtggggggcttaagttacaataggaaaatgttactccattttccttagtgtggaaatatttttcttgttttttaaaaatagggcactttaagagtgctgctggttcttttgcatgatttcccagagttcctttgtgattaccattatgggttctgtgatgtgatcccacctaattgtatccagttaagaaatttgatcctgagtgcctttccaagaaacatgaggctccccgacccattcactcctaatctaaaggtaaggttccaactagttaaaggaaaacttatgtcttaatatttcagtcctttctctgataagtagactgttcagcactttcctacccaacataacacgcacactattagttaagggtactctttaaaggaaataatgttattaagcctgatagaaggtatgatattgttgctattgctgttgctggtgaatattggttcacagcatttttctagttgctagttttcatattaattttgatattaaatttagctctatttacagaaccacagcttaggtgttggggcagtcatttgctgggtgtgccccacatggcaaagaattgcagaacaaacagacctttgtaatctttttctttttttgaggcagagtcttactctgtgacccaggctggagtgcagtggtgcagtctcggcttactgcagcctccccttcgctggttcaagctattctcccgcctcagcctcccaagtagctgggattacaggcactcgccaccacacctggctaattatgtgtttagtggagatggggtttcgccatgtcagccaggttggttttgagctcctcacctcaagtaatctgcctgcttcggcctcccaaagtgctgggattacaggtgtgagccaccacgccctgccatagtctccatatttcacagttttgtgtctgtgcacttgtgcagttgttccttggtcccttgctattcttggaggattggttctaggacccactgggacaccaaattttaagtatgcttaagtcctgtatgtaaagtggcatataacctttgcatatccccttaaatgacatctgtagtgcttatgatacctaatgtagtgtaatgctattatggaaataactattttaaactatattaataactttttaaaatttgtgttttttattgttgtattattatttatttgtatttatttatttatttttgagacagagtctcactctgtcacccaggctggagtgcagtggcgcaatctcagctcactgcaacttccgcctcctggggtccagtgattctcctgcctcagcctcccaagtagctggtactacaggtgcccgccaccatgcctggctaatttttttttttttgtatttttagtagtgacggggtttcactagttggccaggctggtctcaaactcctgacctcacgatctgcctgccttggcctcccaaaatgctgggattacaggcatgagccactgcacccggcctttattgttgtattattttttattgaccccatcatctacctctaccttcaccccccatattttcgatttgaggttaattagatatggaacctaagggtatggagaacccactgtatttttttgtaagttgttggaataaaggagagagaggaccacttaaaatctcaccaccctgacatggctactatagtttgtttaagagacaggggtctcgttgttttgcccaggctgaagggcagtgactattcacaggtgtgaacatagtgcatttcagcctcaggctcctgtgctcaagccgtcctcctgcctcagcctccagagtagctgtgactagaggtgcacaccactagaagtgcccagctatagtttaaatgtagtctctactctttctgacacatgcatttttttttttttttttttttttgagacggagtttcgttcttgttgcccaggctggagcgcaatggcgcgagctgtggctcactgcaacctctgcctcctgggttcaggcgattctcctgcctcagactcccgagcagctgggattacaggcaccacacccagctaattttatatttttagtagagatggggtttctccatgttggtcagggtggtcttgaactcccaacctcaggtgatccgcctacctcggcctcccaaagtgctgggtttacaggcgtgagccactgcgcccggcttcaattttttttttttttttttttttttttaaggagtaagtgtgatgtctggtcttgctggggcttcttttcaaagactcttggtgagtgaggaatcttattccggattattattttgaaacccaagtccaagaaaaatcagttagttgtgcaaattagacctttgcccaaaaggtatcttgcctctgggaaggaaatacattatagagtgggaaatttttatcattttgaaccaagattctttaaagaaagaaagactgattaataaaatgtggcagctgtgctcttcaaggcatttatagtgtatatagttttagaaaaacagtcccaccacttaagcatagatgtaatttactaataaaaatgattctgcttgtgattcttgcattttatctgtggcaggtggacatgttgagtgaaattaacattgctccccggattctcaccaatttcactggagtaatgccacctcagttcaaaaaggatttggattcctatcttaaaactcgatcaccagtcactttcctgtctgatctgcgcagcaacctacaggttaattggtttggcttaaaactcatctacgtcttccatataaagcactttctatgtatggtcctgtgtgtggtccatttgggagttagtcttttattgtcatttccatcaattgggtgaggttgattaactggatttacgtattttactagttcatttaatcagtgatattttgctacagctttggacaagacagcactagaagagtagaccacagacagtcattagctgttggtactcctaggatttttctgaatacctggatgctgatttacatttctctataggatattttggaaagttatatatttacagtctgtatatgccatgcaactacaactttctctccaaatctttaattggcacagtgcatattttgattttataaactttactttagagctgtgccttgagcttcggcttccttgagggaaatcacatttctcttattgatacaaccacctttggagcatctgtgtgtttgttaaataacctcacaaattcaagcaagtgaatcacaataaatgtttggcctttccatgaaggtgtaagaagggtttagaaatactggtgctagaattggtcctctgcaggagtaagcataaggagttctgttttgctcattttaaggtatccaatgaacctgggaatcgctacaacctccagctcatcaatgcactggtgctctatgtcgggactcaggccattgcgcacatccacaacaagggcagcacaccttcaatgagcaccatcactcactcagcacacatggatatcttccagaatttggctgtggacttggacactgagggtgagtgaagcctgccagttttcagagtagagttctctgtgctttttgctacaatctgatcacaaaaatgtaaaaatgcttcaagccacaataatgaaggaatgttctgtcagtatatttattcacaggtctagctgattattttatctttaattggacattatctgctcagtgcaggaaatacaaaaaagcataaaggaaagaattatccagaatcgtgcagtatcagttttggtgtatgtgactgaagttttttagtgtgaaaataaacttaaagtccctttaaacatagcctcttgttacattgttttgttaggctgccttatataagcatttttattggtgcgtgtttggcaggcatcttgttaaatgttcgtgtataaagattaatgaataggactctcctgttctgcaaaaagctcacagtataactcctgttgcaggttgcagcttttctgcttgagctacatttcatttggtcctctatatttatcttataaaatagagaccccagttaggtgctaactagttgtacagtcctgtccagttttgcatacatatattttagggggacactactctttaactttgctattgattcttgagagatgaattgatgttgcatatatgctgcatgcctatatgtgggatggatttaagacagcttaaattcaagatataacaaaattgaataccatcacgtccaagagctcggcaataaaaggacggcagcctttagagaaacgtgtcactgtgacagactcacaaacacgaataatgtcaagcagaggcaaacaaccaaacccaattaagataatacttattccagtgtagtttagactaatcaaaatgtgggctgggtacccttagggtgtcaagacctttttaggagggctgtgaggtcaaaactttttttttttttttttttttgcgatagagtcttgctctctcacccaggctagaaggcagtggcgcaatatcagctcaccataacttccgcctcaggggttcaagcgattctcctgcctcagcctcccgaggagctgggattacaggcacacgccaccatgcccagctaatttttatgtatttttagtagagatggggtttcaccatgttggccacgctggtcttgaacccctgacctcaagtgatccacttgcctcagcctcccaaagtgctgggattacaggcgtgagccaccgtgcccggcccaaaactgttttcatcataaaacaacatttacatttttgggtctattctgtcatgagtgtacagttgaacttctcagaggttacatgaaatatactgtaacaagttgaacacagaagcagaaatgagaatccagctgtcttttattaagcaagacttagagatctgcaaaatgtagaaagacttagtgatgagtgtcaccagaaaatagttcatgtttcttacattagcacatagtgggtctgtttttaaaaatgaatatttttaaaatctaatttctaatgtggaaaattctgaaataaaacgcacagaaatgagaactctttggggtcccaagaaccactgctttaaaccaaagattaatttgaaagcctctgtcagaaacccaaaccctagccagttagaactgtcttcccatgttggcctttcagactaagtcctaagtcaaggtttcttaatttctaggtcgctatctctttttgaatgcaattgcaaatcagctccggtacccaaatagccacactcactacttcagttgcaccatgctgtacctttttgcagaggccaatacggaagccatccaagaacagatcacaaggtaagcgagcagcttattttttaaatgcttcaaaaggatctcctccctttcatcttttttttttcctctttatgctttcagtgttcagtgaaaatccgtttggttggttttttttttgtttttttgagacggagtgttgctctgtcactcagtctgcagtacagtggcgccatcttggctcactgcaacctccgcctcccaggttcaagcgattctcgtgccttagcctctcaagtagctgggattacaggcgcctgccaccacgcccagctaatttttgtattttagtagagacggggtttcactatgttggccaggctgatcttgaactcctgacctcaagtgatccacccgcctcagcctcccaaagtgctgggattacaggcgtgagccactgcacccggccttcagtgaaaatcttttacatgtccaataatgtgttaaatgtgggatacaattgtgagcaaaatggatggttcctgccctcttaatactcattctgatggacatttatcacaagatagggaattataaatcgcaatcatggcttaaatgaaaagtagtttaccacaaggcacattttgattaaaggtcaggagtttctctgaggtggtggtgataaccagtcctaaatcatgcaggcctatgaagtctatgttaaggaacttggacttttcctcattacctctgggttgaaagcagtagcagtaacaggatcatacttgcattttcctaacaatagttaggaatctgttgccagattgcctagactacatatagcattagagagattgtgatacacacacacacacactttaaaaattgggccagactcttaaaacttgctcatttgcctaattaaatagtcacctatggtgctaaatatggtattcctttgatttgtgtactaaaatttaatatcttattggatgcttagatgatgatgatccatttgtttatataaagctgcagtaagtctccttggacttgtaatctttgttatgcttcatgtacagttggtacgtgaaaggatataaagttaagccaatgcttactggcattcggaaaaattttaccaatttacatgtgaactagcaatgttagcttttttttttttttgagacagtctcgctttgtcgcctcctgagtagctgggattacaggcacctgccaccacgtccggctaattttttgtatttttagtagagacggggtttcaccatcttggccaggctggtcttgaactcccgacctcgtgatccacccgtcttggcctcccagagtgctgggattacaggcgtgagtcactgtgcccagcctgcagtgttagaatacttaattcttattttctgtttcctttttattgagagtgagcttatttatttatttaatttatctgtttatttgagacagggtctcactctgtctcccaggctggagtgcagtggcaccatctcggctcaccacaacctccacctactgggttcaagcgattctcctgcctcagcgtccgactgctgggattacaggcatgtggccaccatgtctgactaatttttatatttgtagcagagatggggtttcaccatgttggccaggctggtctcgaactcctgacctcaggtgatccacctgcctcggcctcccaaagtgctggattacaggcatgagccactgtgcccggcctgggagctcattctggaaattactactttttgtactaactttgtgtgccatgtactctgggctttatgtggcttcctctcccccatcaccccttattctgaacagctgtgaggtagataccattatctgcactttatataaatacttagtcttctacggctaagagcagggttcaaacccaggtattccaacctgtgctatttggagtatattaatccacctgtctttactaaaggtgaaaacttttgcatgtggttcaatagtcagggagaagttagaaaaaaagtaatggaagaataatcatgaatttgtatgcttctatacattaactagctctttctccctttttccagagttctcttggaacggttgattgtaaataggccacatccttggggtcttcttattaccttcattgagctgattaaaaacccagcgtttaagttctggaaccatgaatttgtacactgtgccccagaaatcgaaaagtgagttcaaagtaatttttaattgtctaggaatgagactggagactgaaaaccatctgtctctaggttgggtcagctgaatgagatgcaaggtattgttaggcctactctttaatcagagatttgtaactgtcttcatccttcaggttattccagtcggtcgcacagtgctgcatgggacagaagcaggcccagcaagtaatggaagggacaggtgccagttagacgaaactgcatctctgttgtacgtgtcagtctagaggtctcactgcaccgagttcataaactgactgaagaatcctttcagctcttcctgactttcccagccctttggtttgtgggtatctgccccaactactgttgggatcagcctcctgtcttatgtgggcacgttccaaagtttaaatgcatttttttgactcttggccaaaatttagaagatgctgtgaatatcattttgaacttgtgtaaatacatgaaagagaaaacctttgtctggaacttcttggctttgtgcaagctgtgtccaaggcaagtacataaactggtaccttgtaatgaagaggcagctgatgccatgcacttgtctgagggcatagctccatgtcttctgacattcctggtgtcccaaagaatagcaaaaagccagtttgaatattatgtaacttatttttttaatgtggacaggggaccttgaaaatcactaagttattaaaaatgtggatgtgctagaattggatatgtccaggaacatgggaagggctcactattggaatcccatgagtttccattttgtctctacccaaacgtattccaaagctgactgcatttgtaccatcttatttcttttggggattatacacctcagccgcctgagatgggggtcagctctttatataaagggaaaccagaccaggcctaaagcccaccccctaccctcacccccacaatcctctcctgaaacttaaaaacagtgggaatataggaaagggaaccaaatctcattaattaattgttctcccccattaccccactgaatgaatggccatacaggctaagctgaataatgacaaagttgaaaggaccaatacagccccttttataaggattttgaatgttttgcaaatgtattggtccctgtgttgtattttgtagccttttcctgggcttcagctcccctacttcttgtatgtgtatgcatactgtagctaaccattaaagtcatgacacacacatgagtccactgtgcctttctcagtagcagcagccagtgctggtggtgaggaggaaaagtggacaatccagccctgcagaccttggggccatggggaaccaccaactaacttcttgctgaatgattgatttgattgattgattgataggtcattcctactactaagctggcatgtttaaggaaattgtatttttcttcctatttatttcaacactggacaaatgctggagcaggtttatctggttaagctgagtttaaaatacccagttttaatatccttttcccccaggtattttttttttttttaaagaaaatgagtagatacgtatttaaaaacttaacccacttaaaatttgccttacctttcatgactgtcaagttttatggccagagaggacaaaacagttcaaaattaaataattgaagtcctccttgagtgatgtcttagggtttattccctgagaggtggtttgtgccatctagactgaactttgggtaactatcgagtgccagttacacagcttattaaatccagagtcttttcaataaaggttaagtgacttcctcaaactagacttagatttaaaccaggggtctacctccaaagtctattattaaatgctgaaacacaacaagacttacttattactaccgtatgtccactggctttggttaaaactgagaacaaaacagctgtaacatgctttaagtaacaattagcagtgattcccaagtctgctgttctcaatcctaaaacacatcacccttacctgagttaatcctagcacaccaactttgctacttttcctcttggtgtttagtaagcaaaagaaagatccaaattttcctctttttcaaacatcaatgagtattagcttagaataaagttcttattgctgttccttcagggaacagggaaactgctaacttgtcagttccaacaactgatgtaagatcatcttctgaccatagcgaacctgtaaggcttgctgttccctccagctgagtttcgcatagacttccttattactgagtaaaccttggtcagtttttaagtctgtggcataggtctgcaaagtcagtagaacactgttttgaagcagctgtctccacgatgctttgagcttgggaatatttgtgatcgtcaggctgccctcttcccttttatcatctccccctccatcctggtctttaagctctctgaactcctcagcaggcatgcacagtacctagaagcaaccacagagctctttaattagatgtactgcttttgtacttctgaaatgactcaggagactaaactcatcttagcatttattaaaaatcccacatttcctctctcatcttctagctattttgctttaaatacttagattatcagcattaaatggccattttcagccgtttacctttagtgtggtggtcagctcctcttcagtcagcacctcctccctccctatcacaaaggctccctcttcccctaccatctccagtttgcataggaaatcccagcgctcgtacactaggtgcctttcagcttcagtttttgttcctgtagatgaaacagcaatgtgaaagtctcagtacacccaagggttcatttcttctttagtctgccacccagtctacaaagtcaactgctatttagcaaagctatttaacctgaggcatgggtatagacacaccatcagtgtcaaatattgagttaatgatacactcaccctgtaatgctgcctcacgaactgtcaccatctgaatgtcagctgtgtcatctgtgttgtcaggatatggttcaacaaaaccgtacatatgaatcagttgccagttagccatttgcccataagtgttgaaaatctcatggcctttaggaatgggctgagtggctaccatccgaagacaattctgaggtgaaagggagaagctggggccatgcctttcacgggccagccccatgaagattatttccacttaagaagagccttcagcaggtgtagttcagccatgactgatgctgttaactaccaaagttctacctttagttcctgttagaccctaaactgtgaaacaaaaaagggttgggctaactttaaaaggccagcttcatgtttaactgggtggatttctgcacagtcctcttcagcacttaaaaagttgctagctttaaaaacgaaattttcggccaggcgcagtggctcacacctgtaatcccagcacttagggaggtcaaagtgggcagatcacctgagatcaggagttcaagaccagcctggccaacacggagaaaccccatccctactaaaaaatacaaaaattagccgggcatggtggcaggagcctgtaattccaactactcgggaggctgaggcagggagaattgcttgaacccaggaggcggcagttgcagtgagccgagatcacgccactgcactccagcctgggcgacacagtgagactccgcctcgggggggaaaaaatggaactttcgcagatcaaagtcggaaaggaaaatggaggcaaggattaagaaataaccatacttactaatttctgatcctataaatgtgccatcttttcaggctactttttatatagaatagagctggtataaacacagctttatatcagttctaggatcgtcttagacctttggcctgtgaatgtcctcatccctccaaaacacggagactatcactgttccaggctgctatccacagagccacacacagtctgggctcactgatgtgatcagccagaaaggaatgaaacatggctatgcagaccactcaatgtctagcactaaataaatgatggtagtatagtttatcagaggattaaccacaacttactttgaggactttaaaatgtttcgcattcaaatgattctacagtaatatgcatactaaaaggacatacaggaggagctgatttcacctactcattttgtagcactagtaagagaatggagcctaagacacaatggcttgaatcatgctcaatcagtgcaccaagagaaactccactcaccgcagagtattctagattggcgttgtgattggctaagtggtttagtatgtctgcagcaggcaccatcacgggggagttgggctccttttcatcctcttcttcctccagtggttcctgaaagctgccattgacagaacctggctaaggccctgtcttgggtgagggactgggggtggatttcactgtttttccacttttgtccctctatagagttgtaaagaaaagggttccgtcctcagaggccccacccactgacctataggccatcacaagggccaccagctggtggtagagttctagggagcgaaccctgaggctgaagagatcggggtgggcttccatgaagggcagcacgatggactggtactcgctgcggatgttggccaaatccttctccacggcctcaggtacgcctgtgccctggagcaggcaccggcgctcctcctctggcctgcagggacacccacacccaggttcccttcattccttcacacactttactgggtaggactggtgcaggggcggggaaactgttcttgcagcaggctacggtgcaggcgctccccaacccctcccaaggctctcaccagaacatcgggtgctccaagcggcccagctcgggccagagcgcaaagtagggcctccagcgtgaggccggggcctgcagctcgtggagcagcgccagcagcagtggcacccagcccgactggctctgcagcgcaactcgctctgaggaagacacaggtgtgagcgccccggcgcggcctcgcgggccgggcccgaaccgccccgccccgccccgccccgccccgccccagggccctagcccgccgccgtgcccacctcgctccagcaggccgccgatggagcaggtgtgctgcgacaggagcgcggcccgcggcaccacgaacagcagctctccggcctgcacgctctcccgggccaccatgccgtagccggccaccgtgccctgccggctgaccgccacctgagcaggagggctggtcagggcagcccgcgccccgccgcgggtcctccgcccgccggctcgctcgctcaccttgggactcagctccagccccacccgccggcaccagctcaggaagcaggccacaggatccaggtcgccgccgtccacgggccccgccacctgaga

SEQ ID NO: 6455 - DNA, 374 bp, Homo sapiens
tgcagactggccggagttaccgcgggctggaatcgttcctcatgaaaacatcttgagtccaggatctccaattgcactcacgcgctgcgagtgcagaaggagagtcccgtgccgcttggcgcctggttgtgagccaggtacagccctggccttcggtctgtccccgagggctgaggcttcttgcggtctgggtgcaagaacaaaatacggtttctggatcggaagccgagggtctggtggccggccggtggtgagcgacgcaactgggcggcgagcgacctcctgatctcgaccccttgttgccgatggccatggaacccttttactggtggtattcgttcagagcagttttcgtgtgtgtttcagagtggcgt

SEQ ID NO: 6456 - DNA, 374 bp, Homo sapiens; identical to SEQ ID NO: 6455

SEQ ID NO: 6457 - DNA, 552 bp, Homo sapiens
cttgtaccttttatgttgacactgtaagtttgggcactaaaacctaaggacttccatgttgtcattgactctaatctagttagcgttgctactgtatgcttctagctttgattaattcatttaaataaacgtcactgaacttattaaggccttcctagcaaagctctaattattgtaagattccttttgtcggagttgagaggaataaagaagttttgagactcatggtaactttagaagatagtatcatgaaattatttgatttgaatcattgagaaaagccagccagctccttattttaactaccttgggtataggagtatgtgctttgagaatgtatacattaattttttgcacattatcaagaatataaataattccagatgctaaagaaatttggggattatccgttactgcctagtttataggctctgtaaaattgaatagatgtaataagggaattaacaaagactctgacttttaaagtaagagttactatgactttattttaaaagtctgtcttattaatatatctgagatgtgaataaaatc

SEQ ID NO: 6458 - DNA, 2029 bp, Homo sapiens
gcggccgcagtcgtcggccccatccgcgcgatgggctctgaggcggcgcagctgctggaggctgccgacttcgcggctcgcaagcaccggcagcagcggcggaaggaccccgaggggaccccctacatcaaccaccccatcggtgggcgcgtcggccgcggagcgccggctgcggcacctgggtggtggggactgggaaggaaacgtggggggcgtgcacctcattgagcacctgttttgtcccaagcttagtgcgatataccgtttaagcctcataacaattggaacggtaggcatgatcgttccctttgtcggttggctcccagagggtaaggtacttgaccaaggtcacccagctagtcagagtccacaaggggccacatctggctctccaaaacccacaacacaccgccttgggactacctccgacctgacttcctgctttgcccctccccgtcaggtgtggcacggatcctgacccacgaggcgggaatcactgacattgtggtgttacaggtaactttcccccttctctgccaggagcctgggatggggattaggggccccattcagcaatgggcaacccttggctgacatctcagggctgagtgggaacttgtccccaggcggccctgctccatgacacggtggaggacacagacaccaccctggatgaggtggagctacactttggggcacaagtgcggcgcctggtggaggaggtaacagatgacaagactctgcccaagctggagagaaagaggctgcaggtggagcaagcgccccacagtagccccggggccaaactggtgaagctggcagacaagctgtacaatctgagggacctgaatcgctgcaccccagagggtacgctttcgtatgggctgtaagggaaaagggagggggatgccgccttctgaagacacatgttggtcagttcccctgaaaaaccctgggcattcttaattcccaaattaatcctactggaccactctttgatcttctttcatacagtaaaaatacaatagctgggccaaggggaagttttcaggacagctcattccatcaggaactcatggccttgaaccaagcttgccaggaagtggggaaaaggcagtgctttccttgacatcacgctagcaagtttctgtcgactcttatgcaggatggtcagaacatcgagtccaggaatacttcgagtgggcagcgcaggtggtgaaggggcttcagggaacaaaccggcaactggaagaggctctaaagcatctgttcaagcagcgggggctgacaatctgatcagtgcttgaagctatccagaggcacaactccagcctcgttcaggccggacaggattcatacgccatcttttctgtgtctcctgagctccctccatccttcccagatattagaggccaaaaaaagacttgcattttttctcagtctgaaggtctcctgctaactaagctgagccccgcgtggtgggaatcagatgtacccatccatttctgatgcactcaccgcctctccccaagtcttgggtctgtttgctattttgcatggtgggatctctggcccctcagggacttgagattatttaagtactagttcctaacacgttctggaaaataaaaataactctgggttaaggtttaagctgctgctgctccttctccagcctccgactggtgggctgcatatctttccttcagcaaagcaggactaattgtgtgtcccggagtcacctccctcaggttgcgggcctcaacccctccgaacctggcttccttgtcagtgacatgggttgtgtaattatcaggttagactgtgacgtgcctgatggagcctgacacataggtgctcaagaaatggtagcagcctttcccgttaagaaagttggaagggggccaggcgcggtgtctctcgcctgtaatcccagcactctgggagaccgaggcgggcggatcacttgaggtcaggagttcaagaccagcctggccagcatggcgaggccccgtctctactaaaaata

SEQ ID NO: 6459 - DNA, 454 bp, Homo sapiens
actccagcttgggtgacacagcgagactccgtctcaaaaatgaaaaaagaaaagacgtatcggaagggagtgccgcccgcttactgacaaccactgctgggcaccggagagaccccagcagcaacatgattgggccggtgggggattccggttccccagtacctcaagccgcgcgggaaactcggtgactcgcaatcccctcgcccttccgcattgcgggttacttcggttgttaagtgacagggacttccgggaaggcccggaagtggcccggggctgtccgaccccgggagcccggcggtcggcgtaggggaggcggtggaactttgctcggtggccatggggagggattgcccggtggtggtttttcagtcgttgctgagcagctgaggtttatttttatgtattttattctgcatccagtcatccattaaagccaaagtttattaagttg

SEQ ID NO: 6460 - DNA, 2545 bp, Homo sapiens
cgggcgcacctaagctgtccccgcagagacctgcagggagctcgcggcggaggacccagagggaggcctgcggtggctccagcccagactccggccccgaccgcagcagaagtgcacgaggtctacggtcatcagggtcacaaccagtaggttgtagaggcccagcactaggagcgggcctgggcccctgcgggagagaaaaagtatctggatcccggccccgaccgcgctctcgctgctgcgctctgtggggggtacagaatccctgggagtccggagaaagctcaggactccctccccaaataagtgtcgtcttacatacacacatttgcatacgaatttaggagctcatcctagagccacccatgggcagattcaggatggctccccattaccagcttgcacagccccctgaacttctcctttgtaattgtaatcatgatctacatgattttctgttgcggtctgtcccttcactagtctgtaagttacaagcctaccaccccataatttaggaacagagccccagatactggaacaccctgtcgatgttccagtggctctggggttggagatctcacctgaggatgggcgggggcggaagagcggacagattgacttggtacagggcctcaaattcagcccgggtgcagcaggagccccctgcagcctgcaggtggcagcagtaggcttcctctggagaatcagacagacgagggcaaaagaaaccagggtagtgacggccatggacatcccgggtggtctggcacaagtgagggtggtggaccagagctgaagagagaggtgggggtgctagagacaagcaggaggggcctttccacagctcactccacccctactggagagtaaaagagatcagcccctaccagaagaaaagatgcccttccacccatccccatcagttccagttcccaggaatagcccatagcaccagaggcaggtgggccacaggggtaagtgctgtacctgagagagaggttggctggacaagggtcacccagctgaagagcagcagtagccccacagataggcctgtcagcaaggggcctgaccttctctggatgcccatgagagttcactaccacctctgtcctggtcctgggaaccccaacatctctctttctaggccgtgactgcagacaataaggaaataaaagtcaaagccccaaggcccttgggcaccattaatacgagcctgaagcttctctatcacaggcttttagagagagatgacagggactgggtttctgtctcctgttggaaaacgtggggcctgcattgccaaactgctgaaggagagaaggctcaaaggactagaggacagaatgagggatgagagagcagctgagccattagtatgaagaacaaacaagcatttacagccaaatatgtttctacccattctccaacttccaggctgccatggaagctctgggaattctgaccctcctatttcaggtcccagagacctcagttccagcatgtggggcttccctccctaacctctgctacgtggcaaccaccaagactagctgaaaaccaagggtgactcctttcattagcctttcccctgagccttatctgccccagctaccagccagaacacaaaagctacatgtctgattagagtatacttagctaatagggaaccccctctcacagagaagttctatggggatcaccaggtctctcttacccctcagctgcccctaaggcagggaatttctccagaaggccaccagccagcagaattaagtgttattccagtgcctacccaggcctgacaacatcatgctcccaggacagcagtgacaacactcatcaccccaggggcccacagaagatgcctagagactgaaataggagctctcatagcataagaagacaaggcaaatttcatctgcaacactgaggacaaacaaaggcagttcctgcagaaacgtcacagctacctgggagcctaagtctgaagcaattaggcagggctcccagggaaggctctgatttttcaggtcaggccctagggtctcctggagggtccaaaggtagactcccctgcccacagaacctggcccatccctacagggagaactatttttagaacacttggagaattttcagagcttttacaggttgaagatggttcttggggggagcttctgggagaagctgtctctgactctgagggtgtggggattgttctttcttcccgctcccatagtcccctgagccttggccaccctggattcagagcactgtgaggccactgccttatttcttgtctgtcttcctcttttccacagactgtgggctcccaaagagccaggcttatgttcttcttgcacccccaacagagcacactgagctgggggctgcgatgctgaaggcagctgtccacatcacttgctctctgcgcgggccggtcagctccagaggaattcatctggggcaggcccaactcggcccgctgaattagcctccacgatccccgggcctccccggcgccagggggcgctgtaaacgt

SEQ ID NO: 6461 - DNA, 1344 bp, Homo sapiens
cctagagaattcagcctcagcccccagatgaagatggggatcacagtgacaaagaagatgaacagcctcaagtggtggttttaaaaaagggagacctgtcagttgaagaagtcatgaaaattaaagcagaaataaaggctgccaaagcaggtaggtctaaaagtaatctggtttttctaacaatttaaggagcccagggtatgaaattgtttattttatttagtagtgtggtgtgtttcaaggtggcagttccgggttcaagccttagctttgacacttaccagatgtgtaaccttgagcaagttattacacctctcagcctcgatttcctcatcagtaaaatggaaataattgtacctattgggttgttaccaggattaagtgtgaatttaagtaaaagcatcctattttttttttttaaatagatggttagacttataaaccagtcaaaaaaggtgtatttcattactgcctgaagtttggtatgatatgtagtatatttttcattatttctgaacatttactacattgctttaggggaaaatgctgtagttccaaacagtcacttttcaaactacttaaaaatacaacctgattgtaattgggaactgacaatattatagaatactttagcatgtgagtttttattaagtaactgcatgccttgagggcaatatagctagaaacaatggagaagaccagactgaatcagattcagggatatccttaaatacaatatgagattttcttattatttgcttctaaggtaaaggcaaaataatgaggagaagaaagttcttaaaaattctgtttttgctcagatgaagaaccaactccagccgatggaagaatcatatatcgaaaaccagtcaagcatccctcagatgaaaaatattcaggtttaacagcaagctcaaaaaagaagaagccaaatgaagatgaagtaaatcaggactcggtcaaaaagaactcacaaaaacaaattaaaaatagtagcctcctttcttttgacaacgaagatgaaaatgagtaagtgtaaatattttgaatttagtctactttgaaagtatatggagtgttcattaaaatcacattttttcctattataaagatactacaagttctttatagaaagtttaggaaatagagaaaaaaatttaataaactacatctattcatcaatacccctctgacttaaaatgccaactctatagaaattagctagtattaacattttgttatttcccttgtgtggttgtatatatatgtaaattatatttttaagcaaaatacattttttgtgtgtaaacaaaattttataaatacaactgtattgcaaatgtt

SEQ ID NO: 6462 - DNA, 309 bp, Homo sapiens
gccttgttaaaaatacctccccaactcctgctaagggtggccatgagactcagctctggcaagttaagaaatacaggtggaattctgcttgataaagctgctgggttttttgttacaaaaggacagacttggcaaacatgagcctttgctcttatcttttcatcctacttggagtgcagagataaaacctgagtaccagagccacttttaggcataaggaaggcagccatgtgctttgggtcatgttagtaaaaagactcagagcttggctccttgctgacatgcctggaggagctgctacaccagctt

SEQ ID NO: 6463 - DNA, 1585 bp, Homo sapiens
cgcacacccgctgcccagcggtcacagggcttggcgtcaggagagaaggtggccggcctgcaaggtctgggcagccccgccctgatccgcagcatgctgctctccaacccccacgatctgtccctgctcaaggaacgcaaccctcccttggcggaagccctgctcagcggaagccttgagaccttttctcaggtgctgatggagcagcaaagggaaaaggccttgagagagcaagagaggcttcgtctctacacagccgacccactggatcgggaagctcaggccaaaatagaagaggaaatccggcagcaaaacattgaagaaaacatgaatatagcgatagaagaggcccccgagagttttggacaagtgacgatgctctacattaactgcaaagtgaatgggcatcctttgaaggcttttgttgactcgggcgcccagatgaccattatgagccaggcttgtgccgagcgatgtaacatcatgaggctggtggaccgacggtgggctggggttgctaaaggagtgggcacacagagaattattggccgtgttcatctagctcagattcaaattgaaggtgatttcttacagtgctctttctccatacttgaggatcaacccatggatatgcttctaggcctagatatgctccggagacatcaatgttccatcgatttgaagaaaaatgtgctggtcatcggcaccactggcacgcagacttattttcttcctgagggagagttgcccttatgctctaggatggtaagtgggcaagatgagtcttcggacaaggaaattacacattcagtcatggattcaggacgaaaagagcattaaagcacgttataaatatgttaccaccttgagggagcctcaggtccccggcaattataagttaagagcttactggcaatgtaatcattaaaaaacatcagtaacaactaaacctggccttgggactacgttctcagatgggtaactaacgtcaatcctgattccttggtcttggtccctcttccatttcccttgtccagagatcactgaaaggcatcctgggaaggctctggaggctccagctgatttccagataatccatgaaaaagaaaaccagcttcttcctttagagacactatcctatcagattacaggtggcttatccaaatcattgctattttgcagaattccctggaaaaatgctatggctgcagaccttacaaggcatccacataaaactatttcacatcagcactaataattctttctactgagagaaatatgcccattttcacaggttttgttttctttgggaagggtattagaaatggtaggtcagttacactatgatgttaactaatacttatacatgtctgtttggggcagcataaagaccaatttcctcatatttacaccttcccttcccctggatcccctgcagtcaccctgcaatccacagctaaagactatttttgccatatttgagaaagtggatttatctccaaggatgctacattaattttctatttctcctgcattcaaagaaactctggctataaaacaaaggcaataaattagattttttaaa

SEQ ID NO: 6464 - DNA, 1585 bp, Homo sapiens
cgcacacccgctgcccagcggtcacagggcttggcgtcaggagagaaggtggccggcctgcaaggtctgggcagccccgccctgatccgcagcatgctgctctccaacccccacgatctgtccctgctcaaggaacgcaaccctcccttggcggaagccctgctcagcggaagccttgagactttttctcaggtgctgatggagcagcaaagggaaaaggccttgagagagcaagagaggcttcgtctctacacagccgacccactggatcgggaagctcaggccaaaatagaagaggaaatccggcagcaaaacattgaagaaaacatgaatatagcgatagaagaggcccccgagagttttggacaagtgacgatgctctacattaactgcaaagtgaatgggcatcctttgaaggcttttgttgactcgggcgcccagatgaccattatgagccaggcttgtgccgagcgatgtaacatcatgaggctggtggaccgacggtgggctggggttgctaaaggagtgggcacacagagaattattggccgtgttcatctagctcagattcaaattgaaggtgatttcttacagtgctctttctccatacttgaggatcaacccatggatatgcttctaggcctagatatgctccggagacatcaatgttccatcgatttgaagaaaaatgtgctggtcatcggcaccactggcacgcagacttattttcttcctgagggagagttgcccttatgctctaggatggtaagtgggcaagatgagtcttcggacaaggaaattacacattcagtcatggattcaggacgaaaagagcattaaagcacgttataaatatgttaccaccttgagggagcctcaggtccccggcaattataagttaagagcttactggcaatgtaatcattaaaaaacatcagtaacaactaaacctggccttgggactacgttctcagatgggtaactaacgtcaatcctgattccttggtcttggtccctcttccatttcccttgtccagagatcactgaaaggcatcctgggaaggctctggaggctccagctgatttccagataatccatgaaaaagaaaaccagcttcttcctttagagacactatcctatcagattacaggtggcttatccaaatcattgctattttgcagaattccctggaaaaatgctatggctgcagaccttacaaggcatccacataaaactatttcacatcagcactaataattctttatactgagagaaatatgcccattttcacaggttttgttttctttgggaagggtattagaaatggtaggtcagttacactatgatgttaactaatacttatacatgtctgtttggggcagcataaagaccaatttcctcatatttacaccttcccttcccctggatcccctgcagtcaccctgcaatccacagctaaagactatttttgccatatttgagaaagtggatttatctccaaggatgctacattaattttctatttctcctgcattcaaagaaactctggctataaaacaaaggcaataaattagattttttaaa

SEQ ID NO: 6465 - DNA, 593 bp, Homo sapiens
tttttttccagcttcatatcctggtattcaaagtcatgtacaatttttttattgcacaaaatgtctcatctttctctagaaataacagcccttgccataaattcctgcttttgtaacatgaaactgctttcctttggagtgagaccactttgcacctggaagatgctcatccttcaacatccagcttgtctcctccttaggaaaatatcctctgttctgttggtgatactaaaggcagtaccctgaacatgtctttgtaaaagattttgcctttagtattgtggttacccattcacctgtctatccctttccagaaatgtgagctcctcaagggcaggctccaaatctgactttcctactatgcacatagaatggtacttgccatgtaagaaacaaatccttactgtttggggaaaaaacaaaagtacaaagaatacaactctaaaatgaacaaaacaaatgataatatgctgtttagaaagtgttgaaaaactaggcatggtggctcacacctgtaattccagcactttgggaggccgaagtgagggggattgcttcagcccaggagttggaggccagcacggacaacacag

SEQ ID NO: 6466 - DNA, 593 bp, Homo sapiens
tttttttccagcttcatatcctggtattcaaagtcatgtacaatttttttattgcacaaaatgtctcatctttctctagaaataacagcccttgccataaattcctgcttttgtaacatgaaactgctttcctttggagtgagaccactttgcacctggaagatgctcatccttcaacatccagcttgtctcctccttaggaaaatatcctctgttctgttggtgatactaaaggcagtaccctgaacatgtctttgtaaaagattttgcctttagtattgtgattacccattcacctgtctatccctttccagaaatgtgagctcctcaagggcaggctccaaatctgactttcctactatgcacatagaatggtacttgccatgtaagaaacaaatccttactgtttggggaaaaaacaaaagtacaaagaatacaactctaaaatgaacaaaacaaatgataatatgctgtttagaaagtgttgaaaaactaggcatggtggctcacacctgtaattccagcactttgggaggccgaagtgtgggggattgcttgagcccaggagttggaggccagcccggacaacacag

SEQ ID NO: 6467 - DNA, 17908 bp, Homo sapiens
  SITE (57): n equals a,t,g, or c
  SITE (315): n equals a,t,g, or c
  SITE (472): n equals a,t,g, or c
  SITE (530): n equals a,t,g, or c
  SITE (542): n equals a,t,g, or c
  SITE (611): n equals a,t,g, or c
  SITE (683): n equals a,t,g, or c
  SITE (732): n equals a,t,g, or c
  SITE (734): n equals a,t,g, or c
  SITE (1055): n equals a,t,g, or c
  SITE (1158): n equals a,t,g, or c
  SITE (1216): n equals a,t,g, or c
  SITE (2248): n equals a,t,g, or c
  SITE (2422): n equals a,t,g, or c
  SITE (2429): n equals a,t,g, or c
  SITE (2430): n equals a,t,g, or c
  SITE (2435): n equals a,t,g, or c
  SITE (2443): n equals a,t,g, or c
  SITE (2591): n equals a,t,g, or c
  SITE (2638): n equals a,t,g, or c
  SITE (2655): n equals a,t,g, or c
  SITE (2672): n equals a,t,g, or c
  SITE (2690): n equals a,t,g, or c
  SITE (2735): n equals a,t,g, or c
  SITE (2820): n equals a,t,g, or c
  SITE (2834): n equals a,t,g, or c
  SITE (3293): n equals a,t,g, or c
  SITE (3308): n equals a,t,g, or c
  SITE (3405): n equals a,t,g, or c
  SITE (3457): n equals a,t,g, or c
  SITE (3469): n equals a,t,g, or c
  SITE (3485): n equals a,t,g, or c
  SITE (3497): n equals a,t,g, or c
  SITE (3577): n equals a,t,g, or c
  SITE (3631): n equals a,t,g, or c
  SITE (3700): n equals a,t,g, or c
  SITE (3872): n equals a,t,g, or c
  SITE (3935): n equals a,t,g, or c
  SITE (4156): n equals a,t,g, or c
  SITE (4233): n equals a,t,g, or c
  SITE (4242): n equals a,t,g, or c
  SITE (4251): n equals a,t,g, or c
  SITE (4902): n equals a,t,g, or c
  SITE (5165): n equals a,t,g, or c
  SITE (5227): n equals a,t,g, or c
  SITE (5280): n equals a,t,g, or c
  SITE (5315): n equals a,t,g, or c
  SITE (5339): n equals a,t,g, or c
  SITE (5370): n equals a,t,g, or c
  SITE (5460): n equals a,t,g, or c
  SITE (5478): n equals a,t,g, or c
  SITE (5496): n equals a,t,g, or c
  SITE (5512): n equals a,t,g, or c
  SITE (5775): n equals a,t,g, or c
  SITE (6149): n equals a,t,g, or c
  SITE (6377): n equals a,t,g, or c
  SITE (6761): n equals a,t,g, or c
  SITE (7520): n equals a,t,g, or c
  SITE (7863): n equals a,t,g, or c
  SITE (7880): n equals a,t,g, or c
  SITE (8070): n equals a,t,g, or c
  SITE (8104): n equals a,t,g, or c
  SITE (9031): n equals a,t,g, or c
  SITE (9369): n equals a,t,g, or c
  SITE (9534): n equals a,t,g, or c
  SITE (10657): n equals a,t,g, or c
  SITE (11546): n equals a,t,g, or c
  SITE (12396): n equals a,t,g, or c
  SITE (12598): n equals a,t,g, or c
  SITE (12611): n equals a,t,g, or c
  SITE (13155): n equals a,t,g, or c
  SITE (13204): n equals a,t,g, or c
  SITE (13293): n equals a,t,g, or c
  SITE (13351): n equals a,t,g, or c
  SITE (13371): n equals a,t,g, or c
  SITE (13385): n equals a,t,g, or c
  SITE (13394): n equals a,t,g, or c
  SITE (13402): n equals a,t,g, or c
  SITE (13406): n equals a,t,g, or c
  SITE (13415): n equals a,t,g, or c
  SITE (13423): n equals a,t,g, or c
  SITE (13434): n equals a,t,g, or c
  SITE (13437): n equals a,t,g, or c
  SITE (13439): n equals a,t,g, or c
  SITE (13450): n equals a,t,g, or c
  SITE (13464): n equals a,t,g, or c
  SITE (13474): n equals a,t,g, or c
  SITE (13475): n equals a,t,g, or c
  SITE (13549): n equals a,t,g, or c
  SITE (13558): n equals a,t,g, or c
  SITE (13567): n equals a,t,g, or c
  SITE (13671): n equals a,t,g, or c
  SITE (14478): n equals a,t,g, or c
  SITE (14497): n equals a,t,g, or c
  SITE (14675): n equals a,t,g, or c
  SITE (14692): n equals a,t,g, or c
  SITE (14706): n equals a,t,g, or c
  SITE (14723): n equals a,t,g, or c
  SITE (14733): n equals a,t,g, or c
  SITE (15240): n equals a,t,g, or c
  SITE (15268): n equals a,t,g, or c
  SITE (15453): n equals a,t,g, or c
  SITE (15555): n equals a,t,g, or c
  SITE (15625): n equals a,t,g, or c
  SITE (16620): n equals a,t,g, or c
  SITE (17021): n equals a,t,g, or c
  SITE (17191): n equals a,t,g, or c
  SITE (17223): n equals a,t,g, or c
  SITE (17354): n equals a,t,g, or c
  SITE (17509): n equals a,t,g, or c
  SITE (17760): n equals a,t,g, or c
  SITE (17786): n equals a,t,g, or c
  SITE (17799): n equals a,t,g, or c
  SITE (17811): n equals a,t,g, or c
  SITE (17812): n equals a,t,g, or c
  SITE (17824): n equals a,t,g, or c
  SITE (17840): n equals a,t,g, or c
  SITE (17858): n equals a,t,g, or c
ggctgctgatactttggctgtgaggcaaaaaaggagaatttatgatatcaccaatgntcttagagggaattgacttgattgaaaaaaagtcaaaaaacagtatccagtggaagtaagttacaaaccagcaccctcttctgaaaccttttttcttctcagtgctctgtaaaatttgaccttcccaatgtttctatctcccaaatcctctatttcagtcaggcccctcagctttccctgaacacacctttctgggcctctgtgtcactcctgtgttgggtgttcccttgctctcttggatattgggttttcgctctntaaaattcaaatcttactttctccctcaagctattactcatttggcacacattgcatactgtcttgtattaatctcttcctaactctttacctgtccttgagagcaagaactactttcataggaatttgtactttgtaaatagtaattaattgaaancgcatgttgtcattaattgtggcctggttatacgtttgaatgtaacaatttctgttcnttctaatgtgtncccctttgaccatagtttttgtcttgttttgttttcgccaaaattccaccaaaacattaaaatgttgtnaatttattttaccagcacctcagtcacatcctgagactgctaggtgtgactgctgagcacactcttttggtnacccagtcaccaaccagtctggccttccagatgacaaaaaaacactgtnangggaagattgagaatttttgtaatttggttgttcttgtcaataaattttctaagcaagaagtatggtgtttaaaatttttaaggattttagtgcttgattttaagagtgtaaagacttctgtcttgaatatattactaaataagtcagttttattacagtaaaaattaagtgatattaacctagatctgatactgaggatattaattctcatatgtttttaagaggtgtaggtgctggctgtaatactaaagaagtcatagatagattaagatatcttaaagctgaaattgaagatctagaactgaaggaaagagaacttngatcagcagaagttgtggctacagcaaagcatcaaaaatgtgatggacgattccattaataatagatatccttttaaataagttatgcatatacatatagctnttggaatatgtatgtataaatcatttcagtctaaagatcattcactttgtttttagancagttaagttttataagtaaatatgacattttaattttattatattcttatatactaatattttctaaatgttacctttttaagttatatagtacagatccgttagcgttattcctgtgttgcactgagggggaaaaagagattagccaacttttggtctaccaattgatagaatgcagtatgctagccagtgtgcttaggaaatctgtgaatattagaagccattgttaagtacatttgtatttttaaataattatgttcagtgttctgaagtataaaattcagcagctctcaaagttttgaaaatttttcgtttaaagatgagatatgatgtgtccacaatcaatccttgatactttctgcctaacatgaaccccaaaatagttcctactggagaacaggggtctaagtcgtgtgtgcctatcaacaatatatattgggggaaaaacattattatatataatacatataatatcatatataatatataaaatatatttatatataatatataaaaacattattatatatataaaaacacatatccatgtgtttcttacaaaccaccgtcttctctcaggtatctgtgattctcttagtttatgaacttacctgtactcttaaagaaactaaccacattttaccttgtagcacctcatgaaattttgactaatgtatacaatataatttacttttcacattttcatgtatttggtgaacaagtccatgatctcatttgttatttcctttgtatggatcagagccccttaacagtttgagaacaatgggagttttcaagctgtgttctgtggagctctgaaattcaaaagccattaatctattttatcttggacttcgctgccctgctttacgagatgctggccattcccattgccccaaccatggttatgtgtgatatatataaagttttctgtatattatggtattttgacatctccataaacctttctggctgaggagagactgcccatcctgggactagccacttcttagaaacagcatgggctcatngtcctttttagggtcatggatgacgctggaaaccatcattctcagcaaactatcgcaaggacaaaaaaaccaaacacctcatgttctcactcataggtgggaattgaacaatgagaacacatggacacaggaaggggaacatcacacaccagggactgttgtggggtggggggnagggggnnaaggngagagcanttatgagatatacctaatgctaaatgacgagttattgggtgcagcacgccaacatggcacatgtatacatatgtaacaaacctgcacgttgtgcacatgtaccctaaaacttaaagtataataataataaaattaaaaaaaaagaaancagcatgggctcagccaggagcatccctttgatatataaactaaccnagtcaaggtccagaccntcctctctccagtccantacaccccaggtggcaantattcctctgccttaatcatcccagggtcaggtaccagacaactngggggactacctgcatagcttagagcccaccaaaattatccaaactaggccaaatgcagtggctcacgcctgtaatcccagcacntttgggaagccaanggttggcggatcacctgaggtcaggagtttgagaccagcctggccaacagggtgaaaccctgtccgtactaaaagtacaaaaactagctgggcatggcaatgtgcatctgtaatcccagctaccagggaggccataggagaattgcttgaacccaggaggcagaagctgcagtgagccaagatcacactactgcacttcagcttgggcgatagagcaaactccgtctcaaaataaaacaaaacaaaattatccagactagctaatcgtagtgttctccccaccctgcttttttttttttcctgagatggagtcgctctgttgcccaggctggagtgcagtgatgcgatcttggctcactgcaacctccaccccccgggtttaagcaattcttctgcctcagcctccagagtagctgtgattacaggtgctcaccaccatgccctgctaagttttgtatntttagtagagatggngtttcaccatctctagactagacttctttttttatctgtccatgtgtggcagcccctctgtgcatatggtcaggctggtcttgaactcctgacctcnaagtgatccacctgcctcggcctcccaaagtgctgggtggcgtgagccaccnatgcccagccanccctgcatttcttttncccaaggaaacncccaataaaagctctgggctaatgctttccccttgctcctgtcttctgcctcctgaccaccttgttgtcttaaccatgtnggccctgagtagcctgccttgcctcccgtcactaggacctatgagtataatacntttgtttttctgagcctttctttaatcctctgtgtcctcttgtggccatacctgaccatttaatacaangaacaaaaaacaacgatcacagaaaattcctgatgtggaagctgatatggttgctgatggcctccttttccccatccattcccttcccccagaaacctttgcctccatgaagaatgtgcactgctttccatctctctcctaagggtcctcaaatgtcacaaaaatcagaatnggcttcttctaagagcaaaggatgggaactcctttgtctttacctttctagactagacttctnttttttgtctgtccatgtgtggcagtccctctgtgcatatggtcatttagttattttgaccttcagatgtattaccttaatttaaatgcctacggcttgatataaatgtcgttccttaactcctatgacagtacattttcctatgtaactcatgaagacatctgtaattgctttaatggtaagtaccattagacttttccttgcattcttcctctcaaccntatttagtggagggtgattcagaattccctgtgtcctcatcctgtcattattttcagaagttgtgggcattgtgtcntcactccanccatgccgntgtattgatagactgcttttgtttctgttttcatgagaatagctgcttttcacagcattcagttcattagctccactggtagggatcaactgtgtgtggaaggggaaggggacagggacagagggcaagctaaatcagagcgggattaagcaactttcattgtcacacagtcacagagttagtgaccaaacttgaactagaacatggttctcatcagcattgtttatcaaactatatgcaagtatgctggtctcaaatgaaactcaaagaaaccataaggaaagaattaggtgaatccatcttataaccaggaaacctattcctatgcaatttgctgcccctgtgttttctccttaaaataacaatatcatgttaataattataattattaatataactaaaatggggggacgtgtgttcccaaaattatagcacaagtaaaatgaaattgtgcatatttaaatttatgtgtattatccacctatttaaaaagattctgccaagtacctcatcaagtggaatctgactttctatgtaagactatgttggaaataagtataggactattgttctattttaccactgtatttcctgagttttttaaggaagtttgctgagacttctgttaatctgcaactcaacagagatttngttgtagaatttggcttcaaaaataataaaatcatttaagctcaacatttcagtgtctcatacctaatctccactatcctcagtccaatgaacagtgttatttgaggctaaatggtcttaagaatctcagactttacaggagtcttagtcaaagcaaaatcaacttgagctgaatttgttaatgagaatcatacagctaacccatgtataatactaatacatgtattatcttatttaatcctcaaaataaatctatgcagtanggttgtgtatcccccattttatagaattgaaaatcaaagctcaaggtcacctagtttggganttgaaccaaacactctgattccagagcccacattcttgccactgtattccatngatcaacagtattttatgtaactttttatatttantttttgaccaggtgatacactttntggccattcaggcaccttctggtacacaacntggaggtacccattccagaaatggtatgtaggataacttatgtttatataagtgggaaaaatgaatctactgtctcaggatttatatttntctttaggtgaatgtgangctaattgtgtaaacacntgggagttagtcaagntttttatctaaaagtatttatagttgaatttgaatgtctttaatttcttgggtaaaattatagacttaattgattcataaatgattttaaggattattggctatatccttagtcatttattgatatcatttggctcaaagtcaatttttaaaaagtaatcagaatgttttatcaagtgatttttgtttcatacaaaaattaaaactattgtataaaattatcttcaggctatgtgaataaggtgtgtatgaaacaaatgaatnattgtgtttagacttgggtcctatccctaagatatctatccccaagtaaccaaatgatttaaaatgatttaacattttgattaaattattttaaatttgaattttttaagttagaggatgtcaagaaatgactaatacatatggccaataatctataaaaataagttaaaattcccacattgggctgggtgcagtggctcatgcgtgtaatctcagcactttgggaggccaaggcaggtggatctcttgaggtcaggagtttaagaccagcctgaccaacatggtgaaaccccatctctactaaaaatacaaaattagccgggcatggtggtgcatgcctgtaatcccagctacttgggaggctgaggcagcangaattgcttcaacctagaaggcagtggttgcagtgagccgaaatcgcgccattgcactccagcctgggcaacaagattgaaactttgtttcaaaacaacaacaacaacaacacatgtacaattgatataaaaattgccattgaagaaaaaagttcaatgtacatatcaacaatcaattcctttaaattaggtcttttataaaacattgtctggcttattaagtcaaangacatttattgactctatgagtttcatgattttcgttttcagattcagatttttaaaaacaaactaatttgaaagcaataaccaaaaaagggagtagaaaaagattactatattatctacctccttcccccacccgcttattaaaaaagtttacatttaggcatttgtattactggagtctgaagcctcaggatacagattactttttcagctggaagaatgttatatttatttctcagtaggagaaattagttgtctttgtgcttgcagatgggaaaaaaaagagtttgatttgtgaagcatgttgaactgaccagatctgtggtggccaactccaggggataaatttcctgtatatggagaatacctggagcattgctgggnccctgacctattatatagtcacacacggtaacaacagatggttgccagaattctacaacagagagtttctaatgatcagtatttgtgaaaagcttactttttagaaactagtggtttagagccctcaaaattacattctactctatgtctctacttttgtgttttgacttaatgactttattgtgttatgtgaatttagtaagtccctaatagctttgcctgtcttattgtactgtcttaagttagctagaaatgttaataattatacatttgtttatacccaataacttcaaagggtcagaatggacaaaagaaataccagatcaatctaaagagtcattcaggacctatccatgtgctgcttataaataaagagtcgagttcatctaagcccgtggtttttcctgttcccccacctgatgacctcacacagccttcctcccagtccttgactccagtgactccacagaaatccagcatggcaactcaaaatctgcctgagcaacatgtctctgaaagaagccaggctctgcagcagacatcagctacagatatatcttcaggtgggttcagagcctttcttttgtaaattagagagggagaaatataaaaacaggttggctctcttatccaaagtgcttgtgaccagaaatgtcccaagcacttttgacattttggaatatttgcatatacataataacatatcttggggataggacccaagtctaaacacagtattcatttgtttcatacacaccnttattcacatagcctgaatataattttatacaatagttttaatttttgcatgaaacaaaatattgactgtggcttgactgcagcctatcacaaggtcaggtgtggaattttccatttgtggcatatgtagatttcagcttttacctgaagtttacttggtaaggttcttttatctctcttagtaagtctaggataaattagtgaaatatgttccaactacctttaagaaaatatgttccaactatctttaagtatggaccatagtgacttatgcctcttgtttctccatattctttgttatactttttatttgggaagcttagttttatagaagtgataaatnggtctcaactccaattnatgtaggaaatcttactttcctcatttgtttcatttatgaaattttaaaaagctaaaacatttcacactgggtatcaggagtagagagcacaactcttaatttggcagtaccttactgattccaaataaagggagcatggtaggcaatctctcagtgactactgaatgaatgaatgaatgaatggtgccnaatatagacatcatattgcagataatttaaaacntatattgtatataatccaaattgtttattttacctctaggatgtgtctcattgctaaaatgggatttcacaggttaaaagtgacgctaacaagatataactggacatggaatgttttttagcttctttttgcccacatctattcctttctttcccctataaatatgtctatactacagaccattaggatgcacaatagaaaaggtagtgctggctgggcgtggtggctcacaactgtaatcccagcacttagggaagccaaggcaggcagattacctgaggtcaggggttcgagaccagtcttgccaacatatagtgaagccctgtctctactaaaaaatacaaaaattagctgggtgtggcggcgcacacctgtagtcccagctacttggaaagctgaggcaggagaattgcttgaacccaggagttggaggttgcagtgagccgagatcgcaccactccagtctgggcgacagagtaagactccatcttaaaaaaaaaaaaaaagaaaatgtagtccttaaaaagcttacaatctaattaggatataaagcaggcaagctttacatgggttttacctgggttagcttagacataattaacacactggcttcaacaaagtgtttttaaaaagtgagtattctgtttttatggtttcatgtttggaaatcctaactaaggaaagtaattttgggctacattagagcaggccttgaatttcagagtagttaggacatttatccaataaaccagtgaagatctgtgaccaaggaaatagcataattagctataatggtgcacacaggagtaatatgattaggaaagatgcttttggccctgggaagcagaattcagaagcgatggaaactgtagatgtttgcagttatgcaactgagagaacattagggctaaaacaagggccaagtgntggtggggctcatgcctgtaatcccaacactttgggaggccgaggcaggtacactgcttgagcccaggaatttgagaccaacctgggcaatacagtgagaccctatctctaaaaaaaaaaaaaaaaaaaaaaattaaaaattagctaggcattgtgacgtgtgcctgtggtcccagctactggggagggaggccaaagtgggaggattgcaagcctgggaggtcaaggctgcagtgagccctgacagcacttaatgtactccagcctgagtgacagagcgagatcctgtctcaaaataaataaataaataaaaaggctaaaacagtgattacagtgangatcaggaagagaaataacgaacagatttgagaaacactgtaggcaaaataacatttgatgtgtgagatctggagataaagttaacaggaatggaaagtgatgttgaagttttaaggttgaataactgggagaattatgaaactactgactaaaactgagtcagnttttggtagaatgatgatgaggtttggtggtggtttttttttttttttttttttttttttggcagggtctcactttgtcagccaggctggaatgcagtggcgcgatctcagctcactgcagcctcaagtgatcctcccacctcagtctcccaagtagttgggactataggcacgtgccatgaatgtctggctaatttttttgtattttttgtaaagacggatttcactatgttgcccaggctggtctgaactcctgagctcaagcaatccgtccacctcactcagcctcccaaagtgctagaattataagcatgagccaccatgcctggcagataatgagtcttttggtcttcgtctggagtttggaagtttaaaagtaatgccaggcacagagtaagcgctcatgaaaacaacctgtccacaaagtactagtactttaaataaatgtgcatgtcagtcaagctgctgctgtgactacttgtgtttaaatatgagtatcttttactgttaacagaaatataacaaaactttattactgtttccagcaggatctattagtggagatatcattgatgagttaatgtcttctgacggtaagtaggttaaaattttactaactcacttatcagtaatgcttctgtggaatttataagtgaaacatgatttaaaagaaatgaacatatatttgctacctgctttactatgaagattcatgaaaattctcccttaacacttacagtaagtaataggcaaccttcagaatttatttttctttgcttgcattttgagggaaaggaatccatatggggatacttctcaccttcattgaaaataaactgttaggcctttccactcctgaaggatctggtccaagaagagtaaaataacttgtctaaatcaagcaactgatctgaacacttgcctttgtaaatacccctacccaggccaatttcaagctgccaatgggaagtcactgaattagtattaatattaaccatgttgtcatctaacctgaaaaattattaaatatcagttagctacaatatgctaattactttaataatttctctccttctgtaagttcttggatcagagtcctactacctaacaaataaagtagaanacctacgaagtggtagcagttaagttagcaaatgttatagtaactagagatgtactaaacatgtatgtagaagcagagaacatcagcaaactttgtaagtccagttcattcttctgtttggcaaggtggaaaaccaaacactttcattagtgttctgttttttttttttaaggcagagtctccctctgtcattcaggctggattgttattcaggctggggtggcgtggcatgatagctcactgcaacctccacctcctaggttcaaatgattctcctggctcagcctcccgagtagctgggatgacaggcacctgccaccacacctggctactttttgtatttttagtagagacggggtttcaccatgaggccaggctggtctcaaactcctggcggcttctgtttctcaatctaatttgttttttgtttgttctggtttttggtggctgatggtatttcaggctacgcgttgcgggggggtttgatttggaatgatgtgtttgggggtgttttgttggggatgattaaccgtatgtgggagcgctgtttagcagtggctttgttttttgttcgccgtgtttcgtctgttggggctttgtgctggcggggcgggtgagtgcaggtttagtttggatggtgacggcggggtttgtggtgtgttttatgtggggactgtggattacttgattgggtgaaggcttgggactgttatctacctctaactgtgtaacattttagacttcttaataacctaaatatttaaaataatgaatgtaacaccttttttagttcactgattctgaagtgttcttccctaatactttctttacttcacaaaacttcaaccataaaaacaaagggctctgattgctttaggggataagtgantttaatatccacaaacgtccccactcccaaaagtaactatattctggatttcaacttttcttctaattgtgaatccttctgttttttcttcttaaggaggaaagttaaaggacactacaggtcatcaaaaacaagttggccaaggactcattacttgtcttatatttttactgccactaaactgcctgtatttctgtatgtccttctatccaaacagacgttcactgccacttgtaaagtgaaggatgtaaacgaggatatataactgtttcagtgaacagattttgtgaagtgccttctgttttagcactttaagtttatcacattttgttgacttctgacattccactttcctaggttataggaaagatctgtttatgtagtttgtttttaaaatgtgccaatgcctgtacattaacaagatttttaaaaataaaattgtataaaacattcaatttattggtctttgtggagaattagatgcatcaccagtatattacaacagagccattaatcttgtagcttcatcaactggtttgctttcatgacgctgctgaggaatctgaaaggagaaagtattatatttaaaaacacagacaacaatagcagacaaatgacttatataagctgttattcaatttaatttttctagtcatatctttggaagtagaacaatctgtatattctgacaatgttttagagtctgaatatgctatttatactatagagcctagtactagagagccaagtactaaaaattacactcaacttacaggctttgaaaacttgggagtttaatttattagcctcaatttgttagccataaaaaaaagcaaatgatttctgcttnaccagttctttctgcagaggttcaagtgaaatgctttttgcgaaatgtgcaagttccttttgtacatttacaaaagctttatttactctgttaactttttcctcattcataatgtttatcttttaaaaagaaaaaaagcattaatctatgatctcataaccattaaagataagatatattcaaccttaacctgttaaatctnaaaatctaaaaanctcttaccaacaaattagggataattcactcaaaaattcttatagtcttattgggaaattacagacaaaaagttttggtttttaaaaaatgggatttatgtggctatgcctcacacttatggttcagaaggctaaaatatgtgactgtgatattgtgattcataataagatatatatatatatttggtctttgtcctcatttcctgtcatacagctttttaaatcattgtattaagagggataagagtgtcttttgaatgctaataagatggctggtagctgggagtctctagatagcttcaggaggagggctagtcagataaaaacacagggttagaggattaggactttctgctccagaggagtggggataaaggttaagcccatcactaatggccaatgatttaatgaattatgcctacataatgaagcctccggaaatctacaaaagaactgggttcaaagagcttctggatagctgaacacatgggggctcctagaaagtggcatgcccagagagagcagggaagctccatgccccttncccatgtaccttgccctctgcacctcttccatctggctacgcatctgtncccctttgtaatatcctttataataaactggtaaaagtattttcctgggttctgtgagctgctctagcaaattaatcaaacccaaggangggggtcatgggaacacttatttataactggttgggtgagaagcacaggtaaaacatnctgggacttgtgattgtcanctggaagttggggnagatgcttnaggactcnaacntctcaaccntgtggaantctgacgctantcntnccaggtcaacnagtgtcagattttnaattaaaggnnacccccaggtgttggccttgctgaagaatttcatttgcagaatttgttagggtgtgggggaaacttgccccacnaaatttagntattggaangtgttgagtgtccgtatgagagtgagagtaagagaaactgagttgcttttttcctgtatccttacagtgaccaaaatctttctaggctacagtgctgtcatccncgcatctatacaagaaacctggatcaaatacttttagtcccttctaacataacaatacgtctctgaatccttcctggaccttcttgtcttaatggaagacccctgatgacagcttccctcgcagtcctcctcttgagtttaacagaggtaggggtggtgctcttcttcttcactgttgctgctgccaaacaatttctccttcaaaacccttacctcctttgcaccttatgcagcctacccatagatctctctcttagatcctacctggtggcatatataaaagttctagtacctcctgtccaaataaaataatcttcctcaaatacaccaagcttttccctagctcagggcctctgcacttgctatttttctctgcctcgaacccaccactcccaacacttcctagctctttgcattgctagctctttgtcattctagtcttggtttcaatgtgtcaactatgaagaccgtcctatataaactgtcatccccaaaacccccatcatctgcttaatttcattcttagcatttataaaatcataaaactattcaaccaaaaagcttaactccgctagctcatgaaagttgaaagatgaaatgttagatttctatggactattataattaaactgagtcctggagagctgactccatctactactgaaacttgaaaacattttcttaaaaatttttcttaaatcttgtagaaatttctcaggtattttgaaatataaacaaagaaaagaaacccctttcaaattgtgcatttcaataaatattttttatcttcattttacaggtttttgntttgaattgcagatgtctntcaaagatacaagaattactgaggagaaaaagaatgggtgctcactgacatcccatgtcttgcctctattaatacattcttacatttgagtttagagataagaactgtttcccatactatggtttttaaatgagttctatggttcagtaaaactattaaattgaagcttcacacattntgtagttaaaatgtttnatttcttttcaacnatttgttttcaagaaangggaggttantttttcttcctttttttttatatttttttagacaaatgcttgaaaccatccttacctttctaggaaaaatgaagaacctttttaaaaagtaatagtatacagctgttcagtagcttacaatgacactttgcttgtaaacaataaagtcagagtgcttaactaatactcaccttcttaagattagtggtaactggttttgctttgtttttagccttaaagtttttttggctggctatgtgaaatacattcctggacttcggccctcttaatttgttcttggccattgtctagaaaagaaaataaattcaattaaattgcccacatttatgaaccgtaagtcaattttaagtttttaaaggtaccaattaaatctaaaaaattctatcttactcttgattatttttaaagttggtgcatatattatttccaagtctttcactcctagtagattttctgctctttgagtacagagtatgtatctaattcttccctgtatccccagtaatngggcccataggaggcatccaattaatantctgctggttgaattcactaatatcatcaacacaataactgttattctcagcagtacctcaccacccatccttctgttagtctatatactactatgctattctggttcctatcatactttagagactgattctgcctccttcttgacttcttttttattcctttttactctccccactttctctncctgtgcatcccatcaaaatcagtccttaatcctccatttcctacctccctctctcccttaatttacttttatgacttccatattacctctatgtgaacggncccttgccttgaagtgttggatactgtctttcctccgtagctagagatgcattaagccagtaaattctanccttaaaacatctctcagatctgcctttaataatgtatatgaggaataatttttaaaatattaagttaacacatattgagcttttattatatgtacaagcactacacttatgtgctttaactcatttactccttacaaccctttgtaagaagtactattatccccattttaaagattaaaattaaaaaactgacgcaaagagaagttaatttgcccaatgtcacactgtcaataaccaggagatgccaggacttacagccaggcagactagatcagagctaacgttatgtgatattacacttcatgtataaatataaaagctatacaaaaaaatggtatagtattgcttagttcaggactggattactgctgaagtccctaggtccatttgttcaaaccactgtttgtcaaactatgcccatggaccaaatcaggccaagcacctgtccttgtagtaaagtttaattggaggccaagtgcaggcgcggtggctcacacctataatcccagcactttgggaggcgaaggcagagaccagcctcaccatggtgaaaccctgtctctactacaaatacaaaaattagctgggcgtggtggcacatgcctgtgatcccagctactcgggagactgaggaaggagaatcgcttgaatccggaaggcgaaggttgcagtgagccaagattgcaccagtgcactccagcctgagtgacagagcaagactctgtctcaaaaaaattaattaattaaaaaataaagtttaattggaatacagttatgtccattcaatcatatgctgatatggctgctttcctgctataactatgacccacaaagtccaaaatatttagtgtccgacctttaacagaaagtctgccaactcctggcttaagccatctgcacagtggctatctggcaccaagctatgcgatcgaccttcccaatgttaaaaaccttcaacagttttcccaatgtataaggggcaacgtgccttggncttggcatattactggcactctgaatctaccctaaatctgccacacatatctcctgttacgtccctataaacactgctctagccagcctggtctaactgttctcttgcacagacaccttgaacattcttccttttttacctttgctcagtcgtagtcttgactgaaatttatatcttccttcaatgtagccttactacattgtaagtaattaaggaactacttaactgaaacagcaatgcttttgaacgccaacagtattcctcctacttaaaaaagaatgcagtagaaaatacatggttattacagaagatgcaaaaaataaaatacacataataaaacccctcaaatgaagtactctaaaatcattccaagccgggcgcggtggctcatgcctgtaatncccagcactttgggaggccgaggcggacggatcacttgaggccaggagttcgagaccaccctggccaacatgatgaaaccccgtttccactaaaaaaaattaaaattagccgggcgtggtgacgcgcgcctctaatcccagctactcgggaggctgagacacgaggaggncggaggttgcagtgagccgagatcacgccacntgcacaccagcctgggcgacagactgagactcagtctcaaaaataaataaataaaaattaaaataaaataattacaatagtaaccaaaatccaatcattcatctagtataaatcaattgctatatgccacngtgtggtagagaacctatattttatacacaaaaaatatatatggaacataaataatgacagtatatatacggaacatacacagacatgataggtatattgtacatgacactacctataatatacacatggaccatgaacagacagtctacaagtnggagaggtttactagagctgtagacctgagcaaggttcgtggagaaagtaatacactagtgggggtgtgcgagtggagggaaattctctgaaaaccacgtagaaactgatcatgaaagacacagcccaaaactgggaccccgtcaggagatgaaagcccaacaagcaccggggtttcgggcctgctacccagtagggctgcctgaggcagagcgcgacggaaccgagcctacaggccacagcggtacgagnaccggcccaatccaaccccgaccccntgcaaacttcacngccagccctccnnagaaaacttaantttattaaactctcanccagaagtttaacacttngcgtgcagctttttaagctccaggtaacaccatctggcacgtacggcgtc

SEQ ID NO: 6468 - DNA, 4159 bp, Homo sapiens
  SITE (278): n equals a,t,g, or c
  SITE (573): n equals a,t,g, or c
  SITE (1197): n equals a,t,g, or c
  SITE (1208): n equals a,t,g, or c
  SITE (2166): n equals a,t,g, or c
  SITE (2484): n equals a,t,g, or c
  SITE (3286): n equals a,t,g, or c
  SITE (3408): n equals a,t,g, or c
  SITE (3419): n equals a,t,g, or c
  SITE (3435): n equals a,t,g, or c
  SITE (3444): n equals a,t,g, or c
  SITE (3455): n equals a,t,g, or c
  SITE (3457): n equals a,t,g, or c
  SITE (3464): n equals a,t,g, or c
  SITE (3644): n equals a,t,g, or c
  SITE (3675): n equals a,t,g, or c
  SITE (3753): n equals a,t,g, or c
  SITE (3838): n equals a,t,g, or c
  SITE (3849): n equals a,t,g, or c
  SITE (4052): n equals a,t,g, or c
aggttggaaaagatctagagctataatctccgaaaggaagatttgtaatgcactgcgagttagaaatgtttttctcactgcagcttccttgtttcaaaaagagaatttttgacagcactgcaaaggcacaagaaaccaggcacagtataaaatatacaaataaaacaggtaccaaggaacttaaaacattcaacccataacgtcgtctaggtttttctgctttaagaaaattgactcaattcttccaagagaataaccctattaaaggtaagttttcnacatgtgcctctatttattttgttgaggtcataggaaaagctggatttcaaacaaacgtagatgtaagaattaaatagaggagagaagcacgaagggtggctttatagtcaacagggacaggtttattttaaataaacctgagactggcagctggccaagttaggtcagagccacactctcttacagactaagagtttttaaggattcagggtgggagagtttaacagaggcttggactgcttctgtgtctctttgctgtgcttatctgggagggagagttgtgtgtctgttccncatacatctttctgcagctgcaggcatacccgcagctaaaagtctgcttttagcttccctatcttagtacacctgaagggaaaggaatgtgcttattaaggcccactgtttcactggggctcattgtatgagggtgaggtttggtagttagccaagagattttccccctacttcactctgcctgagctgtcttatctgtgttttactgactgctctttctatctgcttgtaattagaagagaagtgatttccttgaaattcatgaggctagaaagggagctggaacttaaaaatggcggtgtttgtccgagatgacggtgctcctgctctgtcagtaaaactgacatttatatgccattttgtagcttacaaaagatttcagcctacactatgctcaaaataaggtgataaaaccactcctgttttgcaagtgatgatactactaaggttcagagtttaagccgtgtgctggcagccacacaactaactagaaattgacaaagccagacggttttgtaaaactaagcatttttttaaaacagtttttaaaaaggttttgtaaacttgataattcgcaaatccacattggttagcacttggtcaagtcctctttccaacaaaccnaggcacttgcnttgcttacagaaagataagcaatttttgcaataaatcatttaattatgcccatcacaaaaaaaattaaggaacagaatatactaaggggagaggaataattgcttgccaatgtatgtttattcaaacttttgtattctttctgacgatccacctgttaaaaacacctaaaaatgctggtataaaatgcccataaagtgtaagagcaaaacaaaaacagaaaaccgttagacttttttataaggccagagttattcacaaatactgaggtgaataagttgggtacaattatttggttctttgaatgtgaggctattgatatatatatacagaaggcaaagaaataaatgtaacagaacgacattacagtgtttatgaaaactggtaggtctcacttttattttgaagtggcgaaataacatggttattcaggcaagagcagaggtctgagtgaggaggcctgggtttttggtttacctctcccaccaaccaaccgtgtgatcttggaaaagttacttcatttctctgtgcctccctttcccatatgcatgtagatagtcattatacccacttcagagaacgttgattatctgctcagcatccctttctggataaccactcttctccgatcaagttgtcctggttgagctgataactacagtcctcctctaaggattttccagctagagctggtggaaaatgctgtctcttgcatttggtgtctttgtgctgggatgatataaaatcaaggctactagtggccatctcctccagcaacttggaagaagtcttcctgcaatgagagcaacacacacaagaagacagaactgaacagaccagagaactctgatgcaatcatttgagtccttggattcagccatagatggaagaaagatccatcccttcatttttcaagtacctgagctaaaatattaccttctttgagcttaaactactttngggttgtttttattttattttttagtcactttaacctgaaagagtcttgactccactcctgtcctacctacttcacaggattattgtgcagagttagtgaaatataaaacatgaaagcataaagtattactaaaacaaaagaaaggatcatgttaattttctaagagccatatttacccatgttccaaatgaaccatacataaagaaaatagcttaaagatttttcatctttaaaaatacatgcaaaaattaaatttccagtttttctaacaatcttaaagatgaataaaatcataaatagaaaaataatctttcagnaaaccttagttttcctgggatagactcggcaatgcagagttctttatacagacctggacctcaaataattgtcttggaagcaattcaacaagtaaacaaagataattaaggagaagaagaaaatgagaacaccacataaattacaaaccatctataatgaaactcatagtcctctaagggaacacagccagccttgtatagatgatactccataatttctcttacttatttaacctccatctcttctctccaccacacagtttcattaagtcaaaatagtttggacacctaggctctgtaggtgctcaaaggaagtacataccacatttctatctctcagggcacaatcatctggattgtaaatgcacagggaacaatgattcttgacagaaagtggtaagaactatgataaatgcacaaaatatgctatttatgggtggagataattccgaattccagaaacattcatgttaaagctcttatttgattgtctcagagcagaaattggcagacttcagcccaaaggccagatccagcccactacttatttttgtatagcccacgagctaagaatgaagttgcatcttaagatggggaaaaactcaacataagaatgatacatagcaacacatgcatattctattaaattcatgtttctgtgtccacaaagtgtcactgcagcacagccatgctcatttgtttacatcttgtctgtctgctgtcatgctgtaatgataatgctgagtacttgcgacagaaaccgcatagcctggaaagcctaaaacatttattacctaggccnttgaccaatttaattttttttttttttgaggcagaattttgctcttattgcccaggctggagtgcagtggctcaatcttggctcaccacaacctctgcctcccgggttcaagcgattctccntgcctcagccntcctgagtagctgggnattacaggncatgcgtcacncnatgcccnagctaattttgtatttttagtagagatggggtttctccatgttggtcaggctggtctcgaactcccgacctcaagtgatctacctgccccagccccccaaagtgctgggattacaggcatgagccactgcgcccggccctaattttttttttaaacagggtctcactctgtcgcctatgnctggagtgcaatggcgcgaacactgctcacntgcagcctccacctcccggactcaagcgatcctcccacctcctcaaccccccaagtagctgagactacaggtgcacanccaccatgcttggctaatttttgtattttttgcagagacatggtttcaccatgttgcccaggctggccttgcattcctgagctcnatgtgatccanccctccttggcatcccagattctggggttacaggtgtaagccaccacacccagccaccaatttaaaactttaaaacattgccaatccctatattagagttgagcagcatggtggtattattcagaatattgctattttatactcaaatacacaggcagcttaaatgaatttttcctcccagcatttcaagaaggtagaaaaanccttaatgtcatgagtttgggttccctttcatctgatgattatcaataattttcattcttccaggctaaaaatggaagctcccagttatgtagaagatatttccatc

SEQ ID NO: 6469 - DNA, 430 bp, Homo sapiens
catgaagtcctaatagtgtgtaaacatgtccatgaaaaagaattgctgagttaatcaggttgcctgtttcttttcccaggttttccctatgttcttgtttgatgtctgctggttgggttggtggtcagtggtgattaccagcattcaggttggagcagttgctgagggcttaacactttgcgggagggagttctgagaaactccaccctctggcttagtttgttctagggactgggtgacagtggcattcttcaggcttggtccagtgatcagagagacaatcccgtgggatcttggtgtccctcttgctatgaatgagagaagggtgggggacacacaccaccccacaccaccactgcatacacctaagctggggacaggggccagcaggtcacggggatcaggcattctgctgtagagcaggtcaggt

SEQ ID NO: 6470 - DNA, 131 bp, Homo sapiens
aaaaattagcctggcgtggtggcggatgcctgtagtcccagctactcgggaggctgaggcagaagaatggtgtgaacccgggaggtggagcttgcagtgagctgagattgcgccactgcactccagcctgg

SEQ ID NO: 6471 - DNA, 1727 bp, Homo sapiens
ttagtggattttccatttaatgctccccatgttatttcaggacctatttaaaagtaataacaaaaaggaacataatccaaaattacatgttttattttcatgtttgtaaaacgaagagcttttttctggatggttttcttatcagcttttcacacaacagtcaagtaaacctcgtggcactagccctagaaaaggaaaaacacgagattcttacaagactacaaacattacaacatatgtaaaagcattaaaagtattaaaaaaaaatattgtccttataacggtccatctcagaagccagatccgtaaaagtttttttttttcaacagaagttcaggttcgggataagatcatcacagataagaccaaggacacaatattcactgatctctaagcaaacagaaaaactccacttacagaaatcgttgcaactttggaacttccaagacaatctggcctctatcaatgggcagacagcgaccctcactgttggcagaaaaaaaaaaaacccaggattttataacacaactgttataaaatcacggcaacaaaatttactccacctctgaattactggtcttaatctcagaagccgaatccgtacttatttttcttcaggttatcagcttcgggataggtttcatcattgattagaccaatcagaccttgtatatgtacacataatacattaaactgcacttctgtgacactgactacaaaccaaggtaatgctaaaaggcaagtattatagtacaaatactacagaacttttaagccatacaacctacttcaaaatgaagctgctagtcagtcacattcgacattcattatcttcactggctactcgtccacactcagaacgctgttcactgacaaaaaaaatttgatttagtctaggtgtggattaaatgctatgctcaatcataaagtactaaaacaacacatacctgttaaaagtgtcaggttttaaccaagcgattttccattaaatattctcccagatgttctggaagttttttcgtgtatctaacaaaaaaaagtaaatttcaaacgatgcaacagttcctattcctgtaaatcaacaggtttactcctttagtttggaaactaagcttaactaagctcttacctttgcatcttcagagctgctccactgtgccactgaagacagcgccattgttcctgcgggaaatcggtatttaagcattctcgcagaaatgtcacactccaaggcgtttttccacacaaaacccttccccttcattaatccgaattgcacacaacgccgccttcgaacagctcagtttcaatacagggtcgaggcttcccattttaaaacaacgccgacggaaggccttcgccattttagtaaaggccctttgctgttaaaactaaccctccgccccaattaaggtggtttttccgccgccgctcaggcacatgccggaggccagcaagttcggcgcccgtggccgatcagcggttcctcacgccaaaactcggagcctgtggccgtcacgactcaacctcagtacatgtggcagtccggccgcacgtttcccacgtgcaagctttcaactctcagcactctaaactcttcactaagatgtcttcacaggattaaagctcttaactcggcctgcgccaccatcttttgctcggatactagcccgcaatacccactcacctaccacccgcccagacgctcgcgaaggccgacgtaaaag

SEQ ID NO: 6472 - DNA, 1727 bp, Homo sapiens; identical to SEQ ID NO: 6471

SEQ ID NO: 6473 - DNA, 392 bp, Homo sapiens
ttggtacccaaatcctcaatatttgtctcagactctgaaccatactgtctttgctcagttatttcttaggcctattgtcccaacatctgtgctggtttagactcaaatccacttgttctattttcaagaatccttcatagcttgacttttccttggcatcttgtgccactgttgacaaaacggttttatttcaggagtcttggcagagcctagcacaagccagtgcatataaatgtggagtactaatttcgatagataatgtgacatattaaaaaatctattgggaggcaagggaggtagaaggagctacaggaaaagcggtcagagggctccaaagcaaccagtctatttcacaactttgtcttgtttgccagctttaacaaaacggtaat

SEQ ID NO: 6474 - DNA, 392 bp, Homo sapiens; identical to SEQ ID NO: 6473

SEQ ID NO: 6475 - DNA, 100 bp, Homo sapiens
taaagagcaatctgacagttcttagttctatatcattgtgcttcatgaccatcaagatccacttttggatgtgtactggaaaaaaaaaaaaaaaaaaaaa

SEQ ID NO: 6476 - DNA, 146 bp, Homo sapiens
gcctgtagtcccagctacttgggaggctgagacaggagaatggcgtgaacccaggaggtggagcttgcagtgagccgagatggtgccgctgcactccagcctgggcgacagagcgagactccatctcaaaaaaaaaaaaaaaaaaa

SEQ ID NO: 6477 - DNA, 789 bp, Homo sapiens
aaaagtttgttttctcgaaataattcatctttcagcttctctgcttttggtcaatgtctaggaaatctcttcagaaataagaagctatttcattaagtgtgatataaacctcctcaaacattttacttagaggcaaggattgtctaatttcaattgtgcaagacatgtgccttataattatttttagcttaaaattaaacagattttgtaataatgtaactttgttaataggtgcataaacactaatgcagtcaatttgaacaaaagaagtgacatacacaatataaatcatatgtcttcacacgttgcctatataatgagaagcagctctctgagggttctgaaatcaatgtggtccctctcttgcccactaaacaaagatggttgttcggggtttgggattgacactggaggcagatagttgcaaagttagtctaaggtttccctagctgtatttagcctctgactatattagtatacaaagaggtcatgtggttgagaccaggtgaatagtcactatcagtgtggagacaagcacagcacacagacattttaggaaggaaaggaactacgaaatcgtgtgaaaatgggttggaacccatcagtgatcgcatattcattgatgagggtttgcttgagatagaaaatggtggctcctttctgtcttatctcctagtttcttcaatgcttacgccttgttcttctcaagagaaagttgtaactctctggtcttcatatgtccctgtgctccttttaaccaaataaagagttcttgtttctgaagaatga

SEQ ID NO: 6478 - DNA, 284 bp, Homo sapiens
tgaagcaaattcatttattacacatatttgaccttctcatgggtgattcagctgtgtctaaataagttttcatatattagaaatatccactgtaacacacataaaccaagaccaggatttgcaataggtgcatttctttggtatgtctgattattttcttgagacttaaaaatacttgcttgaaataaataggtaaaatttatctaatatacaatgactatatcagttaatttatcttttatttaattaacttatttaagaggaacgtaaaatcaatttagtcc

SEQ ID NO: 6479 - DNA, 6317 bp, Homo sapiens
ccctgtagaaaagccttatcttacaaatcaaccaggagacacccatcagaatgtggttgttactgaagcaggtaattacttcatgtgtctttaacttcatcaagaactgaactgtactttcaaacgctgcttcatgttgaccccagtgaaacttgtcttgcctggggaagtggttcactaagtatggtcctatggacatttacttttgaactaggttagaaaaaattatgctaagctagtatttgaatagaaaaacctgttttgttttcttcagagtggtactaaactaagtgatccacattaaaatttggatctggccaggcacaggggctcacacctgtaatcccaagaatttgggaggctgaggcaggtggatcacttgagcccaggagtttgagaccatcctgagcaacctggtgagaccccatctctgcaaaaaatacaaaaaactagcctggcgtggaggtacacacctgcagtcccagctactgggaagctgaggtgggagaatcacctgagtctgggaagtcgaggctgcagtgagcagtgatcatgcactacagtccagtttggtcaacaaagtgagaccctgtctcaaaaaagcaaacaacaacaacaacaacaacaacaacaaaaaaacaccaccaacaacaacaaaagaactttggatctacaagaaatttctctaacaacatgtaggcgtcatgatgcaaattggcacattcagtggagagcaaacaggggtgggctggtaaatgtttagggattggttggatccttaaattgcttgaagtcaaacaggagtgggaggaaacagcaaattatcgctcagataccctattgctcatgagtttgtcttctgttaacaaatgaagtgatgcgcagttaaatgtagataaaagctttatctacatctggtccactttgaccagaattattcagattagtcatgatgatgacttttaatttacaagctaaatgcatagttcttgaatttgctttttttgcatagacatgatattaaggcttagtgcttttcacttttcaggtgcctggttttaaaaccattcagaacatctaaacctaattacatatgtaactaacctgcacaatgtgcacatgtacactaaaacttaaagtatgataaaaaaaaaaaaaaagatcagtaggctgggcgcagtggctcacacctgtaatcccagcactttgggaggctgaggcaggtgggtcacctgaggtcaggagttcgagaccagcttggccaacatggcaaaaccctgtctctactaaaaaatacaaaaattagctgggcgtggtggcaggtccctgtaattccagctatttgggaggctgaggcaggagaatcactggaaactgggaggcagaggttacagtgagccaagattgcgccatgcactctggcctgggagacagagcaagactctgtccctccacaaaaaaaaaatattcagtaatcacattagaaatacttttttctcttttgaaattgagcagatgtttattaattttaagttgtatggaattacagtgtcacggttttttaattttactaagaatacctagcattatcaaatgtgatggaacaggattaaaaaatgattcattttagaatttaattaagatcaagtctttgtgccgctggagtctcgtgtctctgagtcgtgactgtatcatcagttaatatttatatatttcattttaatcccagtgacttgtatggaatcgtgacactaagcttattggctaggtaattacttacccaatatatttacaataatcttaataattattatttttaataataagtacttatttttgtaagtaatgattgagaaggagtaatgaaatgagttagctaaggttcttaatgaaagctagtccatgtctgaattgtagatttaataatagttttggaagtatggatatcaaattggaacagtttgatatcactacagatcagtacaattcaattttccgttcagtaaaattttgtttttaacttttaccaaaacatgaatacagtcatgtgccacttaacaatggggacatgttctgagaaatgcaccattaggcaattttgtcattgtgcgaacatcatagagtgtacttgaacctaggtcatatagcttactacacatctaggctgtttgatatggcctattacttctaggctacaaacccctgcaccatgttactatactgaatgctgtagacaactgtaacataatggaatttgtatatcaaaacctatctaaacatagaaatctataaaataggatatcaaatataaaagatggtatacctatgtagggcagctccattataatcttatgggaccactgtcacatatgtgatgcatcgttgactgaaatgtcactatgtggtgcatgactgtatattatttcattagatttttcaatattttgagaagaactttggggtcaatttattgaaaattctatttcacctgaattttttgaaacattcttacatatttttgctttagaattcttcctcaactatcttttcacatgaagactgttttattttgtaggtataattcccaatctaatttatgttgttataccaacaatacccctgctcttactgatactggttgcttttggaacctgttgtttccagatgctgcataaaaggtaaataactcatatatgtagagacaatttgaaaaactttaaataggttttcagaaatgttttaaaactattagcataaagttaattatattttaattttccttaagaaatcctatacatacaatctaataagatatacattgaggatagaattaatgtaatatattatttaatccttacaggacttattaagcagttacccttctgtttgtatttctcagttgagaagatggtgtcttagatgggttacctagtctgccttgggtaccatagttagtgtccacggtgaatctgaaatttggatgtttgtaaacttccaacatatgcactatattatactgttttttgtttatgaagtataagaattaatgctaaacttttcaatctagacatcaagctatatgtaagacttgatatttgtaggttcattttgtattacttttcaaaattcaagtcacaggtttctgttttatttcaaaaagatcttttaagaacaggaaataaaatacagcggttcaaacaggccactttttggcaggtatcttgaaataaaatcctatattttaccagcaagatttctgggggaatattatgactttttatctgctttcctgtacccttgggttagagaagtttttccatgtgtgccaattttttaataaaaatgaaacaaaattcaatataatgaaaatgtatttcattgtcaaataaaaaatgaaatataaatatgtatcaaaaggaaaaaaggaaaagctattctgtttatataagagcatgtttgctagaataaactagacatctttgtctgcatggtttaaataagaactgatcaaggggatgcctccatcaggaaggacctgcaaacaaattcattttcctcttttgaccttacttcatcttcttctttttctgaaataaaccctaccattaagcaacaaaagacccagaaaaaaattaagtaattctgaaatgaaatactaattctacacaaaagccacattaataacctttttttttttttttaccatttagaccacttttgtgctttttataaactttcttggcttattttccatacatgttagatgactgtagaataaagttgtgctgatcttacttatttggatgaaaatctacaaaccatacaatttggacataatattttattagtaaccaaaacagctaaatctaagtgaattaagtaatattttaaaagggtaatggtcaggtgtgtttagaaatagttcttttttctctttgagggaattctgcaatgtctggtagatggaggaggggatggggagacgcctgtgaggactgaggcagatgctgggaactggggctgggatggtcagggagcaagtaagtgcacaacacagtgaaccgggacaaacacttttggtccaggcaggagattatcttgaggaaaccagcccaaagaaatctacttttgacagggcatccagtagagaatgacttgggtggatcatctgaggtcgggagtttgataccaccctgactaacatggcaaaaccccatctctactaaaaatacaaaaaatagccaggcgtggtggcgggcgccgataatcccagctacttgggaggctgaggcaggagaattgcttgaaccggggaggcggaggttgcagtgagccgagatcaggccactgtactccagcctgggcgacagagtgagggtctgtctcaaaaaaaaaaaaaaaaaaaaaaagagagagagaatgacttggataaactcaggaacagggaacttctgcaggtgcctgaaaagttatcgtgttgtggaaagacagaagatagcagaaccctaggcacaggctggaaatgtgggccagaattccaaatgtgacaagggtgaagttgtatctcaaatctggaggaactcagaaactgttatgttaccaaagcatgaatctgctattgaaccacattggtttcagagactgaggcaccagtaagcttccagaaatcaagtgacttaggtgcagagccggagaagcgatgggaggaggggaataggcacatccatacacatagtataatagcattgttttgatgatttgacattaaattcagcatccattagtgacaggggactcaaggagcaaaatgatttccaaaataattgatcaaagaaaataaaggtatttattggtgaataaaacggaaatgtttaatatagtgtcaggcacatgtttgtaggtgtggaaccaacccaaatgcccatcaatcaatgcgtggataaagaatctgtggtatatatatgtatatatatatatacacacacacacacatatatgtatgtgtatatatatatgtgtgtatatatatatgtgtatatatatgtgtatatatatatgtgtgtgtatatatatacacacacacacacacacacacatatatatatatgatggaatactactcatccatacaaaggagtgaattaacggcattcacagcgacctgggtaatactggagactgttattctaagtgaagtaatacaggaatgaaaaactaagcatcgtacattctcactcacaagtgggagctaagctatgatgatgcaaaggcatcagaatgacacagtggactttggggactcagagggaaagagtaggaagggggtgagggataaaagaatacaaattgggtacagtgtatactactcaagtgatgggtgcaccaaaatttcacaaatcaccactaaagaacttactcatgtaaccaaacaccacccgttcccccataacctatggaaataaaaaattaaaataacaacagcaacaacaaaaatgaactctaaattaggaaatgtcaaacaggaaaagatatgttttgttttctctatcattcacaagaactgtttgccatcttcacatatttgaataatctagaagtttttggaagaatgggaaaatatactgctgagagggggagtctttcataaataactgtctgagatatctccctttggacgtagacatgcttagtttaataagaaattttaggcactaaacattttttcttatgtttttcagtaaaggaagaacaaaaactagtccaaaccagtctacactgtggatttcaaagagtaccagaaaagaaagtggcatggaagtataataactcattgacttggttccagaattttgtaattctggatctgtataaggaatggcatcagaacaatagcttggaatggcttgaaatcacaaaggatctgcaagatgaactgtaagctcccccttgaggcaaatattaaagtaatttttatatgtctattatttcatttaaagaatatgctgtgctaataatggagtgagacatgcttattttgctaaaggatgcacccaaacttcaaacttcaagcaaatgaaatggacaatgcagataaagttgttatcaacacgtcgggagtatgtgtgttagaagcaattccttttatttctttcacctttcataagttgttatctagtcaatgtaatgtatattgtattgaaatttacagtgtgcaaaagtattttacctttgcataagtgtttgataaaaatgaactgttctaatatttatttttatggcatctcatttttcaatacatgctcttttgattaaagaaa

SEQ ID NO: 6480 - DNA, 32174 bp, Homo sapiens
  SITE (29356): n equals a,t,g, or c
  SITE (29357): n equals a,t,g, or c
  SITE (29358): n equals a,t,g, or c
  SITE (29359): n equals a,t,g, or c
  SITE (29360): n equals a,t,g, or c
  SITE (29361): n equals a,t,g, or c
  SITE (29362): n equals a,t,g, or c
  SITE (29363): n equals a,t,g, or c
  SITE (29364): n equals a,t,g, or c
  SITE (29365): n equals a,t,g, or c
  SITE (29366): n equals a,t,g, or c
  SITE (29367): n equals a,t,g, or c
  SITE (29368): n equals a,t,g, or c
  SITE (29369): n equals a,t,g, or c
  SITE (29370): n equals a,t,g, or c
  SITE (29371): n equals a,t,g, or c
  SITE (29372): n equals a,t,g, or c
  SITE (29373): n equals a,t,g, or c
  SITE (29374): n equals a,t,g, or c
  SITE (29375): n equals a,t,g, or c
  SITE (29376): n equals a,t,g, or c
  SITE (29377): n equals a,t,g, or c
  SITE (29378): n equals a,t,g, or c
  SITE (29379): n equals a,t,g, or c
  SITE (29380): n equals a,t,g, or c
  SITE (29381): n equals a,t,g, or c
  SITE (29382): n equals a,t,g, or c
  SITE (29383): n equals a,t,g, or c
  SITE (29384): n equals a,t,g, or c
  SITE (29385): n equals a,t,g, or c
  SITE (29386): n equals a,t,g, or c
  SITE (29387): n equals a,t,g, or c
  SITE (29388): n equals a,t,g, or c
  SITE (29389): n equals a,t,g, or c
  SITE (29390): n equals a,t,g, or c
  SITE (29391): n equals a,t,g, or c
  SITE (29392): n equals a,t,g, or c
  SITE (29393): n equals a,t,g, or c
  SITE (29394): n equals a,t,g, or c
  SITE (29395): n equals a,t,g, or c
  SITE (29396): n equals a,t,g, or c
  SITE (29397): n equals a,t,g, or c
  SITE (29398): n equals a,t,g, or c
  SITE (29399): n equals a,t,g, or c
  SITE (29400): n equals a,t,g, or c
  SITE (29401): n equals a,t,g, or c
  SITE (29402): n equals a,t,g, or c
  SITE (29403): n equals a,t,g, or c
  SITE (29404): n equals a,t,g, or c
  SITE (29405): n equals a,t,g, or c
  SITE (29406): n equals a,t,g, or c
  SITE (29407): n equals a,t,g, or c
  SITE (29408): n equals a,t,g, or c
  SITE (29409): n equals a,t,g, or c
  SITE (29410): n equals a,t,g, or c
  SITE (29411): n equals a,t,g, or c
  SITE (29412): n equals a,t,g, or c
  SITE (29413): n equals a,t,g, or c
  SITE (29414): n equals a,t,g, or c
  SITE (29415): n equals a,t,g, or c
  SITE (29416): n equals a,t,g, or c
  SITE (29417): n equals a,t,g, or c
  SITE (29418): n equals a,t,g, or c
  SITE (29419): n equals a,t,g, or c
  SITE (29420): n equals a,t,g, or c
  SITE (29421): n equals a,t,g, or c
  SITE (29422): n equals a,t,g, or c
  SITE (29423): n equals a,t,g, or c
  SITE (29424): n equals a,t,g, or c
  SITE (29425): n equals a,t,g, or c
  SITE (29426): n equals a,t,g, or c
  SITE (29427): n equals a,t,g, or c
  SITE (29428): n equals a,t,g, or c
  SITE (29429): n equals a,t,g, or c
  SITE (29430): n equals a,t,g, or c
  SITE (29431): n equals a,t,g, or c
  SITE (29432): n equals a,t,g, or c
  SITE (29433): n equals a,t,g, or c
  SITE (29434): n equals a,t,g, or c
  SITE (29435): n equals a,t,g, or c
  SITE (29436): n equals a,t,g, or c
  SITE (29437): n equals a,t,g, or c
  SITE (29438): n equals a,t,g, or c
  SITE (29439): n equals a,t,g, or c
  SITE (29440): n equals a,t,g, or c
  SITE (29441): n equals a,t,g, or c
  SITE (29442): n equals a,t,g, or c
  SITE (29443): n equals a,t,g, or c
  SITE (29444): n equals a,t,g, or c
  SITE (29445): n equals a,t,g, or c
  SITE (29446): n equals a,t,g, or c
  SITE (29447): n equals a,t,g, or c
  SITE (29448): n equals a,t,g, or c
  SITE (29449): n equals a,t,g, or c
  SITE (29450): n equals a,t,g, or c
  SITE (29451): n equals a,t,g, or c
  SITE (29452): n equals a,t,g, or c
  SITE (29453): n equals a,t,g, or c
  SITE (29454): n equals a,t,g, or c
  SITE (29455): n equals a,t,g, or c
  SITE (29456): n equals a,t,g, or c
  SITE (29457): n equals a,t,g, or c
  SITE (29458): n equals a,t,g, or c
  SITE (29459): n equals a,t,g, or c
  SITE (29460): n equals a,t,g, or c
  SITE (29461): n equals a,t,g, or c
  SITE (29462): n equals a,t,g, or c
  SITE (29463): n equals a,t,g, or c
  SITE (29464): n equals a,t,g, or c
  SITE (29465): n equals a,t,g, or c
  SITE (29466): n equals a,t,g, or c
  SITE (29467): n equals a,t,g, or c
  SITE (29468): n equals a,t,g, or c
  SITE (29469): n equals a,t,g, or c
  SITE (29470): n equals a,t,g, or c
  SITE (29471): n equals a,t,g, or c
  SITE (29472): n equals a,t,g, or c
  SITE (29473): n equals a,t,g, or c
  SITE (29474): n equals a,t,g, or c
  SITE (29475): n equals a,t,g, or c
  SITE (29476): n equals a,t,g, or c
  SITE (29477): n equals a,t,g, or c
  SITE (29478): n equals a,t,g, or c
  SITE (29479): n equals a,t,g, or c
  SITE (29480): n equals a,t,g, or c
  SITE (29481): n equals a,t,g, or c
  SITE (29482): n equals a,t,g, or c
  SITE (29483): n equals a,t,g, or c
  SITE (29484): n equals a,t,g, or c
  SITE (29485): n equals a,t,g, or c
  SITE (29486): n equals a,t,g, or c
  SITE (29487): n equals a,t,g, or c
  SITE (29488): n equals a,t,g, or c
  SITE (29489): n equals a,t,g, or c
  SITE (29490): n equals a,t,g, or c
  SITE (29491): n equals a,t,g, or c
  SITE (29492): n equals a,t,g, or c
  SITE (29493): n equals a,t,g, or c
  SITE (29494): n equals a,t,g, or c
  SITE (29495): n equals a,t,g, or c
  SITE (29496): n equals a,t,g, or c
  SITE (29497): n equals a,t,g, or c
  SITE (29498): n equals a,t,g, or c
  SITE (29499): n equals a,t,g, or c
  SITE (29500): n equals a,t,g, or c
  SITE (29501): n equals a,t,g, or c
  SITE (29502): n equals a,t,g, or c
  SITE (29503): n equals a,t,g, or c
  SITE (29504): n equals a,t,g, or c
  SITE (29505): n equals a,t,g, or c
  SITE (29506): n equals a,t,g, or c
  SITE (29507): n equals a,t,g, or c
  SITE (29508): n equals a,t,g, or c
  SITE (29509): n equals a,t,g, or c
  SITE (29510): n equals a,t,g, or c
  SITE (29511): n equals a,t,g, or c
  SITE (29512): n equals a,t,g, or c
  SITE (29513): n equals a,t,g, or c
  SITE (29514): n equals a,t,g, or c
  SITE (29515): n equals a,t,g, or c
  SITE (29516): n equals a,t,g, or c
  SITE (29517): n equals a,t,g, or c
  SITE (29518): n equals a,t,g, or c
  SITE (29519): n equals a,t,g, or c
  SITE (29520): n equals a,t,g, or c
  SITE (29521): n equals a,t,g, or c
  SITE (29522): n equals a,t,g, or c
  SITE (29523): n equals a,t,g, or c
  SITE (29524): n equals a,t,g, or c
  SITE (29525): n equals a,t,g, or c
  SITE (29526): n equals a,t,g, or c
  SITE (29527): n equals a,t,g, or c
  SITE (29528): n equals a,t,g, or c
  SITE (29529): n equals a,t,g, or c
  SITE (29530): n equals a,t,g, or c
  SITE (29531): n equals a,t,g, or c
  SITE (29532): n equals a,t,g, or c
  SITE (29533): n equals a,t,g, or c
  SITE (29534): n equals a,t,g, or c
  SITE (29535): n equals a,t,g, or c
  SITE (29536): n equals a,t,g, or c
  SITE (29537): n equals a,t,g, or c
  SITE (29538): n equals a,t,g, or c
  SITE (29539): n equals a,t,g, or c
  SITE (29540): n equals a,t,g, or c
  SITE (29541): n equals a,t,g, or c
  SITE (29542): n equals a,t,g, or c
  SITE (29543): n equals a,t,g, or c
  SITE (29544): n equals a,t,g, or c
  SITE (29545): n equals a,t,g, or c
  SITE (29546): n equals a,t,g, or c
  SITE (29547): n equals a,t,g, or c
  SITE (29548): n equals a,t,g, or c
  SITE (29549): n equals a,t,g, or c
  SITE (29550): n equals a,t,g, or c
  SITE (29551): n equals a,t,g, or c
  SITE (29552): n equals a,t,g, or c
  SITE (29553): n equals a,t,g, or c
  SITE (29554): n equals a,t,g, or c
  SITE (29555): n equals a,t,g, or c
  SITE (29556): n equals a,t,g, or c
  SITE (29557): n equals a,t,g, or c
  SITE (29558): n equals a,t,g, or c
  SITE (29559): n equals a,t,g, or c
  SITE (29560): n equals a,t,g, or c
  SITE (29561): n equals a,t,g, or c
  SITE (29562): n equals a,t,g, or c
  SITE (29563): n equals a,t,g, or c
  SITE (29564): n equals a,t,g, or c
  SITE (29565): n equals a,t,g, or c
  SITE (29566): n equals a,t,g, or c
  SITE (29567): n equals a,t,g, or c
  SITE (29568): n equals a,t,g, or c
  SITE (29569): n equals a,t,g, or c
  SITE (29570): n equals a,t,g, or c
  SITE (29571): n equals a,t,g, or c
  SITE (29572): n equals a,t,g, or c
  SITE (29573): n equals a,t,g, or c
  SITE (29574): n equals a,t,g, or c
  SITE (29575): n equals a,t,g, or c
  SITE (29576): n equals a,t,g, or c
  SITE (29577): n equals a,t,g, or c
  SITE (29578): n equals a,t,g, or c
  SITE (29579): n equals a,t,g, or c
  SITE (29580): n equals a,t,g, or c
  SITE (29581): n equals a,t,g, or c
  SITE (29582): n equals a,t,g, or c
  SITE (29583): n equals a,t,g, or c
  SITE (29584): n equals a,t,g, or c
  SITE (29585): n equals a,t,g, or c
  SITE (29586): n equals a,t,g, or c
  SITE (29587): n equals a,t,g, or c
  SITE (29588): n equals a,t,g, or c
  SITE (29589): n equals a,t,g, or c
  SITE (29590): n equals a,t,g, or c
  SITE (29591): n equals a,t,g, or c
  SITE (29592): n equals a,t,g, or c
  SITE (29593): n equals a,t,g, or c
  SITE (29594): n equals a,t,g, or c
  SITE (29595): n equals a,t,g, or c
  SITE (29596): n equals a,t,g, or c
  SITE (29597): n equals a,t,g, or c
  SITE (29598): n equals a,t,g, or c
  SITE (29599): n equals a,t,g, or c
  SITE (29600): n equals a,t,g, or c
  SITE (29601): n equals a,t,g, or c
  SITE (29602): n equals a,t,g, or c
  SITE (29603): n equals a,t,g, or c
  SITE (29604): n equals a,t,g, or c
  SITE (29605): n equals a,t,g, or c
  SITE (29606): n equals a,t,g, or c
  SITE (29607): n equals a,t,g, or c
  SITE (29608): n equals a,t,g, or c
  SITE (29609): n equals a,t,g, or c
  SITE (29610): n equals a,t,g, or c
  SITE (29611): n equals a,t,g, or c
  SITE (29612): n equals a,t,g, or c
  SITE (29613): n equals a,t,g, or c
  SITE (29614): n equals a,t,g, or c
  SITE (29615): n equals a,t,g, or c
  SITE (29616): n equals a,t,g, or c
  SITE (29617): n equals a,t,g, or c
  SITE (29618): n equals a,t,g, or c
  SITE (29619): n equals a,t,g, or c
  SITE (29620): n equals a,t,g, or c
  SITE (29621): n equals a,t,g, or c
  SITE (29622): n equals a,t,g, or c
  SITE (29623): n equals a,t,g, or c
  SITE (29624): n equals a,t,g, or c
  SITE (29625): n equals a,t,g, or c
  SITE (29626): n equals a,t,g, or c
  SITE (29627): n equals a,t,g, or c
  SITE (29628): n equals a,t,g, or c
  SITE (29629): n equals a,t,g, or c
  SITE (29630): n equals a,t,g, or c
  SITE (29631): n equals a,t,g, or c
  SITE (29632): n equals a,t,g, or c
  SITE (29633): n equals a,t,g, or c
  SITE (29634): n equals a,t,g, or c
  SITE (29635): n equals a,t,g, or c
  SITE (29636): n equals a,t,g, or c
  SITE (29637): n equals a,t,g, or c
  SITE (29638): n equals a,t,g, or c
  SITE (29639): n equals a,t,g, or c
  SITE (29640): n equals a,t,g, or c
  SITE (29641): n equals a,t,g, or c
  SITE (29642): n equals a,t,g, or c
  SITE (29643): n equals a,t,g, or c
  SITE (29644): n equals a,t,g, or c
  SITE (29645): n equals a,t,g, or c
  SITE (29646): n equals a,t,g, or c
  SITE (29647): n equals a,t,g, or c
  SITE (29648): n equals a,t,g, or c
  SITE (29649): n equals a,t,g, or c
  SITE (29650): n equals a,t,g, or c
  SITE (29651): n equals a,t,g, or c
  SITE (29652): n equals a,t,g, or c
  SITE (29653): n equals a,t,g, or c
  SITE (29654): n equals a,t,g, or c
  SITE (29655): n equals a,t,g, or c
  SITE (29656): n equals a,t,g, or c
  SITE (29657): n equals a,t,g, or c
  SITE (29658): n equals a,t,g, or c
  SITE (29659): n equals a,t,g, or c
  SITE (29660): n equals a,t,g, or c
  SITE (29661): n equals a,t,g, or c
  SITE (29662): n equals a,t,g, or c
  SITE (29663): n equals a,t,g, or c
  SITE (29664): n equals a,t,g, or c
  SITE (29665): n equals a,t,g, or c
  SITE (29666): n equals a,t,g, or c
  SITE (29667): n equals a,t,g, or c
  SITE (29668): n equals a,t,g, or c
  SITE (29669): n equals a,t,g, or c
  SITE (29670): n equals a,t,g, or c
  SITE (29671): n equals a,t,g, or c
  SITE (29672): n equals a,t,g, or c
  SITE (29673): n equals a,t,g, or c
  SITE (29674): n equals a,t,g, or c
  SITE (29675): n equals a,t,g, or c
  SITE (29676): n equals a,t,g, or c
  SITE (29677): n equals a,t,g, or c
  SITE (29678): n equals a,t,g, or c
  SITE (29679): n equals a,t,g, or c
  SITE (29680): n equals a,t,g, or c
  SITE (29681): n equals a,t,g, or c
  SITE (29682): n equals a,t,g, or c
  SITE (29683): n equals a,t,g, or c
  SITE (29684): n equals a,t,g, or c
  SITE (29685): n equals a,t,g, or c
  SITE (29686): n equals a,t,g, or c
  SITE (29687): n equals a,t,g, or c
  SITE (29688): n equals a,t,g, or c
  SITE (29689): n equals a,t,g, or c
  SITE (29690): n equals a,t,g, or c
  SITE (29691): n equals a,t,g, or c
  SITE (29692): n equals a,t,g, or c
  SITE (29693): n equals a,t,g, or c
  SITE (29694): n equals a,t,g, or c
  SITE (29695): n equals a,t,g, or c
  SITE (29696): n equals a,t,g, or c
  SITE (29697): n equals a,t,g, or c
  SITE (29698): n equals a,t,g, or c
  SITE (29699): n equals a,t,g, or c
  SITE (29700): n equals a,t,g, or c
  SITE (29701): n equals a,t,g, or c
  SITE (29702): n equals a,t,g, or c
  SITE (29703): n equals a,t,g, or c
  SITE (29704): n equals a,t,g, or c
  SITE (29705): n equals a,t,g, or c
  SITE (29706): n equals a,t,g, or c
  SITE (29707): n equals a,t,g, or c
  SITE (29708): n equals a,t,g, or c
  SITE (29709): n equals a,t,g, or c
  SITE (29710): n equals a,t,g, or c
  SITE (29711): n equals a,t,g, or c
  SITE (29712): n equals a,t,g, or c
  SITE (29713): n equals a,t,g, or c
  SITE (29714): n equals a,t,g, or c
  SITE (29715): n equals a,t,g, or c
  SITE (29716): n equals a,t,g, or c
  SITE (29717): n equals a,t,g, or c
  SITE (29718): n equals a,t,g, or c
  SITE (29719): n equals a,t,g, or c
  SITE (29720): n equals a,t,g, or c
  SITE (29721): n equals a,t,g, or c
  SITE (29722): n equals a,t,g, or c
  SITE (29723): n equals a,t,g, or c
  SITE (29724): n equals a,t,g, or c
  SITE (29725): n equals a,t,g, or c
  SITE (29726): n equals a,t,g, or c
  SITE (29727): n equals a,t,g, or c
  SITE (29728): n equals a,t,g, or c
  SITE (29729): n equals a,t,g, or c
  SITE (29730): n equals a,t,g, or c
  SITE (29731): n equals a,t,g, or c
  SITE (29732): n equals a,t,g, or c
  SITE (29733): n equals a,t,g, or c
  SITE (29734): n equals a,t,g, or c
  SITE (29735): n equals a,t,g, or c
  SITE (29736): n equals a,t,g, or c
  SITE (29737): n equals a,t,g, or c
  SITE (29738): n equals a,t,g, or c
  SITE (29739): n equals a,t,g, or c
  SITE (29740): n equals a,t,g, or c
  SITE (29741): n equals a,t,g, or c
  SITE (29742): n equals a,t,g, or c
  SITE (29743): n equals a,t,g, or c
  SITE (29744): n equals a,t,g, or c
  SITE (29745): n equals a,t,g, or c
  SITE (29746): n equals a,t,g, or c
  SITE (29747): n equals a,t,g, or c
  SITE (29748): n equals a,t,g, or c
  SITE (29749): n equals a,t,g, or c
  SITE (29750): n equals a,t,g, or c
  SITE (29751): n equals a,t,g, or c
  SITE (29752): n equals a,t,g, or c
  SITE (29753): n equals a,t,g, or c
  SITE (29754): n equals a,t,g, or c
  SITE (29755): n equals a,t,g, or c
  SITE (29756): n equals a,t,g, or c
  SITE (29757): n equals a,t,g, or c
  SITE (29758): n equals a,t,g, or c
  SITE (29759): n equals a,t,g, or c
  SITE (29760): n equals a,t,g, or c
  SITE (29761): n equals a,t,g, or c
  SITE (29762): n equals a,t,g, or c
  SITE (29763): n equals a,t,g, or c
  SITE (29764): n equals a,t,g, or c
  SITE (29765): n equals a,t,g, or c
  SITE (29766): n equals a,t,g, or c
  SITE (29767): n equals a,t,g, or c
  SITE (29768): n equals a,t,g, or c
  SITE (29769): n equals a,t,g, or c
  SITE (29770): n equals a,t,g, or c
  SITE (29771): n equals a,t,g, or c
  SITE (29772): n equals a,t,g, or c
  SITE (29773): n equals a,t,g, or c
  SITE (29774): n equals a,t,g, or c
  SITE (29775): n equals a,t,g, or c
  SITE (29776): n equals a,t,g, or c
  SITE (29777): n equals a,t,g, or c
  SITE (29778): n equals a,t,g, or c
  SITE (29779): n equals a,t,g, or c
  SITE (29780): n equals a,t,g, or c
  SITE (29781): n equals a,t,g, or c
  SITE (29782): n equals a,t,g, or c
  SITE (29783): n equals a,t,g, or c
  SITE (29784): n equals a,t,g, or c
  SITE (29785): n equals a,t,g, or c
  SITE (29786): n equals a,t,g, or c
  SITE (29787): n equals a,t,g, or c
  SITE (29788): n equals a,t,g, or c
  SITE (29789): n equals a,t,g, or c
  SITE (29790): n equals a,t,g, or c
  SITE (29791): n equals a,t,g, or c
  SITE (29792): n equals a,t,g, or c
  SITE (29793): n equals a,t,g, or c
  SITE (29794): n equals a,t,g, or c
  SITE (29795): n equals a,t,g, or c
  SITE (29796): n equals a,t,g, or c
  SITE (29797): n equals a,t,g, or c
  SITE (29798): n equals a,t,g, or c
  SITE (29799): n equals a,t,g, or c
  SITE (29800): n equals a,t,g, or c
  SITE (29801): n equals a,t,g, or c
  SITE (29802): n equals a,t,g, or c
  SITE (29803): n equals a,t,g, or c
  SITE (29804): n equals a,t,g, or c
  SITE (29805): n equals a,t,g, or c
  SITE (29806): n equals a,t,g, or c
  SITE (29807): n equals a,t,g, or c
  SITE (29808): n equals a,t,g, or c
  SITE (29809): n equals a,t,g, or c
  SITE (29810): n equals a,t,g, or c
  SITE (29811): n equals a,t,g, or c
  SITE (29812): n equals a,t,g, or c
  SITE (29813): n equals a,t,g, or c
  SITE (29814): n equals a,t,g, or c
  SITE (29815): n equals a,t,g, or c
  SITE (29816): n equals a,t,g, or c
  SITE (29817): n equals a,t,g, or c
  SITE (29818): n equals a,t,g, or c
  SITE (29819): n equals a,t,g, or c
  SITE (29820): n equals a,t,g, or c
  SITE (29821): n equals a,t,g, or c
  SITE (29822): n equals a,t,g, or c
  SITE (29823): n equals a,t,g, or c
  SITE (29824): n equals a,t,g, or c
  SITE (29825): n equals a,t,g, or c
  SITE (29826): n equals a,t,g, or c
  SITE (29827): n equals a,t,g, or c
  SITE (29828): n equals a,t,g, or c
  SITE (29829): n equals a,t,g, or c
  SITE (29830): n equals a,t,g, or c
  SITE (29831): n equals a,t,g, or c
  SITE (29832): n equals a,t,g, or c
  SITE (29833): n equals a,t,g, or c
  SITE (29834): n equals a,t,g, or c
  SITE (29835): n equals a,t,g, or c
  SITE (29836): n equals a,t,g, or c
  SITE (29837): n equals a,t,g, or c
  SITE (29838): n equals a,t,g, or c
  SITE (29839): n equals a,t,g, or c
  SITE (29840): n equals a,t,g, or c
  SITE (29841): n equals a,t,g, or c
  SITE (29842): n equals a,t,g, or c
  SITE (29843): n equals a,t,g, or c
  SITE (29844): n equals a,t,g, or c
  SITE (29845): n equals a,t,g, or c
  SITE (29846): n equals a,t,g, or c
  SITE (29847): n equals a,t,g, or c
  SITE (29848): n equals a,t,g, or c
  SITE (29849): n equals a,t,g, or c
  SITE (29850): n equals a,t,g, or c
  SITE (29851): n equals a,t,g, or c
  SITE (29852): n equals a,t,g, or c
  SITE (29853): n equals a,t,g, or c
  SITE (29854): n equals a,t,g, or c
  SITE (29855): n equals a,t,g, or c
  SITE (29856): n equals a,t,g, or c
  SITE (29857): n equals a,t,g, or c
  SITE (29858): n equals a,t,g, or c
  SITE (29859): n equals a,t,g, or c
  SITE (29860): n equals a,t,g, or c
  SITE (29861): n equals a,t,g, or c
  SITE (29862): n equals a,t,g, or c
  SITE (29863): n equals a,t,g, or c
  SITE (29864): n equals a,t,g, or c
  SITE (29865): n equals a,t,g, or c
  SITE (29866): n equals a,t,g, or c
  SITE (29867): n equals a,t,g, or c
  SITE (29868): n equals a,t,g, or c
  SITE (29869): n equals a,t,g, or c
  SITE (29870): n equals a,t,g, or c
  SITE (29871): n equals a,t,g, or c
  SITE (29872): n equals a,t,g, or c
  SITE (29873): n equals a,t,g, or c
  SITE (29874): n equals a,t,g, or c
  SITE (29875): n equals a,t,g, or c
  SITE (29876): n equals a,t,g, or c
  SITE (29877): n equals a,t,g, or c
  SITE (29878): n equals a,t,g, or c
  SITE (29879): n equals a,t,g, or c
  SITE (29880): n equals a,t,g, or c
  SITE (29881): n equals a,t,g, or c
  SITE (29882): n equals a,t,g, or c
  SITE (29883): n equals a,t,g, or c
  SITE (29884): n equals a,t,g, or c
  SITE (29885): n equals a,t,g, or c
  SITE (29886): n equals a,t,g, or c
  SITE (29887): n equals a,t,g, or c
  SITE (29888): n equals a,t,g, or c
  SITE (29889): n equals a,t,g, or c
  SITE (29890): n equals a,t,g, or c
  SITE (29891): n equals a,t,g, or c
  SITE (29892): n equals a,t,g, or c
  SITE (29893): n equals a,t,g, or c
  SITE (29894): n equals a,t,g, or c
  SITE (29895): n equals a,t,g, or c
  SITE (29896): n equals a,t,g, or c
  SITE (29897): n equals a,t,g, or c
  SITE (29898): n equals a,t,g, or c
  SITE (29899): n equals a,t,g, or c
  SITE (29900): n equals a,t,g, or c
  SITE (29901): n equals a,t,g, or c
  SITE (29902): n equals a,t,g, or c
  SITE (29903): n equals a,t,g, or c
  SITE (29904): n equals a,t,g, or c
  SITE (29905): n equals a,t,g, or c
  SITE (29906): n equals a,t,g, or c
  SITE (29907): n equals a,t,g, or c
  SITE (29908): n equals a,t,g, or c
  SITE (29909): n equals a,t,g, or c
  SITE (29910): n equals a,t,g, or c
  SITE (29911): n equals a,t,g, or c
  SITE (29912): n equals a,t,g, or c
  SITE (29913): n equals a,t,g, or c
  SITE (29914): n equals a,t,g, or c
  SITE (29915): n equals a,t,g, or c
  SITE (29916): n equals a,t,g, or c
  SITE (29917): n equals a,t,g, or c
  SITE (29918): n equals a,t,g, or c
  SITE (29919): n equals a,t,g, or c
  SITE (29920): n equals a,t,g, or c
  SITE (29921): n equals a,t,g, or c
  SITE (29922): n equals a,t,g, or c
  SITE (29923): n equals a,t,g, or c
  SITE (29924): n equals a,t,g, or c
  SITE (29925): n equals a,t,g, or c
  SITE (29926): n equals a,t,g, or c
  SITE (29927): n equals a,t,g, or c
  SITE (29928): n equals a,t,g, or c
  SITE (29929): n equals a,t,g, or c
  SITE (29930): n equals a,t,g, or c
  SITE (29931): n equals a,t,g, or c
  SITE (29932): n equals a,t,g, or c
  SITE (29933): n equals a,t,g, or c
  SITE (29934): n equals a,t,g, or c
  SITE (29935): n equals a,t,g, or c
  SITE (29936): n equals a,t,g, or c
  SITE (29937): n equals a,t,g, or c
  SITE (29938): n equals a,t,g, or c
  SITE (29939): n equals a,t,g, or c
  SITE (29940): n equals a,t,g, or c
  SITE (29941): n equals a,t,g, or c
  SITE (29942): n equals a,t,g, or c
  SITE (29943): n equals a,t,g, or c
  SITE (29944): n equals a,t,g, or c
  SITE (29945): n equals a,t,g, or c
  SITE (29946): n equals a,t,g, or c
  SITE (29947): n equals a,t,g, or c
  SITE (29948): n equals a,t,g, or c
  SITE (29949): n equals a,t,g, or c
  SITE (29950): n equals a,t,g, or c
  SITE (29951): n equals a,t,g, or c
  SITE (29952): n equals a,t,g, or c
  SITE (29953): n equals a,t,g, or c
  SITE (29954): n equals a,t,g, or c
  SITE (29955): n equals a,t,g, or c
  SITE (29956): n equals a,t,g, or c
  SITE (29957): n equals a,t,g, or c
  SITE (29958): n equals a,t,g, or c
  SITE (29959): n equals a,t,g, or c
  SITE (29960): n equals a,t,g, or c
  SITE (29961): n equals a,t,g, or c
  SITE (29962): n equals a,t,g, or c
  SITE (29963): n equals a,t,g, or c
  SITE (29964): n equals a,t,g, or c
  SITE (29965): n equals a,t,g, or c
  SITE (29966): n equals a,t,g, or c
  SITE (29967): n equals a,t,g, or c
  SITE (29968): n equals a,t,g, or c
  SITE (29969): n equals a,t,g, or c
  SITE (29970): n equals a,t,g, or c
  SITE (29971): n equals a,t,g, or c
  SITE (29972): n equals a,t,g, or c
  SITE (29973): n equals a,t,g, or c
  SITE (29974): n equals a,t,g, or c
  SITE (29975): n equals a,t,g, or c
  SITE (29976): n equals a,t,g, or c
  SITE (29977): n equals a,t,g, or c
  SITE (29978): n equals a,t,g, or c
  SITE (29979): n equals a,t,g, or c
  SITE (29980): n equals a,t,g, or c
  SITE (29981): n equals a,t,g, or c
  SITE (29982): n equals a,t,g, or c
  SITE (29983): n equals a,t,g, or c
  SITE (29984): n equals a,t,g, or c
  SITE (29985): n equals a,t,g, or c
  SITE (29986): n equals a,t,g, or c
  SITE (29987): n equals a,t,g, or c
  SITE (29988): n equals a,t,g, or c
  SITE (29989): n equals a,t,g, or c
  SITE (29990): n equals a,t,g, or c
  SITE (29991): n equals a,t,g, or c
  SITE (29992): n equals a,t,g, or c
  SITE (29993): n equals a,t,g, or c
  SITE (29994): n equals a,t,g, or c
  SITE (29995): n equals a,t,g, or c
  SITE (29996): n equals a,t,g, or c
  SITE (29997): n equals a,t,g, or c
  SITE (29998): n equals a,t,g, or c
  SITE (29999): n equals a,t,g, or c
  SITE (30000): n equals a,t,g, or c
  SITE (30001): n equals a,t,g, or c
  SITE (30002): n equals a,t,g, or c
  SITE (30003): n equals a,t,g, or c
  SITE (30004): n equals a,t,g, or c
  SITE (30005): n equals a,t,g, or c
  SITE (30006): n equals a,t,g, or c
  SITE (30007): n equals a,t,g, or c
  SITE (30008): n equals a,t,g, or c
  SITE (30009): n equals a,t,g, or c
  SITE (30010): n equals a,t,g, or c
  SITE (30011): n equals a,t,g, or c
  SITE (30012): n equals a,t,g, or c
  SITE (30013): n equals a,t,g, or c
  SITE (30014): n equals a,t,g, or c
  SITE (30015): n equals a,t,g, or c
  SITE (30016): n equals a,t,g, or c
  SITE (30017): n equals a,t,g, or c
  SITE (30018): n equals a,t,g, or c
  SITE (30019): n equals a,t,g, or c
  SITE (30020): n equals a,t,g, or c
  SITE (30021): n equals a,t,g, or c
  SITE (30022): n equals a,t,g, or c
  SITE (30023): n equals a,t,g, or c
  SITE (30024): n equals a,t,g, or c
  SITE (30025): n equals a,t,g, or c
  SITE (30026): n equals a,t,g, or c
  SITE (30027): n equals a,t,g, or c
  SITE (30028): n equals a,t,g, or c
  SITE (30029): n equals a,t,g, or c
  SITE (30030): n equals a,t,g, or c
  SITE (30031): n equals a,t,g, or c
  SITE (30032): n equals a,t,g, or c
  SITE (30033): n equals a,t,g, or c
  SITE (30034): n equals a,t,g, or c
  SITE (30035): n equals a,t,g, or c
  SITE (30036): n equals a,t,g, or c
  SITE (30037): n equals a,t,g, or c
  SITE (30038): n equals a,t,g, or c
  SITE (30039): n equals a,t,g, or c
  SITE (30040): n equals a,t,g, or c
  SITE (30041): n equals a,t,g, or c
  SITE (30042): n equals a,t,g, or c
  SITE (30043): n equals a,t,g, or c
  SITE (30044): n equals a,t,g, or c
  SITE (30045): n equals a,t,g, or c
  SITE (30046): n equals a,t,g, or c
  SITE (30047): n equals a,t,g, or c
  SITE (30048): n equals a,t,g, or c
  SITE (30049): n equals a,t,g, or c
  SITE (30050): n equals a,t,g, or c
  SITE (30051): n equals a,t,g, or c
  SITE (30052): n equals a,t,g, or c
  SITE (30053): n equals a,t,g, or c
  SITE (30054): n equals a,t,g, or c
  SITE (30055): n equals a,t,g, or c
  SITE (30056): n equals a,t,g, or c
  SITE (30057): n equals a,t,g, or c
  SITE (30058): n equals a,t,g, or c
  SITE (30059): n equals a,t,g, or c
  SITE (30060): n equals a,t,g, or c
  SITE (30061): n equals a,t,g, or c
  SITE (30062): n equals a,t,g, or c
  SITE (30063): n equals a,t,g, or c
  SITE (30064): n equals a,t,g, or c
  SITE (30065): n equals a,t,g, or c
  SITE (30066): n equals a,t,g, or c
  SITE (30067): n equals a,t,g, or c
  SITE (30068): n equals a,t,g, or c
  SITE (30069): n equals a,t,g, or c
  SITE (30070): n equals a,t,g, or c
  SITE (30071): n equals a,t,g, or c
  SITE (30072): n equals a,t,g, or c
  SITE (30073): n equals a,t,g, or c
  SITE (30074): n equals a,t,g, or c
  SITE (30075): n equals a,t,g, or c
  SITE (30076): n equals a,t,g, or c
  SITE (30077): n equals a,t,g, or c
  SITE (30078): n equals a,t,g, or c
  SITE (30079): n equals a,t,g, or c
  SITE (30080): n equals a,t,g, or c
  SITE (30081): n equals a,t,g, or c
  SITE (30082): n equals a,t,g, or c
  SITE (30083): n equals a,t,g, or c
  SITE (30084): n equals a,t,g, or c
  SITE (30085): n equals a,t,g, or c
  SITE (30086): n equals a,t,g, or c
  SITE (30087): n equals a,t,g, or c
  SITE (30088): n equals a,t,g, or c
  SITE (30089): n equals a,t,g, or c
  SITE (30090): n equals a,t,g, or c
  SITE (30091): n equals a,t,g, or c
  SITE (30092): n equals a,t,g, or c
  SITE (30093): n equals a,t,g, or c
  SITE (30094): n equals a,t,g, or c
  SITE (30095): n equals a,t,g, or c
  SITE (30096): n equals a,t,g, or c
  SITE (30097): n equals a,t,g, or c
  SITE (30098): n equals a,t,g, or c
  SITE (30099): n equals a,t,g, or c
  SITE (30100): n equals a,t,g, or c
  SITE (30101): n equals a,t,g, or c
  SITE (30102): n equals a,t,g, or c
  SITE (30103): n equals a,t,g, or c
  SITE (30104): n equals a,t,g, or c
  SITE (30105): n equals a,t,g, or c
  SITE (30106): n equals a,t,g, or c
  SITE (30107): n equals a,t,g, or c
  SITE (30108): n equals a,t,g, or c
  SITE (30109): n equals a,t,g, or c
  SITE (30110): n equals a,t,g, or c
  SITE (30111): n equals a,t,g, or c
  SITE (30112): n equals a,t,g, or c
  SITE (30113): n equals a,t,g, or c
  SITE (30114): n equals a,t,g, or c
  SITE (30115): n equals a,t,g, or c
  SITE (30116): n equals a,t,g, or c
  SITE (30117): n equals a,t,g, or c
  SITE (30118): n equals a,t,g, or c
  SITE (30119): n equals a,t,g, or c
  SITE (30120): n equals a,t,g, or c
  SITE (30121): n equals a,t,g, or c
  SITE (30122): n equals a,t,g, or c
  SITE (30123): n equals a,t,g, or c
  SITE (30124): n equals a,t,g, or c
  SITE (30125): n equals a,t,g, or c
  SITE (30126): n equals a,t,g, or c
  SITE (30127): n equals a,t,g, or c
  SITE (30128): n equals a,t,g, or c
  SITE (30129): n equals a,t,g, or c
  SITE (30130): n equals a,t,g, or c
  SITE (30131): n equals a,t,g, or c
  SITE (30132): n equals a,t,g, or c
  SITE (30133): n equals a,t,g, or c
  SITE (30134): n equals a,t,g, or c
  SITE (30135): n equals a,t,g, or c
  SITE (30136): n equals a,t,g, or c
  SITE (30137): n equals a,t,g, or c
  SITE (30138): n equals a,t,g, or c
  SITE (30139): n equals a,t,g, or c
  SITE (30140): n equals a,t,g, or c
  SITE (30141): n equals a,t,g, or c
  SITE (30142): n equals a,t,g, or c
  SITE (30143): n equals a,t,g, or c
  SITE (30144): n equals a,t,g, or c
  SITE (30145): n equals a,t,g, or c
  SITE (30146): n equals a,t,g, or c
  SITE (30147): n equals a,t,g, or c
  SITE (30148): n equals a,t,g, or c
  SITE (30149): n equals a,t,g, or c
  SITE (30150): n equals a,t,g, or c
  SITE (30151): n equals a,t,g, or c
  SITE (30152): n equals a,t,g, or c
  SITE (30153): n equals a,t,g, or c
  SITE (30154): n equals a,t,g, or c
  SITE (30155): n equals a,t,g, or c
  SITE (30156): n equals a,t,g, or c
  SITE (30157): n equals a,t,g, or c
  SITE (30158): n equals a,t,g, or c
  SITE (30159): n equals a,t,g, or c
  SITE (30160): n equals a,t,g, or c
  SITE (30161): n equals a,t,g, or c
  SITE (30162): n equals a,t,g, or c
  SITE (30163): n equals a,t,g, or c
  SITE (30164): n equals a,t,g, or c
  SITE (30165): n equals a,t,g, or c
  SITE (30166): n equals a,t,g, or c
  SITE (30167): n equals a,t,g, or c
  SITE (30168): n equals a,t,g, or c
  SITE (30169): n equals a,t,g, or c
  SITE (30170): n equals a,t,g, or c
  SITE (30171): n equals a,t,g, or c
  SITE (30172): n equals a,t,g, or c
  SITE (30173): n equals a,t,g, or c
  SITE (30174): n equals a,t,g, or c
  SITE (30175): n equals a,t,g, or c
  SITE (30176): n equals a,t,g, or c
  SITE (30177): n equals a,t,g, or c
  SITE (30178): n equals a,t,g, or c
  SITE (30179): n equals a,t,g, or c
  SITE (30180): n equals a,t,g, or c
  SITE (30181): n equals a,t,g, or c
  SITE (30182): n equals a,t,g, or c
  SITE (30183): n equals a,t,g, or c
  SITE (30184): n equals a,t,g, or c
  SITE (30185): n equals a,t,g, or c
  SITE (30186): n equals a,t,g, or c
  SITE (30187): n equals a,t,g, or c
  SITE (30188): n equals a,t,g, or c
  SITE (30189): n equals a,t,g, or c
  SITE (30190): n equals a,t,g, or c
  SITE (30191): n equals a,t,g, or c
  SITE (30192): n equals a,t,g, or c
  SITE (30193): n equals a,t,g, or c
  SITE (30194): n equals a,t,g, or c
  SITE (30195): n equals a,t,g, or c
  SITE (30196): n equals a,t,g, or c
  SITE (30197): n equals a,t,g, or c
  SITE (30198): n equals a,t,g, or c
  SITE (30199): n equals a,t,g, or c
  SITE (30200): n equals a,t,g, or c
  SITE (30201): n equals a,t,g, or c
  SITE (30202): n equals a,t,g, or c
  SITE (30203): n equals a,t,g, or c
  SITE (30204): n equals a,t,g, or c
  SITE (30205): n equals a,t,g, or c
  SITE (30206): n equals a,t,g, or c
  SITE (30207): n equals a,t,g, or c
  SITE (30208): n equals a,t,g, or c
  SITE (30209): n equals a,t,g, or c
  SITE (30210): n equals a,t,g, or c
  SITE (30211): n equals a,t,g, or c
  SITE (30212): n equals a,t,g, or c
  SITE (30213): n equals a,t,g, or c
  SITE (30214): n equals a,t,g, or c
  SITE (30215): n equals a,t,g, or c
  SITE (30216): n equals a,t,g, or c
  SITE (30217): n equals a,t,g, or c
  SITE (30218): n equals a,t,g, or c
  SITE (30219): n equals a,t,g, or c
  SITE (30220): n equals a,t,g, or c
  SITE (30221): n equals a,t,g, or c
  SITE (30222): n equals a,t,g, or c
  SITE (30223): n equals a,t,g, or c
  SITE (30224): n equals a,t,g, or c
  SITE (30225): n equals a,t,g, or c
  SITE (30226): n equals a,t,g, or c
  SITE (30227): n equals a,t,g, or c
  SITE (30228): n equals a,t,g, or c
  SITE (30229): n equals a,t,g, or c
  SITE (30230): n equals a,t,g, or c
  SITE (30231): n equals a,t,g, or c
  SITE (30232): n equals a,t,g, or c
  SITE (30233): n equals a,t,g, or c
  SITE (30234): n equals a,t,g, or c
  SITE (30235): n equals a,t,g, or c
  SITE (30236): n equals a,t,g, or c
  SITE (30237): n equals a,t,g, or c
  SITE (30238): n equals a,t,g, or c
  SITE (30239): n equals a,t,g, or c
  SITE (30240): n equals a,t,g, or c
  SITE (30241): n equals a,t,g, or c
  SITE (30242): n equals a,t,g, or c
  SITE (30243): n equals a,t,g, or c
  SITE (30244): n equals a,t,g, or c
  SITE (30245): n equals a,t,g, or c
  SITE (30246): n equals a,t,g, or c
  SITE (30247): n equals a,t,g, or c
  SITE (30248): n equals a,t,g, or c
  SITE (30249): n equals a,t,g, or c
  SITE (30250): n equals a,t,g, or c
  SITE (30251): n equals a,t,g, or c
  SITE (30252): n equals a,t,g, or c
  SITE (30253): n equals a,t,g, or c
  SITE (30254): n equals a,t,g, or c
  SITE (30255): n equals a,t,g, or c
  SITE (30256): n equals a,t,g, or c
  SITE (30257): n equals a,t,g, or c
  SITE (30258): n equals a,t,g, or c
  SITE (30259): n equals a,t,g, or c
  SITE (30260): n equals a,t,g, or c
  SITE (30261): n equals a,t,g, or c
  SITE (30262): n equals a,t,g, or c
  SITE (30263): n equals a,t,g, or c
  SITE (30264): n equals a,t,g, or c
  SITE (30265): n equals a,t,g, or c
  SITE (30266): n equals a,t,g, or c
  SITE (30267): n equals a,t,g, or c
  SITE (30268): n equals a,t,g, or c
  SITE (30269): n equals a,t,g, or c
  SITE (30270): n equals a,t,g, or c
  SITE (30271): n equals a,t,g, or c
  SITE (30272): n equals a,t,g, or c
  SITE (30273): n equals a,t,g, or c
  SITE (30274): n equals a,t,g, or c
  SITE (30275): n equals a,t,g, or c
  SITE (30276): n equals a,t,g, or c
  SITE (30277): n equals a,t,g, or c
  SITE (30278): n equals a,t,g, or c
  SITE (30279): n equals a,t,g, or c
  SITE (30280): n equals a,t,g, or c
  SITE (30281): n equals a,t,g, or c
  SITE (30282): n equals a,t,g, or c
  SITE (30283): n equals a,t,g, or c
  SITE (30284): n equals a,t,g, or c
  SITE (30285): n equals a,t,g, or c
  SITE (30286): n equals a,t,g, or c
  SITE (30287): n equals a,t,g, or c
  SITE (30288): n equals a,t,g, or c
  SITE (30289): n equals a,t,g, or c
  SITE (30290): n equals a,t,g, or c
  SITE (30291): n equals a,t,g, or c
  SITE (30292): n equals a,t,g, or c
  SITE (30293): n equals a,t,g, or c
  SITE (30294): n equals a,t,g, or c
  SITE (30295): n equals a,t,g, or c
  SITE (30296): n equals a,t,g, or c
  SITE (30297): n equals a,t,g, or c
  SITE (30298): n equals a,t,g, or c
  SITE (30299): n equals a,t,g, or c
  SITE (30300): n equals a,t,g, or c
  SITE (30301): n equals a,t,g, or c
  SITE (30302): n equals a,t,g, or c
  SITE (30303): n equals a,t,g, or c
  SITE (30304): n equals a,t,g, or c
  SITE (30305): n equals a,t,g, or c
  SITE (30306): n equals a,t,g, or c
  SITE (30307): n equals a,t,g, or c
  SITE (30308): n equals a,t,g, or c
  SITE (30309): n equals a,t,g, or c
  SITE (30310): n equals a,t,g, or c
  SITE (30311): n equals a,t,g, or c
  SITE (30312): n equals a,t,g, or c
  SITE (30313): n equals a,t,g, or c
  SITE (30314): n equals a,t,g, or c
  SITE (30315): n equals a,t,g, or c
  SITE (30316): n equals a,t,g, or c
  SITE (30317): n equals a,t,g, or c
  SITE (30318): n equals a,t,g, or c
  SITE (30319): n equals a,t,g, or c
  SITE (30320): n equals a,t,g, or c
  SITE (30321): n equals a,t,g, or c
  SITE (30322): n equals a,t,g, or c
  SITE (30323): n equals a,t,g, or c
  SITE (30324): n equals a,t,g, or c
  SITE (30325): n equals a,t,g, or c
  SITE (30326): n equals a,t,g, or c
  SITE (30327): n equals a,t,g, or c
  SITE (30328): n equals a,t,g, or c
  SITE (30329): n equals a,t,g, or c
  SITE (30330): n equals a,t,g, or c
  SITE (30331): n equals a,t,g, or c
  SITE (30332): n equals a,t,g, or c
  SITE (30333): n equals a,t,g, or c
  SITE (30334): n equals a,t,g, or c
  SITE (30335): n equals a,t,g, or c
  SITE (30336): n equals a,t,g, or c
  SITE (30337): n equals a,t,g, or c
  SITE (30338): n equals a,t,g, or c
  SITE (30339): n equals a,t,g, or c
  SITE (30340): n equals a,t,g, or c
  SITE (30341): n equals a,t,g, or c
  SITE (30342): n equals a,t,g, or c
  SITE (30343): n equals a,t,g, or c
  SITE (30344): n equals a,t,g, or c
  SITE (30345): n equals a,t,g, or c
  SITE (30346): n equals a,t,g, or c
  SITE (30347): n equals a,t,g, or c
  SITE (30348): n equals a,t,g, or c
  SITE (30349): n equals a,t,g, or c
  SITE (30350): n equals a,t,g, or c
  SITE (30351): n equals a,t,g, or c
  SITE (30352): n equals a,t,g, or c
  SITE (30353): n equals a,t,g, or c
  SITE (30354): n equals a,t,g, or c
  SITE (30355): n equals a,t,g, or c
  SITE (30356): n equals a,t,g, or c
  SITE (30357): n equals a,t,g, or c
  SITE (30358): n equals a,t,g, or c
  SITE (30359): n equals a,t,g, or c
  SITE (30360): n equals a,t,g, or c
  SITE (30361): n equals a,t,g, or c
  SITE (30362): n equals a,t,g, or c
  SITE (30363): n equals a,t,g, or c
  SITE (30364): n equals a,t,g, or c
  SITE (30365): n equals a,t,g, or c
  SITE (30366): n equals a,t,g, or c
  SITE (30367): n equals a,t,g, or c
  SITE (30368): n equals a,t,g, or c
  SITE (30369): n equals a,t,g, or c
  SITE (30370): n equals a,t,g, or c
  SITE (30371): n equals a,t,g, or c
  SITE (30372): n equals a,t,g, or c
  SITE (30373): n equals a,t,g, or c
  SITE (30374): n equals a,t,g, or c
  SITE (30375): n equals a,t,g, or c
  SITE (30376): n equals a,t,g, or c
  SITE (30377): n equals a,t,g, or c
  SITE (30378): n equals a,t,g, or c
  SITE (30379): n equals a,t,g, or c
  SITE (30380): n equals a,t,g, or c
  SITE (30381): n equals a,t,g, or c
  SITE (30382): n equals a,t,g, or c
  SITE (30383): n equals a,t,g, or c
  SITE (30384): n equals a,t,g, or c
  SITE (30385): n equals a,t,g, or c
  SITE (30386): n equals a,t,g, or c
  SITE (30387): n equals a,t,g, or c
  SITE (30388): n equals a,t,g, or c
  SITE (30389): n equals a,t,g, or c
  SITE (30390): n equals a,t,g, or c
  SITE (30391): n equals a,t,g, or c
  SITE (30392): n equals a,t,g, or c
  SITE (30393): n equals a,t,g, or c
  SITE (30394): n equals a,t,g, or c
  SITE (30395): n equals a,t,g, or c
  SITE (30396): n equals a,t,g, or c
  SITE (30397): n equals a,t,g, or c
  SITE (30398): n equals a,t,g, or c
  SITE (30399): n equals a,t,g, or c
  SITE (30400): n equals a,t,g, or c
  SITE (30401): n equals a,t,g, or c
  SITE (30402): n equals a,t,g, or c
  SITE (30403): n equals a,t,g, or c
  SITE (30404): n equals a,t,g, or c
  SITE (30405): n equals a,t,g, or c
  SITE (30406): n equals a,t,g, or c
  SITE (30407): n equals a,t,g, or c
  SITE (30408): n equals a,t,g, or c
  SITE (30409): n equals a,t,g, or c
  SITE (30410): n equals a,t,g, or c
  SITE (30411): n equals a,t,g, or c
  SITE (30412): n equals a,t,g, or c
  SITE (30413): n equals a,t,g, or c
  SITE (30414): n equals a,t,g, or c
  SITE (30415): n equals a,t,g, or c
  SITE (30416): n equals a,t,g, or c
  SITE (30417): n equals a,t,g, or c
  SITE (30418): n equals a,t,g, or c
  SITE (30419): n equals a,t,g, or c
  SITE (30420): n equals a,t,g, or c
  SITE (30421): n equals a,t,g, or c
  SITE (30422): n equals a,t,g, or c
  SITE (30423): n equals a,t,g, or c
  SITE (30424): n equals a,t,g, or c
  SITE (30425): n equals a,t,g, or c
  SITE (30426): n equals a,t,g, or c
  SITE (30427): n equals a,t,g, or c
  SITE (30428): n equals a,t,g, or c
  SITE (30429): n equals a,t,g, or c
  SITE (30430): n equals a,t,g, or c
  SITE (30431): n equals a,t,g, or c
  SITE (30432): n equals a,t,g, or c
  SITE (30433): n equals a,t,g, or c
  SITE (30434): n equals a,t,g, or c
  SITE (30435): n equals a,t,g, or c
  SITE (30436): n equals a,t,g, or c
  SITE (30437): n equals a,t,g, or c
  SITE (30438): n equals a,t,g, or c
  SITE (30439): n equals a,t,g, or c
  SITE (30440): n equals a,t,g, or c
  SITE (30441): n equals a,t,g, or c
  SITE (30442): n equals a,t,g, or c
  SITE (30443): n equals a,t,g, or c
  SITE (30444): n equals a,t,g, or c
  SITE (30445): n equals a,t,g, or c
  SITE (30446): n equals a,t,g, or c
  SITE (30447): n equals a,t,g, or c
  SITE (30448): n equals a,t,g, or c
  SITE (30449): n equals a,t,g, or c
  SITE (30450): n equals a,t,g, or c
  SITE (30451): n equals a,t,g, or c
  SITE (30452): n equals a,t,g, or c
  SITE (30453): n equals a,t,g, or c
  SITE (30454): n equals a,t,g, or c
  SITE (30455): n equals a,t,g, or c
  SITE (30456): n equals a,t,g, or c
  SITE (30457): n equals a,t,g, or c
  SITE (30458): n equals a,t,g, or c
  SITE (30459): n equals a,t,g, or c
  SITE (30460): n equals a,t,g, or c
  SITE (30461): n equals a,t,g, or c
  SITE (30462): n equals a,t,g, or c
  SITE (30463): n equals a,t,g, or c
  SITE (30464): n equals a,t,g, or c
  SITE (30465): n equals a,t,g, or c
  SITE (30466): n equals a,t,g, or c
  SITE (30467): n equals a,t,g, or c
  SITE (30468): n equals a,t,g, or c
  SITE (30469): n equals a,t,g, or c
  SITE (30470): n equals a,t,g, or c
  SITE (30471): n equals a,t,g, or c
  SITE (30472): n equals a,t,g, or c
  SITE (30473): n equals a,t,g, or c
  SITE (30474): n equals a,t,g, or c
  SITE (30475): n equals a,t,g, or c
  SITE (30476): n equals a,t,g, or c
  SITE (30477): n equals a,t,g, or c
  SITE (30478): n equals a,t,g, or c
  SITE (30479): n equals a,t,g, or c
  SITE (30480): n equals a,t,g, or c
  SITE (30481): n equals a,t,g, or c
  SITE (30482): n equals a,t,g, or c
  SITE (30483): n equals a,t,g, or c
  SITE (30484): n equals a,t,g, or c
  SITE (30485): n equals a,t,g, or c
  SITE (30486): n equals a,t,g, or c
  SITE (30487): n equals a,t,g, or c
  SITE (30488): n equals a,t,g, or c
  SITE (30489): n equals a,t,g, or c
  SITE (30490): n equals a,t,g, or c
  SITE (30491): n equals a,t,g, or c
  SITE (30492): n equals a,t,g, or c
  SITE (30493): n equals a,t,g, or c
  SITE (30494): n equals a,t,g, or c
  SITE (30495): n equals a,t,g, or c
  SITE (30496): n equals a,t,g, or c
  SITE (30497): n equals a,t,g, or c
  SITE (30498): n equals a,t,g, or c
  SITE (30499): n equals a,t,g, or c
  SITE (30500): n equals a,t,g, or c
  SITE (30501): n equals a,t,g, or c
  SITE (30502): n equals a,t,g, or c
  SITE (30503): n equals a,t,g, or c
  SITE (30504): n equals a,t,g, or c
  SITE (30505): n equals a,t,g, or c
  SITE (30506): n equals a,t,g, or c
  SITE (30507): n equals a,t,g, or c
  SITE (30508): n equals a,t,g, or c
  SITE (30509): n equals a,t,g, or c
  SITE (30510): n equals a,t,g, or c
  SITE (30511): n equals a,t,g, or c
  SITE (30512): n equals a,t,g, or c
  SITE (30513): n equals a,t,g, or c
  SITE (30514): n equals a,t,g, or c
  SITE (30515): n equals a,t,g, or c
  SITE (30516): n equals a,t,g, or c
  SITE (30517): n equals a,t,g, or c
  SITE (30518): n equals a,t,g, or c
  SITE (30519): n equals a,t,g, or c
  SITE (30520): n equals a,t,g, or c
  SITE (30521): n equals a,t,g, or c
  SITE (30522): n equals a,t,g, or c
  SITE (30523): n equals a,t,g, or c
  SITE (30524): n equals a,t,g, or c
  SITE (30525): n equals a,t,g, or c
  SITE (30526): n equals a,t,g, or c
  SITE (30527): n equals a,t,g, or c
  SITE (30528): n equals a,t,g, or c
  SITE (30529): n equals a,t,g, or c
  SITE (30530): n equals a,t,g, or c
  SITE (30531): n equals a,t,g, or c
  SITE (30532): n equals a,t,g, or c
  SITE (30533): n equals a,t,g, or c
  SITE (30534): n equals a,t,g, or c
  SITE (30535): n equals a,t,g, or c
  SITE (30536): n equals a,t,g, or c
  SITE (30537): n equals a,t,g, or c
  SITE (30538): n equals a,t,g, or c
  SITE (30539): n equals a,t,g, or c
  SITE (30540): n equals a,t,g, or c
  SITE (30541): n equals a,t,g, or c
  SITE (30542): n equals a,t,g, or c
  SITE (30543): n equals a,t,g, or c
  SITE (30544): n equals a,t,g, or c
  SITE (30545): n equals a,t,g, or c
  SITE (30546): n equals a,t,g, or c
  SITE (30547): n equals a,t,g, or c
  SITE (30548): n equals a,t,g, or c
  SITE (30549): n equals a,t,g, or c
  SITE (30550): n equals a,t,g, or c
  SITE (30551): n equals a,t,g, or c
  SITE (30552): n equals a,t,g, or c
  SITE (30553): n equals a,t,g, or c
  SITE (30554): n equals a,t,g, or c
  SITE (30555): n equals a,t,g, or c
  SITE (30556): n equals a,t,g, or c
  SITE (30557): n equals a,t,g, or c
  SITE (30558): n equals a,t,g, or c
  SITE (30559): n equals a,t,g, or c
  SITE (30560): n equals a,t,g, or c
  SITE (30561): n equals a,t,g, or c
  SITE (30562): n equals a,t,g, or c
  SITE (30563): n equals a,t,g, or c
  SITE (30564): n equals a,t,g, or c
  SITE (30565): n equals a,t,g, or c
  SITE (30566): n equals a,t,g, or c
  SITE (30567): n equals a,t,g, or c
  SITE (30568): n equals a,t,g, or c
  SITE (30569): n equals a,t,g, or c
  SITE (30570): n equals a,t,g, or c
  SITE (30571): n equals a,t,g, or c
  SITE (30572): n equals a,t,g, or c
  SITE (30573): n equals a,t,g, or c
  SITE (30574): n equals a,t,g, or c
  SITE (30575): n equals a,t,g, or c
  SITE (30576): n equals a,t,g, or c
  SITE (30577): n equals a,t,g, or c
  SITE (30578): n equals a,t,g, or c
  SITE (30579): n equals a,t,g, or c
  SITE (30580): n equals a,t,g, or c
  SITE (30581): n equals a,t,g, or c
  SITE (30582): n equals a,t,g, or c
  SITE (30583): n equals a,t,g, or c
  SITE (30584): n equals a,t,g, or c
  SITE (30585): n equals a,t,g, or c
  SITE (30586): n equals a,t,g, or c
  SITE (30587): n equals a,t,g, or c
  SITE (30588): n equals a,t,g, or c
  SITE (30589): n equals a,t,g, or c
  SITE (30590): n equals a,t,g, or c
  SITE (30591): n equals a,t,g, or c
  SITE (30592): n equals a,t,g, or c
  SITE (30593): n equals a,t,g, or c
  SITE (30594): n equals a,t,g, or c
  SITE (30595): n equals a,t,g, or c
  SITE (30596): n equals a,t,g, or c
  SITE (30597): n equals a,t,g, or c
  SITE (30598): n equals a,t,g, or c
  SITE (30599): n equals a,t,g, or c
  SITE (30600): n equals a,t,g, or c
  SITE (30601): n equals a,t,g, or c
  SITE (30602): n equals a,t,g, or c
  SITE (30603): n equals a,t,g, or c
  SITE (30604): n equals a,t,g, or c
  SITE (30605): n equals a,t,g, or c
  SITE (30606): n equals a,t,g, or c
  SITE (30607): n equals a,t,g, or c
  SITE (30608): n equals a,t,g, or c
  SITE (30609): n equals a,t,g, or c
  SITE (30610): n equals a,t,g, or c
  SITE (30611): n equals a,t,g, or c
  SITE (30612): n equals a,t,g, or c
  SITE (30613): n equals a,t,g, or c
  SITE (30614): n equals a,t,g, or c
  SITE (30615): n equals a,t,g, or c
  SITE (30616): n equals a,t,g, or c
  SITE (30617): n equals a,t,g, or c
  SITE (30618): n equals a,t,g, or c
  SITE (30619): n equals a,t,g, or c
  SITE (30620): n equals a,t,g, or c
  SITE (30621): n equals a,t,g, or c
  SITE (30622): n equals a,t,g, or c
  SITE (30623): n equals a,t,g, or c
  SITE (30624): n equals a,t,g, or c
  SITE (30625): n equals a,t,g, or c
  SITE (30626): n equals a,t,g, or c
  SITE (30627): n equals a,t,g, or c
  SITE (30628): n equals a,t,g, or c
  SITE (30629): n equals a,t,g, or c
  SITE (30630): n equals a,t,g, or c
  SITE (30631): n equals a,t,g, or c
  SITE (30632): n equals a,t,g, or c
  SITE (30633): n equals a,t,g, or c
  SITE (30634): n equals a,t,g, or c
  SITE (30635): n equals a,t,g, or c
  SITE (30636): n equals a,t,g, or c
  SITE (30637): n equals a,t,g, or c
  SITE (30638): n equals a,t,g, or c
  SITE (30639): n equals a,t,g, or c
  SITE (30640): n equals a,t,g, or c
  SITE (30641): n equals a,t,g, or c
  SITE (30642): n equals a,t,g, or c
  SITE (30643): n equals a,t,g, or c
  SITE (30644): n equals a,t,g, or c
  SITE (30645): n equals a,t,g, or c
  SITE (30646): n equals a,t,g, or c
  SITE (30647): n equals a,t,g, or c
  SITE (30648): n equals a,t,g, or c
  SITE (30649): n equals a,t,g, or c
  SITE (30650): n equals a,t,g, or c
  SITE (30651): n equals a,t,g, or c
  SITE (30652): n equals a,t,g, or c
  SITE (30653): n equals a,t,g, or c
  SITE (30654): n equals a,t,g, or c
  SITE (30655): n equals a,t,g, or c
  SITE (30656): n equals a,t,g, or c
  SITE (30657): n equals a,t,g, or c
  SITE (30658): n equals a,t,g, or c
  SITE (30659): n equals a,t,g, or c
  SITE (30660): n equals a,t,g, or c
  SITE (30661): n equals a,t,g, or c
  SITE (30662): n equals a,t,g, or c
  SITE (30663): n equals a,t,g, or c
  SITE (30664): n equals a,t,g, or c
  SITE (30665): n equals a,t,g, or c
  SITE (30666): n equals a,t,g, or c
  SITE (30667): n equals a,t,g, or c
  SITE (30668): n equals a,t,g, or c
  SITE (30669): n equals a,t,g, or c
  SITE (30670): n equals a,t,g, or c
  SITE (30671): n equals a,t,g, or c
  SITE (30672): n equals a,t,g, or c
  SITE (30673): n equals a,t,g, or c
  SITE (30674): n equals a,t,g, or c
  SITE (30675): n equals a,t,g, or c
  SITE (30676): n equals a,t,g, or c
  SITE (30677): n equals a,t,g, or c
  SITE (30678): n equals a,t,g, or c
  SITE (30679): n equals a,t,g, or c
  SITE (30680): n equals a,t,g, or c
  SITE (30681): n equals a,t,g, or c
  SITE (30682): n equals a,t,g, or c
  SITE (30683): n equals a,t,g, or c
  SITE (30684): n equals a,t,g, or c
  SITE (30685): n equals a,t,g, or c
  SITE (30686): n equals a,t,g, or c
  SITE (30687): n equals a,t,g, or c
  SITE (30688): n equals a,t,g, or c
  SITE (30689): n equals a,t,g, or c
  SITE (30690): n equals a,t,g, or c
  SITE (30691): n equals a,t,g, or c
  SITE (30692): n equals a,t,g, or c
  SITE (30693): n equals a,t,g, or c
  SITE (30694): n equals a,t,g, or c
  SITE (30695): n equals a,t,g, or c
  SITE (30696): n equals a,t,g, or c
  SITE (30697): n equals a,t,g, or c
  SITE (30698): n equals a,t,g, or c
  SITE (30699): n equals a,t,g, or c
  SITE (30700): n equals a,t,g, or c
  SITE (30701): n equals a,t,g, or c
  SITE (30702): n equals a,t,g, or c
  SITE (30703): n equals a,t,g, or c
  SITE (30704): n equals a,t,g, or c
  SITE (30705): n equals a,t,g, or c
  SITE (30706): n equals a,t,g, or c
  SITE (30707): n equals a,t,g, or c
  SITE (30708): n equals a,t,g, or c
  SITE (30709): n equals a,t,g, or c
  SITE (30710): n equals a,t,g, or c
  SITE (30711): n equals a,t,g, or c
  SITE (30712): n equals a,t,g, or c
  SITE (30713): n equals a,t,g, or c
  SITE (30714): n equals a,t,g, or c
  SITE (30715): n equals a,t,g, or c
  SITE (30716): n equals a,t,g, or c
  SITE (30717): n equals a,t,g, or c
  SITE (30718): n equals a,t,g, or c
  SITE (30719): n equals a,t,g, or c
  SITE (30720): n equals a,t,g, or c
  SITE (30721): n equals a,t,g, or c
  SITE (30722): n equals a,t,g, or c
  SITE (30723): n equals a,t,g, or c
  SITE (30724): n equals a,t,g, or c
  SITE (30725): n equals a,t,g, or c
  SITE (30726): n equals a,t,g, or c
  SITE (30727): n equals a,t,g, or c
  SITE (30728): n equals a,t,g, or c
  SITE (30729): n equals a,t,g, or c
  SITE (30730): n equals a,t,g, or c
  SITE (30731): n equals a,t,g, or c
  SITE (30732): n equals a,t,g, or c
  SITE (30733): n equals a,t,g, or c
  SITE (30734): n equals a,t,g, or c
  SITE (30735): n equals a,t,g, or c
  SITE (30736): n equals a,t,g, or c
  SITE (30737): n equals a,t,g, or c
  SITE (30738): n equals a,t,g, or c
  SITE (30739): n equals a,t,g, or c
  SITE (30740): n equals a,t,g, or c
  SITE (30741): n equals a,t,g, or c
  SITE (30742): n equals a,t,g, or c
  SITE (30743): n equals a,t,g, or c
  SITE (30744): n equals a,t,g, or c
  SITE (30745): n equals a,t,g, or c
  SITE (30746): n equals a,t,g, or c
  SITE (30747): n equals a,t,g, or c
  SITE (30748): n equals a,t,g, or c
  SITE (30749): n equals a,t,g, or c
  SITE (30750): n equals a,t,g, or c
  SITE (30751): n equals a,t,g, or c
  SITE (30752): n equals a,t,g, or c
  SITE (30753): n equals a,t,g, or c
  SITE (30754): n equals a,t,g, or c
  SITE (30755): n equals a,t,g, or c
  SITE (30756): n equals a,t,g, or c
  SITE (30757): n equals a,t,g, or c
  SITE (30758): n equals a,t,g, or c
  SITE (30759): n equals a,t,g, or c
  SITE (30760): n equals a,t,g, or c
  SITE (30761): n equals a,t,g, or c
  SITE (30762): n equals a,t,g, or c
  SITE (30763): n equals a,t,g, or c
  SITE (30764): n equals a,t,g, or c
  SITE (30765): n equals a,t,g, or c
  SITE (30766): n equals a,t,g, or c
  SITE (30767): n equals a,t,g, or c
  SITE (30768): n equals a,t,g, or c
  SITE (30769): n equals a,t,g, or c
  SITE (30770): n equals a,t,g, or c
  SITE (30771): n equals a,t,g, or c
  SITE (30772): n equals a,t,g, or c
  SITE (30773): n equals a,t,g, or c
  SITE (30774): n equals a,t,g, or c
  SITE (30775): n equals a,t,g, or c
  SITE (30776): n equals a,t,g, or c
  SITE (30777): n equals a,t,g, or c
  SITE (30778): n equals a,t,g, or c
  SITE (30779): n equals a,t,g, or c
  SITE (30780): n equals a,t,g, or c
  SITE (30781): n equals a,t,g, or c
  SITE (30782): n equals a,t,g, or c
  SITE (30783): n equals a,t,g, or c
  SITE (30784): n equals a,t,g, or c
  SITE (30785): n equals a,t,g, or c
  SITE (30786): n equals a,t,g, or c
  SITE (30787): n equals a,t,g, or c
  SITE (30788): n equals a,t,g, or c
  SITE (30789): n equals a,t,g, or c
  SITE (30790): n equals a,t,g, or c
  SITE (30791): n equals a,t,g, or c
  SITE (30792): n equals a,t,g, or c
  SITE (30793): n equals a,t,g, or c
  SITE (30794): n equals a,t,g, or c
  SITE (30795): n equals a,t,g, or c
  SITE (30796): n equals a,t,g, or c
  SITE (30797): n equals a,t,g, or c
  SITE (30798): n equals a,t,g, or c
  SITE (30799): n equals a,t,g, or c
  SITE (30800): n equals a,t,g, or c
  SITE (30801): n equals a,t,g, or c
  SITE (30802): n equals a,t,g, or c
  SITE (30803): n equals a,t,g, or c
  SITE (30804): n equals a,t,g, or c
  SITE (30805): n equals a,t,g, or c
  SITE (30806): n equals a,t,g, or c
  SITE (30807): n equals a,t,g, or c
  SITE (30808): n equals a,t,g, or c
  SITE (30809): n equals a,t,g, or c
  SITE (30810): n equals a,t,g, or c
  SITE (30811): n equals a,t,g, or c
  SITE (30812): n equals a,t,g, or c
  SITE (30813): n equals a,t,g, or c
  SITE (30814): n equals a,t,g, or c
  SITE (30815): n equals a,t,g, or c
  SITE (30816): n equals a,t,g, or c
  SITE (30817): n equals a,t,g, or c
  SITE (30818): n equals a,t,g, or c
  SITE (30819): n equals a,t,g, or c
  SITE (30820): n equals a,t,g, or c
  SITE (30821): n equals a,t,g, or c
  SITE (30822): n equals a,t,g, or c
  SITE (30823): n equals a,t,g, or c
  SITE (30824): n equals a,t,g, or c
  SITE (30825): n equals a,t,g, or c
  SITE (30826): n equals a,t,g, or c
  SITE (30827): n equals a,t,g, or c
  SITE (30828): n equals a,t,g, or c
  SITE (30829): n equals a,t,g, or c
  SITE (30830): n equals a,t,g, or c
  SITE (30831): n equals a,t,g, or c
  SITE (30832): n equals a,t,g, or c
  SITE (30833): n equals a,t,g, or c
  SITE (30834): n equals a,t,g, or c
  SITE (30835): n equals a,t,g, or c
  SITE (30836): n equals a,t,g, or c
  SITE (30837): n equals a,t,g, or c
  SITE (30838): n equals a,t,g, or c
  SITE (30839): n equals a,t,g, or c
  SITE (30840): n equals a,t,g, or c
  SITE (30841): n equals a,t,g, or c
  SITE (30842): n equals a,t,g, or c
  SITE (30843): n equals a,t,g, or c
  SITE (30844): n equals a,t,g, or c
  SITE (30845): n equals a,t,g, or c
  SITE (30846): n equals a,t,g, or c
  SITE (30847): n equals a,t,g, or c
  SITE (30848): n equals a,t,g, or c
  SITE (30849): n equals a,t,g, or c
  SITE (30850): n equals a,t,g, or c
  SITE (30851): n equals a,t,g, or c
  SITE (30852): n equals a,t,g, or c
  SITE (30853): n equals a,t,g, or c
  SITE (30854): n equals a,t,g, or c
  SITE (30855): n equals a,t,g, or c
  SITE (30856): n equals a,t,g, or c
  SITE (30857): n equals a,t,g, or c
  SITE (30858): n equals a,t,g, or c
  SITE (30859): n equals a,t,g, or c
  SITE (30860): n equals a,t,g, or c
  SITE (30861): n equals a,t,g, or c
  SITE (30862): n equals a,t,g, or c
  SITE (30863): n equals a,t,g, or c
  SITE (30864): n equals a,t,g, or c
  SITE (30865): n equals a,t,g, or c
  SITE (30866): n equals a,t,g, or c
  SITE (30867): n equals a,t,g, or c
  SITE (30868): n equals a,t,g, or c
  SITE (30869): n equals a,t,g, or c
  SITE (30870): n equals a,t,g, or c
  SITE (30871): n equals a,t,g, or c
  SITE (30872): n equals a,t,g, or c
  SITE (30873): n equals a,t,g, or c
  SITE (30874): n equals a,t,g, or c
  SITE (30875): n equals a,t,g, or c
  SITE (30876): n equals a,t,g, or c
  SITE (30877): n equals a,t,g, or c
  SITE (30878): n equals a,t,g, or c
  SITE (30879): n equals a,t,g, or c
  SITE (30880): n equals a,t,g, or c
gaaggaaatttgtgattagaagccgcgctgttcttatttaagagcgttagcgcaacttccggtattgttgcaagatggccgcgcccagtgatggattcaagcctcgtgaacgaagcggtggggagcaggcacaggactgggatgctctgccacccaagcggccccgactaggggcaggaaacaagatcggaggccgtaggcttattgtggtgctggaaggggccagtctggagacagtcaaggtagtttgggacaggaagtggagaagtagtaaatcgataggttgggactccgtggaatgagggtaaggggcccagagtggatgtagaaagcagagaggggtgaaagatgcttttgaaggaaggtggcttggttggctttgcgttgatttgacatcctgggatggtagtactcatttttctttctttttttttttttttttgagacggagtctcgctctgtcgcccaggctggagtgcagttgcgcgacctcggctcactgcaacttctgcctcccgccttcaaacagttctcctgactcagcctctggagtagctgggactacaggcaggtgccaccacgcccggctaatttttttgtatttttagttcagatggggtttcaccatgttggccacgctggtctcgaactcctgacctcaagtgatccgcccgcctcggcctcccaaagtgttgggattagaggcgtgagccactgtgcccggccggtagtactcattttcttttgctctttttgaatgatattctagccctcacctccttgcttccaattggtttaccaggattctgtggtatagtagtctaagcagaggaaagtttcgttccttgcgtcattccacatcccaagacaagttactgggcagatgagaaacgtagttatgtagcctagtctgcccacactttttgtaagggcttcgtgtttcaattcattagtatccatagtcacctctctctaatatccacctatgatacactgtccagacctggttattatttaaaacttttacatctgcatttttatctatcattcatctctttccccacatgtaatagaaccagcagttctctatcttaaagccttgggcagtgttcttcctcctcctttctcttacccgttagaactaattgaataggcccagaagaaatcgcattggtttagaagtcaggccaggattttaatcttcgttctaaatacacttttttttttttttttttttgagatggagtctcagtctctaccaggctggagtgcagtggcacgatcttggctcactgcagcctccgcctcccgggttcaatcgattctcctgcctcagcctccagagtagctgggattacaggcctgcgcctgtaatctattaaaagaatagaaaacatgattatatcctactaatgggttgaaactgtattattcattcaagaaggtttttttcttctataactaagggtgtctcatggacttagttcttggtcatttgttctttgtgctctctgtgacattacttcaactattcaatttcaaaatctacatcccttttttcgcagactttttggagccatatatctcaagaatgttgctagacatatacattccagtgatacataaaaacttaaccttccaaaacttgtatttgtatataacagtttgtttttagactttttactgaccaccctaatgctccttgggactccaaattgcaacttggaattatttcttttagctgctacagatgtagtccacttctttaacatcaaacttctgatgtcttttccagtgtacagagagttgttaggatagtgtctgtcagtcattcccatcctgccctgcttactccagaattatttttggctttgtgcttgatacattaggattctgtggtttacaaagcagcttcatatataatcactgccctttagtgtctcagctcccaattttcctcaaaatttcctttcttcgtttccactttttcttttttgtttcttttttgagatagggtcttgctctgttgcctgggcaacagagtgcagtggtgtgatggttcactgcagcctctacttccctggctcaagcagtcctcccacctcatcctcctgagtaactgggactgccagcaaatggcactgcgcctggctaatttttttttttttttttgtgagacagggtcccaccgtgttgcccaggccggtctcaaattcctgggctcaagtgatccttccacctcggcctcctaaagtgttgggatcacaggcataagccaccacacctggctactttgtcttgattccatctgtacctttgctcatgccagtctttcttttttcttttttttgagacagggtcttgctggagtgcagtggtacagtcttggctcactgcaatctctgtctcctgggctcaagccatcctcccaccttagcctcccaagtagctaggactacaggcatgtgccaccatgcccagctaatttttgtatttttagtagagatggggtttcgccatgttgcccaggctggtcttgaactcctgaccttaagtgatttgcctgccttggcctcccagagtgctgggattacagccgtgagccactgcatctgcccccatgcccgtcttaaaactgggaataacccctcttccttttacttctgagagttttctttgattaaactgcctcctgcatcattagttttcacatttcttttttttgagatggagtctcgctctgttgcccgggctggagtgcagtggcgctgcaagctccgcctcctgggttcatgccattctcctgcctctgcctcccaagtagctgggactacaggcgcctgccaccatgcccggctaattttttatatttttagtagagatggggtttcaccgtgttagccacgatggtctcaatctcctgaccttgtgatctgcccgcctcggcctcccaaagtgctgggattacaggcgtgagccaccacgcccggccttcacatttcttgttcagatttgcagctcttcacttagtgcatgtttggtgtacgcaaactgagggtggtgactcgatattttgcacagtacctacttactgctcctgtaataaacacagcattcagccttgctaactactaactcctgcctagttccaggatgtctcattggccttgcctaacagccacaggttttttaattaaatccagtgtattagtagataatgtgaagtcacaggttgtgcccttcctcctgtttccctctcagaccattcactggggagtgcaaataaggctgcacagtaatcccccgaagggcttgctgggctccacccccagtgttcctggtttagtaggtctagggtgggcctgagaatttgcctaacaagtttccaggtgcagctgctgctggtagtttggggaccacacttgaagaaccacggggctaggtaacagaagcttatgctgttctctcgtcatgttccctgttcttcaggtagggaagacatatgagctactcaactgtgacaagcacaagtctatattgttgaagaatggacgggaccctggggaagcgcggccagatatcacccaccaggtaactccagggacagtgctcacaaccctttgagcctctgtatggaagggttggcagctgagtgctgcctctcttcagccttaaccatgtctcggtttctgctttgctcagagtttgctgatgctgatggatagtcccctgaaccgagctggcttgctacaggtttatatccatacacagaagaatgttctgattgaagtgaatccccagacccgaattcccagaacctttgaccgcttttgtggcctcatgggtaagaagccttagaacaaagttagaatgaacttgtcagtagggaagaagggaggaagaggaaaagggagaactaaatgtggatttttaagcgagaaaatgggagaacaacatgattaataccaggacaaggactgttattatttttctatgtttgtggaaactccactcctgttcttgcagtagcttcctggctgagtgaaagagggagtctgaacccatcactgtacagctagccatatgcttggcaactgtttgttcctaacatttcaggagtccagtctagatataaagcacacagggaactcatcttatccatggggttttccttgttcgatgactggacagaaggactgtggtctccatctagctctgaactcttttttcccccttctagttcaacttttacacaagctcagtgttcgagcagctgatggcccccagaagcttttgaaggtgaggtattgaaacctgttagttgaaggctggttctgggaatgtttctggggctgacttttctctcttttttactttaggtaattaagaatccagtatcagatcactttccagttggatgtatgaaagttggcacttctttttccatcccggttgtcagtgatgtgcgtgagctggtgcccagcagtgatcctattgtttttgtggtaggggcctttgcccatggcaaggtaaggtctgggctcaaccctgaaattcttggtagagctgaacttagtatagaattcccagagcagtaggcattttaacaatgcttacaatgagctagaagacacatgacagttccacaccctgccccagggcacatcctttgagggctgctgccataattggaagtcacagttaggaccttcttcatcctttgtagggatttgatattcaacagcacagctgaaatactagctcagccatagttttcctgccctaaagaagggctgaaacagctactgagtgacagagttggctgacaaaactgttcttttcttaggtcagtgtggagtatacagagaagatggtgtccatcagtaactaccccctttctgctgccctcacctgtgcaaaacttaccacagcctttgaggaagtatggggggtcatttgacagtagtagaacctgttctgaaaccagaaactgttgatgtcacatcctttgaccctggtctgagctgactgctggaagatgatctttctgcactgagactgtggagtttggggaagccaaggctgtacatttgctatttgtttatcctatgaatactgttcttgcaaacctggttgttttggggttcctaaagtatccagtggtgtaaaactgtttgttccccgggacttcagggacagataggaggttacagagtttgcagtttggttccatgctttgaaggcaggctttagctcccagattcccatgtgctaaaggagagaaccctgatgatggagaagaactgtgaaagagagcagtcaggaatgctagtggtgaaaaactgaacaaacagaagtgattttatctaatacagttccaaggtagaaaaagtggagcaggcagggccttgcacccctctccacccccccatggggggggtggtggtagcggcacatacacaatcatagtaaattggcagaagaaaaacacaatagattcctggctagatggggagagataaggcaatgtgcatgggggaatcagaggggagatgtgagcccctctgctcctcccacaagagtttcccctttgggccgggcacggtggctcacgcctgtaatcccagcactttgggaggcggaggcgggtggatcacttgcggtcaggagttcgagaccagcctggccaacgtggtgaaatcccgtttctactgaaaatacaaaaattagctgggcatggtggcgtgcctgtattcccagctacttgggaggctgaggcaggaaaatcacttgaacccaggaggtggaggttgcggtgagctgagatcccgccactgcattccagcgtgggtgacaaagcaagacgccttctccaaaaaaaagtttcccctttggccccaaatgaagacttggctggcagcagaggcacagctggaagcatcgatcttccacctccctggcttttccattctctgctctggggcaaaggagtgctgtgaaaagggagacgagtagtttctgcaccagtcccgcacaggccacctgcaagacaagaggagtttggaaggctggttagttactcctgtaattcctggtctatagcccttccagatgtttcctagcatgcctcaataagtcacagtagtcattgcccatactgtgttccttagtagccaggctaatccttggaattcaccccagatttctaatactattgtttttttccagtctgttgctctattctgtaacctggtggtagttttagtttagctgtattaacttaccagggaaatggattattccatcttctttaacttctctttccttggcaccattgctttgtgaatataaggcaatatgaatagtaggctcaggaagaagatgtggccaaggaaatagatggatttatacacctgtggagagagaggccactaaggtagacaggcctggagtgtcctttgcaacctttgaggttgcagtgagtccctcccagtctcacaagcaggccttcacttgccttaagccatttgtcccacgtgaagaggcagaaggcagtcatggagtaacccatgaagagccagtggatggtctgttgcaccaaatagtagaagggctggaggacagtaatggcggccagcttgctcagggtggggctctcttgaatgagcctggcagcctggggagggaggaggagctcatcagcatcttgtcccttatattccccttcacccccaccctggaggcctacctgtctttccacaataacaatgaggaattccatctggaagcagaccaggtatcctgagtgcaggccgtgccagagggccaggaatagcaacgagagaccctgagagagttctttatttccaaggaacttgagtcgtttgaagatgtagctggagaaaagggtgggtggggcgaccctcaaactgactggtccttgcatcccgccacctgcctctgggtcctcaccctgaggattggattggagtgctggtgggttcccacgtgtagcccccagagggtacaggaggcagtgctgactgattacttttagagatggaaagcagacccaaggcggagctggagaccgtgtgcgcacgagccacttggttcagcagcagtgactgaggctgatgctgagatcagtggtgaaccagacactctactcaagctgcccacactctagtggtggggacaaacaagtaaagctgttgataaacagggcagtggaggacataagtccattggcagagctggagtaacacccaggtcttaacgcacttttatatcttgcctttttttcaaatatgacagtaatggtttttttgggaggggggtataggtgggggtcaaagtcagtgtgagcgacagggggttctgcccagatgggaaagacgcataggggtgacatggtacacccctgccctccaatctgggaagacagtggaaggaaggaaccagggtccaggctccccaccagcagctcaccgggccacccaggcgttggtgttgatgttgaatgaggcaatggtgccagtgaagcgggggtttgtttcaaagagccacaccttcatgttggcacaggcatcccactttgccttgcccttttcttcaaagccattgaagcccaggcccgtcaaaatgcatactccttcctgagagggaatagctcagttagggctcttgccactccccatactggcccccatggcttgtctaaataggaccttgtttcaacttttctacttactgtgaccagccaacaggtgacatatttgtacagcacaaacttgccccagatcagcatgtacatgcagcggaaccagaaggggtggttcttgagggaagaaagcacagtgcattagggatatcacatgactaggcagtttctctcagcactcttccttttcacacttgtggctggctacttcatacctgcctgagtcctgctgccagatgccctcaatagtctggcctgattgccttcacaataggcagagaggaataagcagagggcctggagaatattcattcgcctttcccttggagagcctcaagggcagcactgtatttaacttctctactgtttgccttcgttggcaaagtgtttggaatgagcatttggaatgttaagtacagaggggcccatattggattttaatttaaggagagaaacctgcccagaattactgaactgttttcaagcctttcagctgggcaggagcaaaagccagcacttccccccttcccttggtttctgaattccctagaagtgcccaaatgtatcagtcaagagaagaaaataggatggagaatcagaagctgctgtgctctgaggggtcacgtggatgtgataaggcaagctaggagcggctcctagagaaggcaacgggtgctaaatgtgcacctggcacagccctgtgcccgcgaaggttgttcagtgctggctgatgaacatgtcccagcacggctggcattgacaactcacagatctagagcaaaaccaacatgcacttgtagatgatatttcctacttctctgctatctgtagggatccttgcctgtccattttctagctctggtgcagtcatgctgctgctgctttagtagacactcacgtcatagtcttcagtgaggagatagtcttctgtgatgtgggggctgagcagtgtgtagcccactaggtagaaaaggcccagactcaggcgcttgagagcaggaatgatgctggaaaggaacgagtgaagttcctggtcacagagagcagagactattcccttcaccctctgaccttcagttatggagaggagtgtttaggggtgtggttgtctacctggaatgggatgagaagctctgctgcccaaagtgtttcctgtttcagggaaagatttctatggctggctatgaggaatggggactgcaaacctcttaagagttgtaggaaagtcagggcagcagacagtggaccagtcttgtgtttacccctcagggatgctactgatctcaaggtcttgccaggtctcacaatctccattgggactgaaaacccagtggaggtaagataataaaaataaccactttgaatctgctccttcatttcttggttgaattgatgctgaaacacaggatggacaagttctcagtgaaggaattcttctggcaattaaactttttttttttttttttttttaccattttaatttttattttctagagtcagggccttgctctgccactccggctagagtacagaggcatagtcattgctcgctgtggccttgaactcctgggctcaagcgatccccttgccttggccacctgagtagctgggactataggcatgtaccaccttgcctggataatttttttttgtagagatggggtctcactatgttgcccaggctggtcttgaactcctggcctccagtgatcctcctgccttggcctcccagagcgttggcattacaggcatgagccactgtgccctcctgcatttcctactgataaatatttttgagacaggattttgctatgttgcccagaatggagtgcagtggtgtgatcaaagctcactgcagccttgacccacctcccctggactcaagcaattctcccacttcagcctcctatgtagcttggactacagatgcatgccactatgtctgataatttttgtatttttttgtagagacagagtctctctatgttgccaggctggtctagaactcacgggctcaagtgatcctcccacctcggcctcccaaagtgctgggattatagaggtgaaaccactgtgcccagcctctatctacctacctacctatcaacctgcctacctacctatcaatcataaatatatttcatatatacatgaaaataggctttaaaggcagaaatgtgactggttcaggcaaaatcctgtggcataaatgtggatttttatgtttgtactagtgttagaatggataactggaagaaccctaaactaaaaagggcccactcctggcacagagtgcctgttacaacagtccagggcctgcatgactcaggtctctatgccagggtcatgctggagaatgcagctttcagaagagtcacttcagagtgagtgaaatacctacacaaacatctggaccaagaggggcaattacctgtttggtatctttcctggtatgtcaatcagctctccctgcaccagcttcatgtagtgattcattgagaactggggccctaccaagaaggccccatagaagtaggagaaaccagcaacttccagcagggaaggaacaccacgtatggcatatttctgttgctcagaggacaaggaattctatgccaagaagagaatgcatggttcaggatagccttgaatctccccacaagagccactttgagtgttccccacctgtgtgccccactgactggggttcttcaaatagccttctctttgggggatgacaaatagttgcttcttgtggaaatgcgtatgtgtgtgcatagctggctgttgctgctttagcaaatgccttgctggcattgatctctggactttgtgcaagagctggatcctgggcaaattagatttgttgatccttgctcagtgctatctgaaagggagattgcacaggctggggaatgagggagaggctccgctctggaatttgggttcagtcttttgttaacaacttttttcttccctttcattaagtcttgaacctctctgccgatgaatgggtacttacctgatctttccctccgtcaaagtagtcaacagccaaacctgagcagagagagaacggatgggtagggtggtgggagaggacactgaggatgtggcctgtagactgagtgcagccagaagtgtatggcggggggcggagggggggtgccgaggaagtttttagtgagatgggggagggacctacatgtaaggaaggcaggcagtgaccatcactcaccaatcagcttcaaagtcagaacacaatgtggcattgtccacttgatatcgtagttgccggtggcagtgtaatagtatccagccagaaggtaggcctaggagaggcagaagtatttattctagcatcactactatttcttctccttgctctgaaattcaatgttctctttcctttttcctttctcctcatcccatcattaaaagccttaataaattcctacaaatggaggtgctgaaaacctgtaatgggaagagcgttgctcaaggcttcttggcaaaatgagggctaaactgagatgagaatttagatgctgggaccacaggtgcatgccaccccacccggctaatttttaattttttttgtttcaccatgttgcccaggctggagggctaatttttgtattttttttgtagagatggggtttcaccatgttgcccgggttagtctcaaactcctgggctcaagcaatctgactgccttggcctcccaaggtgctgggattacaggtgtgagccactttgcctggcctaggcttaggttctttaactcattctaagttgcttttctgtcttgccttgaagtgactctgctcctggatagtgggttaaaccaaagagcctaatggcacagtatgcaaagggttagctggtggcccttccttgaggcaggcaaagagttaccattacaatctgtggatggaacacttgggcctgtgataagccacctacctgaagtcatactgctaagtgctgggagaggggttagaaattaggtctgctaatttctataccacagtcccctgcctacccctgtcccctgaaccgctgtcagctgtagcctgagctgctaagggaaagacgtttaccatctggaagcaaaaggtagtgaggacggcagtgatggtgcggcccattagtcgaaggatgaggaactgaagcacaatacacagcagggagtggtagagctggtttcctggatgcaagaagagagaatttagcctggtttttacactcccaccgtcctgagacttccaatcacaacgtaatatataaagaaaaaatgttggcatcaggatcttttttttcagaataacctcatgttttggaggagaggatggaaattatttattaaaataaaaaagattattagggtgttattttatttcttttctttttttgtttgtttttttagagatgcgacttgctctgttgtccagacttgagtgcagtagctcaatcatagctcactgcagccttgaattccgggctaccacacccagcttgttactgtatttttgaatgtctgaagtgaagaatgaatctaagtggggactgcttggctcggtcattcagttacatccacagcacagagaaactgaggattctttgttgatgaggtatggcaagggtaaccaccctcaaaatgtttttatctgacagaagaatgtacataaaagaaaaaaaggaaaagttaagctgtgttcctcttcatacaaccctctttgcaagtgggagcattataacttccctacctattagattctctcaaggaaattttgttcaagtctgttccttccaggttcccactaattgcggtgtcactgctaatttagtttactcaccaaagttaaaataagcaattgagaggcctgtaaaggtatggaagaggtggatgaggtaggtctccttgtagaaaaggtaatgccgataaaacaaagcaaaggggtaacctagatgggggaaaagataagaagagtgttatttgtgcctggtgccatcccagtttggtttggaagtttatctggcatgaaacgcagcccagagggagagagaaaaaaaaaacaacatacattatatggatggcaacagagaaggcaataacggtatccccaagaaccaaaagttttttgtaaatacaaattttgaactaaagatattaatatttgattgaggcaatataaagctgggtcctaagactaggtttcatttatagcttatgaactattgccagacattttctcttacttgaattttaaaaaatgatacaaggaagctaggcatggtggctcccatgtataatcccagcactctgggaggctgaggcaaggggattgcttgagccgaggagttcgacaccagcctgagcaacatagcgaaaccccgtctctattaaaaaacaagatacaaagatttgagcgtacccatctatgctccagaaacactcatttacactttgtgatctatcttgctagcactgtattatcagattatgaggaaaaatataaattaatatcaggctaaatactggaattgctgactgcatatatagcagttacaagttatgtggagatactcctcacagtctgtaatctgggcatcaaccaagttataaaatccatttaagtatactaaaaaaatgtcttctaaagccatgattcagagtatagtccaaaggccatgagtgaaccacagaggatcttctgatgggtcatgaactgattatacatggccaagggttgcttattgaattaaaaacggtcaataaaatttggtattcctaaactaaaattagcacattccatggctttactgcagactcaccttcagtgttctatctagaggtctggcggccatgcctggcaacatccccactgcactagtgcatatgtggaggatggggatctctcaactgctttttggaaagacattctgcctattctttcattgattattctcttgagttggtcatggtttatactttctgcaattcttgcttttatttttatttattttgagacagggtctcttgctctgtcacccaggctggagtgcagtggcacgatcatcgctcactgcagccttgacctcctgggctcaagtgatcctccaacttcagcctcttgagtagctgggaccacaggtgcttgccaccatgcctggctattttgtaatttttgtggacatgagttctcactatgttgcccaggctggccttgacctcctgggctcaaggaatcttcctgccttggcctcccaaagtgttgggattacaggcgtgagtcactgtgcctgatgaattgctgcgattcttgcttttaaattatgtaactgcagtttttatcatgggcaatacagtttactgtgagtttgcttaactctaaaacgcttagaatagtatcatacagaaataaattgctcaattatttgttaaataagtaaatgcacacaatcatgttatatgttggtttctgtccttctagtcatttttcccccatacattaaaaaaaaaaaaaaaaaaaaggctgggcgcggtggctcatgcctgtaatcccagcactatgggaggctgagacgggcggatcatgaggacaggagatcgagactatcctggctaacacggtgaaaccccgtctctactaaaaatacaaaaaaaaaaattagccgggtgtggtggcgggcgcctatagtcccagctactagggaggctgaggcaggagaatggcatgaacacgggaggcggagcttgcagtgagctgagatggcaccactgcactccagcctgggcgacagagcgagattccgtctcaaaaaaccaaaataaaacaaaacaaaaaactgtactggctggtgcagtggctcacgcctgtaaaccaaggcactttgggaggctgaggtgggtggatcacttgagatccggagtttgagaccatactggccaacatggtgaaaccccatctctaccaaaaatataaaaaattagctgggtgtggtggcgggtgcctgtaatcccagctactcgggaggctgaggcaggagaatcacttgaacctgggaggcagagtttgcagtgagctgagatcgtgccattgcactccagcttgggcaacagagcgagactctgtctcaaaacaaacaaacaaacaaatgccatttgatcttcctggtgccaggatcaactggtgtttttttttttttttgagatggagtttagctgtttttacccaggctggagagtgcaatggcacgatcttggcagctcactgcaacctccggcccctaggttcaagcgattctcctgcttcagcctcccaagtagctgggattacaggtgcccgccaccatgcccagtgaatttttgtatttttagtagagacggtatttcaccatgttggccaggctggtctcgaactcctgacctcaggtgatccacctgccttggcctcccaaagtgctaggattacaggcgtgagccaccacgcccggccaactggtgtttttttttttaattgctgttcccataataggctaggctcttaaatttatagcttcatgcaagtatagttgacccttgatcaacacaattttgaacagcaagggtccccttagacttccctctgcctctgccactgctgagatggcaaccctttctctttctcctcctccttgcctgctcaacctgaagatcatgaggaggaagacctttatgctgatccacttccactgaatgaagagtaaacatattttttcttgcttatgattctcttaataacattttcttttctatagtttactttatggtaagaaatacatatataacacaaatgacatacaaaatatatgttaatcaacttgtttatgctattggtaagtcttctattagtagttaagtttttggagagtcaaaagttatatgtggccgggtgtggtggctcatgcctgtaatctcagcactttgggaggctgaagcaggtggatcacgaggtcaggaaatcgagaccatcctggctaacatggtgaaattccgtctctactaaaatacaaaaaattagctgggcatggtggcacacacctgtagtcccagctactcaggaggctgaggcaggggaatcgcttgaacctgggaggcagaggttgcagtgagcagagattgcagtgagcagagagagccactgcactccagcctggtgacagagtgagactctgtctcaaaaaaaaaaaaaaaaaaaaaaaaagttacacctgtcggccgggtgcggcagctcacacctgtaatcccctactttgggaggcttaggcgggtgggtcgcctgagatcaggagtttgagacgagcctggccaacatggtgaaaccccatctctactaaaaatacaaaaattagttaggcgtggtgcaggcacctgtaatcccacctacttgggaagctgaggcaggagaattgcttgaacccaggaggcggaggtggcagtgagctgagatcacgccattgcactccagcttgggcaacgagcaagattctgtctcaaaaaaaaaagaaaaaaaagttttatgaggatttttgactgtacaaggggtgggatcccataggacctgcgctgttcaaggctcaactgtaattaattctacagatatcttatggattactggctcatgtattcattcaccaagtgtttagtaaatgcctgctatatgccaggtattctgtttatgaagcacgtaattgggtaggaggtggcatgtgatggttcgttttctagctggctgagatgatgggatataggatcactagctctagggaggtggagacatctatgaccctttcaggtagatcaatgagcaaggaaataggatcaagtctcatatatttcacatgggcagaaatttggcagagacagaacaccaggttagcagcaaatattgctaagaactagagccaggaactagaaagtatatagactaaatgtcaatgccttcaatcttttgctttatttttacttttgttttagtaacggggtataaataaaaaaatataaaacagtagataattatctagagcactcataaataagttctaggtagctaagtttctctctttaagcatgaaaacccttaaccatttggaatgctcgaaattaaaaaacaccacacatattactctgcctctttaagttgaatctaatttaacattttctaggtgtctggatcgtatctattccagagtaaagtcatgatggctttatgacgttctgaggtatgtgaaattgtctgcctgactctaacaaggcctacactgtcctgagttctgagttcttgtgtccacttcttatagcctgtctgtccctttccttgctactctgggatcaacagtcacctcttgaacttttggggtgcttggcaatagttcctctccctactcctaatttacggcaggccttagaaaccataaccttattttaaaggtgtaaaaaaaaaaagatttaagacaaaagcaaggggcttgggtgctttccttatggacttaggcctggtaacatctgttctggccacttagaggccttgtgtgctatttcttgttttcaggtgcgttttgcaggaggggacgttgttgagttccaaacaggtgaggtattgcacactagcaaacacatgagaagaaggcggaggaattgggagaaaaataaaaagaatgcagcaggccaggttagcaggaacgttaagacggtgacggagaacagcaaagcctggaagcaagccgccgtggagaaggaagaactgtgctgaggtgagttgctgtgacaacccaggctgattttgagtatgtaaacaccaaaccttgttcttggctgccgctcagctcagcgggctttggagcctggctgcccagccaccacttcagggatgtgctgtttttagggagggtgtgaccctacaagatgtttctgagccttaatgcttttttgtgggagccaatgcttaatatggtggctagagttacctgaagaatctataaaaaatgaccgaagccccttctgctcaccctcccactcatcagagttggcttccgtgggtctgagtgggaaggacttccacttttaacagcatgagacacggttctgacagccccactaacatccgaatgcaggccgcagtgctcagtcctgaggataaaattctcagcttggagattggggttgatgccttacctttattagcaccagatgggtttgtaacaacccagaggtttgtaagaacttgttggccgggcgccgtggctcacgcctgtaatcccagcactttgggaggccgaggcaggcggatcacctgaggtcaggagtttgagactagcctcaacatggagaaaccctgtctctactaaaaaaaatacaaaattagctgggcgtggtagtgcatgcctgtaatcccagctactcgggaggctgaggcagaattgcttgaacctgggaggtggaggttgtggtgagccgagatcacgccattgcactccagcctggcaacaagagcgaaactccatctcaaaaaaaaaaaaagaacttgtttggcagcactgtaactgttccttctttttgattgtttgtttaaagcagggacttcagaaatttattagcaggcgaaggatgatgacctttagtacactccaaacctgaggatcttctactagaatgggacctttataatccctaatgctagggacattcaaaatgcgtgttttttttttttttttttgagacagagtctctgtcgcccaggctggagtgcagtggtgcaatctcggctcactgcaagctccgcctcccgggttcacgccattctcctgcctcagcctctccgagtagctgggactacaggcgcccgccatcacgcccagctaattttttgtatttttagtagagacagggtttcaccgtggtctcgatctcctgacctcgtgatccgcccgcctcggcctcccaaagtgctgggattacaagcgtgagtcaccgtgcccggccaatgctgtggtctttcaagcagctgctgggatacatttaatttgtacaagccctcttcaggggttgtagtcaagcacagggagtggatagaactgtattattcagtctctggacttcactcagttccaagtgctgtttgtgtcagggaccagatctatcacaacgtgcattgttagcgggaacgttttcttatttcctgtacaatagttgtgagattacttattaatcctaaagttgtgaggtttcatctgaagaaacagaaatggactgtttccattaagtctggtaaatttggctgggagtggtggctcacacctgtaatcccagtgctttgggaggctgagacgggagaatcactggaacccaggagtttgagaccagcctgggcaacatagcaagactctgtctctacaaaaaataaaaaaaatagttgggtggggtgggtggtgcgtgcctgtagtcccagctacttgagaggctgaggcaggaggatcacctgagtctggggagacagaagctacaatgagctacgatgatgccactgcactccagcctgggcaacaaagttgttttttttgagaccctgtctcaaaaataaataaataaataaataaaaataaaaaaaatataagcggggcacggtggctcatgcctgtaatcccagcacttcgggaggctgaggcgggcggatcacgaggtcaggagatcgagaccatcctggttaacatggtgaaaccctgtctctactaaaaatacaaaaaattagccgggtgtggtggcgggcacctgtagccccagctactcgggaggctgaggcaggagaatggtgtgaacctgggaggcagagcttgcagtgagccgagattgtgccactgcactccagcctgggcgacacagtgagactccgcctcaaaaagaaaattaaaataaaataaataaataaataaataaataaataaataaataaattgagcaccccaaacaacttttgttaatgtgggaactatatatcaatgtctactgtgttagaaaataagactaaaaactgggtgtggtggctcactcctgtaatcccaatgctttgggaggccgaggtgggtggatcacttgaggtcaggagtttgagaccatcctggccaacatggtgaaaccctactaaaaatacaaaaaccagccagacatggtggcaggcgcctgtgatcccagctacttgggaggctgaggcaggagaatcgcttgaacccaggaggtgggggttgtagtgagctgagatcacgccactgtgctccagactaggcaacagagcgagactccaaatcaaaaaaaaaaaaaaaaggaagaaaataaaactaaaaaaaaagtaaaagatatgattaattcagtaaaaatattaacagtaaaactactacacattatattaatataaataacatactttaaatgtaaaccactatatttcccaaaacaatcaaagaaataaagccatctaatgagaagaatgccactgttttacattttcataaatttatggcctctgtctgacttaatagaagatgactggattctcaaatctgcttctgcatttaatctgttgtaatatgttagtttggttaaaatatacaaagaaaatctggctttacacagacagagaaagtatctgcattttcagataattttggatattctttagcgctacatcaaaacttgacaagtagtagtttcttaacagttaggaacttttgttataataaaacccattggcttctcttgcactttgaatggatattttaccatgcatgactttgtaacatcacacatagatcactgcaaaatactggttccctgttgttaggcagatcttctaaatactgacatatttcattagaatacatatcaaaaaatcatattccttaaatttcaccattgatttcagcagaaaagtctgtatatattgaaaagtggtcaagctcatgggagtggatacaagttttccaaaattctaatttttacttgaaagtgtaaattttatcactggctacaaatattgtcatttgtttaccttgaagtgacaggctcacttcatacagtttcaagagactgtctgccagatgcctaagtctaaaaccatagtttgtctatcattctttcaagtaaaaatggtggtcggtgaaaaaagaagctgctaaatcaatatgcaacttgaataatcgcccaaatgcttttccttgtgacaaccaccgtactctaccagtgtgcagcagaggcggtttatgcatatttcccatttcttcaaacaagtttaaaaagatgtactcaggatcaggcatggtggcccacacctcccagcactctgggaggccaagacgggtagatcactttaggtcaggagttccagaccagcctggccaacatggcgaaaccccgtctctactaaaaatacaaaaattagctgggtgtggtggtgcataccagttaaaaaaaaaagatttattcaaggactgacatttgatacaattaacaatatttagcctgggcgacagagtgaaaccccatctctaaaaacaaaacaaaacaaaacaaaaacaaaaattagccaggtgtggtggtgcacacctgtagcctcagctactcaggaggctgaggtagcatcacctgagcccaggaagttgaggcggcagtgagctgtgatgcccccaccgcactctagcctgggtaagaccctgcctcaaaaaaaaaaaacaaaaaaaatttaccacttcatcaacgattcttaagtgaaactggctctgttttgattgtgagtgcatggcagtaaagaatgcagtgaccactggtacagtttggtgtcaccgtcctgatttgtgctaaggcgccagcagttttaccaccattttgcaacatcagtgcaagtgtcaacatagggaaaagacaaatacatcttagtagtatcatgaaaataatttttaccccaaagagattccttaaagaagtctcaggaacttttaggagtagtctatggactgcatgctgatatggaatgatttgttttaatctttcatcttctaatacccaaatccactagtctttcctttctccctggtttccttgactgccctgctgtgttttcaatctttttgaaacttctctttcactggtttcattggttttgaatacagttatctcttggtgtccatgaaggattggttctagtactcgcagcagacaccacagatgctcaagtcccttatataatatggtgtagtattgcatgtaacctatgcacatcttcacatacactttaaatcatctctggattactcataatacctaatataatgtaaatgcaatgcaaatagctgctatatagcatattgttttttatttatatttttattattgtattattatttagcttagaatccatgaatgtggaacccacaaatatggagggctgactatacacagtttcctggatttttttctactgagatataatttaccataaaattcacccttcaaagtgtaaaatgtaatgttttttagtatattcaaaaggttgtcgccgggcatggtggcttatgcctgtaatcccagcactttgggagccggaggagggcagatcacgaggtcaggagatcaagaccatcctggccaacatggtgaaaccctgtctctactaacaaaaaattagctgggcgtggtggtgcctgcctgtagtcccagctactcaggaggctgagggaggagaattgcttgaacccaggaggcagagattgcagtgagctgagattgcgccactgcactccagcctggcaacagagcgagactccatctcaaaaagaaaaaaaaaaaaggttgtgcagccatccccactatctatctaatttcagaatatcttcatcacctcaagtagaaaccccatacatgttggcagtcatttcccattctctcttaactcccagagcctggcaaccattcatctactttatgtctctatagattggcctattctaggtgtttcatataaatggcgtcaggcaatgtgtagacctttgtgtctggcttatttcacttagcatgttttcaaggttcatccatgttgtagcatgtatcagtacttcattcctgtttatggctgaataatatcccgttgtatggatactctgcattcttttttttaacatttaaaaattttttatagacaaggtctcactatgttgctcaggctggtcttgaattcctgagctcaaatgatctgtccacctcagcttcccaaagtgctaggattgcaggcatgagccactacgcccagcctggatactctgcatataatctacccattcatcagctgacaaacaactgggttgtttccactttaggaacattatgaagaatgctgctacaaacattcatgcattttgtagagacagggtctcactatgttgcctaggccggtcttgaactcctggcctcaaatgatcctcctgctttggcctcccagagtgctgcaattacaggtatgagcccatgtacaagtttttgtgtgaacatatgtttttatgttttcaattctcttgggtatatacctaggaatggatctcctggatctttttcttttttttccctttgggacagagtctctctgtgttgtccaggctgaagtgcagtggcatgatcttggctcacggcaacctccgcttcccaggttcaagtgattctcctgtctcagcctcccgagtagctgggattacaggtgtgcaccaccatgcccagctaatttttgtattttcagtagagatggggtttctccatgttggccaggctagtctcgaactcctgacctcaagtgatcgacctgccttggcgtcccaaagtgctgggattacaggcgtgagccaccgggctgttgcccacgctggagtgcagtggcatgctcacagctcactgcagcctcaactttctaggttcaagtgatcctcccacctgagcctccctagcagctgggactacaggtgtgcacaggaccggctaatttcttgtagagttggagtttcaccatgttgctcaggctggtctcgaactcctgagctcaagcaatctgcccgccttggcctcccaaagtgttgggattacaggcatcagccactgtgcttggccaatgttcactcttactttctgtgcttacttctggcatgggttggctgactacaatttgaatagacccatctttccgtttctttcaccgaaggcattttttctggctcctagatgttgctgacccccaggatccagtcttggccctccactattcttgctacactgcttctttggaaactcatctactctcaagtaacttaatataatctttatgccaaagacagatccacatctttagttctaacttctttttcagttccacatttcctacttccttgctggacagttttaatttgatatttcattaccatctcaaactctgtataactaaggcataaatttctccctaaatcagccttctctgggctttttttttttttttaaattaacagtgttaccattctccaggtcacacaacattcaaaagtgtgttttcctgccagggcatggtggctccacgtctgtaatcccagcactttgggaggccaaggcaggcggatcaccaggtcaagagttcaagaccagcctgaccaacatggtgaaaccccatctctactaaaaatacaaaaattagccgggcgtggtggtgcatgcctgtaatcccagctactcaggaggctgaggcaggagaatcgcttgaacccaggaggcggaggttgcagtgagctgagatcgtctcactgtactccagcctgggcaacagagccagactccgtctcaaaaaaaaaaaaaaagtgttttccttcttcatattggttctctgttatctagtcatgaaatcctgttgattcctcctttccagtctctctcaccatcactgtcaccatgaccatcaccactccctttttcctctgctgatttgcagttaaaacccttatggatctcacccttaaatccttgcaatggcctcctacctgatctctgcctgcaccacgtcttcccagcagtcctataccggggtaatcttccttcagctcctgctcagaaaccatcaatagctcccagctgactactcaacagagtcagcaatcctgtctgttctaccttcaaaataaatccaaaatctgaccacttctctccgcctctactgcttcccctggtctgagttgccactatctctggattattattattaatatatcattattatattcaatgtattatcattatatacttgcctcctgactgatctcaccctgcctttgcctcccttcagtctagccttaatgaagcatctagagggttctattcaacttaagtcagcaggtcactcctctgctcaaagccctctcaaggcctctattctcactcagatcaaaaggctgattgccagcacccgcaggttctgtccctctgcccgggccccactgtcctctgactcatctctcaatctggcctctacccttctgctccagccccaaagctttcccttcctggaatgttaagcaggtccagccttggtgccttcacatggtaagttccttgcctggaaggctctttgcacagataagctcaaatccttcctacacctcaggtcctttgtaaaatgtcaccataagtatcagtgaggacttccctatcttatctagaagtgtatacaacactacccctccccaccctgtaaccctcccccatcacacacttcttgttcttctttcctgctttttctatttttcttctcagtacttattaccttttgacataccatatatcttacttttcagtctttcaaagcagggattatcatctactttagtccctaccgtaccccagtgcatagtacagttcctggtacacaaaatttctcaaaaagtattagctgaatggccgaacaatgagtgaacaagtgctctgtactctaggcagtcaatacaatatttattaagcactcactatgtggttagcattgcattaggcattgggggaatatggtagaattttaagaggtgctttctattcttaaggagcaaaatcaaacaatgatgttctatgctaagggctaactgtatggaatagccaatgttgtagaggttaaagagaaatcaatctcgaccacagtggtcgggagaagtagttcttgaacagagaagagatgacggcattccaagggaggataatgtagtaaagacacagcggtaggaaggagcatggggcattcactccaagagactgggctaatttcaagggaggaaaaatattgtaacaaaatggatgggaaagtgaaaaaccaggcagagtctgaaattgataaatgggaaaaaaaaaatcaattgactaggtgtaggagaaggaaaaggacaaattaaagatgtttatgccactgatataatggtcttcaggtcttcaaacctttttgctggcatagctcctagaagaattttgaaaaactgtatatcctcctttcacattttaaagttgccatctaaaccttatgtttttatttctttatttttttattttcttgagacagtacttcactctgttgcccaggctggagtgcagcggcacaatcacagctcactgcagtttcaacttcctgggttcaagtgatcctcctgcctgagcctcccaagtagctaggactataggtatgtgccgccatgcccccaaaacaacagcaaattatgtgtgtgtgtgtgtgtgtgtgtgtgtgtgtgtgtgtgtgtgtgtgtgtttcaagacacagtctcactctgttgcccaggctggagtgcagtggtgcaatcttggcttactgcaacctctgcctcccaggttcaagcgattctcctgcctcagcctcccaggtagatgggattacaactgtgtgtcaccatgcatggctgattttcttttctttttttttttttgagatggagtttcgctcttgttgcccaggctggagtgcaatggcgtgatctcggctcaccgtaacctctgcctcctgggttcaagtgattctcctgcctcagcctcccaagtagctgggattacaggcaggcgccaccacacggggctaattttgtatttttagtagagacaggatttcaccatgttggtcaggctggtctcgaactcctgacctcaggtgatcctcctgccttagcttcccaaagtgctgggattacaggcgagagccactgcacctggccgcatggctgatttttgtatttttagtagagtagggtttcaccatgttggccaggctggtcttaaactcctgacctcaagtgatctgcctgcctcagcctcctaaagtgctgggcataagccaccatccctagtcagtgtgtgtgttttgaggcagggtcttgctctgtcgcaaaggctggagtgcaatggcacagtcatggctcactgcagccttgatctcctgggctcaagtgatcttccgacctcagacccctgagtagctgagaccacaggaatgtactaccacattcagataattttaaaattttttgtagagatggcatcttgctatattgcccaggctggtcttgaactgctgggctcaagcaatcctcctgcctcagcctcacaaagtattggcattacaggtgtgagctactatgtttggccgtgtgtgtgctttctaatgcctattgaaggtgtgttttaagtgcttatggcagatgtctgccatgcaatctaaatggcaaaccaatcagctggatcagtcttacttacaacacacctggcctgtccctcaacttttctattctttcaccaaaatggaagttccttatgttagagaacttacagagaaaaggaagacaaaggaaaataggaaggagagttaagctctgcctgacactgtctacttaagtgatgggtaactgattaggttcagtgcttagaacttcatataatgagatacaaaatctcattactgacccactctgccagctagaagagcacttgtagatcatggacatttaggtggggatatagccacctttgatcctttctgttcactagattaagccttgttgctagtacaggcaggagccaacataccttccacactccagcaatcctgtacaccttgggctgagtcatatgctgaacagttattcatgaatacagattcttacttagaactgaagaattacctgctccaaacccttcattaggtagataagagactaaggtccaaaggggataactggcatgcccaaggttaacagagcagagctcaaattagaatccacatcacctgatttccattctactattcttgccacatgccttggcacttggcagtgacctgggagtgaatcactaataaccagctgtgtgctcttttaaagctacagctctattattctttgatgtccagataacaatctatgctccagcacctgtttatagacataagcacacccatttttatgtttgcttatcctcctattgaaaaatattttaaaagttcattttaatgctaaatttaggtgtactttctttgttaatctaattcttgagcactctgcacccttcagcagttcatttctgaaagttacctccacctaaatagctcaagcattgtgacagctgtgatacaggactcatggaaactgggacaagtgatcaaaaatgtctgagggaggaacaatagaggggacattttaaaggtaagctattggatagttgttacctgtgagaaagaaagaaaaagggttaggttaagaaatgttagttttttactctctcaacccagccaaacaacctaaacttgaactgtcccaaaggcctaccaaaattctttaatttcttcacttaagctgagtgctcttaataagcaagacttctgaggtgtagtgctagtgattaatgttatacacacccgttggctgactggtgaaacctgctgcaataactaaaaattattctataaaaatgtatagacagagagaatgttaaagctaaaagaggccgttgactcatttctttgttttagtagaacaggtgcaacagattgaggcactttaagacatctaaatggctttactagcaaagataaaaatcacacttgcctgtactcagggaattttatcacattctaattctttgtaaatcagtgaatcccctggtgcaacttctagccagattatctgggctttggaatcagaattatctagtttaaaatttagctctgcagcttgggcaaattacttacattctttttttttttttttttttttgagacagagtctcgctctgttcctcaggctggagtgcagtagtgcagtcttggctcactgaaacctctgcctctcaggttcaagcaattctcctgcctcagcctcccaagtagctgggactacaggcgtgtgccaccatgcctggctaatttttgtatttttagtagagatggggtttcaccatgttggtcaggctggtcttgaactcctgacctctggtgatccgcccgcctcagactcccaaagtgctgggattataggcgtgannnnnnnnnnnnnnnnnnnnnnnnnnnnnnnnnnnnnnnnnnnnnnnnnnnnnnnnnnnnnnnnnnnnnnnnnnnnnnnnnnnnnnnnnnnnnnnnnnnnnnnnnnnnnnnnnnnnnnnnnnnnnnnnnnnnnnnnnnnnnnnnnnnnnnnnnnnnnnnnnnnnnnnnnnnnnnnnnnnnnnnnnnnnnnnnnnnnnnnnnnnnnnnnnnnnnnnnnnnnnnnnnnnnnnnnnnnnnnnnnnnnnnnnnnnnnnnnnnnnnnnnnnnnnnnnnnnnnnnnnnnnnnnnnnnnnnnnnnnnnnnnnnnnnnnnnnnnnnnnnnnnnnnnnnnnnnnnnnnnnnnnnnnnnnnnnnnnnnnnnnnnnnnnnnnnnnnnnnnnnnnnnnnnnnnnnnnnnnnnnnnnnnnnnnnnnnnnnnnnnnnnnnnnnnnnnnnnnnnnnnnnnnnnnnnnnnnnnnnnnnnnnnnnnnnnnnnnnnnnnnnnnnnnnnnnnnnnnnnnnnnnnnnnnnnnnnnnnnnnnnnnnnnnnnnnnnnnnnnnnnnnnnnnnnnnnnnnnnnnnnnnnnnnnnnnnnnnnnnnnnnnnnnnnnnnnnnnnnnnnnnnnnnnnnnnnnnnnnnnnnnnnnnnnnnnnnnnnnnnnnnnnnnnnnnnnnnnnnnnnnnnnnnnnnnnnnnnnnnnnnnnnnnnnnnnnnnnnnnnnnnnnnnnnnnnnnnnnnnnnnnnnnnnnnnnnnnnnnnnnnnnnnnnnnnnnnnnnnnnnnnnnnnnnnnnnnnnnnnnnnnnnnnnnnnnnnnnnnnnnnnnnnnnnnnnnnnnnnnnnnnnnnnnnnnnnnnnnnnnnnnnnnnnnnnnnnnnnnnnnnnnnnnnnnnnnnnnnnnnnnnnnnnnnnnnnnnnnnnnnnnnnnnnnnnnnnnnnnnnnnnnnnnnnnnnnnnnnnnnnnnnnnnnnnnnnnnnnnnnnnnnnnnnnnnnnnnnnnnnnnnnnnnnnnnnnnnnnnnnnnnnnnnnnnnnnnnnnnnnnnnnnnnnnnnnnnnnnnnnnnnnnnnnnnnnnnnnnnnnnnnnnnnnnnnnnnnnnnnnnnnnnnnnnnnnnnnnnnnnnnnnnnnnnnnnnnnnnnnnnnnnnnnnnnnnnnnnnnnnnnnnnnnnnnnnnnnnnnnnnnnnnnnnnnnnnnnnnnnnnnnnnnnnnnnnnnnnnnnnnnnnnnnnnnnnnnnnnnnnnnnnnnnnnnnnnnnnnnnnnnnnnnnnnnnnnnnnnnnnnnnnnnnnnnnnnnnnnnnnnnnnnnnnnnnnnnnnnnnnnnnnnnnnnnnnnnnnnnnnnnnnnnnnnnnnnnnnnnnnnnnnnnnnnnnnnnnnnnnnnnnnnnnnnnnnnnnnnnnnnnnnnnnnnnnnnnnnnnnnnnnnnnnnnnnnnnnnnnnnnnnnnnnnnnnnnnnnnnnnnnnnnnnnnnnnnnnnnnnnnnnnnnnnnnnnnnnnnnnnnnnnnnnnnnnnnnnnnnnnnnnnnnnnnnnnnnnnnnnnnnnnncaaaaaaaaaaaaaaaaaaagcgaaaatatttgcaaaagtagcatacatgtacttccttcaggccacttaaaatacttatgcatgtctaaatattttatataagcatacctacacctaacttcttaaaaattgagtattctttttttgagacggctgtcgcccaggctagagtgcagtggcgcgatctcggctcactgcaagctccgcctcccgggttcacgccattctcctgcctcagcctcctgggtagctgggactacaggtgcccgccaccacgcctggctaattttttgtatttttagtggagacggggtttcaccgtgttagccaggatagtctcgatctcctgacctcgtgatctgcccgcctcagcctcccaaagtgctgggattataggtgtgagccactgcgcccggccgaaaattgagtattcttttaatggattttaagatataaaatctcaggctcagaaatttgagccacctaggggtgagaaattttggcctttgcccgcttcgaactgacttaactaaattaaatctatagaaagtaaaaaataaaggtctgtgaatgtacccagtactctcaggaagaagcatatttgccatgaagctaaaaaagcttcagtttcactccccttccaaggctctggggggtggggtgggggcgggagctagcaacgtgctcacatggtcatatatttttgtaaaacttatagaagatatttttgtattctttttcttaaagaagatatccaagattgtataagcttcagatcccagaaatcctagatttaaaaaaaataatcaaccaccaccccaacaaaattaggcacatgcctgaaaattctgctgctactgccagaattctgcgggtaggggcttcatccaaggtgttcctaataataggcagagtccccagattagttccggtgaggcttttgggaggggttatttggcgcggtgttggtgttggtaggatcctggctgtgaggctgaggcaggcctgaggagggctggggctgacaggtaggcagagttggctgggatgtgaggtgcaaggggtggtacttcggaaacaaactttgaagaggagaaggggcagcaagactgtgagtctggactttgtgatacactgtcacccctagtttagtgtgcctggttagggagaatcaagcagcatggaacccctcttcctttttcactaacatttttctgtatagtggttgaaacccagtgttaagagactgcatgacattggaaaagaaggggaggagaaaaagagtccatatga

SEQ ID NO: 6481 - DNA, 405 bp, Homo sapiens
ggtgcctgctaccacatccagctaatttttgtatttttagtagagatgggttttcaccatgttggacaggctggtctcgaactcctgacctcaggtgatccacccaccttggcctcccaaagtgctgggattacaggcatgagccactgtgcccagcccaacagagtcatttttataaaggaaaccccccctccctctacccacaaacttctgtgttttacacatcaagtgagttagaggaattaggcatttctttgcttgagttcattcactgttaatcttccaaatgtgtcaccttgagaagctaaggagaggctgagtctcaggcacctgaaatgcggttgctggtcagtaagccccaacaactcattgacaaccagaggaaaaggtgccatggcctccttt

SEQ ID NO: 6482 - DNA, 1186 bp, Homo sapiens
  SITE (342): n equals a,t,g, or c
  SITE (343): n equals a,t,g, or c
  SITE (344): n equals a,t,g, or c
  SITE (345): n equals a,t,g, or c
  SITE (346): n equals a,t,g, or c
  SITE (347): n equals a,t,g, or c
  SITE (348): n equals a,t,g, or c
  SITE (349): n equals a,t,g, or c
  SITE (350): n equals a,t,g, or c
  SITE (351): n equals a,t,g, or c
  SITE (352): n equals a,t,g, or c
  SITE (353): n equals a,t,g, or c
  SITE (354): n equals a,t,g, or c
  SITE (355): n equals a,t,g, or c
  SITE (356): n equals a,t,g, or c
  SITE (357): n equals a,t,g, or c
  SITE (358): n equals a,t,g, or c
  SITE (359): n equals a,t,g, or c
  SITE (360): n equals a,t,g, or c
  SITE (361): n equals a,t,g, or c
  SITE (362): n equals a,t,g, or c
  SITE (363): n equals a,t,g, or c
  SITE (364): n equals a,t,g, or c
  SITE (365): n equals a,t,g, or c
  SITE (366): n equals a,t,g, or c
  SITE (367): n equals a,t,g, or c
  SITE (368): n equals a,t,g, or c
  SITE (369): n equals a,t,g, or c
  SITE (370): n equals a,t,g, or c
  SITE (371): n equals a,t,g, or c
  SITE (372): n equals a,t,g, or c
  SITE (373): n equals a,t,g, or c
  SITE (374): n equals a,t,g, or c
  SITE (375): n equals a,t,g, or c
  SITE (376): n equals a,t,g, or c
  SITE (377): n equals a,t,g, or c
  SITE (378): n equals a,t,g, or c
  SITE (379): n equals a,t,g, or c
  SITE (380): n equals a,t,g, or c
  SITE (381): n equals a,t,g, or c
  SITE (382): n equals a,t,g, or c
  SITE (383): n equals a,t,g, or c
  SITE (384): n equals a,t,g, or c
  SITE (385): n equals a,t,g, or c
  SITE (386): n equals a,t,g, or c
  SITE (387): n equals a,t,g, or c
  SITE (388): n equals a,t,g, or c
  SITE (389): n equals a,t,g, or c
  SITE (390): n equals a,t,g, or c
  SITE (391): n equals a,t,g, or c
  SITE (392): n equals a,t,g, or c
  SITE (393): n equals a,t,g, or c
  SITE (394): n equals a,t,g, or c
  SITE (395): n equals a,t,g, or c
  SITE (396): n equals a,t,g, or c
  SITE (397): n equals a,t,g, or c
  SITE (398): n equals a,t,g, or c
  SITE (399): n equals a,t,g, or c
  SITE (400): n equals a,t,g, or c
  SITE (401): n equals a,t,g, or c
  SITE (402): n equals a,t,g, or c
  SITE (403): n equals a,t,g, or c
  SITE (404): n equals a,t,g, or c
  SITE (405): n equals a,t,g, or c
  SITE (406): n equals a,t,g, or c
  SITE (407): n equals a,t,g, or c
  SITE (408): n equals a,t,g, or c
  SITE (409): n equals a,t,g, or c
  SITE (410): n equals a,t,g, or c
  SITE (411): n equals a,t,g, or c
  SITE (412): n equals a,t,g, or c
  SITE (413): n equals a,t,g, or c
  SITE (414): n equals a,t,g, or c
  SITE (415): n equals a,t,g, or c
  SITE (416): n equals a,t,g, or c
  SITE (417): n equals a,t,g, or c
  SITE (418): n equals a,t,g, or c
  SITE (419): n equals a,t,g, or c
  SITE (420): n equals a,t,g, or c
  SITE (421): n equals a,t,g, or c
  SITE (422): n equals a,t,g, or c
  SITE (423): n equals a,t,g, or c
  SITE (424): n equals a,t,g, or c
  SITE (425): n equals a,t,g, or c
  SITE (426): n equals a,t,g, or c
  SITE (427): n equals a,t,g, or c
  SITE (428): n equals a,t,g, or c
  SITE (429): n equals a,t,g, or c
  SITE (430): n equals a,t,g, or c
  SITE (431): n equals a,t,g, or c
  SITE (432): n equals a,t,g, or c
  SITE (433): n equals a,t,g, or c
  SITE (434): n equals a,t,g, or c
  SITE (435): n equals a,t,g, or c
  SITE (436): n equals a,t,g, or c
  SITE (437): n equals a,t,g, or c
  SITE (438): n equals a,t,g, or c
  SITE (439): n equals a,t,g, or c
  SITE (440): n equals a,t,g, or c
  SITE (441): n equals a,t,g, or c
  SITE (442): n equals a,t,g, or c
  SITE (443): n equals a,t,g, or c
  SITE (444): n equals a,t,g, or c
  SITE (445): n equals a,t,g, or c
  SITE (446): n equals a,t,g, or c
  SITE (447): n equals a,t,g, or c
  SITE (448): n equals a,t,g, or c
  SITE (449): n equals a,t,g, or c
  SITE (450): n equals a,t,g, or c
  SITE (451): n equals a,t,g, or c
  SITE (452): n equals a,t,g, or c
  SITE (453): n equals a,t,g, or c
  SITE (454): n equals a,t,g, or c
  SITE (455): n equals a,t,g, or c
  SITE (456): n equals a,t,g, or c
  SITE (457): n equals a,t,g, or c
  SITE (458): n equals a,t,g, or c
  SITE (459): n equals a,t,g, or c
  SITE (460): n equals a,t,g, or c
  SITE (461): n equals a,t,g, or c
  SITE (462): n equals a,t,g, or c
  SITE (463): n equals a,t,g, or c
  SITE (464): n equals a,t,g, or c
  SITE (465): n equals a,t,g, or c
  SITE (466): n equals a,t,g, or c
  SITE (467): n equals a,t,g, or c
  SITE (468): n equals a,t,g, or c
  SITE (469): n equals a,t,g, or c
  SITE (470): n equals a,t,g, or c
  SITE (471): n equals a,t,g, or c
  SITE (472): n equals a,t,g, or c
  SITE (473): n equals a,t,g, or c
  SITE (474): n equals a,t,g, or c
  SITE (475): n equals a,t,g, or c
  SITE (476): n equals a,t,g, or c
  SITE (477): n equals a,t,g, or c
  SITE (478): n equals a,t,g, or c
  SITE (479): n equals a,t,g, or c
  SITE (480): n equals a,t,g, or c
  SITE (481): n equals a,t,g, or c
  SITE (482): n equals a,t,g, or c
  SITE (483): n equals a,t,g, or c
  SITE (484): n equals a,t,g, or c
  SITE (485): n equals a,t,g, or c
  SITE (486): n equals a,t,g, or c
  SITE (487): n equals a,t,g, or c
  SITE (488): n equals a,t,g, or c
  SITE (489): n equals a,t,g, or c
  SITE (490): n equals a,t,g, or c
  SITE (491): n equals a,t,g, or c
  SITE (492): n equals a,t,g, or c
  SITE (493): n equals a,t,g, or c
  SITE (494): n equals a,t,g, or c
  SITE (495): n equals a,t,g, or c
  SITE (496): n equals a,t,g, or c
  SITE (497): n equals a,t,g, or c
  SITE (498): n equals a,t,g, or c
  SITE (499): n equals a,t,g, or c
  SITE (500): n equals a,t,g, or c
  SITE (501): n equals a,t,g, or c
  SITE (502): n equals a,t,g, or c
  SITE (503): n equals a,t,g, or c
  SITE (504): n equals a,t,g, or c
  SITE (505): n equals a,t,g, or c
  SITE (506): n equals a,t,g, or c
  SITE (507): n equals a,t,g, or c
  SITE (508): n equals a,t,g, or c
  SITE (509): n equals a,t,g, or c
  SITE (510): n equals a,t,g, or c
  SITE (511): n equals a,t,g, or c
  SITE (512): n equals a,t,g, or c
  SITE (513): n equals a,t,g, or c
  SITE (514): n equals a,t,g, or c
  SITE (515): n equals a,t,g, or c
  SITE (516): n equals a,t,g, or c
  SITE (517): n equals a,t,g, or c
  SITE (518): n equals a,t,g, or c
  SITE (519): n equals a,t,g, or c
  SITE (520): n equals a,t,g, or c
  SITE (521): n equals a,t,g, or c
  SITE (522): n equals a,t,g, or c
  SITE (523): n equals a,t,g, or c
  SITE (524): n equals a,t,g, or c
  SITE (525): n equals a,t,g, or c
  SITE (526): n equals a,t,g, or c
  SITE (527): n equals a,t,g, or c
  SITE (528): n equals a,t,g, or c
  SITE (529): n equals a,t,g, or c
  SITE (530): n equals a,t,g, or c
  SITE (531): n equals a,t,g, or c
  SITE (532): n equals a,t,g, or c
  SITE (533): n equals a,t,g, or c
  SITE (534): n equals a,t,g, or c
  SITE (535): n equals a,t,g, or c
  SITE (536): n equals a,t,g, or c
  SITE (537): n equals a,t,g, or c
  SITE (538): n equals a,t,g, or c
  SITE (539): n equals a,t,g, or c
  SITE (540): n equals a,t,g, or c
  SITE (541): n equals a,t,g, or c
  SITE (542): n equals a,t,g, or c
  SITE (543): n equals a,t,g, or c
  SITE (544): n equals a,t,g, or c
  SITE (545): n equals a,t,g, or c
  SITE (546): n equals a,t,g, or c
  SITE (547): n equals a,t,g, or c
  SITE (548): n equals a,t,g, or c
  SITE (549): n equals a,t,g, or c
  SITE (550): n equals a,t,g, or c
  SITE (551): n equals a,t,g, or c
  SITE (552): n equals a,t,g, or c
  SITE (553): n equals a,t,g, or c
  SITE (554): n equals a,t,g, or c
  SITE (555): n equals a,t,g, or c
  SITE (556): n equals a,t,g, or c
  SITE (557): n equals a,t,g, or c
  SITE (558): n equals a,t,g, or c
  SITE (559): n equals a,t,g, or c
  SITE (560): n equals a,t,g, or c
  SITE (561): n equals a,t,g, or c
  SITE (562): n equals a,t,g, or c
  SITE (563): n equals a,t,g, or c
  SITE (564): n equals a,t,g, or c
  SITE (565): n equals a,t,g, or c
  SITE (566): n equals a,t,g, or c
  SITE (567): n equals a,t,g, or c
  SITE (568): n equals a,t,g, or c
  SITE (569): n equals a,t,g, or c
  SITE (570): n equals a,t,g, or c
  SITE (571): n equals a,t,g, or c
  SITE (572): n equals a,t,g, or c
  SITE (573): n equals a,t,g, or c
  SITE (574): n equals a,t,g, or c
  SITE (575): n equals a,t,g, or c
  SITE (576): n equals a,t,g, or c
  SITE (577): n equals a,t,g, or c
  SITE (578): n equals a,t,g, or c
  SITE (579): n equals a,t,g, or c
  SITE (580): n equals a,t,g, or c
  SITE (581): n equals a,t,g, or c
  SITE (582): n equals a,t,g, or c
  SITE (583): n equals a,t,g, or c
  SITE (584): n equals a,t,g, or c
  SITE (585): n equals a,t,g, or c
  SITE (586): n equals a,t,g, or c
  SITE (587): n equals a,t,g, or c
  SITE (588): n equals a,t,g, or c
  SITE (589): n equals a,t,g, or c
  SITE (590): n equals a,t,g, or c
  SITE (591): n equals a,t,g, or c
  SITE (592): n equals a,t,g, or c
  SITE (593): n equals a,t,g, or c
  SITE (594): n equals a,t,g, or c
  SITE (595): n equals a,t,g, or c
  SITE (596): n equals a,t,g, or c
  SITE (597): n equals a,t,g, or c
  SITE (598): n equals a,t,g, or c
  SITE (599): n equals a,t,g, or c
  SITE (600): n equals a,t,g, or c
  SITE (601): n equals a,t,g, or c
  SITE (602): n equals a,t,g, or c
  SITE (603): n equals a,t,g, or c
  SITE (604): n equals a,t,g, or c
  SITE (605): n equals a,t,g, or c
  SITE (606): n equals a,t,g, or c
  SITE (607): n equals a,t,g, or c
  SITE (608): n equals a,t,g, or c
  SITE (609): n equals a,t,g, or c
  SITE (610): n equals a,t,g, or c
  SITE (611): n equals a,t,g, or c
  SITE (612): n equals a,t,g, or c
  SITE (613): n equals a,t,g, or c
  SITE (614): n equals a,t,g, or c
  SITE (615): n equals a,t,g, or c
  SITE (616): n equals a,t,g, or c
  SITE (617): n equals a,t,g, or c
  SITE (618): n equals a,t,g, or c
  SITE (619): n equals a,t,g, or c
  SITE (620): n equals a,t,g, or c
  SITE (621): n equals a,t,g, or c
  SITE (622): n equals a,t,g, or c
  SITE (623): n equals a,t,g, or c
  SITE (624): n equals a,t,g, or c
  SITE (625): n equals a,t,g, or c
  SITE (626): n equals a,t,g, or c
  SITE (627): n equals a,t,g, or c
  SITE (628): n equals a,t,g, or c
  SITE (629): n equals a,t,g, or c
  SITE (630): n equals a,t,g, or c
  SITE (631): n equals a,t,g, or c
  SITE (632): n equals a,t,g, or c
  SITE (633): n equals a,t,g, or c
  SITE (634): n equals a,t,g, or c
  SITE (635): n equals a,t,g, or c
  SITE (636): n equals a,t,g, or c
  SITE (637): n equals a,t,g, or c
  SITE (638): n equals a,t,g, or c
  SITE (639): n equals a,t,g, or c
  SITE (640): n equals a,t,g, or c
  SITE (641): n equals a,t,g, or c
  SITE (642): n equals a,t,g, or c
  SITE (643): n equals a,t,g, or c
  SITE (644): n equals a,t,g, or c
  SITE (645): n equals a,t,g, or c
  SITE (646): n equals a,t,g, or c
  SITE (647): n equals a,t,g, or c
  SITE (648): n equals a,t,g, or c
  SITE (649): n equals a,t,g, or c
  SITE (650): n equals a,t,g, or c
  SITE (651): n equals a,t,g, or c
  SITE (652): n equals a,t,g, or c
  SITE (653): n equals a,t,g, or c
  SITE (654): n equals a,t,g, or c
  SITE (655): n equals a,t,g, or c
  SITE (656): n equals a,t,g, or c
  SITE (657): n equals a,t,g, or c
  SITE (658): n equals a,t,g, or c
  SITE (659): n equals a,t,g, or c
  SITE (660): n equals a,t,g, or c
  SITE (661): n equals a,t,g, or c
  SITE (662): n equals a,t,g, or c
  SITE (663): n equals a,t,g, or c
  SITE (664): n equals a,t,g, or c
  SITE (665): n equals a,t,g, or c
  SITE (666): n equals a,t,g, or c
  SITE (667): n equals a,t,g, or c
  SITE (668): n equals a,t,g, or c
  SITE (669): n equals a,t,g, or c
  SITE (670): n equals a,t,g, or c
  SITE (671): n equals a,t,g, or c
  SITE (672): n equals a,t,g, or c
  SITE (673): n equals a,t,g, or c
  SITE (674): n equals a,t,g, or c
  SITE (675): n equals a,t,g, or c
  SITE (676): n equals a,t,g, or c
  SITE (677): n equals a,t,g, or c
  SITE (678): n equals a,t,g, or c
  SITE (679): n equals a,t,g, or c
  SITE (680): n equals a,t,g, or c
  SITE (681): n equals a,t,g, or c
  SITE (682): n equals a,t,g, or c
  SITE (683): n equals a,t,g, or c
  SITE (684): n equals a,t,g, or c
  SITE (685): n equals a,t,g, or c
  SITE (686): n equals a,t,g, or c
  SITE (687): n equals a,t,g, or c
  SITE (688): n equals a,t,g, or c
  SITE (689): n equals a,t,g, or c
  SITE (690): n equals a,t,g, or c
  SITE (691): n equals a,t,g, or c
  SITE (692): n equals a,t,g, or c
  SITE (693): n equals a,t,g, or c
  SITE (694): n equals a,t,g, or c
  SITE (695): n equals a,t,g, or c
  SITE (696): n equals a,t,g, or c
  SITE (697): n equals a,t,g, or c
  SITE (698): n equals a,t,g, or c
  SITE (699): n equals a,t,g, or c
  SITE (700): n equals a,t,g, or c
  SITE (701): n equals a,t,g, or c
  SITE (702): n equals a,t,g, or c
  SITE (703): n equals a,t,g, or c
  SITE (704): n equals a,t,g, or c
  SITE (705): n equals a,t,g, or c
  SITE (706): n equals a,t,g, or c
  SITE (707): n equals a,t,g, or c
  SITE (708): n equals a,t,g, or c
  SITE (709): n equals a,t,g, or c
  SITE (710): n equals a,t,g, or c
  SITE (711): n equals a,t,g, or c
  SITE (712): n equals a,t,g, or c
  SITE (713): n equals a,t,g, or c
  SITE (714): n equals a,t,g, or c
  SITE (715): n equals a,t,g, or c
  SITE (716): n equals a,t,g, or c
  SITE (717): n equals a,t,g, or c
  SITE (718): n equals a,t,g, or c
  SITE (719): n equals a,t,g, or c
  SITE (720): n equals a,t,g, or c
  SITE (721): n equals a,t,g, or c
  SITE (722): n equals a,t,g, or c
  SITE (723): n equals a,t,g, or c
  SITE (724): n equals a,t,g, or c
  SITE (725): n equals a,t,g, or c
  SITE (726): n equals a,t,g, or c
  SITE (727): n equals a,t,g, or c
  SITE (728): n equals a,t,g, or c
  SITE (729): n equals a,t,g, or c
  SITE (730): n equals a,t,g, or c
  SITE (731): n equals a,t,g, or c
  SITE (732): n equals a,t,g, or c
  SITE (733): n equals a,t,g, or c
  SITE (734): n equals a,t,g, or c
  SITE (735): n equals a,t,g, or c
  SITE (736): n equals a,t,g, or c
  SITE (737): n equals a,t,g, or c
  SITE (738): n equals a,t,g, or c
  SITE (739): n equals a,t,g, or c
  SITE (740): n equals a,t,g, or c
  SITE (741): n equals a,t,g, or c
  SITE (742): n equals a,t,g, or c
  SITE (743): n equals a,t,g, or c
  SITE (744): n equals a,t,g, or c
  SITE (745): n equals a,t,g, or c
  SITE (746): n equals a,t,g, or c
  SITE (747): n equals a,t,g, or c
  SITE (748): n equals a,t,g, or c
  SITE (749): n equals a,t,g, or c
  SITE (750): n equals a,t,g, or c
  SITE (751): n equals a,t,g, or c
  SITE (752): n equals a,t,g, or c
  SITE (753): n equals a,t,g, or c
  SITE (754): n equals a,t,g, or c
  SITE (755): n equals a,t,g, or c
  SITE (756): n equals a,t,g, or c
  SITE (757): n equals a,t,g, or c
  SITE (758): n equals a,t,g, or c
  SITE (759): n equals a,t,g, or c
  SITE (760): n equals a,t,g, or c
  SITE (761): n equals a,t,g, or c
  SITE (762): n equals a,t,g, or c
  SITE (763): n equals a,t,g, or c
  SITE (764): n equals a,t,g, or c
  SITE (765): n equals a,t,g, or c
  SITE (766): n equals a,t,g, or c
  SITE (767): n equals a,t,g, or c
  SITE (768): n equals a,t,g, or c
  SITE (769): n equals a,t,g, or c
  SITE (770): n equals a,t,g, or c
  SITE (771): n equals a,t,g, or c
  SITE (772): n equals a,t,g, or c
  SITE (773): n equals a,t,g, or c
  SITE (774): n equals a,t,g, or c
  SITE (775): n equals a,t,g, or c
  SITE (776): n equals a,t,g, or c
  SITE (777): n equals a,t,g, or c
  SITE (778): n equals a,t,g, or c
  SITE (779): n equals a,t,g, or c
  SITE (780): n equals a,t,g, or c
  SITE (781): n equals a,t,g, or c
  SITE (782): n equals a,t,g, or c
  SITE (783): n equals a,t,g, or c
  SITE (784): n equals a,t,g, or c
  SITE (785): n equals a,t,g, or c
  SITE (786): n equals a,t,g, or c
  SITE (787): n equals a,t,g, or c
  SITE (788): n equals a,t,g, or c
  SITE (789): n equals a,t,g, or c
  SITE (790): n equals a,t,g, or c
  SITE (791): n equals a,t,g, or c
  SITE (792): n equals a,t,g, or c
  SITE (793): n equals a,t,g, or c
  SITE (794): n equals a,t,g, or c
  SITE (795): n equals a,t,g, or c
  SITE (796): n equals a,t,g, or c
  SITE (797): n equals a,t,g, or c
  SITE (798): n equals a,t,g, or c
  SITE (799): n equals a,t,g, or c
  SITE (800): n equals a,t,g, or c
  SITE (801): n equals a,t,g, or c
  SITE (802): n equals a,t,g, or c
  SITE (803): n equals a,t,g, or c
  SITE (804): n equals a,t,g, or c
  SITE (805): n equals a,t,g, or c
  SITE (806): n equals a,t,g, or c
  SITE (807): n equals a,t,g, or c
  SITE (808): n equals a,t,g, or c
  SITE (809): n equals a,t,g, or c
  SITE (810): n equals a,t,g, or c
  SITE (811): n equals a,t,g, or c
  SITE (812): n equals a,t,g, or c
  SITE (813): n equals a,t,g, or c
  SITE (814): n equals a,t,g, or c
  SITE (815): n equals a,t,g, or c
  SITE (816): n equals a,t,g, or c
  SITE (817): n equals a,t,g, or c
  SITE (818): n equals a,t,g, or c
  SITE (819): n equals a,t,g, or c
  SITE (820): n equals a,t,g, or c
  SITE (821): n equals a,t,g, or c
  SITE (822): n equals a,t,g, or c
  SITE (823): n equals a,t,g, or c
  SITE (824): n equals a,t,g, or c
  SITE (825): n equals a,t,g, or c
  SITE (826): n equals a,t,g, or c
  SITE (827): n equals a,t,g, or c
  SITE (828): n equals a,t,g, or c
  SITE (829): n equals a,t,g, or c
  SITE (830): n equals a,t,g, or c
  SITE (831): n equals a,t,g, or c
  SITE (832): n equals a,t,g, or c
  SITE (833): n equals a,t,g, or c
  SITE (834): n equals a,t,g, or c
  SITE (835): n equals a,t,g, or c
  SITE (836): n equals a,t,g, or c
  SITE (837): n equals a,t,g, or c
  SITE (838): n equals a,t,g, or c
  SITE (839): n equals a,t,g, or c
  SITE (840): n equals a,t,g, or c
  SITE (841): n equals a,t,g, or c
  SITE (842): n equals a,t,g, or c
  SITE (843): n equals a,t,g, or c
  SITE (844): n equals a,t,g, or c
  SITE (845): n equals a,t,g, or c
  SITE (846): n equals a,t,g, or c
  SITE (847): n equals a,t,g, or c
  SITE (848): n equals a,t,g, or c
  SITE (849): n equals a,t,g, or c
  SITE (850): n equals a,t,g, or c
  SITE (851): n equals a,t,g, or c
  SITE (852): n equals a,t,g, or c
  SITE (853): n equals a,t,g, or c
  SITE (854): n equals a,t,g, or c
  SITE (855): n equals a,t,g, or c
  SITE (856): n equals a,t,g, or c
  SITE (857): n equals a,t,g, or c
  SITE (858): n equals a,t,g, or c
  SITE (859): n equals a,t,g, or c
  SITE (860): n equals a,t,g, or c
  SITE (861): n equals a,t,g, or c
  SITE (862): n equals a,t,g, or c
  SITE (863): n equals a,t,g, or c
  SITE (864): n equals a,t,g, or c
  SITE (865): n equals a,t,g, or c
  SITE (866): n equals a,t,g, or c
  SITE (867): n equals a,t,g, or c
  SITE (868): n equals a,t,g, or c
  SITE (869): n equals a,t,g, or c
  SITE (870): n equals a,t,g, or c
  SITE (871): n equals a,t,g, or c
  SITE (872): n equals a,t,g, or c
  SITE (873): n equals a,t,g, or c
  SITE (874): n equals a,t,g, or c
  SITE (875): n equals a,t,g, or c
  SITE (876): n equals a,t,g, or c
  SITE (877): n equals a,t,g, or c
  SITE (878): n equals a,t,g, or c
  SITE (879): n equals a,t,g, or c
  SITE (880): n equals a,t,g, or c
  SITE (881): n equals a,t,g, or c
  SITE (882): n equals a,t,g, or c
  SITE (883): n equals a,t,g, or c
  SITE (884): n equals a,t,g, or c
  SITE (885): n equals a,t,g, or c
  SITE (886): n equals a,t,g, or c
  SITE (887): n equals a,t,g, or c
  SITE (888): n equals a,t,g, or c
  SITE (889): n equals a,t,g, or c
  SITE (890): n equals a,t,g, or c
  SITE (891): n equals a,t,g, or c
  SITE (892): n equals a,t,g, or c
  SITE (893): n equals a,t,g, or c
  SITE (894): n equals a,t,g, or c
  SITE (895): n equals a,t,g, or c
  SITE (896): n equals a,t,g, or c
  SITE (897): n equals a,t,g, or c
  SITE (898): n equals a,t,g, or c
  SITE (899): n equals a,t,g, or c
  SITE (900): n equals a,t,g, or c
  SITE (901): n equals a,t,g, or c
  SITE (902): n equals a,t,g, or c
  SITE (903): n equals a,t,g, or c
  SITE (904): n equals a,t,g, or c
  SITE (905): n equals a,t,g, or c
  SITE (906): n equals a,t,g, or c
  SITE (907): n equals a,t,g, or c
  SITE (908): n equals a,t,g, or c
  SITE (909): n equals a,t,g, or c
  SITE (910): n equals a,t,g, or c
  SITE (911): n equals a,t,g, or c
  SITE (912): n equals a,t,g, or c
  SITE (913): n equals a,t,g, or c
  SITE (914): n equals a,t,g, or c
  SITE (915): n equals a,t,g, or c
  SITE (916): n equals a,t,g, or c
  SITE (917): n equals a,t,g, or c
  SITE (918): n equals a,t,g, or c
  SITE (919): n equals a,t,g, or c
  SITE (920): n equals a,t,g, or c
  SITE (921): n equals a,t,g, or c
  SITE (922): n equals a,t,g, or c
  SITE (923): n equals a,t,g, or c
  SITE (924): n equals a,t,g, or c
  SITE (925): n equals a,t,g, or c
  SITE (926): n equals a,t,g, or c
  SITE (927): n equals a,t,g, or c
  SITE (928): n equals a,t,g, or c
  SITE (929): n equals a,t,g, or c
  SITE (930): n equals a,t,g, or c
  SITE (931): n equals a,t,g, or c
  SITE (932): n equals a,t,g, or c
  SITE (933): n equals a,t,g, or c
  SITE (934): n equals a,t,g, or c
  SITE (935): n equals a,t,g, or c
  SITE (936): n equals a,t,g, or c
  SITE (937): n equals a,t,g, or c
  SITE (938): n equals a,t,g, or c
  SITE (939): n equals a,t,g, or c
  SITE (940): n equals a,t,g, or c
  SITE (941): n equals a,t,g, or c
  SITE (942): n equals a,t,g, or c
  SITE (943): n equals a,t,g, or c
  SITE (944): n equals a,t,g, or c
  SITE (945): n equals a,t,g, or c
  SITE (946): n equals a,t,g, or c
  SITE (947): n equals a,t,g, or c
  SITE (948): n equals a,t,g, or c
  SITE (949): n equals a,t,g, or c
  SITE (950): n equals a,t,g, or c
  SITE (951): n equals a,t,g, or c
  SITE (952): n equals a,t,g, or c
  SITE (953): n equals a,t,g, or c
  SITE (954): n equals a,t,g, or c
  SITE (955): n equals a,t,g, or c
  SITE (956): n equals a,t,g, or c
  SITE (957): n equals a,t,g, or c
  SITE (958): n equals a,t,g, or c
  SITE (959): n equals a,t,g, or c
  SITE (960): n equals a,t,g, or c
  SITE (961): n equals a,t,g, or c
  SITE (962): n equals a,t,g, or c
  SITE (963): n equals a,t,g, or c
  SITE (964): n equals a,t,g, or c
  SITE (965): n equals a,t,g, or c
  SITE (966): n equals a,t,g, or c
  SITE (967): n equals a,t,g, or c
  SITE (968): n equals a,t,g, or c
  SITE (969): n equals a,t,g, or c
  SITE (970): n equals a,t,g, or c
  SITE (971): n equals a,t,g, or c
  SITE (972): n equals a,t,g, or c
  SITE (973): n equals a,t,g, or c
  SITE (974): n equals a,t,g, or c
  SITE (975): n equals a,t,g, or c
  SITE (976): n equals a,t,g, or c
  SITE (977): n equals a,t,g, or c
  SITE (978): n equals a,t,g, or c
  SITE (979): n equals a,t,g, or c
  SITE (980): n equals a,t,g, or c
  SITE (981): n equals a,t,g, or c
  SITE (982): n equals a,t,g, or c
  SITE (983): n equals a,t,g, or c
  SITE (984): n equals a,t,g, or c
  SITE (985): n equals a,t,g, or c
  SITE (986): n equals a,t,g, or c
  SITE (987): n equals a,t,g, or c
  SITE (988): n equals a,t,g, or c
  SITE (989): n equals a,t,g, or c
  SITE (990): n equals a,t,g, or c
  SITE (991): n equals a,t,g, or c
  SITE (992): n equals a,t,g, or c
  SITE (993): n equals a,t,g, or c
  SITE (994): n equals a,t,g, or c
  SITE (995): n equals a,t,g, or c
  SITE (996): n equals a,t,g, or c
  SITE (997): n equals a,t,g, or c
  SITE (998): n equals a,t,g, or c
  SITE (999): n equals a,t,g, or c
  SITE (1000): n equals a,t,g, or c
  SITE (1001): n equals a,t,g, or c
  SITE (1002): n equals a,t,g, or c
  SITE (1003): n equals a,t,g, or c
  SITE (1004): n equals a,t,g, or c
  SITE (1005): n equals a,t,g, or c
  SITE (1006): n equals a,t,g, or c
  SITE (1007): n equals a,t,g, or c
  SITE (1008): n equals a,t,g, or c
  SITE (1009): n equals a,t,g, or c
  SITE (1010): n equals a,t,g, or c
  SITE (1011): n equals a,t,g, or c
  SITE (1012): n equals a,t,g, or c
  SITE (1013): n equals a,t,g, or c
  SITE (1014): n equals a,t,g, or c
  SITE (1015): n equals a,t,g, or c
  SITE (1016): n equals a,t,g, or c
  SITE (1017): n equals a,t,g, or c
  SITE (1018): n equals a,t,g, or c
  SITE (1019): n equals a,t,g, or c
  SITE (1020): n equals a,t,g, or c
  SITE (1021): n equals a,t,g, or c
gtttgtttttttttttttttttttttttttttttgagatagactttcactcttgtcacccaggttggagtgcaatggcgcaatctcggctcactgcaacctccgcctcctgggttcaagcgattctcctgcctcagcctcctgagtagctgggattataggcacccaccaccacacccagctaatttttgtatttttagtacagatggggtttcaccattttggtcaggctggtcttgaactcctgacctcaggtgatccacccacctcgtcctcccaaagtactgggattacagatgtgagccaccgcacccagcctctgtttacacactaccacataggnnnnnnnnnnnnnnnnnnnnnnnnnnnnnnnnnnnnnnnnnnnnnnnnnnnnnnnnnnnnnnnnnnnnnnnnnnnnnnnnnnnnnnnnnnnnnnnnnnnnnnnnnnnnnnnnnnnnnnnnnnnnnnnnnnnnnnnnnnnnnnnnnnnnnnnnnnnnnnnnnnnnnnnnnnnnnnnnnnnnnnnnnnnnnnnnnnnnnnnnnnnnnnnnnnnnnnnnnnnnnnnnnnnnnnnnnnnnnnnnnnnnnnnnnnnnnnnnnnnnnnnnnnnnnnnnnnnnnnnnnnnnnnnnnnnnnnnnnnnnnnnnnnnnnnnnnnnnnnnnnnnnnnnnnnnnnnnnnnnnnnnnnnnnnnnnnnnnnnnnnnnnnnnnnnnnnnnnnnnnnnnnnnnnnnnnnnnnnnnnnnnnnnnnnnnnnnnnnnnnnnnnnnnnnnnnnnnnnnnnnnnnnnnnnnnnnnnnnnnnnnnnnnnnnnnnnnnnnnnnnnnnnnnnnnnnnnnnnnnnnnnnnnnnnnnnnnnnnnnnnnnnnnnnnnnnnnnnnnnnnnnnnnnnnnnnnnnnnnnnnnnnnnnnnnnnnnnnnnnnnnnnnnnnnnnnnnnnnnnnnnnnnnnnnnnnnnnnnnnnnnnnnnnnnnnnnnnnnnnnnnnnnnnnnnnnnnnnnnnnnnnnnnnnnnnnnnnnnnnntgtttagctcctttagataaaccataactaggctgggcgtggtggctcacacctgtaatcccagcactttgggaggccgaggcgggcagatcacctgaggtcaggagttgaagagtagcctgaccaatatggtgaaaccctgtccctaccaaaaatacaaaaaaa

SEQ ID NO: 6483 - DNA, 5775 bp, Homo sapiens; identical to SEQ ID NO: 5638

SEQ ID NO: 6484 - DNA, 738 bp, Homo sapiens
ccaaataccattattgattgattgattgactgactgagacaaggcctcactcctgttgcccaggctggtgcagtgatgtgatcatggctcactgcagccttgacttctggggctctggtgcatcctctcacttcagtcccctgagtagctgggactacagacacatgctaccatgcccagctaatgcaaatatcatttttaaaaggcgactgaactggacgcctcatatgagctcccatggctgcccagacatgctttcatgtcagtgattatataattttttttgtaaattagcttatgcaaataatcttgtggaccctaacttatacatgcttctgcaaagaaacatgtttaacgataaagttatactggaattcaaaacatgatgttttatggaatgtaagacattggggtatagataaaaagtggttggaaaaaatatatatatttatttttagagatgaggtctccttctgtcatctaggttggaatgcagtggcatcatcatagttcactgcagtctcaaattcctgggctcaaatgatcctcccaccttggtctcctgaatagctgggactacaggtgcatgccatcatgcctggctaattaaaaacaaaatttatttatttatttttgagacagaatcttgctcttttgcccatgctggagtgtagaggtatgatcttggctcaatgcagcctcaacgtcctgagttgagcggaggaccccgggctccag

SEQ ID NO: 6485 - DNA, 696 bp, Homo sapiens
gccagataattagaaggaaaacaaggagagtagatcattatagaaactaaaggaatgacaggggaaaggcatgtcaaatgatgctaagaattcatgttaaatgagggctcaaaagtgccaggatttggcaatgtagagattatccataacatttcagagagctgtttggagagttaagaagtccaaggcagaagtctgatgtgagtggacttgctgcttaagtgaacatggaaccatcacccaactaactgcattttttcattccaaaataatatttgctttctggttataaaaatgtactttttaattagagaagaatgaggaaatatggagacaaaagaagacaaataaaatgattcccaattttccaaccaatgtcagctaatattaatattaatctattgacattttctttttttttattttattttatttgtatacttattaatacagatagttataatttttatttgagtattgtcgactaagttgccttgatcttattattctgctttcttttctctatgtttcttcttgcctttaagtatttttgaaattacaatctcggctggatgtggtagctcacatctgttttcccagcactttcggagactgaggcagaaggatcccttgagcccaatagtatgagatcagcctgagcaacatggtaaaatctcataggtaaaaaatacaaaa

SEQ ID NO: 6486 - DNA, 469 bp, Homo sapiens
aaaagaaaactctcctttgaattaaggtaatccttcttgaaaggcttgtttaaaatgtttccttgttacctgggagagagcaggaagcactgggaaatagcacgtcactggtgcctcgtgccatttccgtgcctttccctgtcttgcctcagccttgcactgtggaatgcaaaagagtagaagaaactccaacgtgaaaattgtcgacaaacaatgcagagaatcttcggtggcattaaacattaaaattaaagacacatggtcttaaattcagctgatatacttgacacctcagatatactcttggtgccaaaagggatgttaagcaaaatttgagggatttgactccttatttgggaaagaccatgactaccaaggggagagaaaccagaggcaaaccttattgaaaaatggagtagctaagtcattttgtatatgttacttttacccagccaagtacagtctgtag

SEQ ID NO: 6487 - DNA, 476 bp, Homo sapiens
gatgttcacgtttttgaacttacacatattcttctgtataagtaaaatatttcataaaattaaaaatgttttataaaattaggaacagaatttcttaaagatcaacatggtactaatacatcttacaatctgtctttcaaagtttcaatagacttaacttagagtcattttttaaattgcattttgatgccaatataattcatgtgtcattttccgctataatacaatgaaaatccagataatggagatggattttcttctgagtagccacgcatattaggtttcaggctccaattgcctggttttgaattgctctttgccatgtgctgtctgtgaccttgggtgggtcacttcacctcccccaaatctaggtttctccaatacctacctccaggcttgttctaggcatgaagtgcagtgatgatggagaaggcatggactgtggcacaaatagaagagtcaggggttggcagctc

SEQ ID NO: 6488 - DNA, 364 bp, Homo sapiens
ataagcgtgagccaccacgcctggcccagataactcttgcctgcctgatttttttataatgatgcactttgttttgttaaaaatttataaatttaaagacaaaatatgcaaaaatgtgccctggtctcagaaataacacagcacattcgagtgaagttgttggcagttccgtgtgttttggggtgattcatttttttcataggttgttggggccgtgcatccattcgtgttctgagcacactccatggtacctgatgactcgaatggatcctgttcaagcccctgggttacccaaagaaatatacttctggcctgctggttggtcagagaatgcaggacacattggggtatcgcgaggtgtcca

SEQ ID NO: 6489 - DNA, 452 bp, Homo sapiens
gtgggcggttcggtgagtgctagatggggtgtctctttacaagactttcctctgagatggctgggctatgcccctgggtgctggggagtgaattgcccgtagatactgatacctgtacttaaccctgtgacggtcaagaccagatccccactctccaagcccctgggaaactggttgatgtagcccctgcagtgataccgcactcaaatccatgcagatcccctgacatggtcggggcagcacccaccacgcaggcttctgttctgagctacatgggatgttgggcgtgtgttttctaagagactgatttcataagacatgtaccagtggccgactggcctgaaacagcctggtcacagcgacatccctgagatcttagcttcttttcctcggggaattatcattggactggaaaactgaggttttgggccactctggattcagatgctttt

SEQ ID NO: 6490 - DNA, 161 bp, Homo sapiens
ccgggctcaagctatcctcccacctcaggttcccgagtagctggaattacaggcatgcgccaccatgccaggctaacttttttgtattttttgtagagatgggggggtctcactgtgttgcccaggctggtcttgaactcctggcctcaggcgatcctcct

SEQ ID NO: 6491 - DNA, 2976 bp, Homo sapiens
gctgattccagaccggattctctatcctgatgagaaaatccccaaaaagtgtcccaacagctctgaaatttctagaaaagtcattgactttccctttccctccctccttctctgtctgtctctctcagcagagcaaagttctcacgtggaagtcagaatcttcctagttctagtggttggacaagtctttaactccatagcctagctccagctaggttcatgagctggccctactgctctctcctttccccttttcctcttatcccattgcattagtctggattcttgcttacagataaccaaaaccttagtcaatctgatttaagcaaaaaccagaattgataggctcacataactgaaattccagggtagaccctaaggccgggctggatgcagggactcagtcatctcactcgggctaggtctctctcaatgcctagtccctatttcatctgagttggcttccctctcaggtgggctttttctcatggagatcctcagcagcccatggaaggagagtgtttttcccatcatcttgtacaagtccccaggttgagtctcattggcctgctggccccatgcccatccctgaacaatactgcaattggtcacctgcagtcacatgccctgtgactgcaggaaggtggggatgggctagttacccaaaggaaagtccaggtgctgtgcccagaagggagaatggatgtggggcagagcaaaccgtagatgtctaccttacccagccagacaagactgcatgtaagaaccaggcttacgggccagcccctctctgcaggcccacactgtacactcctgaaatgccattccttagtctggccaaccctcattcacccttccaatctcagcttatatagatggctccccatgctgcctaggaactaccccacattgcactcccatctctgcatgctccctggaggcagggaggaggttttgtccacctctatatccccagtctctggcccacatcagtgttttcagtaagtgttagtgtgttagtggcatcacttccaactgatatacctccttggtactacccttcccagacttaggaggccatctttggacaatggtgtatggtgggaaagtgctcagcaaggaggctctccttccatcctaggaccctgggccagttgtttcacctctggtcctcataccccagactgtgctgatacggttttccttcctaccccacaagataggatcaaatgagatgctgtgtggacagccctctgacatacacagatatgaggggttgtttggattagggggggaggcagcaggatgagcagaaaggaaactgcacagtgtccccaggaggccatggttaggatatctccaactatgagatacgggagacagaaagtatccaaccaggacaatgtgaccaaactaaagtgagaaaaatgtaggctttggggcagtgtaagtgggtatatcttctgtgaatagcaatttggcaaaatccattacatttcagagcaagcacattctttgacctgaaattccatgcccaggagtttatataagagagacagtgatgagcaaagatttatttgctgaagtgttacttaccatagcagaagattgaaaatgacccaaatgcacgtcctttggggataaataagttagagcatatctaaacaagaaaatattacgtaaaataaattggaggtctccacaaaaaaaaaaaaaaaaaaaaacccattttttttcagacaggatctcacaccgttgcccaggctggagggcagtgacgtgatcagagctcactgcagcttcaacaccccagggctcgagcagttgtcccacttcagcctcccaaatagctgggactacaggtctacaccaccactcccggctaattttttaatattttgtaatgacagggtctccatatgttgcccaggctggtctcaaactcctggcctcaagcagtcttcctgcctcgggctcccaacatgctggcattacaggtatgagccaccgcgcccagcccatctcacttctgaaaatgactcagtgccatgaacccttcatccctagtggcctttgggggtgggaggtcttcaaagtacagccgtctctttctacctaatgtgtgtctgcaacatcgaacttgttcatcataagtacgtattacttctgtaaccaggaaaagttacaagaagaaggggccaggcacagtggctcatgcccgtaattctcacattttgggaggtcgaggcaggagtattgcttgagcccaaaagttcaagaccagctttgggcaacacagtgagacctcatctctaaaaaaaagttcttttaattagctgggcatggtggtgtgctgcgtgcctgtagtcccagctacttggaaggctaaggtaggaggaggattcctttagcctggaggtcaaggctgcaataagccatgttcatgacactgcactccagcctgggtgatagagtgagaacttgtctcaaaggaaagaaaaaaaaaataagaaaatgttgggttctcagcacttccagcccacccccatccatatacattccagcacattgttggggccatttgcaagctctgagatgagattctgcacaagtcagcagtgcagagactcccagggaaggcctgaggccgccaagagcaactctgcagggtctgctccaagaggcagaggtgggccccaccgtccttggcaaaatggagattggtctgagggttccatgaggcaggcttgcaggagcaagggagtgatagaaagccatgtgaggggacgagagggaggacaccctcccctgcagaagtcaggaaggtctttgagcttgttctgagaggaaaacccattctctgggtagaggaatgaagactcagaggagactggggttcgctttgtgtgatactgatatggttactgaaaggctagcccagtcccaggctacgtgaacagacttaaaaaaaaaaaa

SEQ ID NO: 6492 - DNA, 2976 bp, Homo sapiens; identical to SEQ ID NO: 6491

SEQ ID NO: 6493 - DNA, 2980 bp, Homo sapiens
gctgattccagaccggattctctatcctgatgagaaaatccccaaaaagtgtcccaacagctctgaaatttctagaaaagtcattgactttccctttccctccctccttctctgtctgtctctctcagcagagcaaagttctcacgtggaagtcagaatcttcctagttctagtggttggacaagtctttaactccatagcctagctccagctaggttcatgagctggccctactgctctctcctttccccttttcctcttatcccattgcattagtctggattcttgcttacagataaccaaaaccttagtcaatctgatttaagcaaaaaccagaattgataggctcacataactgaaattccagggtagaccctaaggccgggctggatgcagggactcagtcatctcactcgggctaggtctctctcaatgcctagtccctatttcatctgagttggcttccctctcaggtgggctttttctcatggagatcctcagcagcccatggaaggagagtgtttttcccatcatcttgtacaagtccccaggttgagtctcattggcctgctggccccatgcccatccctgaacaatactgcaattggtcacctgcagtcacatgccctgtgactgcaggaaggtggggatgggctagttacccaaaggaaagtccaggtgctgtgcccagaagggagaatggatgtggggcagagcaaaccgtagatgtctaccttacccagccagacaagactgcatgtaagaaccaggcttacgggccagcccctctctgcaggcccacactgtacactcctgaaatgccattccttagtctggccaaccctcattcacccttccaatctcacacttatatagatggctccccatgctgcctaggaactaccccacattgcactcccatctctgcatgctccctggaggcagggaggagggttttgtccaccctctatatccccagtctctggcccacatcagtgttttcagtaagtgttagtgtgttagtggcatcacttccaactgatatacctccttggtactacccttcccagacttaggaggccatctttggacaatggtgtatggtgggaaagtgctcagcaaggaggctctccttccatcctaggacccctgggccagttgtttcacctctggtcctcataccccagactgtgctgatacggttttccttcctaccccacaagataggatcaaatgagatgctgtgtggacagccctctgacatacacagatatgaggggttgtttggattagggggggaggcagcaggatgagcagaaaggaaactgcacagtgtccccaggaggccatggttaggatatctccaactatgagatacgggagacagaaagtatccaaccaggacaatgtgaccaaactaaagtgagaaaaatgtaggctttggggcagtgtaagtgggtatatcttctgtgaatagcaatttggcaaaatccattacatttcagagcaagcacattctttgacctgaaattccatgcccaggagtttatataagagagacagtgatgagcaaagatttatttgctgaagtgttacttaccatagcagaagattgaaaatgacccaaatgcacgtctttggggataaataagcttagagcatatctaaacaagaaaatattacgtaaaataaattggaggtctccacaaaaaaaaaaaaaaaaaaaaacccattttttttcagacaggatctcacaccgttgcccaggctggagggcagtgacgtgatcagagctcactgcagcttcaacaccccagggctcgagcagttgtcccacttcagcctcccaaatagctgggactacaggtctacaccaccactcccggctaattttttaatattttgtaatgacagggtctccatatgttgcccaggctggtctcaaactcctggcctcaagcagtcttcctgcctcgggctcccaacatgctggcattacaggtatgagccaccgcgcccagcccatctcacttctgaaaatgactcagtgccatgaacccttcatccctagtggcctttgggggtgggaggtcttcaaagtacagccgtctctttctacctaatgtgtgtctgcaacatcgaacttgttcatcataagtacgtattacttctgtaaccaggaaaagttacaagaagaaggggccaggcacagtggctcatgcccgtaattctcacattttgggaggtcgaggcaggagtattgcttgagcccaaaagttcaagaccagctttgggcaacacagtgagacctcatctctaaaaaaaagttcttttaattagctgggcatggtggtgtgctgcgtgcctgtagtcccagctacttggaaggctaaggtaggaggaggattcctttagcctggaggtcaaggctgcaataagccatgttcatgacactgcactccagcctgggtgatagagtgagaacttgtctcaaaggaaagaaaaaaaaaataagaaaatgttgggttctcagcacttccagcccacccccatccatatacattccagcacattgttggggccatttgcaagctctgagatgagattctgcacaagtcagcagtgcagagactcccagggaaggcctgaggccgccaagagcaactctgcagggtctgctccaagaggcagaggtgggccccaccgtccttggcaaaatggagattggtctgagggttccatgaggcaggcttgcaggagcaagggagtgatagaaagccatgtgaggggacgagagggaggacaccctcccctgcagaagtcaggaaggtctttgagcttgttctgagaggaaaacccattctctgggtagaggaatgaagactcagaggagactggggttcgctttgtgtgatactgatatggttactgaaaggctagcccagtcccaggctacgtgaacagacttaaaaaaaaaaaa

SEQ ID NO: 6494 - DNA, 700 bp, Homo sapiens
aaagttcaagaccagctttgggcaacacagtgagacctcatctctaaaaaaaagttcttttaattagctgggcatggtggtgtgctgcgtgcctgtagtcccagctacttggaaggctaaggtaggaggaggattcctttagcctggaggtcaaggctgcaataagccatgttcatgacactgcactccagcctgggtgatagagtgagaacttgtctcaaaggaaagaaaaaaaaaataagaaaatgttgggttctcagcacttccagcccacccccatccatatacattccagcacattgttggggccatttgcaagctctgagatgagattctgcacaagtcagcagtgcagagactcccagggaaggcctgaggccgccaagagcaactctgcagggtctgctccaagaggcagaggtgggccccaccgtccttggcaaaatggagattggtctgagggttccatgaggcaggcttgcaggagcaagggagtgatagaaagccatgtgaggggacgagagggaggacaccctcccctgcagaagtcaggaaggtctttgagcttgttctgagaggaaaacccattctctgggtagaggaatgaagactcagaggagactggggttcgctttgtgtgatactgatatggttactgaaaggctagcccagtcccaggctacgtgaacagacttaaaaa

SEQ ID NO: 6495 - DNA, 399 bp, Homo sapiens
agaatttcacaaagcccctgactccgggacactgtgcagctctctggaaaaatgttttaaaggcaaaacaggatagaacgcatggccccccatgtctctcgcctgagtcactaattccatcaaagataaatgaccctagtcctcgcctttctctactcataaaataacacccgacaagaatagtgactatgtttctgtaatctataaccagatgtactctaacacccaaaccttgatgtaatttttcacatactaaatcttcaccacctatgtataaactaaaatactacgttggaggagtctgagagaacctttctaaaagcctcctcccaggctacaggccttggtctataatcctcaagaagacttctaaataaaactaactttaattctttaaaa

SEQ ID NO: 6496 - DNA, 512 bp, Homo sapiens
ccagaaggatatccagggccaccatcaggcaactatatggcaatacatttccccatccttttccctgcccctaccagcaccctctgcctcggacagctgcagcatggctgccaggaacctggtcctcatttcttcctttccctgtgttatccaaggatgatggaaatatgctctgatacatgcagcattttcgtcctggggccacatatgcccagcctttgcaagagccgtctgctagaaacagggaaggcattctgctcatgactctcggcaagtcatttgaaattccatgagtgtccctgcctgtggagcctgcttctcccaccactcctccaaggagacggctcaaaggcccgagggtcgcctgtgtgtatgttactccctaaccagcacacacctacctcatggtgccttggctctttcatccctaaaagtggtaataaaataacttcttcaaaagtttgttgtaagaactaaatgggatgatatgtatatttggcctagagctaacc

SEQ ID NO: 6497 - DNA, 512 bp, Homo sapiens; identical to SEQ ID NO: 6496

SEQ ID NO: 6498 - DNA, 512 bp, Homo sapiens; identical to SEQ ID NO: 6496

SEQ ID NO: 6499 - DNA, 400 bp, Homo sapiens
agaatttcacaaagcccctgactccgggacactgtgcagctctctggaaaaatgttttaaaggcaaaagcaggatagaacgcatggccccccatgtctctcgcctgagtcactaattccatcaaagataaatgaccctagtcctcgcctttctctactcataaaataacacccgacaagaatagtgactatgtttctgtaatctataaccagatgtactctaacacccaaaccttgatgtaatttttcacatactaaatcttcaccacctatgtataaactaaaatactacgttggaggagtctgagagaacctttctaaaagcctcctcccaggctacaggccttggtctataatcctcaagaagacttctaaataaaactaactttaattctttaaaa

SEQ ID NO: 6500 - DNA, 399 bp, Homo sapiens; identical to SEQ ID NO: 6495

SEQ ID NO: 6501 - DNA, 955 bp, Homo sapiens
actgcatgtaagaaccaggcttacgggccagcccctctctgcaggcccacactgtacactcctgaaatgccattccttagtctggccaaccctcattcacccttccaatctcagcttatatagatggctccccatgctgcctaggaactaccccacattgcactcccatctctgcatgctccctggaggcagggaggaggttttgtccacctctatatccccagtctctggcccacatcagtgttttcagtaagtgttagtgtgttagtggcatcacttccaactgatatacctccttggtactacccttcccagacttaggaggccatctttggacaatggtgtatggtgggaaagtgctcagcaaggaggctctccttccatcctaggaccctgggccagttgtttcacctctggtcctcataccccagactgtgctgatacggttttccttcctaccccacaagataggatcaaatgagatgctgtgtggacagccctctgacatacacagatatgaggggttgtttggattagggggggaggcagcaggatgagcagaaaggaaactgcacagtgtccccaggaggccatggttaggatatctccaactatgagatacgggagacagaaagtatccaaccaggacaatgtgaccaaactaaagtgagaaaaatgtaggctttggggcagtgtaagtgggtatatcttctgtgaatagcaatttggcaaaatccattacatttcagagcaagcacattctttgacctgaaattccatgcccaggagtttatataagagagacagtgatgagcaaagatttatttgctgaagtgttacttaccatagcagaagattgaaaatgacccaaatgcacgtcctttggggataaataagttagagcatatctaaacaagaaaatattacgtaaaataaattggaggtctccacaaaa

SEQ ID NO: 6502 - DNA, 3242 bp, Homo sapiens
gatcatgttatctttccttaaaatctggttagatggataatttcataacctattttttttttactctttacttctgttgaaacaggcttcactgtataaataggagaggatgagagcccagaggtaacagaacagcttcaggttatcgaaataacaatgttaaggaaactcttatctcagtcatgcataaatatgcagtgatatggcagaagacaccagagcagatgcagagagccattttgtgaatggattggattatttaataacattaccttactgtggaggaaggattgtaaaaaaaaatgcctttgagacagtttcttagctttttaattgttgtttctttctagtggtctttgtaagagtgtagaagcattccttctttgataatgttaaatttgtaagtttcaggtgacatgtgaaaccttttttaagatttttctcaaagttttgaaaagctattagccaggatcatggtgtaataagacataacgtttttcctttaaaaaaatttaagtgcgtgtgtagagttaagaagctgttgtacatttatgatttaataaaataattctaaaggaaattgtgtaattatagactttttattttaaataagttaaggagtgggtagtataattaaggtccgttgcaaagctgttgttatatttgtataagataaatgctggtcagatgtaagtgtgttgtctgcaattcatcaggattaaattatgtagataacttaagggatatctctgcaaggagaaacacctttttagatcttttagatgctgcttcttcaatgcaaggaaaggaaataaccccagcgaggtactcttcagggacacaggtctagtacaagagaactcttgacggctactaagttcagccagtcttaaaaaactgtgctgtttctacaaaactttaactacagtagtttataaggatgccaacgaaagctgagggtgtagagcaaaatagttctaagcttcagttaaacttctttaggtaagatcttatttacttttcctttcttaattttcctccctaaaagataaactaatactcttaaatggtctttcagtatagtggttcttacgtagtttaacatagctataaattgagtttaacaatttataaactcaagagaataatttttataaaccctgttttccaatctgtcatttacttaaattattttggttgtttttccctttttttccttcttttcccaccccctccccctccatgtgaagatttgggtgcttaacatatcatttttttccctgccggaattttagcattgatatgaaccatggacaagtatattctgctgccacaaagactgtaaagtgcttcatttcaacagctgaggcaagccaagtgatcattaataaagcttttcttggttccttcagtggtgttggtagtaaaatggtaggtaaaagttaggctgcaagttcaataaatcatgagatttcccatcgttacacccttgtgtattcacatttcttggatcaaacattttgagtgaactaggggtttttattaaagacatttgttgtatttatggttgtaactgtacatgcttatcaggatgagactgaaagaaggtagggcaaaaatggttgaatctattttcagatagtagttcatacttgagtgaagtgtcttgtctgcattatgaagcctggtatgtatccagtactaaataggtgggttaaatgtggtaattctagttcagtgtcttaccctgaagagaaagttgtaggttggctgttgaaattcattccttagatatgatcagtttgattgcccggctttattgcctttacaggaatgtgatactcagggcttactctatacaccaatgagtcttctttgatcctaagaccaccactgaagttgtttaggttcttttggacaaacatgataaacttcttcagatactttttttttcctttggcaggaaggtgtcttgctgcaggtaactaatgaagaagtggtcaaccacagagtcttcaagaaataagaaattctgtaccatctgaaagtagttcttgttggtgccttcatttaaaaagcactctttaaaataaaagggaaatgttttctgataaaacaaacatttagttgaggttcttgatataaaacaattacaaaatgagtgttgtttgtaaaacagtaacatcaaattggctagagagataaatgtatcatgttttaaattaggttttgtgagtagacagattacaattctattttaaatataaagtttataaaataaatactttttgtatccaaatacttggtgtaatgtttacacataaaatgtgtgaatcttgttctataaatatttggttgtctaaaagatcaccatcccctaaatttttaaaagcagtttcacaaagctatgcatattttaatattaacaggtaaatgagaagagcattgtggacattattggctgtccccaataaaatgctgttcattatgcactgtatattcagcgtttgagtactcctaaagtttctggctttacttttacgtttagcaatactggtggcattttgaaaatcatggattttaaaggttaaccggctggagtggtccagattaagtggctttgcagaagcactgaggtttacaatatgtgctagattgtcaaatgtcaattagttttattgtggtttacactgagtaaatgaatatcagtgttgctttttaaatgtgtttatttggacatttatctgaattaagaaaaccaaaaagaccaggttaatttgtttctatgataatttgttttggttttgataatgtgaggtatctaacaggtaagtcaaatttaacagcaggtaacacatagaaagcagctttctgtttgaaatagctgagttcgtcaattaaagacgtacaaatatcccaactttaagaaaattttgaaggtttaaaaatgtgtggatgtacaaagacgttgaactttgaaatacatcaggttgatatgcataacctcaaaataccaactcctatccagccaaggtcaagggaatatcacacaaataggggagaattaggtaattgcacaatagactgaaatgaactgattgaaggagggtttactgaagcatgggggtaatgttggatattcaacataggcttatttcctgtgtgtatatgttgtgttgagctgtttctcttgtagaaattgaagtttaaggtagttcttgtgtagctttgagacagtgccc

SEQ ID NO: 6503 - DNA, 11596 bp, Homo sapiens
ctagaaaagcggcggcagcggctctagcggcagtagcagcagcgccgggtcccgtgcggaggtgctcctcgcagagttgtttctcgagcagcggcagttctcactacagcgccaggacgagtccggttcgtgttcgtccgcggagatctctctcatctcgctcggctgcgggaaatcgggctgaagcgactgagtccgcgatggaggtaacgggtttgaaatcaatgagttattgaaaagggcatggcgaggccgttggcgcctcagtggaagtcggccagccgcctccgtgggagagaggcaggaaatcggaccaattcagtagcagtggggcttaaggtttatgaacggggtcttgagcggaggcctgagcgtacaaacagcttccccaccctcagcctcccggcgccatttcccttcactgggggtgggggatggggagctttcacatggcggacgctgccccgctggggtgaaagtggggcgcggaggcgggaattcttattccctttctaaagcacgctgcttcgggggccacggcgtctcctcggcgagcgtttcggcgggcagcaggtcctcgtgagcgaggctgcggagcttcccctccccctctctcccgggaaccggatttggcggccgccattttcatggctcgccttcctctcagcgttttccttataactcttttattttcttagtgtgctttctctatcaagaagtagaagtggttaactatttttttttcttctcgggctgttttcatatcgtttcgaggtggatttggagtgttttgtgagcttggatctttagagtcctgcgcacctcattaaaggcgctcagccttcccctcgatgaaatggcgccattgcgttcggaagccacaccgaagagcggggagggggggtgctccgggtttgcgggcccggtttcagagaagatatcaccacccagggcgtcgggccgggttcaatgcgagccgtaggacaaagaaaccattttatgtttttcctgtcttttttttcctttgagtaacggttttatctgggtctgcagtcagtaaaacgacagatgaaccgcggcaaaataaacataaattggaagccatcggccacgaggggcagggacgaaggtggttttctgggcgggggagggatattcgcgtcagaatcctttactgttcttaaggattccgtttaagttgtagagctgactcattttaagtaatgttgttactgagaagtttaacccttacgggacagatccatggacctttatagatgattacgaggaaagtgaaataacgattttgtccttagttatacttcgattaaaacatggcttcagaggctccttcctgtaatgcgtatggattgatgtgcaaaactgttttgggcctgggccgctctgtatttgaactttgttacttttctcattttgtttgcaatcttggttgaacattacattgataagcataaggtctcaagcgaagggggtctacctggttattttctttgaccctaagcacgtttataaaataacattgtttaaaatcgatagtggacatcgggtaagtttggataaattgtgaggtaagtaatgagtttttgctttttgttagtgatttgtaaaacttgttataaatgtacattatccgtaatttcagtttagagataacctatgtgctgacgacaattaagaataaaaactagctgaaaaaatgaaaataactatcgtgacaagtaaccatttcaaaagactgctttgtgtctcataggagctagtttgatcatttcagttaattttttctttaatttttacgagtcatgaaaactacaggaaaaaaatctgaactgggttttaccactactttttaggagttgggagcatgcgaatggagggagagctccgtagaactgggatgagagcagcaattaatgctgcttgctaggaacaaaaaataattgattgaaaattacgtgtgactttttagtttgcattatgcgtttgtagcagttggtcctggatatcactttctctcgtttgaggttttttaacctagttaacttttaagacaggtttccttaacattcataagtgcccagaatacagctgtgtagtacagcatataaagatttcagctctgaggtttttcctattgacttggaaaattgttttgtgcctgtcgcttgccacatggccaatcaagtaagcttcagctttcagtaattgttatcttagagattatgccacgtgaatgtattttattgtacatatggttaagctgagtaattcatattctgtattgtcatatatcaaatatagacatgtccaccaaaaattaaactttttaagcttcgagtgctgctggtcataaaaattaatttgtcctggttataagagtaatttttaaggttatttctaatgcatatctttaaatattttcgtaactgagagtcatatggagaaacttagtgtttgttgtaaaaagttgtgtttttttggctgagatacttagaatcaccaccagagggggcagttaagggaaaataaatgatacttttcagatattgaatagtgaaataaaaactttgggtcataagtaatgaaccaagagttattttctgatgtttaaaaatagaaatttgcgtttttaggttgtagggttgaaatttttggtaaagattctttaataatcctttgataatcacggtctacatttgtttatttttccttagaaagttttttttttaattaataatttaagataatttaatgttgagtaaatttatatcaagcattaatgactttgaaacttgtgtagatcagctgaggcaattttttggtgtaacacaactaatatgcagtttaacatatggtttaaatttgatgtaagttttttttttccccccagaaaactttagaaactgttcctttggagaggaaaaaggtactctgccagcaggtcacctcatatttaagaatttaatttcctgcatacaaagaggaaaatgtaaataaaaattgaaatggtattttcctttgcagagagaaaaggaacagttccgtaagctctttattggtggcttaagctttgaaaccacagaagaaagtttgaggaactactacgaacaatggggaaagcttacagactgtgtggtatgtaaattactgaattgttactggatattagtcttttagctgtatgttaagtgaatcatggaggaaataactatcagcatagtaaaaaattctattatgacttcacttataagctataatgagattaaatgctaaagtttaccctttggtttgaaaggtaatgagggatcctgcaagcaaaagatcaagaggatttggttttgtaactttttcatccatggctgaggttgatgctgccatggctgcaagacctcattcaattgatgggagagtagttgagccaaaacgtgctgtagcaagagaggtaagcaaacaatgactgtcttgtgcattaacatgaagaacgctgccctgctgaaaatcagaaactatttctgaatttagttttaactcaagattttttctcttattaaaggtgtgttgggtttctggaccattttcttaagctagcttatttttcaaaagctaggtccctaaaagctattttatatctggtagttttaaggtggatacaagcgaagtatggtactacggttgggtgctttgaattatgcttgtgtttttttctgtttggatgacttttaccccaccactattttaggaatctggaaaaccaggggctcatgtaactgtgaagaagctgtttgttggcggaattaaagaagatactgaggaacatcaccttagagattactttgaggaatatggaaaaattgataccattgagataattactgataggcagtctggaaagaaaagaggctttggctttgttacttttgatgaccatgatcctgtggataaaatcgtatgtaagtgtctaaccacaaatgtactgtttttttccagtgtattcaattttgtgtatgttaacatctgtaactttattgaaaggtaaacttttgaagctgcttaatattgttgatttaatttaaaaggagtctgaatttttcattccagtgcagaaataccataccatcaatggtcataatgcagaagtaagaaaggctttgtctagacaagaaatgcaggaagttcagagttctaggagtggaagaggaggtaattttaattctgtttcttctttatttttgttcatatataagggcttgcttctaactggggcatttattgtaggcaactttggctttggggattcacgtggtggcggtggaaatttcggaccaggaccaggaagtaactttagaggaggatctggtgagtttcaagttctacgtgtttaaaggatgagtgtgcttttattttaaatatgattaggttttcattagtagaatcaagaaatccaacctaagtcaattttcctaagacttcaaatagattgtatcctggcaagctcttgtgatttggccagacaagaagttaatagagttgtattaataacagttgtatttatctggattaataatgtaacatgaagtgtcatccgaaaagctttgacccccatcaagtgtcattcttacgtataaataggatggaatctctaagattgagacttgttaagagtccaaaatttaggcggtagatttaattatatgctttcatgttttgtgggtaaactggtagcactggtgtgtccttttctgcggttcttaattattgtgctgaggtagtaagagaactgaaaatgaatattagcaataatgctgaacagtttatagtaaacgtaatctttttttggcccctaacagatggatatggcagtggacgtggatttggggatggctataatgggtatggaggaggacctggaggtcagttttcctctacgttttggtttgtttatgtgactaatacttaactatatcgtatatttacttcatttatattttgagtttttaaacattttatattagtgtctataaatggcttgggtgatagtggtccagttatttctaagtagttttgccatcttagctgttatagcctaaggaatagagtgccattttaaatgaaaatgtaaagataaccatcagagtatctcatcttttctcaagcaaaatgattggatctagatatatctttgtacgtgcttctctggaaaagtacagaatactggatttaacagagtaaaacctaagggggtggtatatgtaggaaaaaatatgaaatatgtctaaacccgtaactagatgggaagcatcccaggataactttcaaaaagcgtaacctacggaaatgttccaaaatgtttagtgtgctcctggctgcagataaggttgtgaactaccattaaacatgaagtgtgatatatcattggcgtacagaaaaggctgatacacactgacagattttgtaacaagggacatttaaaactgagctggtaatagacttgatttctggtgttgccactcaataggcatgactaaatagtgtatctcactgttctactttttataattaaaattttagaggaagctgagttcttgtatttaactacaagttagagactcagcccacaagctttttttttttttttaatatggtttcttttttttttttttttttgagacggagccttgctctgtcacccaggctggagtgtagtggcgcgtctctgctcactgcaatctctgccttcccggtccaagtgattctcctgcctcagcctcctgagtagctgggattaccggcgtgcaccaccacgcccagctaattttagtatttttagtagagacggggtttccccatgttggtcaggctggtcttgaactcctgacctcgtgaactgcccaccttggcctcccaaaaacgctggggttacaggcgtgagcaaccatgcccagccttttttttttttttatttttgttttgcagtatgtgaaagtgtaaatttttgtttatgtccgcacttctatttacagtaaagaacatactgtgtggagtgttgggtctgttttttttctttgaaatggggtctggctttgttgctcagactggagtgcagtggtgtgatcttggcttactgcaatcttagtctcaagccatcctcccacctcagcctcctgggtagctggaactacggggtgtgccaccatgaccggctaattttgtgtttttttgtagaggtgtgggggttttgctgtgttgccctggctggtcttgaattcctgggctcaagcaatccacccgcctcaacttcccgtactgctgggattacaggtgtgagctgctgcgcccagccaagaacattgtttcgttttttgagagggagtctctctctgtcgcccaggctggagtgcagtggtgtgatctcagctcactgcaacctctgcctcccgggttcacgccattctcctgcctcagcctccagagtagctagtactacaggttgctgccaccatgtccggctaatgttttgtatttttagtagagatggggtttcaccgtgttagccagggtggtctcaatctcttgacctcgtgatccgtccgcctcggccttcccaaagtgctgggattacaggcatgagccactgtgcccaaccgagaacattgttttaagatatgtaattcgtagagagacataatagaaactttatcttttgggccagtaggaggaagtgctcttttactttccctctagcccacactactagtctagcctcacagtccttacccacaatatacatgaagtatttcaagatacttaagatttttagttttgagggaaagctgtggaattacaggtatttaactgtgtgcacatggtgttatccatttggctgagtaaccccagccaccaaatgtttaccaaggatagttattcagtccttgaagctattttagaggaatttcattaaatatttcacatggaaacttggaaagctggaaatggatgtgaggagacagttcaaaatggtattgaaaatattaagtgattacttaaaggcttattttataataggtggcaattttggaggtagccccggttatggaggaggaagaggaggatatggtggtggaggacctggatatggcaaccagggtgggggctacggaggtggttatgacaactatggaggaggtaataaattcacctgcaacctttatgtgggaatttggaattaatgtctttgtaacacttgatcttttgtttccatgtttgtcactagatgcccataaaatttgtggataagtgtttgcttttatttgtttttatgggagctttgtcctaagtccttggtttaatgtttgtattgttctgagtattccaattttttaataggaaattatggaagtggaaattacaatgattttggaaattataaccagcaaccttctaactacggtccaatgaagagtggaaactttggtggtagcaggaacatggggggaccatatggtggaggtaatttataaaaattgaggttattcagatttttgtgattaaaggattagccttttgtgacttaaagggaagataacatactaagtagtttgtactgtgggcagtgctccatgtacggtcttagtgaaaataaagaaattttgcataaatctccacagaagtactcagcaagcagttatgacatcaaattgggattagggatgttggaggtgggggtgttcagtagtttaatttctggtggggactcataaacagctaaatacagttgcaacccacattgcaagtggtatacattggaatgagggtctttgaagttaaatccttaaaccatgattcaaaccattgcttagcttatttttgaggtttttagctaggagtaaactagctttgtcttgggcttgatgtacttttaaaaaaatcccttactcagtccaaatgaggatgagagggtgaaaggaccctttatttaaaagaatagggtcagccacgaaataaaaatgtctatgaacccgagtaatttatctcctgagtaattctgctaactggctgcaaaggattaggatctgcttgtttaaaagactggatggatataaaatagaatcaactgtagtgttaggctgatcatgggaaatcaaagtaagtttgttttctcttgctgttccaacaattataggaaactatggtccaggaggcagtggaggaagtgggggttatggtgggaggagccgatactgagcttcttcctatttgccatgggtaagtagcttttgagttttacaattattattatcttgggagacatagctgcaggagtaaaagctttttaggatcatgttatctttccttaaaatctggttagatggataatttcataacctattttttttttactctttacttctgttgaaacaggcttcactgtataaataggagaggatgagagcccagaggtaacagaacagcttcaggttatcgaaataacaatgttaaggaaactcttatctcagtcatgcataaatatgcagtgatatggcagaagacaccagagcagatgcagagagccattttgtgaatggattggattatttaataacattaccttactgtggaggaaggattgtaaaaaaaaatgcctttgagacagtttcttagctttttaattgttgtttctttctagtggtctttgtaagagtgtagaagcattccttctttgataatgttaaatttgtaagtttcaggtgacatgtgaaaccttttttaagatttttctcaaagttttgaaaagctattagccaggatcatggtgtaataagacataacgtttttcctttaaaaaaatttaagtgcgtgtgtagagttaagaagctgttgtacatttatgatttaataaaataattctaaaggaaattgtgtaattatagactttttattttaaataagttaaggagtgggtagtataattaaggtccgttgcaaagctgttgttatatttgtataagataaatgctggtcagatgtaagtgtgttgtctgcaattcatcaggattaaattatgtagataacttaagggatatctctgcaaggagaaacacctttttagatcttttagatgctgcttcttcaatgcaaggaaaggaaataaccccagcgaggtactcttcagggacacaggtctagtacaagagaactcttgacggctactaagttcagccagtcttaaaaaactgtgctgtttctacaaaactttaactacagtagtttataaggatgccaacgaaagctgagggtgtagagcaaaatagttctaagcttcagttaaacttctttaggtaagatcttatttacttttcctttcttaattttcctccctaaaagataaactaatactcttaaatggtctttcagtatagtggttcttacgtagtttaacatagctataaattgagtttaacaatttataaactcaagagaataatttttataaaccctgttttccaatctgtcatttacttaaattattttggttgtttttccctttttttccttcttttcccaccccctccccctccatgtgaagatttgggtgcttaacatatcatttttttccctgccggaattttagcattgatatgaaccatggacaagtatattctgctgccacaaagactgtaaagtgcttcatttcaacagctgaggcaagccaagtgatcattaataaagcttttcttggttccttcagtggtgttggtagtaaaatggtaggtaaaagttaggctgcaagttcaataaatcatgagatttcccatcgttacacccttgtgtattcacatttcttggatcaaacattttgagtgaactaggggtttttattaaagacatttgttgtatttatggttgtaactgtacatgcttatcaggatgagactgaaagaaggtagggcaaaaatggttgaatctattttcagatagtagttcatacttgagtgaagtgtcttgtctgcattatgaagcctggtatgtatccagtactaaataggtgggttaaatgtggtaattctagttcagtgtcttaccctgaagagaaagttgtaggttggctgttgaaattcattccttagatatgatcagtttgattgcccggctttattgcctttacaggaatgtgatactcagggcttactctatacaccaatgagtcttctttgatcctaagaccaccactgaagttgtttaggttcttttggacaaacatgataaacttcttcagatactttttttttcctttggcaggaaggtgtcttgctgcaggtaactaatgaagaagtggtcaaccacagagtcttcaagaaataagaaattctgtaccatctgaaagtagttcttgttggtgccttcatttaaaaagcactctttaaaataaaagggaaatgttttctgataaaacaaacatttagttgaggttcttgatataaaacaattacaaaatgagtgttgtttgtaaaacagtaacatcaaattggctagagagataaatgtatcatgttttaaattaggttttgtgagtagacagattacaattctattttaaatataaagtttataaaataaatactttttgtatccaaatacttggtgtaatgtttacacataaaatgtgtgaatcttgttctataaatatttggttgtctaaaagatcaccatcccctaaatttttaaaagcagtttcacaaagctatgcatattttaatattaacaggtaaatgagaagagcattgtggacattattggctgtccccaataaaatgctgttcattatgcactgtatattcagcgtttgagtactcctaaagtttctggctttacttttacgtttagcaatactggtggcattttgaaaatcatggattttaaaggttaaccggctggagtggtccagattaagtggctttgcagaagcactgaggtttacaatatgtgctagattgtcaaatgtcaattagttttattgtggtttacactgagtaaatgaatatcagtgttgctttttaaatgtgtttatttggacatttatctgaattaagaaaaccaaaaagaccaggttaatttgtttctatgataatttgttttggttttgataatgtgaggtatctaacaggtaagtcaaatttaacagcaggtaacacatagaaagcagctttctgtttgaaatagctgagttcgtcaattaaagacgtacaaatatcccaactttaagaaaattttgaaggtttaaaaatgtgtggatgtacaaagacgttgaactttgaaatacatcaggttgatatgcataacctcaaaataccaactcctatccagccaaggtcaagggaatatcacacaaataggggagaattaggtaattgcacaatagactgaaatgaactgattgaaggagggtttactgaagcatgggggtaatgttggatattcaacataggcttatttcctgtgtgtatatgttgtgttgagctgtttctcttgtagaaattgaagtttaaggtagttcttgtgtagctttgagacagtgccc

SEQ ID NO: 6504 - DNA, 423 bp, Homo sapiens
gctgtcacactcaagggggtgcccttactcagtttattcactagtgtgaaaccagatttctgtatgtgtaagcttttccatgtagcccaatttggtagatgccaaattgcttgacctaataaatactagttaggcattgggagctaacaatgtaaggcaacaagtctcagtttgtcactgatggttgaaaagtggaaaacatctgtcaggacacctggactgcatgttacataaattcgctctctttaaggtttggaactaatatactgagatgttgacaggccctacataatttttgacatttccactatttagtaatgcactaacactggcttgttttggggtagtggaggggaattggtaacaaatcagttgagttgcatggacttaacagagaacaaatcgttcagagactgagatggg

SEQ ID NO: 6505 - DNA, 16163 bp, Homo sapiens
tttatcttttttttttttttttttttttttttttttttttttttgagaaagagtctcactctgtagctcaggctggagtgcagtagcgcaatcttagcaaactctgcctcccgggttccagcaatctcctgcctcagcctcccaagtagctgggattacaggcagatcgactattggagttcttaagttgttaaaattgctcctcttattcagtgaatattcaaggcataaattcacttgattcaacaaaggataaaagggtctctattgtataggtaacatacaaatacagacacaaaatattcacatttcacttcatattagagattgttttattgttgttgttttgagatgaggcctcgctctgttgcccaggctggagtacagtggcacaatcatagctcactgcagcatcaaacttctgggctcaacggatcctcccaccttagcctcccaaagtgctgggattacagctatgagccaccgcacccggtctctttttttcttgatattcaatgtccatattggcttaataaaacgaaaagggccaggtatggtggttcacacctgtaatctgagacagaaggatcacttgagatcaggagtttgagatcagcgtaggcaacatagtaagacctggctctaaaaagtagccaggcatggtggcatgtgcctgtagtcccagctactcaggaggctgaggtgggaggatcacttgccctcaggagtttgaggctgcagtgagttgattgtcccaccgctctccagtgcagatgacagacgaggacccccatctctggaggggagaaaaaagcctactgtaaggatcaaatgtaagacagcctatgagtttttcccattaaaacacatttgtcttcattagtcttctgggggaatagagccatacatatgagtccagctaggagcctgagggtcgtgtggttaagacaaaataaactgggctgttttttgtgtgacagaaatagaaaaggaagatctagtaataatcaaactcaaatgcatgatttcctgtcatgcattgcttaatgacagggatgttctgagaaatgcatcattaggcaatttcattactgtgtgaacatcacacaatgtacttaggcaaatctagatggtacagcctactccacacctaggccagatattgctcctaggctacaaacccatacagcatgttactatattgaacactgtaggcaactgtaacacaacagtaagcattcatggatctaaacataaaaaaggtagtgtaaaaatactgatattataatcttatgggatccactatcgtatatgctgtccatcattgatcaaagccttgttatgcagaacatgactaatctacatatgaggaaatgcaaagttaaatatgaaaagaatgctcaacaaaatcaaacatgcaaaattaaaccaagatgccatcagattgactaaaaattagtaaaatcggcctggcaagtggatcatgcctgtaatcccagcactttgggtggctgaggtggaaggatcacttgagccccggagtttgaaactggcctgggcaacatagtgaggccccatccctaaaaaagattaaaaattagtaagatcaatgttgttaatttgtagtcctagtgaggaaatggggtaatggttattgatagaaatcactgcaatcttgacttctctgatgacttctgagaatccatctatctgctaagtgtcactatatgtaagaatgtgcactacattaatccttttttcgagacagagtctcgctctgtcactctgtcaccaggctggagtgcagtgacatgatctcagctcactgcaacctctgcctccagtgttccaaagtgattctcttgcctcagcctcctgagtagctgggactacaggtgcacgccaccatgccctgctcatttttgtatttttagtagagacacggtttctccatgttggccaggctggtctccaactcctaacctcctgatctgcccgccttggccttccaaagagctgggattacaggcgtgagacacctcgcccggcctcactacattagtctaatagtaggaaactaccaaccacctgagtactcatacccagcaattggttaagttggggagctgccatatgataccctactatgtccctatttaaaaagatataaaatatcttgattactaaacaaacacaagacactgttctgtctcacatgcatacatttcacccttataggagcccatgaataacagatgaggaaactcagacacagagaggtgaagtacattaatttgttcagaatcaaatagcagattccaacccaggtaacctctctggagtggctagcagctatgctagaatagagtatattttagtgtatttattaagtaagatgacccaagataacaactgggtgaaatataaattgcaaatatattttttgttaaaaactattttttttgagtttcactcgtcgcccaggatggagtgcaatggtgcaatcttgtctcactgcaacccccgctccctgggttcaagcaattctcctgcctcagcctccacagcagctgagattacaggaacacacccccatgcctggctaatttttgtatttttagtagagagggggttttgttatgttggccaggctggtcttgaaatccagagatatgggtatcaattgaacttcgggtttgaagcaaggaaattgatgaggtggccttacttctgtagcatctgagttgttacaagaagcctattacataaacatcagagggtagaaatgatagaaaaagggttttctcttcagctaaagatctaagctccaggaattcaagaatttgaatgaatggtttggctcaatccttccataatacaccgtggtagacaggagagatggaaagaggaagagaggaagggcgagaaagatgatgcaagatgctccactgcttgctgattctgaagatggaaagggccaggaaccaaagaatatacgtggccttttgaaatggaagagagaaggaaagattctgccatcaaagcctccagaaggaattcccctgataacctgacttcagcttgcttaattttggacttctgacctacagaactattttcagccataaatgggttaaatttgtggtaatttgttaaagcaccaataagaaactaatacaaacactagagaatataaaaaaacaatatttttcaaattttttgagaaacagtctgtcatccaggctggagcacagtggtattgacatagagctcactgtaaccttaaactcctaggcttaagggaccttcccaagtagcaaggactacaggtgcaagccaccacacccagctaattttaaaatttcttgtagaggtgggggtctcactgttgcccgggctgatctcaaacttctgggattcaagtaatcttcctgcgttggcctccccaaattttgggattacaggtgtgtgccaccatgcatggccaaaggacaatatattgttttcagaaatgcccttagtaaaattgaatgtagggccaccaactactaatatgaatagaaggttctctatcatctgtgaacccaccgctgagagcagtggtgggtatatatatatatatataaggaggtacttaataaacatcagttatttacctttttctgtatggattttggaaatcaattaaaatgtgtctatcatcacactgagccctatcagaatactttacattctttagaagacagttacaacaaaccagaatttaaaacctcattttaatgagacaattgaccctaggcatcacatgaaacttttatttcccaactgtggaaacattcctgtggaaatacatattcaagtttaaaactcgtaagctcaaaagatctaggatatgtactgtaatgccttactggtatcatctaacttataaacaaagataatccaatgagtgtgggcatttctatttctactgtaaaggcatatcaaataaagaaaaaagtctaataattgcataaaggaatataaaactatttattaaccactgttcaccagtatttacaataaagtaaacaatatacagttggataacattttgattactacaaagttgttcttcctggcttttgctgaaccagtaaagcaaactcaagattgagcctccatgtaatgaattggggtaaagaaaaaacatgcaggtcaataggttaggttacaaaaggttgttcacacatttatgacagcaggtcctaaactgccaacacctctaaccatctgattaggtttctatgagccaagtcttacatattccattcatcatgaccttttagtcaatgtagcaacagggattccaacattttgctaaggaatggcccgctagggaaacttttaaatgttcatttaacttagttttgtttagctagttaaaacacactagcatttgtctagtttcctcatctggatgaggaaacctgctgtgatggcagtgataaaatttttccttttaggaattttgcaaataaaccactgcaattatagacactttaaaattatccaatttaaattgtcctatctagaattacttatttcacttgaaatgtatggtttcaggaaaattttcaatttaacttgaagggattatctcttattttgcttggaataatggcatctcagaaacatgggtttacctgtgatttttttgtttgggtgaatgcttaaaaacaaaaaaaaatttacatatgcattttatggatacacacacacacacacacacacacacacacaaaaaacacgtaataaatctagaatggtccttaggctcatgagaacacaagttttgactgagtaatgactatggacatttcccccaacatttagaaaagctgttctttaatgaagaggaaatgatataccatggtatcaaatgttcttttctgataaaggaagcaactacagaaagcttttatttatttgttcaaagtaaccagtgctatggatgcaaaaaacccccaacaactcttccaacgctactttcaaaacaaacatatcaaacttgattttcattaggatgtagttattttgtcacactagtaaatcaaaatctaagacccaatttttatatatatatataaatatatataaaagaacaatgtgaacaattattgagcttcatcttctggacaagaatgccaagttagtctctcttcataaaaagcaattacaatttgaggacacttcatatttgcctctttcgccagcaccaagtctgcctcatctgaatctttcctgttttaagaaaaagaaaaattcagttacaagtcgaagttgttcatgtcaaccgacagccattcatttaagaaataatagtccaaacaaaaggtattgaagtgctccaggagagttatgttacttgttgctatgttctaataaacttcattttcaaaacaggccacagtttgctgacccttgctttaaaacactactagtaaaagtaaccagaatcatcctctcagcagatagtttttccctacctaatgatgaaaaaccatttcacaaattaaaaaaaaaaagctactcttactttcaaatgtaacaatctctgcatactcaccatttcatgagaaacatcaattctccactgctgtctgtggcaccaattattctttcaggatcaagacctctggcaaatcctcttggtttgtcagcctgtttagaagacattttttcatacagcaaactcagagtattaaattgttttcatggcgtattttaaataaaaacattccaatagtgagatggaaatgactagagcaagaacccatatttggtaattaaaaacatctgatttccattaactttacaagcagaaaaacctgagtttgatactcaacgtagaatacttaaaatttctgaaaacattcagaataaaaagtcaagaaaattactgcgttcaatgacaccaaagtcagagttgtgtgggcatacagaaaaactaacctctttatttctggtaataataaagtcttgaaagttaatatatttcaaatgacttccaggaattagtctgaattactgacacattttaaaagcataaacaaaacacaaacggtaagaaatattaaaaatgttaaaactcataccaactatctgtaatcattctaaatgatagtaaatgttagaacaaacttgtgtaacctgtggcccaggatggctttggaggcccaacacaaatttgtaaactttcttaaaacattgaaactttcttgcgattttttttttttttttttttagctcatcagctatggttggtattaagtctattttatgtgtagccctcgacaattctcctaatgtggcccagggctgccaaaagattggaccccctgcgctagaaagtacttaatataaaccagtggctctcaaaatgtggtctacggattcactggggattccagagtcctttttgggagggggttgtgtaaggcccccttttttcatctatttgtgactttggattgtcttcatatacctccaccaaaatgatccgccacagcaatcaaatgtgtttaagtaaaattgccttaagacacatgttgaatatctgtaaaaatgtaaaatgctactcttctcagcttttttagaaaagtcattttagaaatttgttttaatttctactgttagtattgataattataacccatataaacaaaagctctctggggatcctcaataatttttttagagtataaagaggccctgagaccaaaaaaagtttgagaaccaatgatatcaataaatcctttattcctgtcagagttttacatcaatgtcacaagctctggagtcacactgcctgggtgagaatgatggacctaccccacttacgagctgtgtggctttgggcaagttaattaacctctttgtggtttaggttaataaaacagaattttagtatctactgcacagatatttcacagcacattaaaagcaaataatttggcacacagtatagcacatgctaaggactcaataagtgttgttaaagttgtgcctgatttattatttaataattttttgagacaaggtcttgctccgttgcctaggccaaagtgcactggcatgatcacagctcactgcaccttgaactcccaggctcaagcaatccttctgcctcagcctcccaagtagctgagactacaggaggtgtccaccacgtcttgctgattcttttttttttctttgtagagatggggtctcactatgttgcccaaactggcctccaactcctgggctcaagcgatgttcctgctttggtttcccaaggtgctgggattataggtgcgagccaccgtgcctggccaaaactgcttctgttgagcatgtgatttattttcaaaaccaaatttgtagtcaatctcgtttcctcatctgtaaaatagtgattatacctatgaccttatacagagttgtcttgaaggttgtacttggcttctagttcaaatgatcaagttttaaatcatgtttagtgcctgagcctagaacctaattcagcaccaagatgtttccccaaattgccacactaggtcagtaggcaagacaagtataatctgttttacaatcaagggtgtaagtaagaagttacctgatttgcctgacgccacagagacataagtaaagcaaagactggaccaaaacacatgtatagtgaatgaactgaatgtctcaattcatgccaagaaaagtgtttaactattatcaaagattacagacttcaaaatcaaggtattgtttggcaatacaaagatgacatgcaagtacttttcggtggtcaatgccattgatggactataatcagaaagttctatttgcgttgttcttactgtagtgcaaaggctttcgataatccaatcttagtattgtttgtatttaagattgctagccttggatcacaggtaattggtctgatcagggatcaaatccatgaaactaagaaaaattgcactagcacaacctaagtggcatgagcacttactgcacatttacacaaagtaggctaaaccacgcccatccttattgtcctaagtattaaaatatttaaaatacgattaagaggccttttataaaagtatctgaattttaaaaaagcaagtcgtcaaaggtgggcttggtgtggtggttcacgcctgtaatcccagcactctgggaggccgaggcgggtggatcacctgatgtcaggagtttgagatcagtctggccaacatggtgaaaccccgtctctactaaatatacaaaaaccagctgggtgtggtggtacacgcttgtaatcccagctactctggaggcggaggttgcagtgagccgaaactgcaccactacactccagcctgggtgacagagggagactctgtctcccaggaaaaaaaaaaaaaaaaaaaaaaaaaaaaaaaaaaggccaggcgtggtggctcatgcctacaatcccaacactttgggaggccgaggcgggaggatcatgaggtcaggagttcaagaccagcctggccaacatggcaaaaccccatctctactaaaagtaccaaaattagctgggcgtggtggtgggcacctataatcccagctacttgggaggctcaggcaggagaatcgcttgaacccaggaggcggcagttgcagtgaccaagatcatgccattgcactccagcctgggcgacaagagcaagactccatctcaaaaaaacaaacaaacaaaaaagaaatcaagccatcaaccttttacaaaaggacaagctggtgggcaatattttatacttacagcatctcttttcttctttgatttgctgtcatcagattcactgtcagataaagattttctttttgtaccatctttttctttgccagctttctgagagttaagaaacgcttcaatcaattctggacaatctaaattttcttcaggttcccaagtattgtcagcactgtgtttagtttattaaaaaaaaaaaaggtgattgaattaaatatgattcatcaccattatccagatctattttaatagacacccgggggaataaaaagtcctctgtactgcagatactaatcatttcctccttccctacattaccccaccccccagcctgcctccgccagagacagggtcttgctttgttgcccagacgagagtgcagtagtggaatcatagctcactgaagattccaactcccgactcaagcgatcctccacctcagcccaagtagctgggactacaggcatgcaccaccatgcccagctaacttaaaacacacactttttttttttttttaatagagaaggggtctcattttgttggccaggctggtcttgaattcctggtgtcaagtgatcctccagccttggacccccaaagtgctggaattacaggtgtgagccactgcacccaggccctatattctaatttgctaccctgagactccaaattagtaaacccaaattactgggtagaggacaataaaagtctctgctctgtagtattattttcattaaagtcttctttggcctggcacggtggctcacacctgtaatcccagcactttgggaggccaaggcaggtggatcacttgaggtcaggagtttgggatcagcctgaccaacatggtgaaacccggtctctgctaaaatacaaaaattagccgggcatagtggcaggcgcctgtagtcccagctactcaggaggctgaggcaggaaaatcgcctcaactcggaaggcagaggttgcagtgagctgagatcacgccactgcactccagcctgggcaacagggtgagactccatctcaaaacaaaacaaaaaaaagtcttttacattacctgttacactgcacatgggaagtacgctataatcatgctagtggccttaagttttgggagaagagggaggagcccattcatttcctaatgttttgatgggtaaaaataatttttcatgtttcatgggcttaataaagaagggacttacgacacatacttaatttaaactaagaatactgaaggataaaacaggcaaacgtaaatctcccattcaattcataattcccaaactgctatgaattaaatgtgaagagcaggggaagtaggagataacagataggtgaagcccaatcattcgactatcatatgctccatctccagcgtgctcaggaaattgatctccacctatccatttttaattgtcactgcctatggagctttgtggtgtaagggggaagaatcaaagcagataagcacaacaaaccccaagcgttaaagtatgtaattgttgcatgttcaagttattcacattttgtgaataacattatcaagaataatgagagcaatccatatcaaagaacacaaggaaccagagagcttaaaacatgcccaggttctacttcttaggtataaggatataataaacctagtataaagcctagattatatgtaatcctgtatgagacccactagtctatattgtaaagcttcaatgtttttagcaccctctgtgtggaggaaaataatgcagattattctaattagtgtaatatctaaccacattaaaatatattacatagtaaactacactccataattttataaatttgactccccagggtaataaactagtctctagtctgctcaccttcaactgtacaataaagtcttggttcttttgaaatagacctcaaatgagacacctaaaattcaaagtgtctttacatttaaagacacctacaggaaagcaggtaaaagagccaggttaaaaacaaattctaaaaccacttagctgcagttaaacatatagtaaagatgcactaaagtttcttactctgtaaatcccttccacttcaggaaatattccactttcccattcactacacgtcgatctagtactttttccacgacaaattcttcaggctctgcctcttcaacttttttactctttccattctgtttttttcccattttttgctaaaataaaacaaaagagaaattaagaaatattcctcttgaattttgagcacattttcaaggctcaattgcttatattattatcacattcgacataaatttttacttctatatcccagggcagacaccttctggaaagattaaaagtcaacagacaataaaataaaagaatgctttatcttgttcatttagttcaaacttacaacccaccaccaaaataatacaataaaaaaacactatctggaaacagttatttttttccagtctttttttttgagacagggtctcacactcttgtcgcccaggctggagtgcagtggcgtgatctcagctcactgcaacctccgcctccccaggttcaagcagttctcatgcctcagcctccagagtagctgggattataggcggatgccaccatgccgggctaattttttttgtgtttttattagaaacagggtttcaccatgttgaccaggctggtctcaaactcctgacctgaagtgattcaccagcctgggcctcccaaagtgctggcattacaggcgtgagccactgcgcccggccctgtagtcttaaaagaccaagtttactaattttcactcattttaacaacactgcaacaaacaactatgcaggaagtacctaaagggtgatacagagaagcaagtagtagtgacaggtcttaggtgaacctatgacagaccttgtatccacccccagatggtaaaagccccagcccccttctcaattcaaatattaatgtcaaaagcatcaatgatacagagaaaagataaatgcagaatgaaaacatggttcaaaatcctgataccaactgcagggtcaactatagagaccactaggaggttcaattaaaggacaagattatttttccataatctctgtagataatatttcctaccacttagaacaaaactataaagctatcacttcaagagaccaacattacaaatttattttaattccctaaggtgaaaaaaatccttccttcctggtttctcaagagaaagtctatactggtaaccaaattcactttaaacaggcattttctttggtatgacactatttaagagaagcaggaaaccaacgtgaaccagctctttccaatggctcaagatttcctatgagaggactaaaaatggggaaaatttttatgagaggattaaaaatgggggaaaaaaaaccctgaaatggttaatcagaagatcctatgggctgagaaggaatccatcttaacatttcatcttaaagcaaatgctattgccgggggcagtggctcatgcctgtaatcccagcactttgggaggccgaggtgggcagatcatctgaggtcaggagtttgagaccagcctgaccaacatggagaaaccccgtttctactaaaaatacaaaattagccaggcatagtggtgcatgcctgtaatcccagctacttgggaggctgaggcaggagaactgcttgaacccaggaggcttaagttgcggtgagccaagatcacgccattgcactctagcctggacaacaagagaaaaactctgtctcaaaaaaacacaaaaacaaaaaacccaaatactatttaaaaaagataaaccttaattgctcaatcattaaagccatcccacaagtaaagcagcaagcagaaaaaagttaagaacacctcaaggctacagaaggacatttcaagctatgcaggcatatgaagtgtgcagacagatatgtaagaaaggcctcaagactgcaaaagggcatttcaagctatgcaagcatataggtaacacatacacacacacaaaataaaaatcccctgaaatacaaaaacatgcagcaaacacctgacgtttttggataccatttctaagtcaggtgttatgattctcattagtcaagatacttgagtactgggcccaaacagctttctgccactgtacagtacaagaaggtaggaataatggtgggaggagcaaagacaaactgtaatagacagaagtgtatcagatacctatactacatgaaaaacaaaacagctactgccacaaagggagaaggctaacaaaataaagtcaacaataaatacagaaaatgaaaaggatacacactaaggtttacaaaaaaaaaaaggcagacaaaatgccatacagtattcattcactactatggcattcataagctagtttcaaatgctcactattttcttttatagtatatatttgccttaacccagcacttttttccaaaagtggatgagtcaaaataaatttcccattatttaagtgaaattaacagcacacatatctcacaacactaatgaatttttaaaatggaaagttaagaacttttaaagtggccaacctgtgatccttcacaaaataaactaaatacaataacagaccccaaaggctatcaattgcgtgcaaaaacaacttctgttttccagggtaaacagaatctaatgcagaatctaatgcagggtaaacagacttaatgcagaatctaatgatggcacaaattaaaaatcactaacgtgccctttttagtgtgaaacccagagagagcacatacaagccaaaaacaaatgctttattttacctaggagacattaacattcacctttacgtgtttaagattaatgcaatgttaaatattgtgaaaactgtaactttgaatttcatgatttttatgtgaatattccagggtttaaaaaaacttgtaacatgacatggctgaataagataaaaaaaaaatctagccttttctcccttctggctcatatttgcgatttcgatcattttgtttaaaaaacaaaacactgcaatgaattaaacttaatattcttctatgttttagagtaagttaaaacaagataaagtgaccaaagtaatttgaaagattcaatgacttttgctccaacctaggtgcacaaggtaccttgttctttaaattgggctttaatgaaaatacttctccagaattctggggatttaagaaaaattatgccaaccaacaagggctttaccattttatgtaacatttttcaacgctgcaaaaatgtgtgtatttctatttgaagataaaaatcctcagcaaaatccacattgcactgtccttcaaagattagccttctttgaactagttaagacactattaagccaagccagtatctccctgtaatgaattcgtttttctcttaattttcccctgtaatttacactgggagagctgggaaatatgtggatgtaaatttctcagccacagagatgcaaagttatactgtggggaaaaaaaacttgagttaaatccttacatattttaggttttcattaacttaccaatgtagttttgttggaggccattttttattgcagacttgaagagctattactagaaaaatgcatgacagttaaggtaagtttgcatgacacaaaaaaggtaactaaatacaaattctgtttggattccaacccccaagtagagagcgcacatttcaaacgtgaatacaaatccagagtagatctgcgctcctacctacattgcttatgatgtacttaagtacgtgtcctaaccatgtgagtctagaaagactttactggggatcctggtacctaaaacagcttcacatggcttaaaataggggaccaatgtcttttccaatctaagtcccatttataataaagtccatgttccatttttaaaggacaatcctttcggtttaaaaccaggcacgattacccaaacaactcacaacggtaaagcactgtgaatcttctctgttctgcaatcccaacttggtttctgctcagaaaccctccctctttccaatcggtaattaaataacaaaaggaaaaaacttaagatgcttcaaccccgtttcgtgacactttgaaaaaagaatcacctcttgcaaacacccgctcccgacccccgccgctgaagcccggcgtccagaggcctaagcgcgggtgcccgcccccacccgggagcgcgggcctcgtggtcagcgcatccgcggggagaaacaaaggccgcggcacgggggctcaagggcactgcgccacaccgcacgcgcctacccccgcggcggccacgttaactgggcggtcgccgcagcctcgggacagccggccgcgcgccgccaggcctcgcggacgcgggaccacgcgccgccctccgggaggcccaagtctcgacccagccccgcgtggcggctgggggagggggcgcctcgccggaacgcgggtgggggaggggagggggaaatgcgctttgtctcgaaatggggcaaccgtcgccacagctccctaccccctcgagggcagagcagtccccccactaactaccggcgctggccgcgcgccaggccagccgcgaggccaccgcccgaccctccactccttcccgcagctcccggcgcggggtccggcgagaaggggaggggaggggagcggagaaccgggcccccgggacgcgtgtggcatctgaagcaccaccagcgagcgagagctagagagaaggaaagccaccgacttcaccgcctccgagctgctccgggtcgcgggtctgcagcgtctccggccctccgcgcctacagctcaagccacatccgaaggggagggagccgggagctgcgcgcggggccgccggggggaggggtggcacccccacgccgggcggccacgaagggcggggcagcgggcgcgcgcccggcggggggaggggccgcgcgccgcgcccgctgggaattggggccctagggggagggcggaggcgccgacgaccgcggcacttaccgttcgcggcgtggcgcccggtggtccccaaggggagggaagggggaggcggggcgaggacagtgaccggagtctcctcagcggtggcttttctgcttggcagcctcagcggctggcgccaaaaccggactccgcccacttcctcgcccctgcggtgcgagggtgtggaatcctccagacgctgggggagggggagttgggagcttaaaaactagtacccctttgggaccactttcagcagcgaactctcctgtacaccaggggtcagttccacagacgcgggccaggggtgggtcattgcggcgtgaacaataatttgactagaagttgattcgggtgtttccggaaggggccgagtcaatc

SEQ ID NO: 6506 - DNA, 416 bp, Homo sapiens
caaagtgctgggattataggtgtgaaccaccgcacctaggcaatatactgcctcttaaggacttttctaactggattgagatgaaggaagtgttgattcaaaaatgaggccagatcgtgtgcctagaccgtgtctgtttgacaacattcaggaggggtaggtcatgattctggatttaccgtgtttgaggtggtagaggcttttcaatgagatgtgtctagtagatgatgagaaacctgagattgagcccaggttaggaatagagatactggtttagagtcatggctgagaatatcagaagagttgttttgagagtggcaaaggcgggagagtataaagaaaagccgagaagccgaagattacacctcagagaatatctgggtctgttgatggcctttattgtctccccacttctg

SEQ ID NO: 6507 - DNA, 1421 bp, Homo sapiens
tttggagtgcctttgcaggtttggaggtctagacgataatctgagagaacattccccataatctgactcaaagcgctcaacctggctcagaggacacccaggccctatgccccactcacaaggagaggtgggcaagcccccagggataggaggatagtaagcaggatcctccctgtcctggctcccagaaccagagcaaggaatggggaatcctaagggtttctgaggcatcactgaatgtcacccactccacatcaacctggctgtcacctgccaccctttttcagggaggtgagtacctgccatggtcactgttaccagatccttaaaatcctgggctctgagctaggtgcattgctctgttacccatttcctacatttgtttgtttgttcttgatttcctgggggaatgggactgatggagacagacaaacccactgtgggcagcatctaagccatgtccaaggttggtcgaattaagggaaccctggcctctcagcaggacagaaagctgagctgtggttccaggccctcctctctgggcccctggagtgtatctttttttccttgtggcttttgaaattttgcattattttaagaatccagtctttcagaccagcccttttattaagctgtgaatttttaatggattgttttaaagtaaaaaaataaaaacccagaaaacaatcaaattttaacaaaaaaatccgctactcttactcccttgcctccccctaccccagcccatgagagttcccttgcactcccctctgcctttgcaactgatcatcctccctttctccttggcttgaagcatctatgtccagtatctgtgaaatgatgttttatctgtgtgtcaggatgagaaacggcagtcattccaccaagtgttggaaactggttagcctggagacaagggtttctggggccacagctcagggatgtgtatttaattacaggatccccagaaactcctctctaggctggcacagcaacattttttctgggcttgggagccatacctgaactgtttcctccaaggcgggaactccagagagcctgccaagtctggagcaagctggggcttctgctttggccagacctgggccaccatgagacttgaaggcttctagctgtcgtacgacacgagccacggtggccctgcctctccccgctcatagaagcctggtccctctgtctagcccagttcccatctagcatccgtcttctgggcctgaagccctaaatggaccacagcctgcacaggaatcaactgtaggctcaaagggaggcggtgagtaaggtcagagcctgctccaagcccaagaacaaaagttgtgttatgggtggaggctagtcccccagatctagccctgccgtctttgccctttaatgaccattgtttctttctactaaaatgt

SEQ ID NO: 6508 - DNA, 11360 bp, Homo sapiens
ggacgcgggcggggacggagctcggcgtgcttgctgctggagggtgatggccctgcaaggctgtgggctccgacctcaccgggagtcgacagcgagaggttcgccgaagagcgaggttctgggcgagcgctgaacgccggccccaagcaccccgggtctttacacagtccgcgtccacagactctgacgaagacgtggatctgctctcgctttagctgctcgcggtcctccagatcatgtccgcgactcctgcgactccgcgcggaaaaaaaagtttgccaggcgtggactcaatgacctttccaagctgtgcgcctcgctgcctggaccgggtctgagcgcggctgcccaggttgacctttctgcgggaggtgagtgttcgctctgggaaggggctgtagctgccctttggaaggaagggtttgggggtgtaagaggcgttcagattctcggtctggtgtgccccaaattcagatgtgaaaatagatcatggggatgcaatcccagggcactgtatttctcacttccttgggtccctggcacgcgactcccagctaacacccaaccacacacatttctacatactgtttcttaattttgttttgggatatttaatctaagcggtcagcaagacttcttataaaagctggtctacgtacactgagatcaaaccccacaatcccatggtgtttctgctcctgccctagcaagcctgggtcgacttgtcccggggcagccgcggcagcgcagcgtggacgggcccggacacccggtgcctgcccagccagcgacgctgaaggcacatttcaagagggaaatagttcagtcctcggtaatttgtcaacctcgtgctggctttaaaattctcctcccaccttctagtcctgactgagggggcccaaaagcaaactccccgggggcttaaacgctcggattcctgagaaacggcaagtgagaaaggagttgcagttgtacgaagaaggagcgaggaaaaggtgtttgtggagggagccccggatctgtcttcctacctgttagccgagaacaaaagggggctggcgtttcccgaagcgaaagggcgcagacagccactttctctgctaaacaaactgcagtcctgggcagaacaagaaaattactcacgcagggggagcaaggggagcacagagaaacagaacctagattatgcggaaggcatcttaatttaattaactccttgggaaggcagaggcgctctgaaggggcaggaacttcgcagccgtttctctattcacctgatacagtctggccctaacaatctgtcctttaacaattttttttctttttaatgatcttctttgatctacttagtctatagctctctaatttatataaaattctgctgtggtttgggctgaaattcagtgagcctacctatccgaccatcagtcatttatctcatataccagtgcacaggttttagcagatgaaccctgactgtatattatttttagataattcagtgtaatattaccattaccaaagagcgaaactccttatcaagttacttcttaatttttttctccaatgttttgaaagcttcactgaactgaaataagtgtgtacacatcttccttggtgacagccagtcaagtaaattttacaaaatttctccacatgcctggaaattcctgtgaagaagactgatgaaagaaaagtagcctcagctccaccaacatatttatgacttttcattggtttaagtttctttccttgcaagattaaaagtaaccagtggtctgaaacgggacggtggagaaatgacagcagatgatgatcgctgttatttcctgaaagggagtgtgggaactacaaggctcagctctagacaaaacgaaagtactttaggatctctgcattcacttaaaatacttcttttgacatacatttccagcaactcaatgggagtgtggaaatttaaccttcctaattatttgtggcaagagccattggtggatatttaaggttgttctgtttgtaaaagggtttcaaaaggaccaatggtttgctcttcctctatgaagaaactatctgccctacaaattaaaacaaacaggtactatgaaatagcactttttttttttactaacatgaacctgaattatattagtcgttaatttctgtattataaaccattcagagaaaagggaaagaagatggcactcaactttgtggcagtgtaacctttatggcagagttcgctgtgcctttggtatagaaatcacaggtcacaacagtactttagccaacaccactcccccacatgcccgctcccccctccccaacgcatacaccctgtggtgggagttgtgctttgcctcctgtatttatttctaagaaatctagtctgggaatacacccaaataataatttcggtttcctctctatgggaaagaggttgcttttcaacacgaagggaaaaataatattttgaatctctggaaaatcctcattacgcaaagagaaggaaataaaggtataaattattatttttaattgaaagggaaataatcaggtagattaccaggaatgttagtagaatccttttcccctgcctccctaagagacttgccaccgagcaaaaatgaatcgtgatttgtggtgggaaagttgattactaatgggggtttgcagttgcggttgaatggtctgactgagaccctctgactgttacccacctctcattaactcttagcctgaactcccagaccgcataccaccaagcagaagcgattcgttaataaatctctgtcccgagcccttccagaggaaggtgtgggccccgcagaggcagccagatcctgccttgccagagcgctctgtcattagcgtagccccctaagtctgctcacagatggaaccataggcaatacttcataacgcgctggagaggacaagtcagacgcaggaaggggttgggtgggaagggaaggctggagtctctcctgccttcctgctgggttcaaatgccaggcttggcggttggtggcacagactgggaaacgtgactcctacacctgggggtctgccctcagagggaaggccctggtcccccgaactggcagaactcctttctaaaaaggggctggtagtgggagaaggtgggcccgctgtgaatgtaggtgaggtgatcccgggaacctgggtctgaaatcagacctgtgttgccattgggagcacggagagaggggaagcgccctgcttaggcccaggccgggcgtcctggtggtgggaccgcagccgcactcacctccaggccaacggacaaggttcctgcaagccagcagggccactctgtgcttggcctactgcagctcccctgcagctcctttcctctccctccccggagcgctctcctctctcctctcccctctcttctctctcctctctcgtctcctggggcatcccgggtggagggatgtaggggtcgctcctcggtgccaggccgggaagcagctcaggcctcccaagagcttggcgctcagtctgggaaaaggggttcctctggcctcagggacgttctccgcccccaccccaccccctgggagcctgaaccatctggaagggatcttagtcgggggttgggaggagagcccgtggataggaggagggggcgattctaggccgaatccagcccctgaggtgtcacttttctttcctgcggcccgtcaccgctgatagatggggctgagggcagaggaaggaaaaagaaaacctccgaggtcagtgcggggcgaggtgagcccctcccagggccctctggcccaggaggatgaagcgcgccggcttcgctcttgcacgccggcttgccatccgggtaagcgcgggaaaggcggccacagggcgcggcggcagcgcagcgcgtgggatctcacgacccatccgttaacccaccgttcccaggagctccgaggcgcagcggcgacagaggttcgccccggcctgctagcattggcattgcggttgactgagcttcgcctaacaggcttggggagggtgggctgggctgggctgggctgggctgggtgctgcccggctgtccgcctttcgttttcctgggaccgaggagtcttccgctccgtatctgcctagagtctgaatccgactttctttcctttgggcacgcgctcgccagtggagcacttcttgttctggccccgggctgatctgcacgcggacttgagcaggtgccaaggtgccacgcagtcccctcacggctttcggggggtcttggagtcgggtggggagggagacttaggtgtggtaacctgcgcaggtgccaaagggcagaaggagcagccttggattatagtcacggtctctccctctcttccctgccatttttagggctttctctacgtgctgttgtctcactgggtttttgtcggagccccacgccctccggcctctgattcctggaagaaagggttggtcccctcagcacccccagcatcccggaaaatggggagcaaggctctgccagcgcccatcccgctccacccgtcgctgcagctcaccaattactccttcctgcaggccgtgaacaccttcccggccacggtggaccacctgcagggcctgtacggtctcagcgcggtacagaccatgcacatgaaccactggacgctggggtatcccaatgtgcacgagatcacccgctccaccatcacggagatggcggcggcgcagggcctcgtggacgcgcgcttccccttcccggccctgccttttaccacccacctattccaccccaagcagggggccattgcccacgtcctcccagccctgcacaaggaccggccccgttttgactttgccaatttggcggtggctgccacgcaagaggatccgcctaagatgggagacctgagcaagctgagcccaggactgggtagccccatctcgggcctcagtaaattgactccggacagaaagccctctcgaggaaggttgccctccaaaacgaaaaaagagtttatctgcaagttttgcggcagacactttaccaaatcctacaatttgctcatccatgagaggacccacacggacgagaggccgtacacgtgtgacatctgccacaaggccttccggaggcaagatcacctgcgggatcacaggtgaggcgggcaaggaggatggctgggagagggaaagcgaatttgtcctggacacaccgagtcctgatagacattcccagtgtcattataatcccctgtgatctaaaatacaccctcagtcacgctcctcagcccggttcagctaattcccaacatctaccctttctttcccccagcggctcttgctacgttcttgtttggaatgagggagggcctttcctcagtcttggacaggaacaatctgttggccttagtcctgggatggttatcctgtctcctcccggtgctgtggggagtggtgcaggcagaacccaggtaccctggggtgccggtcctggctgcagtcgggctacttctgttgggtttcgtccctccccccaccccccaccctccacccaggtgcgccccagagcctgccgtggggacctttcttttaagctgtatttgtgggttgagagggggaggaggtcttgaggtcaccgaatttacaaacagctcccacctcccttccgcgaccttaaactctgcattaatacaaggcaattgaaggcattcaataatgtaagtgttatcattgggtaaaaacttctcaggagttggggagacctttttagcggtatcttttctggactctacctgctgttccccagagatgagacttctgtacccatcctgcgaggctgttaagggattcactaaaattagcacttctaaactcagccttgccttacatcctgatttggccaatttaaatcccagagaaaaccatggaggccaagaaaggcccgttcagcggggtttcgagctccagaatacgccagagagggcgatcaagtgtagataaagcccgcgggctggtgaatattttgaagagaattagttgagattaaccataaagagaattacacaggaaaaaaaaaaatctaaaaacgtaaatggaaatcttgtttcttttgttcttccacgacttccttttaagtaattgctaaaagtaactcttcaccatggggcaaagttatttcaatgaaaccttatattgattttcagatacatccattccaaagaaaaacccttcaaatgtcaggagtgtgggaaaggattttgtcagtctagaactctagcagttcacaaaactttacacatgcaggtaagtttgttttcttgtttaaaaacagtggctggttcgtgttatcattactgctttgcaaaaggtgttcaatggcagactctttctcttaaaaggctctatttagattagttctctaggtggggaaaagcaacacttgatttctttaatacataaaattaatcttgtttaacataaagcatttttatatttttctcaaaaaacggccactttgattatcataaatcctaattttagaatttttttcatccaatctgtcctgcatttaaagctttcgtgtttaggaggaaataaaggtaattttgataatggaggcatagtgaaatcccatacgttctctttcccaagggcctcataatttgtagctttcaggacattgaggaatagtttagttttccagcaaagaggagccttattacccaggagaatgttgttccttaagagaggattagagtttttccttcccccttttcctgcctatgacatggtgatgaaatgtgaagagctggaaatcacaaagcccaccgaggtggctgcgggtctgcctccgaagttatcagtgtaatcgggcctctgtgtatgcctgcacgtgtattttcatgattggaagattaggagcacggatttgttcctgcaagtctcctcttttgttgtcatgagagtgttatgttaacgcttgtgataacgataagacagaaactattgaaaagggtgcagtggtggtgtgaaggattaatcctttgcttgcttcacatctgaacaggaatctccacacaaatgtcccacatgtggaagaacctttaatcagagaagtaatctgaaaactcaccttctcacccatacagacatcaagccctacagctgcgagcagtgcggcaaagtgttcaggcgaaactgtgatctgcggcggcacagcctgactcacaccccgcggcaggacttctagagaagcccaggatctgtcccgtgccgccgctgctcccctccccagacacctctccacgtctcctacccagggggtcgcatccctagcccttcactgaccccagctcttcccttgctgcagccgcacctgcagctccagggagttaactcttcttctgggggactgagaactgtagaaagccacacactactacatcccttcacaaagagtatatgctagtttcttgtagatattcacagctcattttagagctctgtacataatgttgtgggtctttgttttgttgttttgtttgctttgggatcttgttggatgcacttagatatggaaaatggaagccaaattttatctttaaagactgtattttcaaaataaaactttttcttgtttgtttcaaaactcctgcaaaggtgtcttgctatttaaatactgtttttcctctagattctggaagagtgggctgcctctataaaattcaatactgaaggacattctttatccctaggtttaaaaaataggatttctcagaattctcattctgcaacttcagcccttccctttttatatggtggcattttggaattagacaattgggctgcttgtttttcaaagatattaaaaacattgatgcccctaaggttttatccccttttgtttatttcaatgacttgcgtattattccttcagataaatgcaatatcttaatataacatgcaacttccatggctgtcctacttgaaagcacaggatgggaagaagcaggaagcatagaagaggtgggagcttcttgccacttcatttttgaaaagtccttggcctattgtcacaatttatgatgggcaacttctcttaccattagactttgaacactatgatttatcactgtagacagagactttatcctgccttcaggacagaagtctaaaatccgacagaagagtacaggaagatacaaccttcaagaagacgggagagaagaggagaaaggagaaaccactaagctatgttcacaaaatatttttttccaagggtggggatcctttcttctagaaggttaggatttctctgcaaagcaaactgagttgggttaccagtgaggtttccaccactggttggtctttgtccctgggaaaatgccagaagtgcaggttactccatgtatagagctcatggcaaacatgtaatcaccttctgagacatttcaacctttcctaaatggttcccggggaacatgactctagtatagtgacaaccctgaagtatagtgtaggatttgagtggagggctttggaaggagataaagagtagtactattcagagactggaaggaaagtgatttaacttaaagggggaatgacagagaaacctgtggcacagtaggctctcacaaactgtttaatatggaataacaggttaaacaaggcattatcagatttatgtaaaatttgtatatttgtgtggggatggcatgtttcactttcagggtgattccaagcaacatgtcctatgtttgtaccttagaatcttccagaaaagtagatagagacttgaggactaggttcaaaatttctcaacagtaccttgttcaattcaacttactaagaggtttcaaaaagtgttcctgactaattgcttcctctgttttcaggggagctggctagaagtcatgtttatctctcaccagagattaattctctccaacaaagtgtccactcaccagcctgtgtgcctaatgctcacacaaatgcattccccagcgtgggatgagcccaaagtcttcctgaggagtaggggtagggatggagtatggagtgcatgtgcttgtgttatttagaggaatgaaacagctgtttgctttcttttgtttgtacagaattaactcagtgacctccctgcccctcctctctcaagatcctgcccacgttggtacagaagatttgaatactttagggcagagttaacattgactgtccctagagccccactaatcctgcaggctttttctacatagtcaatctcacagccccacccacccctactgactacaagtgttacagttccatctcacagggttcagtccaattatcaaagaatgacccttgttcactatcaagctacaggcatatccttgaagtccctattacaggaatacatagataggtataaccacagaactgttcctccccatttattttagtggaagaaatgggaatcagaagggaaagagaaagaagagaggagaaagtggagaaagcagttccccatctgatacacatactattttaaaagttaaggttacttataattaatttatttactcattaatttaataaatgcttattttatgcttctcatatgccaaaccatgtgctaagctccactgattttcatgatcagtttctgcctttctatatctagtgacacatttttggaatcttggctacttagataattaaaaacctatgatagggctaatttaacaactcccctcaatctagacacttaaatccagcattcatctaggctcagaaaggttctagcttctgtcagggtagactttttctacatactcttcatgatcttaggtgaacttttatttttatttttaagataaagtctcactcgttgcccaggctggagtgcagtggcacaatcttggctcactgcaacctccacccccaggttctaaatgattctcttgcctcagcctcccaagtagctgggattacaggcacctgccaccatgcctggctaatttttgtatttttcgtagagatgtggtttcaccatgctggccaggctggtcttgaatgcctgacctcaagtgacctgcctgctttggcctcccaaagtgctgagattacaggggtgagccaccatgcccagccaggtgaacttttaaacagtgagttcctctccaaattctgggttttgttttcttcttctttagactgtccaagtgtacaggaaatgaacaaatttatgagacatcatagggaaaatatcttgtattttaggaaattgatctgctgggtttttttggttcagagaagagtcattatttgagttttagattagcctgtgttttccttacaccctctaccacagtcaactcatgaatcaatgctcctggcaagagaccggccaggagttggaaatatcgcaagtcataaccacagtgctgaagaacttcatgcacaagttaggtatttactctcgagctgtgactgtaatctcattttgtagtctatgcagtaaggttttaaaaataatttctagaaacgaattacattgtaatcaactgttaatataaaattatgaatgtgtgttaggtgctcttactgatgctaaccttgaaatgtaggtcattgtggtactagtgctttataattgtagcaattacaattgctattttgcacaggcacacccttttttacatgaggaagcatttttaaaatctgtctgtagaacaacaaaatatttaaaaagtcaacaaatctaaaatctcaaattataaataggcccaactaccactagtgataaaaccagaggtggttactgggaatttcatctgttcatctgctgatgttagcccaggcatttggtcctcttcacttaaataatgttcagtcagatacttttacccaaactttgattctggaggggcagcctacccttggaaggcacttgggaaacattagttcttgaggatcgtcaacatgacaaaatagatgcatttgcactaaacactgtgtagaatcaacagcaaattttaatacaagaaaagtattggcggccgggcgcggtggctcacgcctgtaatcccagcactttgggaggccgagacgggcggatcacgaggtcaggagatcgagaccatcctggctaacacggtgaaaccccgtctctactaaaaatacaaaaattagccgggcatggtggcgtgtgcctgtagtcccagctacacgggaggctgaggcaggagaatggcgtgcacccgggaggcggagcttgcagtgagtcgagatcgcgccactgcactccagcctgggcgacagagcgaaactccgtctctaaaaaaaaaaaaaaaaaaaaaaaaaaagaaaagtat

SEQ ID NO: 6509 - DNA, 139 bp, Homo sapiens
tcaattttttcttctataatgtaacttgtcactgataaccacctctgctgacagcaatgagcaataaagggtgtggagattcagaatgattcagctttgatgacctgagatatttcaagttcattcctgtttctttttt

SEQ ID NO: 6510 - DNA, 442 bp, Homo sapiens
tatggtaccccctttttgtagataaaaaattttgaagtttagagaggctaaagttgtgtgtgcaaatgcactccctgccactcagggtagaactactctgcctttatttagtatttagacagaaatgcacttcgatttgctataatcacaagaggttttttgtttgtttgtttgttttaaaaaagaaaaagatctggtccaagatagcagtaactataacgtcatgatgacctctgggtataactcctcagtgtagaccctgatccacaaggctcccctggggtcaggagttcagtgatgcagtgcgctgggctgaaggggcccaaggagggaggaggatgaatttggggccatgtaaggcacaggatcaaagacttgaggtatgatagataaagcaaggatttgaaggtcatctggcagtctgctgctgaaattagaaatg

SEQ ID NO: 6511 - DNA, 119 bp, Homo sapiens
gcttgaacctgggaggcggaggttgcagtgagctgagatcacgccactgcactccagcctgggtgatgaagcgagactctgtctccaaaaaaaaaaaaaaaaaaaaaaaaaagtggggg

SEQ ID NO: 6512 - DNA, 835 bp, Homo sapiens
tgagctccttggagctatccagatcctgctcacttttccttcctgagatcagaacaaatcacccccttactcccactccaaacaaggccttgatgataaactaatccttcctaaaatgctggtaggtaaacaagcaatgatgaagcattgaacacaggttaactcctgacttttgtaccattgtctattccattacacattaacatgactctgaatgccagatccaaacctttgcccaccatctgcttgtcgtgcaacagttgaggcagtaaccaggggagattcacttcctgtcttgtccttccccagggatcacccccctgctgccctctagcagccaaactcagatgagttccattgttaccctaggtgtgcccatctctttggtagggaaggagaaaggtaagaatagccatcagtgaggaaggattcttggagcgaggagccactgtggtttttcctgctatttaagatgttgagaccggataactttagaaagatacctgcacaaacccataaatagtgcttttataaagtttagttcaccggaacctgagttcagtatttgacattagctttttgtccaaagagttgaagcctgctggaggtctttgctcaaataataaataccacatatttccaagtgtgttcaggtataggcactaggtactgtctgtttacttcatgttaggcacattacatgcattggctaatcaaatcctcatcaattacatatgtaataatctaaacttgcctccttgtattataaatggaaataatcctgtttatttaaacgggttttcaatgtacagtagggattaggatactcaaatgg

SEQ ID NO: 6513 - DNA, 1422 bp, Homo sapiens
ctccatccatccttccctccctcttcccctccagctaaatggacaattctagccaacattgagtcactcaataagtctcaacagtgggtgtgtttgctgagattgtccagcggttgagcagtttggtctcacctccctcgctagttgagaccaaaaagagcaaataacttcctcatggtctttgaaacataatgcttatatcgtggtcaatggctttaaaaagatctgtttcttgtttctttcaccaaactaacaggttttccccttaaatgatgtagtacaaattaaagtaatcttaaaaatgtttggccaaaagtaaatttaaaggacatcttgtcatggttagatttttttttttctattgccacacatgcccgttccttcacctttaagcaaagagagtggttcagatggtttgtaagatgccaacctgacgtcgcattctgtcattctacccagctcttaattcaatttgcttccattatcctaacaggcttctttcttacttagaacttggaaaggctgctgtatttaataccctccaacactaacgcagacttaagataggtactgtttattgaaaacctactgagtgaaatgtgcggttttaggaccttcataaacatctcatttaatctttctagcatcctgtgaaacagccatgatttcacgttgataaacaaagaagacaggggtcccagggatgtgaagcatcttgcccaggcttctgctgctggtgaccagtgtagccaggactccagcccaggttttcctgactcagaagactgagctttttcctggatgttattaatagctaattgtgtccaagcaaccaagggccttgagtctgcttggttctgcttatggcctcacatcaagaaatggagctagtccatgtctgtagtcccaatgctttgggaagccatgatgggaaggttgtcggaggccaaaagttcaagaccaggctgggcaatatcacaagactccatctctacggaaaagtaaaaaattagccagtcatggtggtgtacacttatggtcctagttactcaggagacttaggcaggaggattgcttgatcctaggaattcgaggctgcagtgagctatgattgcacctctgcacccaagcctgggcgacacagcgagaccctctctcttaaaaaaaaaaaatagcagagctcaccaaagtgatgttcacctttttatgacattcctttttcttagcttaagaaaagaaagctgctagatgagagtcttagttttcctgcataagacctcctttatgaatagaataaaagactgtcaaagtaggctgggcttgggcccaggctaatctatgaaggaagcaagctcgtgttccttacctatccttttggtgtccattggattgtgccccgaagtggcctttacccttgagccg

SEQ ID NO: 6514 - DNA, 354 bp, Homo sapiens
ctctgccagttcctggtggatagtcatttaaagtgcaacccacaatcaagagtataaaaaacaaatgaaacccaaacatatttactgaatacatcgttaatggaagattccaggtactgtgaaggatactgtgggagaaagacatggttccctttcttcacaaatttatagcttccttattataaggagttaaacagtagtatcagacaataaaaatgatataaaaatgtaaacaataataaattacatgaatggaattgtctatgctgagcagtgaaagacattagggattttaatcaggtgatgcatagatacataagtccagttttgtgcctagagtaaatcagcaactaa

SEQ ID NO: 6515 - DNA, 716 bp, Homo sapiens
cttgccttcacaaggaggcctcctcagccatgtggaactgtaagtccattaaacctctttttttgtaaattatccagtctcaggtatgtctttatcagccacatgaaaatggactaatacagttattaatagaattaaatgaaattctttatttaaagtactcaaaaaatattaactattattattaccatcatctagttagttgatttttaaagtaagatgtgtctatgttctcttttcagcaccataaaggtagagcagtctctgactagatctggtaaaaaaatattttatgcagatgagtaaacttcactattacaatgagctctctaaagaaagagtcccctttcctcaacttactgtatattctaattgttagcaactcattcaattgggatttttcttgcatctttttgtaaattataaagaagatccatgtgttttaaaattgatgtgctttttaaaactccaaggtagtgtgttttcattttacaaatggaaagtgtcggtattttttgtaaaaagtagaaaattagtttatgcgtcttcaaatagcaaagcttaattagacagtcgcatatctatcattaaaattcaaatgttttaattcacttggaccccaaatgtgaatttctcttggctagattattcatagattctctgcatgtaatgatgcctatggtttctaaaattctttttgtctaaaatcatgaaga

SEQ ID NO: 6516 - DNA, 5478 bp, Homo sapiens
gggcgcggtggctcacgcctgtaatcccagcactttgggaggccaaggtgggcggatcacgaggtcaggagattgagaccatcctggctaacacggtgaaaccccatctctactaaaaatgaaaaaaaaaaaaaattatccaggcgtggtggtgggcacctgtagtcctagctgctgaggaggctgaggcaggagaatggcgtgaacccaggaagcggagcttgcaatgagcagagatctcgccaatgcactccagcctgggcgacagagtgagactccgtctcaaaaaaaaaaaaaaaaaagggactgaggatttttaaagatggaaaaaagacaaagtaatacagaattaaaactattctgcaataatttattaaggattgtcttaaaataattcagaaccttgagaatccctctgtaatgacactatgtacacaataaagatatactcaaaaatctttacgtgtgagatttccaagagggaaagtgcttattttcccattctgggttccatgcccagcctaggcagctcaactgttgccagaggcaatgatcacattttaaaaacatggtttaggggtatgtatactgtctagataaagttctaaataaaaagcatgctgaacagataattcagttaattgcttattatggttcctgcttcaaaacacatttgatgaagcaaggaaactaaactcagaaaatataaacaagttggaatcatgttgttaattcataagcacttattaactaaatcctgcttaaggccacattaaagttacaattacggatatatatttaagtgtgtgactcataaattagcttaaaaatcaggttcattcatcttacagaccttgcttgagagtgaggaggatggggtgttccatggtcttttctaagtctagccagctgcctcccaaatgtgtaattcggggttacacgttgagagagtagactgaatcaatacaaatatgtaagtgttactagaaaaagaactcaagtacatgttcttccgattattcatcaatagcatcaaaaggaaatgatgtggatgaaggaaacattatatgtgtgcacattttttaggatgtttcttagaaatctagcgtcatagttggtcattatgcttgtgaactgaaaaccagagaaagtaagagtgagttgtgtgtgtgcgcatgtgcgtgcatgtgtgtgtgttcatacagctttctttataggctgctgctctgttgccatagggggaactttttatagatttacatttggtaaatatacccacatccaaaaaaagacgtatgaaaaattgggatgccagctaactaaatcaactcataaaaactaaagttaagggtaagattattttcctcgattattttaaaatatgatgtttactggaaggaaagtccagagaattaccacagatgaagtgtgagtgtatttctcccacttgtaaatgagctcttatttcctacagtgtatattctggtccacaatgagtcattttcaacatgtttcagtttaacttctaatacatttttaaacttggcaggcaaatttagatgaacattacttccagttttagagactgcttctaaattatacttcagtggtgtagtcatcatgaaaagttctttcagtaaaaggaaacaggattgattggaaatgtatgttttggaggagcaaaaaaatggttaccatttttaaattttgttactacataaaccctgttaacattatcttaaaaagttgtagatgtgaggtccttttatggatagaagatactttagagaagagaatatatgatgtatcctagataataataaagttaatatttattaaacttttactatgcctagcattgtttaactgttctatacgtattagctattttaatgcctgcataataggcagtagtatgttttctgtaagccattcaggccgtgtttctattagaaaacatgaagcccggcacagttctggccgtttgactaaaactttatgtttgtaaaaactagcaatttatatagagaattttacatagttgccagctctgaataagtatttaataattaccttgtataaatttatgcaatcctgtgaatcttctggcaaatttcagtggccaatctatctactgttatcttttaaatatgcttgatttttgttactataatttttacactgtgtcttattatttttaacactttaaaagttcataaaaatttagtttgaaaaatgcttcaagatgattgcaagcattgcattcattttgcaaatgaggaaacaagtctaaagaagtaatatggcttgtcctcagttacactgttactagaaacggagccataattacacatctgttctctttgttcccatcccagttgttctttctgccacaccagtatgttatacttagtaaacagtatatgaagcataatatgtgtgaagttgaacatcagtaggtatatttttgttctcaaatatacacatcaaaaacaacacaatttaaaactatactgtattaatttcatagggttgcaatgataaattgccaaaacttggtggcaaaacaacagaaatttattctccattctagaggccagaactctgaaactaagatgttgacatggctttactgtctcctaaggctctaggggtaatcctttgcttgcttcttccagcttctgggggcctccaggcattccttggcttccttggcttgtaaccgtatcactctagtctctgcctctgtcttcatgtggctttctcctttgtgtgcctcttatatggatatatctgattgcatgtacggcacactcagataattcaggacaggtctctcatctcaagatgcttaacttaatcacatctacaaagactctttttccaaataaggtaatagtcacagcttttgggagttaggacatggacttctcttttttggcagggttgggggcaccattcaacctaccacatataccttttaattcatgtgaattatatttacttgagttcttcaataaaggtaacattttattttgaaatgatttaactaaaattttctaattttaggagttactgaaattctatgatatttctatggactatctttcaacctactagctgttgaacaaaatcataccttagagattctagaatctgccatttgatctatgacatacatttattatgacttaaaagtcttcctgtgtgacttttaataacattctttaagaacatcatgacagtgacattaagattaaagaaacagtagttatacatttttaacagatacagtataaaaacctagctttagacaagctatgttagcttcatttaggccatttaattgctagcaattaaattttgctctactgtgtttgagatcctttagatttgggatgctcttataatgactatttcatgttttattttcgttccttatttttttcattcaagtgattcctgattttaataaatgtttatgcataatgtgtatctttgtattatatatcccagatgtatgatcacttagtttctgcttctgtagaaattattgctagatgtgaagatatgctgaattcattttagccattgaaagtatattactgtaaatgaaaggaaaaacaaccaatatataagtctgtgcttcatacagttattgatatggtttgggtctgtgtccccacccaaatctcaccttgtagctcccataattcttatgtgttgtgggagggaccaggtggaagataattgaatcacgggggcagatctttcccatgctgttcttgtgatagtaaataagtctaacaagatctggtggttttaaaaatgggagcttccctgcacaagctctctctctttgtctgccaccatccacaaaagatgtgacttgctcctccttgccttcacaaggaggcctcctcagccatgtggaactgtaagtccattaaacctctttttttgtaaattatccagtctcaggtatgtctttatcagccacatgaaaatggactaatacagttattaatagaattaaatgaaattctttatttaaagtactcaaaaaatattaactattattattaccatcatctagttagttgatttttaaagtaagatgtgtctatgttctcttttcagcaccataaaggtagagcagtctctgactagatctggtaaaaaaatattttatgcagatgagtaaacttcactattacaatgagctctctaaagaaagagtcccctttcctcaacttactgtatattctaattgttagcaactcattcaattgggatttttcttgcatctttttgtaaattataaagaagatccatgtgttttaaaattgatgtgctttttaaaactccaaggtagtgtgttttcattttacaaatggaaagtgtcggtattttttgtaaaaagtagaaaattagtttatgcgtcttcaaatagcaaagcttaattagacagtcgcatatctatcattaaaattcaaatgttttaattcacttggaccccaaatgtgaatttctcttggctagattattcatagattctctgcatgtaatgatgcctatggtttctaaaattctttttgtctaaaatcatgaagatggcagatgcacaaaataataacatctctgggctgtgtgtggtggttcacacctgtaatcccaacactttaggaggctgaggcaggaggattactggaggccaggagttcaggaacagcctggcaacaaagtgagaccccatctctgcacacatacaaaaaaattaaccacgcagagtgggcatgtgcctataatctcagctcctcaggaggctgaggttgaaggatcccttgagccttggactttaaggctgcactgagctaagatggtgccactatgcccctgcctgagcaacagaataaaaccctgtctctttattaaaaaagaaaaaaaaaaaaaagactatttctccttgccttcaggcaagaatgcacccagatcatcctagtctgataggctatccatatgcaaacctgtaaaggaactcacatacctgtaaaggtactcacgtacctgtaaatgacaatgaaatggtagcttcaaaatagttatataagtagtttacaggaaagtcaaggtatgataaataacctgtcatttataagaatggaatgttctgtatgttggtgtaacaaaacatgtctattcttttgtgtcatgttttgccattggttaagccatacatttgattaagaagtaagtcagcagatacttcaacttggtatccagtataaccaatatcacctcttcattatagaaacaacctcttccatggctgggtgcagtgattcattcctgtaatccctacactttgggaggccatggtgggaggatcactagaggctacgagtttgaaaccaggctgggcaacatagtgagaccccagctctcccaaaaagtaaaaaaaaaaaaaaaaaaaaaaag

SEQ ID NO: 6517 - DNA, 290 bp, Homo sapiens
gtggtggttcacacctgtaatcccaacactttaggaggctgaggcaggaggattactggaggccaggagttcaggaacagcctggcaacaaagtgagaccccatctctgcacacatacaaaaaaattaaccacgcagagtgggcatgtgcctataatctcagctcctcaggaggctgaggttgaaggatcccttgagccttggactttaaggctgcactgagctaagatggtgccactatgcccctgcctgagcaacagaataaaaccctgtctctttattaaaaaagaa

SEQ ID NO: 6518 - DNA, 724 bp, Homo sapiens
aagcattccacttgagataccatctcacaccagttagaatggcaatcattaaaaagtcaggaaacaacaggtgctggagaggatgtggagaaataggaacacttttacactgttggtgggactgtaaactagttcaaccattgtggaagtcagtgtggcgattcctcagggatctagaagtagaaataccatttgacccagccatcccattactgggtatatacccaaaggactataattcatgctgctataaagacacatgcacacgtatgtttatcacggcattattcacaatagcaaagacttggaaccaacccaaatgtccaacaatggtagactggattgagaaagtgtggcacgtgtacaccatgggatactatgcagccataaaaaatgatgagttcatgtcctttgtagggacatggatgaaattggaaatcatcattctcagtaaactattgcaaggacaaaaaaccaagcactgcatgttctcactcatggatgggaattgaacaatgagagcacatggacacaggaaggggaacatcacactctggggactgttgtggggtggggggagggggaagggatagcattaggagatatacgtaatgctaaatgacgagttaatgggtgcagcacaccagcgtggcacatatatacacgtgtaactaacctgcgcactgggcacatgtaccctcaaacctaaagcgtcatggtcata

SEQ ID NO: 6519 - DNA, 554 bp, Homo sapiens
ataatttttagagagtagcagttatttgaaatatatgaaattgagtatgattcagggaggtttgcagtctgaaagatgagaaggaatcagtcatgtgaggtcccatgaaacatattacctataaggccttcctgaaaaacctactggaaattgtaacttcaccaaagaaggaaagaatcaaagaactcatggactgagatgtcagggtaaagaagaactggaagtgaacgtttagtgtaaaatgtaatcttaatgacctttgtcattttggttacaaaagattgtaatcataattgttaacaagaaattataacataaaaataatagaagtagaggcgaaatagcagaaacttgcaactaaaattagggaattgatggtaagagaaatagtgtttgtacatatataatgttctcagatttcatgaaagaatcaatagttttatgaagaaatacatgttttaatatataatttaaaactataaatggaacagactatatattttgcatactaccagagggaggaaaaagatcaatcacaggctatataacaaagg

SEQ ID NO: 6520 - DNA, 430 bp, Homo sapiens
tcagctttattagacccaatgcccatttcaaaacaagtattctgtgaaatatcccttactatattgaaatggaattcataggtattctaacttacctcatgcacatttcagaggaaatcagtataaagtcctaactataacataaattagaaaaagagagtaattgataagatgatgatgtgtattccatgcgtaggtgcctgagtacactggagagcatggatgtttacacctgtatgtggaattatcttgaattcaacagtgacaaaggctgttgtatatagatgtattatgtcaacaactcaaataccacaaaactctgttgctgttactaacatgacttttttgaaatggtaaacagctgttaggagaattgcaaacaaaatagtgattgaatattgtttcttcagttataccatagttacattcc

SEQ ID NO: 6521 - DNA, 430 bp, Homo sapiens; identical to SEQ ID NO: 6520

SEQ ID NO: 6522 - DNA, 378 bp, Homo sapiens
cagatgcctaagaagcttgggcccaaatctcagagacagcgtggggctgttgcccccctcacccaggtccagcaggcggcctgttcccccacttataaacaggccaagcgcaatgccaggagctatcagggccgccgccgccgccgtcgttgcagccagaataccacttccagggttcctagccaactgcaagcagttgactcttcatctgcttcctgcaggacctacaagaacagtgaggagcttcggtctcgtattgtgtctggaatcatcacacctatccatgagcagtgggaaaaggctaatgtaagcagtccccaccgggagttcccccctgctaccgccagagaggtggacccactccggattcctccacac

SEQ ID NO: 6523 - DNA, 396 bp, Homo sapiens
gtggaaagagtcataccaactaaaatgcagtgttggaccttgtttggatcttgattcaaactaattcaaaaaattatttttcaaacatttggggaaatttgagcattgaccaggtattagatagcattatgaattactgccagttttgttaggtgaaataattctgcttatgttaaaaaaagtctttatctgttagagatatacattgaagtatttaaaggtgaatgatatgtctgggatttactttaaaataatttcagcccccgccaaaagagtaaggtgttggggaggggaagtataagtaaaataagaatggtggactattgataattattgaagttaggcgggaatacacacaggaactcatgatactattcttactattttttggtatgt

SEQ ID NO: 6524 - DNA, 396 bp, Homo sapiens; identical to SEQ ID NO: 6523

SEQ ID NO: 6525 - DNA, 378 bp, Homo sapiens; identical to SEQ ID NO: 6522

SEQ ID NO: 6526 - DNA, 2612 bp, Homo sapiens
tcaggtgccatttctactgcctaatacagtgccatttgccttgtgaagacccataaacattcattgtgttgaatgtaagatagagactctccctagtcttactgatctcagtaccccacaaatgattaagaatgatatgaaaaccagcagctgaggaacatcttattatttagttgtagcatattcataacaagtgtccttcaaggataaacatatattctctatttgtatttagcaagtaaaacttgtgttgacctttagtgcattatattcagcttttaacagtattatgtatgtactggaaagcaaagaaatcttagagtcttggacattgtttatttgtgcaacaactagaaaggagcaatgaagtttatttcagttgtatttttccctaagcacaatctgcaatagtttatgtatgacagagataattcaaaaaggaaaactatatataaaagttgtatataaagtttgtctctgaaatatttctttgaagtttttaaaaaatcgactcatgtttaaaaacaaaaacacatattcagagcattggacttttttaacttgttttcatctgtttatcatgacttttttatttctggtgtagagtccacattatttagtttgttgtacttttaaatttcaaagttcaaatctgaagaattagcgtttgtgatttcgggataccatgcagtggttttaatcccaggaaaaaaactatcaccaaaagttcgtttgattctcattatgtaactttgtagaaccatcctttctagatgggtccaccacagtgaatttgtaactttgaagtcaggatagaatatcattagattatctgtgagatagcattactatgttaggaccagcagagtttgggttggtaaaaataatgtttgctctattactgggttacagacatttcagcatttttaggttggttttaaatcactaaaaatatttattcggatttgaaggatttaagtgctaaaaatcaatccatttcttgcccttcaataattgtccatgcctgccttttgttgtttacatgctcttctgcccagactgttagtaatctagggaccccctttggagctgataagtacagttcagccttttctcctcaaatatataatgactttaacattcctaagaatataggtatttctgaatgatttaaatttgaggaattttaatacataaaatacaatgtacaaactttctgcccactcagatctcttctccatcatgtacttagtatttcccattaacctacacactgatttttatgctactccttgtagaaacaaaattctggtttgactcagtttttgtgtttataaacttttggaatgtgtaccccgtttatgtgaagaattatgacctatcagtcatagctaaatagtgaacctcaaaagtgttaacttttgactattcatgtgaggtttggtatcttgcatttatgtacatggctgtaaattatgtgcatttactctgtatttatgttatctagctgacttttacttgaattgttcaaattttaaaaattaaaatacgctcatgaaaatatggctttttctgtaatatatcaacattttattgagaacataatcacacttttttggattatcctatgtgtggaacaaaaatccattgccattttcaggttaagttttaggctcgcttgattcagtcagcaaaccttatcttgagcactttgtatctgttagatctagtgatgtctgaaggaacccaaaggtcaagtaatccaactccctcatagtgtacaaagaaatcttgcatatcttccacaggtttattgacttttatccaacacttttcatgttttaatttcagcctttgtgaaagttgatattaaaaatacagaggtgagaacttgttagaataaccaaatgaatccacataatgttagatcaaaatacaaatgacaaagataaaatgctatgtagtgcctaccctctttacattttgtctattttatttaagtttttctgtattgtagttaacatcaaacattgtccagtcttgaggaaaccaggacgaaatatattttgtatttcaacattgacataaatctgaaattgttggttctactaatagtactctgcactgaaggcactggcaaaataatggttaaaattgagcacaggtgttccaagttgtgtgtgtgtgtttattactgaacattgggagccgtgatagggaagtaatttgtgagttcatgatttcttaaggttctagtgtgacatttatacactgataaaactcaggcaagcaaaatgtaattaaatgttccccctgcccccccccccttttaatatatatacacggagcttcactcttgtcacccatgctggagtgcaatgacatgatctcaggtcactgcaacctctgcctcccgggttcaagcgattctgcctcagcctgacttcccttctgtttctttattttcgcactgtgtagaccagctgactgccttaatatgtattgaatcaattcaagatttatgttcatagagtgctgtgtttatacagtggtgtcatgtgatttcttaatagcctatagatccaataaatacagaggaatattagttacaa

SEQ ID NO: 6527 - DNA, 980 bp, Homo sapiens
aaaatccattgccattttcaggttaagttttaggctcgcttgattcagtcagcaaaccttatcttgagcactttgtatctgttagatctagtgatgtctgaaggaacccaaaggtcaagtaatccaactccctcatagtgtacaaagaaatcttgcatatcttccacaggtttattgacttttatccaacacttttcatgttttaatttcagcctttgtgaaagttgatattaaaaatacagaggtgagaacttgttagaataaccaaatgaatccacataatgttagatcaaaatacaaatgacaaagataaaatgctatgtagtgcctaccctctttacattttgtctattttatttaagtttttctgtattgtagttaacatcaaacattgtccagtcttgtaggtgaggaaaccaggacgaaatatattttgtatttcaacattgacataaatctgaaattgttggttctactaatagtactctgcactgaaggcactggcaaaataatggttaaaattgagcacaggtgttccaagttgtgtgtgtgtgtttattactgaacattgggagccgtgatagggaagtaatttgtgagttcatgatttcttaaggttctagtgtgacatttatacactgataaaactcaggcaagcaaaatgtaattaaatgttccccctgccccccccccttttaatatatatatatacggagcttcactcttgtcacccatgctggagtgcaatgacatgatctcaggtcactgcaacctctgcctcccgggttcaagcgattctgcctcagcctgacttcccttctgtttctttattttcgcactgtgtagaccagctgactgccttaatatgtattgaatcaattcaagatttatgttcatagagtgctgtgtttatacagtggtgtcatgtgatttcttaatagcctatagatccaataaatacagaggaatattagttacaa

SEQ ID NO: 6528 - DNA, 119 bp, Homo sapiens
acgcctgtaatcccaacactttgggaggccgaggcgggcggatcacttgaggtcaggagttcgagaccagcctggccaacatggtgaaaccctgtctctactaaaaatacaaaaactag

SEQ ID NO: 6529 - DNA, 119 bp, Homo sapiens; identical to SEQ ID NO: 6528

SEQ ID NO: 6530 - DNA, 1030 bp, Homo sapiens
ggacttttttaacttgttttcatctgtttatcatgacttttttatttctggtgtagagtccacattatttagtttgttgtacttttaaatttcaaagttcaaatctgaagaattagcgtttgtgatttcgggataccatgcagtggttttaatcccaggaaaaaaactatcaacaaaagttcgtttgattctcattatgtaactttgtagaaccatcctttctagatgggtccaccacagtgaatttgtaactttgaagtcaggatagaatatcattagattatctgtgagatagcattactatgttaggaccagcagagtttgggttggtaaaaataatgtttgctctattactgggttacagacatttcagcatttttaggttggttttaaatcactaaaaatatttattcggatttgaaggatttaagtgctaaaaatcaatccatttcttgcccttcaataattgtccatgcctgccttttgttgtttacatgctcttctgcccagactgttagtaatctagggaccccctttggagctgataagtacagttcagccttttctcctcaaatatataatgactttaacattcctaagaatataggtatttctgaatgatttaaatttgaggaattttaatacataaaatacaatgtacaaactttctgcccactcagatctcttctccatcatgtacttagtatttcccattaacctacacactgatttttatgctactccttgtagaaacaaaattctggtttgactcagtttttgtgtttataaacttttggaatgtgtaccccgtttatgtgaagaattatgacctatcagtcatagctaaatagtgaacctcaaaagtgttaacttttgactattcatgtgaggtttggtatcttgcatttatgtacatggctgtaaattatgtgcatttactctgtatttatgttatctagctgacttttacttgaattgttcaaattttaaaaattaaaatacgctcatgaaaatatggctttttctgtaa

SEQ ID NO: 6531 - DNA, 307 bp, Homo sapiens
gtttatttaaagtatataatgagagatcagatatcataaaaaactattttattaaggaaattataggctggagtatatatgcatttaaaaaaatcttaggttaaattatcaacacactgttattaaaatcgacagttagaaatactttctacacatattagggaaacagtggagtccattgattcagttattcatattttatattttgtgtagtacactagagtaaaatcagatatgatggagaactttagtacataaaactgattgggagtacctttatgaaataagaattgtttttatgtgtctt

SEQ ID NO: 6532 - DNA, 307 bp, Homo sapiens
gtttatttaaagtatataatgagagatcagatatcataaaaaactattttattaaggaaattataggctggagtatatatgcatttaaaaaaatcttaggttaaattatcaacacactgttattaaaattgacagttagaaatactttctacacatattagggaaacagtggagtccattgattcagttattcatattttatattttgtgtagtacactagagtaaaatcagatatgatggagaactttagtacataaaactgattgggagtacctttatgaaataagaattgtttttatgtgtctt

SEQ ID NO: 6533 - DNA, 421 bp, Homo sapiens
acaatattgtaacacttctcagaatgagtaagtacaagtagttgatttcactgaaatgctatttattttaattatatagtaaaattgtcctttttcatatacaggtctgtaaattttaatacatatacagatttatgtaagcaccattacagtcatgatacagaacaattccatcactcctccagattccctcattatcccttcacggtgatgcctacccgcttctgctagtcctgacagccactgatcttttctccatcattgtagttttgtctttttgagaatgacacataaatggaattacaaagtaggtgaccttttgaggctgtcttcttgtactcaaaataatacctttgagatttattcaagttttggggtgtactaatagtttgttactttgtgtttgattgaataccattgt

SEQ ID NO: 6534 - DNA, 746 bp, Homo sapiens
taatttttcaggcaaaattttgaatagctagtgagtgcacatagaactgcccaacacttttaatgtggcttggtggttttcttcttttcactgggtacccacttatttttctgaagtggatatatgtagtggcatttgtactttgtaggctcagaagtctttaattatatccatttcagatatcaagagtctgcttactcttgctattgtgctttgaaagcagttatgccaaaatagtatcagagaaatgtacattacatgttctttctgaattttcctgtctttgattttttgattatatagtcatgctatgctgtaatgcttattccatattttttgttaatcaaggaaatccttcacaaataatgcttcaacagcattgcaattgtatactgctgaaatataggttttgcttaggaaaatcattgggaatatctctaacttgtgatttagtaggcttggaaaatgtcatataaaaagttgaacttttaagctgggtgtggtggctggtacctggaggcccagttacttgggaggtggaggcaggcagaattgcttgaggccaggagtttgagaccagcctgggtgaacagaacagatctcctcttggctctaaaaagtaaaaattgagaagtaaaggaaattaaaacaaaataaaagttgagcatcatagcatgtgcctgcagtctcaactacttgggaaactgagatgggaggatcactcgagcccacaagttagaggctgc

SEQ ID NO: 6535 - DNA, 357 bp, Homo sapiens
tttaggtttgtggttggtgggaaacaaaaaaagcatgagtgaatctttagcatctggaaagaatgggtagattcacatattaagcacaatgtgagccactgtgttttttttgtaatttaagttccgggatacatgtgcaggtttgttacataggtaaacatgtgccatggtggtttgctgcacctatcaacccactgtgcttgttattactatttattaatagtaataaaacttcatggatcaactaacttaacattgtgatgtttgcacaggttgcctgtgatttgcttcggaggattattcgtatcttgaatctcagtaagagactccaaggacaactgcaagggggaagtagag

SEQ ID NO: 6536 - DNA, 295 bp, Homo sapiens
ccaaagtgctgggattacaggcgtgagccaccgcgcccagccacattttcattttctaagttggacttcatagggtcacatagtattgagttaatataagacagacctttttctatcttgttggttgcttactagaagatgaggaagctaacatctctggtttacagttaactaatttgaggaatataggcattggaatagtgttagtgtagcaagtaaatgagtgtaagagaacattttgcaaaactatacacttaaaattctaaagttcagtaaattaagtaaacttgggacc

SEQ ID NO: 6537 - DNA, 295 bp, Homo sapiens; identical to SEQ ID NO: 6536

SEQ ID NO: 6538 - DNA, 430 bp, Homo sapiens
aaacccatattttgcttagccatatattgctcaattctgccatccttgggactggcttcatcctcaggctagtagcaaaatggttgcggtgattccaggcatcatatcatatccataaataacaacttccaaaagaagaggaaaagtatctcttcctgtgccactgtttttggatagaggaaactttctacaaaaacctctagcaaacttctttcccatctttttggccagaattgggtcataggctagttcctgaaccagtcaccagtaaataacccttaggttaatcacgtttctcaatctggaatggtgttggcttctactgaggtatatggttgtattggggagagattctgttaaagaggaagagggagagaattgatgctaggaaagtaatttggaaaaccataactctcttcagtgttattgt

SEQ ID NO: 6539 - DNA, 430 bp, Homo sapiens
aaacccatattttgcttagccatatattgctcaattctgccatccttgggactggcttcatcctcaggctagtagcaaaatggttgcggtgattccaggcatcatatcatatccataaataacaacttccaaaagaagagtaaaagtatctcttcctgtgccactgtttttggatagaggaaactttctacaaaaacctctagcaaacttctttcccatctttttggccagaattgggtcataggctagttcctgaaccagtcaccagtaaataacccttaggttaatcacgtttctcaatctggaatggtgttggcttctactgaggtatatggttgtattggggagagattctgttaaagaggaagagggagagaattgatgctaggaaagtaatttggaaaaccataactctcttcagtgttattgt

SEQ ID NO: 6540 - DNA, 664 bp, Homo sapiens
ctcaaagtgactgccaaatccagggctgtgcatagagtgactgctgacagcctttgataagctttgctgtgagtccaaaagaatgatcggatagatgcctgtcttgcagcgcatctacattaatctcatagcaaattattcgtctcatattagagaaagtttagctttcttagaagcttgatgggaaagagcctcccagctcttagagtttgattttcgcaactcagttcacatcttcttcttactccaggttcccagctccttgagccttgcccgtgaaggggttggagtcaggatgggaagccttgagctgccttgacctgctccatctctgactcagggatgtgccctgcttgtcacagcatgggtgtgctgggccttggggcatcttttcaggcagagagcaagacgttggcattgtggaaagctgtacctccaaacagcagcccattcacagactacagaggaagaaaagaccacacttgctacagtaacaatgcaattcagtaccagggaataacttaacatgaaacatgtcaaatctatgtaaacaactggaaggcactcctaaaaaatacaaaaaagaatttgaaaaaaaaaaatcatgttctaaattagggaagtttgaggttctaaatatatcaattcttcctaagttaattta

SEQ ID NO: 6541 - DNA, 663 bp, Homo sapiens
ctcaaagtgactgccaaatccagggctgtgcatagagtgactgctgacagcgtttgataagctttgctgtgagtccaaaagaatgatcggatagatgcctgtcttgcagcgcatctacattaatctcataacaaattattcgtctcatattagagaaagtttagctttcttagaagcttgatgggaaagagcctcccagctcttagagtttgattttcgcaactcagttcacatcttcttcttactccaggttcccagctccttgagccttgcccgtgaaggggttggagtcaggatgggaagccttgagctgccttgacctgctccatctctgactcagggatgtgccctgcttgtcacagcatgggtgtgctgggccttggggcatcttttcaggcagagagcaagacgttggcattgtggaaagctgtacctccaaacagcagcccattcacagactacagaggaagaaaagaccacacttgctacagtaacaatgcaattcagtaccagggaataacttaacatgaaacatgtcaaatctatgtaaacaactggaaggcactcctaaaaaatacaaaaaagaatttgaaaaaaaaaatcatgttctaaattagggaagtttgaggttctaaatatatcaattcttcctaagttaattta

SEQ ID NO: 6542 - DNA, 320 bp, Homo sapiens
gctgattggtccataggtggtcataggcaggcctggaaaaagcaccgtctgattggccaaaaggcatcagtgaagttctcactccaggttgcggactccacctggaacggacagctgagcccccaggcttcaggccatccctggcttaaaggtagggtttcactagagacccaccccttcctgcctaggaacctgtctgcctcccactgccatcaacatgccatccatggcacccaggctatctgcactgaggggcacccacatgcccacgctcagctgccctcaatgcccccagcctccctcccacactcatcactgcc

SEQ ID NO: 6543 - DNA, 320 bp, Homo sapiens
gctgattggtccataggtggtcataggcaggcctggaaaaagcaccgtctgattggccaaaaggcatcagtgaagttctcactccaggttgcggactccacctggaacggacagctgagcccccaggcttcaggccatccctggcttaaaggtagggtttcactagagacccaccccttcctgcctaggaacctgtctgcctcccactgccatcaacatgccatccatggcacgcaggctatctgcactgaggggcacccacatgcccacgctcagctgccctcaatgcccccagcctccctcccacactcatcactgcc

SEQ ID NO: 6544 - DNA, 512 bp, Homo sapiens
taaagatttaatgaaaattggaaatgtattaggctggtgcaaaattaatcggttttagtacaaaagccgtgattacttttgcaccaacctaatacatagtttcaaggtatcttcccacaagtatttattaattataaaggaaaatagagtaactttacatggaagaagtgacagatacagctatttttctgagagatcaaattaaatattaccagtgttcatatacactgaaattctacatcatggttagcatgcaatgagaagaacatagcagcatttttgttatattattgccaaaccattagagtcagagtctaaccattagaaaatctaaaaaaaaaaaaaagaaaaaaaaagaaaaagctaagtgcatactcaaattgtttcccaaacctggaaatattctacaaaaacacttgttccatagttttagaaattatacagaataggaaagtcaaagtaatttcaaagaaaatgagacacatgacaactaaaagcaaacagttttattt

SEQ ID NO: 6545 - DNA, 512 bp, Homo sapiens; identical to SEQ ID NO: 6544

SEQ ID NO: 6546 - DNA, 472 bp, Homo sapiens
acagtgcagtgtaagcttaagaaggtgtggagaggatgggagtcactcactgggcaggaatggcccagctccagcaccttgctatgaccagccagctgctgggaacaggccaggaagagtgtggccttagcgcaaacactggggtggatctcgagatgaaggtgtggccgctggaagctgtcacttcaccactcctcttctgaagagagagctgagccctgcacatgggagcattggtgaaaagggtggtagacgtttatcagtaaccttactggttttgtgctccatcctccatctcccaaagtccccctgaccttgccttcagctccaggaatggccacatgactcagacaaagccaaccagccatcccatttcagtggccagtgatgaatgattcagtgtttacccaaacgcatccaatcagggtgaatctgaggacatttgctggggaggctgggacacagataatct

SEQ ID NO: 6547 - DNA, 1525 bp, Homo sapiens
gatgccgcggattagcgggttggctctcagggcggggcgcaggctttctcactgatccgggagcgtgggagcaggggcaacgcggggccatccgggagctgcccgcctgcttcgcagttggctttccgggccctcgagcaacgtctgactttgccctttgtttttaaacaccatgcaggatggtttgtgtacaaacgaagccgtgtcacttctcaagtgtcggtgctcaacgtggcaacgcccctcccgcccccagtacagagatcctgcccatccaccgacaatccccctcctcatcttccttcccccaggtgcgagtgattcaaggaaatccgactggagggaacacacgctgcgatgcaccctctcctcttccattgagccaggggtgaccttgagagactcaggccacctcaccaggctctaccaggaacagcgtctacagctggtagagagcacgggctgcagagaggtaaagatggggttcggaagccaaggctccccttgttgcatgggtgacatcaggcaagctactcaacctctaaccctggcttccccttctgtatactggagacagtatcggccccacaggcacttgtggagcaagtgggtttgagctgagctcctctgaaaatcagaggcacactcagagagtagctcagaaaaccaggatgtgtcagtttcatttgctgggaagcagaagccaagatagaattagaagtgcaatgtctgtgaaggaagaataaagggaaaaggaaacaggagtggggcagggggcagaccaaaaggaagacagacaagtgtgagaaggagccccacagtgcagtgtaagcttaagaaggtgtggagaggatgggagtcactcactgggcaggaatggcccagctccagcaccttgctatgaccagccagctgctgggaacaggccaggaagagtgtggccttagcgcaaacactggggtggatctcgagatgaaggtgtggccgctggaagctgtcacttcaccactcctcttctgaagaaagagctgagccctgcacatgggagcattggtgaaaagggtggtagacgtttatcagtaaccttactggttttgtgctccatcctccatctcccaaagtccccctgaccttgccttcagctccaggaatggccacatgactcagacaaagccaaccagccatcccatttcagtggccagtgatgaatgattcagtgtttacccaaacgcatccaatcagggtgaatctgaggacatttgctggggaggctgggacacagataatctcttttctgacagatggtaacaagaaagtaggtagctgcaggggctgctggcagccatcttgagacatgaaaggtgtccaaattgggatgaattcagcactgaagatggtggtacagagaaacaggagatagggcctttgatcacattgttggatggctggttaagcctctcctgaaatccattctactgctggactttacagttcataaactaataaatcctctttactgtttgaa

SEQ ID NO: 6548 - DNA, 119 bp, Homo sapiens
cgcctgtaatcccagctactcaggaggctgaggcagtagaattgcttgaacccaggaggcggaggttgcagtgagctgagatcgtgccactgcattctagcctggcaacagagtgagac

SEQ ID NO: 6549 - DNA, 670 bp, Homo sapiens
gatgccgcggattagcgggttggctctcagggcggggcgcaggctttctcactgatccgggagcgtgggagcaggggcaacgcggggccatccgggagctgcccgcctgcttcgcagttggctttccgggccctcgagcaacgtctgactttgccctttgtttttaaacaccatgcaggatggtttgtgtacaaacgaagccgtgtcacttctcaagtgtcggtgctcaacgtggcaacgcccctcccgcccccagtacagagatcctgcccatccaccgacaatccccctcctcatcttccttcccccaggtgcgagtgattcaaggaaatccgactggagggaacacacgctgcgatgcaccctctcctcttccattgagccaggggtgaccttgagagactcaggccacctcaccaggctctaccaggaacagcgtctacagctggtagagagcacgggctgcagagaggtaaagatggggttcggaagccaaggctccccttgttgcatgggtgacatcaggcaagctactcaacctctaaccctggcttccccttctgtatactggagacagtatcggccccacaggcacttgtggagcaagtgggtttgagctgagctcctctgaaaatcagaggcacactcagagagtagctcagaaaaccag

SEQ ID NO: 6550 - DNA, 1302 bp, Homo sapiens
caaatatgtatccgttttttaaattttttaacaaaagatgcatataccaaaagcatcactcactactttagtcagattcagagaaccctcttagaccacacttgagttattgtcatggaatagctttttaaaatggctggaaatgaagatagtctcttgaaagaacaccttttcctacctatttcagtattgtagtcaaatcttgaaatacaaattttttttttcaatggcatggtctcggctcactgcaacctccgcctcccggcttcaagtgattctcctgcctcagcctccccagtagctgggatcacgtagcgcccgccagcatgcctggctaagttttgtatttttagtaaagacagggtttcaccatgttggccaggctggtcttgaactgccgaccttgtgatccgcccgcctctgcctcctaaagtgctgggattacaggcatgagcccggccgaaatacaatttaattaaaatacttattttcttattagaaagctgcctctcaatggcacctactgctacatttacatagtaacccaaaattgcagttgcttagcagggagagaatcacagtgctggatattatttatactttttcttccaaaacgatttgaggaagtactgtgctggccattgtttacatcatattaggagatctggatgtcactttcttttcccatatcctcgatttcctcactttttaaaatgtcatgtgtttttgtaagttttcttaaatcctttggaaatgtgatgacggtgaaaaatccctgaaggcttctatacacctgttggcatggaatattttgcaacccgtttcttccctacaaacagaagagacaactaaatacggtttgatctacatctgcaagagcctagccattcagtattaaaaagtgatggccctggttgacggtaccacacctgaagacctatgccctttccttcacactccctacttctgcatttcttccctcctgaacgtctatcaagtggaccatatgaaattgccagtattcaactgttttttatcttaaaaggtgacaattctatatcattcaacctaaattaatgtctcaagaacataacctttgtttctattattgtgaccttacttttaaccatcctagagctctttaacctgttcacactggatttcaaggatcttaagttgttctactacataatcactatcacacttcagaaacattttagtttacattaaatacacttaaccccctcatatttcatctcttcctttctcaaaaatagtaataaataacctcaagccattaaa

SEQ ID NO: 6551 - DNA, 241 bp, Homo sapiens
tttgttttgttttttttttcaggagtggggatatgttctaccgtatcgccataccctttttgcaaagtgttagtccagccaccttgagagcaaagtacttggccacaggagttaaattcgtttcttcattgataccaattggcaaatgatatgagacatgaattgtcttttttctttcttttttggggggtggggacggcacgtccgcagaccattttgacaagcaaaaaaaacacttctg

SEQ ID NO: 6552 - DNA, 608 bp, Homo sapiens
gtacaccaaatcccacagggtgacagacaaatgagaccccccaaacccaagaggaggaagatctccagataacagagactactccactaatgcgcagtgtttattaaaggaacatgcacagatgtatctgtatataggtattgatatagccacagttatatcaatatttagactatggcagatagctaccaccaccacagggtgctaaaagaaacagtgatacaaaatttttttgatcaggaaggataatgaatgctggaaaagccaatcaaagtctctgtgtgatgagagtgatcaatggtcaagagattactgagaaactctttttctataatactaaattgtgattataagaaatagtccaaatgtttctgaagaattttcaatgttgtatatagaaaatacagaatttcatggtgatatcagaaatgtaaatattgtacagtattgtcatgtacaagcgtacctaatgcacactttatcttttattgtacaaagaaatagtgtacaaaattctttggtttctatggagtacacctaccagagactaccagtgtaaagtgataaataaaaatacaacctaaatgcttttctatgataatgtaaaa

SEQ ID NO: 6553 - DNA, 608 bp, Homo sapiens; identical to SEQ ID NO: 6552

SEQ ID NO: 6554 - DNA, 603 bp, Homo sapiens
gttttataaaaaaaaatcttagatggaatattttactcagccatttctgtagttaacatttgatagccacctgttgaagcagatagcttatactgactgcaccaccgctggtgctcagaattgagggtttttttgcaaatgatatctgacaaggtaaaactttctatttccgtacatggaggcaaaaaccccactttgcaaccattatcagaggtaagattgataataattcatttttttgtagtggcaaatataaatatgaatcatcaaagcaagtttcatatccattcatcagtattacttaacccagaagttaaggtggcttacggaattattagcaatggtaatttttttatcagtattgtgtaacatatcagatttattttatttaaagaattatttataccattaacagattcttatatatattaatgtggcaaaaatgtgcaggttaaatctattaaccaaattatttatattatattaagtaagaaaaaatgtgaaacaaatgtagagagaaaatactacattacaagtatacaaacctaaaactgtgagccattgtaaagtacaaggtaattaataagaaatgtagcacaacat

SEQ ID NO: 6555 - DNA, 541 bp, Homo sapiens
  SITE (11): n equals a,t,g, or c
attaatgaaancggtatgaaaaagcaactaaaaagaactaatcaaaaataaaaagcttttgcagcttaccgaggaaaaaaacaaaaataaaaagcttgaatttaaaaattcagtccaaaggaggagatttttagaaggttccatactgaaatgaatatgcaagcatagtacatttctatgtttcaaattagcccatggagttggctatccctaatgtaatcactaaaagtatctagaagatctaaataaaggaatgatcatttcagagcgtatgctagaatgctgaagttataatagtccactagttacttaattctgcatttctgaagtgttgcacttgcaaacgattatcagtagtgtttttaattagaagagatgttgatgcaggtttatatgtatcaaaaacacatgacttcttagtcttaaaagtgactaagacttcttatttctgaaaacaaacccaaaaccggaactgagaatgaatattaacaaaataaacccacgaaaagtttttggtgttctctgccaaaaaaaaaaaaaa

SEQ ID NO: 6556 - DNA, 6715 bp, Homo sapiens
tgctagggccagcttgcgcattcttactgttggggtgcggcgagtgtctcacctctctgcacttccaaggactcttgtcatctgctttaggcgggaaatgctgttgctggattgcaaccccgaggtgagattcgggctcacagagcccgagcttttgtcttgcaggctcaagcttctagattcgtcttctcgttaatgcggggacggaccactgggcgctgcctggtcagagctggttgtgaagggcggggaggtttccagcccggaggggcgcgggactggacaaaggtgggaagggtgctggatctgttctcttcctgcaggtggatggtctgaagcatttgctggagacaggggcctcggtcaacgcacccccggatccctgcaagcagtcgcctgtccacttagccgcaggaagcggccttgcttgctttcttctctggcagctgcaaacgggcgctgacctcaaccagcaggtaactaggtaactgttgctgtgtacagccgtcccctccaacccagacacacacaaacatttctcagacgccaagagttgtttcagctgttaaaaacatgtctatagcagcgatgtccaacagaaatataatgcaagacacagatgtaatttaagagtttttttccagtcttgatgtgaggacatgagaaatttgaagtttttaagtagccacattaataaacgaaacatgaaattttagtatttgacccaatttgtccaaaatgttatcagttcaatatgtaatcaaagcaattgctgattagatattttacactttcttttattctgtcttcacaatctggtgtgacagcgtatctcaaatcagactagccacatttcaaatactctagccttaagtggctgttgactatcatattgaacagcacagatctagtttatttcaaaagaagtaattgctacattaccaaaagtctccctgcagcaattgaaatacttaggagctatgtccacaagcattctaatttcctaaagagttttcttactgtagtttgcatcttccactgaatattaaagcatggtgaattttaaattgtaaacttttctggaagaactctttttatttgcttacattttaatgtatgtgcatatggctacacgtttttatttatttgagacggagttttgcttttgtcgcccagactggagtgcaatggcgcgatctcggctcactgcaacctctgcttcttgggttcaagagattctcctgcctcagcctccctagtaggtgggattacaggcacgcgccaccgtgcccggctaatttgtgtatttttagtagagacagggtttcaccatgttggccaggctggtctcgaactcctgaccttaggtgatccgcctgcctcagccttccaaagtggtgggattacaggcgtgagccaccgcgcccagccacacatttttattaatgaaaacggtatgaaaaagcaaactaaaagaactaatcaaaaataaaaagcttttgcagcttaccgaggaaaaaaacaaaaataaaaagcttgaatttaaaaattcagtccaaaggaggagatttttagaaggttccatactgaaatgaatatgcaagcatagtacatttctatgtttcaaattagcccatggagttggctatccctaatgtaatcactaaaagtatctagaagatctaaataaaggaatgatcatttcagagcgtatgctagaatgctgaagttataatagtccactagttacttaattctgcatttctgaagtgttgcacttgcaaacgattatcagtagtgtttttaattagaagagatgttgatgcaggtttatatgtatcaaaaacacatgacttcttagtcttaaaagtgactaagacttcttatttctgaaaacaaacccaaaaccggaactgagaatgaatattaacaaaataaacccacgaaaagtttttggtgttctctgccaaaaaaaaaaaaaaaaaaaattccctgtccagtacaatgcagttctaactagcttccttaaatagctaatattaaatgtcactcatcaactttcacaaaaagtgtttttgggagactctaaaatgcaccatcttaccttaaggatgttttaggagaagctccactacacaaggcagcaaaagttggaagcctggagtgcctaagcctgcttgtagccagtgatgcccaaattgagtgagtatgaaaacagtggcttcacattttatgttttcttggattaaactaatcagactcctgaagcttagttacatgtgcttttaaaaataatgcttgcgtaattgataatttagtgttaatcatttaaatgttaacttaggttgttggtgctatcgaataatactcagttcgagtaagtaaaaagtcagatcctgagcaatcagaggtgcaattttgttcattatgactgtattctacttcagtttcggttcaggaaaacccattctatagttcccattgactacctttgggtactcatacactgtattaaacatcagataattctaacattcattcagaactggaatgcccgctctatgctggattctgttagttgctgaggatacaatagtgaccaaaaatgcaatttccttatgcatcctttacctcttctgttctgcaaccaacatttgtatgagcccaaaattcccttgtaagatataaaaaaaaagacttaagttcaatgtttcatttcactccgtttttatcctgttttcagtttatgtaataagaacgggcaaacagctgaagatctcgcttggtcatgtggatttccagactgtgccaagtttcttacaacaattaaatgtatgcagacaataaaagcaagtgaacaccctgacaggaatgattgtgttgccgtgctcagacagaaacggagtctcggaagtgtagaaaataccagtgggaaaaggaagtgctggtaagtaactcagagctgctgcttttttcctcccgcagtgatctcttgtttgcatagcatttattattccatttaatactgacactcgtatttctagtagtattgtttcattctcattaacattttagtactggttatacttaccagagtctagagaccaaaaatgggactgcatggtggaagtttggggataaaactctttttaaaaaaaagtttttaatgttaacgtgtttttaaaaacagatgtcacgtgggttatgaagaagtctgaagaacgccttcatttcatgcaaatctataagctcctgcttttggctttaccatatgttgtgtctaatctccttctgagaaggacgaaaaactttcttccaagtgaagatccatttaagaacacatgtatttacatgcctataatatgctggttgtgtatgctttgtcttttaagttattaaaggaacgtctaaaaaatacattctccgtgcagtatttacaacctttgaaaaaggtcataatttaaatcgtcaaactagaaccaggatttaatgtgaaaaattaaactgattctttattcacaaatttataataccactctactgcagtctttgactccaagatattttaaatcatatttggtcgctgaggaagacataagttatagtatgcatccttgttccaaaaatctgggcccttccatccgcaccagccctggatagagaagacgggaaaggaaagccttttacaaagttacaagattatgtcatggaaatcgtgacatcaggctctgtcagcaggaccttggaataagactctaaatggctttatcattcaaggatttgaattcctactagcatagaaaagtaacgtatcttaccctttaaggtaggtttttgaacttttaattctatgtatgtaattcatcataaaaatcattaaaaaaaatttacctgtaactgttattccagataccacactttactgattctgagatgtatagttttaccacttgcaactgatagcatgtgacaattgaactagcaatctgtttttcttaatagtccataaaggactgtaagagaccattcagtggcatcttaggattgaagtactgtagtgagaaacctcagcttgccccctgcctggcactctgtgccctttcattttcaaattccaggtgttactcaattctacttcccatgtttcatgtcagtattaatcctttttgccagcagagaaaattactttcaagcaaaatctcatttagagtatgaaaatttctcagatttctcctagggccactgagttattttattaaagaagaaaacttaaaagccaataactggtctgtattatatgattcttaaatgctttgagaaatccttgcaaggaggctgagactctgaaaataccatgaagtgagtgacaagcagcggtctgactccctcctaataagatacacgttgtcaaaaaacaagataaaagtaaaaaatcctctaccagtcctaggtaatcccccactctccctaggtaaccagcattctattaatcatctcattttttcagcaaaactttctctattaatttaatgtcctaaaatctgttctcttaacagacagagaaaaaaggctcattctgttttaacctttttttgatccttttacacatgaaggccttgtccaggtaaccagatccagattttttaaaggagaaattggtagagagggtgtcagaatgggattgcatagggacatagtgcataggacatgcttctttcctgtgagatgaccagcatgggaacttcaaacaggaaagcaccacaagaaggcaaagaggtcaggcagagatggaactctcctctggcctcctgggttcctggagtcaagtgaatcaatagttttaatggcaggaccttggctgcacagtttcttgtgtatacaaatagagcaaggaggtttctgctgttgaaaagttctatagaaatagaactagcaaagatggagattgcaattctcagagaaagaaatcagggacaatcccttactctaattgttcagaaaccttacctagataatgccatgtagtgcagagccccttgagtcaaccagaaaagagaaatttgatgatgaaaataattaaggcttctccctgcctttaagaaaaaatcgaaatgcctggttcacaaagaccaccctttctgactgagcttggtgtgtccttccagcctcacctcttcgcctagctctggacgcactgatctacctgcagtgcggctttcactgtttctacaaggcaggggccaccacagcaccagcctcgtagaagcacctgagataccattttttttttctcgagagtcctttttgcactctccttctctgtcctaccctaaaggttttagctcccgaaaaacctcgtgtaatactagtgcttaggacagtgcctggcacttgttaggtactttaataaatactgaatggaatgaacaccttgctacagaacaagaatattgctactatattcagtaagatacatgcaccagtcaaaaaaccttttatagacttcaaattccaaatgctgtgaaagagaaaaggaaaaaaaaacacttaaaactgtaacaacacatttctatcctattagtgtttatacccttatcataaacaaaagacttcagtaaactgaggatataacagagttggactacacacattaaaaacttttttttgagctggaatttcactcctgttgcccaggctggggtgcaatggcgccatctcagctcactgcaacctctgcctcccgggttcaagtgattcccctgcctcagcctcccaaatagccaagattataggcgcccaccaccacacctggcttatttttgcatttttagtataaacaggatttcaccatgttggtaaggctggtctcgaattcccgacctcaggtgatctgcccacctcagcctcccaaagtgctgggattacaggtgtgagccaccacgcctggcttaaaactctttaacatattaaaacattttatctttagtttatagtttaaaaggtggttatgtattctctgcaatttcaatgtatttggcagcgaatataaatgttacttaaaattcaagttaattatgttttacaatactttctcctaaagacttggtactgagttttcatatgtgagaattagttgcctatgaattaacaaatttttacctcctttatctgctattgtaagtaagaatactcttaaatatgtatcaacttcaaaccctttatagaatgagattaggttatatgtaaatgaattaaaattagtcaagcctccataatgtctagcatactgcttagctatcttttggttaattctaaaattttaaaagtttatatattctgctcatctattttaagacattgataaactttgatacatttgtttatgaaagctctaaaatctccaaaggaatatatttatgagtgtgtgtcctattattaattttaatagctgagaaagtttctataaacctaaattttgtcttttgcaatgtgctttgttcttgcacattccctatacagagacggctacttacaacagcctcagaaggcctccacacagggagatctctgccctcagcttattgtctttctgttaccagccagtttgtgatccttcatttctagcttctttgccttttgtctcaatttgtgttaaatggatacttaccttttccaaaataacttgcaggtcttcagcaccggtataatgtggatc

SEQ ID NO: 6557 - DNA, 483 bp, Homo sapiens
gctagattcaaagattttctgattggcaattggttgaaaagttactgactaaagacttaggaatgtctttagagaataaaggggttgtggagaccaaggttttagtgagaatgggataattggtgtggaaaacacaatttggtgtcagaagtgttgtgaatacatagttttccaattgagtttctggatgagattaacatttcaattggtagactgagtatagtacattgtcttccccaatgtgggtgggcctcagccaatcgaccgaagacagaatagaacaaaaaggctgacctcccaggagtaagagggagctcctacagccaaacagcttgagctggaacacttttccagccttgggctcagactgggactgcacatcagtttgcttgcatctccagcttgtcaactgcagatcctgagacttctcagccttcataattgtacgggcaaattccttataataaatcttttatacacaca

SEQ ID NO: 6558 - DNA, 412 bp, Homo sapiens
ctaaaaaactaagaggaacaaaaaaagaacattgaacatcaggcaataagggaaaacgatcaccaagagatgagacacaaatgaggcaagctcccaaattggcctgggcctgccagggtacaaagcagaaagggagaaaacaggcagaggctggtggttgccctaagttgaggaaacggagtttctctaagagtctagagagaacaaggcagctagactttgcagggcagatattggaggggagagctgcacagggtgttcccagaccaaactgagggttgggttgctatttcttgtgacccagtaagaacatgtagatgaactggggaggaagagagtttttatttctggaaccagttacaggcagaagccctggaaactataaccagaccaactcaaaattacagttttc

SEQ ID NO: 6559 - DNA, 411 bp, Homo sapiens
ttgctcaagacgctggggttagacgtgctccggctacacagcggagtgtcagggggccaagaatatccctctcctttttcttccctcctgctggctttggttgctttcctaaacattgccccggacggcaaagtcggcttcactcttagcccttgttagggaaacgctggatccaagattagctgcgcccttctttgcttcagttgaacaagcaccagagtcgctgatttggcagtgtcggagcgggaggaactggtcttaaaaaggtacctcctgaactcgggaagactgctaaccctccagattattgttttgcatctgtgtgctgttcatgaacatacctcagagctgctcactgcaacttgaaatttcattatatttttaatcacaaagtttgcatcctacccttga

SEQ ID NO: 6560 - DNA, 5150 bp, Homo sapiens
ccacaggcattcaccaaggacttcgaggtgagccagctctatgactgcaactggatcgtggtcaactgctccacaccggccaactacttccacgtgctgcgccggcagatcctgctgcccttccgcaagccggtgagtctccgtcccagggcaggggtcacaggcagggggcctggccaggcagggccagctggcagctgggcgtgtatttcccttccagctgattatcttcacacctaaatctctgctgaggcacccagaggccaagtccagctttgaccaaatggtatccggtacgtgcctggcctgggtgtgtggggtagcccacaatggggcggtggcccattgtgtggcttctgcttctggggcttctccaacctcccctctgcctgtggctctgctgacctgcagcagctcctggcatggtcccactagcagtagggttgggaggttggcacaatggctgacctgggccagctcaggtcatgtgggttgcgtccatggtagagtccactggggcccccttagaccctagcagggctggtcgaggcctggcagaggcctgctgagttcgcaagatattgagtatcattcattcatttgtccattttaaaaattcatgagccaaacagacattacaggccctggggtcctggtgtcccctccaggagtctttggccttatttccctgggagtcagatcagataaaacactatagttgcaactgagaggtgactatgtccagggaaggacaggtgtgaggctggtggagcagagctgtcttggaaaatggtcctgggcagtagagggagggctgggaagggcctcagcatggacaggggttggattttctcccatgtgtgtttggatgtcccctctgtgcaggtgggcagctgttagagctctgatgtcgggactggactacctgggctacctgccctgtgctggcttctctcttgagggcctgggatccatttgtcctctctaccccagagtcttcacctgagatgcagggatgtgaggacactacagtagcttcctgagaggttttgcagtgtgcgtgacctggggtcaggatcatgggctcaggaaggaagaatggttggggcttggaggtgaagctcagctgccaggctgaaagaggaggagcatgcagcagcctcctgggacatctgcttagtggtgggggactgcagtgctctgcaggaggtgggcgcagctgggcagaagcaaggttggggcaaaggatgatgccatcatgttgccttctctgtctccttcagggcgcttcttattgtacccccacctccggtcaccttaaacgtgatgcttccagggctcaacccttgggtgtctccacccctctccctatgacagctcagggtgtcatctgccccctgctccatcttttagttcaagaggtgtccactgcagccacaagtccaaacctgcagttagtgtcagtggctaaggagagcctggggatgcaggcctggtcctgagctgccccagcccctctgggtaccaacgcctctgccatgtcctgttggtccctcagggaccagcttccagcgggtgattcctgaagatggggccgcagcacgggcccctgagcaggtgcagcggctcatcttctgcacgggaaaggtgtactatgacctggtgaaggagcggagcagccaggacctggaggagaaagtggccatcacgcgcctggagcaggtgtgcctgaaccccttgtacagtcaagtgatgggcaagctcacgtcgctggccccggctctggccaatgtgccaggcaggccagatgaaggccggtgaggccctgtgcctcctgtccgggggtgctggggacataccgcccctcctctggctatgctcctttgtttctgcctccccagatctctccattccccttcgacctgatcaagcaggaggcagagaagtacccaggtgcggagctggcctggtgtcaggaggagcacaagaacatgggctactatgactacatcagcccacgcttcatgaccatcctgaggcgcgcacggcccatatggtacatggtggggccgctgattgcccctcacctcggccctgaggctctgtcctggctccatctgtcccataggccatgctacccagaactggccctgcccttctctggtgatgagcaatgatggggcatcatcagtactggctttgtgtttgttctgcagccagaactgtattaaggaacctgctacatgtctcaaaactcctgccttagatcttaggccggttatgtagtccttggagccttagtccctgcatctctacaaagggcggtgataagattagatctgatgtatgtattagctctggcacatggtgcgttcccaatactggcatcatgtgttcctgggaagatgggagagggtcctgagaaactccaagaagccaaaagtatgtttgtccccaaagtctttgagttgttgcctcatttgttgtcctcatgggcaagtgcagtgacatggagggacagtttctccccactcttctgtggctaggtgactgagtttgatccgggctttgcagctcattggaagtggtgccagggccaaaaggcagggtctatggcttcgaggtcagcggttctcagatgcgtgccccctgcagtcccggagtgagggcagcggttggggggcggctaggccccgccttccccttagcttgtctctcctcctccaggtatgttggccgggacccagcggctgcaccagccacaggaaacaggaacactcacctggtgtcactgaagaagtttctggatactgccttcaatctccaggcctttgagggcaagacattttagagctgggcaaaacctgtgtaggtctcgctgtgggtttgctggggaccaagggggtgatgaaaaggggaggggcggagctcctgcccaggagaggggctgtggggccccaggataaaacagacacagtgacagggccaagagccagcactgctggccttggtgtcatgccagaatctaccaggactgagggagccagaggagtcctataggcaggctactgtgctggagcatcccccagctgctcccatcttgctggaatttcttgggcggcttctccacctgtatctcaagacagacacccgggggcctgtgtctgtggccgctcccatcccggcagccctggctgctgctcgccccaccctcgcttatctgtagattcaaagcgatgttctcttctgtgctcttagaagtagggagttcagcagtaacagccaggtgaagcgaacctgctgggtgatttgtttgcgctctgttttatggggcattcctgcgagatgtgtcagcttctgtgtgaaatgcagccacagctcatgtgtaccaaagtagaaaaccaaatcacagagaaataaaaacatgcttcagagagatttgctgttttcatttcatgttgtaaaactgggggagggataggcagttgagagaaggtagggaatggggagaaagttaaaaaaatggagagaagaaaatatctgcctccatggatatttttttgagacggagtttggctcttgtcacccaggctggagtggagtggtgcgatcttggctcactgcaacctccgcctcccagattcaagtgattctcttgcctcagcctcctgagtagctgggattacaggcatgcgccactatgcccggctaatttttttgtattattaatagacggggtttcaccatgttggccaggctggtctcaaactcctgacctcaagtgatccgcctgccttggcctcccaaagtgctgggatgacaggtgtgagccactacgccagattttcatttgagcaccaggtagtgtctgttggcttctccactctggccttttgtgggttttgcttccctgtggagatactggagaagctgccacagaggagggatgttttgcttggaacagatcatgtgttcatttatccccttctcagagcacttcctccgtgcgggacactagggcccgggtggaaggcatctgtctgcatgctggcttttcgcatcgggagtccagtggggagacatgtcagctgtttaattcattgagttacgagttatgttggaagtcaatgcagacagctgtgggtgtcagggaaggatccctggaagaggtggtgttcaaaggaagaggaaaagagagatgaacctctctggaacagacagaaatactgaccatagggctggcatgagcaacctaaaagaacgatcagcgtgaggttggacagtggagtgttaagttttatcagcctcaaaaatagcttgttgaaaaattagctgggcatggtgacacgtgcctgtaatcccagctactcaggaggctgaggcaggagaattgcttgaaactgggaggcggaggttgctttgagccaagatcgtgccactgcactccagcctgggtgacagagcaactctgtttcaaaaaaaaaaaaacagagtatgtcttgttgagatatactttgaatcctaccacagggacattcaaagtgacataaagtgaaaagaattgtagcccccatttatagtgtctgtcgtgtcttgggccttctgctggatgttttgcgtgtgtaattaaacgctgtctaatcttcaccatggctttgcatgttgggaatatttccattttatagacgaggaaatcgaggttcatataaagttatttgcccaaggtcacttcctaaggaagtggtggttttggacttcacctctgtcctcaagaccacattgcttcccttggggaaatcagctcttcccataccatgcattcctagccccacagaaatccactagtctgggctttctctgcgattggctgaggcagcaactggtgaggcacctgggctgtgcaggagcccttggggatcagatggtggatgtggcctgcccaaggtgcatacagtcccttccttagtgtgggtacgggaaggctgtagataggccagaggtcatctcctgcaggaagaggtacaatcagccaggcatggtggctcctagctatagtcccagttactcaggagactgatgcaggaggatcacttgagcccaggagtttaagaccagcctgggtaatgtaacaagaccctgtctctttagga

SEQ ID NO: 6561 - DNA, 5151 bp, Homo sapiens
ccacaggcattcaccaaggacttcgaggtgagccagctctatgactgcaactggatcgtggtcaactgctccacaccggccaactacttccacgtgctgcgccggcagatcctgctgcccttccgcaagccggtgagtctccgtcccagggcaggggtcacaggcagggggcctggccaggcagggccagctggcagctgggcgtgtatttcccttccagctgattatcttcacacctaaatctctgctgaggcacccagaggccaagtccagctttgaccaaatggtatccggtacgtgcctggcctgggtgtgtggggtagcccacaatggggcggtggcccattgtgtggcttctgcttctggggcttctccaacctcccctctgcctgtggctctgctgacctgcagcagctcctggcatggtcccactagcagtagggttgggaggttggcacaatggctgacctgggccagctcaggtcatgtgggttgcgtccatggtagagtccactggggcccccttagaccctagcagggctggtcgaggcctggcagaggcctgctgagttcgcaagatattgagtatcattcattcatttgtccattttaaaaattcatgagccaaacagacattacaggccctggggtcctggtgtcccctccaggagtctttggccttatttccctgggagtcagatcagataaaacactatagttgcaactgagaggtgactatgtccagggaaggacaggtgtgaggctggtggagcagagctgtcttggaaaatggtcctgggcagtagagggagggctgggaagggcctcagcatggacaggggttggattttctcccatgtgtgtttggatgtcccctctgtgcaggtgggcagctgttagagctctgatgtcgggactggactacctgggctacctgccctgtgctggcttctctcttgagggcctgggatccatttgtcctctctaccccagagtcttcacctgagatgcagggatgtgaggacactacagtagcttcctgagaggttttgcagtgtgcgtgacctggggtcaggatcatgggctcaggaaggaagaatggttggggcttggaggtgaagctcagctgccaggctgaaagaggaggagcatgcagcagcctcctgggacatctgcttagtggtgggggactgcagtgctctgcaggaggtgggcgcagctgggcagaagcaaggttggggcaaaggatgatgccatcatgttgccttctctgtctccttcagggcgcttcttattgtacccccacctccggtcaccttaaacgtgatgcttccagggctcaacccttgggtgtctccacccctctccctatgacagctcagggtgtcatctgccccctgctccatcttttagttcaagaggtgtccactgcagccacaagtccaaacctgcagttagtgtcagtggctaaggagagcctggggatgcaggcctggtcctgagctgccccaacccctctgggtaccaacgcctctgccatgtcctgttggtccctcagggaccagcttccagcgggtgattcctgaagatggggccgcagcacgggcccctgagcaggtgcagcggctcatcttctgcacgggaaaggtgtactatgacctggtgaaggagcggagcagccaggacctggaggagaaagtggccatcacgcgcctggagcaggtgtgcctgaaccccttgtacagtcaagtgatgggcaagctcacgtcgctggccccggctctggccaatgtgccaggcaggccagatgaaggccggtgaggccctgtgcctcctgtccgggggtgctggggacataccgcccctcctctggctatgctcctttgtttctgcctccccagatctctccattccccttcgacctgatcaagcaggaggcagagaagtacccaggtgcggagctggcctggtgtcaggaggagcacaagaacatgggctactatgactacatcagcccacgcttcatgaccatcctgaggcgcgcacggcccatatggtacatggtggggccgctgattgcccctcacctcggccctgaggctctgtcctggctccgtctgtcccataggccatgctacccagaactggccctgcccttctctggtgatgagcaatgatggggcatcatcagtactggctttgtgtttgttctgcagccagaactgtattaaggaacctgctacatgtctcaaaactcctgccttagatcttaggccggttatgtagtccttggagccttagtccctgcatctctacaaagggcggtgataagattagatctgatgtatgtattagctctggcacatggtgcgttcccaatactggcatcatgtgttcctgggaagatgggagagggtcctgagaaactccaagaagccaaaagtatgtttgtccccaaagtctttgagttgttgcctcatttgttgtcctcatgggcaagtgcagtgacatggagggacagtttctccccactcttctgtggctaggtgactgagtttgatccgggctttgcagctcattggaagtggtgccagggccaaaaggcagggtctatggcttcgaggtcagcggttctcagatgcgtgccccctgcagtcccggagtgagggcagcggttggggggcggctaggccccgccttccccttagcttgtctctcctcctccaggtatgttggccgggacccagcggctgcaccagccacaggaaacaggaacactcacctggtgtcactgaagaagtttctggatactgccttcaatctccaggcctttgagggcaagacattttagagctgggcaaaacctgtgtaggtctcgctgtgggtttgctggggaccaagggggtgatgaaaaggggaggggcggagctcctgcccaagagaggggctgtggggccccaggataaaacagacacagtgacagggccaagagccagcactgctggccttggtgtcatgccagaatctaccaggactgagggagccagaggagtcctgtaggcaggctactgtgctggagcatcccccagctgctcccatcttgctggaatttcttgggcggcttctccacctgtatctcaagacagacacccgggggcctgtgtctgtggccgctcccatcccggcagccctggctgctgctcgccccaccctcgcttatctgtagattcaaagcgatgttctcttctgtgctcttagaagtagggagttcagcagtaacagccaggtgaagcgaacctgctgggtgatttgtttgcgctctgttttatggggcattcctgcgagatgtgtcagcttctgtatgaaatgcagccacagctcatgtgtaccaaagtagaaaaccaaatcacagagaaataaaaacatgcttcagagagatttgctgttttcatttcatgttgtaaaactgggggagggataggcagttgagagaaggtagggaatggggagaaagttaaaaaaatggagagaagaaaatatctgcctccatggatatttttttgagacggagtttggctcttgtcacccaggctggagtggagtggtgcgatcttggctcactgcaacctccgcctcccagattcaagtgattctcttgcctcagcctcctgagtagctgggattacaggcatgcgccactatgcccggctaatttttttgtattattaatagacggggtttcaccatgttggccaggctggtctcaaactcctgacctcaagtgatccgcctgccttggcctcccaaagtgctgggatgacaggtgtgagccactgcgccagattttcatttgagcaccaggtagtgtctgttggcttctccactctggccttttgtgggttttgcttccctgtggagatactggagaagctgccacagaggagggatgttttgcttggaacagatcatgtgttcatttatccccttctcagagcacttcctccgtgcgggacactagggcccgggtggaaggcatctgtctgcatgctggcttttcgcatcgggagtccagtggggagacatgtcagctgtttaattcattgagttacgagttatgttggaagtcaatgcagacagctgtgggtgtcagggaaggatccctggaagaggtggtgttcaaaggaagaggaaaagagagatgaacctctctggaacagacagaaatactgaccatagggctggcatgagcaacctaaaagaacgatcagcgtgaggttggacagtggagtgttaagttttatcagcctcaaaaatagcttgttgaaaaattagctgggcatggtgacacgtgcctgtaatcccagctactcaggaggctgaggcaggagaattgcttgaaactgggaggcggaggttgctttgagccaagatcgtgccactgcacctccagcctgggtgacagagcaactctgtttcaaaaaaaaaaaaacagagtatgtcttgttgagatatactttgaatcctaccacagggacattcaaagtgacataaagtgaaaagaattgtagcccccatttatagtgtctgtcgtgtcttgggccttctgctggatgttttgcgtgtgtaattaaacgctgtctaatcttcaccatggctttgcatgttgggaatatttccattttatagacgaggaaatcgaggttcatataaagttatttgcccaaggtcacttcctaaggaagtggtggttttggacttcacctctgtcctcaagaccacattgcttcccttggggaaatcagctcttcccataccatgcattcctagccccacagaaatccactagtctgggctttctctgcgattggctgaggcagcaactggtgaggcacctgggctgtgcaggagcccttggggatcagatggtggatgtggcctgcccaaggtgcatacagtcccttccttagtgtgggtacgggaaggctgtagataggccagaggtcatctcctgcaggaagaggtacaatcagccaggcatggtggctcctagctatagtcccagttactcaggagactgatgcaggaggatcacttgagcccaggagtttaagaccagcctgggtaatgtagcaagaccctgtctctttagga

SEQ ID NO: 6562 - DNA, 116 bp, Homo sapiens
caagcctgaaatcccagcactttgggaggccgaggcgggcagatcaccaggtcaggagatcaagaccatcctggctaacacagtgaaaccccgtctctactaaaaatacaaaaaaa

SEQ ID NO: 6563 - DNA, 861 bp, Homo sapiens
caagcctgaaatcccagcactttgggaggccgaggcgggcagatcaccaggtcaggagatcaagaccatcctggctaacacagtgaaaccccgtctctactaaaaatacaaaaaaaaattagccgggcatggtggtgggcgcctgtagtcccagctagttgggaggctaaggcaggagaatggcgtgaacccaggaggtggagcttgcagtgagctgagatcacaccactgcactccaccctgggtgatagagcgagacgccatctcaaaaaacacaaccaaaaaaacaactaaccctgggaaataaaacaagctcatggaacaagcagaaggctttaaatgaactgtagtaacttcagagggcaaggagaatattgctgctatgaaataataacagactatttttaaaataattggatgttaagaaaatatgaaattttcccaaaattaaaacctcagtagataggctgaatagcagaacaaacacagctgaaatacaaaataagtttgaagacaaggccaaggaattctccaaagaaagttgaacaaagaacaaatatatatattttaaaattctttaaagaaacatggagaacacaggagtttcacaatgctgatactgcatctaacaggaatcccaggaggagaagacacaggggatctttgtgatggaatgtctgtctcttgactgtatcaatgtcactgtatcctggttgtgattatcctagagtattgtaagatgttattattggagaaaaatgggtaaagattctctgtgatgtagttcttaatgatggcatgcaaatttacagtgatatcagatacaaaagtttaattaaaaaatgagttgtctgctcccta

SEQ ID NO: 6564 - DNA, 1022 bp, Homo sapiens
cgtacaccgtgtgcaacagctccctctcggagtacggagtcctgggtgggtccacgctctcctgcaggccaggcaggccccagacacctggggacaagagatgggctgggaagggaccggggccagggcctgggaggggcgagagatgctcagaggcccttaggggatggccctgggggatggtgattgggctgccctcacctaaggccatgtgggaggtgaaatcgtgtcccatctgggccccttggggatcccagttggggggacctccttaccttgaggggttttgtgggtatcagggccccagtgggcgcagacagagagcccaacacagtctgctgtgggttccagctgctgagcagtccagtcttggcccagccctctcacattcctttgagccccatcttgcctcctctgccctgcaccctaggaacactgcactgagatcccttctctgggctctgggcttccctgcctgtgtcccctgtgcatgctctccctcagatgcatcattagctggctcacctcgtcctcactgcctgcccctagaggccaggcagccccccgcccccaggcagatgcctctagggctgtttctgccccttctccttagcagctctgcatgtttttaaggagttcttgacagatggtccctgttgcctccccaggatacctaaataaggttgaacctgaccacacatgatagcagggctgagggtagcatctctgagcatgttgtcagcccccaggatggtacattgtaccctttgaatcccagggaatccctgggttcgtcctggcttgtgagaaggatgggtgggggcatggaggatatactgagaaaggctaaatttgactggagccactgccacttggtgactgcgtgcagcaagctctatcttgtcttctgtttaggctttgagctgggctatgccatggccagccccaatgccctggtcctctgggaggcccagtttggggacttccacaacacggcccagtgcatcatcgaccagttcatc

SEQ ID NO: 6565 - DNA, 426 bp, Homo sapiens
cctgcctcagcctcccgagtagcggggattacaggtgcccaccaccacacatggctaatttttgtatttttagtaaagatggggttttgccatgttagccaggctggtcttgaactcctgacctcagatgatccgcctgcctcggcctctcaaagtgctgggattacaggcatgagccatcgcacccagcctatggtacacctttactgaggaaacaattcaggaacatcactcttagtaaggcaattgttgattataagtcaaaaaaacactatcatgtacaaattcaggggattttgtataccttgtttttttggttacaaatatgcaaaattaaagatgtttgctaatacttgtttccaatttttaaacttttcaagtgttgcactgttaataatgttaaaataaaaggcatttgacttagta

SEQ ID NO: 6566 - DNA, 6708 bp, Homo sapiens
tttcttttttttttttttttttttttttttgagacggagtctcgctctgttgcccaggctggagtgcagtgacacaatcttggctcactgcaacctccacctcccgggttcaagcgattctcctgcctcagcctcccgagtagctgggactacaggcgcgtgccaccatgcgtggctaatttttgtatttttaatagagacggggtttcaccatgttagccaggatggtctcgatctcttgacctcgtgatccgtccgcctcagcctccctaagtgctgggattacaggcgtgagccaccacgcccagctgcggaagagattttaaagctctccacatatttcagtgtgccacctgtgctaagaactacaactttattattttattttattttacttgtttttgagttggagtctggctctgtcgcccaagctggaatgcagtggtgcaatctcggctcactgcaacctccgcctcctgggttcaagtgattctcttgcctcagtctcccaagtagctggacaggtgtgcgccaccatgcctgactaatttttgtatttttagtagagacggggtttcaccacattggctaggttggtctcaaactcctgacctcaggtgatccgcctgcctcggtctcccaaagtgctggtattacacatgtgaggcattgcgcccggcctgagaactacaactttagacttactgttgtgaaaatctcaaactagcctctattgcaaacatgtgtttgcatcatataggcatgcatagacatgctgacggggtttatgttacagccaaaaagctaatgccaacaccaaccgctggcacttctatatttacttccaggagcccttgcctttaccacccataccccgctacccatgtacctcccactcccccagattgaggagggagctagctaataggcaactgaagcactggattggaactgcaactcaaggttgtgggagcaagagttctgaagtgaagaccttgatcagcacaaacctgatcatgtgaccttgtgaaagttacttcacaattccctgcttcggttactatggttataaaattaaactaatggaatggatctatttgctaaaaatatgagatttaatgagcaaataattttaaagtgctccattaattctgcgattgttaaataacttcactgcataaaattctatagaactctttcaaatatataaaaaaaagcaccccaatgattctttttttttttggaaacagggtctcactctgttgcctaggctggagtacagtgccatgatcacagctcacttcaacctcagcctcccaggtagctgggactgcaggcctgtaccgccattattattattattattattattttgtattttctgcagaaatggggtttggtcatgttacccaggctggtctcaagctcctgggatcaagtgatccgtccgcctttgcctcccaaagtgctgggattacagcggggagccactgcgcccagcccagccagcccgattctgacccagagggtttagaagttgcttagacagatctgctcctgtaagttcacagaactcctctggctactgctgtccctttttttcctgagtcttgtttgctgaaatcttcttgagattctgtgagacaatagcccctatttcttccagtaaattactctttttcttcccctttagacagccagtgctggtttctgttacatgtaaacaaaaaggattttattttttatttttttaggctagtcaagtgaagcagtgggaggcggaggacaaaaagaattttgactaaggcaataaatatattatacaagtgaagtatttcccaaactgtattctgtggaatgctgtgttctcaaatgttaacaagttccatacaagaaccatttatttctaaattctaaagtcacattcatattatgaattatattaaacatatatagttacttttattatacctaataatctgtctttataaaagtgtttacccaaaaatgccagcagattccatgagaaactacctgtactacaatgatcgtcaaactttggtgcatacatgacagaatcaaccggagggcttgttaaaggattgctgagtcaaacccctcgtttcagcaggtttgtggtggggcctgagaatttacatttcttttttttttttttttagacggagtcttgctctgttgcccagactggagtgcagtggtgcgatcttggctcactgcaacctccgcctcccggttcaagcgattcttctgcctcagcctcccgagtagctgggactacaggtgcccgccaccatgctcagctaatttttggatttttagtagagacggggttttaccatattggccaggctggtctcgaactcctgaccttgtgacccacccacctcggcctcccaaattgctgggattacaggcaagagccaccgcgccctgccgagaatttgcatttctaacaagttcccaggtgatgctgacactgctggctcatggaaccactgctgtagtattttccaaattatcctgattctaagaaccacctatgacctgtgctgttttttcagtggttactggctcatgtcacataaattcttttaggattcaaacatgtttgtgatattactcagtatttacatcttgcttttactgcagcatgatagaaaaattaaccacaggtatatcataacaaaaagaccatgagttaccattttcacaaagttcagatatatttaaattagcctatttaatctttttttggttgttgttgagatggagtctcactctgtctctcaggctggagtacagtggcacaatctcagctcactgcaacctctgcctcccaggttcaagtaattctcctgcctcagcctcccgagtagcggggattacaggtgcccaacaccacacatggctaatttttgtatttttagtagagatggggttttgccatgttagccaggctggtcttgaactcctgacctcagatgatccgcctgcctcggcctctcaaagtgctgggattacaggcatgagccatcgcacccagcctatggtacacctttactgaggaaacaattcaggaacatcactcttagtaaggcaattgttgattataagtcaaaaaaacaccatcatgtacaaattcaggggattttgtataccttgtttttttggttacaaatatgcaaaattaaagatgtttgctaatacttgtttccaatttttaaacttttcaagtgttgcactgttaataatgttaaaataaaaggcatttgacttagtatgattgtttcttgaacttcatcttttcaggttattttgttgctggccacttgcaagatttataggcactactgaggcctcagtgctgagattcagcaacattataatcattataattcaaagtttagttttttgttttttgtttttttttttaaagagatggggtcaaaatgctgcccaggcatgtctggaactcctgggctcaagcaatcgtcttgcctcagactgccaagtagctgaactgtaggcacataccacacctggctgtgttcagtttcatgggcaagtcaaactatctagtgttttgtctgtacagacaaggtcaatgcgacttctccaagcttttatcactcaatggtcctacaggcccttgtgagatagatagggtcttagaacaaataactcattacaatcctgggcaaatactctactgaactggtgaactgaaaatgttttgctaatggcccaaatgtcacctcaaatttttttgcctagaggagttacacaactagtttgtataataatttagttatactaggccctcaagtctaatttgaaacaaaatacttggcaaagcaaaatataacctaagaaataattctgattttctgctaataacagacttggtttagtagtcaaaaaacctggacacaagtctcactgccaaggtgctgagtgactgtataaatcacatgatttctaattccagttctctcaatctacaaaattagaacaaggatgactagctcatattaagtatcctctaaaccattttaaaaatgcaaaatgctgttttaactgatggtactttcaattgtatcttttttttttttttttttgagacagagtctcattctgtcacccagactggagtgcagtggcacagtctcggctcactgcaacctacacctcccaggttcaagtggttttcctgcctcagcctcctgagtagctgggactacaggtgcgtgccaccacacctggctaatttttgtatttttaatagagatggggttttactgttgtccaggctggtcttgaactcctgacctcaggtgatccacccaccttggccttccaaagtgctgggattacaggcatgagccaccgcacctggcctaattgtatcttttgaagcaatgactccttcggatctccaggatcctcctgatctttatgcttcagattgggatttatccttcaggaagctttctctgaacacctctaattagacggggaggggtactttgtctgtgtcacacctatccccccaactcgtgttgtttcatagcacttatcacactgtgcattgtctgtgggttcctggatgcagggacgcctctaatccattttagcagtccattggtgtctgtctatctcttccagatagaagaaggcatcaaacacagttcactgatgacaatttattataatctgttagtagcacacagacaaatattagttaaaccagaaccatgtctacacagaagtgggcaatgacatgtgccattctatggcacacggtgtgcacttaatcatcatgttttagcattttgatcttctgcttatggcgctcaatttctttctgcagacgctcaatctccttcttatgatgaacgatttcttcttcatggtgttttttcaaagctgccagttgttctctactctgtgctctacaaggacacggtggctcagggtttaatttcaatccttcaccccaaagagatctcaaagcataacctgtaatgtctaagcaaggaataggagttccaattccatgggagtctagctggtcatcctcttctactcctcaactagtgaaagaataccccatcttaaattgaggtgtagccatcttaagaagaccaaagagcttattgctttcagattcctctttaaaatagaaaactccagagagatgtgacacaagtccctaataccttatgaggggaacaacccagggaacttgactcccctttagggaaaaaaaaaggaacaaaatgaggaagacagacaaaggggtgtagctaaaaggcaaatatccatttcctattccaatctgtctagagctttctttgcctatagaaatgaatggcccactgtaaggccaataaagggtctcttgcatgcgcagtacttggcagttcaatttaggttccaagaagggactggattacaatgttggtttggtcacatttaggcctcagttttccttaactacaaaatgtaggggctcaattagatagtctctaacggctgtaccttggctctctatacggtatggcaggtgtcatggtgataattctcaacagaaggcagaagtgaaaggccaaaggacaagcaaaagcaagattaattcctcactgctctccagagtggacagaagtcagttaaagataactcaaggctggcaaagggaggcccagcccactccatactcctaagcaggagagggaaatctacaggtctaggttgggctgagtagggcaaaagcctttagaagatggtgtccaaccataagtagctcccatgaccagctcccatcatcctcactcttgcggagtcgggggtctagaaacacctgagaagcctgaatgcatgcaggcttgcaaagctaaggcgtgctggcgaggaaggagagcgtagagggggtgacaggtgggtaagggccgagggagtcaggctgggaggcaaacgttgggcggtcggatctagacactgtgcgaagaatctgggggtgtttcgcacgacctgaggagaactccacgcgggagatggtaatgataaaggaggagttgagccgtgggttgttttggagacccgccggtggaaacggtttgggggcctgaaactgttgtgcaggtaactgggagtgccctatacgtggcaacggtcgggacatcaagggttagggtatactggattggggcccgggagttctgttgggggatggggcgcccaaggcaccaggtaggaacgggtggggcgattggcagtttaaggattggaaggccattgggagatccagggctggacttgggacccggtgagcctcaccggaaatatcgttcctcttcagcctgctctctctttccgaaggccccaccggcttcccggatggagcccgcgccccggtcgacattctcggactgcagagagacagggacactggtaaaggtacggaagcaaagatgggatccgcccgcggggctggagcagcggacactgccgcagcgtacctgatccgagccgaagcctcgggcttgcatggtcctcacgccccacacgccaagccacgtccgcgccgccaacgccgtcactgccattgctgctggagctgcacctctggcgtctctgccgcagcaagcagtctctcgttacgcgctaatggcagggacggccaagcac

SEQ ID NO: 6567 - DNA, 426 bp, Homo sapiens
cctgcctcagcctcccgagtagcggggattacaggtgcccaccaccacacatggctaatttttgtatttttagtagagatggggttttgccatgttagccaggctggtcttgaactcctgacctcagatgatccgcctgcctcggcctctcaaagtgctgggattacaggcatgagccatcgcacccagcctatggtacacctttactgaggaaacaattcaggaacatcactcttagtaaggcaattgttgattataagtcaaaaaaacactatcatgtacaaattcaggggattttgtataccttgtttttttggttacaaatatgcaaaattaaagatgtttgctaatacttgtttccaatttttaaacttttcaagtgttgcactgttaataatgttaaaataaaaggcatttgacttagta

SEQ ID NO: 6568 - DNA, 527 bp, Homo sapiens
cggggttttaccatattggccaggctggtctcgaactcctgaccttgtgacccacccacctcggcctcccaaattgctgggattacaggcaagagccaccgcgccctgccgagaatttgcatttctaacaagttcccaggtgatgctgacactgctggctcatggaaccactgctgtagtattttccaaattatcctgattctaagaaccacctatgacctgtgctgttttttctgtggttactggctcatgtcacataaattcttttaggattcaaacatgtttgtgatattactcagtatttacatcttgcttttactgcagcatgatagaaaaattaaccacaggtatatcataacaaaaagaacatgagttaccattttcacaaagttcagatatatttaaattagcctatttaatctttttttggttgttgttgagatggagtctcactctgtctctcaggctggagtacagtggcacaatctcagctcactgcaacctctgcctcccaggttcaagtaatt

SEQ ID NO: 6569 - DNA, 665 bp, Homo sapiens
gagtgcagtggcgcgatcttggctcactgcaacctccacctcccggttcaagcgattcttctgcctcagcctcccgagtagctgggactacaggtgcccgccaccatgctcagctaatttttggatttttagtagagacggggttttaccatattggccaggctggtctcgaactcctgaccttgtgacccacccacctcggcctcccaaattgctgggattacaggcaagagccaccgcgccctgccgagaatttgcatttctaacaagttcccaggtgatgctgacactgctggctcatggaaccactgctgtagtattttccaaattatcctgattctaagaaccacctatgacctgtgctgttttttctgtggttactggctcatgtcacataaattcttttaggattcaaacatgtttgtgatattactcagtatttacatcttgcttttactgcagcatgatagaaaaattaaccacaggtatatcataacaaaaagaacatgagttaccattttcacaaagttcagatatatttaaattagcctatttaatctttttttggttgttgttgagatggagtctcactctgtctctcaggctggagtacagtggcacaatctcagctcactgcaacctctgcctcccaggttcaagtaatt

SEQ ID NO: 6570 - DNA, 4158 bp, Homo sapiens
cttcgttatattcaggagagtaaggaacgagctgcagaaatggtaaaagcagaggtactgcgagaacgtcaagaaaccgcccgaaagatgcgcaaatattatttgatttgcctccaacagattttgcaggatgatggaaaagaagggtgagttcagtctgaacaatgtgtcctgagattaccaggacaacatgttatcatttttaaagcattttccttaaccactaaattaactatttctacatgatcagccatagggggttaagagaggtttatggctgtgctaccctaaatgttggcagagccaataggaaaacagaaaccatggggctaaggcaactcattttttcctttaaactatatttttaatattctggaattccccacagggctgagaaaaagattatgaatgctgctagcaaacttgctacaatggcaaaattactggaaacacctatttctagtaagtcccaaagcaaaactacacagtcaggtatgtcaaagtgagtcgccaaatggtttttctatcttttcttctttagctatttaatattttcagtatgaagaaggcagggaaggtaaggagtgagagttaatttgtgaagttttgtatgttttacttaaactagaagtttacgcaaaaagagtacacagtttccaatttaagtaggcagactgagcatgcccatcagtttcctattgctgcttccatccctcgaaatgatagaaaagattttaaacagcaaataaagaatgagaaaaagaagaaattataagtgggttttaaaaagttgcagtgggccaggcatcatggctcacacctgtaatcccagcactttgggaggctgaggtgggaggatcccttgatcccaggaatttgaggttgcagtaagctatgattgtgccactgtactccagcctgggtgacagagtgaggccctgtctcaaaaaaaaaaaaaaaaagtttgcagtggatagaccagaagctacaagaaatccctgagagaaagaagacagtataggatggaagatggaaacctcagttcaaaaccaccgggagatgactattgcaattaggagcaatatcaaaactgttccacatatgagggtgatatgttccaggagaaatagagggcctaggggatatgaatggggtaattagttggtgttctaaaccaacagcaaccaggtggggttaatcctctctttatttcttcttctcccctcctttccccaacctcaatattgagctgggcaacaacaacaggaacaaagaatctgggagcagggcagtgctccaggtggctagccatatcaagcaggaactgggagccgacttgccttgggaggctgagatgggaggatcacttgagtccgggaggtcaaggctgcagtgagctgtgatcgcaccactgcactccagcctgggaaacagagcagaccctgtctcaaaaaaaaaaaaaaaaaaaaaaaaaaaggtaagagtaaccaacaaaaacatagaacgtataactttaaaactggtaaaggaaaaacttggaaaaaaacattttcaatctaacaaaatcaggaaagaggaaaaaaacctagagagcgtgggtaagtaggacataatagtagtttgaaacatcaacaatcacactaaatataagtaggttaaactcatataagttattaaaagaccacaactttcaaatagggtttttaaaaatgtggaaatttgctatttttacaagaagaacatctaaaattaaaaatcaggggatggagaatgatataccaagcaaatgcagtgttgatattagataaattatagaggtaaataaaagattagataaattagagttagcattaaaagggacaaagctgatagttcataatgataatggaatagtctcccaagaaactgtaattgttttctttctgtagatcatacagctttatataaagcaagagctgatagaaatacatgaaaaagactggtaaattcccaatcacactgagagatttttaacatatcagtggggaaatggggttcttgaacctctggaaaacttgaagctgagattgttcaggggtccatgagtctgatgttggtaaacattcctcatgtacaagccaaagattatttgtataaattttggaatggtgatgtgaaccttaggtatgaaaaggcagtaacatataacaagaaaataattttctagatctggggcaacagtgtgcaaataatgtccccagtagagaagcaaatccttttcatggactctagggcttgctactctgagatacaatgcctctaatttcatgctatgtggctgctttgtctttgatcagatttagtgtcttaggtaattaaatcagaaagtctatttagctattctagaagtgtatgtgtaggtattgggtgggtggggttctttgagcgaacttgtcagaaactccattcttaacatcagaatcagggcaggattgaaaacattgtggctggatcttgaaattgctataacatctattgcagaaaatgataggtcagatggatagcaataataattatatatcagatcttagtaacaaaattaccaagctttatctagtggatatatgtaaaagaatatttttaaatgtccagcattgatgtattttctttaagaattattacagtatataagcattctttgggaatacagtataaaaacataaattttttcttatttttaattttttttatttttttgttcaaggatgaatcttccctttaaatattaattttctcttaatttcgtgtttccttgcacataatagcactgcccctaacttcagagatgctgattgcagttaaaaaatcaaaaagaaatgatgtgaatcagaaaataccatgttgtattgaaagcaaatcaaatagtgtaaacaccatcaccagaactctgtgcgaacaagctcccaagaggagggcagcttgtaacttacaaaggctgttagagaactcagagcatcagagcataaagcatgtgggatccaaagagacacatttggaattccagtttggggatggtagttgcaagcacctaaacagtttgccaaggaatgtttctcctgagtttgttccttgtgaaggtgaaggaggctttggtttgcacaagaagaaagacctactcagtgataatggttctgaatcacttccgcattcagctgcatacccctttcttggaaccttaggaaataaaccctcacctagatgtacccctggtccttctgaatcaggatgcatgcatataacctttcgcgattctaatgaaagacttggtttaaaagtatataaatgcaatccactaatggaaagtgaaaatgctgcatctgagaaaagtcaaggtttggatgttcaggaacctccagtaaaagatggaggggaccttagtgactgcttgggctggccttccagcagtgcaaccttatcctttgacagtcgtgaagcatcatttgtacatggtaggccacaaggaactttggaaataccaagtgaatctgttaaatccaaacagttttcaccatccggttatctttcagatacagaggaaagtaatatgatttgtcaaacaatgaaatgtcagcgttatcaaactccatacctgtcagaagaaaccacgtatttggagccaggaaagatcagtgtgaattgtggacacccatctcgtcataaggctgatagattaaagtcagatttcaaaaaactgagcagtacattaccatcttcagtgtgtcagcagccttcaagaaaattaattgttccgctatctagccaacaagatagtggctttgatagcccatttgttaatctagactaattatggtacagtatttaagaagaatcattaatatattaacaaaaatggaagggaagacctcatactgaaaaaaattgtgagccctgcctcttttgagatgttttaataacatctgttatataagtaaagcattcttctaaaattgcttgagatatttatgttgccttaatattccaaaggcctgatggtgtatgtataatctgcttttgtgtggtgcttatttttggtttctaaaccatctatttttatacttataaattgactcactctgcagtgttaacttatttaaataaacttgcatatggtctgtagaa

SEQ ID NO: 6571 - DNA, 4169 bp, Homo sapiens
cttcgttatattcaggagagtaaggaacgagctgcagaaatggtaaaagcagaggtactgcgagaacgtcaagaaaccgcccgaaagatgcgcaaatattatttgatttgcctccaacagattttgcaggatgatggaaaagaagggtgagttcagtctgaacaatgtgtcctgagattaccaggacaacatgttatcatttttaaagcattttccttaaccactaaattaactatttctacatgatcagccatagggggttaagagaggtttatggctgtgctaccctaaatgttggcagagccaataggaaaacagaaaccatggggctaaggcaactcattttttcctttaaactatatttttaatattctggaattccccacagggctgagaaaaagattatgaatgctgctagcaaacttgctacaatggcaaaattactggaaacacctatttctagtaagtcccaaagcaaaactacacagtcaggtatgtcaaagtgagtcgccaaatggtttttctatcttttcttctttagctatttaatattttcagtatgaagaaggcagggaaggtaaggagtgagagttaatttgtgaagttttgtatgttttacttaaactagaagtttacgcaaaaagagtacacagtttccaatttaagtaggcagactgagcatgcccatcagtttcctattgctgcttccatccctcgaaatgatagaaaagattttaaacagcaaataaagaatgagaaaaagaagaaattataagtgggttttaaaaagttgcagtgggccaggcatcatggctcacacctgtaatcccagcactttgggaggctgaggtgggaggatcccttgatcccaggaatttgaggttgcagtaagctatgattgtgccactgtactccagcctgggtgacagagtgaggccctgtctcaaaaaaaaaaaaaaaaaaaaaaaaaaagtttgcagtggatagaccagaagctacaagaaatccctgagagaaagaagacagtataggatggaagatggaaacctcagttcaaaaccaccgggagatgacaattgcaattaggagcaatatcaaaactgttccacatatgagggtgatatgttccaggagaaatagagggcctaggggatatgaatggggtaattagttggtgttctaaaccaacagcaaccaggtggggttaatcctctctttatttcttcttctcccctcctttccccaacctcaatattgagctgggcaacaacaacaggaacaaagaatctgggagcagggcagtgctccaggtggctagccatatcaagcaggaactgggagccgacttgccttgggaggctgagatgggaggatcacttgagtccgggaggtcaaggctgcagtgagctgtgatcgcaccactgcactccagcctgggaaacagagcagaccctgtctcaaaaaaaaaaaaaaaaaaaaaaaaaaaaagtaagagtaaccaacaaaaacatagaacgtataactttaaaactggtaaaggaaaaacttggaaaaaaacattttcaatctaacaaaatcaggaaagaggaaaaaaacctagaaagcgtgggtaagtaggacataatagtagtttgaaacatcaacaatcacactaaatataagtaggttaaactcatataagttattaaaagaccacaactttcaaatagggtttttaaaaatgtggaaatttgctatttttacaagaagaacatctaaaattaaaaatcaggggatggagaatgatataccaagcaaatgcagtgttgatattagataaattatagaggtaaataaaagattagataaattagagttagcattaaaagggacaaagctgatagttcataatgataatggaatagtctcccaagaaactgtaattgttttctttctgtagatcatacagctttatataaagcaagagctgatagaaatacatgaaaaagactggtaaattcccaatcacactgagagatttttaacatatcagtggggaaatggggttcttgaacctctggaaaacttgaagctgagattgttcaggggtccatgagtctgatgttggtaaacattcctcatgtacaagccaaagattatttgtataaattttggaatggtgatgtgaaccttaggtatgaaaaggcagtaacatataacaagaaaataattttctagatctggggcaacagtgtgcaaataatgtccccagtagagaagcaaatccttttcatggactctagggcttgctactctgagatacaatgcctctaatttcatgctatgtggctgctttgtctttgatcagatttagtgtcttaggtaattaaatcagaaagtctatttagctattctagaagtgtatgtgtaggtattgggtgggtggggttctttgagcgaacttgtcagaaactccattcttaacatcagaatcagggcaggattgaaaacattgtggctggatcttgaaattgctataacatctattgcagaaaatgataggtcagatggatagcaataataattatatatcagatcttagtaacaaaattaccaagctttatctagtggatatatgtaaaagaatatttttaaatgtccagcattgatgtattttctttaagaattattacagtatataagcattctttgggaatacagtataaaaacataaattttttcttatttttaattttttttatttttttgttcaaggatgaatcttccctttaaatattaattttctcttaatttcgtgtttccttgcacataatagcactgcccctaacttcagagatgctgattgcagttaaaaaatcaaaaagaaatgatgtgaatcagaaaataccatgttgtattgaaagcaaatcaaatagtgtaaacaccatcaccagaactctgtgcgaacaagctcccaagaggagggcagcttgtaacttacaaaggctgttagagaactcagagcatcagagcataaagcatgtgggatccaaagagacacatttggaattccagtttggggatggtagttgcaagcacctaaacagtttgccaaggaatgtttctcctgagtttgttccttgtgaaggtgaaggaggctttggtttgcacaagaagaaagacctactcagtgataatggttctgaatcacttccgcattcagctgcatacccctttcttggaaccttaggaaataaaccctcacctagatgtacccctggtccttctgaatcaggatgcatgcatataacctttcgcgattctaatgaaagacttggtttaaaagtatataaatgcaatccactaatggaaagtgaaaatgctgcatctgagaaaagtcaaggtttggatgttcaggaacctccagtaaaagatggaggggaccttagtgactgcttgggctggccttccagcagtgcaaccttatcctttgacagtcgtgaagcatcatttgtacatggtaggccacaaggaactttggaaataccaagtgaatctgttaaatccaaacagttttcaccatccggttatctttcagatacagaggaaagtaatatgatttgtcaaacaatgaaatgtcagcgttatcaaactccatacctgtcagaagaaaccacgtatttggagccaggaaagatcagtgtgaattgtggacacccatctcgtcataaggctgatagattaaagtcagatttcaaaaaactgagcagtacattaccatcttcagtgtgtcagcagccttcaagaaaattaattgttccgctatctagccaacaagatagtggctttgatagcccatttgttaatctagactaattatggtacagtatttaagaagaatcattaatatattaacaaaaatggaagggaagacctcatactgaaaaaaattgtgagccctgcctcttttgagatgttttaataacatctgttatataagtaaagcattcttctaaaattgcttgagatatttatgttgccttaatattccaaaggcctgatggtgtatgtataatctgcttttgtgtggtgcttatttttggtttctaaaccatctatttttatacttataaattgactcactctgcagtgttaacttatttaaataaacttgcatatggtctgtagaa

SEQ ID NO: 6572 - DNA, 453 bp, Homo sapiens
ctaacttgcagtctaacagtgaagaagattttttttctccttctgagttctctcccaccactgtctagttcttttggttgcctccatatgggctccatatagtacccagtccaagactgggtcttacataggtgatttctgatctagtggggctattctaaagctagtcactgagccagcaggcagcttggcccagttcctggctgcaaagctctgcctttaacctctaggctctctagatacatagttttaatataacttgtggcctcaggtggagagtgtagctttttcagcctccctgaggtaaggaacccctacctggactactgctttagacagcaagcttgtcctttgttcctttcctcagttggatgcttttagtccttattattctgcagaaactcctggccacctttactacttttggttttttttttttttaagccgagtctc

SEQ ID NO: 6573 - DNA, 435 bp, Homo sapiens
attcagaagaacttcaggcatgagttagttgcatataaagtacaatgtgaattcatgaaattgaagttgtgccacaagcatggaagaacccacatgtgtatccctggcctcctgtgctgaggaaaatatggctccttaatttttgctacgacgtttatcctgcagagaggatcaagctgattatgttagagcatttctgggcagagaatttagtgaaagtttgacagcagtggttcaggacatacttacaaatattttgggcagatgactatctgttagcttttacatccccagagccttccttaaattatggtttaagtaatagttcatggtttaattgtgatataatcttagtaggagtaataatatatctgttagggtataatgatgttatggtaatattaagaataaatgttcagaaaccaaccaaataaa

SEQ ID NO: 6574 - DNA, 344 bp, Homo sapiens
tctccaatgccactcctctacaatgatagccagccacactggcgatctgttccacagaatctcatggttatgtcactcaaatgcctcatccaaagtctggcccatagagggtacacaactattttcctttctgccaattgcttactgtcttcttgcggatttgaggactgtggcttggataagcacttggatggtacaccagttaagatgaggaactgaacaaccatgaagggaaaagaaggtgggctgcggagagttcagtcacctgagcagttgtctagaaaactagttctaggagagaaattgaaatatgatctaacagaaaaaatcagtataaaagaatt

SEQ ID NO: 6575 - DNA, 655 bp, Homo sapiens
tttttttttttttttatgagatggaatctagctctttcgcccaggatggagtgcagtggcgcgatctctgatcactgcaacctccgcctcccgggttcaagtgactctccagcctcagcttccagagtagctgaaactacaggtgagtgccaccacgcccggctaattttgtttgtatttttttagtagagacagggtttcacagtgttagccaggatggtctcgacctcctgacctcgtgatccgcccgtctcggcctcccaaagtgatgggattagaggcgtgagccaccgcgcacggcggaaaacgagattttttagatcaactttacattgccaatgcccatggtattccctccacaacaaactccacaagagtgctcagaaaagtcaaacttgttatcaggtgatctttagggacccaaagactactcttcctaccctttccagtgttgcccaggctggaattgcactagcgtattcacatgttcctgcagtctctagcccgagagtttaagctatcctaccacctcagcctaccgagtaaatgatagtacagacgcaagccgtcacacctggttagcttcatttttttgcagagacgagttctatgttgcccaggcaaatctgttaactcctgagctgaagaaagcctc

SEQ ID NO: 6576 - DNA, 655 bp, Homo sapiens; identical to SEQ ID NO: 6575

SEQ ID NO: 6577 - DNA, 802 bp, Homo sapiens
gagtatctcctgatcaattttttttgagacgaagcctcgcctttgtcgcccaggctagaatgcaaaagcgccatgtcttttcactgcaacctttgcttgctgggtttaagtgattctcctgcggcagcctcccgagtctctgggatgacacgcgactgccccacgcccggctaatatttgtatttttagtagaaacgagatttaaccacgttagccaaactggtctcgatccgcacgcctcggcctcccaaagtgctgggattacaaaatcggaaaaattattccctagaaaacggtgaaattcaatattaaagctctttatgtgagacttgagtggctctgaaaagagcctttgagttttaaagcacctaagcacacatttacttggagcttgtatacttggtgacagccttggtaccttcggacactgcgtgcttggccagctctccgggaagcagcagacgcacggcggtctggatctccctggaggtaatggtcgagcgcttgttgtagtgggccagacgggaagcctcgcctgcgatgcgttcgaagatgtcgttaacgaaggaattcatgatgcccatggccttggatgagatgccagtatcggggtgaacctgttttagcaccttgtacacatacacggagtagctctccttacgactgcgcttgcgcttcttgccatccttcttctgcgccttggtcacagccttcttggaacccttcttcggagcaggagctgacttagctggttcaggcatgctgtcagaaaacaataacagcagtgagaatgaacgcactt

SEQ ID NO: 6578 - DNA, 2328 bp, Homo sapiens
tttcctatttcttttttttttttttttttttttttttttttgagacggagtctcactctgtcgcccaggctggagtgcagtggcacgatctcggctcactgcaagctccgcctcccgggttcacgccattctcctgcctcagcctcccgagtagctgggactacaggcgcccgctacaacgcccggctaattttttgtatttttagtagagacggggtttcaccgtgttagccaggatggtctcgatctcctgacctcgtgatccgcccgcctcggcctcccaaagtgctgggattacaggcgtgagccaccgcgcccggccgagtttcctatttcttaaccacaccattgatagtttgggatagagacaaatagagaaagttatctttagaggagctgtctgttgcaccaaaaaaaaaaatgtaacagcactgttaacatcttggcattgacccttatagtcactcttttttcctaaaactatatgtgtgtgtgtgtgtgtgtgtgtgtgtgtgtgtgtgtgtgacatcatgtaaataagaatacactacttggcaacttggatttaccccatacaatgccatgagcatattttatgtcgttttttttaaagcattctttttaacagctgcataatattccattagggataaaacctagttttaggcaaagtccaactcttcaacattagtatttccagttgttagccacagtaaacaaaaatatggacaatattaacaaaattagaagttaaaatcaatgagtttgtatatttttaaatatttgcagaaaagaaaagggagtagtctggaatggggactagatttcaaacttggatgagtaagtgaagccaggtagagtatcataaggtctgtcttggttgtgctgagtttcagatgcctgtgaaatacttatttcatgtactatttaaagcctaatcaccataatttttgatattgactgaattgcctgactgaaatccaagtcagcccacaattcaaacattgaagtccaataccaactacttgaaaatgtgactatttggagataaggtctttaaaggtgtaaaatgaggttttaagggtaggtcctaatctattctgactgctgtccttataagatgatattaaaacacaacccacacacacacagggaagaccagagaggggaaaacccaaggagagtggccccagaaaaaatcaatcatgctcactggtttgatcttgaacttgtagccttcagaattgtgacaaaattaatttttttaagccacacagtctttggtagtttgttttggcagccctagcgaacacacttctcaaacattttcattctgggaatacttttctccacaccttttctatgttatgctagcttttgtactccacaaagacaaacacacagaacacagatgcacacccacccctactgtatgttgtaggggaggaaagagcgtttccttttacccatcttatgttcattggctggggccctgaaacaaaatacagattaacaacagaaaaatatacactttatttttattttgatttatttatttatttttgagacggagtcttgctctgtcgcccatgctggagtgcagttgcccgatcttggctcacggcaagctccacctcccggcttcatggcattctcctgccgcagtctcccgagtagctgggactacaggcgcccgccaccacacccggctaatttttttcaattttcagtagagacggggtttcaccgtgttagccaggatggtctcgatctcctgacctcgtgatccgcccgcctcggcctcccaaagtgctgggattacaggcgtgagccggcgtgagccaccgcgcccggccaagagaaaaacattcacatttaatatgaagttttacatgacataaggaaataaggacctgaagaagggcttaaacctgagtgtgtttgcactaggtttgatgaagagagtcatgcagaaatataacaagacaaaaataatatgagctaaggataataaacaaggagaaatctagcaaggtttatttgttcagattcctcgcatactctgcaagactcccaggagggtcttaagacctgcttcagaggaaggtcatacgaacattcttgtctatgttgttctactaatgtcttagaatatttactatgtcaaggcgccatactttggagtactatgttgtcagaaacctgaggttgctcatggagtactatggagtagtgaccttttttttttttttggtcccattttagaaatttgattaatgagtataaactaatggtttctatgtttgagacggagtttcgttcttgttg

SEQ ID NO: 6579 - DNA, 2325 bp, Homo sapiens
gtttcctatttctttttttttttttttttttttttttttttgagacggagtctcactctgtcgcccaggctggagtgcagtggcacgatctcggctcactgcaagctccgcctcccgggttcacgccattctcctgcctcagcctcccgagtagctgggactacaggcgcccgctacaacgcccggctaattttttgtatttttagtagagacggggtttcaccgtgttagccaggatggtctcgatctcctgacctcgtgatccgcccgcctcggcctcccaaagtgctgggattacaggcgtgagccaccgcgcccggccgagtttcctatttcttaaccacaccattgatagtttgggatagagacaaatagagaaagttatctttagaggagctgtctgttgcaccaaaaaaaaaaatgtaacagcactgttaacatcttggcattgacccttatagtcactcttttttcctaaaactatatgtgtgtgtgtgtgtgtgtgtgtgtgtgtgtgtgtgacatcatgtaaataagaatacactacttggcaacttggatttaccccatacaatgccatgagcatattttatgtcgttttttttaaagcattctttttaacagctgcataatattccattagggataaaacctagttttaggcaaagtccaactcttcaacattagtatttccagttgttagccacagtaaacaaaaatatggacaatattaacaaaattagaagttaaaatcaatgagtttgtatatttttaaatatttgcagaaaagaaaagggagtagtctggaatggggactagatttcaaacttggatgagtaagtgaagccaggtagagtatcataaggtctgtcttggttgtgctgagtttcagatgcctgtgaaatacttatttcatgtactatttagaagcctaatcaccataatttttgatattgactgaattgcctgactgaaatccaagtcagcccacaattcaaacattgaagtccaataccaactacttgaaaatgtgactatttggagataaggtctttaaaggtgtaaaatgaggttttaagggtaggtcctaatctattctgactgctgtccttataagatgatattaaaacacaacccacacacacacagggaagaccagagaggggaaaacccaaggagagtggccccagaaaaaatcaatcatgctcactggtttgatcttgaacttgtagccttcagaattgtgacaaaattaatttttttaagccacacagtctttggtagtttgttttggcagccctagcgaacacacttctcaaacattttcattctgggaatacttttctccacaccttttctatgttatgctagcttttgtactccacaaagacaaacacacagaacacagatgcacacccacccctactgtatgttgtaggggaggaaagagcgtttccttttacccatcttatgttcattggctggggccctgaaacaaaatacagattaacaacagaaaaatatacactttatttttattttgatttatttatttatttttgagacggagtcttgctctgtcgcccatgctggagtgcagttgcccgatcttggctcacggcaagctccacctcccggcttcatggcattctcctgccgcagtctcccgagtagctgggactacaggtgcccgccaccacacccggctaatttttttcaattttcagtagagacggggtttcaccgtgttagccaggatggtctcgatctcctgacctcgtgatccgcccgcctcggcctcccaaagtgctgggattacaggcgtgagccggcgtgagccaccgcgcccggccaagagaaaaacattcacatttaatatgaagttttacatgacataaggaaataaggacctgaagaagggcttaaacctgagtgtgtttgcactaggtttgatgaagagagtcatgcagaaatataacaagacaaaaataatatgagctaaggataataaacaaggagaaatctagcaaggtttatttgttcagattcctcgcatactctgcaagactcccaggagggtcttaagacctgcttcagaggaaggtcatacgaacattcttgtctatgttgttctactaatgtcttagaatatttactatgtcaaggcgccatactttggagtactatgttgtcagaaacctgaggttgctcatggagtactatggagtagtgaccttttttttttttttggtcccattttagaaatttgattaatgagtataaactaatggtttctatgtttgagacggagtttcgttcttgttg

SEQ ID NO: 6580 - DNA, 545 bp, Homo sapiens
ttacaaaatcggaaaaattattccctagaaaacggtgaaattcaatattaaagctctttatgtgagacttgagtggctctgaaaagagcctttgagttttaaagcacctaagcacacatttacttggagcttgtatacttggtgacagccttggtaccttcggacactgcgtgcttggccagctctccgggaagcagcagacgcacggcggtctggatctccctggaggtaatggtcgagcgcttgttgtagtgggccagacgggaagcctcgcctgcgatgcgttcgaagatgtcgttaacgaaggaattcatgatgcccatggccttggatgagatgccagtatcggggtgaacctgttttagcaccttgtacacatacacggagtagctctccttacgactgcgcttgcgcttcttgccatccttcttctgcgccttggtcacagccttcttggaacccttcttcggagcaggagctgacttagctggttcaggcatgctgtcagaaaacaataacagcagtgagaatgaacgcacttaaat

SEQ ID NO: 6581 - DNA, 434 bp, Homo sapiens
atttttaaaaagtgctcaaagcatctatttttcatagctgtgcaaaagtaaaagaaataatattcatttttcacttcatgcaagaacctcacttgcatgaggttctcgaaatagaaaatcataatcaggacaacttgtcacttcttcagatgttttatatagaatatcatttggcttctaaatctgtgattccttttttgtctgtggctccagattttcataatctaccactattaagcagaagtggtaatttatgaagaaatttgggtttgaaatgcttattattttcatgaagataaaaagtaaaataagaatgttaaccatttgagtcctgttgctgaagggcattgagaggagttgagccccatctctctctcccattgcagtagttcctcttaaagtctcccttaccatcttaaaaaaaaaaaaaaaaa

SEQ ID NO: 6582 - DNA, 434 bp, Homo sapiens; identical to SEQ ID NO: 6581

SEQ ID NO: 6583 - DNA, 143 bp, Homo sapiens
gacattctggagctaggtaatatccttaaatttatctttaccgttgtaaatacaactgtgtaattgagcttcatctgattgttttagagtcaccaagagactgcctctaatgaccctaagtggctctgtatgcatagaaaaat

SEQ ID NO: 6584 - DNA, 143 bp, Homo sapiens; identical to SEQ ID NO: 6583

SEQ ID NO: 6585 - DNA, 538 bp, Homo sapiens
ttgctcatcttcgccacacggtggcggtcttatcacatgcttagtgcctgctcttttcctgcttgcgctcaaggcggtttcggaggggtagggtatgccgtttgtcccttgcaaatcccaggatgccctacatccagaaatctggccatgcaaggcaaagcccacattttgtcaccagccagcctgggttcaaatgccgtttaagagctgtgatcgtctctgggtctcttcagcagtaaaatgggactgcaaacccagatcaccatgcacgtggtaaaatttgtaggagataagttatgtgaagctcggggctgaggcccctgtgtagggcccagttcctagttcctaagacggcttcctcgagctgaaaggaacccagcccagtgtagtcttatggggaagagggtggggacccagtcttaagagcagaaccaagaatgagagcctgagctacgtgcagagtgcagagtccctgctgtgagctctgccccaccccaggctggaaaggttgcctgtctgcccctggggtgggagggtg

SEQ ID NO: 6586 - DNA, 538 bp, Homo sapiens; identical to SEQ ID NO: 6585

SEQ ID NO: 6587 - DNA, 263 bp, Homo sapiens
ggcaggtattagcagcaaggcagggttcccaggggtgcagtttaatattgtgtgcgttcaggaaagtagttttgctactctatgccccaatttcctcctacagaacagggctaatatgctcatttaatccacagatccactattaatgctggtacccacctaataccctctaagggtcactcatctcccttggaatttaatctacactcctccccaaggcccctgctcagtctcccttgacatctgccctgttgtggttcact

SEQ ID NO: 6588 - DNA, 5049 bp, Homo sapiens
ccgcgccgtgcacgtcttggttcgggccgggcataaaaggcttcgcggcccagggctcacttggcgctgagaacgcgggtccacgcgtgtgatcgtccgtgcgtctagcctttgcccacgcaggtatgaacacccggagtgcacctggcgggaggacccccttcaggctgctttggcccgatcctgactttagtgctggccgcctttgctttccatccgctatagtggcctcctttgtccttgcgggggaaaccgaggccacagccttgcagcgcaggcctgatcgcccgacttcccgccccctgctcgtgcgggcctcactgtctccttctgggctgggggcttgcgacaccgccctccggccgactcgctcgtggggtgctggtggcagtggctgggtcactcgtgctctggtcaggagagcgggtctccggcagcctccgggcctcgtagaccgggtacccgggagggtgagggttagtgctgtcgcctccgccgtgctgactcagtcatagggcccagcacgcagcgcgaccttgggttgggaggacaaagtgtcttcccgggcgcactgaccgggcgggggtctcagctttcagtcatggcctccggtaacgcgcgcatcggaaagccagcccctgacttcaaggccacagcggtggttgatggcgccttcaaagaggtgaagctgtcggactacaaaggtgagcgccgcccggagggggcccaggtagaagcggggccgtgcatgagagaagctgggccctaactcctctgtgtccctcctccccagggaagtacgtggtcctctttttctaccctctggacttcacttttgtgtgccccaccgagatcatcgcgttcagcaaccgtgcagaggacttccgcaagctgggctgtgaagtgctgggcgtctcggtggactctcagttcacccacctggcttggtatgagcaggggccaaagagggaggttgcagctaagctcacaccctcaggtcctagcagtgtggcttcgtggccattgctcaacctctggaacctgcgtttccccatcgtgaaaataatggaaacattgccgcccaagtctttaaggatgatgacagtaattagcatttgacaactagttgcctggtatatagagttgcagatgcaactcagatgcaactctatctactctatgtacttagttcccaggagggaggctgtgctgccctatttcatgaagatggaaactccagttcaccgaagtgaagggctgtaccccatgacacagctagaggaggatggggactcttaacacaggctctctgctgggtgatgctgcaagttacaagcacatgtgaagccacttagctggagctgtgcctctcaaactcagtcttcccagccatggggatacagtccttgcacccaacccagggtggggtgggtgaggctcccagcggcctactctaaagccccttatctccggcctccagtgcttatcacattgggcccacagggtgaggaccctgctgtgccaggcatcctgaggccccaactctgtctcccctactcccaggatcaacaccccccggaaagagggaggcttgggccccctgaacatccccctgcttgctgacgtgaccagacgcttgtctgaggattacggcgtgctgaaaacagatgagggcattgcctacaggtactgtgggaccctcagcccggctcagggagcgccctgccccccattcctgtgatgctgggaccactcctgtacaatgtcttctctgcccccagccctgtggctagcagcgggtggttggtagtcccttccttgtctctggcagtgggagctatcagctcctcactgggaaccctgatgtcttcaggggcctctttatcatcgatggcaagggtgtccttcgccagatcactgttaatgatttgcctgtgggacgctccgtggatgaggctctgcggctggtccaggccttccagtacacagacgagcatggggaaggtgagcagatacacacatgacacatgggtacatactgagcgcctccgtcactcatgcaaacattcactgcctgtcctcttacctgtccagatgggtgttagggccccaaagaagattcagctcagggctttgtctgcaggatgtttctaatgtggtaggagacaaataacgcctgacattcaaccaaggtggacaaaggggccgggctcagtggctcacggttgtattgccagcactttgggaagctgtggcaggtggatcacctgaggtcaggagttcgagaccagcctgaccaacatggtgaaaccccgtctctacgaagaacacaaaaaattagctggccgtggtggtgcacacttgtaatcccagctacttgagagactgaggcaggagttcgcttgaacccaggaggcagaggttgcagtgagctgagatcgcaccgttgtactccagcttgggcaacagagcaaaactcagtctcaaaaaaaaaaaaaattagcttggtttgtgaagcatgcctatagtcccagctactcaagaggctgaggctggaggatcacttgagcctgggaggtcaaggctgcagtaagctgtgatcgcaccactgcactccagcctgggtgacacagcaagaccctgtctcaaaaaaacaaacaaacaggccgagcgcggtggctcacgcctgtaatcccagcactttgggaggccgaggcgggcagatcatgaggtcaggagtttgagaccagcctggccaacatagtgaaaccgcgtctctgctaaaaatacaaaaaaattagctgggtgcggtggcaggtgcctgtaatcccagctacttgggaggctgaggcaggagactcccttgaacccgggaggaggttgcagtaagccgagatcacaccactgcactccagcctgggcgccagtgtgagactccatctcaaaaacaacaacaacaaaaaaacctgtaggggtggggcagagggacaaagatgggactaaaggagccaaaaagacaggaagatgctgtgtctcatgcctgtagatgctgtgtctcatgcctgtagttccacctactctggagagtgaggcagaagattgcttaggcccaggaatttgagtcgagcctaggcaacatagcaataccccatctctttttttttttttttaagagatggggtattggttaaaaaaaaaaaaaaaaaaaaagaggccagatgcagtggctcacacctgtaatcccagcattttgggaggcctaggtgggtggatcacctgaggtcgggagttcgagacaagcttgaccgacatggagaaacccagtctctactaaaaatacaaaattagcccagcctggtggtgcatgcctgtaatcccagctacttgggaggctgaggcaagagaatcgtttgaagctgagaggcggaggttgcagtgagctgagatcgtgccattgcactccagcctgggcaacgagtgaagcgaaactccgtctcaaaaaataaaaaaaaaaaagaggccgggcacggtggctcatgcctgtaatcccaccactttgggaggctgaggcgggcggatcaagaggtcaggagatcgagaccatcctagctaacgcggtgaaaccctgtctctactaaaaatacaaaaaaattagtcgggcgtggtggcgggcgcctgtagtcccagctactctggcggctgaggtaggagaatggcgtgaacctgggaggcggagcttgcagtgagcagagatcgtgccactgcactccagcctgggcaacagagcaagactccatcttaaaaaaaaagaaaagaaaaaaagaagaaaaaggagagctgggtggcaaaaagaaattgaagaattaagagtaggaaaaacaccagctagaaaatactgaacttggccaggtgtagtggctcacgcctgtaatcctagcattttgggaggccaaggtgggtggatcacctgaagtcaggagttcgagatcagcctgaccaatatggtgaaaccctgtctctgctaaaagtaccaaaaaattagcagggtgtggtggcgggcacttgtagtcccagctactcaggaggctaaggcaggagaatcacttgaacgcgggaggcagaggttgcaatgagccgagatcacgccattgcactccagcctgggcaacagaggaggactctgtctcaaaaaaaaaaaaaaaaaaagaaagaaagaaaaaagaagaaaagaaaaagagaaaatactgaacttggctaggcatggtggctcacacctgtaatcccagcactttgggaggccaagacgggcagatgacttgaggtcaggagttcgagacaagcgtgactaacatggtctctaccaaaaatacaaaaattagccaggcgtggtggtgcacctctgtaattccagctagggagtctggggcatgagaatcgcttgaacccaggagggagaggttgcatgagctcagatcatgctactgtacttcagcctgggcaacagagcaagactctgtctgaaaaaaaaaaaaaagaaaaaatactgaactgggcttggagggtttatcttaatatccacattcctgggcctggaccacttgcttccagcattttcttctgcaacacaggcccttgctttgcttcaccttgaacctggggctgtagccttcatgtgcatccttgtgtcttcccacagtttgtcccgctggctggaagcctggcagtgacacgattaagcccaacgtggatgacagcaaggaatatttctccaaacacaattaggctggctaacggatagtgagcttgtgcccctgcctaggtgcctgtgctgggtgtccacctgtgcccccacctgggtgccctatgctgacccaggaaaggccagacctgcccctccaaactccacagtatgggaccctggagggctaggccaaggccttctcatgcctccacctagaagctgaatagtgacgccctcccccaagcccacccagccgcacacaggcctagaggtaaccaataaagtattagggaaaggtgtgagtctgt

SEQ ID NO: 6589 - DNA, 5049 bp, Homo sapiens
ccgcgccgtgcacgtcttggttcgggccgggcataaaaggcttcgcggcccagggctcacttggcgctgagaacgcgggtccacgcgtgtgatcgtccgtgcgtctagcctttgcccacgcaggtatgaacacccggagtgcacctggcgggaggacccccttcaggctgctttggcccgatcctgactttagtgctggccgcctttgctttccatccgctatagtggcctcctttgtccttgcgggggaaaccgaggccacagccttgcagcgcaggcctgatcgcccgacttcccgccccctgctcgtgcgggcctcactgtctccttctgggctgggggcttgcgacaccgccctccggccgactcgctcgtggggtgctggtggcagtggctgggtcactcgtgctctggtcaggagagcgggtctccggcagcctccgggcctcgtagaccgggtacccgggagggtgagggttagtgctgtcgcctccgccgtgctgactcagtcatagggcccagcacgcagcgcgaccttgggttgggaggacaaagtgtcttcccgggcgcactgaccgggcgggggtctcagctttcagtcatggcctccggtaacgcgcgcatcggaaagccagcccctgacttcaaggccacagcggtggttgatggcgccttcaaagaggtgaagctgtcggactacaaaggtgagcgccgcccggagggggcccaggtagaagcggggccgtgcatgagagaagctgggccctaactcctctgtgtccctcctccccagggaagtacgtggtcctctttttctaccctctggacttcacttttgtgtgccccaccgagatcatcgcgttcagcaaccgtgcagaggacttccgcaagctgggctgtgaagtgctgggcgtctcggtggactctcagttcacccacctggcttggtatgagcaggggccaaagagggaggttgcagctaagctcacaccctcaggtcctagcagtgtggcttcgtggccattgctcaacctctggaacctgcgtttccccatcgtgaaaataatggaaacattgccgcccaagtctttaaggatgatgacagtaattagcatttgacaactagttgcctggtatatagagttgcagatgcaactcagatgcaactctatctactctatgtacttagttcccaggagggaggctgtgctgccctatttcatgaagatggaaactccagttcaccgaagtgaagggctgtaccccatgacacagctagaggaggatggggactcttaacacaggctctctgctgggtgatgctgcaagttacaagtacatgtgaagccacttagctggagctgtgcctctcaaactcagtcttcccagccatggggatacagtccttgcacccaacccagggtggggtgggtgaggctcccagcggcctactctaaagccccttatctccggcctccagtgcttatcacattgggcccacagggtgaggaccctgctgtgccaggcatcctgaggccccaactctgtctcccctactcccaggatcaacaccccccggaaagagggaggcttgggccccctgaacatccccctgcttgctgacgtgaccagacgcttgtctgaggattacggcgtgctgaaaacagatgagggcattgcctacaggtactgtgggaccctcagcccggctcagggagcgccctgccccccattcctgtgatgctgggaccactcctgtacaatgtcttctctgcccccagccctgtggctagcagcgggtggttggtagtcccttccttgtctctggcagtgggagctatcagctcctcactgggaaccctgatgtcttcaggggcctctttatcatcgatggcaagggtgtccttcgccagatcactgttaatgatttgcctgtgggacgctccgtggatgaggctctgcggctggtccaggccttccagtacacagacgagcatggggaaggtgagcagatacacacatgacacatgggtacatactgagcgcctccgtcactcatgcaaacattcactgcctgtcctcttacctgtccagatgggtgttagggccccaaagaagattcagctcagggctttgtctgcaggatgtttctaatgtggtaggagacaaataacgcctgacattcaaccaaggtggacaaaggggccgggctcagtggctcacggttgtattgccagcactttgggaagctgtggcaggtggatcacctgaggtcaggagttcgagaccagcctgaccaacatggtgaaaccccgtctctacgaagaacacaaaaaattagctggccgtggtggtgcacacttgtaatcccagctacttgagagactgaggcaggagttcgcttgaacccaggaggcagaggttgcagtgagctgagatcgcaccgttgtactccagcttgggcaacagagcaaaactcagtctcaaaaaaaaaaaaaattagcttggtttgtgaagcatgcctatagtcccagctactcaagaggctgaggctggaggatcacttgagcctgggaggtcaaggctgcagtaagctgtgatcgcaccactgcactccagcctgggtgacacagcaagaccctgtctcaaaaaaacaaacaaacaggccgagcgcggtggctcacgcctgtaatcccagcactttgggaggccgaggcgggcagatcatgaggtcaggagtttgagaccagcctggccaacatagtgaaaccgcgtctctgctaaaaatacaaaaaaattagctgggtgcggtggcaggtgcctgtaatcccagctacttgggaggctgaggcaggagactcccttgaacccgggaggaggttgcagtaagccgagatcacaccactgcactccagcctgggcgccagtgtgagactccatctcaaaaacaacaacaacaaaaaaacctgtaggggtggggcagagggacaaagatgggactaaaggagccaaaaagacaggaagatgctgtgtctcatgcctgtagatgctgtgtctcatgcctgtagttccacctactctggagagtgaggcagaagattgcttaggcccaggaatttgagtcgagcctaggcaacatagcaataccccatctctttttttttttttttaagagatggggtattggttaaaaaaaaaaaaaaaaaaaaagaggccagatgcagtggctcacacctgtaatcccagcattttgggaggcctaggtgggtggatcacctgaggtcgggagttcgagacaagcttgaccgacatggagaaacccagtctctactaaaaatacaaaattagcccagcctggtggtgcatgcctgtaatcccagctacttgggaggctgaggcaagagaatcgtttgaagctgagaggcggaggttgcagtgagctgagatcgtgccattgcactccagcctgggcaacgagtgaagcgaaactccgtctcaaaaaataaaaaaaaaaaagaggccgggcacggtggctcatgcctgtaatcccaccactttgggaggctgaggcgggcggatcaagaggtcaggagatcgagaccatcctagctaacgcggtgaaaccctgtctctactaaaaatacaaaaaaattagtcgggcgtggtggcgggcgcctgtagtcccagctactctggcggctgaggtaggagaatggcgtgaacctgggaggcggagcttgcagtgagcagagatcgtgccactgcactccagcctgggcaacagagcaagactccatcttaaaaaaaaagaaaagaaaaaaagaagaaaaaggagagctgggtggcaaaaagaaattgaagaattaagagtaggaaaaacaccagctagaaaatactgaacttggccaggtgtagtggctcacgcctgtaatcctagcattttgggaggccaaggtgggtggatcacctgaagtcaggagttcgagatcagcctgaccaatatggtgaaaccctgtctctgctaaaagtaccaaaaaattagcagggtgtggtggcgggcacttgtagtcccagctactcaggaggctaaggcaggagaatcacttgaacgcgggaggcagaggttgcaatgagccgagatcacgccattgcactccagcctgggcaacagaggaggactctgtctcaaaaaaaaaaaaaaaaaaagaaagaaagaaaaaagaagaaaagaaaaagagaaaatactgaacttggctaggcatggtggctcacacctgtaatcccagcactttgggaggccaagacgggcagatgacttgaggtcaggagttcgagacaagcgtgactaacatggtctctaccaaaaatacaaaaattagccaggcgtggtggtgcacctctgtaattccagctagggagtctggggcatgagaatcgcttgaacccaggagggagaggttgcatgagctcagatcatgctactgtacttcagcctgggcaacagagcaagactctgtctgaaaaaaaaaaaaaagaaaaaatactgaactgggcttggagggtttatcttaatatccacattcctgggcctggaccacttgcttccagcattttcttctgcaacacaggcccttgctttgcttcaccttgaacctggggctgtagccttcatgtgcatccttgtgtcttcccacagtttgtcccgctggctggaagcctggcagtgacacgattaagcccaacgtggatgacagcaaggaatatttctccaaacacaattaggctggctaacggatagtgagcttgtgcccctgcctaggtgcctgtgctgggtgtccacctgtgcccccacctgggtgccctatgctgacccaggaaaggccagacctgcccctccaaactccacagtatgggaccctggagggctaggccaaggccttctcatgcctccacctagaagctgaatagtgacgccctcccccaagcccacccagccgcacacaggcctagaggtaaccaataaagtattagggaaaggtgtgagtctgt

SEQ ID NO: 6590 - DNA, 263 bp, Homo sapiens; identical to SEQ ID NO: 6587

SEQ ID NO: 6591 - DNA, 1370 bp, Homo sapiens
ttactcctatatgagaacagaatatcaatgcttcttgactacagtctcccctactgatacttaatgtgccaagttaaaatacttgcatagtggacaataaggcagcatggggatttcctattcctgtttcctgccaaattgacaggttgcattgcagcaggtgcacctcaaagtgattaagaatgtaagggctgacaaaacatgtgtgatgtgactgcaggcattttatgtgagtgacatgtcatggcaagtattggcctcaagagattatacttggggctctagggtgtgagggcaatctatacgtgtgtaaaagcatcattgagaaggtgagtactcaagaaaaaataaccttgactgggagtctttacataaatgaagtacattgcaattcaaggtatattttttttgctacttaaatattttacaaatgtcctatttttatgagtagatgaaatacacatgtgtcttgaacagtgtgattatttgactgctgaacaactcattaagctgccaggacagtgagagtctgctttgttaaaattcatgatagatgctcacaccgctaatcctagcactttgggagggtgaggaagaaggatcccttgagccaaggaggttgagaccagcctggcaatatagtgagaccctatctttacaaaaacaaaaaaattagctggacgtggtggcatgcacccatagtcccagctatttgggggctgaggtgggaggattgtttgagcccaggaggtcaaggctgaagtgagctgtgattgcagcactgcactccagcctgggtgacaaaatgagaccctgtctcaaaaaaaaaaaaaaaaaaaaaaaaaaaaaatcacgattggcgaaaaaaatgcaatataattcagtcatccaatttaacgaacacatttagttcatgttatcaacctctccaattctaggatttctgacttattttacatgtaagaaaataaacaatataaatgtcattgcattatttatttattttcaaaaatgataaaaaagcaggagtgaaaagagtagactttggagggtaaataaaatagttgtttactatgtacacacatacatatatttgcatagaaatacaggaggaatatggacttctagtatgaaccactggttgacagaccccagattaagaatttttatgtttatgtaccttttttaagagacagagttcataggttttgtcagattttgatagtaatcagtaatctcaacagcattaaaatgatttctaaagttctttctatatttaaaattgtgtaattcactttacatcctaatatattcctgttgaaacatatttgcttttctccagagaaacagaaatatatcttattttctaa

SEQ ID NO: 6592 - DNA, 1370 bp, Homo sapiens; identical to SEQ ID NO: 6591

SEQ ID NO: 6593 - DNA, 167 bp, Homo sapiens
tatttatttatttatttatttatttatttatttatttattttagacggagtctcgctctgtcgcccaggctggaatgcagtggcacaatcttggctcactgcaacctccgcctcccgggttcaagtgattctcctgcctcagcctcctgagtagctgggactacagg

SEQ ID NO: 6594 - DNA, 167 bp, Homo sapiens; identical to SEQ ID NO: 6593

SEQ ID NO: 6595 - DNA, 262 bp, Homo sapiens
ggaaaggatagcgaataggatctgaactcttattctaaggctctgtaagagcaaaacagagagacaggacccgttgaaaaaaccatgaagctgttgatattttctttgtttgttttttactcttcaacttgtttgctacatttcctttcttccatggctaaccatcctctagctcttttcccctctgtccctcccaccacataaccttcttataatacttctgcataaaatgaaccaacaaaattgttcacagtaaatgttt

SEQ ID NO: 6596 - DNA, 262 bp, Homo sapiens; identical to SEQ ID NO: 6595

SEQ ID NO: 6597 - DNA, 647 bp, Homo sapiens
atcaaaggaaagaggcagaaattatagcagtaagtaacagtaattagatgtgatcagatgataccaagatgttgttcattcatttacgccacaaacatatcccgagtgccctttttttgctaggcactgggaataaaatagcaaaccacatattcttctttctcttaagacactcataattaagtctagcaagacaggcactatgcagtgaatggtaagacacagtgggaaagctgtgttactgagtttcatcaagaaaataattttaaaaagtgtttctatgttgcgttcttactataacacaggatcctgttggtcacattgtaaatgtaatcacaccttcacagcaggacatctgcagtttgactttgccctatctttatttttattctcatttgtggaaagatagaggggacaaattccaagacagtcatttttgttcagcttaagctttcttatcccactcttttttctttgtttacttttcaaagtgatatttgcccttttttgttctgtaggaagtttagggaatataaaaaggttcagcaagttccactacacacctgtgctatgttgttctgtggtggttaaaatatgagtgttttacttttcttttctttttctatacatttttcaagttttctaaa

SEQ ID NO: 6598 - DNA, 313 bp, Homo sapiens
cttttttttattttttttatttttattttttgagacagagtctcactctgttgcccaggctggagtgtggtggcgtgatctcagctcactgcaagctccacctcccaggttcttgccattctcctgcctcagcctcccgagtagctgggaccacaggtgcccgccaccatacctggctaattttttgaattttttagtagagacggggtttcaccgcattagccaggatggtctccatctcctgacctcatgatctgcccgcctcggcctcccaaagtgctgggattacaggcgtgagccaccgcgcccagcc

SEQ ID NO: 6599 - DNA, 4124 bp, Homo sapiens
agaaaaaataggagtttcacttaagaatgtccttgatgaagcaataaaaatctcagtccctcgggttcacatctttttaatattctgtgggacaagataggaagcacacataaattacttgtgctgtgtactagagaatgctggttgtcttgaggaaaaacacttccacaaatattagagtgaaaacaagtgaactagacagttttttcatggaatatcattttacttggtagactgacacacaatagttactcagactttggtgtttgacagacatttttttggaaatgaataacaagagcctgtcacttcaaggtaaacagttgacaacatttattgccaatgataaaatttgaactttcaagcaaaaatgcaaattttggaaaatgtgttatttctgccactgagaacataacagcataccaacacttttagactttttacttttatattgtataatgaaatgcatcaacatttggatgatctgtattacaggtgaaccaacattttccagtattagtggtggggaatgaccgtgtcatgaaggcttgaccaggatggggatagctcaaggaggcaggatggctcattgtttatgtcttcttcaggaacacaatgaagtaggttgagtttccaggatttggcccctgcattggggatggttggaagaaaagccaaaaaccatagcttcttcaagccagtggacttaaaaaacagtagtacttttaaagaaacaaggaattcaaggcaagagctgtttgtggggctaggggtaaagaaaaatgatggctttgccaaaatttgctaaatttatatcaggctgggtcctgatacacatttctaaaaatccaggcgaagcatggtggctcatgcctgtattcccagtactttgggaggacaaggcaggagggtcactaaggccagaagtttgagaacagcctaacaacacagcaagactgtctctacaaaaaaaaaaaaaaaaaaaaaaaaaaaaaaaaaaaaaaaaaaaatcagccaagtatggtggtgcatgcctgaagtctcagctactcaggagggatgaggattgtttgaggccaggagttggaggctgcaatgagctatgattgcacccctgtactccagcctgggcaatagagcaagaccctatctctgaaatatatacatacatattttttaatttttaaaaaattctttattgaatttttggaaaagaagctaaacatattaaagcttgtctacttgggggagacttttatggagtaagatacagagaaaccaattttccaatgtgatttttttctctccttacctgccttaataatcataatttccctttaaaaaaaatcttttgtggtactacaatttagtcctctctggcccactgaccttagtgtcagaacccctgatcttgtgcagagttgccctctcctcctcatcccagctgttttaccagggtcctagttcttctgttgttcctacacactacaaattttcttccttggtcttcaatactggcgtttgtatttgggaactcacgaacagatctctttggcttttaaactgctagaacttggccaacaccccactttgcctcaggaatttcctaataatggctcctttcaccatagcctctgacctaatttgttgttgttctttatttgcatgctcgtttttattgaatatgcagtagtataatttctctttcctattagtaatccactcctgccttctaaaaaccctagtcgggaaaaaatctgtggtttcctgagtacacagtcagctgtttcacaacaacagcctgtcacgtccttgaagacagtgctgaggtcagggatacaagaattgaggtagaaactggaatagaatatgcaatttttctgtgtgggcaattgggagagatgagaggctactgaaaggtacctgaggaggaatcaagagccaatgagattgagaggcctcttgtgtgagccactgtttctttgctataaagaaatacctgaggctgggtaatttataaagaaaagaggcttattgggctcacagttctgtagactgtataagaagcatggttccagcatcttcttttgtttttttttttgagttggagtctccctctattgcctaggctggagtgcagtggcactatctcagctcactgcaaccttcacctcctgggttccagtgattctcctgcctcagcctcctgagtaggtaggactacaggtgcccaccaccacacccggctagtttttttgtatttttagtagagatggggtttcaccatactggccaggctggtctcgaactcctgaccttgtgatctgcccgcctcggccttccaaagtgttgggattacaggcatgagccaccacacccagccagctccagcgtcttcttctggtgaaggcctcaggaagcttacaaccatggcggaaggtgaagagggagcaggcgtttcacagggtgagagagggagcaaaagagatgctatgttcctttgatcaaccagttctcatatgaactcattacaacagtgaaggcaccaagccattcatgaaggatctgccgccatgacccaagcccagcccactaagcccacctccaacattggaggtcacatttcaacatgagatttggaggggacacacatccaaatcatatcacctctcatggggaaggcaaagagagggtaagctggtggctagaaactaaaaacaaagatttgagaggagagagatgctacaggtgttggtacagttgtgtgggtgtgagcatcctggcacttccactcacttcccgtttactgtgagcagaattttctggatgggtgtggaaaagtcttcatccaagttgggtctgagcagaatcacagaggctcttggaaatggcccatgtggattttatgtagcctactcaactcttttttacatgaatgaagaagtctgtacttatttaaagtatctgacaattccaggttaggccggcaggtcctactctgcccagaacagggacctcgcccctggcccttatattaggaacttggtcctgtgcaggtcaggacactatcacatgagttctggagagcaaaagccaaagatggaactgaaggttagggagtgatacattttctgaattagagctcatgaacattaagatggttaaatatgaaaaatagaaattactgtctagaattaaaataaaaaaaatggcaagataacaaaagacttgtgaaaatgcctaacataggtgtaagttcaatataggctaaatgatgtcagtataaactggtggttttccaccaatttgtgaaattaaagtgtttttctcagcttgatatggatacacctgagacccccgcctatgtcctaaggagaagaaggcagaaataatgagaactgaggccttccctaccccctccctccacacacaaggtgggtcatacccctagcatcctcatacctacctctcagacctcaaggcttccctgccccactggagatggcttttcttccccagagtcctcacaacccctcctgggtgtcatgtgatctacttgaatgctgtcaggcactagctattgagcttgtgccaggaccagaggccccagatgtgatgaactaaaagaccactcttcctgtacctcaatgacatcacctgcggtgggtgcttttcagaaatgatcacaccctgtttctgatgtaggtcacccgcacgccttatactccactcaagggtggacatccaaggggcaatgggggtttggggattcgttagaacatgggcagggattctttttgctgaggtacaggtgcattctgaatggggaagacgctggcagggagtgagggtccgcacatttccgtggggagcggagttgcccctgtgggacagcctcctcctgcagcatgtaagccacccctccagctgaccaccagtctgacttccccaagcagtggatactgtgtctatactggaagtgtctgaaggagggtcctcagagcagcccatgatagggttgaggaatctttaatctgaaaggctacaatccagaagtcactccaggcagagatgaggtctcccctgaaagcagggccaccacctctttggctcagagattcctg

SEQ ID NO: 6600 - DNA, 4119 bp, Homo sapiens
agaaaaaataggagtttcacttaagaatgtccttgatgaagcaataaaaatctcagtccctcgggttcacatctttttaatattctgtgggacaagataggaagcacacataaattacttgtgctgtgtactagagaatgctggttgtcttgaggaaaaacacttccacaaatattagagtgaaaacaagtgaactagacagttttttcatggaatatcattttacttggtagactgacacacaatagttactcagactttggtgtttgacagacatttttttggaaatgaataacaagagcctgtcacttcaaggtaaacagttgacaacatttattgccaatgataaaatttgaactttcaagcaaaaatgcaaattttggaaaatgtgttatttctgccactgagaacataacagcataccaacacttttagactttttacttttatattgtataatgaaatgcatcaacatttggatgatctgtattacaggtgaaccaacattttccagtattagtggtggggaatgaccgtgtcatgaaggcttgaccaggatggggatagctcaaggaggcaggatggctcattgtttatgtcttcttcaggaacacaatgaagtaggttgagtttccaggatttggcccctgcattggggatggttggaagaaaagccaaaaaccatagcttcttcaagccagtggacttaaaaaacagtagtacttttaaagaaacaaggaattcaaggcaagagctgtttgtggggctaggggtaaagaaaaatgatggctttgccaaaatttgctaaatttatatcaggctgggtcctgatacacatttctaaaaatccaggcgaagcatggtggctcatgcctgtattcccagtactttgggaggacaaggcaggagggtcactaaggccagaagtttgagaacagcctaacaacacagcaagactgtctctacaaaaaaaaaaaaaaaaaaaaaaaaaaaaaaaaaaaaaatcagccaagtatggtggtgcatgcctgaagtctcagctactcaggagggatgaggattgtttgaggccaggagttggaggctgcaatgagctatgattgggccactgtactccagcctggggcaatagagcaagaccctatctctgaaatatatacatacatattttttaatttttaaaaaattctttattgaatttttggaaaagaagctaaacatattaaagcttgtctacttgggggagacttttatggagtaagatacagagaaaccaattttccaatgtgatttttttctctccttacctgccttaataatcataatttccctttaaaaaaaatctttgtggtactacaatttagtcctctctggcccactgaccttagtggtcagaacccctgatcttgtgcagagttgccctctcctcctcatcccagctgttttaccagggtcctagttcttctgttgttcctacacactacaaattttcttccttggtcttcaatactggcgtttgtatttgggaactcacgaacagatctctttggcttttaaactgctagaacttggccaacaccccactttgcctcaggaatttcctaataatggctcctttcaccatagcctctgacctaatttgttgttgttctttatttgcatgctcgtttttattgaatatgcagtagtataatttctctttcctattagtaatccactcctgccttctaaaaaccctagtcgggaaaaaatctgtggtttcctgagtacacagtcagctgtttcacaacaacagcctgtcacgtccttgaagacagtgctgaggtcagggatacaagaattgaggtagaaactggaatagaatatgcaatttttctgtgtgggcaattgggagagatgagaggctactgaaaggtacctgaggaggaatcaagagccaatgagattgagaggcctcttgtgtgagccactgtttctttgctataaagaaatacctgaggctgggtaatttataaagaaaagaggcttattgggctcacagttctgtagactgtataagaagcatggttccagcatcttcttttgtttttttttttgagttggagtctccctctattgcctaggctggagtgcagtggcactatctcagctcactgcaaccttcacctcctgggttccagtgattctcctgcctcagcctcctgagtaggtaggactacaggtgcccaccaccacacccggctagtttttttgtatttttagtagagatggggtttcaccatactggccaggctggtctcgaactcctgaccttgtgatctgcccgcctcggccttccaaagtgttgggattacaggcatgagccaccacacccagccagctccagcgtcttcttctggtgaaggcctcaggaagcttacaaccatggcggaaggtgaagagggagcaggcgtttcacagggtgagagagggagcaaaagagatgctatgttcctttgatcaaccagttctcatatgaactcattacaacagtgaaggcaccaagccattcatgaaggatctgccgccatgacccaagcccagcccactaagcccacctccaacattggaggtcacatttcaacatgagatttggaggggacacacatccaaatcatatcacctctcatggggaaggcaaagagagggtaagctggtggctagaaactaaaaacaaagatttgagaggagagagatgctacaggtgttggtacagttgtgtgggtgtgagcatcctggcacttccactcacttcccgtttactgtgagcagaattttctggatgggtgtggaaaagtcttcatccaagttgggtctgagcagaatcacagaggctcttggaaatggcccatgtggattttatgtagcctactcaactcttttttacatgaatgaagaagtctgtacttatttaaagtatctgacaattccaggttaggccggcaggtcctactctgcccagaacagggacctcgcccctggcccttatattaggaacttggtcctgtgcaggtcaggacactatcacatgagttctggagagcaaaagccaaagatggaactgaaggttagggagtgatacattttctgaattagagctcatgaacattaagatggttaaatatgaaaaatagaaattactgtctagaattaaaataaaaaaaatggcaagataacaaaagacttgtgaaaatgcctaacataggtgtaagttcaatataggctaaatgatgtcagtataaactggtggttttccaccaatttgtgaaattaaagtgtttttctcagcttgatatggatacacctgagacccccgcctatgtcctaaggagaagaaggcagaaataatgagaactgaggccttccctaccccctccctccacacacaaggtgggtcatacccctagcatcctcatacctacctctcagacctcaaggcttccctgccccactggagatggcttttcttccccagagtcctcacaacccctcctgggtgtcatgtgatctacttgaatgctgtcaggcactagctattgagcttgtgccaggaccagaggccccagatgtgatgaactaaaagaccactcttcctgtaactcaatgacatcacctgcggtgggtgcttttcagaaatgatcacaccctgtttctgatgtaggtcacccgcacgccttatactccactcaagggtggacatccaaggggcaatgggggtttggggattcgttagaacatgggcagggattctttttgctgaggtacaggtgcattctgaatggggaagacgctggcagggagtgagggtccgcacatttccgtggggagcggagttgcccctgtgggacagcctcctcctgcagcatgtaagccacccctccagctgaccaccagtctgacttccccaggcagtggatactgtgtctatactggaagtgtctgaaggagggtcctcagagcagcccatgatagggttgaggaatctttaatctgaaaggctacaatccagaagtcactccaggcagagatgaggtctcccctgaaagcagggccaccacctctttggctcagagattcctg

SEQ ID NO: 6601 - DNA, 667 bp, Homo sapiens
tggatggacacgtagtagatctataaatatatcaccctggactcaatccacagagtgatgaatgtgaaaggtggtttgcatgccactgcacaaacccatatgaaatactcatcttggacttttaatcaaaattgaattctgcaagtgttagcaatgtttttaagagcagtttttttagtatttaaattttttacctttattgggaagttatctgttaggataatacaatttaatgaaagaaaacaatagtaggagacttggaagctcctattcatatttggcagccctttggcttctctgagagggcatccacaaatgactttgctatggatacaatgctgtgttcaaagatgattttacggccgggcgcggtggctcacgcctgtaatcccagcactttgggaggccgaggcgggcggatcacgaggtcaggagatcgagaccatcctggctaacacagtgaaaccccgtctcctaaaaaacacaaaaaaattagccgggcgtgatggcgggcgcctgtagtcccagctacttgggaggctgaggcaggagaatggcgtgaacccgggaggcggagcttgcagtgagccgagatcccgccactgcactccagcctgggcgacagagcgagactccgtctcaaaaaaaaaaaaaaaaaagatgattt

SEQ ID NO: 6602 - DNA, 522 bp, Homo sapiens
ggtggattgatagatggcatatgttggatctctgtcctgggcatggcaccatgcttagcatggcagaggatacagtgaggagtgaggcaaggtgctacctccaaggagtctgaagcgtagttgaaagatgagataaacagaacaatagtcagactgcaagacagaaatgaaatgtgccatggaggaggtgagaacagtaggctgcaggtgtccaaagcaggagtgcacctgttctggaagaatctaaatggtgttctttcaggaagtagcacatcagatggactcactgcgtctgaactgagtgtcacctagatagcactgaaaaatatctattcctaggctaggccctattcaaattaagtaaaagtctctaaagggaagagctttggaatagatttttttctgtatatattttttaaagattgccaggtgattcttttacgcagccattggtgcaaaccacaggttgaaacaacagtcagatattgataggtgtattctgggcagagggaattttagggg

SEQ ID NO: 6603 - DNA, 667 bp, Homo sapiens; identical to SEQ ID NO: 6601

SEQ ID NO: 6604 - DNA, 401 bp, Homo sapiens
ggtggattgatagatggcatatgttggatctctgtcctgggcatggcaccatgcttagcatggcagaggatacagtgaggagtgaggcaaggtgctacctccaacggagtgctgaagcgttagttgtaaacgatgagataaacagaacaatagtcagactgcaagacagaaatgaaatgtgccatggaggaggtgagaacagtaggctgcaggtgtccaaagcaggaccgcacctgttctggaagaatctaaatggtgttctttcggaatagcacatcagatggactcactgcgtctgaactgagtgtcacctagatagcactgaaaaatatctattcctaggctaggccctattcaaattaagtaaaagtctctaaagggaagagcttggaatagatttt

SEQ ID NO: 6605 - DNA, 22299 bp, Homo sapiens
tcctaaggaaatcaagttgtttattagtcttgtgttcacccatgtcatgcatacgaagattgaagagctgaaaacgctttgatattctccactgtaaggcactgtgtgataccccgcttaaaactattcctaccattccaccaagggactttcctttccactgacaagttgaaggaggaattcagagacagtgcttccgtagccaaattgtttcattgttcaagtatattgatagggtggttgcctaagcagaaaatgcagaattaaacgaaggaagcttgttttgagagcaggtctgtcaccatctatggtacatatgacaaggaagtaaacaggaagtgctgaattggcttggtttactcctacagggacagagagaaataaaatcagtgtttaccaaatggaaaagcacaaagttggtacagagagaaatgttattttcaggcttctaaaaaggcattacaaataacacaaagtttcaaacctataattaaaaactatttttaaaaagttttgattaggttcccttcaaaaataggcattttaggctgaaataaattcttaaagttttgactcccacttatgctggtttttccataatccacactccataaatgcccctcttaaataacagatttcaggagtaaaaaatatgtcttaaagtcatctagtagaacttcaatgctcccacttaatagatgaggaatccaagaccccaaagttaaagcaatttctcaaacaccacacagccattaagggcagggagaatttaggatccaagttactcatcaggcaagagttacgaatagatataatttcttagtgccagatccacggaggaaacaaaccttgtggtgaaggggccaaatgtattgttggtgtagttttttccagaagccaagactgggcctgtgggtccaaaccgagtgtacttctgtccttcagcagctctggacaagagctaaataccatctaaatgcctgactccagaatcatgagaaataaaaaaaataatgttgccttaaagccactaacgtttggggtgggtttgttacacagcaaaagataactgaaacagaaataggcaggatcaccccatgaggcaaggaagcacatcagctgagttgtttactaagggcaaaggcgatatggactggctaacagaagacggaagttataaatactagcaaggaccattggaccagttacagaaatgatgacagtagtggttgtaagtatttctttcttactttaatatgaatacagcatttttttggtattaattttctttactcccccacttccattccctatctttaatagaagatgtgttaatagtggctagccatatagctcagtatttaagttacaggatattaaagagggagtgtgactcagagaaaagaggaaaaaatatcaccccaaaatggatgtgtcatataggacttaatagccttttactaaaaaaaaaaaaaaaaatgcacttttggcggggcatggtggctcacgcctgtaatcccagcactttgggaggctgaggcaggtggatcacgaggtcaggagattgagaccatcctggccaacatggtgaaactccgtctccattaaaaatacaaaaattagccaggcctggtggcacatgcctgtagtcccagctacttgggaggctgaggcaagagaatcacttgaacctgggaggcggaggctgcagtgagctgagatcgtgccactgcactccagcctggatgacagagcgagagactccatctcaaaaaaaaaaaaaatttatattagaacagttttacatttactgaattgtgaagacagcacaaagttcccatatacccaacacctactttcctctattattagtaatttacattatgatacatttgtcacaattaatgaacaaatattggtatgttatttcctaaagcccatacttgattcggatttccttagtttttatccattgtcccgtttctgctccagaattgcatccaggatgccacattacatttatgtcatgtctccttaggctcctcttggctatgatagtttctcaggctttccttgacagttttgaggagtgtggtcaggtattctgtaatgcctctcaagtgacatttgtatgatgctcaagattagaaggggttatgggttattgggaagatgaccacaaaggtatttataccctttttggaggacagggttagcatgcatcatgttaggtggaagcattttgctgttgactttatttggaggttaaacatggttaaaagatgtatgtatgggtaccaagtagacaaaggttggatagactgcagtcattggtagtgtgccaacttggtgaaacttaaactactttcccattccctacagggttctgagttagagttggccaaaagggaaatgtatgcagatgtggaaggtggaaatgaagcagctattgatctttgaaggtcttgcaggtacagagaaggcacagaaatgctgacaggttctagcttgtcttcacattcttctactccacattcagttctgactgaagaggctgttgaccaacagtggctcccagcttatgccagacactcagtggtgggcctgccaaggtggcagttatacagaagcatggcttcctgcataccttctcataagccatcactttgcagccacttttggcacttggttgttctttgtttctcacattgatgggttggtcttttttttttttttctctgatcctccaacttccttcctatgctttcactttcctagttcttctcacaactgtataaggtctgattcctgtaatcctcatcccatagtacacagtggttctgattctgtgactgaaccctgactgataactcaaggtatgagagactgattttcaaactgcaaacaactacagaagctggaaaaaaaaatacaaatgcagttgtgtaatagttttctatgatgccgtaacaaattactacaaatttagtagcataaataccacaaatttattatcttacagttctataggccagaagtccagtataagtctcattagactaaaatcagtgttgtcagactatgtttttttctggaggctatagggaagaatctgtttcctgttcattcagattgttgggagaactcagtttctgtttcttcagtaccaaggtctccattttcgagccgtctgtaagctggggccattctaggaggccatcatattccttggctcgtggctcctttactctgtcttcaaagctagaacatcaagtcattttcatgttgcatctctcttacccattcttctgcttttaagagctcatgtgattagactggacccatgtggataatctaggataacctctccatcttaacttcctttgattagcaaccttcatgccatctgcaaccttatttcccttttgctatgtgatgtaacatattcacaggttctgagatttggatatggacatcttggggtaggggtacaaattatttgaagcatcagaaaaaatccagtgtggccaggacttgagagaataagataatggagaaaagtcaggttctctttttttctcacgaaatttgccaattaactgtgagatgaagtgaggccaaacagtctgggaattatggcagtatcactgggctggggaagcagaggttggagtttggggctgccaaggcagttgagggaccatgattccctgaccagaggaaactacagagaaataagtctataattctgcatgcaatttccccttgaagcatatgtcaactccaaagctgtacatatggtggggttgggggtgagagcagcagatggaaggctaaaaaggtgagcaaaaattccatcaatcttattgggttaggggttagatttcagagctcaccagggttgaaggggcctggtaaacaccataggctctcagctgagaccctagggatattttctaggaataaaggcaaagcagaaatagatcaaccttgatccaactgtaccccatctgcctgccagaaaattatatcctctctagaaaaaatcaccatccagagtttctttaagacaaggtcttgatctgtcatccaggttggagtgcagtggtgcaatcataactcacagcagcctcaaattcctgagcttaagggatcctcctgcctcagccttctgagtggctgggactactacaggcacatgccaccacgcccagttaatttttatttttgtagcgatggggtcttgctttgttgcccagggtggtcttgaaatcctgggctcaagagatcctcccccctaccttggcctcccaaagtggtgagattacaggggtgagccagtgtgcccagcccagagcgtctatatcttttgcatatatgatgtctggcattcagtaaaacactcataggcaaagcaggaggcactgaaaaccaagaggaaaaaaaaaaaaacagacaacagaaacattcccaagcaacccaaatattgaggtaataaagaagggactggaactggaattttttttttttcaaaaaagaatcaaatggtgatggtataattaaaaaaataaaaaaaatttaagaattcagtagatgagcttaatagaattttagaaggaaagttcaataaatacaagataggtcagtagaaaatattcatattgaagcagagagaaaaggaaataagaaatacagaaaagggtacagaagacatataatgtatggttaaaaaaataagtctgacatacatctaattgaaatcctagaagacataaagaaatatttgaagaaaagtggataggatctaaaaaaatcgatgaaaaatatccagccacagattcaagtagttctacaaattccaagaaagaaaaacaaagaaaactacatgtaggcatgtcatactacaactgttaaagaataaaaggaaaaacacctcaaaagcatccagagaaaagcaggcacattaccttcacaggggcaacaacaggctgacaaccaaaatgacagaggccaaaagagaaggaaataagtctgatgtgtgaaaaataatgcacattttataatgcaaaactttaggaaaagagaaatgtccaaaaataggatacaattgaaaacgaaccagccatcatagtaggaagaaatgtagtgacaggtctcccaacaggttatttaagggtatatgttcactgcttgaaccctaaaggccaggcagtgatccaagtccagggtgccccgcagaggagcaggtgtccctgagaatccaaacttcccagagagtatctgggaacataccaaggaaaacagtcccatcacacacacggtaggcaaagagccagaaaattagcttaaaagcagccttcgagatgggaggcagcgtggatctctagagttgttctgctgctgcccaggagttccctgtctgtaagtcttaataaactcatctactcaccaagctggacttgtccgaatcattctttggtttcttggcatcttcccagtttgggggtgggagcagtgttatagtctcaaaattttatttttactgttattttttttttagacagagtctcattttgttgcccaggctggagtgcagtggtgtgatctcaggtcactgcaacctctgccttccgggttcaagcaattctcctgcctcagcgtcctgaatagctgggattacaagtgtgcgtcaccacgcctggataatttttgtatttttagtagagatggggtttagccatgttggccaggctggtttcaaactcttggcctcaagtgatacacctgccttggcctcccaaagtgctgggattatagttgtgagccaccacgcccagcctcaaatttttttcataacagaaatactctgcagtcttaaaaaaaagtcatgagaaagtgttactataggttacaaagaagtatgtactttatgaacatattgtgtgtgtgtgtatgtgtgcatgtgtgtattaaaatgtcagtcacgtgtagtctcaacgttaaaggactatagctaattctaattgcattctttgtgcttttctgagtcttctgagttttttgtttgcaatgaatgaatattttaaaaataataaaaagggtggtaaagaacaagttaaagagttaaaatgacaaaaataagttaaaaccaagaaatacaagttagcatgttaaggagttatgatgaggataagattgtagatttaaatgtaaccatatcaatcattacattagatatagtctaaagagtgggattaaaaggcagagattgtaaaatgggttaaaaagcaacacctaactataggctatcagtgaaaaagatactttaaataaaagtaaaggatgaaaaaatatgtataatataagtactgaagaaagatgaagtagatttattaatatcagaccaagtacacttcagaacatgacatactgtcaggggtaaaaaggaaaattaagaatgctaaaggggacaattaatcaagaagacatgccattcctaaatgtgtgtatgtaactgagaacagaacttcaaaatatactaagcaaaacctaataaaactcaaaggagaaacagataagtctacaatattaattgaagacattaaccctcctttctcagtaattgattgtaaaaagtagaaaatcagtaagtatacagaagaactgaataacactgttaggttgatgcaaaagtaatcatggtttttgccattactatttcaaaggcaaaaaccgtgattacttttgcaccaacatatcaactaacttgacctaatatttatagaatactacatcaaagagcacaatacacaagttttcaagtgcatatgcacatgttctgggccataagcaaaccttagaaaacctaaaggaactgaaatcatacaaagtatgtattataaaattaaactaaaatttagtaacaggaagatatctaggacattctcaaacatttggaaacgaatcaacacatttctaaataagccatgagtcaaagagaaaatcagaaaggaaattagaaaatgttctgaattggatgaaaatgaaaacaaaacacattaaaggttgtgggatatagctaaagtagtgtttagagggaaactgaaaaggaagaataaacaaattgccaatcttaggaattaaaaagaggagtgtcactacagatcctacagacatttaaaggattataagataatttaatgaacaactttatgccaaaacttttgttaacttagataagggacaaataagagacaaactatcaaaactctctcaagaagaaatagataaccttatatctaatagataaccttatatctatctaagaaatagccttatatctaatattattcatagctaaaagctttcccacaaaaaaacacttcagaccctgatagcctccctggtgaattctacggaattttaacaacaacaacaaaaaacactaattctacagaaactcttccagaacatagaaaaggaagcagcaggcccaaactcattttatgagcctagcattagctgatataaaaaccagaaatgagacattacaaaaactccagatcaatacttttcatgagtacagatacaaaaatacctagcaaaatgttagcaaatcagatccatcaaaatgtcgccaggcacagtagctcaggcctataatcccagtactttgggaggccaaggtgggaagatcacttgaggccaggagatcgagaccagcctaggcaacaagcaagaccctgtcactacaaaataaaacaacaacaaaaaaaatgccaggcatggtgatgtgtgcttatacttctagctgtttgggaggctgaggcgagaagatggcttgagcccaggagttccaggttgcagtgagctatgatcatgccactgcactccagcttggactacagagtgagaccctgtctctttaaaaatacaaacacacaaatatatataaatatacacatacatattcacacacacacacacacatgcccacacacacggaggttaatacatcatgaccgaattgcatttatcccagtaatgaaagattagttcaacaagtaaaaatcaatcaacgtaatctatcactgggaaaaaaaaaaaaaactcattgtcttcaaggatgaagaaatccatttgataaaattcaacatccataaaaacactcggcaaaaaaggaataaaaggaaacttccttaatgtgataaaaagcatctaagaaaatcttagctaatttaatggggtaaaggctgaatgctttccccataaaatagggaaaaggacaggatgtccatttttaccactcctattcaatagtgtactggagatcctagtcactgcaataagacatgaagaagaaataaaaaccatacagattagaaagaaaaaaaattgtatttgcaaacaaaatgatcatctatgtagaaaatcccgaagaaactataactgcccccaccacctcagcaatctattagagctagtaagttcagcaaggttttagcataaaaagttaatatacaaaaatcaattttatttctctgtgaaataaaatgaataatgaataattggaaaatgaaaaaaatttaaatatttcttataacatcagccatgaaatatccatgcacgaacctaataaaatatgtactaggtttatattctgaaagctataaaacattgatgagaaaaatttaaaaagacctttataaatggagagctatatcatgttcattaattagaaggcttaatgttgctaaggtgtcagttctttccaaattaagctatacattgtaagcaatcccagtgaaaatttcagaaagtgttttgtagaaatatgaaaaagcaaagaatctaaaatatgcaaagcaattttgaaaaagaagagctgagaaactcttaagacctgatttcatgacttagtatagaagtcatagtaatcaagacaaccagcattagtatcaggataaacaaatagactaatggaacaaaacaggatgcaaagcagagcaatatttatatggtcaattaattttagacaagggtgtcaaggtaattcaacacagaaaggatagttttctcaacgagtggtattgaaactatctgacatccacatccatatgcaaaaaaaacaaaaaaatagaacctcaactcttatcttgtattaataccatatacaaagtcaaaataaatagaaaacctaaaagtaaaaattcaaaacttaaatatctaaaagaaaacataggagaaagaaagcctttgtgagcttgggttagatgaaggtttcttacataagacatacagtataagccataaaagaataaaaattgataactttgacttattcaaaattaaaaatatcagcttttccaagggcactttaggaaagaacaagctccagacttgaaagttttgaaaagcacatttctgataatagatctgtatctaaaagacataacacttatattgtaaagagacaaacaaccatgtttttaaggggcaaaagatgtgaataaacacttcaacaaagaaaaaatacagatggcaaatgaacacatggaaaatgcttaatatcattggtcatcagggaaatgcaggtaaagccacaatgagatatcactatgcacctactggaatggctaaaattaaagcaaaataaataagcaatacaccaaatgctggatcataccaaaagctagtgaagatatggagaaactagaaatctcatatttctggtgggagtgccatatggtacatctacattggaaaacattttggtagttttttataaaaataaatattcacttaccatgagtcagtaatcccacttctaggtatttacccaatacaaatgaacacgtgagtccacacaaagatctgtccatttgtgttcagagcaattttatttttaatagcaacgaaatggaaacaatgcaaatgtccactcaatagcgaatggatgaacaaattgtagtgcatccatatgatggaatattactcagcaataacatataatgaactaacacacgaaacaagatggataaatctcaaaagcataatgctaagtaaaaaagacacacaaaaatcttgaaattcaacttgatatggaattattgcatttaatatgccattctggaaaatataaaaaatgatagggacagaatgagtgttgccaggggttagtgatgaggcgggggaatcatgttacaaaggaacatgaaaaaactgttttgggttcttttatttttattgtgatggtgattacacaactgttcatttgtcagaagtcactaaattgtgctgtacatataaaaagggtttatacctatatgcaaactagatcagactaagcatttttttttttttaaagaaacatagataagagtggtgattcatgcctataatcgcagtactttgggaggctgaggcaggaggacagtttgaatccaggagtttgagataagcctgagcaacatagtgagaccctgtctctataaaaagaaaaaaaaaatgctgggcatggtggcatgtgctttgtagtcccaactactcaggaggctgaggtgggaggattgcttgagcccaggagctgtgatcatgccagtgtacttcagcctgggtgacagagtaagaccctgtatcaaaaaaaagaaaaaaggaaatatattgtttctatgtgccatatctaaagaacttctgcaacatatgaagtgataaataatacatgattttttaaataaaaatgctaacctggagctgtggtaaaaagaaaatttgagcaagtggtgaaacagatatatcaaaataggccaggtgcagtggctcatgcctgtaatcccaacactttgggaagacaaggtgggcggatcacttgagctcaggaattcaagaccagcctgggcaacgtggtgaaaccctgtctctaccaaaaaaatattagccgggcatggtggcatgcgcctgtggtcccagctactcaggaggctgaggtgggaggatcatttgagcccaggaggcaggggttgcggtgagccaggatcacgccactgtactccagcctaggtaacagagtgagaccccatctcaaaaagaaaaaaagatacatcaaataaaatttgacataatattactgaaacctaatgacatcacaactaatttctgcttgtagtggtcaaatttcttattttgttggagatgcactgtgatttaggaagtaccaaaatgcaaaaatgttttttaaaagagttatgttgaaaaacacagttgaagaagttcagaagtcttgggaaagtcaaggggaagctgaatgttgagatatgaagatgacgagccaggacagaagtgaaaaggaaaagctaaaggctggagaagaaccagagaagtataataacatgggtatagtgttgcaagaatttgcagaattaagtactgatcagtcattcattcatataatactgactcaacacgtattatgtgtcatgcactgttctaagtgctgggatatagcagtaggcaaaatagaccatgatccttaattgcagagtctacattctagagggagaacacagtaacaaaataaacagatctatgaaatggtattttagaagacagtaagtgttagagtgaaaaagaaagcaaggaaagggatatgatgtgctagagcaggggttggggtctcaatatttaaaagggtggtcagagaaggtcttatagagaaagtgatttatgtttttttgagacagggtctggctgtgttgcccaggttggagtgcaatggcactatcctagctcagtgctgccttgaactcctgggctcaagcgattctcctgcctcagccttcccattagctgggactacaggaatgtgccactgtgcctggctacttttttaattttttgtagaggcagggtcttgctctgttgcccaggctggtctccaattcttcgcctcaagcaatcctcccactttggccttctaaagttctgggattacaggtgtgagccactgtggcccggtctgagaaagtaacatgatatttcatgtatggcttgaagaaggtaaggtagccatgaggacagctttttacggtggatgcttctaaacaccgagtactcatggtatgcacagctaacatccatctacttcgttgagacccatttagcttccattgaaatgatattcaaatataccattaatgtgataattggttatgactgctgataaaaatgatttacaaaataatcttcatttcaactgagcaagaaaaatttgagatccaactgaaagaaaaccacatacctcactttatttttaactactactacccccctctctgaaacctgcccctctttcaattttcattatatgtgactttgggaatgctgaatttacttttttagtatcattagctgggaaagggggttagaaagagtgggaggaaatagcctatccatatgaaaacaataatcacataatatttattgtctgggattgaaatgtttcaaataggcaaagcaataaaatgtcaggaaaagcaaaacttcctaatgttaaaaatatcataaatttttcccaaaataagacatatgaaaaaagttccagtgatagtttatgtcaaaggaagaaaaaagccctcaaatccacgttaaagctgcctgaaatcttcagaaggcacaatctactcaccattggagaacgaggagacaatggcaattatgataaagtacagaaagcaacgattaccttttattgagcttgagaatcactttttaacataaactcactgatccctgcattctataacttggcttttgctatctattgttttttaaaaaaaggtagtgtcaaaaaactagcaggatttcagtatcacgttaaagtgattttacattttataattacaatgggacttatgtgtatatttattaataaaatagagtagcacctacatgggcaaaatatactttattgaatctacagataatttaatctaggtgggttcatgaacccctttctgtaatttcacggttcccctcaggctcactgtttggggcctgcagactacatgttgattgcttgattttcataggtgccaaataagatttctgaaggaatggctataaagaaaacagacattttaatttcaagctactctttggagtagcttccggttcacaaaatgttatttttagtctaaatagatctttatatttgctttaagttcagtggacatgttattccattacctttagggaaatttgatcctaaaaggctcattgtctttacagtgaaccagtgggagaactggtaggttttcaaagatggactatatacaaaaatagtcctactagtttgtaattctttttcaagattgtatagattcagatggaactcaaaggttcttaggtcttagtagtgcaaagtaatgcaaatatgattaaggtcatctgtttatgaggtccttaaccccttcacacaagactgatggcacagtgacctactcacaaaggccacaagaaacctgatgcatgcggtgctttaaattggtttttctgagacattgtatttgtctttaagagaaaagctgtgatcatctaaagttcataagctgtatagccaaataagtgaaataagaattgatgagattaaacaaagatttttaaaaaaggattctgagcttatgtttaaatgcatttttttttggctgggcatggtggctcacacctgtaattccagcactttgggaagctgaggcaggtggactactagaggtgaggagttcaagaccagcctttccaacatggtgaaaccctgtctctactaaaaatacaaaaatcagctggatgtggtggcgcatgcctgtaatcccagctactctggaggctgaggcaggagaattgcttgaacccgggaggcggaggttcctgtgagccacttcagcctgggcaatagaatgagactccgtttcaaaaaaaaaaaaaaaaaaattttttttctaccaaccaaaccacaaatgtttatgagtatctgtgtatatgagaatgacaaagaggtgttaattcaagacttgccctcaagaaattcttaatctggtgcagtctaaaggcacatggacagatgatcagggatactaaataggaagcagagagaacaacaagggcttagagttcagaggaagcaaagggtgctatgtgctgagacaggcaggaaactttatgggaaagagctagggaaggagaccaccatgaaaacctaggaaagaagaggcagattgattttgcatactgctaacagaaacacctgaccttctacacattgccatggaagggctcccaggagacctcatctccacataggccacgcagccctacctaggccatagggaccttcctctgtgattgtcacaggaacacagcaagacagccactcttgagaggagctgccacaggtagttttgcatctgactccctagttctggtaaggcaaaggtctttccacctcagccccctttgggatgtgaatgcaagctataaaactgcttggctggccaggcacggtggctcacgcctgtaatcccagcactttgggaggctgaggcgggtggatcgcccgaggtcaggagttcgagaccaacctggccaacatagtgaaaccccgtctctactaaaaatacaaaaaattagctgggcgtggtggcaggcgcctgtaatcccagctactcgggaggctgaggcaggagaatcgcttgaacctgggaggtggaggttgcagtgagctgagatcgagccattgcactccagcctgggcaacaagagtgaaactctgtctcaaaaacacaaaaaacaaaaccaaaaaactgcttggctgtggtttagagttggctcctccatgacatggtaaccccccagtcactcatgtcttctgtcaattggcccctctggcttggtatcttcctgtgggattaggaacgtgggaagttgacactgtgccgatcttgcttatgtagctgtgtaacagactgtctaaagccatttgggctcaccgtttccttacaggccaaacctatggaagtgtggcaagccaactcatgagctgcagtagttggtgctgcttagtgtctgcttgcttgactgactggtatgtttaggtcagggaggggtgacaagtggccaatgcattggcaggtgaactaactcttcccaagtgaagtagctggaagacacacttaaaaccattcagaaatagctgggtgaggtggcttgtgcctgtagtcccagctaatcaggaggctgaggtgggaggactgcttgcacctaggagttggagaccagcctcagtgatatagggagaccccatcttaaaaaaaaaattcagaaaagaaagttgtaccacaggctggtgcagttatttggaatcttaaaggacataaatcagaaggtggcttgtcctgaggcagaacaaacttagggttgaattaaagaagctgctgactgggtgtggtggctcatgcctataatcccagcattttgggaggccaaggtgggaggatcacttgagtccaagagtttgagatcagcctgggcaacaaagagagacctgactctctctctctgtaaaacaaagctgctgctaactactgagtggaatggaaaactatcctttgtaattcaaattgtgcatggtagctttttttccactttcctatttatttccatacaccacttcccccagacctgcctcacacacaaacatgtcaggctgggaaaaactatgactactatataattaatgaattaatgagcaagcctttaaaagggtcatttatttaaagtttcagggcattgccatatgtacttttgtatctgctgctgcaaacacgtaaacaagatgggaattattttataacatggatacataccttgtatgaaagcgtgaaacggtagcctgtaaacagagccttctggggaaatctggtcttcagaaaggagagaagctttgtatacatggatctttgaggaattttttcccataatttgtatagggactttttagtatattcattgattatatacatttatcttgaggcttaagacattattaaaaacttggcatgagcctatataattatattctattgtacatgatataatattctattatatacataatacttggcattagaggaggaatgttaagttaaaattttcttgcaatcaaattttctggttctgagaagtgcttctaggttcaaggtcaggcagcaattctctttaatatggtctcagaaatctctactccagtacagtccacgttgtgtaacagtggttaacagcatgagctttgggatcaaagtgctgggtacaaaagccagctctaccttgggtaattctgcataagacatttaatctgctgttcctcagtttcctctctcctgcctgtgggcaacagggcatatctggtagtggggctgtgagtattaaatgagataaatcgcacaaactgcttagtacacagggtagcacatggtgtgctgtaattattatgtcatagcttattaaaatgctgacacaatacatcatcatttttgatagcaagtagagtgttacctggtataagtaaaactatattttgatcatcttgagccttgcctccttctttttttcctatctatctatctttaccctcctttgaaaaaaatgagaatagtgaatattcagtagtgatgagcagaaaagggatcatgaacacaatgctgtacagataattacagtggctcccaacaatgaaatatgtatgcggcgttcttgtgactgcaggaattgattgctttaaaatatgcttcaattgccaaaacttccatgacttatgacagcttgactatttactatctatcttgctctggaaaacaaatgcaagtctcgtctctttctttaggtatcatggtatcagtatccgacttacaacatttgagactttctttaagagatacgactttctaatatttgagtttttaacgacatctggcccttatttaaccatcacatttacatccaattcctgcaggcaaagttttgttgtttaagcttggctagatgccctctgcagaaagcctttgctttaatgaacacaattccacaaaaactgctagagttccctgctctcttctcacccctgccactgtacaacaatagcatgtaaagtttcatcttgagtttcaaataagaaggtaaaaataagaaactgtgttgctggagaattagctctttgtagtggccactgctatgacatattcaacttgatgcccttagattatttgcagagtgtttatgtactatgaaatgttcggccagagcatacaggaaactgtaaaatattttatgagatgtatacatggttgatggtagaattttaaatgtagcctggaaaggttctatccaaattccaggggggcagatgagagaatatgttctctttagtgattcagttttacacaagaggttatatgaactggaaagcattgcctgatttgagaactacgtaaaaaaattcataaaattaaactttataattaattctaaacaagtaaacatgttttctttcagaccaagaatcaccagttatgtttatttgtcttctacatggtaaaagcatcagacatggcttgtttattattttataaaaacaaagaacagcaataaatgaagggttctccccagatacaggaattatatacaccatttaaaaaatatttgtgcttctgatggttttcaaataaaaagtcttggttttaaaattgaaacagtatttttgaatcacaacgattacaatctaagaaggcaggaaagctaatggcataaccctctaaatggcacgttcagaaagttatacttccaaatttaggtgaagggagaaatatttctactttctttacccttaaatctaggaagcagtatcaagagacgctatttatttattggcttatttattttcaaattcagtctctaaaatacaagggacaaaaaatagaaactagctttgtatatttccatttgacttagagttaagcctgatgtgtaagataacagactgtttacttaataccacagtcacactgaagattttactatataacacgtatgctttaggatgtatccataattagtacaggttttaaataaatttacatcgttgtctaggataaatatgccataaaaccccaacatgtcttagtaatattcttatgctaacccagtatggtagaaaatactgtataataccgactgaaaattagggaccatcgattctcatctctggtctgtcactacattattgagtgatcttaggaaactcactttccctctctaggccatggttttttcatttgcaagatgagcagctgttcttaatgatctctaagactatcttctgctctaacattatgattattgagaaaataatttactgaagttttcttaaacattccttctgtaaattttcttttgtttctatagtcactgctgaaggaagttttatttcacttcaaatttagtattgtgcaaagagtcagagaaagaacctaagtataaaaaatagaaaagggaattaaaaatattgagcaattatggggacatgtaggctggttcaggacagacataaatgaccttgctttattctaaattcagcttactggcttatgatgaaaaatgaaaggttttatatgaacttactgggcaaaaccagattttataaataattacctgtcagactgttcaagatagacaaacatatgccagaccaacaaaaacacagacctgtcatatttctgagagaaatgtacattgagtcttccttctctgggactataaggagatcaggtggaataaaacgaaggaaaaaaacccaaaccctatattttctgccttgtgcatactttaaaatgtataatgtgggagagaaggaattttgatgtgaaaaattatcccctgaaaattttataccatctataagcctggcagatcaaaaccaaatacaataaatgctatcgtttaaaagttaagttaagttaggatgtttactgcaagcttgtaattttccatgattatggatgccaaggaaaataagaatgataaaaagtttaatcataatcatacattttaacaagcatagatggaacatcaaaatcctttaggaatattttgatattatatatctatccgtgctttttgtttctgaaatgcaaattttttctaaaaagattaacatagagcaggtaaatgacagttaacaaatgtaaatgatgtggcataatcatattaactgagcctcataattctttgagtctgatggttttcaaataaaaagtcttgaatttaaaattgaaacagtgtttttgaatcgcaactattacaatataagaaggcaggaaagctaatgacataacctctaaatggcatgttcagaaagttttatacttccaaatttgggtgaagggagaactatttctactttctttacccttaaatctaggaagcagtatcaagagaggcttgctctcttgagcagtatcaagaaaaaggagcagtatcaagaaaaagatctttcatgtttctcatttctgtttttattaattctttagaaagagtgtttcaagtatgtgtaaaaaccataaaagtaaaattatacaaaactcccacagaattaaagaaataactttcttttttgcaattgaagtttaatcaggaactgtacaattacatctgctatattttggtttgttccaaagagttacggttcctcatttactggagaaagtatagatgccagaagggtagctcggctgctaacagcaagaaattacccagcccacatttccagtctaggtgtggtagtgctttgaagggaggaagcaagaaatcactctgctccccttctactgattctgaatacttggcttctaaatgtgtatggcatgtgcaggagtggtggatctggggattggaggaacaggaaaaggagggaaatgaagatggaggaagaggttctgtgtgaggaaaaacacacatgaaaggcagatggcaggaagttgggaagcaggcactgaaaatgacacatactataagtggagtgaaggggaaaggaggtgggaacaggtgatttatcaggtctgttagatctttgattactgtaagtttataaaatggatagctgtcactaaaatacatgtcaacaaatgttggaaagtaaagttggtggtgtaagggaaggcgaaaactcactgtccttttaattttgtttccttgttccaaacctggattataaaatatatcaaataaaatgcagacaaaacgctggacgggggcaaccactgcttttaaggtatgtgagctgagggcagtaaatctactcaaattaaaatttcaaaactgtgtgatctgcattcttgtccacctacagactatcctaaacatcctgccattaattagctgaacagcccatctagtaaacaagaccgatggttgaggggctggaaaagaggaggagtcagcaagttgaaagtcacaacagaccagcccactccctcagataaaagaaaggtaaatttgtattttattttgttcacaagaaatcaccttaatataacattgcctttcctgttgttgcaggcacatcacagttgtcacatcagcaggctagaaaagccatcccattcctgcggtaggcattctgtcaaagaaaaagaaatctgcaatgaattatcacatgaagtcaaacaaggaaaggaggcaaaaagcaagcagagccctcttcctgttttgtagactctgctggctacaatctaatagaatgcttaatctgaatatttctggtggcaaaactatagcaaccattctgtctattaaaaagtcagtgtggttaacaagtggttagtgattctatttttgggaagtagcagatacataaaataagacatcccattttgttaactgattgggcttggttaggccaaagagatgtattgaatctgtttgtcttttataaacatgtgttctctattcgatatgctcaggaatcacttctaactaactaagtatcttaatagtctataaattactgactcattactggcccttcccgggcctaatttatagtctgagtgaaaagctgtcggaacagacactaatagaggcctctcctcctccctaaaatatgatgatctcaaaggagttctgtatagttctgcatattgtagacagtatcaaaaatgcaaatcttatataattttatatacatacctgtacgtacagatgtacacatggatatgcatggtgggataaaatactcccataaaagaaaatgggaaaatggattctaagtgcaataattaatacgtttcagtaaagaaagaaaagttgcatgcttttcattccaagagacatattttgcatttcagtgttgggagacctggatcacacagggtctctgtaacatcctgaattccaccataagacccagaggggagcagaactaaaattcaggacttaggaataaaatttccctttccctggcacatttttaatcatttaaactagtaacagtcacatccagagaattcataaccgtcaatcttttcagaaaaacaaagaaaatcataaaattcaggttagggatttttcccccttaggctaataactctgaagcagttctggagtctgtatacttccagcccaatgaattaaccttgaacagccacagccatattttaagaaatacagaataaccttttacgatcaagataatgctatggaggcagtgaaatcttcatcttaaaaaataattaaaccacatttataattaattatactaaaaatggaaagtagacttaacccttttagaaagacttccatcaacatgaggtgaaacaaatatagttttctagataaccttctcttaatcataaaattcaattaacttgaaaaccttctctccaaatatcctgcttaagaagatttactgtgcttgtcaggctttggcgccctggctgaaatttctttggttagttatgctgctatgcagttcactccagatcagtgtatcagggatgacaaaacagtggcacattccaagtgtcattcctcagtgttctttctgtgagcttgttctttaccatggggctttttgtgttgtagaacacttctggattgaagaaaacattctaacaaggactagaaaattccaactctacttcctaaaattgcgctatagaacagtgttaagtgaatgcctcagagagccacaaataactt

SEQ ID NO: 6606 - DNA, 495 bp, Homo sapiens
taaacaatgtatagagtctcattctaacccttgagtctgtggtcttgttttctacaatggtggctgctgagctgaggccccaaggaaggtgagaagccagccacactgagccaaagggctggcaacagtgactggagcaaggctggacatacaggattccctgtctttaactcctttaagtaaagtcaagggaaagcagagtttggtatccgactgatgcagactgttggcttttacttggcatgtactttcttactgcttgagaaatgttattttttccttaaacttctttctcattaatcttgtgttaagagtggtctaaccctgttagtttggtaggcagcttctgttccaattagcatatatttccataagtgttgagtggggaagggaaggaaaacgcagaatttctcaactattgaccttgagggacttgtaggaaggtgtgtctgacatgcttgtaatacaactgactctgaaaaagctctagtaaat

SEQ ID NO: 6607 - DNA, 483 bp, Homo sapiens
tgctttttccttttgatgtacaaaggatgtacattgtctatgtagggcaattatgggaacgtcccaactttggcatgctttccagagtaagcaactttacaggaagatggatgaagacaacaactcatcttcacgtcaactgtaaatttctctctatttgtgttgcaaatgttgaaactaaatttaaacactgcttggtgtgagggccttccagaggccacattctcatggaatactttgtatcccacttactttcttctgtcagaccctatgaatgattcccagttctgtatctatctttacagacactcctagttagtaaaatccaggctttgaccagaaagagtcaggacttccacccactactgaaaattatagcttaatcaataacacaattagacctccccaacaaactggatcctacgtgcctatatactacttaaggttcatttctggtttaataaagctctgttctcaacatca

SEQ ID NO: 6608 - DNA, 364 bp, Homo sapiens
catccgagcaatgctgccaaggggatgtttggtcttttaaattgtgatgacaaaataaacttttatgaaccctcttgctcaataaacacagcctggcattttaaatgtcagcacatctcaattttgtgagagggtctgcctgagaggattgacttgaaactacacagcaaagaggaggtgctagtccacatttgcgtgttccatttgcatgagcaaaatggacctgaagatggagctgcagcaagaggggaggcacatgtccaatagcaaggaagccatcaagaatcctttattcttgaaggggtatgcaacagactggaaaggatctcatttttctttgctttaaatgctttggtaaatgtaa

SEQ ID NO: 6609 - DNA, 22756 bp, Homo sapiens
cccggagagagctggccgggatgaggcgccggctttcccgggtcttctccagctgccaccgctttactgcaaaactgacgggcgcaaaaacatgagtgactccgcgggagggcgcgctggtctccggcgttaccccaagctcccagtgtgggtggtggaggatcatcaggaggtgagcggacggcaacagggctctggggcagaatcagcggaagccctgacgctcagagggccaagcagagggcgcaaccttagcatcggaggccagagagttaaccagagttaaactgccctattccgttgctgtggagaggaccccaaaacagctaactaggaagaatgagaactgacatttatgggcgcttcctacgagtcggggcaacttatttacctcggtttgcccccaaatcccagaaccaaacaaaaggtggcatcgggattcgaaaccggacagtctggctgcagagccctgtgttcttaacctgcagttaactctggcttccaagtatctcctggaatcgccaccacagccctgctgtttagatgggaggctttatgcttggaacgtgggctctgatctgaaatggggacagtaatcgtaggactcacagggctcttaggagtattattgtgtgcatactgtgtttaaaaatcttttttttttcttttttgagacggagtctctctctgttacccagactggagtgcagtggcgcgatctcggctcactgcaacctccgcctcctgggttcgagcgattcttctgtctcagcctcctgagtagctgggatcacaggcacgcatcaccgtacccagctaatttttgtatttttagtagagacggggcttcgccacgttagccaggatggtctgaaagtctgacctcacgtgatcggcccccgccggcctcccaaagtgctgggattgcaggcgtgagctactgcgcacggcccatattgcgtaaaaaaaaaaaaaaatttaacacggtgccctgcatagataaacactaaaaggggtttccatgtttatggccgtgctgatttacagtagccaaattggtgtcttaatctagacttttccaagtcaacaaaggaggcccatggatctaataaatatgttttaaagtagcatcagtaggcttgggatgggaggcagttctctggacgttaaaaaagaagagggatttactgttggtgacagctaataggagaggaagataggtttctcaggacctggatatagtgtctatgaccttgagagaatgagaaagcctaggttagacggtgctttcaaattaggtattaaacctagaattagagaagatgtaagaggagaaatggcctttatagaccacctagcccaaccccaccattctaagtgtaccaaaaagaccctaaccagcctggacagcagagcgaaatcccatctctacaaaaatagaagtgaaaaaattagctgggcgtagtggtgcgtgcctgtaatcccagctactcaggagactgaggtgggaggatcgtgtgaacccaggagtccaaggctgcagtgagccatgatcacaccactgctttccaggctgggcaactgacaagcccctatccctttttaaaggaaaaaaaagaatactttgagacctagggtaccttgaacacctagttaatgttagaacaggcattaagcggtagtttgttcctgagccccagtcctggtctgtttccccacatgacctgttgagttcaagggggcagcaggaaggccgctggagatgcaggttggaagttctgaggacaaagtaatgcttgagattatcatctgcaccatctacagtaaacaaattttatgtttttccactttacagcaacatagtatgctttcaattatgtgcattatttagcattgtttttcagtctgcagttgagtgtgtgctcatggtttcagtgttaattcttattgtgtgcctgtgtcttttacaggttctaccctttatataccgggccataggctcaaagcatcttcctgccagtaatgtaagttttttacatttcgactcacatccagacctccttattcctgtgaatatgccagcagacaccgtgtttgataaggaaacactctttgggtaatatgtgattttatttatggtcttttgtgtttgaagtacaatttgcagtagataataagcaattataggaaatagactttgctaaactcatgggtttgggggttttttgtttgtctttttgtctttttcattttatttagaacaagtgttgacaactttcttaaagagccagattagcaaatattttaggtttgctggctatatggtctctgttgcaactattaatctttgcctttgtagtgtgaaagcaatcacaagcactgtgtaaacaaatgacagtagctgtgttccaataaagctttatttacaagctgggcatggtggatgagcctgtagtcccagctactcaggaagctaaggtgggaagatcacttgaggccagcagttccaggctgtgatcaaagcctgtggatagctgctgcactccagactgggcaacataaccagaccccatctcttaaaagaaacaaaccaaaaaaactttgtttacaaaaacagcctagccaatgtttaatccttttaatatttgcctttatagagaccattggattctcacgtctatttctgcatttagtccattgccatatgctgttttggttgaaatatatgatgaagattcaggctttcacaggcatgtaattggaaaaggaaagaatattttgatagcctttttagataattgtgaatattctttgatagtgcgccaaaacttgaaaagtagtagtttattaaagcttatttgaaatgtagaattcagcaattcagtatcaagtgtgaataaccatagtttcttgaccactcctttcaagataaatggtgttcacctcaaagttcaatcacaagtgcttttccttgagacaactgttatgcttcaaactatgtagcaggagagctttctgtgcatttctcattttgccacacataatatttaaaaatgtatactcaggatggaaatttaataaaatcaagatgttctcgaatgacacttttatatttatttatttatttattttggcagtggttggtaatgaagaatatagtaactactaacagtttggtgctgctgccttaattaatgttggaacatcaacccaccagtgcctttgcaccatctttgcaaatgtcagtaaatgaaaacaggaaataatgccttagtattttcatgaaaatagttttgtaatagtgatgtccctgaaaaagtctcaggaaccactctagggaccacactttgagacctgtggtcttaaaatgttgtggataaaattacacttgggaaaaaataaaaataaaagttttaatgttgtctctatgtttcttttccagagaattaagtattgaaaattggattatgcctgcagtttatgctggccatttttcacatgtaatatggtttcatcccacatgggctcagcagatcagagagggcagacaccactttttagtaggcaaagacacttctaccacaacaatcaggtaatttcctcatatttgtgaatatggaagtgattgaatgtttctatcttattttggattcctataataacttcataagtctctgcacacaaatagggtcagattaagcctcgacttctccaaagagttctcaaaacacgaagaacaaacttttaagtctcttgatattcttcatgtaccatttatatttagttgctggtcaaattagattttgaatgtgatcattatcctccggaatttgggcttcattggtgattaactccttaagccattgaagtatcttatagatttatacattcagtagtacattttactgtttcctgtcagtataactgttgtctgctgaatttgccgcagtggctcacgcctgtaatcccagcactttgggaggccgaggtgggcagaagacgaggtcaagagatcgagatcatcctggctaacatggtgaaacaccgtctctactaaaaatacaaaaacaaattagccgggcgtggtggcaggcgcctgtagtcccagctactcaggaggctgaggcaggagaatggcgtgaacccaggagacagagcttgcagtgagctgagatcgtgccactgtactccagcctgggcaacagagtgagactctgtctcaaaaacaaaacaaaaaacaaacaaacaaaaaaacagtaattagcagtgaaagggcaaaattatctcactttgatttttttataaatccaactgctgaataagtagatttggggctttaattttctttataatataattagtttcagataagtacttaatctaaagtaaattacagtatcctctgacttgagataaatatgcaactgtttttattgtataagctatttaacaatgttttgtgtatcttgtgatactataatactttcagaaatatcaatatgttcttgactttaaaattctcttgtgatgggataaatattttaaacagtatagccataactttctagaaccttaaggataatggagtgaaatggtaatacgttgaaaatcagatagtcttcctcattgaaaatgatactttatttctaatttattcttaatgatacaattaacttttgtagtatataatcttgtcgtttgcacaaatagctttgttgtgatatatgaaaattgtatttatttcagatataattcaaaagaaataattaagactcagcatataaatattgtacatactactggtatatgtgaaatagtagtagggtttttattgagtacttcagtgagtaggcctgatttaacctacaaaatcaaataattttcagcaatctgacacagacatttgaaactccacgtgtgattaacaattttggaagattttgattcatgactttggttaatcctgcaagtaaaaatgtatggaagagacacatatacatgttggtgtgcagtttgacaaatacttgcatgtttgtatgataggaacatgggagaactgctgttattaaaaagaatattaatttaggttgggggatacagcttcatcttagggttgtacagttttaataagcttggacattagttttactatgtcattaatctatttttggaaaatagcttttacagtttatagctgtgtatgctgggagaggtcaagtgggaaataaatattaaccatgattttaggtgggtaaggcatgcctctagaagaagtatttggcttcactgtttgaagtatttaccaagtcacctttcatactgagaatattatggttatatagaaattaacaaagctctaaaatatgtcagggggagtttctattaagagaaattatttccagatgaaatttttctcttcaatgattttttggataaagattcagctggtatgagagagaacaaaggaacactggcttaaacaagagagtttattcttatattagaattcactgtacacaaaccaggcctatgtggcagctctagagtttggggaaccctagttccttctacctttttgcaccaccgtctctagaatattgcccctgtccttatagtccagggtggcttgccacctctgtgttcatatgccagtcagcagggaacaggagaacaaagctctgcatgcttttcttccattcacaaccaccggccttaatttaatcacatggccacaccaggctgcaaggcagactgaaatgtagtctttatatggggcagctgtgtgtccagctaagaatttgaggaatgctatttctacagaagaacaggaagtataaatactagagactgctctcagtttttgtcaaataggtccgttcttatatttctgccataccatagtgaaatgtcaactgatttgcccattcttcttaaaaatcgttttttcctctgattcagggttacaagtacagatcattatttcctaagtgatggtctgtatgtacctgaagaccagctagagaaccaaaaacctttacaattggatgtaattatggtaaaaccttataaactctgtaacaatcaagaagaaaacgatgcagtgtcttctgctaagaaaccaaagctagccctggaagattcggaaaacactgcctctactaactgtgactcttcttcagaaggactggaaaaggacacagcaacacagagaagtgaccagacttgcctagaaccatcatgttcatgttcttctgaaaatcaggaatgccagactgctgccagcactggggaaattctggaaattttgaagaaagggaaggcatttgttttagatattgacttggattttttttcagtcaagaatcccttcaaagaaatgttcactcaggtaaataattgtgtttttaacacatagatcttgagaattgtatggcttttctctagatgaggaaccagcaaactctttaaacagccagctagcaattattttaggctttggggttcacattctctactaatacccttttctgttgttttctaaaccttttaaagttgtatataccattcttaacttgagggccatacacaaacaggctataggctgtggattgccaactcctgctctagatagtattcattattttgcatttattaattggggtaatgtatacatgggtgatggataaaaattaagtcatacagtacaggtatatacagtcagccctctgtatccgtgggttctgtattcctggatttaaccagccacagataggaaatattcagaaaaaataaaaaacaactagaaataacaatacaagagtaaaaaataatacaaataaaaaacaatacagtataacaactatttacataggatttacactgtattagataccacaagtaatttagagatgacttaaagtatatgagagggtatgcatatgttatatgcaaatactacactattttatgtcagggacttgagcatccacagattttggtatccacaggaggtcccagaaccaatcccccacggataccaagggacaagtgtacattgaaaaacagcactctcttatccccattccctcagttctttgcttcagaaacaaatactgtgatcagtttcttgtgtatctttccagcgatattctatatataaatcctgtgtaacagattattccttaaacagtgatgtgcctgattactcacctaaatatttgtaataaatatttgtaatgaaagtttctagaaggttacataaggaattcagtggcagttattccttttagagtgctattaggaaacctgggaacacaaggatttgtatagcctaaataccctttggtacaatggactttttaaaaagcatatattaaactttattatttagtagcaattttttaaatatcattaggaaagacagatgttcatctttttttttttcttaagagcatgttcaggctgggcatggtggctcatgcgtataatcccagcactttgggaggccaaagcaggaggaccacttgagccaaggagtttgagaacagcgtaggcaacgtagcaagaccccatctctattaaaaaaaaattttttttttaatttagccaggcatagtggcacgtgcctgtggtccagctactcaggaggctgagatgggaggatcacttgagcctgggaggtcaaggctgcagtgagtcgtgatcgcacccctgcactccagcctgggtgacagcgagaccccatctcataaaaaagaagcatgttcaaaagttaggggagttaagttctgttgttaactctactgcttattagctatatgatcttaggaaaattacttaacctttccgacccatagtttcttcaagtatcaaatcagaataataatcatacccaactcaggattgttataatgaataaagcactgaagatatgccacaacattgtgcttaatgaattttagcccttgggtataaccttttcctgagaatactcctaaataggattactggggccaggtgtacccacctatataatggatccatgtagctgtgctaaacaaggggaaacattatcctacaaagtttgtatagcaagcctctttctccccttgtgtggtgcctcctgaccgaggttctatgtctttgacattctacctccagtattgcctttgtacttcagagatctcttctgttgttagagaaatggctgcaaagtgaacatagggagttctttgttgttgttattaaagatatgtatatttcctgtaaacagctaagtctgtttagatcctaggacatggcatttatatagcagaatattatttaaaatattttcatctcgtgacccattagccaccaagtatgcttccttaggtaatttttacatagtagtaccatgcccagctggatagagttgccttgaagaagtgatatttacaataaaacaaaattttacaatatttacaataaaattattacaataaaaatctaaagtatacattttgcctgattctcccatacatacctttaaataattatctaagatgttcttgtatcacaaggaaggttgtctcttccttaaagcatatcattaaaaaattttaacttttttttttctggtatgtggattttttgttttgttttccaggaagagtacaaaatcttacaagagctgtaccaatttaagaaacctggcaccaacctaacagaggtatcctccatttgtttctttggggttttattcatttatcatataactaataatatcttgcaaattaccacagtgatctcaaagactgctcaaagtgtgtgtgtgtgtgtgtgtgtgtgtgtgtgtgtgtgtgtgtgtattggcgaagcccatggttagtacttgaaaattatgttttaactaatagagccaagttttttttgtaatgggatgttgcttgttttttgaaagaataactatataatctcagcttttcaatgtatttaaaggaagatttggtagatattgttgatactcgaattcatcaattagaggatttagaagccactttcgctgatttgtgtgatggtgatgatgaagaaacggtacagagatgggcttcaaaccctgggtaagactctcaaacatttttttcccccaactctactaactttcagtcctagatatgttcctaaatttgcaagatacattgcttttaaaaaagtagtattcagctacttgggacactgaggcaggagaggaccacttgaggccaggagttccagaccagcctgggtaatgtaacaagaccctgtctctaaaaaaaggttttttaattagccagatatggtggcacctacctgtagccactacagccactgctcccagctacttgggaggctgaagtgggaggattgcttgggccaaggagtttgaggctgtagtgggctgtgatcatgccactgcactctaccctgggtgacagagacttgtctcaaaaaagagagaaaaaaaagaattagtattaaatttcaacacatttactaacaatagtagacattattgagtgttttctgtgtaccctttatctaagatttttccttgccttatctcatgtactccttacaacagtcttatggttttattattattatgtcaattttatagatgaggaaaccaaggttaagtaaattgccccaagtcacatagtaagtgggcatgtttttagtctttgtatggtagctgcccctaaatatgagatactatacaaggtcttaaagagaattaaagatgagtagtacataggcattccctgttctaagtagagtaagaaagaaatactaacctaacaacagaaaagtaaattacttgacaagtaaattacaatgcaaaaatttggctgggcgtggtggctcacgcctgtaatcccagcactttgggaggctgaggcgggcggatcatgaggttaggagatcgagaccatcctggccaacacggagaaacccagtctctactaaaaataccaaaaaaaaaaaaaaattagccgggcatagtggtgggcgcctgtagtcccagctactcgggagactgaggcaggaaaatggcgtgaatccgggaggcggagcttgcagtgagccgagattgcatcactgcactccagcctgtggagactggactttttctgagactccgtctcaaaaaaaaaaagcgaaaacttagcttcttttaaggaaaacccaaacacaagtggaagggtattttcaatctcttgacgtgaaggagcagtatttgaaggctagattctccatcaggtaatttatttgactggctgttcatatcaccttgaaagaatggagagagaagttctttttgagtgaaagcctttggtattgaagctggagtgaaagaatattgacataaatattacagtgatttttctctaaaataattcttaaatcatgtaatctcaaacagccagaaaactaaaataaaaccatcagacaaactttttgtccccatgagcataggaaaaccagaactagcttattttaaaactaatctcccacgaactgtcatattattctctctggtgtaaacaaaagaaaatcagttgtaaggtagcaagataaaacgggaaattagaatcaatagtactttaggccagaacatgaacagccactaagatttgtcatgttttggttattaaaaataattcagcagatctctagaagaatatggaaaaagctgaaacagtggttgcctctggggagaggaattctatggctaaatgatgaagtatatgagtgagaaattacttcttttgctatgtgcacgtattatctattcaaaatactcattgtaatttttacttaaaatattcagaaacatccctaaaatgtaaacatcataaagctttaattattgacactaacaaagcagtgatgtggaagaataattcacagtaatattaatcacatcagtaagtattgattaggcactttaacatcagttaatggccgggcgtggtggctcacctctgtaatctgagcactttgggaggccaaggtgggcagatcgcctgagctcaggagttcgagaccagcctgggtgacatggtgaaatcctgtctctacaaaaaaatacaaaaaattagccaggcatggtggcatgcacctgcggccccagctacttgggaggctgaggtgggaggatcacttgagcctgggaggtcaaggctgcagtgagctgagatcgcaccactgctctccagcctgggtgacagagggagaccctgtctcaaaaaaagaaagaaaaaaaaatcagttaatgctttttcctcttcagtatagggttctaaaatgattccctgttttttgaaatgatagaagagggagatagaaaaataagtcacaggacaggagtcttcctagaaatactgaaaaatacctattattttgttatttcatgaagtctcaagctaagtttaaaacttcaacaacaacaaaataggcctggaaaccttggaatcctaagtccagcccacagacttccactgaaacccactctgcctactgagcatgcccagttagctcctcatcaccagcagagagttctatcacagacttgaaaatatgatgagactgcaacagtagtgagtttagactgtgcttggtattgaagggagaaaaaaaatagcataaaggaaaagtagatgacactgaaagaaaagtctccccaaaccaaccatgaccctaaagagccagaccctcggcatggaggcttcgctatgtctagggaagtgaggtgggtgtttagggtccagaagcctagaaaatgtcattaattaaaaggaaaaagtaacaggacaagtgggcaagcaggcaggcctccatgcctccttttttctttctttttttactcccagcaaattcgtgaatatttgtggaggaggaattaaaacactagaagcattagccaatcagagcttccaaaaggtccacctaaacttaataccttaaaagcatcaatgtggccgggcgcgatggctcacgcctgtaatcccagcactttgggaggccaaggcgggcggatcatgaggtcaggagatcgaaaccatcctggctaacacggtgaaaccccgtctctactaaaaaataaaaaaaattagccgggcgtggtggcgggcacctgtagtcccagctacttgggaggctgaggcaggagaatggcgtgaacctggaaggcggagcttgcagtgagccgagatcgtgccactgcactccagcctgggcaacagagtgagactcttgtctcaaaaaaaaaaaaaatgcatcaatgttatatcagatgatgtaggatttttccgattataattgtatttactggctaggcctgggttcacacctgtaaaatcccaacacttgggaggctaaggtggaaggcttacttgaggccaagagttaagaccagtctgggcaacatagcaagaccctatctctacaaaaagattttaaaattagttgggtgtggtggtgttcacttatagtcccagctactcgggaggctgaagtgggagattccttaagcccaggagttcgaggctgcagtgagccatgatcacaccactgccctgtagcctgggtggtagtgagatcctgtctcaatagtaataataattgtatatacaaataaacgtgtccttaattttttttttttttttttagctttcaggaaacagccttttttcatcacagtgtgctaaaaacacttagttttcttgctaatcaaaataattttttttttttttgagacagtttcactcttgtcaccctggctggagtgcaatggtgcggcctcagctcactgcaaactccgcctcctgggttcaagcaattctcctgcctcagcctcccgaatagctgggattacaggcatgcaccaccacacctggctaattttgtatttttagtcgagacagggtttcaccacattggccaggctggtctcgaactcctgacttcaagtgatccgcccgcctcggcctcccaaagtgctgggattataggcatgagccaccgcacctggcctcaaaataatttttaaagtcagtagaacttcccatttttgaagaagaaatctcattttcttgaatgctcacttttagtctttaacacaatgtgtaatcttttgggtaagaaaacaggaaacatttatttcttaatattttaagatatttgaacagctttatcttttatttcccaagtgccatatgaagcatgttattatggtaaatgttagtataatgtataatttgctattatcattttagttgtggtggttgtgatgtttaattgagtgggatggcttttttccagaatggaatcactagttccccttgtacagagtttgaaaaaacggatggaagtaccagactatgaaatggtaaatattttatattaatgtgtaaaattgaccctttgtaaagacaattttctgggtagaagaatttcctttttgttaaagtggttcgtttttgtttgtgttcctgtgaagtctgaaacaattattaagaaaagaaatgagtgaaaaaaatacatacgttgaaacagaatactgttttcctggaaaagtcttccaggaaaaacttttttttctcaattttatgtatgaagcaaaagtcctgtgtgttttttgtaattttgtctgtggtcggatctctcttcaccagacaaaagaaaagtacacaatttctaaaatggtccattttttattgatgagtatttatactgccttctgccttccttcttttcctccctatttaaaaacttttccgtttgtaaaaaccacaagacaaagaaaaaagagagagctgtgactagcacattttaaatgtgttagctgtttgtcaacaggtatctgaatgctatggccaaagatacttttagtcataatttatttgtatatcattttgcagtctttgaagcatatattttcccatttgacctggtacttgagatgagaaagctatagcttaaaatgttcaagtgacttttctcagatttgatgccagggctaagacttccaagtctccttcctcttagtgtggtctttctcttacttcagtaagctgggtttgcatattttatttacttatggaatacagtcagaccactgtgtttgactaaagttgaagtattgatttaagtattgattgaatttataagaatttgctggtactctttaaaataagagatgtctattttcacactgctgataaagacatacctgagactgggcaatttacaaaagagatttaatggacttacagttccatatgattggggagacctcatagtcatggcggaaggtgaaaggcaggtctcacatggtggcagacaagagagagagcttgtgcagggagacttttgtttttaaaactgtgagatctcgtgagactcattcactatcatgagaacagcacaggaaagacccacccctacaattcaatcacctcccatcggcttcctcccactacatgtgggaattgtgggggttacaattcaagatgagatttggatggggacacagccacaccatatcattccatccttagcccctcccaaatctcctgttctcgaatttcaaaaccaatcctgccttcccaacagtccctcaaagtcttaacttatttcagcattaactcaaaagtccacagtccaacatctcatctgagacaaggcaagtcccttccacctatgagcctgtaaaatcaaaagcaagttagttacttcctagatacaatggatgtacaagaattgggtaaatacaaccgttctaaatgggaggaattggcccaaaggggcagtgcaagtctgaagtccatcagggcagtcaaatcttaaagctccaaaacgatcgtctttgactccatgtctcacatccaggtcacgctgatgcaagaggtgggttcgcattgtcttgggcagttctgcccctgtggctttgcgggatacaacctccctcctggctgttttcatgagctggtgttgagtgtctgcagcttttccaggcacacagtacaagctgtcagtggatctaccattctgggatctggaggacggacagtggccctcttctcacagctccactaggcagtgcccctagggactctcagtggggatccgaccccacatttcccttccacactgccctagcaggggttctccatgaggggcctgcccctgcagcaaacttctgcctgggcatccaggtgtttccatacatcttctgaaatctgggcagaggttcccaaacctcaattcttgacttctgtgcactcacaggcttgatcaacaccacaaggaagctgccaaggccatcctctgaaaccacagcccgagctctatgttggccccttttagccatggctggaatggctgagacacaggacaccaagtccctaggctgtacacagcactgggaccctgggccctgcccatggaacaattttttcctcctaaatcttcaggcctgtgatgggaggggctaccgcaaaggtctctgacatgccccagatacattttccctattgtcttggggattaacatttggctcctcgttacttatgcaaatttctgcagccagcttgaatttctcctcaaaaaatggaattttcttttctttaacattgtcaggctgcaaattttccaaacttttatgccctgtttctctcttaaaactgaatgccttggccaggcacagtggttcacgcctataatcccagcactttgggaggccaaggctggcggatcatttgaggccaggagttcaagaccaacctggccaacatgttgaaaccccgtctctactaaaaatacaaaacttagctgggtgtggcagtgcacacctgtaatcctagctactcaggaggttaaggcagagaatcgcttgaacctgagaggcaaaggctgcagtgagccgagatggtaccactgcactccagcttgggtgacagagcgagactccatttcaaaaaaaaaaaaaactggatgcctttaacagcacccatgtcacctcttgaatgctttgctgcttggcagtttcttccaccagatatgctaaatcatctctcaacttcaaagttccacacatctctagggcaggggcaaaatgccaccagtctctttgctaaaatataacaagagtcacctttgttccagttcccagcaagttcttcatctccatctgagaccacctcagcctggatttcattgtccatgtcattatcagcattttggtccaagccattcaacaagtctctaggaagttccaaactgtccaacatttccctgccttcttctgagccctccaaactgttccaacctctgccagttccaaagttgcttccacattttcaggtatcttttcaacagtgctccactctactggtaccaatttactgtattagtctgttttcacgctgctgataaagacatacccaagactgggcaatttacaaaagaaagagatttaatggacttagtgttccacatgattggagaggcctcacaatcatggcagaaggtgaaaggcacatctcacatggcagcagacaagaagagagagcttgtgcagcgagacttgtgtttttaaaaccatcagatctccagccgggcatagtggctcacatctgtaatcccagcattttgggaggccgaagcgagcagatcacctgagatcgggagttcgagaccagcctgaccagcatggagaaaccccatctctatgaaaaacacaaaattagccgggcgtggtggcgcatccctgtaatcccagctactcgggaggctgaggcaagagaatcgcttgaacccaggaggtggagtttgcagtgagccaagatcatgccattgtactccagcctgggcaaaaagagtgaaactctgtctcaaaaaaagtaaataaataaaactgtcagatctcctgatactcattcgctatcatgagaacagtgcaggaaagacccacccccacagtcacctcccaccaggtttctcccatgacacatggaaattgtgggagttacaattcaaggtgagatttgggtggagatacagccaaaccatataatgagcaaagcaaaagaatattttggtgaaacctaagcaaatccaagacttaaacttttttgtttaacttttttttttttcccctgggagcatatattcaaattgccctgaataaacacttccaagacttacactttttaaaaatggtaattaagaagatcgttataagatacttaaggtttgaaaatgttttgaggccaggagcagtggctcatacctgtaatcccagcactttgggaggccaaggcaggtaaatcgcttgagcccaggaatttgagaccagcctgggcaacatggcaaaaccccatctctacaaaaaatacaaaaattagccaggtgtggtggtgcacacctgtagtcccagctacttgagaggctgaggcaggaggattgcttgagcctgggtggttacaatgagttgagatcctgccattggactccagcctgggcaacagagtgagactttgtgtcaaatttaaaaagagaaagaaaatgctttgaattcatacaatattatcaaatatgtctgcaggcaggtctgctttaatcattacattgcatctgggtttttttcgttgggtgggtttgatgttttttggggggcagggaatggctagggctcagtcacagattatgtaatccattatgatatgccctacagctgcagagatagaacgctaaatagttttatcattttggcaaaatgaacatccagaattcatccttttatcacactgactgatcattgccagttaaattgttgatgtgtatccaaagcctccaataaaatatttgattagtgtgttttttcatactttgcacttgcgtactctaggcaaaactatgacatagttaagttccagttttcaaaacattaaagttaaggttgcagaatggtagcatgtgagccacttctaactttcaggcaagtttagtgtagtgctaagactagaacatattccattcaaatttaaaacacataggtagatagcagtagcttatggttatacataaaggatacacaagaaaacagtttggttaaataaggtaggataaatattttctcttgtatcctctcaaagctttgaatgtagtactaggtgcacatattaatatttaaaaagtaagtaaaataatgtgttaaaaatgagataagaatatgtacaatttttttttttctttttgagacggagtttcgctcttgttgcccaggctggagtgcaatggcacgatcttggctcactgtaacctctgcctcccgtgttcaagtgattctcctgccttagcaggagaagctgggattataggcatgtgccaccacgcccggctaattttgtatttttagtagagacggggtttctccatgttggtcaggctggtctccaactcccgacctcaggtgatccgcctgtctcagcctcccaaagtgctgggattacaggcatgagctaccacgcctggcctcaactttttagaatctagatgaaatggataatttgatagaaaatgtgaattaccaaaattgacccaagcccaatgaagtagttaaagaattattctaaaaagaggcatctggcccagacaggcatataggcgagttctaccaacacttcagagagcagataacttttatgacatagaaactgttaaggaaaaaataatcccaatgcataaaaatattaaaaattaaaagtttttcatatttaaggtgttggatatcccagttaccctgatttgatctttatatgctattatgaatcacatgtaccctgaaaatatgcacatcttttatgtatcaataaaagtaaagatttgtcaataaggccattaatgattaaagaagcttataaaaacaactgtcatacagtgtaatttttaattgtcttattttcaggttcaccaggctggtttaacctgcgattattcagaacttcctcaccatatcagcacagaacaagaaatagagtgtcttattcaatctgtgcattatttgctgaaaaatttaccaaatcctactcttgtgacaattgcaaggtaagtgtgttcagcagaataatggcaaatcagagatgtgcacatcctaatctctggaacctgtgaatatgttacattatatggcaaaaggaaattcgcagtgtgattaactcaaggattttgagatgagattatcctggatttatcaggtgggcccagtgtaatcacaagggtcattagaagagaaaggcaggagggtcagaatcagagagagtgattcgaaaattctacacttcgggctttgaaggtggaggccacaagctaaggaacacaggcagccttagaagctagaaaaggccaggggacagattatccttgggatcttacaaaaagaatgcagccctgtcagcacctttattttaggacttctgacctccaaaactatataataaattagtgttgctttaagctactaagtttgtggtgattttttatagcagcagtaggaaactaatacaatctctgtaggtaaataacctggtcactagagcgtaaaatgagtttatcagtggtcttacagattatctctttaggtttgaaatacttgtactaaggagtaggccagataactaattccagttcttctataaagatttctgtgctgctcttctcactctgtcctctagaaggctttattcacccttatccggaaccaggagacactggttaatccagttgtaactggcagcagcattgtaactgcccagtgcaactcaggttgcagttggtaagttctggaaagactcccaaaatacagatatctgccccaacctactttgctcttttctgcttcctactgcctaggaaagtaaatccaacaccagcacatcgccacatttcattttggaccaagccatggatcctttataattttgtagttaacaaatcatttttagaaataggatccttttatcagttggaaaacctcgaccctcatcatttctagccctagcacacacataataaaagatgttccatcgctaagataataagcccctgtattcccaagcaacatctcactttcaggcaaacaatggtctagcaatcaagcattaaggcacacaccgcatgtcaccttgcacaggttaatctctttcagatttctttaaagggatagtaattgtgcctatttcatagagttgctgtgaaaattaaagaacataatttatgtaaggtgactaacatggggtaaaccttcactagctttcaattgatattaatccaaagttcagcacaccttaatttctgttttacattgaaatgaacacatgcagcttttcctcacagtatgattttatcctatgtgtatttttcttctttctctttctgttggttctaggtcaagtctggatgattactgtccttctgaccaagttgacactattcaagaaaaggtcctcaatatgctacgtgccctctatggaaatctagacctccaagtgtatgcagcagagtctcctccatcttgaaacaaacaaaacattaggctcctgttgtatcttggtttagtaacaggcccttaattaacttatttgtacatgagtcttccagagaacactgttttatattaactttcagttgaaatctttcagatattttgaatctctgaacaaccattgtcagttgtgaatgatggtaaattttttggcatcaagtctcataaccccaactgatagaactgttgcttatctgtcttccttaagtattttttagggttttgtttttttttttgtttgtttgtttgtttgtcttcacttttcccccaggtctgttgagctgtatgagattcattcatacttcatttattcattcaactaatatttgttgaacacttacatgtaccagacattattaagtgctgggtatatggtaatgaacagaatagacaaggcccctgcccttttaggggagacagatgagaagtaaattacgggttatgagaaatgttatgaaggaaaggacaacaacagacatgtcttagtacttagggtatcatggctttataggaaagtaacattctctatctttttttttttttttaattttataaaaatagagatggggtctcaccatgttacccaggctggtctcaaactcctgggcacaagcaatccacctgccttcgcctcccgaagtgctgggattacagatgtaagtcactaccccagccagaaactaacattctcaaaagctactaccaaaaaaaccccacaaatttgccaatccatgaaagtatcataggaagtctacctttccaaggaatttggcattgtggccctgctcttgccaaatgctctccagcattgttggtatcaaggtggtctggttgagtaaacttgaccaaacaaaaattaactgttttttgcttttctgtttttgttttgctgatcaaaaaagcccttcagggtctcttgtgcatccaggaggtcattgtagatatcaataatatagtgcctaagtgccactttattgccaagtctagattgatacttttttcagataaaccagctttttatgtaaagagtaagggaaaaagttaaatctttaattctgacctgccataaatacccaaagatataaactgtcttccaccacccccctcataactaagacatccttcctgagtcactcttaatcatgaaacttgattttctcaattggccagtcttctgatctttagtatctctttagttcagtaatttttacctacctacttgatttattttcctttaaaaggtgaaatgacatttaaagaaaaacaaacacccatcattcctcagtcccaacacagcagttcttttcactcttgcttgtaactttcaggccttacccacatgtgttcctatagagttgcatgtagctaaaattatagtgtgctgcctaactttgtgctaataacgaaggacacacattatcattgcctcacagtggatggcacctgaccccatttttccaaggattctattttccagtgaatttttgtcaccgagttaatttcccaagtctgatagcatgaatgcttatttgtgctgtgaaaagcagagcagcctgactcagctttccattttcataggataatatgtgccaaaaaaggtttattttcttggtaaaatcagaattgtagaattgtgctatttttaatttttaaaatttttggttagagcttatagacattacttttatgattattttgcgtgctaaataagttaaagggtatgttttgaactatagcactaattaatgtgtgtgatcctagtatgttgatagctttgattttgtgagtggtttactagtcatttattatgattcccatgaactctgatatgattcattgtggttttaactcaggttgaataaaagcatccatttcttttataggaaggtttgtttaattctcatgttctgtgatcatctctttgagaataaaattcagtccctaatagttgaaaagaatcaacttagtaaattatgtcttgcacattccaaataggaaggtatttactttatcaagatgtgtttcatttgtgttctgagtaccagtgaggggataccgtggtacagtgttttgaattgtgtactaatatcattaaagcatgggattttagtggctttttaaaaaatgtga

SEQ ID NO: 6610 - DNA, 104 bp, Homo sapiens
tttttggatttttagtagagacagggtttcaccatgttggccaggatggtctcgatctcttgacttcgtgatccacccgcctcagcctcccaaagtgctaggat

SEQ ID NO: 6611 - DNA, 398 bp, Homo sapiens
gacgcagcaccatgcagctcagtcccaacctgtcgcaggacccggcgcgcctgcctagaggacccgaggcaggagttgggggcggggaggtgaagctgcgccatccaggggctgccgagtggagggtcggaagtctccctctagggtctggatcaacaaagcacccgacttaatgcgctgggagagtgattcatgaaaagaaatttaaagctagccctgtgtgcattatcagcccaaccctgcttttctttagtcctagttctttactaaaatctcctgcagggctgagatttactatagtccagtggttcctgtttagtccacagaaaggtggggccgggtggaagaatgcagggcccgcgagcagaagccttctctcccatttaagggtgtgtgca

SEQ ID NO: 6612 - DNA, 313 bp, Homo sapiens
tcatgaagcagaggttcctggagcactttccccttcctgtgcttctggttttgaaagccattcaccacctgcctgaattcttcactggtcttcaaggaaaaggaaataaaatgttgaaaagcaagagattactttaataaagaaccgaggagaggaagcacagagctcggcagtccacagcacactcaccatttctccaaaggcgttcatggccattgtgaagctgtgtttcccttccctgtattcctgattgtgctgctcaatcatcttcatgttctgccacactgctctcctccatccttcttcattctag

SEQ ID NO: 6613 - DNA, 327 bp, Homo sapiens
atagaataccaacttaaacttcttaattagaatcaggaatcaggactctttggctgctgattggaggaagaactgtccttaaatccagagtgggccgggcatggtggctcatgcctgtaatcctagcactttgggaggccaaggcaggtggatcacctgaggtcaggagttcaagaccagcatgaccaacatggtgaaaccccatctctaccgaaaatacaaaaattagccgggcgtggtggtgtgtgcctgtagtcccagatacttgggaggctgagacaggagaattgcttgaacctgggaggtggaggttgtgtgagtcaagat

SEQ ID NO: 6614 - DNA, 327 bp, Homo sapiens
atagaataccaagttaaacttcttaattagaatcaggaatcaggactccttggctgctgattgaaggaagaagtgtccttaaatccagagtgggccgggcatggtggctcatgcctgtaatcctagcactttgggaggccaaggcaggtggatcccctgaggtcaggagttcaagagcagcatgaccaacatggtgaaaccccatctctactgaaaatacaaaaattagccgggcgtggtggtgtgtgcctatagtcccagatacttgggaggctgagataggagaattgcttgaacctgggaggtggaggttgtgtgagccaagat

SEQ ID NO: 6615 - DNA, 369 bp, Homo sapiens
agaataccaagttaaacttcttaattagaatcaggaatcaggactctttggctgctgattgaaggaagaactgtccttaaatccagagtgggccgggcatggtggctcatgcctgtaatcctagcactttgggaggccaaggcaggtggatcacctgaggtcaggagttcaagaccagcatgaccaacatggtgaaaccccatctctactgaaaatacaaaaattagccgggcgtggtggtgtgtgcctgtagtcccagttacttgggaggctgagacaggagaattgcttgaacctgggaggtggaggttgtgtgagccaagatcgtgccactgcactctagcctgggtgacagggtgagactccatc

SEQ ID NO: 6616 - DNA, 2248 bp, Homo sapiens
agaataccaacttaaacttcttaattagaatcaggaatcaggactctttggctgctgattggaggaagaactgtccttaaatccagagtgggccgggcatggtggctcatgcctgtaatcctagcactttgggaggccaaggcaggtggatcacctgaggtcaggagttcaagaccagcatgaccaacatggtgaaaccccatctctaccgaaaatacaaaaattagccgggcgtggtggtgtgtgcctgtagtcccagatacttgggaggctgagacaggagaattgcttgaacctgggaggtggaggttgtgtgagtcaagatcgcaccactgcactctagcctgggtgacagggcgagactccatctcaaaaaaaaaaaaatccagagtggttggtagtcaagacaaaaagctagattatttttgttagtctgagaactaagcaccttagtggcccaaagacaaggcctgaaatttccatgaaaagaaactgggatctgttcatctgttctgttgagacctcatagttccataccatagaaataggcacagtgggttttggggggagagttgtaagtataagctctctgtacctctgtttactgtttagtgagaatttgggtgtccactgaggcagttcatacttggcggatgattgagtcctgatttctcagggccagcagactctggtgttactgatcttgtggaaaagtcaacccaatgagaagattttatgcagaagttttaaatgcacattgatcataatttgaatatgtcacagtctttatttttcttttcagccaatcctgaggcaaaagaaacattttaattcactgcacattccaaaagccttgcagaaggccctgccatttaagaacaagcccaaggccaggcgcggtggctcacgcctgtaatcccagcactttgggaggctgaggcgggcggatcacgaggtcaggagatcgagaccatcctggctaacatggtgaaaccctgtctctactaaaagtacaaaaaattagccaggtgttgtggtgggcgcctgtagtcccagctacttgggaggccgaggcaggaaaatggcgtgaacctgggaggcagagcttgcagtgaactgagatcgggccactgcactccagcctgtgcgacagtgcgaaactctgtctcaaaaaaaaagaaaaaagaaaaaataaaaaacaaacccaagacccaagcaaaggacaggcggagactggccgtcatgcgtgagcctcatgaaagaaaggtactgtcgcccatgccgtactgcacgctgcatttagataggaaaagaacactctcagtagcacacttcctgtttctactgcagtctcagttattcagggcactggaactaaagtcagaggaagagctggagtcaatttcccttcctttgcctggtcctgctctgccctgttcttttgatggggtataacaggcacatgactggggaacccttctgtcttggttagctgcacacagtgtccacagaatgatgaacagaggtagtaaaggtaaaatgcgatcacacttgtgtctccatgccaacaatgacttcctagcgcaggatgcattttcatgcggttaatattcatttggatcgtgggttgcctctagtcttagtgcttaggatgtgagtgtgtggtggctgagagcattctgatactcaccggcttttgtccttgtcagatcctcacactgctggatgctctgagtatggtgcacagtcagaagatgaagaaggccaaggagcagcggcacctgcacaataaagagcacttcagagccaagcagaaggaggaggaggagaagctgaagtggcagaaggacctcaggaagaagctcttccaaattcaggggcagaaggaaagaagaaaccagaagtccagtttgaagggggctgagggccagtttcagtgagcctttggactggagggactgtccctggatctgcagaggtggacagtttcaaacatcacagtttgaatgcctgtgaatgacaagtcagtgggcaagaactcaagagatgtctctacacaaactgtgcctgcaagaggaacagagaagcctggactacttggaccgggttcattctcatcacttggggctgtcgagatttaaagtgatgtaagctgtggttgtgtggattctcttactttcctctgcctgcctcagtttaattattttgtcctgcaaaaataccattaaatttttttttgttagttttg

SEQ ID NO: 6617 - DNA, 369 bp, Homo sapiens
agaataccaagttaaacttcttaattagaatcaggaatcaggactctttggctgctgattgaaggaagaaccgtccttaaatccagagtgggctgggcatggtggctcatgcctgtaatcctagcactttgggaggccaaggcaggtggatcacctgaggtcaggagttcaagaccagcatgaccaacatggtgaaaccccatctctactgaaaatacaaaaattagccgggcgtggtggtgtgtgcctgtagtcccagatacttgggaggctgagacaggagaattgcttgaacctgggaggtggaggttgtgtgagccaagatcgcgccactgcactctagcctgggtgacagggtgagactccctc

SEQ ID NO: 6618 - DNA, 393 bp, Homo sapiens
aaatagaataccaagttaaacttcttaattagaatcaggaatcaggactctttggctgctgattgaaggaagaactgtccttaaatccagagtgggccgggcatggtggctcatgcctgtaatcctagcactttgggaggccaaggcagatggatcacctgaggtcaggagttcaagagcagcatgaccaacatggtgaaaccccatctctactgaaaatacaaaaattagccgggcgtggtggtgtgtgcctatagtcccagatacttcggaggctgagataagagaattgcttgaacctgggaggtggaggttatgtgagccaagatcacgccactgcactctagcctgggtgacagggcgagactccatctcaaaaaaaaaaaaaaaaaa

SEQ ID NO: 6619 - DNA, 2248 bp, Homo sapiens; identical to SEQ ID NO: 6616

SEQ ID NO: 6620 - DNA, 390 bp, Homo sapiens
aaatagaataccaagttaaacttcttaattagaatcaggaatcaggactccttggctgctgattgaaggaagaactgtccttaaatccagagtgggccgggcatggtggctcatgcctgtaatcctagcactttgggaggccaaggcaggtggatcccctgaggtcaggagttcaagagcagcatgaccaacatggtgaaaccccatctctactgaaaatacaaaaattagccgggcgtggtggtgtgtgcctatagtcccagatacttgggaggctgagataggagaattgcttgaacctgggaggtggaggttgtgtgagccaagatcgcgccactgcactctagcctgggcgacagggcgagactccatctcaaaaaaaaaaaaaaa

SEQ ID NO: 6621 - DNA, 1419 bp, Homo sapiens
atacatgtatttttttaaatgttaatgtgctaatttctactgaagcaatgtggatttttctgaaagctttaatgttttaataagctttttattgaaatgttaatgtccatacagaagagtgcccaaatcataagtgtgcatctagatgaactatagcacaccaggctgccacgccctggaccaagcagtagccttgacctgtggcctctcccaggcactgctgccccaacccacaaaatagctactttcccagttcctgatgtagatttgttctacctggttttgacttctataaaatacagcatattctatttagcctggcttctttggttcagtattacagaatacatctgtgttcttgtctatggcagatactgatttattgtcattgttgagttccattatatgactgtgtcaccatttttccattgatgagtaaagtgatttcctatttttggctgttatcccacggccctgaacactaggtctggatatgggacttgcaggtatgcaggggcacacacacttctgctgggggatccctgggtggggtggagactccagggcacctgtgctctgcttcagtgtggagggttctgtgtcgtgttctgggagcacagtggcttggccctccacccaccagcagcagcttaaagagttcctgctgttccacatgcttgccaacaattggcctcttgagtttttttttttttttttaagttttcagtgcctgcctggacttgtgttttcatttagattttggtttcttagaacttttgtttttctcttcacagcttaacaatgcatttgaaaagatttgttttcatgtggagtattcagttttgtaataagagggttgttcaaggcatcactctgccactctgctagaaacagaagtctcccaggcatttctttttatataaagtagttaatgaaattttgaaccatcttacatgaatttttattaaaatacacttctggatgtggtgcccattatccattctactcttttgtaacaagtagatttctctgaattcttgaatttgaaaacaactggggttcctaaacagagaatatggaatattattagggatgatgtctttaataatatatttcaagacaggagaaactttttctatatagttgactttaataaaaagcttagggcaaaactttcaatatattaacagtatttatgaggcagttaagaatttgggtcatctccatttctgctaaaaatacaaaaaattagccaggtgtggtggcgggcatctgtagtccctgctacttgggaggctgaggcaggagaatggtgtgaacccgggaggcggaggttgcagtgagccgagatcatgccactgcactttagcctgggcgacagagcaagactccatatcaaaaaaaaaaaaaaaaaaaaaa

SEQ ID NO: 6622 - DNA, 1420 bp, Homo sapiens
caccatatacatgtattttttaaacgttaatgtgctaatttctactgaagcaatgtggatttttctgaaagttttaatgttttaataagctttttattgaaatgttaatgtacatacagaagagtgcccgaatcataagtgtgcatctagatgaactgtagcacaccaggctgccacgccctggaccaagcagtagccttgacctgtggcctctcccaggcactgctgccccaacctacaaaatagctactttcccagttcctgatgtagatttgttctgcctggttttgacttctataaaatacagcacattctatttagcctggcttctttggttcagtattacagaacacatccatgttcttgtctatggcagacattgatttatcgtcattgttgagttccattatatgactgtgtcaccatttttccattgatgagtaaaatgatttcctatttttggctgttatcccacggccctgaacactaggtctggatatgggacttgcaggtatgcaggggcacacacacttctgctggaggatccctgggtggggtggagactccagggcacctgtgctctgcttcagtgtggaggcttctgtgttgtgttcggggagcacagtggcttggcctccgccaccagcagcagcttaaagagttcctgctgttccacatgcttgccaacaattggcctcttcagttcttttttttttttaggttttcagtgcctgcctggacttgtgttttcatttagattttggtttcttagaattttcgttattctcttcacagcttaacaatgcatttgaaaagatttgttttcatgtggagtattcagttttgtaataagagggttgttcaaggcatcagtctgccactctgctagaaacagaattctcccaggcattttttttatataaagtagttaatgaaattttgaaccatcttacatgaatttttattaaaatacacttcaggatgtggtgcccattatccattctactcttttgtaacaagtagatttctctgaattcttgaatttgaaaacaattggggttcctaaacagagaatatggaatattattggggatgatgtctttaataatacatttcaagataggagaaactttttctatatagttgactttaataaaagcctagggcaaaactttcaatatattaacagtatttatgaggcagttaagaatttgggtcatctccgtctccactaaaaatacaaaaaattagccaggtgttgcggcgggcgcctgtagtccctgctacttgggaggctgaggcaggagaatggtgtgaacccaggaggcggaggttgcagtgagccgagatcatgccactgcactttagcctgggcaacagagtgagactccgtatcaaaaaaaaaaaaaaaaaaaagaat

SEQ ID NO: 6623 - DNA, 1529 bp, Homo sapiens
ctgtctttgtcaggggatgagtgcaaggggctattgatcagccccttgctggcgtcactccctcttaaacttttcactgggtactcttttgaactattttttcccccaccgtatacatgtatttttttaaatgttaatgtgctaatttctactgaagcaatgtggatttttctgaaagctttaatgttttaataagctttttattgaaatgttaatgtccatacagaagagtgcccaaatcataagtgtgcatctagatgaactatagcacaccaggctgccacgccctggaccaagcagtagccttgacctgtggcctctcccaggcactgctgccccaacccacaaaatagctactttcccagttcctgatgtagatttgttctacctggttttgacttctataaaatacagcatattctatttagcctggcttctttggttcagtattacagaatacatctgtgttcttgtctatggcagatactgatttattgtcattgttgagttccattatatgactgtgtcaccatttttccattgatgagtaaagtgatttcctatttttggctgttatcccacggccctgaacactaggtctggatatgggacttgcaggtatgcaggggcacacacacttctgctgggggatccctgggtggggtggagactccagggcacctgtgctctgcttcagtgtggagggttctgtgtcgtgttctgggagcacagtggcttggcctccaccaccagcagcagcttaaagagttcctgctgttccacatgcttgccaacaattggcctcttgagtttttttttttttttttaagttttcagtgcctgcctggacttgtgttttcatttagattttggtttcttagaacttttgtttttctcttcacagcttaacaatgcatttgaaaagatttgttttcatgtggagtattcagttttgtaataagagggttgttcaaggcatcactctgccactctgctagaaacagaagtctcccaggcatttctttttatataaagtagttaatgaaattttgaaccatcttacatgaatttttattaaaatacacttctggatgtggtgcccattatccattctactcttttgtaacaagtagatttctctgaattcttgaatttgaaaacaactggggttcctaaacagagaatatggaatattattagggatgatgtctttaataatatatttcaagacaggagaaactttttctatatagttgactttaataaaaagcttagggcaaaactttcaatatattaacagtatttatgaggcagttaagaatttgggtcatctccatttctgctaaaaatacaaaaaattagccaggtgtggtggcgggcatctgtagtccctgctacttgggaggctgaggcaggagaatggtgtgaacccgggaggcggaggttgcagtgagccgagatcatgccactgcactttagcctgggcgacagagcaagactccatatcaaaaaaaaaaaaaaaaaaaaaa

SEQ ID NO: 6624 - DNA, 4859 bp, Homo sapiens
  SITE (1100): n equals a,t,g, or c
  SITE (1790): n equals a,t,g, or c
  SITE (1824): n equals a,t,g, or c
  SITE (1827): n equals a,t,g, or c
  SITE (2467): n equals a,t,g, or c
  SITE (2476): n equals a,t,g, or c
  SITE (2477): n equals a,t,g, or c
  SITE (2479): n equals a,t,g, or c
  SITE (2480): n equals a,t,g, or c
  SITE (3044): n equals a,t,g, or c
  SITE (3045): n equals a,t,g, or c
  SITE (3087): n equals a,t,g, or c
  SITE (3101): n equals a,t,g, or c
  SITE (3393): n equals a,t,g, or c
  SITE (3600): n equals a,t,g, or c
aaagaacagaaaaaaggccgggcgcggtggctcacacctgtaatcccagcactttgggaggccgaggtgggcggatcacgaggtcaggagatcgagaccatcctggctaacacggtgaaaccccgtctctactaaaaatacaaaaaattagccgggcgtggtagcgggcgcctgtagtcccagctactcgggaggctgaggcaggagaatggcgtgaacccgggaggcggagcttgcagtgagccgagatcgcgccactgcactccagcctgggcgacagagcaagactccgtctcaaaaaaaaaaaaaaaaaaaaaaaaaaaagaacagaaaaaaaaatttcatgcaaacaaacaggaacttttaaaaaagcaggagttgctataataatatcagatagagttcatggcaaaaagaatttctagaacaaaagaggaatattacgtaataacaaaagagcaagagtatatcttgatcctaaatatatgtgcaccaaacaacacagcttcaaaacacatgaagcaaaacctgatagagcttaaaaaagaaatagaaaaatccataatttatcctagaatatcagcataggaaaaaattggttttaaaaaaggaagcaggctgaacatggtggctcccgcctgtaatcccagcactttgggaagccagggtaggcagatcccttaaggtcaggagtacgagccagcctggccaacatggtgaaaccctgtctctactaaaaatacaaaaattagccgggcgtggtggtgcatgcctgtagtcccagctatttgggaggctgaggcacgagaatcacttgaacccaggaggcagaggttgcagtgagccgagatcatgcaactgcactccagtctgggcaacagagtgagactccatctcaaaaaaaaaaaaaaaaaaaaaggaagcaactaatggtggaagtaaagccaccctgacatgataacaaaagcgtcattttggggaaatgacctcatatcagcagtttccccactcatccagaggtgagtatggtgtactctccatgtagtgacaataaatatatttattaaataaataaatcctgtgtccatgatttctccacnactccatgttagatcctgttatcatccattaggtattaaagtgctctcagccaaggagggtaccgagctcgattcgtatcatgtaacgaagctgggtaaggagttagaggtttgtttagcaagcctttaccggctaggtcggttttcagctctaaccgaacagagcaagccgtctttgtaagactagtcatccaggccacttagccgtctcatcatttatgtttgacagtccgcctatgttgtcgatcaggcaggatatctatcccagtcgagcaagttagtgagcatagccagtcgagtaacggctttttgtgtagcatgccaattctgtctaagcagtgaggcatcacattcattcaacggtgggtagagtgtctttaaagctaagcgtgcgatactgataggccagatatgttagccaggccagtcaattttttctgtcagcctttcaacgctagtgtgtttatccagcatgacatctaaagccagcgtagccacttagtttactagtgagcaaggacattgatgtcagtcaatccacccagtcgggcaagccaggttattcacccagccagccattccagctaggcgacccagccagccaagccacgcagccagccaagccagccagccagccagccaagccagccaagccaatcaagcaagccaagggggatcctctagagtggncttccggactgcaactcgtagaaggtatcagttnttntaccttccccggccagcgggtattgctccggtaaataaagcgacatttaaaaaattgctggtaaatcgcagtggcaatggtttggtgataaaaaatgattcagctaattgggtgacgatttcggatgtcaaagctaataatgtcaaagtcaattatgaaactattatgattgcccccttagaaagtcagagtgttaatgtcaaaagtaataatgcaaataactggcatctgaccattatcgatgaccatggcaactatattagtgacaaaatttaattgcaggagctgcctatgttgagaatgaccccacttgcatcagcaatcgtagcgttattgctcggcattgaagcttatgcagctgaagaaacctttgatacccattttatgataggtggaatgaaagaccagcaggttgcaaatattcgtcttgatgataatcaacccttaccggggcagtatgacatcgatatttatgtcaataagcaatggcgcgggaaatatgagattattgttaaagacaacccgcaagaaacatgtttatcaagagaagttatcaagcggttaggcattaatagcgataacttcgccagcgggggatcctctagagtggacttgcagacagcagactctatcaagggcnattcaaatnntnntaactgcttggtaagtaaccatgatcgaactgatcaagaatctgtaacttggtcaaaggtaaccacaaaattgtgcaaaactacaggatacataaatatttttggggtttcattattacagatgacgttgaggagagaaaagttttacatttttacaatcttaggtttaccaatgggccctgggaggtctaatagcagaattctgcccaatagtggaggcaactcactgacccaaccagtgagagcacaggtagtttccactgtgagaaactcaactacagaaccagagtagaattagaaagaaacaaaagtggaggtaacagctgaactagtgagaagcggaagcacagagaggtgaaggagagaagtggaattgtgagtacggcaccgtcaggagtcaggggccaaaggtccctcttctcaagggggcattaccattactgactcaaaggggagcccttactgacatcccagggctctgggaggctggactacaacctgcctagtgtcatacctgtgctggtaccgagctcgattctatcatgtctgcgtttttaattgatnnacttatttattttatgtggagttctgagagttctttattttngacacaagttcttngtcagatatgtgatttgcaaatattttctctcattctgtaactaatctttccatcatcccaattgcgttttttgcagagcaaaaaaaaatttaattttgatgaggtccaatttatcaattttttcttttataaattgtattttgatgtcaagtctaagggttctgcttagtccctgatcctgaagatttttttttttttttcctgaaaatattacagtttgacatttaagcccatgatccttgtgttatgttttgtataaaatgtgaaggtcaggccaagcctcatctcctngcctagggaggtctgattgttcctgcagcacttgttgaaagggctatcagtcctctactaaactgctgtggcatctttctcaaaaattaattaagcatatttctggggtgggatctctatcttgcaccagtaattaatgtgtctctccctccaccagcaccatactgagttgattactgtagttgtagagtaagctttaataattgnggtaccgagctcgattctaatcatgtctaggtttgaggctgcagtgagccgagatcatgctactgcacaccagtctgagcatcagagtaagactctgtctcaaaaacataacagagcaaaacaaaaaacaacttaaatagcaaaataagattaaccaagataaatcagatgttagaactttaaagcagccatcataaaagtgcttcagaaaacaatggtgaattttcttgaaacaagaacaaaatgaaaatcatacaactgaaaaatacaataactaaatgaaaaaatgtgcagttgggtacaatagcagagtggagacgacagagaacagagtctcttgattcaaggacaattaatagagctggcccataggaacgatggagagataggagactgagaaatgaacgcctcctcggggatgggtgggacagtgaccaaaggcccagcgttcctgtcaccagagtcccaggaggagaggaaggaatgtgtggtgaaaaagtattcaaaggcacagtggttgaagatgtcccaaatttggtaccgagctcgattcgaatcatgtatattctattcttcctagtcaatctagtgcagtcaattcttcctagcatgcctatccatccatgtcttccttccattcatcctatccatccaatccactcatcctcttaagtcatccagccatccatccaagccacccatccaatccttccatgccagcccagccacccaagccacccagccacactccatctgaaaaaaagaagcactccatccagcctgggcagtagagcgagagtccatctccaagaaaaaaaaaaaacaaaactaaacaccagcctggccaatatagtggaaccccgtctctaataaatataccaaaaaatcagctgggcgtggtggcacacgcctgtaatcccagctacttgggaggcccaggcaggaagatctcttgaacccgggaggtggaggtcgcagcgaaccaagattgcaccactgcactccagcctgggcaacagggcgagacttcctctcagaaaaaaaaaaaaaaaaaaaaagaccagcctggcctacatggtgaaacctcgtctctactaaatatacaaagaaattagctgggcgtggtggcacacacctgtaatcccagctactcaggaggcccaggcaggaggatcgcttgaacccgggaagtggaggctgcagcaagccaagattgcacaactgtactccagcctcggcaacagagtgagactccatct

SEQ ID NO: 6625 - DNA, 612 bp, Homo sapiens
gggaactaaaaaaaatagttgtaactttgaagcctttttatggatcaacatgaagattgagggatctcaaacagaaagggcatcctggtggcaaaggttaatcattaccagactgcaagagtagtttcaatggcaagaaagcagcaacagaatcaatgaaaacaaagcaatgattagaatgccctttccccttctcctcctgacttgtagacactgattgtcttccttggacttagggaaccccttaggttcttgaaaaattcaatgatcaggctatagtagatggtccccagtacacagcacaagattttttgataaactggacattttgaaacccaaataactaattagaaaaatcaaacatgtgaaactactttatcccatgcataggggttatactggaaataaaatgtacaacattggaatcctgaaggagaaaagtcctaaaagtttcaatatcaagaatcctgcacctgctgctacttatctagccttttgcttgatttctggctgatgaacttgcacaactcttgaaaacttaaaaacttgaaaatttgtcacttgaaaactacttgaaccaaactatgaaatctcacctgatatataagatgc

SEQ ID NO: 6626 - DNA, 1518 bp, Homo sapiens
tgtctttgtcaggggatgagtgcaaggggctattgatcagccccttgctggcgtcactccctcttaaacttttcactgggtactcttttgaactattttttcccccaccgtatacatgtattttttaaacgttaatgtgctaatttctactgaagcaatgtggatttttctgaaagttttaatgttttaataagctttttattgaaatgttaatgtacatacagaagagtgcccgaatcataagtgtgcatctagatggactgtagcacaccaggctgccacgccctggaccaagcagtagccttgacctgtggcctctcccaggcactgctgccccaacacacaaaatagctactttcccagttcctgatgtagatttgttctgcctggttttgatttctataaaatacagcacattctatttagcctggcttatttggttcagtattacagaacacatccatgttcttgtctgtggtagacattgatttatcgtcattgttgagttccattatatgactgtgtcaccatttttccattgatgagtaaaatgatttcctatttttggctgttatcccacggccctgaacactaggtctggatatgggacttgcaggtatgcaggggcaaacgtgcttctgctggaggatccctgggtggggtggagactccagggcacctgtgctctgcttcagtgtggaggcttctgtgtcgtgttctgggagcacagtgtcttggcctccaccaccagcagcagcttaaagagttcctgctgttccacatgcttgccaacaattggcctcttcagtttttgtttttgtttttttttaggttttcagtgcctgcctggacttctgttttcatttagattttggtttcttagaactttcgttattctcttcacagcttaacaatgcatttgaatagatttgttttcatgtggagtattcagttttgtaataagagggttgttcaaggcatcagtctgccactctgctggaaatagaagtctcccaggcatttctttttaaagtagttagtgaaattttgaaccatcttacatgaatttttattaaaatacacttcaggatgtggtgcccattatccattctactcttttgtaacaagtagatttctctgcattcttgaatttgaaaacaactggggttcctaaacagagaatatggaatattattggggatgatgtctttaataatacatttcaagataggagaaaccttttctatatagttgactttaataaaagcctagggcaaaactttcaatatattaacagtatttatgaggcagttaagaatttgggtcatctccgtctccactaaaaatacaaaaagttagccaggtgtggtggtgggcgcctgggctacttgggaggctgaggcaggagaatggtgtgaacccgggaggcggaggttgcagtgagccgagatcatgccactgcactttagcctgggcgacagagcgagaccctgtatcaaaaaaaaaaaaaaaaaagaa

SEQ ID NO: 6627 - DNA, 434 bp, Homo sapiens
ctctgagcaactctgggtgtacattttcctctattcctcaagagctattgtgaatttgatcatccagtatgctgataggcctggggactgacacatagtaagcccataacaattataatttaaaactaatttgttatatagcataattgatatattttaaaatgcaaaactataattcaactaaaatatacaaggcactctaagtcataccatgttttaagtagcttacaaggtgatcagcaagtgtcttatacaaaaagcaaatttgttcaaagagaagccttgcaaataagtatttataattgtatggttttatattttagccagaagagtgaaattgtttagcaatgggggaaataaaagaatgtttaattacagttgcagataattgccttttccaaagacaatgtatgtaggcagaagtcatacctgtt

SEQ ID NO: 6628 - DNA, 1527 bp, Homo sapiens
ctgtctttgtcaggggatgagtgcaaggggctattgatcagcccttagctggcatcactccctcttaaacttttcactggatactcttttgaactgtttttttcccccaccatatacatgtattttttaaacgttaatgtgctaatttctactgaagcaatgtggatttttctgaaagctttaatgttttaataagctttttattgaaatgttaatgtacatacagaagagtgcccgaatcataagtgtgcatctagatgaactgtagcacaccaggctgccacgccctggaccaagcagtagccttgacctgtggcctctcccaggcactgctgccccaacccacaaaatagctactttcccagttcctgatgtagatttgttctgcctggttttgacttctataaaatacagcacattctatttagcctggcttctttggttcagtattacagaacacatccatgttcttgtctatggcagacattgatttatcgtcattgttgagttccattatatgactgtgtcaccatttttccattgatgagtaaaatgatttcctatttttggctgttatcccacggccctgaacagtaggtctgcatatgggacttgcaggtatgcaggggcacacccacttctgctggaggatccctgggtggggtggagactccagggcacctgtgctctgcttcagtgtggaggcttctgtgttgtgttctgggagcacagtggcttggcctccgccaccagcagcagcttgaagagttcctgctgttccacatggttgccaacaattggcctcttcagtttttttttttttttttaggttttcagtgcctgcctggacttgtgttttcatttagattttggtttcttagaactttcgttattctcttcacagcttaacaatgcatttgaaaagatttgttttcatgtggagtattcagttttgtaataggagggttgttcaaggcatcagtctgccactctgctagaaacagaattctcccaggcatttctttttatataaagtagttaatgaaattttgaaccatcttacatgaatttttattaaaatacacttcaggatgtggtgcccattatccattctactcttttgtaacaagtagatttctctgaattcttgaatttgaaaacaattggggttcctaaacagagaatatggaatattattggggatgatgtctttaataatacatctcaagataggagaaactttttctatatagttgactttaataaaagcctagggcaaaactttcaatatattaacagtatttatgaggcagttaagaatttgggtcatctctgtctccactaaaaatacaaaaagttagccaggtgtggtggcgggtgcctgtagtccctgctacttgggaggctgaggcaggagaatggtgtgaacccgggaggtggaggttgcagtgagccgagatcatgccactgcactttagcctgggcaacagagcgagactgcgtatcaaaaaaaaaaaaaaaaaagaa

SEQ ID NO: 6629 - DNA, 1529 bp, Homo sapiens; identical to SEQ ID NO: 6623

SEQ ID NO: 6630 - DNA, 434 bp, Homo sapiens; identical to SEQ ID NO: 6627

SEQ ID NO: 6631 - DNA, 1524 bp, Homo sapiens
ctgtctttgtcaggggatgagtgcaaggggttattgatcagccccttgctggcatcactccctcttaaacttttcactggatactcttttgaactattttttcccccaccatatacatgtattttttaaacgttaatgtgctaatttctactgaagcaatgtggatttttctgaaagttttaatgttttaataagctttttattgaaatgttaatgtacatacagaagagtgcccgaatcataagtgtgcatctagatgaactgtagcacaccaggctgccacgccctggaccaagcagtagccttgacctgtggcctctcccaggcactgctgccccaacctacaaaatagctactttcccagttcctgatgtagatttgttctgcctggttttgacttctataaaatacagcacattctatttagcctggcttctttggttcagtattacagaacacatccatgttcttgtctatggcagacattgatttatcgtcattgttgagttccattatatgactgtgtcaccatttttccattgatgagtaaaatgatttcctatttttggctgttatcccacggccctgaacactaggtctggatatgggacttgcaggtatgcaggggcacacacacttctgctggaggatccctgggtggggtggagactccagggcacctgtgctctgcttcagtgtggaggcttctgtgttgtgttcggggagcacagtggcttggcctccgccaccagcagcagcttaaagagttcctgctgttccacatgcttgccaacaattggcctcttcagttctttttttttttttaggttttcagtgcctgcctggacttgtgttttcatttagattttggtttcttagaactttcgttattctcttcacagcttaacaatgcatttgaaaagatttgttttcatgtggagtattcagttttgtaataagagggttgttcaaggcatcagtctgccactctgctagaaacagaattctcccaggcattttttttatataaagtagttaatgaaattttgaaccatcttacatgaatttttattaaaatacacttcaggatgtggtgcccattatccattctactcttttgtaacaagtagatttctctgaattcttgaatttgaaaacaattggggttcctaaacagagaatatggaatattattggggatgatgtctttaataatacatttcaagataggagaaactttttctatatagttgactttaataaaagcctagggcaaaactttcaatatattaacagtatttatgaggcagttaagaatttgggtcatctccgtctccactaaaaatacaaaaaattagccaggtgttgcggcgggcgcctgtagtccctgctacttgggaggctgaggcaggagaatggtgtgaacccaggaggcggaggttgcagtgagccgagatcatgccactgcactttagcctgggcaacagagtgagactccgtatcaaaaaaaaaaaaaaaaaagaa

SEQ ID NO: 6632 - DNA, 612 bp, Homo sapiens
gggaactaaaaaaaatagttgtaactttgaagcctttttatggatcaacatgaagattgagggatctcaaatagaaagggcatcctggtggcaaaggataatgattaccagactgcaagagtactttcaatggcaagaaagcaacaacagaatcaatgaaaacaaagcaatgattagaatgccctttccccttctcctcctgacctgtagacgctgattgtcttccttggacttagggaaccctttaagttcttgaaaaattcaatgatcaggctatagtagatagtccccagtacacagcacaagattttttgataaactggacattttgagacccaaataactaattagaaaaatcaaacatgtgaaactactttatcctatgcataggggttatactggaaataaaatgtacaacattggaatccctaaggagaaaagtcctaaaagtttcaatatcaagaatcccgcacctgctgctacttatctagccttttgcttgatttctggctgacgaagttgcacaactcttgaaaactaaaaaccttgaaaatttgtcacttgaaaagtacttgaaccaaactatgaaatctgacctgctatataagatgc

SEQ ID NO: 6633 - DNA, 352 bp, Homo sapiens
caggaaaaagaatctaagctggtcatcaggtgaccaaggttttggtcaggactcgtctacttgcttggtggttgatttcagggaagtaacctacattatctgttactgtttggtcttctcagtggaaagttctctcatcacattaggctcttaatatgacaaaaagaaacttaggaaagcagtttttaaaaagcaaagtttattcttgttttgtttctgtttggctgcttatcatacagcagaacagactactgaaaactggacattcaaagcctgaatttcaagacctcacacttgacacttccatgaaagcaggcaaaagactcaggtgcaggcaaggaaaggggcttcc

SEQ ID NO: 6634 - DNA, 227 bp, Homo sapiens
gagtctctgagcaagttaatctccctatgatgcctcatctaccacatataaagcttggctgaaaatgtaataatctctatggtctttttcagctctaataccacatgtgactctagactgtgccactaagtgaatcttgctgtacctaagtgggtggcttagagctaagaggctcttgactggagagcaggcgtgacctgagccactgatctctgccctccacatta

SEQ ID NO: 6635 - DNA, 227 bp, Homo sapiens; identical to SEQ ID NO: 6634

SEQ ID NO: 6636 - DNA, 250 bp, Homo sapiens
tcacctgaggtcaggagttcaagaccagcctgaccaatatggtgaaaccctgtctcccctaaaaatacaaaaattagctgggcgtggtggcatgtgcctgtaatcccagctactcaggaggctgaggcaggagaattgcttggacctgggaggcggaggttgcagtgagccgagatcacgccactgcactccagcctgggtgacagagtgagagtccatctcaaaaaaaaaaaaaaaaaaatacaacccc

SEQ ID NO: 6637 - DNA, 250 bp, Homo sapiens
tcacctgaggtcaggagttcaagaccagcctgaccaatatggtgaaaccctgtctctactaaaaatacaaaaattagctgggcgtggtggcatgtgcctgtaatcccagctactcaggaggctgaggcaggagaattgcttggacctgggaggcggaggttgcagtgagccgagatcacgccactgcactccagcctgggtgacagagtgagactccctctcaaaaaaaaaaaaaaaaaaaaaatacaac

SEQ ID NO: 6638 - DNA, 348 bp, Homo sapiens
ccactacataatatttcaacaagggctccagcttgagtctgactatatgtaaccttaagacacattggcttggatgggtgcaaaggacacaaggatttgcaataggaccaagaaacatctagggtcagactcagtttaaggcagctgctcccaagcctggcagcacattaacatcactgaggccatctaggccccactccagagcaattaaatcagaatttctggaggtgaagtgcagacaccggtattttcttttaaagtatcctaggggaccttaatgtgcagctggggttaagaaccactaagctaaggaaacagaactcaaggtggacatcttgggtccaaagg

SEQ ID NO: 6639 - DNA, 348 bp, Homo sapiens; identical to SEQ ID NO: 6638

SEQ ID NO: 6640 - DNA, 471 bp, Homo sapiens
tttatgggcagaagcacacgatagagtttattacaaccaatagaattaacatcaatattttaagtgaacagaattttatgatatgggtataagcaagccaatgtctccaaattgctagcctttaagagccaaacaaaatacctcaagctttcagcctgtgtgtctgtaagttagccaattctctccccaatgcacctaaggattcttgagaatgcttacaaagcctgattgccactaagcctgattgtcactcttctgagctttagactactactccagagaagttgcttgtcccctcttaccattagggaccaatttcccacagaacaggatcctaatcagttcccacaccctgttcctagcattactttgtctaaacacagaagagctttctctttcatacgcaagtcatactgacagacctacttgccgacctaggtagcaaacatctgaaggtattaagagaatcac

SEQ ID NO: 6641 - DNA, 471 bp, Homo sapiens
tttatgggcagaagcacatgatagagtttattacaaccaatagaattaacatcaatattttaagtgaacagaattttatgatatgggtataagcaagccaatgtctccaaattgctagcctttaagagccaaacaaaatacctcaagctttcagcctgtgtgtctgtaagttagccaattctctccccaatgcacctaaggattcttgagaatgcttacaaagcctgattgccactaagcctgattgtcactcttctgagctttagactactactccagagaagttgcttgtcccctcttaccattagggaccaatttcccacagaacaggatcctaatcagttcccacaccctgttcctagcattactttgtctaaacacagaagagctttctctttcatacgcaagtcatactgacagacctacttgccgacctaggtagcaaacatctgaaggtattaagagaatcac

SEQ ID NO: 6642 - DNA, 318 bp, Homo sapiens
tcaggacatccatcgggtggaaactgctgcactcccccacccgttcaggccactggagtgtcaccaaaccaccagggctgcccctgctggagtagctcacctgggtaactctgaggacaagcccccttggagactcttctcaggagggaggtggcattttccaagaaagggttcaacacagacctctgagtcagaggaccagttaaagagaaaattattctgactttattcaggaatgttgctgtaggggtcgtgattattgccatgcggggagttgcccttgaggcagctgggagtggctcacgcctgtaatcccag

SEQ ID NO: 6643 - DNA, 318 bp, Homo sapiens; identical to SEQ ID NO: 6642

SEQ ID NO: 6644 - DNA, 155 bp, Homo sapiens
gtctctactaaaagtacaaaaattagccaggcatggtggcgcgtgcctgtaatcccagctactcgggaggctgaggcaggagaatcgtttaagcctgggaggtggaggttgcagtgagctgagatcgcaccactgcactccatcctgggcgacag

SEQ ID NO: 6645 - DNA, 155 bp, Homo sapiens; identical to SEQ ID NO: 6644

SEQ ID NO: 6646 - DNA, 1224 bp, Homo sapiens
tctgacactacttttcatccccagaagtacgatttgaggcttttttccccgtctttacttaacatattgtctttcctttcctccagcatcttgaacatatggaacatggtcacagcataagcatgtgtgtgctgtcctctacttgccctgtcacctccagcatcttgaacatatggaacatggtcacagcataagcatgtgtgtgctgtcctctacttgccctgtcacctccagcatcttgaacatatggaacatggtcacagcataagcatgtgtgtgctgtcctctacttgccctgtcacctccagcatcttgaacatatggaacatggtcacagcataagcatgtgtgtgctctcctctacttgccctgtcacctttgtcatttccaggtcagttactacaacctccacctcccggattcaagtgattctcctgcctcagccttctgagtaactggggctacaggttgcctgccaccacgcctggctagtttttttatttttagtagagatggggtttcaccatgttgtccaggctggttgtgaacttctggtctgaagtgattcgccctcctcggcctcccagagtgctgggattacaggcgtgagccactgtgcccggccccaggtcaattttgattgatttttcccatctctccatatgggtcataatgtcctgcctcttttcatgcctgtttttttgttttttgtttttcccggatattcaatattttgtattctaccttgtttggtgctggatatttttgtaaacctatacatatctttgcatttgtttctcgaatgtgatcaagttacttggaaactgtgtggtccttttttttcaggcagggtctcactgtgtcgcacgggctggagtgtagtggtgtgatcttggctctctgcagtctcggccccctgggctcaagtgattctcccacctcagcctccccaatagctggggccacaggcacgcatcaccacattggcgactttttggatttttgtagagatggggtttcaccgtgttgctcaggctagtctcgacctcctgggctcaactggtctgcctgccttggcttcccaaagttctgggattacaggtgtgagcccccacatctggctctgggtcttcttattcagtggtgtttggtgggacctgaactgtatttagtctcgtgttgatgcttccctactacggggtgagaacttcttcctgctctaac

SEQ ID NO: 6647 - DNA, 302 bp, Homo sapiens
atctttagtatattgagcctttgaatccatgaacatggtggtacatcttttaggtctatgatttctttcatcagcattttatagttttcaccatataaaatctgtgtgtattttgttaagtgtacacttatttaagtatttcactttctttggagtgattgtaaaatatattgtttgtttaatttcagttttcacatatttattgcaactgaccagaaaatgaaatgggattgtcttttgtgtgttgacattatttccccaagaccttgctcaacttatttggtatttgcttttgagtgtgt

SEQ ID NO: 6648 - DNA, 448 bp, Homo sapiens
ggaaaatcaggttgaccacaacttctgtagttcttgagggaagaagggaagtataatgatgttggaagtcaaaatattgacattaagatagccaagtggagttttattatgtatgtatgcatgtagacatgattgaaatgtatattacaagctcatatgacatacctttataatagagaggtacctgtggattctaccttacttttgttagtgttttcactgtttcatgtgagttttacaatgaacctgtgagatttgcagagttaagagttataataacccgtctatggtagaaaacacaggttcattcagaggagtaaagtggcttgcttgagatctgtgtcagtggtagtcttctgactagtgtttcacagagttgttttgacctaagaaagttagagcctgggccagacgcggtggctcacgcctgtaatcccagcactttggg

SEQ ID NO: 6649 - DNA, 326 bp, Homo sapiens
cgattagtcagtggatagtttttaatttgacttaaaaaattgggggtcacataaagggaaccagcaaaagatttggattctgatgaacaaggtttaaggctcagctctgccactgacatgctgtgttacatgggcaagtccccactcaccatctttggtcctttatgtactcttctggttctcattgtttcttccctgaaaaaatcagggtgctgaatggtcaggtgagctccctattctctgttggtgagtggccctcattcctggtcagttagccatgggctattgagggaagatgttttatgaagtgtattgatggtaaattt

SEQ ID NO: 6650 - DNA, 640 bp, Homo sapiens
aaattgtaagcgttaatattttgttaaaattcgcgttaaatttttgttaaatcagctcattttttaaccaataggccgaaatcggcaaaatcccttataaatcaaaagaatagaccgagatagggttgagtgttgttccagtttggaacaagagtccactattaaagaacgtggactccaacgtcaaagggcgaaaaaccgtctatcagggcgatggcccactacgtgaaccatcaccctaatcaagttttttggggtcgaggtgccgtaaagcactaaatcggaaccctaaagggagcccccgatttagagcttgacggggaaagccggcgaacgtggcgagaaaggaagggaagaaagcgaaaggagcgggcgctagggcgctggcaagtgtagcggtcacgctgcgcgtaaccaccacacccgccgcgcttaatgcgccgctacagggcgcgtccattcgccattcaggctgcgcaactgttgggaagggcgatcggtgcgggcctcttcgctattacgccagctggcgaaagggggatgtgctgcaaggcgattaagttgggtaacgccagggttttcccagtcacgacgttgtaaaacgacggccagtgaattgtaatacgactcactatagggc

SEQ ID NO: 6651 - DNA, 640 bp, Homo sapiens
aaattgtaagcgttaatattttgttaaaattcgcgttaaatttttgttaaatcagctcattttttaaccaataggccgaaatcggcaaaatccsttataaatcaaaagaatagaccgagatagggttgagtgttgttccagtttggaacaagagtccactattaaagaacgtggactccaacgtcaaagggcgaaaaaccgtctatcagggcgatggcccactacgtgaaccatcaccctaatcaagttttttggggtcgaggtgccgtaaagcactaaatcggaaccctaaagggagcccccgatttagagcttgacggggaaagccggcgaacgtggcgagaaagsaagggaagaaagcgaaaggagcgggcgctagggcgctggcaagtgtagcggtcacgctgcgcgtaaccaccacacccgccgcgcttaatgcgccgytacagggcgcgtccattcgccattcaggctgcgcaactgttgggaagggcgatcggtgcgggcctcttcgctattacgccagctggcgaaagggggatgtgctgcaaggcgattaagttgggtaacgccagggttttcccagtcacgacgttgtaaaacgacggccagtgaattgtaatacgactcactatagggc

SEQ ID NO: 6652 - DNA, 654 bp, Homo sapiens
aataccgcatcaggaaattgtaagcgttaatattttgttaaaattcgcgttaaatttttgttaaatcagctcattttttaaccaataggccgaaatcggcaaaatcccttataaatcaaaagaatagaccgagatagggttgagtgttgttccagtttggaacaagagtccactattaaagaacgtggactccaacgtcaaagggcgaaaaaccgtctatcagggcgatggcccactacgtgaaccatcaccctaatcaagttttttggggtcgaggtgccgtaaagcactaaatcggaaccctaaagggagcccccgatttagagcttgacggggaaagccggcgaacgtggcgagaaaggaagggaagaaagcgaaaggagcgggcgctagggcgctggcaagtgtagcggtcacgctgcgcgtaaccaccacacccgccgcgcttaatgcgccgctacagggcgcgtccattcgccattcaggctgcgcaactgttgggaagggcgatcggtgcgggcctcttcgctattacgccagctggcgaaagggggatgtgctgcaaggcgattaagttgggtaacgccagggttttcccagtcacgacgttgtaaaacgacggccagtgaattgtaatacgactcactatagggc

SEQ ID NO: 6653 - DNA, 640 bp, Homo sapiens; identical to SEQ ID NO: 6650

SEQ ID NO: 6654 - DNA, 648 bp, Homo sapiens
gcatcaggmaattgtaagcgttaatattttgttaaaattcgcgttaaatttttgttaaatcagctcattttttaaccaataggccgaaatcggcaaaatcccttataaatcaaaagaatagaccgagatagggttgagtgttgttccagtttggaacaagagtccactattaaagaacgtggactccaacgtcaaagggcgaaaaaccgtctatcagggcgatggcccactacgtgaaccatcaccctaatcaagttttttggggtcgaggtgccgtaaagcactaaatcggaaccctaaagggagcccccgatttagagcttgacggggaaagccggcgaacgtggcgagaaaggaagggaagaaagcgaaaggagcgggcgctagggcgctggcaagtgtagcggtcacgctgcgcgtaaccaccacacccgccgcgcttaatgcgccgctacagggcgcgtccattcgccattcaggctgcgcaactgttgggaagggcgatcggtgcgggcctcttcgctattacgccagctggcgaaagggggatgtgctgcaaggcgattaagttgggtaacgccagggttttcccagtcacgacgttgtaaaacgacggccagtgaattgtaatacgactcactatagggc

SEQ ID NO: 6655 - DNA, 654 bp, Homo sapiens
aaatacgcatcaggaaattgtaagcgttaatattttgttaaaattcgcgttaaatttttgttaaatcagctcattttttaaccaataggccgaaatcggcaaaatcccttataaatcaaaagaatagaccgagatagggttgagtgttgttccagtttggaacaagagtccactattaaagaacgtggactccaacgtcaaagggcgaaaaaccgtctatcagggcgatggcccactacgtgaaccatcaccctaatcaagttttttggggtcgaggtgccgtaaagcactaaatcggaaccctaaagggagcccccgatttagagcttgacggggaaagccggcgaacgtggcgagaaaggaagggaagaaagcgaaaggagcgggcgctagggcgctggcaagtgtagcggtcacgctgcgcgtaaccaccacacccgccgcgcttaatgcgccgctacagggcgcgtccattcgccattcaggctgcgcaactgttgggaagggcgatcggtgcgggcctcttcgctattacgccagctggcgaaagggggatgtgctgcaaggcgattaagttgggtaacgccagggttttcccagtcacgacgttgtaaaacgacggccagtgaattgtaatacgactcactatagggc

SEQ ID NO: 6656 - DNA, 654 bp, Homo sapiens; identical to SEQ ID NO: 6652

SEQ ID NO: 6657 - DNA, 640 bp, Homo sapiens; identical to SEQ ID NO: 6650

SEQ ID NO: 6658 - DNA, 640 bp, Homo sapiens; identical to SEQ ID NO: 6650

SEQ ID NO: 6659 - DNA, 640 bp, Homo sapiens; identical to SEQ ID NO: 6650

SEQ ID NO: 6660 - DNA, 389 bp, Homo sapiens
tcttacaatcacatctgtgttttctaaaggcctgacactgattggtacatggagtacagcctgaagggaacaagacttgttagaaaggaagctattgactgggtgtggtggctcgtgcctataatcccagcactttgggaggctgaggtgggcagattacttgaggccaggagttcgagatcagcctggccaacacggtgaaaccccgtctctactaaaaatacaaaaattagcaggttgtggtggtgagcacctataatcccagctgcttgggaggctgaggcaggacaattgcttgaacctgggaggctgaggttgcagtgagcccagactgcgccactgcactccagcctgggtgacagagacttcctttccaaaataaaaaaaaa

SEQ ID NO: 6661 - DNA, 389 bp, Homo sapiens
tcttacaatcacatctgtgttttctaaaggcctgacactgattggtacatggagtacagcctgaagggaacaagacttgttagaaaggaagctattgactgggtgtggtggctcgtgcctataatcccagcactttgggaggctgaggtgggcagattacttgaggccaggcgttcgagatcatcctggccaacatggtgaaaccctgtctctactaaaaatacaaaaattagcgggttgtggtggtgagcacctataatcccagctgcttgggaggctgaggcaggagaattgcttgaatctgggaggctgaggttgcagtgagcccaggttgcgccactgcactccagcctgggtgacagagacttcctttccaaaataaaaaaaag

SEQ ID NO: 6662 - DNA, 389 bp, Homo sapiens; identical to SEQ ID NO: 6660

SEQ ID NO: 6663 - DNA, 653 bp, Homo sapiens
ggcaggaggaaacacgatggattgggtgggagtagggaaacagatgagaagaggtatcaggaaagctgcctaggtttctggtctgtgccactgtgtggatgatgagagaatgtgtcagtggtggaggccaaggtctgaaagtggagtggggaagagtgagagagaaaattgtaagtttacctttatgttcagctgaggtcatttcgaaacatacaagcagcagtatgaagaattccattgatatatttgtccggagcccagagtgaggtttaaataagaagaaataaactcgctagtaaaaattgcagacacacaaaaggcttgaacaggcacttcacaaaatagattatccaaatgaccaataaatacataagtactcaacatcattagccattagaaaaatgcaagttaaaaccacaatgagataccatttcacactagaatgaataaaattttaaaagactgacaatgctaaatattcccaggatgcagaacaaccaaaaccctcatatattatgggggacatggaaaattgtacaactcctttggaaaacaggtagtttctacagaatttcaatatatacataccatacaactcagccattgcattcctatttacccaacagaaataaaatcatttgtctactgaaaaa

SEQ ID NO: 6664 - DNA, 1137 bp, Homo sapiens
ggcaggaggaaacgcgatggattgggtgggagtagggaaacagatgagaagaggtatcaggaaagctgcctaggtttctggtctgtgccactgtgtggatgatgaggtcatctactagaggatgtgtcggtggtggaggccaaggtctgaaagtggaggggggaagagtgagagaggaaattgtaagtttacctttatgttcagctgaggtcctttcaaaacatacaagcagcagtatgaagaattccattgatatatttgtccggagcccagagtgaggtttaaataagaagaaataaactcgctagtaaaaattgcagacacaaaaaggcttgaacaggcacttcacaaaatagattatccaaatgaccaataaacacataagtactcaacatcattagccattagaaaaatgcaagttaaaaccgcaatgagataccatttcacactagaatgactaaaattttaaaagactgacaatgctaaatgttcccaggatgcagaacaaccaaaaccctcatatattatgggggacatggaaaattgtacaactgctttggaaaacaggtagtttctacagaatttcaatatatacataccatacaactaagccattgcattcctatttacccaacagaaataaaatcatttgtctactgaaaaatttgcaaaagaatgttcattgcagctgtagccattataaccctcaaacggaaacaacccaatgtgcatggattgtgaatagatgacaaatggtggtccatctatacaatggaatattgctcttcaacagaaacaaactacaggtccatgtagcaacatgatgagtgaaagaagtcagatgtaaaaaagtacatatgtatgttgcaatttatacgacactctagaataggcaaaactcatccttagtgatgaaatcagatctgaggttgcctggggcagagatgggggtagctgactgcaaggaggtgtggggagggttgtgaattttggggagtgatggagctgctctgtatctcaattgtgatgtggttacacaactgcatgcatttgtcaaaactcacagaactacactctaaaacgtataaattttactgcatgtaaatcttaccttaattaaaaattaaaaaaattgaa

SEQ ID NO: 6665 - DNA, 1121 bp, Homo sapiens
ggcaggaggaaacacgatggattgggtgggagtagggaaacagatgagaagaggtatcaggaaagctgcctaggtttctggtctgtgccactgtgtggatgatgagagaatgtgtcagtggtggaggccaaggtctgaaagtggagtggggaagagtgagagagaaaattgtaagtttacctttatgttcagctgaggtcattttgaaacatacaagcagcagtatgaagaattccattgatatatttgtccggagcccagagtgaggtttaaataagaagaaataaactcgctagtaaaaattgcagacacacaaaaggcttgaacaggcacttcacaaaatagattatccaaatgaccaataaatacataagtactcaacatcattagccattagaaaaatgcaagttaaaaccacaatgagataccatttcacactagaatgaataaaatattaaaagactgacaatgctaaatattcccaggatgcagaacaaccaaaaccctcatatattatgggggacatggaaaattgtacaactcctttggaaaacaggtagtttctacagaatttcaatatatacataccatacaactcagccattgcattcctatttacccaacagatataaaatcatttgtctactgaaaaatttgcaaaataatgttcattgcggctgtagccattataaccctcaaacggaaacaacccaatgtgcatggattgtgaatagatgacaaatggtggtccatctatacaatggaatattgctcttcaacagaaacaaactacaggtccatgtaacaacatgatgattgaaagaagtcagatgtaaaaaagtacatatgtatgatgcaatttatacgaaactctaggcaaaactaatccttagtgatgaaatcagatctgaggttgcctggggcagagatgggggtagctgactgcaaggaggtgtggggagggttgtgaattttggggagtgatggagctgctctgtatctcaattgtgatgtggttacacaactgtatgcatttgtcaaaactcacagaactacactctaaaacatataaattttactgcatgtaaatcttaccttaattaaaaattaaaaaaattgaa

SEQ ID NO: 6666 - DNA, 7105 bp, Homo sapiens
gcttagtgtgaagggtcctttcagtcctgcttcttggctccacagactcctccagcttctcggatccaccagcccagccctcattctttcatggtcagcaaccccatagccaggtctgtccagctgggacacaagcggatagtaataaggttgggcaaagtgccccaggagtggggagggggcagagagctggaactggggagactgggagggtcctctcttattggggagtaaagacagagagctgtggttcttctcttttgagactctggactgcttgtaaggtcagaaatggtctatctgccacttggtaccagaccgctgatctagaccattttcatacctgcctcctgtctcttgtttctacttagattttcaattctcctcatcccatctctcctaacttctttaccctctaccccttcttaacttccctggctttcaaatgccttctgtatcctaacacccccatctctgctttccagccttcccctctcaccctgcttttccccatttgaggcttgtagtttgccaggaggggaatgggcagcttgtatttgcccattctcttagttaagaggcacccaatccctgtaccaagcaggggcacatcagcagcagccgggcagacttgtcctcttgcagcctgtgcgccacctgctgcctccagtgcctcctctagcctgctgagagggggtgccaggagggtggaagaaggtggggtaggactagtattctgagctgcactgaaaatacagtcaggggaagtgggtgagacagagcagaattcgagacagacttgctgaagaggagaaagcatgggaggagttgcaggactgagtattaacttgatgacttggaacaagcaaggactgagttacagggactgggtcctttctctggcctgtcttgaaaatgtttcctggcctcccagagtctatttccccttctccaaaacacaagagttgaccagataacttctgagatagatccctttgagttagagaatcacatttctagcttgactgcctgggaagcccagtacagggctaggctccttcagaaggcccccgcatctcaggttagaaaaaagctggggcaagagcggacccctgaatggcttgagcaaccagtatttggtctccctgccaggctagctagagtttgtttgcaggcttcaagagccttagggaattataacatcttcattttgcagagaaggcagctaaagccatgagaaggaaggtcacgtggtgagaagagagctctgaaaatcccggacagggaagagccagcaggacacagcaggagacaaagagagaaaaatactgaaccaggcaaaaatgaaaagaaggcaggagtagggctgagaaaggtgatcagggacaaggggcaagagagatacttggatgaaagtagggaggtacaaattccagtggtggggcagggcagtgtcctcaggtagcactgcatttcagacctgctattgtaccttgcagaccagcttctcctttccctcagatgtcttaaattgttaggacttggccgggcgtggtggctcacgcctgtaatcccagcacttggggaggccaaggtggatcacgaggtcaggagatcgagaccatcctggctaacatggtgaaaccccgtctctactaaaaatacaaaaaattagccaggcatggcagcgggcgcctgtagtcccagctactggggaggctgagacaggagaatggcgtgaatccaggaggcggagcttgcagcgagctgagatcgcaccactgtactctagcctgggcaacagaacgaaactctgtctcaaaaaaaaaaattgtcaggactcattcttttgatgtaaataatttttcactctttaaaattattaaatacaatgaaaacaaccttattaccatctactttggtgagtccctttcaaaaacactcttcccttggactccaccatctggggggcctcttctcccaccagaagagtgtattctaatgccctgatgccatgggtcaggtatagccaggctggagaaaagaagctgccaccatggttgcactttcactgaagatcagcattgggaatgtggtgaagacgatgcagtttgagccgtctaccatggtgtacgacgcctgccgcatcattcgtgagcggatcccagaggccccagctggtcctcgtgagtctgactcccccggtggctggagtgggagtcttcagtcccttcttgttcccaggctctcggccttgagagttgacccctttgtcccctaagactactcacccctcaggtctgtgttccatggttccctcgttctttaggcccaaggtcatgggagaaatagtcaggggcaacatggtacaagctgttcagccacattggggtcttcataagcctaaagtgatccatcctctcttttagccagcgactttgggctctttctgtcagatgatgaccccaaaaagggtatatggctggaggctgggaaagctttggactactacatgctccgaaatggggtaagtatcctttcatcaaggaccaccacatccccttccatcagcttctccctgttccacctcctgttttcagcacccacatctgttgtctcttagccctccccatgctttcttcctattaacagacagtcataattccctgcttttgaacgaaccaccatagtcttcctttcagtgctccactctctcccctcgggctgtgtaaagaggaaataatacccctagctcagagtaggcccctgtctcttcttcctgccctaacaggacactatggagtacaggaagaaacagagacccctgaagatccgtatgctggatggaactgtgaagacgatcatggtggatgactctaagactgtcactgacatgctcatgaccatctgtgcccgcattggtaaggggccctagtacagttgaaagcctgggccagaaagcctcaactctctcaaaaggcatggatgcagtacctgggaagctaacaagccatctccttcctcaggcatcaccaatcatgatgaatattcattggttcgagagctgatggaagagaaaaaggaggaaataacagggaccttaagaaaggacaagacattgctgcgagatgaaaagaagatggagaaactaaagcagaaattgcacacagatgatgagtgtaagcagaactagaaaaaagagggcttttgaaatgggaagggtgggaaggggcttcagcatctgcttctgccaggcactgttttacaccctggggatacatcagtgagaaaacaaagtcctacactcatgggacttacatttaagtgaggggaggtaggaaatgcagaaataaacagagaccagacagcacaggggccatgggggtttggcactgaggggactgtctgtatcccagtgaactggctggaccatggtcggacactgagggagcagggtgtagaggagcacgagacgctgctgctgcggaggaagttcttttactcagaccagaatgtggattcccgggaccctgtacagctgaacctcctgtatgtgcaggtatgcagaggacttggctggggtggggcaggaatagggagggctcggaagcacagtgtgcgtgtccttgcacccacacacaacattcgcctccttgccctgtgctctccaggcacgagatgacatcctgaatggctcccaccctgtctcctttgacaaggcctgtgagtttgctggcttccaatgccagatccagtttgggccccacaatgagcagaagcacaaggctggcttccttgagtgagtgacccacatcctataccctgtcagggcccaggactccctgccattgtgaccccagtgggcctgtctccattccaagcctgccccccactatttcttcttccgaggtaccagggtttgaccaacatagctacccttttagttgccatcatccattgtctcttctctgcctctggaatatgaatgtagttcagtatctctgcccctacccccatctctgaagcaagcatgtcactcttttttgagattatctgaagaattttgctgcagtagccagagggaaaccgggtaaaattttccctatagggaacatgggttaaaagtctcacaagcctcatctgctggtgtttcttggaatgcagagtttggcgtggctttctcagcttcctaagtgcatgttcatccttctagaaagctctttctcctcttggttccctgaaatggtgctctagacccactttccctcagggactgagcctctaacttaattttcctcagtccctttccctacagggagagacacaggtcacattaagaattcatactggccaggctcggtggctcacacctgtaatcccagcactttgggaggccagggcgggcagatcacctgaggtcgggagttcgagaccagcctgaccaacgtggagaaaccatgtatctctactaaaaatacaaaattagccaggcgtggtggcacatgcctgtaatcccagctactcgggaggctgaggcaggagaatcacttgaacctgggaggtggaggttttggtgagctgagatcgtgccattgcactccagcctgggcaacaagagtgaaactccatctcaaaaaaaaaaaagaagagtttacacgaagtcacctctatttcagaagataatctagactctattccctcagagtcttttttctccccaaagataacactgtcctaggtatttcctcatacccccaggcccacagttcatggcccacatgtcccctgatgctgtctaccacatgctgaccctcccttttctggtgtagcctgaaggacttcctgcccaaggagtatgtgaagcagaagggagagcgtaagatcttccaggtgaatgtgggtaggggaaagtatttgggatgaccgcggagctttgctgcttaatcttactgactaaatggccccctgcctcctccccgtctcccctaacttggctttcacccaccgggctgttatcccacctcacctctgccaagaaagcagacagcttgggcttttagtctcagctccatccctgcttttgctgtgcaattcagttcaatattcttgtaatcttttatttacctctgatttgggataacagtacttgccccgtgtaggactgataggatcaaatgaggtagcataatctgaaattactgtgaaagagtatagtctttgtccactataaggtgttacccccactctgaatactcagcccagaaggccttctctttgcccttctacttccaaactctctgttcatatctccagaatgtctgcaagttccttgactgtatcccttgactcatcgcttctgcatagcccttatcagcctccatcccgttaccctctcgttctcatatcttgtactcctcaacctttccagtgtccccataattctctctcgttagagttagcatccaaccttaattccttagctgtgatatgaaactctttgctaaattcttccccattttatgcacaggcacacaagaattgtgggcagatgagtgagattgaggccaaggtccgctacgtgaagctagcccgttctctcaagacttacggtgtctccttcttcctggtgaaggtaggttatgggcccttttcactgccctccttgtttcccactcttgcccttttctgtctctgaaagtctctggccttgccctcagtcacatctcccaccattccctaagattcccattctcttccttgctctgacctcatgaaaacctgcctgtcatcagccctacaccaccacttccctccctaccctgcattttcccttgtccgttagccctcccggccacctcaacatcccctatggctgcaagctgatctgatcattcacctctcatttgacctctgacctgtaacaccaacaccaacctctgcctcataggaaaaaatgaaagggaagaacaagctagtgcccaggcttctgggcatcaccaaggagtgtgtgatgcgagtggatgagaagaccaaggaagtgatccaggagtggaacctcaccaacatcaaacgctgggctgcgtctcccaaaagcttcaccctggtaagtctggggactataacaagaaagtgctttgggagtttcattaaaggggcagctgcagaggtctcttccctctcttggggtaagtatactgagtattactccagaaaaaaaggaggttagagtagatggagaatcttcctctgggagagtgtgaggcttaaatgaaacggatgatggacttattctttaaaatcagcagaacaaaaatctcatcagcaagctgagatcacaggaattcttgtaggtgtggtgaaaggaaaaatgtgataacctccctgtttcagcagcagctatatacagtgaatttttgactttatattatagggttatgaattgaaaactgatatcaacttgataaagtaccctaatgacacaaatacaaattataggaaatgctgttttttcccttttggatactacagccaaccttaaagtgtggccattttatgccaaatattatatcctctcaattttatcatcagagtaaaaataagagacttcctaaatgatatgtatttgaaactgtgtagtgtagaggccactcctcagaagtaaaaaatttccctccaaggagaaaataaagaggaggttcaagaaaggtgggcatcttccaagagggccgttgccacgggaaggcatctcatcagctcaaccttgggcctcccatcctagccatttccatcctggatagatttgagctttccctctgagtcccccacttgtcaccctaggattttggagattaccaagatggctattactcagtacagacaactgaaggggagcagattgcacagctcattgccggctacatcgatatcatcctgaagaaggtgagcactgcctgccctagccttctccttatcgcctcttgccctctccacaagccagtcctttagaaatgggcactcagattgcttgaacctgggaggcggaggttgcaatgagccgagatcttgcctctgcactccagcctgggtgacagagccctttcttgtc

SEQ ID NO: 6667 - DNA, 189 bp, Homo sapiens
aggtcaacagtcctgcagcagcaatacaaccgggtggggaaagtggagcatggctctgtggccctgcctgccatcatgcgctctggagcctctggtcctgagaatttccaggtgggcagcatgccccctgcccagcagcagattaccagcggccagatgcaccgaggacacatgcctcctctggtaagt

SEQ ID NO: 6668 - DNA, 3118 bp, Homo sapiens
gaagggagggcgaggccggagcccgagggcgacccgagaagcggcggggcggcgggccggcgggcggggcgcagagccaggcagcgcaggtaggccagaccgggccgggcgggggccttagggtggggccgcggggcctggccccggggcgggcgggccctgcctctcttgcgtgtccggttcgggtcctattagttggagaggtcagcgtccagcgcatctcggcttgagctcggcgtgaagtaggccgtcttggggaagacaggcctttcctgggagcagtcctatgtctgggataggctttggggagcgtgaggagtcgggtggcagcggggcgcagggcggggacgggctttggtgttagctgatagcgggcatgtgggtaggaaagctttgggtgagttggggattaggtggggtccgtttaggaatcaagggtcgctataggagttaaaagctggggttaaaacttaagagttagtgtgagtcaggtccgttttagataggtaaggtttagattacggtcattatcttgtttgctgggatggccatcatacgtcataatttgagttcagggtcaggttaagggtcaacaaacaacaggaatcaggttagagcttgtttgagggattaaagaatgttggcatggtcggtgttaaggataaacagtgaaagcgtgagttaggaatcaaattataaatgaactttaggcttaggggtcaacatttagggttaacatcaggggatttggtgctaaaggcaaaacttagatcagtttcagggatcagggattggatatgagtctgtgctaggaaagggatgaatgtccaagccggtactgggaatcaggaaacaaattagaggtggggttaatgttaggaatttggggcagctttaggggttgtggtttgaggctagcatagttgaccttgagcagataaaatttaagaggttggcagtaggtaaatgcccttcttttgtagggaaatcctttattcctatgtagttacaggggcttctttttacccagagagataaactaatttcaggctagcgttctggctttagctagaattgcaggcatctgggattccagcttctttattccattctctaagcccaaggcccttgctgtggccaccacagttaggggacagagattctggactgtgttgtttacagacaacataggtgggaaatagggacccaggatgtacaaggcctagtcacaagttggggactgcctagggaagaaggagctgatgactatgggggaagctaaccaaggaatcactgttgccatgggagaagggaataactgaatcccctgaaagtttagccctgcttctcccacttcacttgttctcttggtattaagccctcctctccaactctcatccctgactctgcatttcacacccatcctgcctatccccttacaaaatacttcccttgcctttaactctcccatgctcatcttatcatccgttcccatccttagttctacctccctcaccaacctttaatccgcacatcctacctgaatttaccctcatcaaaacctgagctttcccatcattttaaattactctcctaccattttcacccagtcatgtacctacattccacctggtcatctgctgaataccctactcccatcccctgctgtgtgtcaccccctggatctaagcctcttttaatttcttggaccatttgtagatccccttcccccactccccaacagaaaagaggaaacgagacccaaagaggaaactgggtcttgctgatcccacgcccagccaggccactgaccacacccccacttcactcccagcctgaccctgccactgaccacagcactatcctctactcagcctgacccagccactggctgtaccccatcccccatcccagctccagctttacttagacattgccaatgtcccttcactttcccacccccaccccagtctgatttagtgactgaccacaggcccagctcttctcaacctcctatagcctgacctggcctctgacctcaccccatcattccctgacttagccaccatccatgtaatcattccccttcccccaacctgatgcagtgactggtcatatatgtatcttatgtatatgtatttttccaaacaccatcatcaccagcattctttttctacaccctgtcttctcatcctttttctacaccctgtcttccccattcccagcctgatgcagtcactaacccaaccccatctgcccctagtggctactaatcatatactcataccctttttccccacagcctaaccacatcccgtaaccacagcctcatcctcacattctctgcccaacctgatcctttcccctcttcccaattcgtcgcctaaactcaagctgccccagccgctaaagtggctgctgatgataggaagctgtgggactctaacctgtctaccttagtagttattaggtcctgtcatttctacctccccaaacttgttctgagtgacatcttcctcaatgccattccaactccggcttcattacctttaatttgtactaatacagtgtccttctaactaatctccaaggtaactgccagagttatttttctaaaatccagttccggttatgtctcttctctgctcaaagactcccttggcttccttttgtcctccaataagtaaaattcctcatacccctctccagtcttcctctgcctttccatcctaaccctgacttccccaccactgctcccttgcaggtacccctgtgcttcaacagcctgcctgctcacttccctgaatgctcctccacgatttactgcttctccatctttgcttatgctatttctctgcctggagtgaaaactacccctgacacatctccagctggctggcgtagtggagaaagcttgggctttgcagtcagaaacctgggttcggatcctggcttcacaacttattatttggagaagtatttgaacaagtatttaacatctttgagtctgttttctgatctgtaaaaatggaaataatgacacctactgtaaggattaaatgaaattatgtatacaatgcaagtgacatagtcaataaatggcagatcactattgttt

SEQ ID NO: 6669 - DNA, 559 bp, Homo sapiens
tcacctcctccatctgctctttcttatctacctgtctttcatcctctctgttcctatgttttcttcccattctttctttcccttaccttcatttacttttcttttccctaaaaccctagctcaaatagttcaacagaggttacttgaggagtgaggggagggaatgatgaaaactgcaggtgtattccgtttgttccttcgtcttccttaaatattttcataacggtcgtttcggttcgtgcaaagaaaaaaagaatgaatcaactcttaatgactgcctcctactgctgagctctctggactagtcacttcatttatattttctcattttctttattccttactatatttctctgaagtgtcattcccatttcatagttgaggaagctgggactcaggaggattaataacttgtccagcgttacaaagtgagtttaggagccacaattcagattcagatttattgactccaaaatttttgcaggttttaccatagcatgttgcttcagaaataaacagacctggctgcaaaccccagacccaattactctgtgccttt

SEQ ID NO: 6670 - DNA, 559 bp, Homo sapiens; identical to SEQ ID NO: 6669

SEQ ID NO: 6671 - DNA, 645 bp, Homo sapiens
ggatttaaatgctcaactgtttaaatgaactaaacagcatgatttcatgtatagtcatggagcacacaaacaatattttctggacacacgtgtttcttcttttaactgtaaaagaaaaaatgatttcacaggaattacattatttaaatctatttccttctcatgtgactgaagtttaaagttcttagtgctgcaatcgcatcttctcaggtgtgttctgtttccgtccacctatgcataggtgttggtgttgttcatgtcaagctgcctaatttgtttagtaggtgttcgaatggggcatacaattctctagacatgtggcaagcacacgggagaagccaccatccaggtgattcgcagcagtaaggctgatcagaaatttgatcctggctcaggggggttccggcagtaatcaaactctattcaccttgggtgagatttcgttatacctattcagccctgcttcagtgaaatctcactcaggaaaatagattctgtctccaactggaatctcccaaagccatgactatgtttctgatcagcactacagctcagatgaagcgttcagttacctgccagccagtcagcatttccccagactgcaaccagtgttggaaccaatctgcaggagtgggtggattggta

SEQ ID NO: 6672 - DNA, 421 bp, Homo sapiens
taaattagggataataataataaatacaacatggaacagttacagtgttaaatgattgaggcatgtaatttgccttacgaaatgcctaactcatggggtgcccttaagaaatactactctcccccacctcctttacaaaattgcatgtctaatgcagtgagaaatgccaggcgtggaagatattctaggtttgatcatctgtggtttcttggccaaaacaagaagtttgagttctacattttattttgagttattaaacattgccatgcatccacaagagctgtattgtggcctgtagagaaacatagcatagtaatcaagagtgcaggctttgggcccacagctctgacctgaggcaaattccctacctctctggccctcagtttcctaatttgtaaagtgtgtatatgtgtggaggtgg

SEQ ID NO: 6673 - DNA, 421 bp, Homo sapiens; identical to SEQ ID NO: 6672

SEQ ID NO: 6674 - DNA, 645 bp, Homo sapiens
ggatttaaatgcacaactgtttaaatgaactaaacagcatgatttcatgtatagtcatggagcacacaaacaatattttctggacacacgtgtttcttcttttaactgtaaaagaaaaaatgatttcacaggaattacattatttaaatctatttccttctcatgtgactgaagtttaaagttcttagtgctgcaatcgcatcttctcaggtgtgttctgtttccgtccacctatgcataggtgttggtgttgttcatgtcaagctgcctaatttgtttagtaggtgttcgaatggggcatacaattctctagacatgtagcaagcacacgggagaagccaccatccaggtgattcgcagcagtaaggctgatcagaaatttgatcctggctcaggggggttccggcagtaatcaaactctattcaccttgggtgagatttcgttatacctattcagccctgcttcagtgaaatctcactcaggaaaatagattctgtctccaactggaatctcccaaagccatgactatgtttctgatcagcactacagctcagatgaagcgttcagttacctgccagccagtcagcatttccccagactgcaaccagtgttggaaccaatctgcaggagtgggtggattggta

SEQ ID NO: 6675 - DNA, 282 bp, Homo sapiens
attaaaggctggaaggcactggatgcctgatgatgaagtggactttcaaactggggcactactgaaacgatgggatggccagagacacaggagatcagttggagcaagctcaataacaaagtggttcaacgaggacttggaattgcatggagctggagctgaagtttagcccaattgtttactagttgagtgaatgtggatgattggatgatcatttctcatctctgagcctcaggttccccatccataaaatgggatacacagtatgatctataaagtggg

SEQ ID NO: 6676 - DNA, 418 bp, Homo sapiens
gacaattaaaggctggaaggcactggatgcctgatgatgaagtggactttcaaactggggcactactgaaacgatgggatggccagagacacaggagatcagttggagcaagctcaataacaaagtggttcaacgaggacttggaattgcatggagctggagctgaagtttagcccaattgtttactagttgagtgaatgtggatgattggatgatcatttctcatctctgagcctcaggttccccatccataaaatgggatacacagtatgatctataaagtgggatatagtatgatctacttcactgggttatttgaaggatgaattgagataatttatttcaggtgcctagaacaatgcccagattagtacatttggtggaactgagaaatggcataacaccaaatttaatatat

SEQ ID NO: 6677 - DNA, 1162 bp, Homo sapiens
tggaagtatctggatgttccttagtcacttaaaggagaactgaaaaatagcagtgagttccacataatccaacctgtgagattaaggctctttgtggggaaggacaaagatctgtaaatttacagtttccttccaaagccaacgtcgaattttgaaacatatcaaagctcttcttcaagacaaataatctatagtacatctttcttatgggatgcacttatgaaaaatggtggctgtcaacatctagtcactttagctctcaaaatggttcattttaagagaaagttttagaatctcatatttattcctgtggaaggacagcattgtggcttggactttataaggtctttattcaactaaataggtaaagaaacctccatgacaggaatctgaaacattgtccctggtgctcataaattctccactgtattgtctgaaatgacttatctcagtcctgactgtgggctcagatttactgtacagttcatcaacttctcagcatgatggataatgaatgtttcatttacatcgctaattgccaagccatggttcctgcaacctttaacccgtatgctttgtcccattatcaccatatgtcaatataattgcatttaacattccaaatgataaactttcctctatacagagaaatatttttcacaaagaaatcgcataagggctgctggtaaaatataagtctattacaggaaatgacagggattcaactagaaatataggaagattctcgtaactagtaaaatccatcgtcagacaaggacccttgatttcatatgtaggaaaaatactggtattttcttaaggatttgtctttgttgccttttaattgaacaaatgcataaaaagagattcctaaagtagtgcaactaaactttcaggcctatgtaagatccaagaagtacatattttttaaaactggttagcgatagctacatgacccaattatattttctatatttatttgattatcagccagtaaactcataatgaagcagctgcgcactcccccaacaattgagaattgaacaaatttccagagagaagtgaaaaatatcaaaaattaaaatcctaaacttgaagacaagttgagagaccatttagtctggccacctgtatccaagattcatttaaaaccaagcagcgg

SEQ ID NO: 6678 - DNA, 615 bp, Homo sapiens
  SITE (10): n equals a,t,g, or c
cttatctcanaatgtctaaagcaaattttccacagttatcaatcctattttaatatgtaaaactttctgaaaataaatttcaaagaggggactgtgggaaaccaaaatatgccatccaaagcgtgcctctttggcatattttgagatggctattcagagggtctgcagacacaaagcatggctctgaaaatttatccttttgtaaaataaatttacatgtatatattaataaagcaaacaagggatgcaggcagacggtttctctgaggtccttttatttgaatctaggaaagattaactcacaggaaaagaagactaaagacaggtttgacacttttaaaggtctgacagagaaactattaccacaggttaccatctactctttttgagggctattacctgatagaccttctctgcacaatgaaacaacagcctttgttcacagtgcattcttccccttacccttccataacctgtcaccacagcctccaggagcttcaggcctctttttctttctgtatcatataaaaaccttaggcccttctttgagtcctgtattttgtgtagctccctgtgcacgtgcatgtaataaatttgtatgctttttcctgtgaa

SEQ ID NO: 6679 - DNA, 615 bp, Homo sapiens
cttatctcaaaatgtctaaagcaaattttccacagttatcaatcctattttaatatgtaaaactttctgaaaataaatttcaaagaggggactgtgggaaaccaaaatatgccatccaaagcgtgcctctttggcatattttgagatggctattcagagggtctgcagacacaaagcatggctctgaaaatttatccttttgtaaaataaatttacatgtatatattaataaagcaaacaagggatgcaggcagacggtttctctgaggtccttttatttgaatctaggaaagattaactcacaggaaaagaagactaaagacaggtttgacacttttaaaggtctgacagagaaactattaccacaggttaccatctactctttttgagggctattacctgatagaccttctctgcacaatgaaacaacagcctttgttcacagtgcattcttccccttacccttccataacctgtcaccacagcctccaggagcttcaggcctctttttctttctgtatcatataaaaaccttaggcccttctttgagtcctgtattttgtgtagctccctgtgcacgtgcatgtaataaatttgtatgctttttcctgtgaa

SEQ ID NO: 6680 - DNA, 957 bp, Homo sapiens
cttcaatgaaatttatagaaaagactctcacaagtaccattgaatatagttttctgatgattttgagatcgtagtatttgactgggtaagaattccgaacttcagtgaaaaaactgaactcaaaaaactactaacccaacatcaagcagaataagaattattacatgggactaaagcaatgaaagattatgattttatgacttttttgtttggcacatggcttattctttcatgtttcattttccacattaattttttttttctttcagctatctacagtttacgggaatatgggaaggtgtacttttgtgtgcagaattgaaatttttttttctccctacctgatccctccagagtttggagactatttgtgagtattcttatttcaataacaatatagttatttgcttacatttaagaagaatctattctctttctaataggacacaattggaaacattggccatattaccaaggctttgcctgacatgtcctattctgagatatgaccagattgctctaaggaattaaagttgactttataaagccaattaaaaccccttggaaaatctatcttgatatcttggataaataattaacatggttgatttacaggtgagaaaaaatgtcacttcctgagaggccctggaacctgaatatatttttgggaaccttgagaagagaagtattcactcaagtttaaaggtattacaggcacaatttgagggtgactcctccttggattggcttcccagcctcaagaggctttcaaaagtttaatctgagattccttgtgaaaagttccagcaaagcaaaattgaaaatgagcttatatgattaatcatcattttgctgtacttctgtaaattattaggcaaagtataacaagcctaaaacttattttgcaaacaaattagttttattgtgattaactttggtaaaaaggggggaactcga

SEQ ID NO: 6681 - DNA, 396 bp, Homo sapiens
cagttgacttccacaagtgattactgagtggcaagcatgtaccaggtaccatgctaggcagaggcagtaaaatgatgaataaaacacagcagaatttacagtttggtgggatagcaaaacacagaaatagataactcagtataatgtggtgaatgctaagagacttagctcaaatcagcttgttttgaaaattttaactgttgccaagctactagtaaatgagttcaaattgtccactttagccttctaaaccctgattgtttctgtgcagttttaattctcattactatactgtgtgatctttctgattcagatccaaacagatttctcttttatgagccttattgtctcccatttctcaccttggatcttgaagccatagtaacatctttctca

SEQ ID NO: 6682 - DNA, 600 bp, Homo sapiens
tttgcatccaaattgtttgacctttgtgcagtggctcccattatcaactggggaaccagtacaatctttacctagttactactgaggttgttctctctccatcacaaaatttcatgctatttatctgtgagaaaatgcctgaggactttcacacagtaattcatcttatctggaacccttaggatcacatgtagaccgagcaaatgtcaagttcacagagaacacctgtgtcttcagaacattaaagggcaccattagagcttgtttcccttcacttaacatgcacatttttggcataagttggggctgaatgatgttgtcatagcaaatactgctagaatgattgctgtactcattacactaccaaaaaaaagagagagatgaatgggtgtggagtgtcactaaccctcctcatgatcagcacatggagaggacaggacagggtgacattcctgaggaactggtaacccccagacagctaatatgctttatgacagattggtgggttggctatctccaaaacttctaagacatagaaattcagattgaggtcataggtattcagattaatctgtaacggtcttggaagattattatata

SEQ ID NO: 6683 - DNA, 497 bp, Homo sapiens
tgttcttgcccacactatttgatccactgccacactctatgtcttatacatatatgactccaaatctctctcctgagctccagatctaaaaatctacatgcttagaagacatggaaaactcaaataatgtgatactcttgttatttcccaatgatataattattcaactgcttatccaaaccagaaacttgggagtcaaatcatgttttttattcatgtctcacatccaactgatagtcagctctgtctgtcctgcctctcaaatgtcattcctctatgattctctatcacagagatgcccatttgggttcaggcttccattgctcatcccctgcactattgaaattaccctcaaattagccctctaacatccaggtttgttctttttaatgtatacataaaacacattttagaatttctgtccaaaaatcctcttctttcatagttttctcctgtttattaaaaagtctaaattctgaatttaccacataggcctt

SEQ ID NO: 6684 - DNA, 358 bp, Homo sapiens
gaacctcccagggaagatgaggagaggcagagaataacattaattctaaccaaaacccgtatatgttggaggaatgaacagatcccttttatagaacttgaaaatgagcctccaggaggttaaataagctgcttacagtttcacagctagaaacaggagaggcagaattcaaaagcacatctttctcattccaaagctcatgctctctgaggcatactccatggcggtggtgcactgtgagcaggaagggagtgcccttttccatctatctccctttttctttatctcttctcaagaggatgatagggaaatagaagtgacaatgaagatagagagattggagggagggataaggaaa

SEQ ID NO: 6685 - DNA, 308 bp, Homo sapiens
gatggacacataagtaatcatgacacagaggctgggtgtggtggctcatgcctgcaattccagcacttcaggaggccaaggcggaggaatcacttgaggccaagagttcaagaccagcctggccaacttggcgaaaccctgtctctactaaaaacacaaaaattagctgggtgtggtggttcatgcttgtaatcccagctactcgggaggctggggcaggtgaatcgcttgaacccgggaggcagaagttgcagtgagtcaaaatcctgccactgtactccagcctgtacaatagtgagaacccgtct

SEQ ID NO: 6686 - DNA, 351 bp, Homo sapiens
ggacactaaagtgagctttaatatttaatctaaaaaagataggaatgtgtatttctttatattagatgcaatcaaaagtttaaagaacctgaagcaaatgtgtagtaggcttataactggactacgtaccttaactactacttagaaaactaaagcctaatttaattaagtaagctactaaggatctgtttaaaaaattcaaaatttaaatccaaacccaggtctgactaatttaaaagtttgcattcttaagcgtgacacactctccttctgtgtgagagagttgaaagtatagatatttgtagatatagagtattttatgacaggaacttagaagtgacataattatgg

SEQ ID NO: 6687 - DNA, 351 bp, Homo sapiens; identical to SEQ ID NO: 6686

SEQ ID NO: 6688 - DNA, 1694 bp, Homo sapiens
gtttcccatacatatatatgggaaagaattatatatatacacacagttgttggttaattatatccaagcattaaaatattgtattctaaatggccatactgcccaagttaatttatagattcaaagccatccccataaagctaccaatgactttcttcacagaattggaaaaaactactttaaagttcatatggaaccaaaaaagagcccgcattgccaagacaatctaaagcaaaaagaataaagctggaggcatcatgctacctgactttaaactatactacaaggctacagtaaccaaaacagcatggtactggtaccaaaacagagatgtagaccaatggaacagaacagagccctcagaaataccaccacacatctacaaccatctgatctttggcaaacctgacacaaacaagaaatggggaaatgattccctatttaataaatggtgctgggaaaactggctagccataatgtagaaagctgaaactgcatgccttccttacatcttatacaaaaattaattcaagatggattaaagatttaaatgttagacctaaaaccataaaaaccctagaagaaaacctaggcaataccattcaggacataggcatgggaaaggacttcatgactaaaacaccaaaagcaatggcaacaaaagccaaaattgacaaatgggatctaattaaactaaagagcttctgcacagcaaaagaaactaccatcagagtgaacaggcaacctacagaatgggagaaaatttttgtaatctacccatctgacaaagggctaatatccagaatctagaaagaacttaaacaaatttacaagaaaaatcaaacaaccccatcaaaaagtgatcaaaggatatgaacagacccttctcaaaagaagacatttatgcagccaacagatacgtgaaaaaatgctcatcatcactggccatcagagaaatgcaaatcaaaaccacaatgagatatcatctcacaccagttagaatggcaatcattaaaaagtcaggaaacaacaggtgctggagaggatgtggagaaataggaacacttttacaatgttggtgggactgtaaactagttcaaccattgtggaagtcagtgtggcgattcctcaaggatctagaactagaaataccatttgacccagcaatcccattactgggtatatacccaaaggattataaatcatgctactataaagacacatgcacatgtatatttattgaggcactattcacaatagcaaagacttggaaccaacccaaatgtccaacaacgatagactggattaagaaaatgtggcacatacacaccatagaatactatgcagccataaaaaggatgagttgacgtcctttgtagggacatggatgaagctggaaaccatcattccgagcaaactatcgcaaggacagaaaaccaaacaccacatgttctcactcataggtgggaaatgaacaatgagaacacttggacacagggcggggaacatcacacactagggcctgtcgtggggtgggggaaggggggagggatagcattaagagaaatacctaatgtaaatgacaagttaatgggtgcagcacaccaacatggcacatgtatacatatgtaacgaacctgcacattgtgcacatgtaccctagaacttaaagtataataataaataataaaaaa

SEQ ID NO: 6689 - DNA, 204 bp, Homo sapiens
aaaagatctaccctagcctgatgctgctggggctggcaaagttatgtgagctcagaagttgagaccaagcctccatctcctctactttaagtggaaagttaacacagtctggaagagtcagccaggagtatcagcccgtttgtgttaacttgcttttattttttcttgctgaaaacagaagtgaattacactcttcactgaatc

SEQ ID NO: 6690 - DNA, 204 bp, Homo sapiens; identical to SEQ ID NO: 6689

SEQ ID NO: 6691 - DNA, 114 bp, Homo sapiens
cagagtttcactcttgttgcccaggctggagtgcaacagcatgatctcgcctcactgcaacctccacctcctgggttcaagtgattctcctgcctcagcctcccaagtagctgg

SEQ ID NO: 6692 - DNA, 279 bp, Homo sapiens
tcaatgattccaaaaaatcgatacagtttcaaattttaatttagatgtaattgtgatcatcactgtatttatatatccaagtgactacattttaagttgtagacaattgttatttagaggtatgaagaaaaagagggagctggtgggaagtttgctagcataggagaaagtaaaaagaagcttcaattttataataatgaaattaaaagtcttaaaaagtcttagagattatttagtatagtactttatttttttccttaagaaacaatcaaggcatgt

SEQ ID NO: 6693 - DNA, 429 bp, Homo sapiens
ctcgaactcctggcttcaagcagtcctcccactttggcatcccagagtgctgagattaccactgtgcctggctcgttaactgtgtttttaaaggaactctttgtatgtgtgctgacaggttacccaaaaggagtgactttgagactttaatttacatagctccaaacagcatgtccaggtgaaagcacagatatcagaataggtatgatggatctaagagccaaagcatttcattctcattcattgtagtccaaatgaaagacatttgaatcatgcaacattttgaagaatttttaaaacatgcttttagattgttttacaacaaaattaatgatgtaaaggtagtttaaaacttgattaatacctgatttttactagttaagtaccaggcagcctttatttcaaactgggaaactattttaaatactt

SEQ ID NO: 6694 - DNA, 360 bp, Homo sapiens
ggttggatggtggtgttctgggtctcattcctggaggcccagcttacagcttgctcttgcaaccctttcgataaatttataagcactcagattctctgaataaggtctcttttaaattaaataatgagagtattttatggctcctgtgactgacccttacctgatacacttccagtcacagtcagaatcaatctaaagtccttaccaaggcctaccagcccggaaccatccagccttagccactttcttactgtctctttcactgactctgcttaagctacatgtcacttttgcatttttgttcttccctgaacacactaagcttgccttacttagggctctgggacctgctgttcttat

SEQ ID NO: 6695 - DNA, 360 bp, Homo sapiens; identical to SEQ ID NO: 6694

SEQ ID NO: 6696 - DNA, 493 bp, Homo sapiens
ccttttgccaccagcctagggttagggtctctgtcattttctctcatgctgtgctgtgttgtagctccctgtgagtctccatggtgtagtgaaatgagcaaggctctgctgtaagacaagtctgggctcaagtgctggcctacctcttattggggtgtcctttaccagctttcttacctttctcagcctctgatcaaagctcactgcagcctcaaccttctggggacaagcgagcctcccgcctcagcctcccaaagtgctaggactacaggcataagtgactatgcctggcccaagcctgttttcttatctgtaaaattggaacaacaacaaaaaagtattctttgtagagttgtgtgagaattagagataatgtatgtaaaaaatctggcaccagtaatgaaacacagtaaaactacaaaaggaaagcaagtttttcctctgttttccctacattaaaacataataacattaaatgattattctgactgta

SEQ ID NO: 6697 - DNA, 337 bp, Homo sapiens
aaactaaacatttgataattatggcaggaaatatggaaggaattaaaaagcatgagggagaagaaatggaatgcacattacaaaagaaatagctccctggtgggtggtttatgctccctgtttgaattttttccttcatattacagtttaaccacacccttagcatcgcagcttgactctgcccaaaaaagtcataaatgcatacaaggtcttcacaatttttaaaaaatacgcattgtactgaattctcatttaattcactactacgttgttgattgaggtggaaactcaatcaactgtttttactgccaatgaaataaaagtagctaatatttat

SEQ ID NO: 6698 - DNA, 337 bp, Homo sapiens; identical to SEQ ID NO: 6697

SEQ ID NO: 6699 - DNA, 357 bp, Homo sapiens
tgggggggcaggcaggcggggaaggagaggtcttaaggggcggcgaggggaggtcgcatttcctccgaggctggcgatcggcggagctcccacctccgcttacagctcgctgccgccgtcctgccccgcgcccccaggagacctggaccagaccacggtgagcgcagggcgcacggcgcggaggccggactcttcgggcggccgggggtgcttgggcggccggagcgagcctgcgggacccgagcaagtttcccaggtcggcgcggggcccggcgccttcagactcgctctcttctctcttccgcagatgtggaaacgctggctcgcgctcgcgctcgcgctggtggcggtcgcctg

SEQ ID NO: 6700 - DNA, 429 bp, Homo sapiens
gaccagaacattggtatgcggcacatgactgtagatcttctcattaataataggcaacctggtcaggtgcacgaagtctagggttcagaatccaacaggctcaaattcaagtccagctcagccacgtggctgagtgctgtctgaacctcagcgtcctcagctgttaaacagaggtaaccatccccatctcagcagctttgggaggaaattaaatgagatatattgggatccagataaccaataaaatatcaaatcactttaccagttcaagctcttaccactcagtgattgcatggacttatcactgacgaatgaactcaggagttcaggagttcgagaccagcctgggcaacatcctcacccagctaatttttgttttgtttggtttggttttgtttttgagatggagtctcactctgtcgcccagct

SEQ ID NO: 6701 - DNA, 508 bp, Homo sapiens
caggccatcctcacattctacagaggttaacccagcaacttagggacacagctggggcaggactcccgggctcctggtcagtccctctatggggatgctaagcctcagggctgacatctcttagctctgccttccagggagaatttcacagggcctcccatttgtgctgctgtgaaggccgtcctgctccttgtcaagcctgtcttctccgtggcttgaggaagatctctttcgtgcccaaattgtgaataagtaaactggatgcagcatctctgattgctctgggaagaaatttatgagaagtgcctgagaaaagtcatgattttatgcctctgctaagcaacctgttggacactgcttggtatctacagctaagtggttccctgttcagacctgcttcctctgattagcagccacagatcttctgggttttcacttgtttatttctgtttattgtcatctctgggaagatggcttcaaattttttatcccccaattatttaacccc

SEQ ID NO: 6702 - DNA, 353 bp, Homo sapiens
tcacagcaggaggtgaggagtgggtgagtgagcaaagcttcatctgtatttacagccgctccccattgctcgcattaccccgagttccgcctcctgtcagattagcagcagcattcgattttcataggaacacgaaccctattgtgaactctgcatgcaagggatctaggctgtgcactccttatgagaatctaatgcccgatgatctgcggtggagctgaggcggtgatgctggcactggagcacggctgcaaatacagataagcattagcagagaggtttgactgcacagagaccatagtaagtcagttgcttgcagactcatatcaaaaccatatctgtgagtggcgggt

SEQ ID NO: 6703 - DNA, 368 bp, Homo sapiens
ccacttctgtccatgcctctttcccacactcagcacgtgtctcagtcacagtttgggtaagtccaccggctaaccctagccagaatgagtaagaaaaaaatcaagcgtctctggagagcttctttgaaaagggggaaaggcccaatggtgaaacagcagaagactcaaagaaagttgcatttaaaaggaaacagcaagagccctgcttcaattatggattcattgcaacaagtgattcatattccccaagccctctttgcataatatgtgaccactggctatccagtgaagccgtaaaaccttcaaaaccgcttcgccacatggagaccaagcaccttgcattaaaagacaaacctttagagtttttc

SEQ ID NO: 6704 - DNA, 477 bp, Homo sapiens
gggattataggcgtctgccaccacgcctagctagtttttgtttttttaatagagacgaggtttcaccgtgttggccaggctagtctggaactcctgacctcaggtgatatacctgccttggcctccataggtgctgggattacaggtgtgagccaccgtacccagccagttctgttttcttaattgtatacataacacgcagtgagcaccatcacagagaagtttaaccacagatctgagaatcatggaatcatttcatcataaccactgttactcggaatctttatttcactcttgttcaccacctctttccaaaagaaatttgaggtaataaaggacaaaaggcaaggaaaagtgagatgggaaatgcacaaagctaacagtccactaaagctaaacctgcacctatcccatgatctaggagttccactcctgggtgcagacccaaaaaaatgagtgcctgactcaccaaaaaaa

SEQ ID NO: 6705 - DNA, 357 bp, Homo sapiens
caaattctggtgataaatattataatttagtctgaccttggcctgaggtttataaagaaatactgttaaacattgctttctgttcaggtaaatatatacacagaaatagaatagtatactctcctgcaaaagaatgttatttactttcattttgaaggatgttgtcttaagcctgtttttctgaactccacttaatgacccacactgatgctctggtttgacaaacaaaatcttcagatttgatgattttgttaatttctagagcaggctcaggtgaaaatatcagccagtgattctgaggtgttgcattcctatttttaaagcagtcattaggtaggactgatgtaggcaatgaaa

SEQ ID NO: 6706 - DNA, 357 bp, Homo sapiens; identical to SEQ ID NO: 6705

SEQ ID NO: 6707 - DNA, 1082 bp, Homo sapiens
gtttttctgagaagtgtgggatagaacccttattttaaatggacagtttatcttaagacatccagttaaaataggaaaaaattaacatctagaatctaattaatgaggtttactctaagatttgtttaaaaatatgccttttaaaatctatttgtctctttgttttatttgtaattttagcgagatgaaatataattttgatagaccattcatttataacttttgtaattggcctctcatgcttttccttatctttttttgtgtcagctatgtgtaaatttgaaactaattatgacaccaaataaagaatccatttagggtgacctcattggaaaacagcatttttgcagatactcactctccttttagcaaatatggttaaattaccattttgaatacttctagaactatgaagaatggtggtgattcatgatatagaattttgataattactaaaaatcattttgtcaatttttttccagcaactttctgatgtagcagtctcttgatatacaagagggatatggtgagaccttgaacttcagctttctgtaattccactggtatatgttataacttcacaggctaactttctctatacataaaaggggagtaattgtatccactgtcaacttgtgaggaccgaaggataatcaaatgggaaatggggagtgtgtggttaacactttgtccactgcctggtaatggcgattcagtcactgctaacacagaattagaaatgacacgtgttatgtattttctggtcacctgagaatagtcagaaccattagcattgaaagccatgagtgccttgggtcaagagtagcttatgatgacatttatttttatagttaaagaagtggagacagaatagatagaatggttacaggtaagtgtaaacacattattttctttattaaagaggcttttcttgcttgaaaacatttttgaaaattgccactggccaggtgtggtggctcacacctataatcctagcactttgggatgctgaggtggaagcttgggcaacatagcaagaccatatctcttaaaaaaaaaaaaaagaaaaagaaaaaaagaaa

SEQ ID NO: 6708 - DNA, 605 bp, Homo sapiens
gaatccatcaattatatttcatatgagaagtgaaataacaattgtgtattcctccatggttaggggttctgaataatggcttaaatcagatgggttatcaactttatgacctagcccagttgctggtatctcaaatccgttttaacaaatatgcactcgggtagtggaagctttagatattaaaaaaataaaagccctcactgacaaagtggcaataaattattaaaatgctatgtttttggaattcaggtagattctttttgagaccatcatagagaggaatagaactttgctgtcctttttgttttccttatccatgcttttgtctcacagcaaaatatactatgactctattttaaaaaatggtctacctgtctgtgaacttctgtctcttgcaactggaaattttgcttgtgtctgtctgcaaaagagggaaacaaatagatatcagggatttataaaagctatctcaatattatgacatactagtttacaatgtttgtcaatttcaggtacttttgacaactgtgaaaccggaagaatgatggttgatgttcaaagagagagttttatttatatggagctaaattaaaaaaattttcatc

SEQ ID NO: 6709 - DNA, 1082 bp, Homo sapiens
gtttttctgagaagtgtgggatagaacccttattttaaatggacagtttatcttaagacatccagttaaaataggaaaaaattaacatctagaatctaattaatgaggtttactctaagatttgtttaaaaatatgccttttaaaatctatttgtctctttgttttatttgtaattttagcgagatgaaatataattttgatagaccattcatttataacttttgtaattggcctctcatgcttttccttatctttttttgtgtcagctatgtgtaaatttgaaactaattatgacaccaaataaagaatccatttagggtgacctcattggaaaacagcatttttgcagatactcactctccttttagcaaatatggttaaattaccattttgaatacttctagaactatgaagaatggtggtgattcatgatatagaattttgataattactaaaaatcattttgtcaatttttttccagcaactttctgatgtagcagtctcttgatatacaagagggatatggtgagaccttgaacttcagctttctgtaattccactggtatatgttataacttcacaggctaactttctctatacataaaaggggagtaattgtatccactgtcaacttgtgaggaccgaaggataatcaaatgggaaatggggagtgtgtggttaacactttgtccactgcctggtaatggcgattcagtcactgctaacacagaattagaaatgacacgtgttatgtattttctggtcacctgagaatagtcagaaccattagcattgaaagccatgagtgccttgggtcaagagtagcttatgatgacatttatttttatagttaaagaagtggagacagaatagatagaatggttacaggtaagtgtaaacacattattttctttattaaagaggcttttcttgcttgaaaacatttttgaaaattgccactggccaggtgtggtggctcacacctataatcctagcactttgggatgctgaggtggaagcttgggcaacatagcaagaccatatctcttaaaaaaaaaaaaaaagaaaaagaaaaaaagaa

SEQ ID NO: 6710 - DNA, 605 bp, Homo sapiens; identical to SEQ ID NO: 6708

SEQ ID NO: 6711 - DNA, 90 bp, Homo sapiens
gatcgcgccactgcactccagcctgggcggcagagagagactccgtctcaaaaaaaaaaaaaaaaaaaaaaaaaaaaaaaaaaaaaaaaa

SEQ ID NO: 6712 - DNA, 3098 bp, Homo sapiens
ctcatatttttcccagacgcggaggttggggtcatggcgccccgaagcctcctcctgctgctctcaggggccctggccctgaccgatacttgggcgggtgagtgcggggtccagagagaaacggcctctgtggggaggagtgaggggcccgcccggtgggggcgcaggactcagggagccgcctccggaggagggtctggcgggtctcagcccctcctcgcccccaggctcccactccttgaggtatttcagcaccgctgtgtcgcggcccggccgcggggagccccgctacatcgccgtggagtacgtagacgacacgcaattcctgcggttcgacagcgacgccgcgattccgaggatggagccgcgggagccgtgggtggagcaagaggggccgcagtattgggagtggaccacagggtacgccaaggccaacgcacagactgaccgagtggccctgaggaacctgctccgccgctacaaccagagcgaggctggtgagtgaacccggccgggggcgcaggtcacgaccaccccccatccgccacggaccgcccgggtccctcagagtctccggatccgaaatctaccccgaggcagcgggacccgcccagaccctccacccgggagagtcccaggcgcctttacccaggttcattttcagtttaggccaaaatccccgcgggttgggcggggagggggcggggctagctgggcggggctgactgcggggaccggctagggtctcacaccctccagggaatgaatggctgcgacatggggcccgacggacgcctcctccgcgggtatcaccagcacgcgtacgacggcaaggattacatctccctgaacgaggacctgcgctcctggaccgcggcggacaccgtggctcagatcacccagcgcttctatgaggcagaggaatatgcagaggagttcaggacctacctggagggcgagtgcctggagttgctccgcagatacttggagaatgggaaggagacgctacagcgcgcaggtaccaggggccatgggcgccttccctatctcctgtagatctcttgggatggcctcgcacaaggttgggaggaaagtggacccaatgctaggatatcgccctccctctagtcctgagtaggaagaatcttcctggctttcgagatccggtaccagagagtgactgtgagagtccgccctgctctctgggacaattaagggatgaaatttctgagggaatggagggaagacagtccctggaataccgatccgcggtcccctttgagccctccaacagccttgggccccgtgacttttctctcaagttttgttctctgcctcacactcaatgtgtttgaggctctgattccagtccctcggcctccacttaggtcagggccagaagtccctgctcccccctcagagactctaactttccaaggaataggagattttcccaggtgtctgtgtccaggctggtgtctgggttctgtgctcccttccccaccccaggtgtcctgtccattctcaggttggtcacatgggtgctgctggggtttcccatgaggagtgcaaagtgcctgaattttctgactcttctcagatcctccaaaggcacacgttgcccaccaccccatctctgaccatgaggccaccctgaggtgctgggccctgggcttctaccctgcggagatcacgctgacctggcagcgggatggggaggaacagacccaggacacagagcttgtggagaccaggcctgcaggggatggaaccttccagaagtgggccgctgtggtggtgcctcctggagaggaacagagatacacatgccatgtgcagcacgaggggctgccccagcccctcatcctgagatggggtaaggagggagatgggtaaagaggggaacgaggggtcatgtcttttctcagggaaagcaggagcccttctggagctcttcagcagggtcagggctgaggcctggagatcagggcccctcaccttcccttcctttcccagagcagtctccccagcccaccatccccatcgtgggcatcgttgctggccttgttgtccttggagctgtggtcactggagctgtggtcgctgctgtgatgtggaggaagaagagctcaggtaggaaggggtgaggagtggagtctgagttttcttgtcccactgggggttgcaagccccaagtagaagtgtgccctgcctcattactgggaagcaccatccacactcatgggtctacccagcctgggccctgtgtgccagcacctactcatttgtaaagctcctgtgaaaatgaaggacagattcttcacttcgatgattatggtggtgatgggacctgatcccagcagtcacaaatcacaggggaaggtccctgctgatgacagacctcaggagggcagttggtccaggacccacatctgctttcttcatatttcttgatcctgccctggatctacagttacacttttctggaaacttctctgggatcaaagactaggggtttgctctaggaccttatggccctgcctcctttctggcctctcacaggacattttcttcccatagatagaaacagagggagctactctcaggctgcaggtaagatgaaggaggctgatccctgagattgttgggatattgtggtcaggagcctatgagggagctcacccaccccacagttcctctagccacatctgtgggctctgaccaggtcctgtttttgttctaccccaatcactgacagtgcccagggctctggggtgtctctcacagctaataaaggtgacactccagggcaggggccctgatgtgagtggggtgttgggggggaacagaggggactcagctgtgctattgggtttctttgacttggatgtcttgagcatgaaatgggctatttagagtgttacctctcactgtgactgatacgaatttgttcatgaatattttctctatagtgtgagacagcttccttgtgtgggactgagaagcaagatatcaatgtagcagaattgcacttgtgcctcacgaacatacataaattttaaaaataaagaataaaaatatatctttttatagataca

SEQ ID NO: 6713 - DNA, 5721 bp, Homo sapiens
ccacagaatccttataagccaaagtgggtgaagatgaggtatggagcatggtatttgaaccccaagttgtggaaaaagcaaagagtagacgagcctctggttgaccctgaggtctcacataaggctcaagaggagaattttaaaaaggagctgcaggaacaggtatgtatttatactgagatttgatcatctgagcttcagatgatcacagtgcatctgccaccctcctactgaaccagactctgcggcgtaatacaaaggctcctgaaagccctccaccttgcatattgaattcagcaaggagaaagctaagtaatgttaaggagaatgtgtaataagcaagacttggaatctcctggctttgtggtagacatgacatctctaaagattggacagctactcatgctattccaccattcttggaacaatttattccaaggataattgttcaaagggtggtgtgacttggtacgaccacctcagtgcccagaatagatgtgctgtcatgagttatctttgggtaacaaaatgtgaagcttgtttcctatcagctatgggtgaatgtcaaaaaattcaaaatttcaaccaggaaatttcttttaggcaattcatttgagttgcaggatctgtctgagaggaaagggacaaaggttaagcactgtttgatattgcaaagcaacaaacactcacaacaagggtgtgctctaattttactacagataaaccctgcctgctcattgcttgtgtaaaagtagctagtggaaagaagatactcattatggccctggaaatttggaaatagtgatgcaacacttgcatagtactctaatgaggatatttgcaaacctcttctctttttcaacagaccccaaacttctcctagataacagacgtgaaaacactttgagaaagtaaaatacaatacaaattagacttattattcttcagtaatcactcatcaattgtcttcttcagattggaaagctaagacaggaaggatggtcattttaatcttttccagtactgaatataaattcttattttcaggtgtgaggtatgatacaaatttatgagcaccccatgtttatataagtctcaaaattatgtaaataatgtttggcagaatttcttagtatggtttttggaaagcctaggtttatgtgaatttaatatataacataaagctattccagttgcacttttattataaaaggtaacatcattttttctcaaattaaatatttaaaaagaaaaatagctacaaacttttgctttaaggtatctagagttctctttttaaaagcatattcttaattactaattcttaaagacttcaaaagttttacaaaacatatttcattttgatgacaaatgctataaagatgtttgccaaaatggttacagtgagctaataaagtagcattatttaaatataattgatataactcgtatagtaaaagattgtttatcaggcagtttagacacagggaggatgcataacaatggaattgttctacaataatttttataaatcacacctttttaatacctgaggaatgatttacattatcgactataggtggcaccaccaggctgtggcaccccagtttacaagacgcaggcactgtggggtactggtaagagacagtaactatgacaacatgactgtctttctgggaactcgtgagttttgactattcttgatagatttggtttggaaggtgaaatggttttaaagtactgaattgaaattatgtaaacttatgcatccaatttttaaattaaaataaatgtaaagaaaaactaaaaagatgcataaatattgtagatgttgggactgatcaaatcatatttgattgtcctgtcctttgaagttaagatctatgatttgtggacatactgttaatcttaactaggttagattccagacatcataggtcaataattgtctaattgctaaaatgtgttgcccatccttaatatggggataaggaaaaggctaggggaaggagagaaagctggacatctttaaaagccttcatattcatcaactcatgaacattacacacatattcaaaaacaagaaggatatgggttaaaatgagatactttataaggaactaaatgcttttaatgagaacaaatatgaaatcaagcttctgatggctgacccctttcttcaaatgtgggtactcttttaggaggagttacttgcagaccttcacggaacagttgcctttaaggatttcattctaagcaggggctacaggacgccacgtgtgagtaaagggtcctttcagaaggccctgctgaggggcttcatggctcacagttgttgacgggaagaggttatgaccctgacaaacccaaatagttctcttacaggcacataccaagacaggcccctggaagaaagggcatgcttctccccagacggggactcagagataggatatggcattttgccctttttattctgcctatttggtttctgctactatcagagatactatttccctgtgatctttgactcatcttccttggatttggcctcaataggaggtctatgtacagggcatgggccttgcaaattccaactgttactcaacaccctgaattctctaggatgttttcaagtctcctttgcgtcctggtctaaggacaaagagctgtggcttgggttaggacaaaatagcgttgggatttgcaatttcatcattgcactattagctctgcctcaagtagaaacaggctaaggcaaaagttcacttcctggggggcctggccagtgtcttctgtcttttttccctttcttcatttctgcctcctggtttcccctcactaacttgtaaagctggccccagcatctccacacaatgtggtccccctttggacaatcacttgtaacagggttggggtgggaggttggcagaagggaacatggagcgggagggcctgctgcctcgagcagtgtgcccagatcagccctgtcactgcagcaggagactagataggcatctggggctgaagtcatagctgataatgtcaagcatttgtccactgtcctctgtgtgcacgtaccttggggtctttaggggacagtgcaactgagatggtcagaagtttctggaaatgggagatttgatttctgtttttccaagagtgatagaactaacaatagctgatacagctagcaaataaatgtaggacaaagttcagaatcagactggtttcaaagttaaatcaggcaagtctagagcatgagatggagatttgagactgggaaactccattatagaactggtttggaggaactcctttagctttgaacatcaatactaggtctgctagatatatttaatatacaaataactgcctaatctgtatataaggtttgcataactatatttatatataatatataaaatataaaatatgcatctatagctttaatattacataattatgtgtttacgagtccatattagatatgtaaaaatgtacttctgtggtatatgtgtgtgtatatataaatccttatttgccattgatattattgtggctcatttttgtatcttaacatttttagtggcaaaacacccttctttttttcattttgatgtgttccctattgatttaatccatactgttcatgaacatttagttcagttttgggcaaaaggaagcatgcctgacacactggctattgcaggatctggccagcagcccgcaatgcaacggggctctctgttcccaggcggattggcaggttgagaaataatagacacacacaagatagtgaaagctgggtccaggggtgtcaccgccttctggtcccacggtgccaacaatgcactggatataccagcatttattattaagtttagtgagggcgggggtaggttagtgagagatttagggtcatttgattgtgagatgagatggtcacatggggatgaagtaattctttaacataacatttgtatgtagaagtacagtacatttgtatgtagaagtacagtgtacagagataagaatttacaatatagtgtgtgcgtcaataatttctaacagaatcttaaaatagaaacacaatctttccataacctatgattagcaagatattaatcaacagtaacagttgccacaaaagctggttacaaacaatccatggaaacaggaggtgaagctagacaaccagttagaccagaaattctcagaagggagtatgccttaaccctaaagaggcctagaagagctgtggcaagatgagggcatttatagccctatcttatccatatggacaggcgccccccatgtgtccgtttataggctttccacaagggtcgcattccattcccagagctatgaacatctgcttttctgggataggaatgttggtgatgtgcaacctccctgactgcacgtccgttcataggctgtctgcagggggaagcacatcatgcgctgttggctcgttctggcagcccaacctggcattgtctttacacaatcctgcatgcaattttgtatttacaataatcaggagcatttcatcttttattccgtagcaatagtttcagggggtctccctacatctggctgtcctcttttcagtcacattgactagagaaatgatgcccctggtcacaacagagtcctctgagaacacctgtcactcaaaaccctacaatattttgtccctttattcttacatcctatattcttattttatcaataagatttcaactgaaggagagaaggggctctatcacagggaataagatatatatgcatatacacacacacagtatataaatatatgtgtgtgtatgtgtgtgtgtgtatacacagttattatttacttaaatctatatgtgaacattcattcttttttttaacctcctgtgtacattcacatatgttatgtgaacatatgcacttacctacacattccagtatctgctgctggattaactacttgatgcatcacccacagcctcattccctctgctgcacggatggatcccaagccttagtagcagggatgggcagcacaaggctatgttgagctgggctgggccagacttgggcacagaacaagtgtgaattccatctgagtgtttctgatactgtgtgactaccttccaaagaccaacatctatcatggtcagattattaacatgtgattttgcatagtgtaaggatatatattagagtgtgaaattttgagttagatatggtagtggttgtggggaggactgtactgtgcaagttttgtttgccaatctaatgaaggttctctcatttttttttagttccttgagaatatgtatatcgggaaggaatgtaaacgtgcatgtaataagactcctataaaacgaactcaagcatagaagaatcgtaggagaatgattaggcagattttattactacgtacttggctatttctctgtctccttttaaagattaaacagagtttatgatgagtgtcccactgtggatgttcaactttgacttggcaacatctgtaaatgtaatacctgatggttataagcatttctcaatggatttctgcttcagttaatcaacattttgtatactttatcacccatgagatcaatattcacatgtaatcttctcatatttttgtggcacgtgaatattatataggtatatcaactattggtaaaaataaataaaggcataaataaaaacaga

SEQ ID NO: 6714 - DNA, 5721 bp, Homo sapiens
ccacagaatccttataagccaaagtgggtgaagatgaggtatggagcatggtatttgaaccccaagttgtggaaaaagcaaagagtagacgagcctctggttgaccctgaggtctcacataaggctcaagaggagaattttaaaaaggagctgcaggaacaggtatgtatttatactgagatttgatcatctgagcttcagatgatcacagtgcatctgccaccctcctactgaaccagactctgcggcgtaatacaaaggctcctgaaagccctccaccttgcatattgaattcagcaaggagaaagctaagtaatgttaaggagaatgtgtaataagcaagacttggaatctcctggctttgtggtagacatgacatctctaaagattggacagctactcatgctattccaccattcttggaacaatttattccaaggataattgttcaaagggtggtgtgacttggtacgaccacctcagtgcccagaatagatgtgctgtcatgagttatctttgggtaacaaaatgtgaagcttgtttcctatcagctatgggtgaatgtcaaaaaattcaaaatttcaaccaggaaatttcttttaggcaattcatttgagttgcaggatctgtctgagaggaaagggacaaaggttaagcactgtttgatattgcaaagcaacaaacactcacaacaagggtgtgctctaattttactacagataaaccctgcctgctcattgcttgtgtaaaagtagctagtggaaagaagatactcattatggccctggaaatttggaaatagtgatgcaacacttgcatagtactctaatgaggatatttgcaaacctcttctctttttcaacagaccccaaacttctcctagataacagacgtgaaaacactttgagaaagtaaaatacaatacaaattagacttattattcttcagtaatcactcatcaattgtcttcttcagattggaaagctaagacaggaaggatggtcattttaatcttttccagtactgaatataaattcttattttcaggtgtgaggtatgatacaaatttatgagcaccccatgtttatataagtctcaaaattatgtaaataatgtttggcagaatttcttagtatggtttttggaaagcctaggtttatgtgaatttaatatataacataaagctattccagttgcacttttattataaaaggtaacatcattttttctcaaattaaatatttaaaaagaaaaatagctacaaacttttgctttaaggtatctagagttctctttttaaaagcatattcttaattactaattcttaaagacttcaaaagttttacaaaacatatttcattttgatgacaaatgctataaagatgtttgccaaaatggttacagtgagctaataaagtagcattatttaaatataattgatataactcgtatagtaaaagattgtttatcaggcagtttagacacagggaggatgcataacaatggaattgttctacaataatttttataaatcacacctttttaatacctgaggaatgatttacattatcgactataggtggcaccaccaggctgtggcaccccagtttacaagacgcaggcactgtggggtactggtaagagacagtaactatgacaacatgactgtctttctgggaactcgtgagttttgactattcttgatagatttggtttggaaggtgaaatggttttaaagtactgaattgaaattatgtaaacttatgcatccaatttttaaattaaaataaatgtaaagaaaaactaaaaagatgcataaatattgtagatgttgggactgatcaaatcatatttgattgtcctgtcctttgaagttaagatctatgatttgtggacatactgttaatcttaactaggttagattccagacatcataggtcaataattgtctaattgctaaaatgtgttgcccatccttaatatggggataaggaaaaggctaggggaaggagagaaagctggacatctttaaaagccttcatattcatcaactcatgaacattacacacatattcaaaaacaagaaggatatgggttaaaatgagatactttataaggaactaaatgcttttaatgagaacaaatatgaaatcaagcttctgatggctgacccctttcttcaaatgtgggtactcttttaggaggagttacttgcagaccttcacggaacagttgcctttaaggatttcattctaagcaggggctacaggacgccacgtgtgagtaaagggtcctttcagaaggccctgctgaggggcttcatggctcacagttgttgacgggaagaggttatgaccctgacaaacccaaatagttctcttacaggcacataccaagacaggcccctggaagaaagggcatgcttctccccagacggggactcagagataggatatggcattttgccctttttattctgcctatttggtttctgctactatcagagatactatttccctgtgatctttgactcatcttccttggatttggcctcaataggaggtctatgtacagggcatgggccttgcaaattccaactgttactcaacaccctgaattctctaggatgttttcaagtctcctttgcgtcctggtctaaggacaaagagctgtggcttgggttaggacaaaatagcgttgggatttgcaatttcatcattgcactattagctctgcctcaagtagaaacaggctaaggcaaaagttcacttcctggggggcctggccagtgtcttctgtcttttttccctttcttcatttctgcctcctggtttcccctcactaacttgtaaagctggccccagcatctccacacaatgtggtccccctttggacaatcacttgtaacagggttggggtgggaggttggcagaagggaacatggagcgggagggcctgctgcctcgagcagtgtgcccagatcagccctgtcactgcagcaggagactagataggcatctggggctgaagtcatagctgataatgtcaagcatttgtccactgtcctctgtgtgcacgtaccttggggtctttaggggacagtgcaactgagatggtcagaagtttctggaaatgggagatttgatttctgtttttccaagagtgatagaactaacaatagctgatacagctagcaaataaatgtaggacaaagttcagaatcagactggtttcaaagttaaatcaggcaagtctagagcatgagatggagatttgagactgggaaactccattatagaactggtttggaggaactcctttagctttgaacatcaatactaggtctgctagatatatttaatatacaaataactgcctaatctgtatataaggtttgcataactatatttatatataatatataaaatataaaatatgcatctatagctttaatattacataattatgtgtttacgagtccatattagatatgtaaaaatgtacttctgtggtatatgtgtgtgtatatataaatccttatttgccattgatattattgtggctcatttttgtatcttaacatttttagtggcaaaacacccttctttttttcattttgatgtgttccctattgatttaatccatactgttcatgaacatttagttcagttttgggcaaaaggaagcatgcctgacacactggctattgcaggatctggccagcagcccgcaatgcaacggggctctctgttcccaggcggattggcaggttgagaaataatagacacacacaagatagtgaaagctgggtccaggggtgtcaccgctttctggtcccacggtgccaacaatgcactggatataccagcatttattattaagtttagtgagggcgggggtaggttagtgagagatttagggtcatttgattgtgagatgagatggtcacatggggatgaagtaattctttaacataacatttgtatgtagaagtacagtacatttgtatgtagaagtacagtgtacagagataagaatttacaatatagtgtgtgcgtcaataatttctaacagaatcttaaaatagaaacacaatctttccataacctatgattagcaagatattaatcaacagtaacagttgccacaaaagctggttacaaacaatccatggaaacaggaggtgaagctagacaaccagttagaccagaaattctcagaagggagtatgccttaaccctaaagaggcctagaagagctgtggcaagatgagggcatttatagccctatcttatccatatggacaggcgccccccatgtgtccgtttataggctttccacaagggtcgcattccattcccagagctatgaacatctgcttttctgggataggaatgttggtgatgtgcaacctccctgactgcacgtccgttcataggctgtctgcagggggaagcacatcatgcgctgttggctcgttctggcagcccaacctggcattgtctttacacaatcctgcatgcaattttgtatttacaataatcaggagcatttcatcttttattccgtagcaatagtttcagggggtctccctacatctggctgtcctcttttcagtcacattgactagagaaatgatgcccctggtcacaacagagtcctctgagaacacctgtcactcaaaaccctacaatattttgtccctttattcttacatcctatattcttattttatcaataagatttcaactgaaggagagaaggggctctatcacagggaataagatatatatgcatatacacacacacagtatataaatatatgtgtgtgtatgtgtgtgtgtgtatacacagttattatttacttaaatctatatgtgaacattcattcttttttttaacctcctgtgtacattcacatatgttatgtgaacatatgcacttacctacacattccagtatctgctgctggattaactacttgatgcatcacccacagcctcattccctctgctgcacggatggatcccaagccttagtagcagggatgggcagcacaaggctatgttgagctgggctgggccagacttgggcacagaacaagtgtgaattccatctgagtgtttctgatactgtgtgactaccttccaaagaccaacatctatcatggtcagattattaacatgtgattttgcatagtgtaaggatatatattagagtgtgaaattttgagttagatatggtagtggttgtggggaggactgtactgtgcaagttttgtttgccaatctaatgaaggttctctcatttttttttagttccttgagaatatgtatatcgggaaggaatgtaaacgtgcatgtaataagactcctataaaacgaactcaagcatagaagaatcgtaggagaatgattaggcagattttattactacgtacttggctatttctctgtctccttttaaagattaaacagagtttatgatgagtgtcccactgtggatgttcaactttgacttggcaacatctgtaaatgtaatacctgatggttataagcatttctcaatggatttctgcttcagttaatcaacattttgtatactttatcacccatgagatcaatattcacatgtaatcttctcatatttttgtggcacgtgaatattatataggtatatcaactattggtaaaaataaataaaggcataaataaaaacaga

SEQ ID NO: 6715 - DNA, 1118 bp, Homo sapiens
ttgtaaatttgtttaagttccttgtagattctggatattaggcttttgtcagatggatagattgcaaaaattttctcccattctgtaggttacctgttcatgctgatgatagtttcctttgctgagcagaagctctttagtttaattagatcacatttgtcaattttggcttttgttgcaattgcttttggtgttttagtcatgaagtcttagtccatgcctatgtcctgaatggtattgcctaggttttcttctagagtttttatggttttaggttttatgtttaagtctttaatccatcgtgagttaatttttatataaggtgtaaagaagaggtccagtttctgttttctgcatatggctagcccattttcctagcaccgtttattaaatagggaatcctttccccattgcttgtttctgtcaggtttgtcaaagatcagatggttgtagatgtgtgatgttatttctgaggcctctgtcctgttccattggtctatctgtctttttggtaccagtaccatgctgttttgtttactgtagccttgaagtatagtttgaagtcaggtagcatgatccctccagctttgttctttttgcttaagattatcttggctatatgggctcttttttggttccatatgaaatttaaagtagctttttctagttctatgaagaaagtcaatgatagcttgatgggaatagcattgaatctataaattgctttggacagttatggccattttcacaatattgattcttcctctccatgagcatggaatgtttttccatttgtttgtgtcctctcttatttccttgagcagtggtttgtagttctccttgaagaggtccttcacgtcccttgtaagctgtattcctaggtgttttattctctttgtagcaactgtgaatgggagttcactcatgatttggctctctgcttgtctattatttgtgtataggaatgcttgtgatttttgcacattgattttgtatcctgagactttgatgaagttgcttatcagcttaaggagattttggggctgaggcgatggggttttctaaatacacaatcatgttgtctgcaaacagagacaatttgacttcctctcttccta

SEQ ID NO: 6716 - DNA, 274 bp, Homo sapiens
gggcgcagtggctcaggcctgtaatcttagcactttgggaggccgaggcgggcggatcacgaggtcaggagatcaagaccatcctggctaacatggtgaaaccccgtctctactaaaaaatacaaaaaaattagccgggcatggtggtgggcgcctgtagtcccagctacttgggaggctgaggcaggagaatggtgtgaacctgcgaggcggagcttgcagtgagccgagatcgtgccactcactgcaccccagcctgggcgacagagcgaga

SEQ ID NO: 6717 - DNA, 195 bp, Homo sapiens
gggcgcagtggctcaggcctgtaatcttagcactttgggaggccgaggcgggcggatcacgaggtcaggagatcaagaccatcctggctaacatggtgaaaccccgtctctactaaaaaatacaaaaaaattagccgggcatggtggtgggcgcctgtagtcccagctacttgggaggctgaggcaggagaatgg

SEQ ID NO: 6718 - DNA, 320 bp, Homo sapiens
tatgaatgtaaaatgtggaaagctatttatgctttcctttaacccttattttattttttcctgttgtgtttgggttaaatgtaaattgtattcatttgttgattttaatatgtgtgacccacacagaaataattttatttattgaacctcctgtgggaagatgcttaatagtttataaatataaaattgtccccaacactaccagatgatgctaaaagatttatagtttatccatgatgttcagttttgttttttccattaagttatcatggttcaaattatccattaccaaaaacgtcatgagaaagatgcatgagatc

SEQ ID NO: 6719 - DNA, 145 bp, Homo sapiens
cccattgactagttatgtaaaaaatctcacccctagatcacaaaagtttgactctgtaagagaagcaggtcattgtgcacaatgtcctcaggccactggaaaaaaagctcatatcctgatgcggtaatcttcctccacttaaaaa

SEQ ID NO: 6720 - DNA, 394 bp, Homo sapiens
ctgcatggaactgcttccaaggcatagatttgattattctaccatctctgattcaatggaagaatttcatctcataacttagaagcttgactttacctgtttacagcaatacttcacatttactataagatttatctcaaaagtctcatatctgcaatgtaagctatagttagataagccatttatcaaggatgattttacttttatttacttttacttatttttaatttattttaattaattaatttttagagatagggctttattccatctccaggctggggtgcagttgttggatcgtagttcaccatcacgtggaactcctgggctcaaaggatcctcccacctcagcctctctcccaagtagctaggactacagatgcatgccaccacc

SEQ ID NO: 6721 - DNA, 15054 bp, Homo sapiens
ttggcctttcttcatagtctgttcatttctaacagcctgactgtggagctcacacaggatttcctcccatacaaacaacagctccaactcagtttacagaatgtgagtttgcatgtggatttttctcaccggtctttccattccgattgaatttcagccctagcgaccttgattcttggaattctaggttactgcatcctagccaatttgttagaatatactggtgtggatcacaaatatttagtatatcagactgttcttgctcttccactttcacatctttcctgtttttgaggctgactgctgttcaaacccacccttccacacaccaacaccttcatctatgcaatatttattaagtattgctaatttgctgcatctctctcagatcaggacatagctataggcttatttgagcccaggccttaagctacttccctgctcagtcaaaacactctcactgtagactttattaccacaaacactcattttatcttctctttcttttctcagtacttattagtagagtcacataaattacttttaaaggttttctctaccttctttgtcatgctggttcttacagatgggcatgtaggcatagtgttcccatccttttcacatatattcctttacatgttcctttattcaacccacattaaacaaatgtttatggaaaaaatgaacataagctctgtgccaggcatgtgaaaggcactggacatgccatgaagatgcatgcaagtttttctgtcttgaaggaacatacagtttcttgtaggagacaaataaacagagataaattataatccattatgataagtgctataatagaatcaaggccaaaggtttttaaaaagttcagagcatttggctacctggtagagtcagagaaggcattactgagttggtgactttagaatgggtgttaaattgcatgaaatatatagatgtagttttagatgaaaaatgctggtaagttatagtgaaaaataagccccccttggttgtttaggaggattgggatttacagttgttgttattattttttctttctatatactctccttgcagaaaggaactaggggctctcacattctccagaatttcctgatttacaacatcttcctactacaaccaagttaatcccatgaatcttcctctatatattacttgatatgtacaaatgtaacaataagcctttgaatgtgtacatatgggtgacttatttacaggataaacatgagccaactagatgggcagcacagatcacctttctcactaacatcatgtcataattttaagactgggtactaaaaacttatctgtagtgattttcatacccacatttcaacacatgtcttaccattgtgttttagttgtgtagatttaaatagatttattctcatcattaggttttggtatttgtgagtatgaaaacatagctactgttggcccttctcccaagagagcaccctctcgtatattttatgttcttggccagaatttgattcagtatcaactaggctgtaactttgagacacaatttggaagttgctatgagaatgctacctttgggaaccttgtctgccatctcccttgttgtaaagcagggtatcagtcatgttcagaattctaagattgcttatttattagggccttatgtgattcgtattagtaaaaagcctcccagttgttattttatgagtatattgctcgttatatttttgtttcctatgcagtctttaggaccgttagactctataaacttgttttccattcactatgccattcaccatttctttttttgctttgtggttgcacatgctgtaagcagggaaaactttgtactgagtctctgaccaagaaatactttttcatgataatgatgatgataataatgattttcatgatgatgtcttgacagacaagaaatcatttctccagtacccgggaagagatggaagaacttaagaaaaggatgaaagaagctccccagacatgcaaacttccaggacagccaactattgaaggctatctctatacacaagagaaatgtgtgtggggacataggggtatccattgggtttcaataagccaggaactactgccacttgtcggctgtgaattttgggcacccttactgttcatagacccctgatagctaaaattcccttggaacgcaggcagggaatactgaaaacaaaaaaaaaaaaaggagaaactgagaggaagttaaagatttgtcttacaaaggctgtgtagtgataagacctaaggttttctctgagattcaaaatgggtattatttgttctttaatccttctgattattcttttggaaaaaagggaagtagaggaaaggaagtagaaaaataatatttcttatacttattatgtaccagacatggtgctaagttcatttaaaacactgcctcatttaatctttgcaaccaatttatacccatacacataaggccactaaggctcagagacgtcaccatttgaaagtcacccaactaacaagtgtcaggactaaaattaaattcaggtctatgaaatgccaaagcccatgatcctactatagtaccctatatcttcgtctgcattagggtcatatgtttgctcttttcttttctttttttaagacaggatcttgctctgttgtccaggttggagtgcaatggcaccatcatagctcactacagcctcatactcctgggctcaagcagccctcctacctcagcctcctgagtggctgcacctaaaggcacctaccactacacttggctaagttttgaattttttgtagagacaaggtctcactatgttgctcaggctcatggatgctcttatagcacttagtgaacatcatgattccagtgggaaagacagtatctgtttttcattggtgactaagtaaagtgggttaacttgtttagtcactgaatgttgcagagcattcaatctttcctaattcctcagtaacattatgcacacctgtatgtgtgatttgattttatttgccctttgaactatgacccaatactccccaaacctgttattcagtttttgcccagagttattatatctggggaataaacagaggacacacacccagaggctgccagtagcaaaaatcactgtaattcaaaaagcatgacactacggtagtgaaattatcacacttttctttgcatagagcagtttacttgtgatgattttcaaagatgtgttctcccacttgtcaggttcatctcttcaactgtgtgtcgcacaatttctcgatctcagtgctgttgacatttcaggctggataatttttagttctgggaagtggtcctgtgtattatagtatatttagaagcatccctggcctcctcactttgtgctcatagtaatctccaggtgtgacaacctaaaatgtctctaatgtattgccacatgtcccctgggaggccaaattacccctagttgagaaccactgctgtatgctgtgtgatccttctgtgcttcagtattctgatttgtcatatgggcataacattgctactcagttgaatgtatgcttaatgagcactgtttctgccagatactgtgcaatgcattggggacacccttgaaaaactgaatcaaccatgatttctttcaccaagaagtgtaaagtgatgggagagatagacaagtatatcaataattataatgaaatgtggtgataactgtatttggggcatatatctaaaggcttcacaaagaaagtgatatttgaactagaacttgaatgatgagtgggagtttgataggtaaagaaaaggaggaatggccgggcacagtggctcatgcctgtaatcccagcactttgggaggctgagacggcagatcactggaggtcaggagtttgagaccagcctggccaacatggtgaaaccccgtctctactaaaaatacaaaaattagctggatgtggtgatgcttgcctgtaatcctagctacttgggaggctgaggcaggggaatgacttgaacctgggaggtggagattttactcagccgagatggtgccattacactccagcctgggtgacagagtgagactctgtctcaaaaatgaataaaagaaagaaagaaagaatgaaagaaagaaaagaaaagaaagaaaggaaagaaaaaggaaagaaagaaaggaaagaaaggaaagaaagaaagagagagaaagaaagaaggaaaaggaggaagggaattccaggtatataccactgcatgagtaaaggcagggttgtggatagacatagttgatttgtagggcccttgtttgccaagaatagtcctgctttacccctgttgtcctgatgtaattattaataatactgcctcattcagtcttaaataagtcttggatttggactagaaattatatggctacctctttatgtgggaactaaaagtaattcattgagacaggaacatagaggtgaggtgccaaaagaaaaagctagaaaggtaagttttgatcatgttatcaagggcattgtaggcaggctaaggagtgtggagatagtgggaaagccgtggatggtttttaatgaggggaatgataaaaatagagatatattttaaaaataatctaggaaaagagtggagaatgaattggagtggagtgatcagagatggggacaatagggaaatcagagaaggccaatgaaataattaattggtgagatagtaaatttttgttttttaaaaatatgtttcataaaatataaatacaaaataagacactgggcccagcgctgtggctcatgcctgtaatcccagcactttgggaggctgaggcatgcagatcacgaggtcaggagatcaagaccatcctggctaacatggtgaaaccccatctctactaaaaaaaatacaaaaagttagccgggcgtggtggtgggtgcctgtagtcccagctacttgggaggctgaggcaggagaatggtgtgaactggggaggtggagcttgcagtgagctgagattgcgccactgcactccagcctgggtgacagaacgagactctgtcaaaaaaaaaaaaaaaattaaaacaaaaacaacactgatagggttcttaactaattcggtgttaaaaaggaatggagaggaggagacagttaaaagagagatgtgtagagtcatgtacaggttagaaggggcataacccaatgaccaatgacatggaacagttatagagacagcaaagtaaatgacaatagtctccagcttctgggatatatggtgatacaatttatagggaacatggcagggagagtaggttttgagcaagccagaagcagctgtgggaagcagttggtgaaggttagaatctccctgtgtgcagtaggtaggtggctatggaaggagggcggtcagggcaagggcagggctggatctgaagtttggctctgaagagcaatgtgtaaatagcttccatcttagggttgacttcctatacagctaaaatagttattctgtctgctcacttttacttgtccttgtaggggctttaggaatatcctgggtgaaatactattgccagtatgagaaagagaccaaaacactgaccatgacgcctatggagcagaagccaggtgctaagcaggtcagttcttgtttgcaccatatttttggaaatggatctatgactgtttctcagaaaagaatatatgttgacctagtatcaaatcatcaagttcatcactgttacgtgaggccatgactttatatgtacaccttggcctaagtttgagtcagatagcactgagttgagtgaaaaatttctctgttgattagagcaagccttttgaaagtgccggtagtctttcaaaccagttatttttacaagtgccagtcacattgtacagtcaactatgtaaaaatatggatgaattacttttaagaatgctctactcttggattctttaaaatagcaagttttaaaaatatgaattgaattccaaaattccttttttacaggagtgtgtttatggcccacagttggaataaccgatactcacattctatgtactactcaaatatctttaagcagttaatctctctttttctgccctccaaaccttctcttcacatcactgaaacactgacacagactaaactttaaccaccacttgaaacaaaactacgtttacattaaccttgagaaagacaccctgaatcctttatacgaaaacaacaacaacaacacaacagcacaacaacacaacaacacactcacacacactcacacacacagatacacacatgggggttccttaagataaaagctgatctttagacagattgtttatattctaaaagtagttcaatgtgcctctttcccctttaactggctctcagacagggtcttagtgcatgatttttaagcatttgcactctttacaaattgtttgttggaagtgcttcaagggttatttgttagcactgaaagtagtacatgaagacccaatttaggtagggaggaatttggagaaaaattgggacagtttctctcccttgctgatccttttcatggaagatctctcttgtgtggcttgctcatgttgaattagagaggatggaaatgtgctttcaggctactgaaatttttttggagtgagagtggtcttttaaccacaagatttagctccctgctttaatgtgctttggtgatgggatggacttgtaaaagatgttgtatcaaacagagtttctggaatcctcggctatgctttattattattgttattattattattattatttgcgatggagcttcactcttgtcgcccaggctggagtgcaatggcacaatctcggctcacagcaacctccacctcccgggttcaagcgattctcctgcctcagcctcttgagcagctggtattacaggtgtgcaccaccacacccagctaatttttgtatttttagtagagatggagtttcaccatgttggctaggctgatctcgaattcccgacctcaggtgatcctcccgccttggcctcccaaattgctgggattacacgtgtgagccacggtgccagttactgtgcttttatcatgggccagttactcattcaaaaccctcctcagtttccagtccgccagttgccaaagcacctttcagtgtggttccaataaattcatcctgtgttttagcactgatttgttccaagtcagtcagaacttagctgattaatctgactaggaagtgcttataagcaacactggcctgcagtctctttcttttatttttctacacacattacttttcaaataccggagaggaaagctccttttgtaggcagtaatttcatttaggcactttctctgaggctgctcagaggtgcttattgcaaactccaagacagagtcagcagataccactttcatatcctcctgacagatgccagcaagccctccttttagtttttctttccctcttctcttttcattgagtagctgcttgcaaaactgcaatggtggtggcctgagcatttttgatgtggtattccttatggaatggaaagaagaacttagttactcacaaggcagagggaggtggtgggggttacttggatttccccaaattggagttggaagtgatttcttcctgtcagttctctgtttcacttcttaatactagtttgtattttacaattataaattttacaaataaatgataccataataataagaacactacaaaagccactatttcttgaatacctgctgtgtgccggacactgagctagacccttctgtcatattcatgctcctcatttaccctcctagcagctatgtgaagtcagtgcccccaatttgtgtaggaagtgagaccaagttgaagatgcaggaattggccatctttctgactatggcacttactatagcgttggtcccactactttagcctgtcagctctcatctgtgttttcatggtcaattttctgatcatcttctcaaatgataatttattagatcttcatcccttccctgttaggaatttgtggtcagaagaaggagtactgcattctgaatcttcagacctgtgtttaaattttagctctgtgatctggtagcttttgaccttgagtaaattgcctaatgttactcagtcttagtttcctcatcagaaaagtggtaaggatgataaagtagttcataaacattcattgagcactaagtatttgcaagatactggaggtataaagatgaataaaacactgttcatgtctttgaagacttcctagtcaagtggtgaaattaaacataaaaacaggacattttaatattacgtgcaaagcacatagtgggcaatgtgttggtttgaagaaggatttttgaggaagtggaagctgaactgcagtttgtagaataagtaagagtttagtcaggcaaagcagatagacaaggtcattttgggtggagcgattaatataggcaaagtcatgcaatcatgaaatagcatgatatgtatgtgaaataagagtacttttgcattgtaggggcattaaacaggtgagcagtcactggagatgagattggaatggtgggcagggcctaggtccctgagctgcaatgtcattgaagctgaggacattgagaatttaaagagatagagtgagtctgtgactttgctcataactctcattttgaaagactaatgtgtgacatcccacatttaggggtaggaaggcatactgaaggattaatttagagttgagttgttacagtgcaggagcaaggaaagattggcctgcaagtggctgagtatgctgatgagcaagaagtattgggtaatgagccacgtgggccagtttgtatgtcatagtatctaggcacctgggcagtgttacctaacttgagataccacagtgggttttgttattcccatttaatagattgtgaagttaagacttagagatggaatatgatttatttatttatttatttttgagacagaatctcactttgtcacccaggctggagtgcagtggcacgatcttggcgcactgcagcctctgcctcccggtttcaagcgattctcctgcctcagcctcccaagtagctgggattacaggcgcccaccactgtgcctaatttttgtatttttagtagagacggggttttgccatgttgaccaggctggtctccaactcctgacctcaggtgatccacctgccttggcctcccaaagtgctgggattacaggcatgacctgctgtgttttggccagggtcacatagctggtaaatggcataactgagacaagaccctaggtcttaaactttctagtgtgttgctatttccactataccaatttggatgactttgggtatgctgctttacttctttaagtgtcacttctctataatggttgttaacaataaaagtggcttaaaaatacctagcataggctggacacagtggctcacgcctgtaatcccagcactttgggaggctgaggtgggtgggtcacgaggtcaggagttcgagaccaccctgaccaacatggtgaaatcccgtctctactaaaaatacaaaaattagccgggcatggtgcgcacctgtaatcccagctactcaggaggctgaggcaggagaatcgcttgaacccgggaggcggaggttgcagtgagctgatatcgcactactgtattctagtctgagtgacagagcaagactacgtctcaaaaaaaaaaaaatgtagcgtaatatatggcacatagtaagtgataaatgttacttctctttcctgtatcacatggtctctgttgagataagagagggaatctgaacaaggtgagactagaattttagtctgtggacacagtgggttttaattcccttaattacctacaggactaaagtgggccacactgtccttgctgcacatatgaaatatcaaatgctaccatgactaatacacacatttgctatttcctctacttttgcgctacctttggagcgattacatttgtgatttctgtcatcctaaagagtctagagttgggagacagaaatgtttttctccctccttcatctgccactttaatggaagcttctttgctcagctaccctctgactttctaagggaggttttagacagccacttaccccgtcacaatttccctccccagaggcctcatgaaaattttattctgtacacttaatgccattcagtcagcccatttctcctacactccccttacatgatatgtattgagcttcctattaagtcttccgtcttgggaaagagtgctggatgactctgaacaatttctcctggtctcagccattgattcttggagcggggagaaaccatctgccatcttgctgcaaatactgtttgaagggacaagattctcagtgagtctacacattgctcctgctgccttgaccagacgccttccaagtgacactgaagacactgtaggaagcagaaacagcttctgtgtctttttttaaaaattgcctgttaattcttgtttcatatcaggggcccttggacttaacactgaagtactgtgtgagaaggaagacggagtctatcgacaagaggttctgttttgacatagaaactaatgaaaggtaagctgtgccgctgtgaattggcaatgtccccacgtgccagatgcttagcctgggtaggtcttttattttcctccgtcatcccacgttgatgacaatgagtaagtctattcaggactttgttgtgagtctattcaagccagctcttctggctgcccttcccagggatccctgctagacctggcccagtgctgcttttctctgtgcaagcttctatcagctttgcctcacttgctctgggaagaaaaagtctctcctgggatttaatttgctatcagatgtgcaaaaggtcaacatttggtgatcttgcaagaaggaaaggataacaaagctcattctttgttaaatctcctaatatcacataaaagaacaaatgaattggcacacatttttgagggagggaagatggggtggagggtcgtggtgttattagaaagtcatttccccccatttggtgcaaaaatgatgcagaccttccctactttacagatactcaatgaactggaaatagtgtgattatcacctttcagatcttacagctaaggcttgcacattttggacttcgttgtgtttgtttctccccagtgccctctttttttacttgaacctgagcagttttatcagaggagaattttaaccattaaaatttcaaatgaatgcatttggcattattgtggagaaagacatgctttatagttgggtggttgtaccaaaataaacagaataaatctgtttctagattttatctcaaccttttatttctagatgttagatacttagtaatagaatagaattttgcaaaatgatcagattgctagaaaggaacttgaagggtgaattacaatatcatgtgaacaaaactagcagtgactgggatcataacaatcagactaaatgatgagggcatttttaaaaaaattggggaataaaggacttagcttgtttccttatttcaaaattgagagattattatttgaccctcacaatttcgatttgtgaatttatatcatttctttgttaaaaatggatgatcccaattgaggtggctctgaaagtacgtattgttgccagtaaccatgagactgtcactcattttcctgatagcctcagttccagtaggaaggggaaaattattgttggctgtggcttcccttttttgcaaataatatccccaactcaagcagttgcaaacagtttgtccccgtggttaggggctaggatgaatttatgtttcttgtacctggtgctatgcatggctcatgataagtactaaatttgatgtttatttttaagtgtttttttcttatcctagaatgctgaagaattttcgacactagaacccagggattaaagttttgatgcatctacacttttagttatcatatactgtgcactttacaaaacattccctcatttaatctacaccccccccattttaccagtgaggaaactgagacccacatatatttaactgacttgcccaactaaagtcacataggaaatggtgaggctgagctcaaaccctggtctgtaggtctccaaagcccatgctggtttctttttgtttgttttgagatggtgtctctctctcttgcccaggctggagtgcagtgttgcacaacctctacctcctgggctcaaacgagtctcctgcctcagcctcctgagtagctgggactacaggcgtgtgccaccatgtccagctaatttttgtatttttaatagaaatggggtttcaccatgttggccaggcttgacttgaactcctggcctcaagacatccacctgcctcggcctcccagagtgctgggattataggcgtgagccactatgcctggctccatgctgtttttaattttttatattgtctattataagcagaagaaacaagctgcaaagtagagcgttaaatataataatgaacaggtgctgaggcccctctctgcatgtggagtcttttgagtgacatgacatctgcttttctggctagtcagtctgatataaggaacagagtcaggcttcctagcaggcatcaggcagctgtactcacattccctggagcacagagcaaagggctcttggagccactttttctatgtcaggaagagaggataagattttttatttttttaacttttaattttttagagagagggtcttactctgttgcccaggttggtttgcagtggcacaggttcaagtgatcctcttgcgtgagcctcctgagtagctgggactgacaggtgtgcaccaccatatctggctaattttttattttttatagctatgggaccttgctatgttgcccaggctggtcttcaactcctggcttgcagtgattctcctgtgccagcctcccaaagtgctcatattacaggtgtgagtcactgcacctggttctaaatttaggctcttagcagtatttaaaatgacaggctcatagcaaggcagagcttgaaatgttttaataacagcaacaacaataattgtaataataataaaaacaattgctaacatttgccaagtacctcctttgtgacaggcactgttatcagccatttaagcgtataatttcctttagtcgtcaccacagtcacatgagggaggtgatgttatttgaattttggtttgtgaatctgtatcatttttgtgttaacaatggatgaccccattcaagatggctgtggaagtatatattgttgccagtaaccacaagactgtcattaagaggtgctttaatgaagtaagagaaggtaggacaggaaccccatgattccagcaggtagaacaggattcctgtgatatcagtaatggaaaggacctcccagctcctgtgttccagaaccctttcagataaagaaactgaggtctagaaaggcctagttacttatccagggtggctgaactctcttggcattgcttttatcattctatgactctaggagaggtctcatcttatcacagaatttgtggaaggaacaatgttttcctaatggctcagcaagccaggagaatgcaaggagactttataccttgcataaagtatggttaatctcaaaattccagatgagtcacaaagatctaaaaagaccataaagagcataacagcttgggatatctctgggtagttagtagtgtcttagtccatttgtgatgttatgacaaaatacctgagactcagtaatgtataaacaacagaaattcatttgtcacatttctagaagctggaagtccaagcagtttcagtgtctggtgagggcctggtctctgtttccaagatggcatcttgttgcagtgccctccagagagcaccaacaccgtgtcctcatatgtcagaagagatggaagggaatgaacctactctttcaagtttttgtaaaagggccctaatcccattcatgaggttctacccttatgactaactcacctcctaaaggtcccatttcttaatatcatcacattggtagttaactttcaacctatgaattttggggaatattcagaccacagcaggtagcctgcaaataaatagaataaaacagggttcgaagccgtgtgccaggcagaagaggccttatattgtagtaatgaagaatatggctgctggaccagactttctggatttaattcctgtctctagtagttccctgctatatgaccttggataattactctgtgcctcagtttccccttctgtgaaatagagatgattactgtaactgccttattatatatattaactgagttaatatacatagtttacttggaacaaaatttgtcacctagtaagcattcagtaaatattagttgtttttattagtcataaaattgcttattagccaaaacgcctcctccctgtgtcttagccagtactcatgttgttgaatttattgcaactcaaaatgtttcttggacatcgcaggtgctggaagaagcaaagccattttactgagagataatgtgcctctgatgttcatgctcattcctagagctcagacaaagtggctggcttccaacagagtaaggcagtgagagcctttgtttggttcaagcacaatggggccaatttaagtgtgcattatggaggcgtcttgacagttaccttcctatttcttgcaggatctgggcacaaggccaccaagataccacccccgcctccatggttcccaaagttactgttctgtaaattgcctattgttttcttgagtaaaagagattttgaaaaattagtattctgtaagcctatgcttgttcagtgtgacaaactccagggcagagagggaccctagatcacaagactccattctctcagttgaattttctgctttatacttaccatttttttccccctcaggccaggaaccatcactctgcaggccctttcagaagctaacagaaggctatggatggaagccatggatgggaaa

SEQ ID NO: 6722 - DNA, 101 bp, Homo sapiens
aggctagagtgcagtgatgcaatcttggctcactgcaacctccgcctcccgggttcaagccattctcctgcctcagcctcccaagtagctgggattacagg

SEQ ID NO: 6723 - DNA, 296 bp, Homo sapiens
gaacatatactcagtgaaatcacattatgagacaagagcggaagactttgttcttcatttcacattttctaaatgagctactttgcaaactgatcactagaaccatatacattaacaggatttcttgacaggaatttattcaaattctagtaagaagcaaaagggaggtatcgtgcacatttaactggttgtctactgttgagttcaaacataaccatggtcaaattattcagatgttagaaattcagcaagcttcttggtacctaagattaagaaatcaagcatcagcagaaatt

SEQ ID NO: 6724 - DNA, 296 bp, Homo sapiens; identical to SEQ ID NO: 6723

SEQ ID NO: 6725 - DNA, 367 bp, Homo sapiens
gggattagaacccagatccccagcccaagttcaaacttgtcccctctccaggttacaactccaaaaaatggggctgtgacccagaaaactctgtgccagcaatctctgtctgtccccttcttcactctcacctagtttccacggggctcaggtgtctcctgttggccaacaggctggcctggcactcagccacctaggaccccatgtatcctggcattctaggcctggggtgatgcagacagatttcctcagcctccgcttcttctgccttgaaacactcagtccctcctgtgatccccgggacctggcttgggctgcgtgtgtgcgtgcctgtgtgtgtactcacacatgggcctggtagggaggc

SEQ ID NO: 6726 - DNA, 434 bp, Homo sapiens
tttaaaactagtctaggaaacactttaatttctgtgagcaaaactgtatcttatctctgccttagttaaagatacaaattgtactttttaatatttatttgttaaattctctattaccaaggtgtatcggagatctacatgaatctctcaataaataattggtacattttatttatatgcataaaaattaggagtctcctccatccccagcatcatattccatacccacaaaacaatggtgaataagtcataatccccatttaacaattttctctatgtattgattcctgctatgtgcatgatactgaggggagcacttcatagaagacaataaggcttttgagcaccttctgtcttctgggtccagttgttatttcatttcacattattccataataacctgcaagaaggttgttattattatattatgtgtg

SEQ ID NO: 6727 - DNA, 434 bp, Homo sapiens; identical to SEQ ID NO: 6726

SEQ ID NO: 6728 - DNA, 2464 bp, Homo sapiens
agccgccctcggcgtcctctgtagcgggcgacctaggccgcgggacccggacggaggtagaggccagggcagcgcgtccgggagcggagtccgcgcccgccgccgccatgccggacagctgggacaaggatgtgtaccctgagcccccgcgccgcacgccggtgcagcccaatcccatcgtctacatgatgaaagcgttcgacctcatcgtggaccgacccgtgaccctcgtgagaggtacgaagccccagcccggggctccctcgccggcctctggggacccctggatcccacaccctgcctggatcctccaatgcctccggggtcccgtctgcctgagaccgccccccgctgcaccccggggacaactccccacccccggagacctccgagctccgtcgcctcctttggcctcccactgcaccccggacctcacctcccaggatcccttactctcccctgcaccccgggatgccccgcttcttcccaggactcttccctccctgccgcacccagcgcccactgccccaggaccccgcactgctctccgccccccgccgccccgggcacccctccactgcaccgctggcctcaggcctctctcaaatgtctctctgccagatgaccaagtgtcggggtgatggccgagatgcccaaattcaccatctctggaacgaaccgggaaaatgcccagttcagtttttgttgtttttttttttcctgagacagtctcactctgttgcccaggctggaatgcagtggcgcgatctcggctcactgcaacctctgccccaccccgggttcaagcgattctcctgcctcagcctccccagtactaggattacaggcgcaccaccaccacgcccagctaatttttatatttttagtagacacggggtttcaccatgttggccaggctggtctcgaactcctgacctcaggtgatcctcccaccttggcccccaggtgctgggattacaggcctgagccaccgtgtccagcctggttcagttctttttgaacacttggggtgcatagcatgctctggtggttcttccgtaagagggtgaagtctccaaatcaaacccccaaagatctggaaaccgtgcaacagcggacccagctccctctcttttgtagcagttgtagagcatgtctgtcctatgtgtctggatgttcgagctctccttttagctcgttcatttcccagtgaggaagctgaggccgtaaggtggtaagttctgcttgctggaggctccctgttggagcctctttgcgcacccagcagggtccctgtgcagctgggggaggtgcactggcagagctgcgtcccagtccttgccatctgtgagaagcagctgcctgtaggcttgtgtgggggacagagtaaggtaatgcatgtggaactctgaggatgatgcctggtactcgggagctctccatcagctgtagcctaggccttcacaggcctgcctggctggccacatcccttagagagacgaattgctgttttctaaacgctggaacactcaggaagttctcctctctcccctccaaagggcttatgagaaataagaaagctaaaagcctgtccaaaccgatgaggcatttgagtctgtggctttgtctttgcagaatttatagagcggcagcacgcaaagaacaggtattactactaccaccggcagtaccgccgcgtgccagacatcactgagtgcaaggaggaggacatcatgtgcatgtatgaagccgaaatgcagtggaagagggactagtacgtgagccatgctgggagtgtggagatctgcaccgtgtgctgctgggacactagtccctgggatgccacagggtggcatgcccagattttaggggtgacatgggaggagccagaccccagggctcttgctttcaattgttctcacagggtacaggaaaaggattccttgtgattagcctctcttgctccttttctccaccagcaaagtcgaccaagaaattatcaacattatgcaggatcggctcaaagcctgtcagcagagggaaggacagaactaccagcagaactgtatcaaggaagtggagcagttcacccaggtggccaaggcctaccaggaccgctgtgcgtgccccacccacccccaaccccccaccatcctcctgaggcctgggggccagaaccattgcaaatcttccctcccctcccttgtgctcacttgactttgccccctttgcatgtagcagaggcctcggttcccagcttgtttccattgcttccccagatcaggacctgggggcctacagttctgccaggaagtgcctggccaaacagaggcagaggatgctgcaagagagaaaagctgcaaaagaggccgccgctgccacctcctgaggcagctgtgggtgcccctgctgtgtggctctgtatgactgttgctgaaatataaagccctgcaacctgcctgtg

SEQ ID NO: 6729 - DNA, 2464 bp, Homo sapiens
agccgccctcggcgtcctctgtagcgggcgacctaggccgcgggacccggacggaggtagaggccagggcagcgcgtccgggagcggagtccgcgcccgccgccgccatgccggacagctgggacaaggatgtgtaccctgagcccccgcgccgcacgccggtgcagcccaatcccatcgtctacatgatgaaagcgttcgacctcatcgtggaccgacccgtgaccctcgtgagaggtacgaagccccagcccggggctccctcgccggcctctggggacccctggatcccacaccctgcctggatcctccaatgcctccggggtcccgtctgcctgagaccgccccccgctgcaccccggggacaactccccacccccggagacctccgagctccgtcgcctcctttggcctcccactgcaccccggacctcacctcccaggatcccttactctcccctgcaccccgggatgccccgcttcttcccaggactcttccctccctgccgcacccagcgcccactgccccaggaccccgcactgctctccgccccccgccgccccgggcacccctccactgcaccgctggcctcaggcctctctcaaatgtctctctgccggatgaccaagtgtcggggtgatggccgagatgcccaaattcagcatctctggaacgaaccgggaaaatgcccagttcagtttttgttgtttttttttttcctgagacagtctcactctgttgcccaggctggagtgcagtggcgcgatctcggctcactgcaacctctgccccaccccgggttcaagcgattctcctgcctcagcctccccagtactaggattacaggcgcaccaccaccacgcccagctaatttttatatttttagtagacacggggtttcaccatgttggccaggctggtctcgaactcctgacctcaggtgatcctcccaccttggcccccaggtgctgggattacaggcctgagccaccgtgtccagcctggttcagttctttttgaacacttggggtgcatagcatgctctggtggttcttccgtaagagggtgaagtctccaaatcaaacccccaaagatctggaaaccgtgcaacagcggacccagctccctctcttttgtagcagttgtagagcatgtctgtcctatgtgtctggatgttcgagctctccttttagctcgttcatttcccagtgaggaagctgaggccgtaaggtggtaagttctgcttgctggaggctccctgttggagcctctttgcgcacccagcagggtccctgtgcagctgggggaggtgcactggcagagctgcgtcccagtccttgccatctgtgagaagcagctgcctgtaggcttgtgtgggggacagagtaaggtaatgcatgtggaactctgaggatgatgcctggtactcgggagctctccatcagctgtagcctaggccttcacaggcctgcctggctggccacatcccttagagagacgaattgctgttttctaaacgctggaacactcaggaagttctcctctctcccctccaaagggcttatgagaaataagaaagctaaaagcctgtccaaaccgatgaggcatttgagtctgtggctttgtctttgcagaatttatagagcggcagcacgcaaagaacaggtattactactaccaccggcagtaccgccgcgtgccagacatcactgagtgcaaggaggaggacatcatgtgcatgtatgaagccgaaatgcagtggaagagggactagtacgtgagccatgctgggagtgtggagatctgcaccgtgtgctgctgggacactagtccctgggatgccacagggtggcatgcccagattttaggggtgacatgggaggagccagaccccagggctcttgctttcaattgttctcacagggtacaggaaaaggattccttgtgattagcctctcttgctccttttctccaccagcaaagtcgaccaagaaattatcaacattatgcaggatcggctcaaagcctgtcagcagagggaaggacagaactaccagcagaactgtatcaaggaagtggagcagttcacccaggtggccaaggcctaccaggaccgctgtgcgtgccccacccacccccaaccccccaccatcctcctgaggcctgggggccagaaccattgcaaatcttccctcccctcccttgtgctcacttgactttgccccctttgcatgtagcagaggcctcggttcccagcttgtttccattgcttccccagatcaggacctgggggcctacagttctgccaggaagtgcctggccaaacagaggcagaggatgctgcaagagagaaaagctgcaaaagaggccgccgctgccacctcctgaggcagctgtgggtgcccctgctgtgtggctctgtatgactgttgctgaaatataaagccctgcaacctgcctgtg

SEQ ID NO: 6730 - DNA, 517 bp, Homo sapiens
gagcagcagcaagacttactggaaagagagaaagaacaaagcttccacactgtggaaggggacctgagtgagttaccactgctggctcccgcagcctgcttttattctcttatctggccccacccacatcctgctgattggtagagtccagtggtctgttttgacagggcgctgattggtgcgtttacaatccctgagctagacacaaagcttctccacatcctcaccagattagctagatacagagtgtccacacaaaggttctccaagtccccaccagagtagctagatacaaagtgtcgattggtgcattcacaaaccctgagctagacacagagtgctgattggtgtgtttacaaaccttgtgctagatacagagtgccgattggtgtatttacaatccctgagctagacataaaggttctccacgtctccaccagactcaggagcccagctggcttcacccggtggatcccgcacgggggctgcaggtggagctgcctgccagtcccgcgcc

SEQ ID NO: 6731 - DNA, 2776 bp, Homo sapiens
cacgggaaaaaaacagtaacacgcttaattcactttatttttcttgtataaaaaccctatgttgtagccacagctggagcctgagtccgctgcacggagactctggtgtgggtcttgacgaggtggtcagtgaactcctgatagggagacttggtgaatacagtctccttccagaggtcgggggtcaggtagctgtaggtcttagaaatggcatcaaaggtggccttggctgcaaaacaaaagaaccccaggagggtcagtggtgtgcttgaggcaagtcccccaacccaaaaattgtcgcactcctaggaacagagaggccattctgggcgggtctgtcgtgcattaggagagcctttctctgcctccctgaaaacacgccaagcacacactggacccgtgtggttaagcggagctgagagaccatggctatgccccatgtgtggaccacctaccgaagttgcccagggtggcagtgcagccccgggctgaggtgtagcagtcatcgataccagccatcatgagcagcttcttaggcacaggtgcggagacgatgccagtgcccctgggtgcagggatgaggcgtaccagcacagagccgcagcggcctgtcacctggtgagggaaggagtcaggagacgggggcccgagggagcctgccccacggcaggcccatcacctgccaccagcctaccttgcaagggacagtgtggggcttgccgatcttgttcccccagtagcctctgcgcacggggacgatggagagcttggccaggatgatggccccacggatggcggtggccacctccttggagcacttaacacccagaccgacgtggccattgtagtccccgatagcaacaaatgcctgcgaaaagatgtgtgtgaggcagctggtggccctacacccaatcactgcccaccgcccagggcctgttgcacccctcaaggaaagagaggccacagtaaggcccatccgaggtcctgaggagatcttttctctctctccccgttacgaaagtcacacgggtgaagccaagtgcaactatgcagagccgagagagtcccggcaagcccagcgcagccccctccaggacagccgggtaccttgaacctggtgcgctggccggcacgggtctgcttctgcactggcataatcttcaaaacctcatccttgagagaggcccccaggaagaaatcaatgatctctgattcctgaaacaaacaagaaaattgtagggagagcattaaaaaaaaacttaataccattatgatattcaagaaccaaagtcacggccgggggcggtggctcaagcctgtaatcccagcactttgggagactgaggtgggcggatcacaaggtcaggagtccgataccagcctggccacatggtgaaaccccacctctattaaagacacaaaaaattagccgggcatggtggagtgcgcctgtaaccccagctattcaggaggctgaggcaggagaatcgcttgaacctgggaggtggaggttgcagtgagccgagatcacgccagcctaggcgatagggcgaaactgtgtaaccgcccaccccgcccaaaaaaaaccgaagaagtcatgaaccccctcacctggcttccccccgatctgtccccttcgtttcgtttttggaagcttgtatgtaaggttaccctatttctgcatctcaatcgtttcttcctatttgccctttttctcttgtttggtgagatgtggctttccactcagatttccttttgctttgtccagctttggcctagccatgaccaccgtaccttgctagggcgaacgctcacatgacaaatatgccattagcctttccccactgcacccgctggatgcagatgacagctgtcccgtacacgcggactatgacagtttgctaacccttacagtgtcctcccacaacctgaacttcatcatcctctcggatggcatgaaccaagcgctgcttctctttcagttctttggaaatgaattcgctgcgaatgtgggaagatgcgctgaaatgccttttgtggctctggcttcgctcaggtatccatccaacctctaagtggaatcctctcctcagccagcccgcaacacaacctcaacctctcacgcgagacgctgggccctttaatgcgagtcaatggcagatgctaatcctccaaccccagcccaaatgactccggggtcgcacttgctcaacgccccaacgaccgacgcgtaccttaataggcagggagaagagatagatctcctccagggacttgatcttcatgtccttgaccaagcggcccaacttggtgacgggcatccactaaagggagaaaaggcgccagtgaccaggaccgctctccggcgccgcccaggggccggaccccgagcgtggctgatacctacctccttatcctcggccttgcctccgcgagctccgcggcctcggccccggccccgtccacggccgcgaccccggccccggatgccactgccgaaacctccgcggaagccaccgcggttccccatcccagggccaccagggcccccgggcccccccgctgcaccggcgtcatccgccatttgctgggaaaagcgacaagaaggaactagtcagtgtggcctacgcatctggcagccccccgcgagacccagacaagggctcccgcccaggagcgcggactcgggagcctagacccgacccgatgtccgcggattcccgccgcccacgcagaggcccgctgcagcgaccaacaggactcacgtgttttgtcg

SEQ ID NO: 6732 - DNA, 517 bp, Homo sapiens; identical to SEQ ID NO: 6730

SEQ ID NO: 6733 - DNA, 2776 bp, Homo sapiens
cacgggaaaaaaacagtaacacgcttaattcactttatttttcttgtataaaaaccctatgttgtagccacagctggagcctgagtccgctgcacggagactctggtgtgggtcttgacgaggtggtcagtgaactcctgatagggagacttggtgaatacagtctccttccagaggtcgggggtcaggtagctgtaggtcttagaaatggcatcaaaggtggccttggctgcaaaacaaaagaaccccaggagggtcagtggtgtgcttgaggcaagtcccccaacccaaaaattgtcgcactcctaggaacagagaggccattctgggcgggtctgtcgtgcattaggagagcctttctctgcctccctgaaaacacgccaagcacacactggacccgtgtggttaagcggagctgagagaccatggctatgccccatgtgtggaccacctaccgaagttgcccagggtggcagtgcagccccgggctgaggtgtagcagtcatcgataccagccatcatgagcagcttcttaggcacaggtgcggagacgatgccagtgcccctgggtgcagggatgaggcgtaccagcacagagccgcagcggcctgtcacctggtgagggaaggagtcaggagacgggggcccgagggagcctgccccacggcaggcccatcacctgccaccagcctaccttgcaagggacagtgtggggcttgccgatcttgttcccccagtagcctctgcgcacggggacgatggagagcttggccaggatgatggccccacggatggcggtggccacctccttggagcacttaacacccagaccgacgtggccattgtagtccccgatagcaacaaatgcctgcgaaaagatgtgtgtgaggcagctggtggccctacacccaatcactgcccaccgcccagggcctgttgcacccctcaaggaaagagaggccacagtaaggcccatccgaggtcctgaggagatcttttctctctctccccgttacgaaagtcacacgggtgaagccaagtgcaactatgcagagccgagagagtcccggcaagcccagcgcagccccctccaggacagccgggtaccttgaacctggtgcgctggccggcacgggtctgcttctgcactggcataatcttcaaaacctcatccttgagagaggcccccaggaagaaatcaatgatctctgattcctgaaacaaacaagaaaattgtagggagagcattaaaaaaaaacttaataccattatgatattcaagaaccaaagtcacggccgggggcggtggctcaagcctgtaatcccagcactttgggagactgaggtgggcggatcacaaggtcaggagtccgataccagcctggccacatggtgaaaccccacctctattaaagacacaaaaaattagccgggcatggtggagtgcgcctgtaaccccagctattcaggaggctgaggcaggagaatcgcttgaacctgggaggtggaggttgcagtgagccgagatcacgccagcctaggcgatagggcgaaactgtgtaaccgcccaccccgcccaaaaaaaaccgaagaagtcatgaaccccctcacctggcttccccccgatctgtccccttcgtttcgtttttggaagcttgtatgtaaggttaccctatttctgcatctcaatcgtttcttcctatttgccctttttctcttgtttggtgagatgtggctttccactcagatttccttttgctttgtccagctttggcctagccatgaccaccgtaccttgctagggcgaacgctcacatgacaaatatgccattagcctttccccactgcacccgctggatgcagatgacagctgtcccgtacacgcggactatgacagtttgctaacccttacagtgtcctcccacaacctgaacttcatcatcctctcggatggcatgaaccaagcgctgcttctctttcagttctttcgaaatgaattcgctgcgaatgtgggaagatgcgctgaaatgccttttgtggctctggcttcgctcaggtatccatccaacctctaagtggaatcctctcctcagccagcccgcaacacaacctcaacctctcacgcgagacgctgggccctttaatgcgagtcaatggcagatgctaatcctccaaccccagcccaaatgactccggggtcgcacttgctcaacgccccaacgaccgacgcgtaccttaataggcagggagaagagatagatctcctccagggacttgatcttcatgtccttgaccaagcggcccaacttggtgacgggcatccactaaagggagaaaaggcgccagtgaccaggaccgctctccggcgccgcccaggggcccgaccccgagcgtggctgatacctacctccttatcctcggccttgcctccgcgagctccgcggcctcggccccggccccgtccacggccgcgaccccggccccggatgccactgccgaaacctccgcggaagccaccgcggttccccatcccagggccaccagggcccccgggcccccccgctgcaccggcgtcatccgccatttgctgggaaaagcgacaagaaggaactagtcagtgtggcctacgcatctggcagccccccgcgagacccagacaagggctcccgcccaggagcgcggactcgggagcctagacccgacccgatgtccgcggattcccgccgcccacgcagaggcccgctgcagcgaccaacaggactcacgtgttttgtcg

SEQ ID NO: 6734 - DNA, 2395 bp, Homo sapiens
tctcagcctatttagaagtatcccatagtttaaaaatccaggaatctctgaattcctggctaactcctgagtaaaatcaacctatctaccaggaaaagcactagaaggcaccgtgccccttcatgggcgagtgacttgagggaatacgtgggtaaaagggaaggtgccataagttaacttctttggccagcactccagactgagcatcgagcctcctttattcccaccttctcttccaggcgcacgccgacactgggcggaagggaagaaaccagtggggatactgttcttttgcgggggcagcatgagcagactcaggtgggctctctgagactatcgcgttttgagtttccaggctgtggtactccctatccttccctacctcagaattctaagcataggccataattatgcaactgaattgaaaaatagaaacgtatagacaacagccagcactggatagtttttttaatggcttatcacaaaggttgagaatccctggttgagactgattaaatagagaatttacaatcttacataattttaaaccctttcatgcctaggaagaaaatgctggccttgagatagatagctcttcagaggatccagattaaactaaggtatgtaaaaaattagttttcgaagtcagctgcagtcatatgccacgttaggacgttttggccaacaaaggaccacatctgtgacagtgggcccataagattctaatactatatttttaccgtcctttttctatgtttagacatgcagatagcatggtgacagttgcctgcagtattcagtaccgtgctgtacagatgtgtagctaggagcagtaggttatggcacacagcctaggtgtgtagtgggtgccaccatctaggtctgtttaagtgtgctctgtgatgctcccacgacaaaatcgtccaacagcgcatttctcagaatgtacccctgtcgtcaactgatgcatggctgtaattttaagccagctgttcaaaaaagttctcaccaattagagaatttatattctcaccactttaacaaacggagttaagtaagaaacctctaaaatggttgctagaaattaaatattgtcaccgacctggtcaaaaccttttaagtaaaatgattagccaatcacagccttggcttacactggcatcagagtctggtgtgtgtcgcacacacgtgctgtaggtggaatgtttcatgacgaggactttctggaactcagaagccctttttgagtggggcccgggtagctgtaggatgggcagatctgaattcccagtacagtgtggcattttgaaaaagaaagaatgtataagaataaaagggtcagtcaagaagtaggagcaattattacccaactattcgaaggatgaccctttaaaaatcaataaaaacctatctggagtgaaagaccaacttaaatgagcaatagcatgaattacgtaatataaagacaagcgttcctgcttcaaagcacacgaaatattctgagtctgcctgcggagcttcagctgcagtcatctttttaccaagattgcacgtaagtccattttcttaggttaaatgctttttgtagtgttatttacactagtggtatgtgctaggaaccctttcttcgtttttctgagatttgacagaacatggaataacatatcaaactgaattcttagaacgtgagtaaatgaaactttccttttagaagcaatgtagaattacatgctccatattattcaaattaagaagcttttgaaataataccaccttgattatccatgatcattttctaattttaacattttgtacacatttacctcgttttctttcaaggcaacaggcgctgtagatcttagtaccctgcccatagacccaagcacttttctcatttcttctgacagttcgagtcacttctcacagttgacttcctcaccaaataataagggggtgaagaagactcggcctacctactactcagtaatcctgctgtccagtcgactggagaagagagatttgttcacctctactagttttatttgttcttagtagttgtagaatttaaattggttttaatgaaatgttccttttatgaaattttaaataaaagccatttagtgtatatttagtatagcaagaagcatgtgaataagctccatataacctgacattgcgcatcttacagcatcctcttggtcagatgtctaataaaaagattgttattttcaaatttatcatagttcctgcaacttgcactttttaaagctgtgtttgtgagaatttatagactgcatatcgctatacttgatggaaattaaactatttttattttgaaagaagttaatttatattttaagttctgtatgtttttctccttttacctgagttcttt

SEQ ID NO: 6735 - DNA, 2395 bp, Homo sapiens; identical to SEQ ID NO: 6734

SEQ ID NO: 6736 - DNA, 1776 bp, Homo sapiens
tacattttgctgacagataactaaccgatgatgaggccgaggtaaaagagacatctgcagtgtgacagaagggagcatgagaagcatggctcaccagccagcctctgtggtctttgtaattagaagcttcagaactcactaatactactgtacctttcattggcgcattaccccataaaactttttgagacgaggtgagatctgagtataaagataggtcagaagtattttaaagggcttaatgtgccaaaaagaaaaaaagctagagaccctttttgcaaacatttggtgaccacacatttgagggaagacgtggcgttaggtgaagcagaagcaaaccctgctcttaggggctcacctaggtgagtgcacagcctgtgacgctacagggagaggctgagtaaaccgagatccagcgttctgtatggcaggggtattgcttatcacagaggttctgaagagtaggaagtacataatgaagagggctttaaaaattgccaacaaagtgagtcaccagggctggcagtagtgtgacggggctgtcctgagctgttaggagagtagatgcggggagggctggtgacctccgtgggtttatatgtcggaaactcttctctccaaatcccaggcctggcttccagcaccatccagctgtgcccaagaagccaccctggtctgttctccaactcttttaaatggtgcccaacttttctaagtgagcttagcaatgagaagaaaaaaaaacatgaattctttttctggaaaatcagggagacatgggtaataataggtactaataaatatttatagatgagtgaatgaggaaataattacatcaaaaaggtcagtgacaattgataaatgacaaggaaatatttaattaggtaaaactaaatcattgctctctatactaggatagactttatctacttcatctgttcctaagtcagcatgttagttctggggaaggatcataagaaaggaaatactttttaaaaaaaaatttggaaacatgtaacaaagcaagggtaaaatatatatatatatctatataagtgctgtgactgtaaaagtgtactttccattaattattagccgagttaagagaatggtcacattgaagtactgtgtggactagaaatgtaccctgtcatcatgcaatgaaatattgttatcgttttaacatagctcatttatgtagaatgaattctggtggtttaccccaagtcacagttaggacggtagatggtgagatcgcagatgcgctattatctagattcagtgttacattttcgatgtttatcactcagtgggtttttattaatatgctgattaagttatttactgggccagtcattgtgctaaatagttgctcttttgtgtttcattgccttgatgtttgagtgtaatctagcattttaatacagtgtttattttgcatgatctttaacaaatgttttaagcaattttaaaaaggcaggatgttattgacattatacactgaagtcttaacattttaacatttatagtgcttatttgcaaaattgtataattaggaattatttcagagacaatgttttctttttcaggtgagtagttgccgcgtaatatcattggagtacattctttatactgtttgtgaaattaatactagcatattaagtgtacaaatagatttagaaaacaataaaaaattgcatgctattctgactcatgaatttttattcactatgatgattcacattttgattaaaaataaaagtagtttgtgtgttt

SEQ ID NO: 6737 - DNA, 8143 bp, Homo sapiens
ggctcgagcccagccccaggcccagtggtattactgaattcactgaatgtggatgcagtatgtgagaagctgaaacaaatagaagggctggaccagagtatgctgcctcagtattgtaccacgatcaaaaaggtgaggcagccacttacacacggaccagagacagcgctgggggcggaagacaggactgtgtgggtcgtgtaaactttatgtatagcttcccaaacatgcattccctgttaaaatgggaaagctctaaatggaaaacataattcttactagtttgtattctaaaattgccctgttttctcttattttataaatggataaaataaaataaagtagctgtcttaccatgttcttttttaaatgacgtaatacaagtaaagaatgccttgatgagaaagagaaagctctgagggattcccattgggataaacagaactcatctttccagtgtggaaccgaaaacctttgtgttacatttttttctaattgtaatatttgttagtgtgatttagtgattatcaaagtaagccacacttgcctcattttctccaaattctcattttcatgtcatgtaggacttaggatcatgtcacatttgatgaaaccacataggtttgggtttgcaaggttaatgcatttgcatagtttttttttcttctaagatcctattgcaattctagcagctatcaggaagttggctagagatgcctgagatttgggggaaggttttaacgaagtctttatagtaggtatttcactaaggtatactttttatatcagagtactgtgtaataaagtagaacgttaataaccagcctctaatatttatatacttgaaagaatgacatctgagagaagttttttaaagaattatgagcatatgtagacaccattttactcatctcagccaattttagaaaggtttcagataatgtcagtttccttacagagctggctcgtgctagtccctgtttgcatgagtcaaacaccggcttttccatggataagccccactttctccttcaggcagctggttggtgtcaggaaagagcggggtctcccacacgagtcctttgtgatgattttgttcccatcggggtagtggttttctccccactcagctctttgctcctagaccccggctttctgaagcccctcagagccgctggcctcctccgtgcttagggctccgcggcattgttgcagcaggacctctgtcacagacttgctgtgtatactgttttcttcaggattaacttggaaactgaacattctattgattataaacatagctatttcataaatttgccccagttaataaagtcaggttttacattttataaaagcagtaagctacctattattaataaagaaaatgctgttgtttcatttaggggaaactagaattacagggaaccaaaagtaataacttccttttttatgattttttttttctttgagatggagtcctgctatgtcacccaggctggagtgcagtggcgtggccatggctcactgcaacctcccgcctcctgggtgcaagcgatcctcctgcctcagcctcccaagtagctgggactacaggcatgtgccaccactcccagctaatttttgtagttttaatagagatggaatttcaccatgttggccaggctggtctcgaactcctgactttaggtgatccacccacctcagcctcccaaagttctgggattacatgcgtgagccaccgcgccgggccttgtgaatttaatagactggaaaattagtgggtgggcattcttcatatctgtatctaatataacggataaacaagtttgccaggcctacttcatttagaacgttgttagtgaccaacacgcttatgagaacagatgtctttgtcccctcccagcagcttgtgttcatgttcatattttctaagattagaaaacaaaaactaacagttttgttgttgctcatgacagcataggtagttttggaaataggagggttagttcttcggttggtcccagaaaatgcctaagacatttgggaaaatatgaagtggctgatgttgttcaaattcagcttgtttattgtattattatatgggatgataaccttttttttggtcagcctttctggtctctagagacttatttaaaactaaatataagcatacttggcaatcactagtaattcagaatatttcacattctgtctttatacccataattgttttaatttttactcaggcaaacataaatggccgtgtgttagctcagtgtaacattgatgagctgaagaaagagatgaatatgaattttggagactggcaccttttcagaagcacagtaagatatttgtaacattgtgatgtttacaacattattttatgataacattcaaaattatttataacattgtagaaaaccagtatcaataagtactggcctaaactggtatttttttcatatttttttaaatttaaaaactgcttcttacacttatgtgcaatcctgtgttgtggaaaatacacacagcagcacttggcagcctttgcctttttgggcatttcactcagagatttggggaagaggccgcctgccggttcttcatgctttcacctgccttaactctcatcaggctcctcaaagccttcgaggccttgaccttcagcattcatccttatagggcttgcattgcccaggtttagcaagaatcctgttaagtcagtttacatgtgtgatcaccctcagtatttgatcaaacgcctcactaacccccccacccccaggtgatgtcggctcaccctggccatcggcgtaccaagagtcccccactcctgctgcctccccttagtaatgttccatccacgacccccaccctgccccttggtggtagatccccactcattcgtgcttattccgagttggactcccttctgtagtgagactgcttacccctgttgccatagttctgaataaaatctggacctaccgccctactcctggccagctctggttttgacacaagccagctgcatttttctttgtcctcaagttaagttttaaacagaagtaataatttaatggacaaattgcagtgtagtatatgtatggtggtttctaccattgcttcctttagtattaatgaacatgaaagataagctgatgtataaaacaaattcactagaaattcacttaccagaagtatgctttctcattgctgttgcaatagctttataatgtttggtatttctaaatatttctaaagcttctaaaatatgatttgttagtgtaaatatttatgtttttcttctgttaaggtactagaaatgagaaacgcagaaagccacgtggtccctgaagacccacgtttcctcagtgagagcagcagtggcccagccccgcacggtgagcctgctcgccgcgcttcccacaacgagctgcctcacaccgagctctccagccagacgccctacacactcaacttcagcttcgaagagctgaacacgcttggcctggatgaaggtgcccctcgtcacagtaatctaagttggcaggtatttattgaatggcatttttcatattattgaagaataagcacaccgttcagttcactgagattatatgggcatttagacagtcattcagaaaatgcttactgaatacctaagtgaacaggagacaagatggagggctccctgtactcaaggagctgcatccatgtggagaggggcagtcagtgaaacaaacaaaaaagtagctcatgtagacattgatgagagctgagatatccatcagggtcacagcatgcagagtcaatagggattaggccacttgagctagggtggtcagcaaattcagcctttctcaggcgatcttcctgttgcattcagtaactgttggttgaagtacatcttcattggaacactggccacatagtgtccctttgagcaccatcctttggttttccaggacgcctgcacacccttcacggatattggtttcttctggtctggcattagatgtaggcgcgttcttcctttggagattcttagaagaaggaggccaggtgaggggtaggggtaggggcagggacagagcaaagtgagagatgcaggaggagtagcgggagtgaggagagcgcaggaggaaaagcagagcagggtgtggagaacaacgggggaggaggcacagcgggcggcagcgagtaacactgagtgggcagggcagggcagcggtgaggaggagcagcgccttggggaaggaagaaaatgtcctatttccttgagaaggtccccaacaaattcactttgctccttcttttttgttttagcctttgctcttgacccttcttaaactttcttgattcttctccttctttttcctcatctgtactttttgctccttgtttcttagctattctgggatctgaagcaaattctaattctaaaacttaatattggaaataaacttgtaaaactactttatttttctgtttactaaggcccaactattggcctcattgcattttatattttatcaatgaagttgactttggccttaaataaaagctaaacgtttgaagttataaaaacaagtgctgtggccgagcatgtgggacatgcccatagtcccagctgctcaggaggctgaggcgggaggattgcttgagtccagtagtttgaatctagcctgggcaacacagcaagatcctgtctcttaaaaatgaaataaaaaccagaaacaagtgctaagattatttgttaatacagtgtttaatcatacttttaaatattaacaataaactgattttattaaaatttatagaaagctttctagtaacagcattataaggtcacagcttttgttaatctgtgttatgtagaattcttttaaaagaatttgatgttttgatgactttttaaatggttagtgtacatatatatttcctaagctgatgtttatgccttttttcttcttatttgaatttttaaattattttttttctgtcttcacagtcacaaactcgcagaaccccaagtctttcgagtctcaattcccaggattccagtattgaaatttcaaagcttactgataaggtgcaggccgagtatagagatgcctatagagaatacattgctcagatgtcccagttagaagggggccccgggtctacaaccattagtggcagatcttctccacatagcacatattacatgggtcagagttcatcagggggctctattcattcaaacctagagcaagaaaaggggaaggatagtgaaccaaagcccgatgatgggaggaagtcctttctaatgaagaggggagatgttatcgattattcatcatcaggggtttccaccaacgatgcttcccccctggatcctatcactgaagaagatgaaaaatcagatcagtcaggcagtaagcttctcccaggcaagaaatcttccgaaaggtcaagcctcttccagacagatttgaagcttaagggaagtgggctgcgctatcaaaaactcccaagtgacgaggatgaatctggcacagaagaatcagataacactccactgctcaaagatgacaaagacagaaaagccgaagggaaagtagagagagtgccgaagtctccagaacacagtgctgagccgatcagaaccttcattaaagccaaagagtatttatcggatgcgctccttgacaaaaaggattcatcggattcaggagtgagatccagtgaaagttctcccaatcactctctgcacaatgaagtggcggatgactcccagcttgaaaaggcaaatctcatagagctggaagatgacagtcacagcggaaagcggggaatcccacatagcctgagtggcctgcaagatccaattatagctcggatgtccatttgttcagaagacaagaaaagcccttccgaatgcagcttgatagccagcagccctgaagaaaactggcctgcatgccagaaagcctacaacctgaaccgaactcccagcaccgtgactctgaacaacaatagtgctccagccaacagagccaatcaaaatttcgatgagatggagggaattagggagacttctcaagtcattttgaggcctagttccagtcccaacccaaccactattcagaatgagaatctaaaaagcatgacacataagcgaagccaacgttcaagttacacaaggctctccaaagatcctccggagctccatgcagcagcctcttctgagagcacaggctttggagaagaaagagaaagcattctttgagaaaaacaagcaaaggagaagagtgttactgtacctttatgacagaattgtcctggattttgactccatccacgcccatcacctttctacattttgctgacagataactaaccgatgatgaggccgaggtaaaagagacatctgcagtgtgacagaagggagcatgagaagcatggctcaccagccagcctctgtggtctttgtaattagaagcttcagaactcactaatactactgtacctttcattggcgcattaccccataaaactttttgagacgaggtgagatctgagtataaagataggtcagaagtattttaaagggcttaatgtgccaaaaagaaaaaaagctagagaccctttttgcaaacatttggtgaccacacatttgagggaagacgtggcgttaggtgaagcagaagcaaaccctgctcttaggggctcacctaggtgagtgcacagcctgtgacgctacagggagaggctgagtaaaccgagatccagcgttctgtatggcaggggtattgcttatcacagaggttctgaagagtaggaagtacataatgaagagggctttaaaaattgccaacaaagtgagtcaccagggctggcagtagtgtgacggggctgtcctgagctgttaggagagtagatgcggggagggctggtgacctccgtgggtttatatgtcggaaactcttctctccaaatcccaggcctggcttccagcaccatccagctgtgcccaagaagccaccctggtctgttctccaactcttttaaatggtgcccaacttttctaagtgagcttagcaatgagaagaaaaaaaaacatgaattctttttctggaaaatcagggagacatgggtaataataggtactaataaatatttatagatgagtgaatgaggaaataattacatcaaaaaggtcagtgacaattgataaatgacaaggaaatatttaattaggtaaaactaaatcattgctctctatactaggatagactttatctacttcatctgttcctaagtcagcatgttagttctggggaaggatcataagaaaggaaatactttttaaaaaaaaatttggaaacatgtaacaaagcaagggtaaaatatatatatatatctatataagtgctgtgactgtaaaagtgtactttccattaattattagccgagttaagagaatggtcacattgaagtactgtgtggactagaaatgtaccctgtcatcatgcaatgaaatattgttatcgttttaacatagctcatttatgtagaatgaattctggtggtttaccccaagtcacagttaggacggtagatggtgagatcgcagatgcgctattatctagattcagtgttacattttcgatgtttatcactcagtgggtttttattaatatgctgattaagttatttactgggccagtcattgtgctaaatagttgctcttttgtgtttcattgccttgatgtttgagtgtaatctagcattttaatacagtgtttattttgcatgatctttaacaaatgttttaagcaattttaaaaaggcaggatgttattgacattatacactgaagtcttaacattttaacatttatagtgcttatttgcaaaattgtataattaggaattatttcagagacaatgttttctttttcaggtgagtagttgccgcgtaatatcattggagtacattctttatactgtttgtgaaattaatactagcatattaagtgtacaaatagatttagaaaacaataaaaaattgcatgctattctgactcatgaatttttattcactatgatgattcacattttgattaaaaataaaagtagtttgtgtgttt

SEQ ID NO: 6738 - DNA, 8041 bp, Homo sapiens
ggtatgaattttatcataaattaagtaactctacattccattaactctctttttaaatagttcaaatgggggggacagtaattttttttaatacttatgaagtgttacctcaaaataatattgcccatggatatcaaatcagtctgaatgaacataactgaaaaatattcagaatgcttgaaatgacttagaagtaatctttaagagctaaccctaggggcccagtcctcctttcatagaggtgagctccttagctgaaatacatctctaaaagaccttctgtgaaaagtgagaggtgcaaaagttcctgaatgaccaaataccctgctgccaaaacgaaaagcaatttcatttaaaagtatattccgtttatcttctgcgcagcacttgaattttattgagatagagatattctgtacaccaaacccaatttaattcccataaataaagcagagtgggtgaacatgatcctctattttcttttgttgcagagaaacgctgattcctgataactggtggtgtttcatttgtttttgtttgatttttcacgttagaggagcagagttttcagacacttaggcctacaagacttaacccctgttgggcaaggggatttaggggaggaagcacatcagtaatatcagcactcaactataatgtgtccaagtgaaaatggctcaaagtaaaagagatccttagatgcataataaaaaagtcatgccctttcttagcaagcaggataaaaacagactgataaaataatttccagtaccaacatcttttccatctgtttttctatcatttctagaactaagtgccaaaaacgctttttttaagaaaaaagttttgctcaaagttgccttctctctcttttctatttatttctctgctttttaaaattacattttatgttctaaaatcactgatctgagcttattactttcttattgaaaaactctcagaggtttccaaaagctaaagagcacttaaaagttcaaactcctagcacaatattcgagactctccatgtgagacttaaacttgcattcccaatacacattcccaacagcgtcattcagacattattaggaaagccaatcagaaacttttacaatttctgttccatgctctttcttttccttattccaaaccttttgtcaaattgtttcctcccataacatctgtttaatttctattcatccttcaaacttagtcactttctctaagatgcctacctagctagatccccatataaggttttgatatcactcttctcacagcactttcctatggcactcataatctaagttggattatatttttgtgtgtatttcttacacatcagggcaaatatgtttggggataaaggtgtttagaaagaataacccaactattttcaccattgcagccctagaattttgccttaaaatacaaagtcagggcacagtatgtttgctgtgttagagaattaaaataatacttgcctcttttctttttcttcctttcctttttacaaaaatatcctcatttcttctcttgtctttttgtctttttttctccacaattctacaaactttcttcttttccattttcctcttttactgtcttcttatttcttcttcattttttattccttcacttctttgtctgccccttattttcttcttcaatatcataggttttgcacaaattttttcaacatctattcacctattcttttatattgctagtgtaaaatttttaatatgttctgaagcaaatttcatctgtgcataattattcaataatttactcattcatttcatttaattttattaaatatttgttgtttattcatgagtaccaagcactcttctgagcactagagatctgaattgagtaagactgacagaatcacttctcatggaagttaagttattgtagagacagagaaaaatcccacaaagaatcaaaaaatactgtagaatggtaggtggtgaatataaaaaagagaaacttaaaatgacaaattcttcatctgaataatgacagggttataactattagatttacccttcagccataaacaaatataacactcaaaaaatacataagcagcaactctttttagacatctaacaacagactccacaacactgctatcctggaaaagaaagaactactggaggtaagcaacacatttaccctggctttttgattaggaacgcagtgaaatagaacccaaagagaaattgatggtgtctaaggtagacattattagcattgtggctgggatttatgaagcaggttagtagagaggaggtagctgtttagagatgaagcttcagaaatcttttctaaggtcaccttaagccactggcttaatattaggcatttatagggcaagatttgctgaaaccctgaagagaactacttgagggttgtgagccaaatagagatattagaggctgcatttccatctgagctttgaagagagcagtgattctcccagcacgcagctggagatctgagaaagggcagactgcctcctcaagtgggtccctgacccctgacccccgagcagcctaactgggaggcaccccccagtaggggcagactgacacctcacacggccgggtactcctctgagacaaaaattccagaggaacgatcagacagcagcatttgcggttcacaaaaatccactgttctgcagccaccgctgctggtacccaggcaaacaaggtctggagtggacctctagcaaactccaacagacctgcagctgagggtcctgtctgttagaaggaaaactaacaaacagaaaggacatccaccccaaaaacccatctgtacatcaccatcatcaaagaccaaaagtagataaaaccgcaaagatggggaaaaaacacagcagaaaaactggaaactctaaaaagcagagcacctctcctcctccaaaggaacgcagctcctcaccagcaacggaacacagctggacagagaatgactttgacgagttgagagaagaaggcttcagacgatcaaactactctgagctacaggaggaaattcaaaccaaaggcaaagaagttgaaaactttgaaaatgattttgacgaatgtataactagaataactaatacagagaagtacgtaaaggagctgatggagctgaaagccaaggctcgagaactacgtgaagaatgcagaagcctcaggagctgatgcgatcaactggaagaaagggtatcagtgatggaagatgaagtgaatgaaatgaagcgagaagggaagtttagagaaaacagaataaaaagaaacgaacaaagcctccaagaaatatgagactatgtgaaaagaccaaatctacgtctgattggtgtacctgaaagtgatggggagaatggaaccaagttggaaaacactctgcaggatattatccaggagaacttccccaatctagcaaggcaggccaacgttcagatgcaggaaatacaagaacgccacaaagatactcctcaaaaagagcaactcaagacacataattgtcagattcacaaaagttgaaatgaaggaaaaaatgttaagggaggccagagatgaaggtcgggttacccacaaagggaagcccatcagactaacagcggatctctcggcagaaactctacaagccagaagagagtgggggccaatattcaacattcttaaagaaaggaattttcaaaccagaatttcatatccagccaaactaagcttcataagtgaaggagaaataaaatactttacagacaagcaaatgctgagagattttgtcaccaccaggcctgccctaaaagagctcccgaaggaagcactaaacatggaaaggaacaaccggtggcagccactgcaaaatcatgccaaattgtaaagaccatcgaggctaggaagaaacggcatcaactaacgagcaaaatagccagctaacatcataatgacaggatcaaattcacacataacaatattaactttaaatgtaaatggactaaatgctccaattaaaagacacagactggcaaattggataaagagtcaagacccatcagtgtgctgtattcaggaaacccatctcacgtgcagagacacacataggctcaaaataaaaggatggaggaaaatctaccaagcaaatggaaaacaaaaaaaggcaggggttgcaatcccagtctctgataaaacagactttaaaccaacaaacatcaaaagagacaaagaaggccattacataatggtaaagggatcaattcaacaagaagagctaactatcctaagtatatatgcacccaatacaggagcacccagattcataaagcaagtcctgagtgacctagaaagagacttagactgccacacaataataatgggagactttaacaccccactgtcaacattagacagatcaacgagacagaaagttaacaaggatacccaggaattgaacccagctctgcaccaagcggacctaatagatatctacagaactctccaacccaaatcaacagaatatacatttttttcagcaccacaccacacctattccaaaattgaccacatagttggaagtaaagctctcttcagcaaatgtaaaagatcagaaattataacaaactgtctctcagaccacagtgcaatcaaactagaactcaggattaagaaactcactcaaaaccactcaactacgtggaaaatgaacaacctgctcctgaatgactactgggtacataatgaaatgaaggcagaaataaagatgttctttgaaaccaacgaaaacaaagacacaacacaccagaatctctgggacacattcaaagcagtgtgtagagggaaatttatagcactaaatgcccacaagagaaagcaggaaagatttaaaattgacaccctaacatcacaattaaaagacacagaaaagcaagagcaaacacattcaaaagctagcagaaggcaagaaataactaagatcagagcagaactgaaggaaatagagacacaaaaaacccttcaaaaaattaatgaatccacgagctggttttatgaaaggatcaacaaaattgatagaccactagcaagactaataaagaagaaaagagagaagaatcaaatagatgcaataaaaaatgataaaggggatatcaccaccaatcccacagaaatacaaactaccatcagagaatactacaaacacctctacacaaataaactagaaaatctagaagaaatggataaattcctggacacatacaccctcccaagactaaaccaggaagaagttgactctctgaatacacaggatctgaatcacaggatctgaatcacaggatctgaaattgtggcaataatcaataacttaccaaccaaaaagagtccaggaccagatggattcacagccgaattctaccagaggtacaaggaggagctggtaccattccttctgaaactattccaatcaatagaaaaagagggaatcctccctaactcattttatgaggccagcatcatcctgataccaaagctaggcagagacaaaaccaaaaaagagaattttagaccaatatccttgatgaacactgatgcaaaaatactcagtaaaatactggcaaaccaaatccagcagcacatcaaaaggcttatccaccatgatcaagtgggcttcatccctgtgatgcaaggctggttcaatatacacaaatcaataaatgtaatccagcatataaacagaacaaaagacaaaaaccacatgattatctcaatagacgcagaaaaggcctttgacaaaattcaacaatgcttcatgctaaaaactctcaataaattaggtattgatggaacgtatctcagaataataagagctatgtatgacaaacccacagccaatatcatactgaatgggcaaaaactggaagcattccctttgaaaactggcacaagacagggatgccctctctcaccactcctattcaacatagtgttggaagttctggccagggcaattaggcaggagaaggaaataaagggtattcaattaggaaaagaggaagtcaaattgtccctgtttgcagacgacatgattgtatatctagaaagccccaatgtctcagcccaaaatctccttaagctgataagcaacttcagcaaagtctcaggatacaaaatcaatgtacaaaaatcacaagcattcttatacaccaataacagacaaacagagagccaaatcatgagtgaactcccattcacaattgcttcaaagagaataaaatacctaggaatccaacttacaagggatgtgaaggacctcttcaaggagaactacaaaccactgctcaatgaaataaaagaggatacaaagaaatggaagaacattccatgctcatgggtaggaagaatcaatattgtgaaaatggccatactgcccaaggtaatttatagattcaatgccatccccatcaagctaccaatgactttctacacagaattggaaaaaactactttaaagttcatatggaaccaaaaaagagcccacaccaccaagtcaatcctaagccaaaagaacaaagctggaggcatcatgctacctgatttcaaactatactacaaggctacagtaaccaaaacagcatggtactggtaccaaaacagatatatagatcaatggaacagaacagagccctcagaaataacaccgcatatctacaactatctgatctttgacaaacctgagagaaacaagcaatggggaaaggattccctagttaataaatggtgctgggaaaactggcttgccataggtagaaagctgaaactggatcccttccttacaccttatagaaaaattaattcaagatggattaaagacttaaacgttcgacctaaaaccataaaaaccctagaagaaaacctaggcattaccattcaggacataggcatgggcaaggacttcatgtctaaaacaccaaaagcaatggcaacaaaagccaaaattgacaaatgggatctaattaaactaaagagcttctgcacagtaaaagaaactaccatcagagtgaacaggcaacctacaaaatgggagaaaattttcgcaacctactcatctgacaaagggctaatatccagaatctacaatgaactcaaacaaatttacaagaaaaaaacaaacaaccgcatcaaaaagtgggcgaaggatatgaacagacacttctcaaaagaagacatttatgcagccaaaaaagacacgaaaaaatgctcaccatcactggccatcagagaaatgcaaatcaaaaccacaatgagataccatctcacaccagttagaatggcaatcattaaaaagtcaggaaacaacaggtgctggagaggatgtggagaaacaggaacacttttacagtgttggtgggactgtaaactagttcaacccttgtggaagtcagtgtggtgattcctcagggatctagaaatagaaataccatttgacccagccatcccattactgggtatatacccaaaggactataaatcatgctgctataaagacacatgcacaggtatgtttattgtggcactattcacaatagcaaagacttggaaccaacccaaatgtccaacaatgatagactggattaagaaaatgtggcacatatacaccatggaatactatgcagccataaaaaatgatgagttcacgtcctttgtagggacatggatgaaactggaaatcatcattctcagtaaactatcgcaagaacaaaaaccaaacaccgcatattctcactcataggtgggaactgaacaatgagaacacatggacacaggaaggggaacatcacactctggggactgttgcagggtggggccagggggagggatagctttaggagatatacctaatgctaaatgacgagttaatgggtgcagcacaccagcatggcacatgtatacatatgaaactaacctgcacattgtgcacatgtaccctaaaacttaaagtataataataataaaataaaataaaaaataaaaataaaaaa

SEQ ID NO: 6739 - DNA, 21577 bp, Homo sapiens
ggtatgaattttatcataaattaagtaactctacattccattaactctctttttaaatagttcaaatgggggggacagtaattttttttaatacttatgaagtgttacctcaaaataatattgcccatggatatcaaatcagtctgaatgaacataactgaaaaatattcagaatgcttgaaatgacttagaagtaatctttaagagctaaccctaggggcccagtcctcctttcatagaggtgagctccttagctgaaatacatctctaaaagaccttctgtgaaaagtgagaggtgcaaaagttcctgaatgaccaaataccctgctgccaaaacgaaaagcaatttcatttaaaagtatattccgtttatcttctgcgcagcacttgaattttattgagatagagatattctgtacaccaaacccaatttaattcccataaataaagcagagtgggtgaacatgatcctctattttcttttgttgcagagaaacgctgattcctgataactggtggtgtttcatttgtttttgtttgatttttcacgttagaggagcagagttttcagacacttaggcctacaagaacttaacccctgttgggcaaggggatttaggggaggaagcacatcagtaatatcagcactcaactataatgtgtccaagtgaaaatggctcaaagtaaaagagatccttagatgcataataaaaaagtcatgccctttcttagcaagcaggataaaaacagactgataaaataatttccagtaccaacatcttttccatctgtttttctatcatttctagaactaagtgccaaaaacgctttttttaagaaaaaagttttgctcaaagttgccttctctctcttttctatttatttctctgctttttaaaattacattttatgttctaaaatcactgatctgagcttattactttcttattgaaaaactctcagaggtttccaaaagctaaagagcacttaaaagttcaaactcctagcacaatattcgagactctccatgtgagacttaaacttgcattcccaatacacattcccaacagcgtcattcagacattattaggaaagccaatcagaaacttttacaatttctgttccatgctctttcttttccttattccaaaccttttgtcaaattgtttcctcccataacatctgtttaatttctattcatccttcaaacttagtcactttctctaagatgcctacctagctagatccccatataaggttttgatatcactcttctcacagcactttcctatggcactcataatctaagttggattatatttttgtgtgtatttcttacacatcagggcaaatatgtttggggataaaggtgtttagaaagaataacccaactattttcaccattgcagccctagaattttgccttaaaatacaaagtcagggcacagtatgtttgctgtgttagagaattaaaataatacttgcctcttttctttttcttcctttcctttttacaaaaatatcctcatttcttctcttgtctttttgtctttttttctccacaattctacaaactttcttcttttccattttcctcttttactgtcttcttatttcttcttcattttttattccttcacttctttgtctgccccttattttcttcttcaatatcataggttttgcacaaattttttcaacatctattcacctattcttttatattgctagtgtaaaatttttaatatgttctgaagcaaatttcatctgtgcataattattcaataatttactcattcatttcatttaattttattaaatatttgttgtttattcatgagtaccaagcactcttctgagcactagagatctgaattgagtaagactgacagaatcacttctcatggaagttaagttattgtagagacagagaaaaatcccacaaagaatcaaaaaatactgtagaatggtaggtggtgaatataaaaaagagaaacttaaaatgacaaattcttcatctgaataatgacagggttataactattagatttacccttcagccataaacaaatataacactcaaaaaatacataagcagcaactctttttagacatctaacaacagactccacaacactgctatcctggaaaagaaagaactactggaggtaagcaacacatttaccctggctttttgattaggaacgcagtgaaatagaacccaaagagaaattgatggtgtctaaggtagacattattagcattgtggctgggatttatgaagcaggttagtagagaggaggtagctgtttagagatgaagcttcagaaatcttttctaaggtcaccttaagccactggcttaatattaggcatttatagggcaagatttgctgaaaccctgaagagaactacttgagggttgtgagccaaatagagatattagaggctgcatttccatctgagctttgaagagagcagtgattctcccagcacgcagctggagatctgagaaagggcagactgcctcctcaagtgggtccctgacccctgacccccgagcagcctaactgggaggcaccccccagtaggggcagactgacacctcacacggccgggtactcctctgagacaaaaattccagaggaacgatcagacagcagcatttgcggttcacaaaaatccactgttctgcagccaccgctgctggtacccaggcaaacaaggtctggagtggacctctagcaaactccaacagacctgcagctgagggtcctgtctgttagaaggaaaactaacaaacagaaaggacatccaccccaaaaacccatctgtacatcaccatcatcaaagaccaaaagtagataaaaccgcaaagatggggaaaaaacacagcagaaaaactggaaactctaaaaagcagagcacctctcctcctccaaaggaacgcagctcctcaccagcaacggaacacagctggacagagaatgactttgacgagttgagagaagaaggcttcagacgatcaaactactctgagctacaggaggaaattcaaaccaaaggcaaagaagttgaaaactttgaaaatgattttgacgaatgtataactagaataactaatacagagaagtacgtaaaggagctgatggagctgaaagccaaggctcgagaactacgtgaagaatgcagaagcctcaggagctgatgcgatcaactggaagaaagggtatcagtgatggaagatgaagtgaatgaaatgaagcgagaagggaagtttagagaaaacagaataaaaagaaacgaacaaagcctccaagaaatatgagactatgtgaaaagaccaaatctacgtctgattggtgtacctgaaagtgatggggagaatggaaccaagttggaaaacactctgcaggatattatccaggagaacttccccaatctagcaaggcaggccaacgttcagatgcaggaaatacagaacgccacaaagatactcctcaaaaagagcaactcaagacacataattgtcagattcacaaaagttgaaatgaaggaaaaaatgttaagggaggccagagatgaaggtcgggttacccacaaagggaagcccatcagactaacagcggatctctcggcagaaactctacaagccagaagagagtgggggccaatattcaacattcttaaagaaaggaattttcaacccagaatttcatatccagccaaactaagcttcataagtgaaggagaaataaaatactttacagacaagcaaatgctgagagattttgtcaccaccaggcctgccctaaaagagctcccgaaggaagcactaaacatggaaaggaacaaccggtggcagccactgcaaaatcatgccaaattgtaaagaccatcgaggctaggaagaaacggcatcaactaacgagcaaaatagccagctaacatcataatgacaggatcaaattcacacataacaatattaactttaaatgtaaatggactaaatgctccaattaaaagacacagactggcaaattggataaagagtcaagacccatcagtgtgctgtattcaggaaacccatctcacgtgcagagacacacataggctcaaaataaaaggatggaggaaaatctaccaagcaaatggaaaacaaaaaaaggcaggggttgcaatcccagtctctgataaaacagactttaaaccaacaaacatcaaaagagacaaagaaggccattacataatggtaaagggatcaattcaacaagaagagctaactatcctaagtatatatgcacccaatacaggagcacccagattcataaagcaagtcctgagtgacctagaaagagacttagactgccacacaataataatgggagactttaacaccccactgtcaacattagacagatcaacgagacagaaagttaacaaggatacccaggaattgaacccagctctgcaccaagcggacctaatagatatctacagaactctccaacccaaatcaacagaatatacatttttttcagcaccacaccacacctattccaaaattgaccacatagttggaagtaaagctctcttcagcaaatgtaaaagatcagaaattataacaaactgtctctcagaccacagtgcaatcaaactagaactcaggattaagaaactcactcaaaaccactcaactacgtggaaaatgaacaacctgctcctgaatgactactgggtacataatgaaatgaaggcagaaataaagatgttctttgaaaccaacgaaaacaaagacacaacacaccagaatctctgggacacattcaaagcagtgtgtagagggaaatttatagcactaaatgcccacaagagaaagcaggaaagatttaaaattgacaccctaacatcacaattaaaagacacagaaaagcaagagcaaacacattcaaaagctagcagaaggcaagaaataactaagatcagagcagaactgaaggaaatagagacacaaaaaacccttcaaaaaattaatgaatccaggagctggttttatgaaaggatcaacaaaattgatagaccactagcaagactaataaagaagaaaagagagaagaatcaaatagatgcaataaaaaatgataaaggggatatcaccaccgatcccacagaaatacaaactaccatcagagaatactacaaacacctctacacaaataaactagaaaatctagaagaaatggataaattcctggacacatacaccctcccaagactaaaccaggaagaagttgactctctgaatacacaggatctgaatcacaggatctgaatcacaggatctgaaattgtggcaataatcaataacttaccaaccaaaaagagtccaggaccagatggattcacagccgaattctaccagaggtacaaggaggagctggtaccattccttctgaaactattccaatcaatagaaaaagagggaatcctccctaactcattttatgaggccagcatcatcctgataccaaagctaggcagagacaaaaccaaaaaagagaattttagaccaatatccttgatgaacactgatgcaaaaatactcagtaaaatactggcaaaccaaatccagcagcacatcaaaaggcttatccaccatgatcaagtgggcttcatccctgtgatgcaaggctggttcaatatacacaaatcaataaatgtaatccagcatataaacagaacaaaagacaaaaaccacatgattatctcaatagacgcagaaaaggcctttgacaaaattcaacaatgcttcatgctaaaaactctcaataaattaggtattgatggaacgtatctcagaataataagagctatgtatgacaaacccacagccaatatcatactgaatgggcaaaaactggaagcattccctttgaaaactggcacaagacagggatgccctctctcaccactcctattcaacatagtgttggaagttctggccagggcaattaggcaggagaaggaaataaagggtattcaattaggaaaagaggaagtcaaattgtccctgtttgcagacgacatgattgtatatctagaaagccccaatgtctcagcccaaaatctccttaagctgataagcaacttcagcaaagtctcaggatacaaaatcaatgtacaaaaatcacaagcattcttatacaccaataacagacaaacagagagccaaatcatgagtgaactcccattcacaattgcttcaaagagaataaaatacctaggactccaacttacaagggatgtgaaggacctcttcaaggagaactacaaaccactgctcaatgaaataaaagaggatacaaagaaatggaagaacattccatgctcatgggtaggaagaatcaatattgtgaaaatggccatactgcccaaggtaatttatagattcaatgccatccccatcaagctaccaatgactttctacacagaattggaaaaaactactttaaagttcatatggaaccaaaaaagagcccacaccaccaagtcaatcctaagccaaaagaacaaagctggaggcatcatgctacctgatttcaaactatactacaaggctacagtaaccaaaacagcatggtactggtaccaaaacagatatatagatcaatggaacagaacagagccctcagaaataacaccgcatatctacaactatctgatctttgacaaacctgagagaaacaagcaatggggaaaggattccctagttaataaatggtgctgggaaaactggcttgccataggtagaaagctgaaactggatcccttccttacaccttatagaaaaattaattcaagatggattaaagacttaaacgttcgacctaaaaccataaaaaccctagaagaaaacctaggcattaccattcaggacataggcatgggcaaggacttcatgtctaaaacaccaaaagcaatggcaacaaaagccaaaattgacaaatgggatctaattaaactaaagagcttctgcacagtaaaagaaactaccatcagagtgaacaggcaacctacaaaatgggagaaaattttcgcaacctactcatctgacaaagggctaatatccagaatctacaatgaactcaaacaaatttacaagaaaaaaacaaacaaccgcatcaaaaagtgggcgaaggatatgaacagacacttctcaaaagaagacatttatgcagccaaaaaagacacgaaaaaatgctcaccatcactggccatcagagaaatgcaaatcaaaaccacaatgagataccatctcacaccagttagaatggcaatcattaaaaagtcaggaaacaacaggtgctggagaggatgtggagaaacaggaacacttttacagtgttggtgggactgtaaactagttcaacccttgtggaagtcagtgtggtgattcctcagggatctagaaatagaaataccatttgacccagccatcccattactgggtatatacccaaaggactataaatcatgctgctataaagacacatgcacaggtatgtttattgtggcactattcacaatagcaaagacttggaaccaacccaaatgtccaacaatgatagactggattaagaaaatgtggcacatatacaccatggaatactatgcagccataaaaaatgatgagttcacgtcctttgtagggacatggatgaaactggaaatcatcattctcagtaaactatcgcaagaacaaaaaccaaacaccgcatattctcactcataggtgggaactgaacaatgagaacacatggacacaggaaggggaacatcacactctggggactgttgcagggtggggccagggggagggatagctttaggagatatacctaatgctaaatgacgagttaatgggtgcagcacaccagcatggcacatgtatacatatgaaactaacctgcacattgtgcacatgtaccctaaaacttaaagtataataataataaaataaaataaaaaataaaaataaaaaaagagatattagaggttgaatagtgctgagagatagtagaggtccaataagtcagagtagagggaccttgctgaatacatcgaacactgggtatttagttgagatgtcaaaaaccattatctaaggagtaagcctattcttgccctagagcaaatgttgctctagacatattcttaaaggactaaaaccaagcttcaataggatcaattagagccactagtaagttaactgcctgccagaaaagacaaaacaaaacaaaacaaaactcaacactctgtacaaaaaggtaacatcatagagaccttttaaaaattgtgctaaaaacccagaacaaaatttatcatctgaatcgtgtttaagtgtgcagttcaattgcattaactatatacatgttttacaaaatctctagaactttttcatcttgcaagtctgaaactctgtacacattggataacatcttcccatttctccctctctccaatccctggaaaacaccattttactttctgtttctatgagatcgaccagtttagacaatttattaaagtgaaatcatacagtatttgtcttttggtgactgcctcatttcacttagtataatgtcctcaagtttcattcatatagcacatgtatagtatgtaacaggatttttaaggctgaataatattctaatgtatgtatataccacattttgtttaatcattaatccatatatgaacatcttggttgcttctgcctcatggctattgtgaataatgctacagtgaacatcggtgtgcaaatagctcttactgatcctgctgtcaactcttttggatatatacctagaagtgcaattgctggatcatatggtaattcaatttataattttttgagggtcttacatactgttttccataatggttgtaccattttacattcccagtaatgctacatgagacttccaatttctttcatcattgactatgatgttagttgcagacttttcatatatggcctttattatgtgaggtagttttcttctatttatagtttgttgagtgtttttatcatgaaagagtgttggatttttgtcagatgatttttctgcatcagttgagatgataatgtggtttttgtccttcattctgatactgtgatgtataatattgttcaaattttatatgttgagttatccttttattggaagtaaatgccatttggtcatagtgtataattcatttattgtcctcttgaatttaatttgttagaaattttggcatcaatattcatcagagacattgctctgtagttttcttttctttagtgtcttttcctgacttcagtatctgagtaacgtttgactcataaaacgggtttagaagtgttctctcttctcctattttttggaagagtttgagaaagattggaattaattcttctttaaatgtttggtagatctttccagtgaagttatctggttgtgagtattttttttggtaggttttttgttactgattcataactccttactagtcataggagttaactattcctgttctgatgttttgatttcgtcatgacttagtcttgctatattgtatgttagcatatgattgttcatagtagtctcttacaatcatttttatttctgtggtatcagtcgtaatgtctctccttttatttctgattttatttatttgaatcttctctgttttttcttagtttagctgtttgtccaattattttcaaagaactaactcttttagtcacactcattaacaatccccacctccctaccaggctacaatacccttccaagcctctggtaaccattcttctactctatcttcattagtttaattgttttgatgtctagatcccacaaataaatgagaacatgcaatgtttgtctttctgtgcctggcttgtttcatttaacataatgacccccagttccatccatgttattgcagatgacaagatattattcttttcatggctgaatagttctccattatgtataagtacattttctttatccatccatctgttgatggacacttaggttgcttccaaattttggctattgtgaacagtgctgaaacaaacataggagtgcagatatctcttcaacatactgatttcctttcttttgggtatattcaataccccaaaaaaggatcatatgttagagcaatttttcatttttttgaggaatctctaaactcttctccatagtggttgtacaaatttacattaccatcaacagtgtgtaaggattgtcttttcttcgcatcctcaccagcatttgttattgcctctcttttggacataagccattttaactggggtgagataatatctcattgtagctttgatttgcaattctctgatgatcaatgatgttgtgcaccttttcatttgtatgttcaccatttgtacatcttcttttgagaaacatctattcaaatcttttgcccattttttcattgaattattagatgtttcctatagagttatttgcactccttatgtattctgattattaatcccttgtcagatgggtagttagcaaatattttctcccattctgtgagttgtctcttcactttgtcaattgtatccatggctgtgaagaagcctcttaacttgatgtgataccatttgtacatgtttgctttggttgcctgtgcttgtggagtattactctcagatatttttgcacagaccaatgttccaaagaatttctccaatgtttccatgtagtcatttcatagcttgagtttatagatttaatttttaatccattttgtttcctttttgtatatgatgagagattggggtctagtttcattcttccgtatatggatatcaagtttttgcagcaccatttattgaataatgccttttcctcattgtatgatcttagctcctttataaaaaatgagtcgctgtagttatgtgggttatgttatgtttctgggttctctattctgttctgttggtctacatgtctatttctatggcagtactctgcagttttgattactatagctctgtaatataatttaagtcaggtaatgtgattcctccagttttgttctttttccttagaatagctttggctattctgggtcttttgtggtttcatataaattttaggattgttttttctatttctgagaagaatgtcattggtattttgataggtattgcattggatctgtagattgcttttggtagtatggacagtttaacaatattgattcttctgatcctgaacatagaatatttttcattttttgatgtccccttccatttctttcatcggtgctttatagttttcattatagagctcttttgcttctttggttaaattaattcctaggcatttaatttttggtgaagtctttaggtttttccaaatatgagataatattgtctgcaaaaaggataattttgctttttcctttccaatttggatggactttatttctttctcttgtctgattgctctagctaggacttccagcattatgttaaataatagtggtaaaagtaagcatccttgttgtgtttcagatcttagataaaaggctttcaattttttcccattccatatgatattagttgtgggtctgtcatacatggcttttattatgttgatgtattttccttctatacccagttttttcagtgtttttatcaagaagggatgttgaattttatcaaatgctttttcagcatcatttgaaatgatcatatggtttttttctccattctattgatatgatatattacattgattaatttgcatatgttgaatcctccttgcattccagggagatatcccacttggtcatgatgaatgatctttttgatgtattgttgaattctatttgctagcattttgttgaggatttttaaatcaatattcatcagagatattggctgtagtttgctttgttgatgtgtctttgtccagttttggtatcagagtaacactgacctggtaggatgagtttggacatactccctcctccactattttccagaataatttgagtacaactggtattccttcttctttaaatgtttgttaggattcagcagtgaagtcattgagtcctgggttcttcttatggggagacattttattacaacttaaatcatgttacttgttattaatctgttcagattttggatttcttcctggttcaatcatgctaggttgtatgtgtctaggtatttatcaatttcttctagattttctaatttattggtatatagttgctcatataagccactaatgatcctttgaatttctgcagcacctcagttgtaatgtctctttttcatttctcattgtatttacttggagcttctctcgttttctcttaggtagtctggctaaagatttgttaattttgtttaacttttcaaaaacccaactctttgtttcactgaaattttatattgttttcttcatttcaatttcatttatttctgctctggtatttattacttcttttcttctaccaattttgggtttggtttgctcttgcttttctagttccttgaaatgcatcattaggttgtttatttgaagtttttcttgttttttgatatagacacttagagctataaacgtccctcttagtactgtttttgctgaatcccgtagattttggcatgttgtattttcttaatcatttgtttcaagaaaattttcaatttccttcctaatttctttattgacccactggtcattcaggagcatcttgtttaatttccatgtgtttttatagtttccaaagtttctctcattattgatttctagttttattccattgtggtaagagaagatgcttgatataatttcaattttttgaatgttttaagacctgttttgtgacctaacatatagtctttccttgaaaatgatccatgtgcagaggaaaagtatgtgtattcttcagctgttggattaaatgttctgtagataactattaggtctatttggtgtatagtgtagttgaagtctgatgtgtctttgttgattttctgtctggaagatctgttcagtgttgaaagcagggtgttgaagtctccagttattattatattggggtttatctctcactttaactctaataatatttgtattatatttctaggtgctccagtgctcagtgcaaatatatttaaaattattttatcctcttactgaattgacccctttaccattatatagtgaccttctttgtctcttagtttttgtcttgaaatctattttgtctgacaaaagtatagctgttcctgctcttttttggtttccattggcatgggatatattcttccatccccttatttttagtctatatctgtctttatagcttacctgtgtttcttgtaggcaacagattactgggtctttttttttttttatccattcagccattctatgtcttttgattgaagagtttagtccattgacattcaatgttgttggtaagtaaggacttactcttgccattttgttatttgttgtctggttgttttgtggttttctcttctttctttcctttctgtcttccttttagtgaaggtaattttgtctggtgatacaacttagtttcttgctttgtgtgtgtgtgtctgcatatcagttctatgttatttggtttgaggttaccatgaggcttgcaaatactatcttataacaattattttaagctgataataacttaacactgtttacataaacaacaaacaaaaagaaaactaataaaaacttcacaccttaacattgtttccacacccctccattttaaaactttttgttgtttctagttatatcttattgtactacctatgtattgaaaagttgtagttatttctttggttcatcatttagtgcttctgcaaatatgggagtagtttacataccacagttacagtgttataatattctgtgtttttctgtgtacttactattgccactgagttttgtaccttcagattatttcttattgttcattaatatccttttcattctaattgaagtactccctttagcattttttgtaggacatatctggggttgatgaaattcatcagcttttgtttgttagggaaagtctttattcctcctttatatttgaaagacatttttgtcagatatactattctagtgtaaaagttttttttcctgcagccctttaaacatagcatgcaaacttctcttggcctgtaagggttccactgaagagtctgctgccagatgtatgtgaatggtgctccattgtatgtgatttgtttctttcctcttgctgccttcaggatcctttgtttatccttgatctttgggggtttgattattaaacaccttgaggtggtcttctgtgggttaaatctgcttggtgttctataaccttcttgtacttggatattgacatttttgtctagatttgggatattctctattattatccctttgaataaactttctgcccccatctcttactctaccttttctttaaggccaagaaggcttagatttgcccctttgaagctattttctagatcctgtaggtgtgcttcattgttttttattctttttccttttgtctcctctgtgtattttcaaatagcccgtctttatgctcactagtgctttcttctgcttaatcaatcttgctgttaaaaggctctgatgcattctttaatataccggttgcattttgcaactccagaatttctgcttgaatctctttaattatttgaatctctgtgttaaattaatctgatagaattttgaatttattctctgtgttatcttcaatttctttgagttttctcaaaatagctattttgaattctatatctgaaaggtcacatagctctgtttctccaggctttgtccctggtgccctatttagttcatttggtaaggtcatgtttttcctggattgtcttgatacttgcagatgttcatccgtatctgggcattgaagagttatgtatttattatagtcttcacattctgggcttgtttgtacctgtctttcttgggaaggctttccaggtatttgaaaggacttgggcattgtgctgtaaggtgtatctgctttaggggggcacacaaagcccactaacactagttcttgcagactcatagtggtgttaccttcatggccttagacaagatccagaataattatctggattaccaggcagagactcttgttctctttccttgagcaaaagacctgaatagacattcctcaaaaggaaatatgtgagtggctaacaggtttctgaaaataatgctcagcatcactaaccatcagggaaatgcaaataaaaaccacaatgaaatatcatttcacctcaattagaatggctactatcaaaaagacaaaaagtaatgaatgctgacatagatgtggagcaaggaaaactcttatacactactggtgagaatgaaaattactacagtcattataaaaaacagaatggaagttcctcaaaaaattaaaaatagaactactggtggaggttccaagatggccaaataggaagagctccagtctgcagctcccagcctgagtgacacagaagatgggtgatttctgcatttccaactgaggtatctgcatttccaactgaggtactgggttcatctcactggggcttgtctgacagtgggcacagctcatggagcagggtggggcattgcctcacccaggaagcacaaagcgtcggggaattccctttcctagcaaagggaagccgtgacagacagtacctggaaaatcgggacactcccaccctaatactgcacttttccaacggccttagcaaatggcacacaggagattatattctgtgcctggcttggagggtcccacacccatggagcctcgctcactgctagcacagcagtctgagattgaactgcaaggcagtagcgaggctgagggaggggcatctgccattgctgaggcttgagtaggtaaacaaagccaccaggaagctcgaactgggtagagcccatggcagctcaaggaggcctacatgcctctgcagactccacctctgggggcagggcatagcagaacaaaaggcagcagaaacttctgcagacttaaacgtccctgtctgacagctttgaagagagtagtggttctcccagcatggagtttgaaatctgagagtggacagactgcctcctcaagtgggtccctgacccctgagtagcctaactgggagacaccttccagtaggggctgactgacacctcatacagctgggtgcccctctgagatgaagcttccagaggaaggatcagacagcaacatttgctgttctgcagcctctgctggtgatacccaggcaaacagggtctggagtggacctccagcaaactccaacagaccagcagctgagggtcctgattgttagaaggaaaactaataaacagaaatgacatccacatcaaaaccccatctgtacatcaccatcatcaaagaccagaggtagataaaaccacaaagatggggagaaaccagagcagagaagctgaaaattctaaatatcagagtgcctattcccctccgaaggaatgcagctcctcgccagcaatggaaaaaggctggatggagaatgactttgacgagttgagagaagaaggcttcagacaatcggtaataacaacttctctgagctaaaggaggatgtttgaacccatcacaaagaagcaaaaatccttgaaaaaagattagatgaatggctaactagaataaagagtgtagagaagtccttaaatgacctgatggagctgcaaaccatccacgagaactacgtgatacgtgcacaagctacagtagccgatttgatcaagtggaagaaagggtatcagtgattgaatatcaaatgaatgaaatgaagcgagaagagaagtttagagaaaaaagagtaaaaagaaatgaacaaagcctccaagaaatatgggactatgtgaaaagaccaaatctacatcttattggtgtacctgaaagtgacagggagaatggaaccaagccagaaaacactcttcaggatattatccagaaaaacttccccaacctagcatggcaggccaacattcaaattcaggaaatacagagaacaccacaaagatactcctcgaaaagagcaactccaagacacataatagttagattcaccaaagttgaaattaaggaaaaaatgttaagggcaggcagagagaaaggttgggttacctgcaaagggaagcccatcagacaaacagcagatctcttggcagaaactctacaagccagaagagagtggaggccaatattcaacatacttaaagacaagaattttcaacccagaatttcatatccagccaaactaagcttcataagtgaaggagaagtgaaatcctttacagacaaacaaatgctgagagattttgtcagcaccaggcctgccttacaagagctcctgaagaagcactaaacatggaaaggaacaaccagtaccagcaactgcaaaaacatgtccaattgtaaagaccatcgacgctatgcagaaactgcatcaactactgagcaaaataaccagctaacatcataatgacaggatcaaattcacacataacaatattaaccttaaatgtaaatggactaaatgctccaattaaaagacacagactggcaaatgggataaagagtcaagaaccatcagtgtgctgtattcaggagacccatctcacatgcagagacacacataggctcaaaataaagggatggaggaagatctaccaagcaaatggaaaacaaaaaaaaggaggtgttgcaatcctagtctctgataaaacagactttaaaccaacaaagatcaaaagagacaaagaaggccattacataatggtaaagggatcagttcaacaagaagaggtaactatcctaaatatatatgcacccaatataggagcacccagattcataaagcaagtccttagagacctaaaaagagatttagactcccacacaataataatgggaaactttaacaccccactgtcaacattagacagatcaacgagacaggaagttaacaaggatatccaggaattgaactcagctctggaccaagcagacccaatagacatccacagaactctccaccccaaatcaacagaatatgcattcttctcagcaccacatcacacttattccaaaattgaccacatagttggaagtaaagccctcttcagcaaatgtaaaagaacagaaattataataaactgtctctcagaccacagtgcaatcaaactagaactcaggattaagaaactcactcaataccattcaactacatggaaaatgaacaacctgctcctgaatgactactgggtacataacgaaatgaaggcagaaataaagatgttctttgaaaccaatgagaacaaagaaacaacataccagaatctctgggacacatttaaagcagtgtgtagagggaaatttatagcactaaatgcccacaagagaaagcaggaaagatttaaaattgacaccctaacatcacaattaaaagtactagagaagcaagagcaaacacattcaaaagctagcagaaggcaagaaataactaagatcagagcagaactgaaggagatagagacacaaaaaaacccttcaaaaaataaatgaatccaagagctgggtttttgaaaagatcaacaaaattgatagaccactagcaagactaataaagaagaaaagagagaagaatcaaacagatgcaataaaaaatgaaaaagaggataacaccaccgatcccacagaaatacaaactaccatcagagaatactataaacacctctatgcagataaactagaaaatctagaagaaatggataaattcctggacacatacaccctcccaagactaaactggaaagaagttgaatccctgaatagatcaataacaggttctgaaattgaggcaataattaatagcctacgaaccaaaaaaagtccaggactagacaaattcacagccaaattctaccagaggtacaaagaggagctggtaccatttcttctgaaacaatcccaatcaatagaaaaagagggaatcctccctaattcattttatgaggccaacatcatcctgataccaaagactggcagagacacaacaaaaaaaaggagaattttagaccaatatccctgttgaatattgatgcaaaaatcctcaataaaatactggcaaaccaaatccagcagcacatcaaaaagcttatccaccacgatcaagttggcttcatccctgggatgcaaggctggttcaacatacagaaatcaataaacataatccatcatataaacagaaccaaagacaaaaaccacatgattatctcaatagatgcagaaaaggccttcgacaaaattcaacagcccttcatgctaaaaactctcaataaactaggtattgatgggacatatgtcaaaataataagagctatttatgacaaacccacagccaatatcatactgaatgggcaaaaactggaagcattccctttgaaaactggcacaagacaggaatgccctctctcaccactcctattcaacatagtgttggaagttctggccagggcaatcaggcaagagaaagaaataaagtgtattcgattaggaaaagaggaagtcaaattttccctgtttgcagatgacatgattgtacatttagaaaaccccgtcgtctcagcccaaaatctccttaagctgagaagcaacttcagcaaagtctcaggatacaaaatcaatgtgcaaaaatcacaagcagtcctatacaccaataacagacaaacagagagccaaattatgagtgatctcccattcacaattgcttcaaagagaataaaatacctaggaatccagtttacaagggatgtgaaggaactcttcaaggaaaactacaaaccactgctcaacaaaataaaagaggacacaaacaaatggaagaacattccatgctcatggataggaagaatcaatatcgcaaaaatggccatattgcccaaggtaatttatagattcagtgccatccccatcaagctaccagtgactttctacacagaattgggaaaaactactttaaaattcatatggaaccaaaaaagagcctgcattgccaagacaacactaagccaaaagaacaaagctggaggcatcatgctacctgacttcaaactatactacaaggctacagtaaccaaaacagcatggtactggtaccaaaacagagatgtagatcaatggaacagaacagaggcctcagaaataacaccacacatttacaaccatctgatctttgacaaacctgacaaaaacaagaaatggggaaaggattccctatttaataaatggtgctgggaaaactggctagccatatgtagaaaggtgaaactgaatcccttccttacactttatagaaaaattaattcaagatggattaaagacttaaatgttatatgtaaaaccataaaaaccctagaagaaaacctaggcagtaccattcaggacatagacatgggcaaggacttcatgattaaaacaccaaaagcaatggcaacaaaagccaaaattgacaaaatgggatctaattaaactaagggcctctgcagagcaaaagaaagtaccatcagagtgaacaggcaacctacagaatgggagaaaatttttgcaatctacccatctgacaaagggctaattaccagaatctacaaagaacttaaacaaatttacaagaaaaaatcaaacaaccccgtcaaaaagtgggcaaaggatatgaacagacacttctcaaaagaagacatttatgcagccaacagacccatgaaaaaatgctcagcatcactgtccatctgagaaatgcaaatcaaaaccacaatgagataccatctcacaccagttagaatggcaatcattaaaaagtcaggaaacaacaggtgctggagaggatgtggagaaataggaacacttttacactgttggtgggactgtaaactagttccaccattgtggatgacagtgtagcaattcctcaaggatctagagctagaaataccatttgacccagccatccgattactgggtatataaccaaaggattataaatcatgctgccataaagacacatgcacatgtatgtttattgtggcactattcacaatagcaaagacttggaaccaacccaaatgtccatcaatgatagactggattaagaaaatgtggcacatatacaccatggaatactatgcagccataaaaaaggatgagttcatgtcctttgtagggacatgggtgaagctggaaaccatcattctgatcaaactatcccaaggacagaaaaccaaacaccacatgttctcactgataggtgagtattgaacaatgagaacacttggacacagggtggggaacatcacataaaggtgcctgtcatggggtggggggagggaggagggata

SEQ ID NO: 6740 - DNA, 8041 bp, Homo sapiens
ggtatgaattttatcataaattaagtaactctacattccattaactctctttttaaatagttcaaatgggggggacagtaattttttttaatacttatgaagtgttacctcaaaataatattgcccatggatatcaaatcagtctgaatgaacataactgaaaaatattcagaatgcttgaaatgacttagaagtaatctttaagagctaaccctaggggcccagtcctcctttcatagaggtgagctccttagctgaaatacatctctaaaagaccttctgtgaaaagtgagaggtgcaaaagttcctgaatgaccaaataccctgctgccaaaacgaaaagcaatttcatttaaaagtatattccgtttatcttctgcgcagcacttgaattttattgagatagagatattctgtacaccaaacccaatttaattcccataaataaagcagagtgggtgaacatgatcctctattttcttttgttgcagagaaacgctgattcctgataactggtggtgtttcatttgtttttgtttgatttttcacgttagaggagcagagttttcagacacttaggcctacaagacttaacccctgttgggcaaggggatttaggggaggaagcacatcagtaatatcagcactcaactataatgtgtccaagtgaaaatggctcaaagtaaaagagatccttagatgcataataaaaaagtcatgccctttcttagcaagcaggataaaaacagactgataaaataatttccagtaccaacatcttttccatctgtttttctatcatttctagaactaagtgccaaaaacgctttttttaagaaaaaagttttgctcaaagttgccttctctctcttttctatttatttctctgctttttaaaattacattttatgttctaaaatcactgatctgagcttattactttcttattgaaaaactctcagaggtttccaaaagctaaagagcacttaaaagttcaaactcctagcacaatattcgagactctccatgtgagacttaaacttgcattcccaatacacattcccaacagcgtcattcagacattattaggaaagccaatcagaaacttttacaatttctgttccatgctctttcttttccttattccaaaccttttgtcaaattgtttcctcccataacatctgtttaatttctattcatccttcaaacttagtcactttctctaagatgcctacctagctagatccccatataaggttttgatatcactcttctcacagcactttcctatggcactcataatctaagttggattatatttttgtgtgtatttcttacacatcagggcaaatatgtttggggataaaggtgtttagaaagaataacccaactattttcaccattgcagccctagaattttgccttaaaatacaaagtcagggcacagtatgtttgctgtgttagagaattaaaataatacttgcctcttttctttttcttcctttcctttttacaaaaatatcctcatttcttctcttgtctttttgtctttttttctccacaattctacaaactttcttcttttccattttcctcttttactgtcttcttatttcttcttcattttttattccttcacttctttgtctgccccttattttcttcttcaatatcataggttttgcacaaattttttcaacatctattcacctattcttttatattgctagtgtaaaatttttaatatgttctgaagcaaatttcatctgtgcataattattcaataatttactcattcatttcatttaattttattaaatatttgttgtttattcatgagtaccaagcactcttctgagcactagagatctgaattgagtaagactgacagaatcacttctcatggaagttaagttattgtagagacagagaaaaatcccacaaagaatcaaaaaatactgtagaatggtaggtggtgaatataaaaaagagaaacttaaaatgacaaattcttcatctgaataatgacagggttataactattagatttacccttcagccataaacaaatataacactcaaaaaatacataagcagcaactctttttagacatctaacaacagactccacaacactgctatcctggaaaagaaagaactactggaggtaagcaacacatttaccctggctttttgattaggaacgcagtgaaatagaacccaaagagaaattgatggtgtctaaggtagacattattagcattgtggctgggatttatgaagcaggttagtagagaggaggtagctgtttagagatgaagcttcagaaatcttttctaaggtcaccttaagccactggcttaatattaggcatttatagggcaagatttgctgaaaccctgaagagaactacttgagggttgtgagccaaatagagatattagaggctgcatttccatctgagctttgaagagagcagtgattctcccagcacgcagctggagatctgagaaagggcagactgcctcctcaagtgggtccctgacccctgacccccgagcagcctaactgggaggcaccccccagtaggggcagactgacacctcacacggccgggtactcctctgagacaaaaattccagaggaacgatcagacagcagcatttgcggttcacaaaaatccactgttctgcagccaccgctgctggtacccaggcaaacaaggtctggagtggacctctagcaaactccaacagacctgcagctgagggtcctgtctgttagaaggaaaactaacaaacagaaaggacatccacaccaaaaacccatctgtacatcaccatcatcaaagaccaaaagtagataaaaccgcaaagatggggaaaaaacacagcagaaaaactggaaactctaaaaagcagagcacctctcctcctccaaaggaacgcagctcctcaccagcaacggaacacagctggacagagaatgactttgacgagttgagagaagaaggcttcagacgatcaaactactctgagctacaggaggaaattcaaaccaaaggcaaagaagttgaaaactttgaaaatgattttgacgaatgtataactagaataactaatacagagaagtacgtaaaggagctgatggagctgaaagccaaggctcgagaactacgtgaagaatgcagaagcctcaggagctgatgcgatcaactggaagaaagggtatcagtgatggaagatgaagtgaatgaaatgaagcgagaagggaagtttagagaaaacagaataaaaagaaacgaacaaagcctccaagaaatatgagactatgtgaaaagaccaaatctacgtctgattggtgtacctgaaagtgatggggagaatggaaccaagttggaaaacactctgcaggatattatccaggagaacttccccaatctagcaaggcaggccaacgttcagatgcaggaaatacagaacgccacaaagatactcctcaaaaagagcaactcaagacacataattgtcagattcacaaaagttgaaatgaaggaaaaaatgttaagggaggccagagatgaaggtcgggttacccacaaagggaagcccatcagactaacagcggatctctcggcagaaactctacaagccagaagagagtgggggccaatattcaacattcttaaagaaaggaattttcaacccagaatttcatatccagccaaactaagcttcataagtgaaggagaaataaaatactttacagacaagcaaatgctgagagattttgtcaccaccaggcctgccctaaaagagctcccgaaggaagcactaaacatggaaaggaacaaccggtggcagccactgcaaaatcatgccaaattgtaaagaccatcgaggctaggaagaaacggcatcaactaacgagcaaaatagccagctaacatcataatgacaggatcaaattcacacataacaatattaactttaaatgtaaatggactaaatgctccaattaaaagacacagactggcaaattggataaagagtcaagacccatcagtgtgctgtattcaggaaacccatctcacgtgcagagacacacataggctcaaaataaaaggatggaggaaaatctaccaagcaaatggaaaacaaaaaaaggcaggggttgcaatcccagtctctgataaaacagactttaaaccaacaaacatcaaaagagacaaagaaggccattacataatggtaaagggatcaattcaacaagaagagctaactatcctaagtatatatgcacccaatacaggagcacccagattcataaagcaagtcctgagtgacctagaaagagacttagactgccacacaataataatgggagactttaacaccccactgtcaacattagacagatcaacgagacagaaagttaacaaggatacccaggaattgaacccagctctgcaccaagcggacctaatagatatctacagaactctccaacccaaatcaacagaatatacatttttttcagcaccacaccacacctattccaaaattgaccacatagttggaagtaaagctctcttcagcaaatgtaaaagatcagaaattataacaaactgtctctcagaccacagtgcaatcaaactagaactcaggattaagaaactcactcaaaaccactcaactacgtggaaaatgaacaacctgctcctgaatgactactgggtacataatgaaatgaaggcagaaataaagatgttctttgaaaccaacgaaaacaaagacacaacacaccagaatctctgggacacattcaaagcagtgtgtagagggaaatttatagcactaaatgcccacaagagaaagcaggaaagatttaaaattgacaccctaacatcacaattaaaagacacagaaaagcaagagcaaacacattcaaaagctagcagaaggcaagaaataactaagatcagagcagaactgaaggaaatagagacacaaaaaacccttcaaaaaattaatgaatccaggagctggttttatgaaaggatcaacaaaattgatagaccactagcaagactaataaagaagaaaagagagaagaatcaaatagatgcaataaaaaatgataaaggggatatcaccaccgatcccacagaaatacaaactaccatcagagaatactacaaacacctctacacaaataaactagaaaatctagaagaaatggataaattcctggacacatacaccctcccaagactaaaccaggaagaagttgactctctgaatacacaggatctgaatcacaggatctgaatcacaggatctgaaattgtggcaataatcaataacttaccaaccaaaaagagtccaggaccagatggattcacagccgaattctaccagaggtacaaggaggagctggtaccattccttctgaaactattccaatcaatagaaaaagagggaatcctccctaactcattttatgaggccagcatcatcctgataccaaagctaggcagagacaaaaccaaaaaagagaattttagaccaatatccttgatgaacactgatgcaaaaatactcagtaaaatactggcaaaccaaatccagcagcacatcaaaaggcttatccaccatgatcaagtgggcttcatccctgtgatgcaaggctggttcaatatacacaaatcaataaatgtaatccagcatataaacagaacaaaagacaaaaaccacatgattatctcaatagacgcagaaaaggcctttgacaaaattcaacaatgcttcatgctaaaaactctcaataaattaggtattgatggaacgtatctcagaataataagagctatgtatgacaaacccacagccaatatcatactgaatgggcaaaaactggaagcattccctttgaaaactggcacaagacagggatgccctctctcaccactcctattcaacatagtgttggaagttctggccagggcaattaggcaggagaaggaaataaagggtattcaattaggaaaagaggaagtcaaattgtccctgtttgcagacgacatgattgtatatctagaaagccccaatgtctcagcccaaaatctccttaagctgataagcaacttcagcaaagtctcaggatacaaaatcaatgtacaaaaatcacaagcattcttatacaccaataacagacaaacagagagccaaatcatgagtgaactcccattcacaattgcttcaaagagaataaaatacctaggactccaacttacaagggatgtgaaggacctcttcaaggagaactacaaaccactgctcaatgaaataaaagaggatacaaagaaatggaagaacattccatgctcatgggtaggaagaatcaatattgtgaaaatggccatactgcccaaggtaatttatagattcaatgccatccccatcaagctaccaatgactttctacacagaattggaaaaaactactttaaagttcatatggaaccaaaaaagagcccacaccaccaagtcaatcctaagccaaaagaacaaagctggaggcatcatgctacctgatttcaaactatactacaaggctacagtaaccaaaacagcatggtactggtaccaaaacagatatatagatcaatggaacagaacagagccctcagaaataacaccgcatatctacaactatctgatctttgacaaacctgagagaaacaagcaatggggaaaggattccctagttaataaatggtgctgggaaaactggcttgccataggtagaaagctgaaactggatcccttccttacaccttatagaaaaattaattcaagatggattaaagacttaaacgttcgacctaaaaccataaaaaccctagaagaaaacctaggcattaccattcaggacataggcatgggcaaggacttcatgtctaaaacaccaaaagcaatggcaacaaaagccaaaattgacaaatgggatctaattaaactaaagagcttctgcacagtaaaagaaactaccatcagagtgaacaggcaacctacaaaatgggagaaaattttcgcaacctactcatctgacaaagggctaatatccagaatctacaatgaactcaaacaaatttacaagaaaaaaacaaacaaccgcatcaaaaagtgggcgaaggatatgaacagacacttctcaaaagaagacatttatgcagccaaaaaagacacgaaaaaatgctcaccatcactggccatcagagaaatgcaaatcaaaaccacaatgagataccatctcacaccagttagaatggcaatcattaaaaagtcaggaaacaacaggtgctggagaggatgtggagaaacaggaacacttttacagtgttggtgggactgtaaactagttcaacccttgtggaagtcagtgtggtgattcctcagggatctagaaatagaaataccatttgacccagccatcccattactgggtatatacccaaaggactataaatcatgctgctataaagacacatgcacaggtatgtttattgtggcactattcacaatagcaaagacttggaaccaacccaaatgtccaacaatgatagactggattaagaaaatgtggcacatatacaccatggaatactatgcagccataaaaaatgatgagttcacgtcctttgtagggacatggatgaaactggaaatcatcattctcagtaaactatcgcaagaacaaaaaccaaacaccgcatattctcactcataggtgggaactgaacaatgagaacacatggacacaggaaggggaacatcacactctggggactgttgcagggtgggggcagggggagggatagctttaggagatatacctaatgctaaatgacgagttaatgggtgcagcacaccagcatggcacatgtatacatatgaaactaacctgcacattgtgcacatgtaccctaaaacttaaagtataataataataaaataaaataaaaaataaaaataaaaaaa

SEQ ID NO: 6741 - DNA, 468 bp, Homo sapiens
gctgataaagacgggaataatccctaccgggttgaccagcgcaaataacccgatgaaaaatttgaagtaaacgggaaaatcaaaaaaggtctgaatcacggttagctccgaagcaaaagccggataatgttagccataaataaggttgaaaagacgcgctgacaatacgccttttgacagcatttttcacctcctaactacttaaaattgctatcattcgttattgttatctagttgtgcaaaacatgctaatgtagccaccaaatcatactacaatttattaactgttagctataatggcgaaaagcgatgctgaaaggtgtcagctttgcaaaaatttgatttggatcacgtaatcagtacccagaagtgagtaatcttgcttacgccacctggaagtgacgcattagagataataactctaatgtttaaactcttttagtaaatcacagtgagtgtgagcgcgag

SEQ ID NO: 6742 - DNA, 422 bp, Homo sapiens
cacctgccactcacccactgctgtgcagcttggttcctaacaggccatggactggtacaaggaataatgcagggttggggacccacaaggttacatagagtattggttaaaaaaaagtttgccctggccgggcgcggtggctcacgcctgtaatcccagcacttcgggaggccaaggtgggtggatcacctgaggtcgggagttcgagaccagcctgaccaacatggaaaaaccccgtttctactaaaaacacaaaataagccaggcgtcgtggcacatgcctgtaatcccagctactcgggaggctgaggcaggagaatcgcttgaacctgggaggcggaggttgcagtgagctgagatcatgccattgcactccagcctaggcaacaagagcgaaactccgtctcaaaaaaaaaaaaaaa

SEQ ID NO: 6743 - DNA, 422 bp, Homo sapiens; identical to SEQ ID NO: 6742

SEQ ID NO: 6744 - DNA, 325 bp, Homo sapiens
atgctggtgacaccttagccactggagacaaagcagaagttactgagatgcctaatagtgattctttacctgaggatgcagaagtgcattgtgattcagctgcagtttcacatgagccaacaccagctgaccccagaggggaggggcatgaaaatgcagctgtgcagggtgcaggggctgccgccattgggccccctgtgcagcctcaggatgccaacgccctggagccccctctcaatggagacgtgactgaggatacacttgctgaatgtattgattccgtcagccttgaggcagaacccagatccgaaatacccctgcaaga

SEQ ID NO: 6745 - DNA, 325 bp, Homo sapiens; identical to SEQ ID NO: 6744

SEQ ID NO: 6746 - DNA, 335 bp, Homo sapiens
tcacagtccagaccatgcctgtatatggatggatgagggagcaaaagttcccaggggctcaagagctgccaagggccactctgcctccagctaaaggggctgcaccgcaatgctcatcttccagggaaagggccagatcatggggaagccacctgtgtgtgggagagcagaatccatcccatgcctctggattttgttcatgggacacaaaggtaaagatgggcaggtgggaagaggatgttctcattccaggacatgtgttttgagaccactttctctctgctgtgccccaggatcctttctggggccttggctggttctcacactatgggttt

SEQ ID NO: 6747 - DNA, 10339 bp, Homo sapiens
ccaaaggtaccagtggctcagccctcactgctctcataagccaggtcttagaggctcccggagtgtatgtctttggagaacttctggagctggccaacgtgcaggaggtaagaacggtttgcaaacaatttctctttattctaagactctgtaattctccaggtttccaaagaatttcagtgctgaagtattgtgaacctgtgaggtaccctattgtgagacagatgggaattggtggggcagagggagagattgagagaatatccttggctccttttatccagtatttttatcttaccttgggtaaaattagattgttgctaataataacctaaaagatagtaaaaaagtcaaattgatcctgataaattagaaaagtagtgctgtaagcatgggctgtttaataggagtagattcatgcattcttaaggaccagaaacctccagtgcaatatcgataaggaagattggtcagggacacacagcagaaacatactgctattgaacataagatggacatgaataggagtgtattgttcttgaggaaaagggcagtgttgtgctaaatgtgttagatgtgttagatatgacatgaaaagctaggacatagttcattttacttgtttgcttgcttgttattaaaaccttggatatccagttttggtcattgtgcctcaaaaatgagaagatccattgaacagaaggaacaaagagatgtaaagcaatctatacttctcaacctctactttccaatttgaacatttttatttatttatatttattcacttattgagaaaagtctgtaagcatctttattgttttgtggggtggaggctggtgctcaggagcttttggcggattggtggggcaggtccccttcctcttcatcctcacaggcttctggctatgcagactggtgctggctctgtggaagctgccatgcatagatctgggtgatggtacttcttgtggagcatgtgctggatgctgttgagagtggccccggagttcttggtggtggcgatttgcatataggaggtggtttgcttttgttgggcagtttatcaccttcatgaccaccacaacacctttgctgttggctccacacccacagtcagttttaacaggagtttcagtgaatcagttagttgtaaccaaaggagttgccggccttcagtttattggattcggtgctgtgtgtctgcctattcctcttgatggggaaactggagcagttccctacagtccagccatttcaggtgcccagttatgtctcctctacctgtgatgttcagagatgagaagagccacttttactttttcactgtaaatttttatttaatgtcagccttgcttgccgaactataaactctgtgaggaggtctgtagtgctcaccattgtttctttagagctgaatacgtagcctgacacacagtaggctttcaataaaaatttaatttaccagaagtggaaaatgagttttatgaagaaaatttcagaaaactgagttcatttttcaacacaagagatgaccaaggggtaatatgttccttcaggttcatgaacagcctgcatgaatatgccaagtagttgttttgtaactgtggaagattggctaagaggagatggatggaaagtaaagtcagaaagaccttattgatttaggccagtgggagaagtgttggagtatctgctctggagaaaatgctcttttccggctagttttgttaattatgtttctgaaaaggggggctagattggatggtctttacgcaggtttcttccccttctgattcagggacttcaggaggtttgtgtaacctgagaaagtagcctgaggtattatggtgctggagttctccatagggtgcttagcagaccacctttatctccccatacattgcgtttttccatatgtgagctgagaataagctggttgcctttcagtgatctgaaattatagatgcatttcttggaagctttattttttttaatggctaaaattgagtagtatcgctattgctgtctgtagactaccacttgctattcctgtttagagtttactgggcttggtaagttggaagggtaacaggagcacgtttgtgattttttttttttttttttgagacggagtctcgctctgtcgcccaggccggactgcggactgcagtggcgcaatctcggctcactgcaagctccgcttcccgggttcacgccattctcctgcctcagcctcccaagtagctgggactacaggcgcccgccaccgcgcccggctaattttttgtatttttagtagagacggggtttcaccttgttagccaggatggtctcgatctcctgacctcatgatccacccgcctcggcctcccaaagtgctgggattacaggcgtgagccaccgcgcccggcccacgtttgtgatttaaacaacaacaacaacaacaacaaccagttaacgtaattgacagcagagaagttccaggcagaacagtggctctttcgtttttcttctacacatggctttttgccatcagcatcagtgaagagtaagtaattttaatgaacattttgatttggggcagactgataccctggttttctgtcccagcctggctttctgtcataccttatgatgtgctggtctctcccagggttcatagtccacgtgtagtcctgaaacttggaaccaaccctgagctttgttcactttgggttggtggtggctcatgccatacctaccaagctggtatgtagatagggctgctccagtctttgttttaatgcaaacagaatcttgagaagatttgaactccttccaatgcttaatgctttgtatgtgtgtgtgagagaaaagcagttcgttgggcatgctgtatagaaagtaaaacattcctgagagagagaaattaaatttggggctttaataatcttgtttattttttcccgaagaaccagagttggtagagaccccaggggccaagtaatcaaatagtacagaataaacagccatggcatctttgacacatgctcacccgtcctctgtttgaacactacagtgattggtagacagtttggtctgtggtgaactttttttttcctcttcagcttgcggaaggagctaatgctgcttatttgcagttgttgaacctgtttgcctatgggacatacccagattacataggtgagttggtgaagatccttcaaaagacttgtgttaattatgttgctcagtttggaagaccatcaaggtttgagatataaagcatggggtagtggggagacttcttgacctggctgcctcccattttgctgtgcccggtgggtgacctcacaaagggaatgttccttctcaccttttatattctagtgggtcaaatggggcctgtgtgtgctcatccacaaatgtagcccttgtttgttttccagatgagattcttgaggactggtgtttgtagggctcttggagtgctgtgaagtgcagaatacccacctgtagaatgtttcaacattttaaatattatcaaaataataccagcatattgaagaaaatttggaaaatagactttttaaaagtcactcataggctgggcgcggtggctcatgcctgtaatcccagcactttgggaggccgaggcaggcagatcacttgaggtgaggagttttacaccagcctggccaacatggtgaaaccctgtctctactaaaaatacaaaaattagctcggcgtggtggtgggcgcctgtaatcccagccactccggaggctgaggcagcagaattgcttgaacctgggagatagagactgtagtaagctgagattgcaccgctgtactccagcctgggcaacagagcgagactctgtcaaacaaacaaataaataaataaatgtcactcatatgttgctcagacatttggatgctggacttttttgtgccccttatgtttgtgttttgtattacataggtacaactatgtatacagttttatgtcttgcttgtttcttcccacttacaaacatttatccatattttaagtctttttaatatttttaatatttcataatctacttagctcattttctgttgcagggcatttgggtcattttaaattataatctgaagtattaggttgaggtatttgtatgtccaaacactaacttaccttctacccaaagcatttttttctggctttcctacccttttttaatggtatgactgtagcctgatactcagggccttcgctgcgatatccctgacttcttctttctccctggtcacttctactttgtgctgctgtcagactggacagtttgccagttcctggtacaccacatttttttctgaccttccctttgttccagggaatgtgttctgtttttctgtccttgcttactaaagaggcagcattgcacagactctgttagcagactgcctgtagccagtctggctccacttctactagttgtgtgttcgttgacaaatgaagtaaccttatgcagctcaatttcctcgtctgtaaagtgggagtaacaatacaagcccattattccttacctacactcctcgaagttagatgtttcagaatttagaatttttgggactttaaaaaggtaatatgatgcgcatgcctttttatgtaacactcccagaggaatgtggaaacaagtgggataaaaagcctgtctccgtacaggttagaaattcccaccaggtgaatttcagcaccatgcttaagaaaaaatcagtttggatatagttttttggaatccagaattatcgttaaggaattgaggacacttggagtcttgcgggttgttgtgaagatgaactggatgtgtgtatgtacgtgtggatctatgcaatccacaagatgtaaagcttgctatttatgttagctgctgcagctgctgcccttgctgttattatcatttatggttattattgaaattttgcctctttctcaaggctcaactcaaactccatctcttccatgaattctttctttttatcttctgtactttccaaatgatactgttctctttccctctcccctcccctttcatctctttctcttacccctgtctcctccccatccctctcctcctctcttctagtagcttgtacctttcttctggtagttctgccttggatttgtagctatggaaacatctgattgtaagaccgaggacaagtccagggccatgaagttgcacacctccaggtggttggtggccctggagttgtgccatgcagcagccctggcaaagcccatcttgttcatccttgattcttctcagtacagagcattgcacacaacagatgctcgatgaagatatgtttaatttaattgaatgtcacaaggggcacaaatagtactccattaagataattgccacatcattttgcttgtttgctttttaggagactaaactctgtgtttgtagaaactgagtcttttcttctttggaagtacatagtcttccaaagaagacaggaatatttgtcaaatgaataagtgcaaagtcatgatagtgattcagtagtagatttggtttggggagttggtgagcttattccataaaagaaatcctaattttattttgtgtcttgatttttgtggtgggtgggactgagcagccaacaaggagagcctgccagaactgagcacagctcagcagaacaagctgaagcatcttaccatcgtgagcttggcatcaagaatgaaggtacggtactgagccttctcttgtcttcctccttaccccaagtcagctgtctcattgacatcaatgaaggaagtcccagctgcacataggagagtcacatcataaatgcataaaatttgcttgacagaggaaaagataaaatggtgtagaaaagtactccccattccatacaggaaaagtatgcccagaagtgattgactcagcaggtcttagtcctggcatgctgtggtgccgcatgtggcatgatcattttgccatattaaggggagactgctgttaaagatatacatttttcaaatagcaaggcatctcaaggcaagttaacagcttaatctgttgctcagtacacagtgaactatgcccatgctggaggaaaaacttgctatgtcggacttgctagattttttgttgttgttgttgttgagacggagtctcactctgtcgcccaggctggaatgcagtggtgtgatctcagctcactgcaacctctgcctcccagattcgagcgattcccctactcagccccaagtagctgggattacaggcgtggaccaccccgcccggctaattttttttttttttttttgagacagagtgttgctctgttgcctgcgctggagtgcagtggcgcaacctgggcttactgcaacctccacctcctgggttcaagtgattctcctgcctcagcctcccgagtagctggaattacaggcacctgccaccatgcccataatttttatattttttagtacagtcagggtttcatcacgttggccaggctggtcttgaactcctgacctcaggtgatccacctgcctcggcctcccaaagtgctgggattacaggcatgagccaccgtgcccggcctttttaacttaaaaaattttttaaattgagacaagggtctcaccatgttgcctaggctggtctcaaccccctgacttcaagcgatcctcccatctcagcctcccaaagtgttgggattacaggtgtgagccactgcacttggtttttttgttcttggattgcaatttcagttgctgaaatcattttatctgatctaatggcacatttctgattctcagcctagcatttcaggtgggaggcctattttgttgtgaaatgaggacctgaccttttttcttgtactgattgtggacttctcaagtgtagtaaagaatgttggtacagcccaataaagaactattgttggggaattcatattggttgtgtctgagaaaacagatacaaacttcagggtgacatctgagctggcagtacccattggccacctataggtagatatgctggcctgcaagttttttttgtttgtttttgcactctgctgggcaagtagccagctctttccagtgactgggatctgttggagatttatggtgatctagcaaagtctgaaagcttccagaaggtggcagagtggcatatactcagtagttccctttctctccactggtacaagtttttaggatctctacaagtatgctgcagcatgtgaaatctgaaggctgggtgaagccaaggaggcagagaaccaggaggttgctttcttagatgttgggtcttctaggtctcatggttcatttatccacctcttgttgccctagctattaataattaccactagcctgcgtttcccgagcctagaggcagctgttggctatgggagtaatacctgcattttcgctaatgcttgccagatggtttttataatgatcacatggccttatctacagtgtatcccctactccgtgttgctgaaagacctggagatgcggaatctccgggaactagaagaccttatcattgaggctgtctacactgacatcatccagggcaagctggaccagcgaaaccagctgctggaagtggatttctgcattggccgtgacatccgaaagaaggatatcaataatattgtcaagaccctgcatgaatggtgaggctaaaaggaggagggggatatctagcatgtcttttgtgcctctccttgcaaaaatgtgattccctggtgtcagctgagggtttggggtgggcctgtagctacctgggagctggggcttagtgagccggagagtggagctacatttgtgatcacagctgtgtgataacaggagtcatttcaggcctcctggtgccttggttgtaaaatagttctttccttaaatgcaactgggagctatttaaaagtgggctataaaatgcccagggttagcaggtggagcctatgtgtcctagctgtgtgaggctagtcctgccctttccaaactcacgctcaaagtttgaccaaactcaggaaggctagtgtttgtaagattctttctttgtttttattattttttctatccctgttgaagttaacatgtttataagattcttcggataaaagaacttacgttcaaaatcagtaacatattgggctaatgtttgtaaaacaccgtgagggacatggaagacaaggagtgggtcattttaacttggaatacagactcatacaaagaatatctgataactatactctggtatataaaaagcattgggacatttgtgttttctctgttttaatggaatttgatatttgtaagagctgtctcacattctacgaggattcactgtggagtgatttaaattatttgggcttataaagccagatggactgattggagaagttttagctcagttttgaaggaaggccagggttagagtatacctggaggtgaggagagtgtgttcccaggcaggcacgtggcatgttggaagccatgaagcagacccggtgagctttgtacacaggttcgggagggagagagaatctctgctcatccccgagagaagcatatccagagaggagcagtgccactttgactccttggggcctgatgtcccctgagtttccctcacttcagctacttttacaccccaggacatgtgttgctcacccctcaccccaagttctgtcccaaatatagccccaaacaccttctctatacaacatctgccacaagtggaagttttcaatagcttacaaaacttagaataaataagaaataaacttagaaataccccaacacaaaaatggtctggcacacaaaatctagtttctgaacctgccaaagttggctgtcctattctgtttttgagatggctgacacagctttttatgtccatagtctggtttcctgtttttaagcccccaatatgtttgacatagaggtgccagactaactggttaccatgggatgtttactagtagaaactcttacaactcatgtttaggcactggaggtagattgaaacaaaattcataggctgagggctaccacatatatggcaaaatgctcacactgttggatcttaagtggagggtatggggatattcattgtagtctttcaactttttcatttttaaaaaaattaatagtggggaaaataggaggaggggtatggcaattaggaagtaacttaaacttctgagaaaaggcggaatcttcaaaacaggatgcttttaggaaatctttttttgtttgttgttttttgagacagttttgctcttgttgcccaggctggagtgcaatagtgcgatctcagctcaccgcaacctctgcctcccaggttcaagcgattctcctgcctcagcctccctagtagctgggattacaggcgtgtgcaccaggcctggctaattttgtatttgtagtagagacggggtttctccatgttggtcaggctggtctcgaattcccgacctcaggtgatccgcctgcctcggcctcccaaggtgctgggattacaggcatgagccactgcgcctggcctagaacatcttttttttctgttgagaaaaggattactcagtgccatctataaaatctattctaccttcttttttttttttttttttttgcggcagagtttcgctctgtcacccaggctggagtgcaattgcgtggtctcagctcactgcaacctccgcctcccgggttcaagtgattctcctgcctcagcctcccaagtagctgggattacaggcacccgccaccacacctggctaatttttgtatttttagtagagatggggtttcactgtgttggccaggctggtctcgaactcctgacctggtgatccacccacctcggcctctcaaagagctgggattacaggtgggagccactgcacccggcctgtcctaccttctttaatcgtatgtgctacaaaaccatcttccatgagatacaaagttgaaaattaaagctgtattctaagaaactagccccagactaccatatttgtctcctaatgtcctgcattatgtatttagaagtgcttgtctttgggaaggagtgaacgggcaagagatgtggcagagggagtattaaaggaggtccctgtaagatactggggagagctgttggggaagaatatttctgagcctggaagagacttcccaggccattctgcagctcagggctggttttctccattgtaggtgtgatggctgtgaagcagttctactgggcatcgagcagcaagttctgagagccaaccagtacaaagagaaccacaaccgaactcagcagcaggtagaagcagaggt

SEQ ID NO: 6748 - DNA, 441 bp, Homo sapiens
aggaaaagcagagaggcagcagcagctctgggagaaagggacagcagacattagaggggcgagtgttctgggagcctcagagcagtgatggattttccatctttccttggaggaggggctgggtcttggaatcccctcccttctctgccccttacacacagtttgtcctgaggagcagacatgaggtctgtgctcacccaagcgctcacagtctccttctctcttcaatacccatctgctgggcctaattcttacctcaaaaaggtaactcttgattattcttaaaagtttaaaaaaaaatagtaactgtgattctggtctaagctaaaattatttttcctcaaggttgtctcccaagaaaaatgcttaaagaggccgggcacggtggctcatgcctgtaatcccagcactttgggaggccgaggtgggcggatcacctga

SEQ ID NO: 6749 - DNA, 441 bp, Homo sapiens; identical to SEQ ID NO: 6748

SEQ ID NO: 6750 - DNA, 370 bp, Homo sapiens
gaatcatgactgtgaactgtctcctaaataatttagtgttccattattcccctccccagtacattttagatttaggtcctacacagttctagaccctggattctagggctttgcctctggaaccagcggtattggcctcacttgagagcttattagaaatgaagagtctccagcccaccctcaaatccaaggaatcaggatttactttttaacatgctccccaagtgatctgtgtgcatgttaaagtaggagaaatgctgctctgaggcatctgatcagcaggccctcccaggccctggcttcagggtagagctatttgggttgcagatagcaccatgccacactctgtgggcagagagttcaaattcca

SEQ ID NO: 6751 - DNA, 370 bp, Homo sapiens; identical to SEQ ID NO: 6750

SEQ ID NO: 6752 - DNA, 341 bp, Homo sapiens
aaaaaatctaaaaataagacaaacgagaagtagaccctggaattttgttccagtgttcatcaagctcacataactttattttatacaccataaaaacaagaaaggcctagaaagataccccgctgacctccagacacaaggcatttattgcattctcatgactgtcatctaaacattaacaaatcaaaagaagattcttattaaggtatacatttttagtgaaccccagacattgtctatagttcaacaattccatttattaaatgctcacaagctaacttctaataattttttgtactcttgcctgcaatcaacagtgagaataacaccctgtcatatca

SEQ ID NO: 6753 - DNA, 341 bp, Homo sapiens; identical to SEQ ID NO: 6752

SEQ ID NO: 6754 - DNA, 375 bp, Homo sapiens
gctggagtatggtggataggtgtgtgtgtggagggggtttaggggccagactgtgccatgtgggccagtagggccaggagatgcctgggattttattctaaaggtggcgggcaccctttagagggtctcagtagcaggtttggaggcagagacgggtgaaggagggagatggcagtggggctggagctgggagagtccacgtggcatggggaggtgggggagggaagagcccagataggatgcctgggatgcatgcaggagaagggatgcctgaagcaggcctgagcagggaacctctggctggagtgctccgggggcatccagagctgaggtcatccaaggggagagggggcgggagccgaggcccagcctgag

SEQ ID NO: 6755 - DNA, 599 bp, Homo sapiens
aaaagtaaatttattttttttcacatcccacattacatttcttgattagcacagtcaagggtgacagagaactactctcttaaggattacctggggtctgagtcatttcagaagattacacagaattttccacagttcctgaaggtgaaagcttttcaaggcaaaataaaatctggtctatagccttttggatgaagtcaggccgacatatcacagctttgagctaaacagtgtattgaagtcctactattttgctgtaagaccctgaataaagtcttacaatgtgtaatttattcttggcccaagtttcaattctgctcttaagtgaggttatgagagagagatttccacaaattctggtgaattctcttatttgtaaagttcttctgggaaagaagtggagtaatttattccaggacttgatccacaaagtcaagataaagtccacactttgtctacatatatctcttttcctaagctctaatttattttggttagtgtgccctttcatgtaacaccaattctcggcatgtcagaatcagattccagacatgccaactttacagacatgaacaggcccatataagtcccttgtattg

SEQ ID NO: 6756 - DNA, 599 bp, Homo sapiens; identical to SEQ ID NO: 6755

SEQ ID NO: 6757 - DNA, 262 bp, Homo sapiens
caaaaaattagctgggcgtggtgttgggtacctgtagtcccagatgcttgggaggctgaggcatgagaatcgcttaaactcgggaagcagaggttgcagtgaacggtgatcgcaccactgtactccatcttgggcaacagagtgaaactctgtctcaaaaaaaaaaaaaaacaaaaaaaaaagtctgtattcatggaatttgaattttcttctttgaatatctgaaattagtcttctaaaaaagtcggctgggcccggtggc

SEQ ID NO: 6758 - DNA, 180 bp, Homo sapiens
tgcccgcgttctccgcttccattccccgaggccgctgatgcgggcggctccacctgccgggcacacgggcagccggtctctgtagtaccgcgtggtactcactgcggtaagacaaccccagagacctgggcccgatggctggcagtacccagacagtggctggactcaagctcctcctcc

SEQ ID NO: 6759 - DNA, 180 bp, Homo sapiens; identical to SEQ ID NO: 6758

SEQ ID NO: 6760 - DNA, 262 bp, Homo sapiens; identical to SEQ ID NO: 6757

SEQ ID NO: 6761 - DNA, 330 bp, Homo sapiens
ctggaagactgcctttaaaaaaattaaaaagagaatttataacaaataggtgaaatacgtgatcactgagttactgaggtggatattgtattaaatatggcatggttcctggagatttggggaagttctggaggcttttttttccaatataaataaaactttcaaaaaaactgaaagacaatgttgtttattgtgcaagaacagtcaagactacttaaatgggatattgtgacgaagtgctgccaattaatgctgtatctaatctcaaatacatgcaagacttttatccttcttagtaggctgaccaaaaagactaaaagaagttgtctt

SEQ ID NO: 6762 - DNA, 338 bp, Homo sapiens
gttgtgaatgacttactttttattctataaattaggtcatagccaatatttcagtacacaaacattatttttattcatttgaatcccaatatgttttcttaaattgtaggaaaaaccggtagcatatcagtcagcaaaccagaaattatatcttactgctacatctcataactacatcttactaaaacacaaacattcataatatgtagtatactatctctaaaattacataggttttgtgtacatttcttctaattgatcatgtctgcttattttcctctggattaaggatcaaggagatagtatattagatgatttgataaatttccaatgctttg

SEQ ID NO: 6763 - DNA, 32134 bp, Homo sapiens
gacccacatgtgaacaccccatatgtgtgcactttttctgcgaatggtgatcatctgattttcaaggggttagcttgttttttaaaaaatgaaaaaaaaaatcactgtttactaatcaatgagtggtattggggcaatttggtagttctcagaaaaaaaattaatttggatcaatttctcacatcttatacaaggatgaattctaattggagttaagatacaaatatagggctgggcgcagtggctcatgcctgtaatcccagcactttgggagtccgaggcaggtggatcacgaggtcaggagatcgagaccatcctggctaacatggtgaaaccctgtctctactaaaaaatagaaaaaattagccaggcgtggtggtgggcacctatagtcccagctactcaggaggctgaggcaggagaatggatgaacccgggaggcggagcttgcagtgagccgagatcgagccactgcactccagcctgggcgacagagcgagactccgtctcaaaaaaaaaaaaaaaaaagatgtaaataaaactccagaaatattgaaagaaaccttgggattatttgctttgtaacttggactggtgaaggtgtttctgtcaccccaaacaccaaacccatgaaataaaagacttacaaatttgattacataaaaatgaaatttctggccggtcgcataatcccagcactttgggaggccgaggtgggcggatcacgaggtcaggagatcgagaacatcctggctaacacggtgaaaccctgtgtctactaaaaatacaaaaacaaaatcagctgagcttggtgtcaagtgcctgtagtcctagctgctcaggaggctgaggcaggagaatggcgtgaacctgggaggtggagcttgcagtgagccaagatcatgccactgcactccagcctgggccaacagagcgaggctccatctcaaaaaaaaaaaaaaaaaaaatgaaatttctgtgtgacacatccataccatggactactactcacaataaaaaggaacaggctgggcgcggtggctcacgcctgtaatcccaacactttgagaggccgaggcaggcagatcacgaggtcaagagatcgagaccatctggccaacatggtgaaaccccgtctctactaaaattacaaaaaattagccgggcatggtggcaggcgcctgtagtcccagctacttgtgaggctgaggcaggagaatcgcttgaacctgggaggtggaggttgcagtgagccaagattgagccactgcactccacagcctggccacagagcgagactccgtctcgaaaaaaaaaaaaaggaacaaactatgatgtgcacaactcagatggatctcaagggaattatactgcatgaaagtacacaaaaggttacattccatggatgcccattcatataacattcttgaaatgacagaattctagagatggcgagcaggttagcggttgcaggggtttagcaaaagggagagtaagagggaagtggctgtggctatgaaagggtagtctacagggtctttgagatggaaatgttctgaatcttgactgatggtgaccacatgaatctgaacatgtaataaaagagtatagaatgagatacacaaacatacaaattagtgcaagtaaaactggggaaatctgaacgaggtcagtggattagatcaaggtctgtttctcttcagaatctcaaatcttaaaaggttttgtattttctaaacacaaataaaagctggaaagccaatcagtagtaatctgaaagttcacaatgtcagttgacgtctcatggtattgggaagaaagataagcattgaggctaatatcaccctatgcttgattaagtttttgttttatatgttaaaatcactaaaccgaaagcttagttgttgttctcccacaaataaaattaagccctcatttacttttaattcagttccaaataggtttgccatttagatttttgtccaagaactaactcctccccactcccggtttttgtttgtttgttttttaaatttatttattgagacaggttctcactctgtcacccaagccacatgtagcctcaaactcttgagctgaagccatcctcccacctcagtctcccaaagtgttggaattacaagcatgaactaccacacacctcccacctttaatatatctaaaatataaattctcttctgccttagaaaaaacaggctgggcgcagtagctcatgcctgtaatcacagcactttgggaggccaaggtgggtggatcacgaggtcaggagatcgagaccatcctggctaacactgtgaaaccccgtctctactaaaaaaaaaaaaatatatacaaaaaaaaaaaattagttggcatgcgcctgtagtttcagctactccggaggctgaggcgggagaatcccttgaacccagtaggcagtggttacagtgagccgcgattgcgccactgcactccagcctgggcgagagagctagactccgtctcgaaaaagaaaaaacaagcatttgactctgtcttttaagattaccactggattatcatatctgaggcatatactagttatcatgttcatttccaagattctttgccctctgaatctcctgtgctgctattggagtctctatatggtttactacaggacattagtctgtcatccacatgtccctaggcacatgtccctggacacactcctcctggagtggcaggaatgactagtgacctccaccgacttcctccctgtcgcttgcatgattcctctgcttctacaccttcccctgtctactcaaactccggtttatctagaagattatgagtgcttttaaaaagatccaagataaaacttcaaaagaagtggcccataaaatctatacttttctcttccaaaaggtgatggcatctctcctacaaaagaggatgtaattcactcagatgtacaagatgaactggttcattctgcttgttacgtatgcatctaattagtttgaatctatgcagtaccaccaccttaagatgtttccaaaggacaactctaaactcttactattaaaaaaaaaatgttttaagtagaaaggagtattaagtgaaatttcaatattgaattcattgcataaggcaaacattagatataagtgggaaacatcttagaggattttactgttttacattttttaggtgaatagcaaccttagatcatcttacaaaatatggttactgtcacaaaataaaacttgaaactatattcagtcatttaaaaaatgaactctttattttagctggaccagctattccttctgttgtggcgtatccgaaaaggagtcagaccagcactgcagatagtgacctcaaagaagatggaatttcctcccggaaatcaagtggcagtgctgttggaggaaagggaattgctccagccagtcccatgcttgggaatgcaagtaatcctaataaggcggatattcctgaacgcaagaaaagctccactgtccctagtgtaagtgttgttgaactatagagtggtcttagggtggtagggttggaaccagctagacaccaggtgttcattttactcctgtggtctctcgtactggaatgccctctctactaggcagccatgcccaatcttaacttacagaaatcctacctgctgcattgtaggtatttattgttgacactctcttagttcattcttgctgctgtaacaaaatacctgagactggctaatttataaagaaaagacatttatttcttaacaattctggaggctgagaagtccaagatgaaggcaccaacaagttccgtgtctggcaagggccctgttctctgcttccaacatgatgccttggtgctggcatcctccagaggagacaaatgctgtgttgtcatgtggctgaagggacagaaggggtgaactcaccccctcaagcccttctataaaacactaatctggccgggtgcggtggctcacgcctgtaatctcagcactttgggaggccgaggtgggtagatcacgaggtcaggagttcaagaccagcctggccaagatggtgaaacgccatctctactaaaaatacaaaaattagctgggcgtggtggcaggcacctgtaatcccagctgctcaggaggctgaggtagagaattgcttgaactcaggaggcagaggttacagtgagccgagatcgcatcactgcactctagcctggcgacagagcgagactccttctcaaaaaaaaaaaaaaagatactaatcccttcatgaaggcggagccctcgtggcctaaacacctaaaagactcatctccaaatactgttttctcctatgggagataaagcttaaacatgagttttggaggggacacattcagagcatagcacacccaccatagacactagatggtgataggtcctttatttcaaggcctggttccagttatttcggacacctgctgagccttaggttgtcaggtgctgagacatggaaagacctcacagtctaacaggaagtgaatgaaaacagtgacagtgcagatggaagcctacgtgcacacacggggaggtctgactgccagtgccccaaagatgtggtgttcacactgagtcttcaaagagctctaatgatgaagagtgttggctgagttcttaccatgtgccaaggaccatgctcagtgctttttcatggattagctacattttaaggtgaaaaaaaagttgggtaattgcctaaaattacactgccaacctgaatccagctcttaatccctatctgtaacaaaatctccccagtaagtagataatatttactaaattaaattgaatccattcagcttcagaaacttttttctgtgtattgaagtatgttctatctaacctaacatattaaagaatttgcagagaagtaaacaatcttaagattattctgtaagcacgtttttccctacaaaattaacaatgatgcagccctgcctccaactccagaaaaaccctggactgaggaggctgtggagaaaccctgttgctctctgaaagcccttcattgttccattctggggactgggtgcatgaaggaccccaaggggctttgcatgtttcatcctctgaccttatgcttagtcgaagtaaaccctgtgtgaaaagtttattttggcctccaaatgccatacagtaggattattgtttccatactcctgcagttaaaattccgtctccaacgtttgttgacagttaccagagaagatgagggcattattccctgccttcatgacttctcttcccctttgctcttgtctacacacgctgcccttctgaaagtgaatcatgagtattttcagtccacccatactaaattacttacaaaggaaaaaaggtagttagcaacattattattttctcccatgagtctttgggatttctctgtagatggtctgctcaagctgtagtaaaagtgactgctctatctttgtttaaaaattatctgataaaattccatagctatggccaggcacggtggctcacacccgtaatccctgcactgtgggaggccaaagtgggcggatcacttgaggtcaggagttcaagaacagcctggccaacatggtgaaatcccatctctactaaaaatacaaaaattagccgggtatagtggcgtgctcctgtaatcctagctattcgggaggctgaggcaggagaattgctttaaccgagaagatggaggttgcagtgagctgagattgtgtcattgcactccagcctgggtaacagagcgagactccatctcaaaaaataaaaaaaaaagtccatagctgtgacttgttccttgctttttagttttttgttttggaagttaaattcatgtgaatccacatgacaatgattaaccattttaaagtgggcaatgcggtggcatttggtacactcacagtattgtgcagccaacacctgtctttagtttcagaactttttcagctccccagaaggagcatctgtttaggctgggcacagtggctaacccctataatctcagcgctttgggaggctgaggtgggaggatcacttgagcccaagagtctgagatcagcctgggcaccagagtgagacctcatctctacaaaaaaaattaaaaagaaaatagctgagcgtgatgatgcacacctgtagtaccagctacttgagagcttgagaggctcaggtgggaagatcatttcagcccaagaggttgaggctgcagtgagtcatggtcacatcaccatattccagcctgggcaacagagcaagaccctgtccttaaaaaaaaaaaaagtggccgggcgcagtggctcacgcctgtaatcccagcactttgggaggctgaagtgggcagatcacaaggtcaggcgttcaagaccagcctggccatcatggtgaaaccccatctctactaaaaatacaaaaattagccaggcatggtggcgggcacctgtaatcccagctactcgggaggctaaggcaggagaatcgattgaacccaggacgcagaagttgcagtgagccgagatggtgccactgcactccagcctgggcgaaaaagcgaggctccatctcaaaaaaaaaaaaaaaaagaacacctgtatcccttaagtaatcactttccattcctcctctcccctctgcccccctcccttccccctcattccctggcaaccaccagtctgtgttctgtctctggatttgcctgttctgaatattttatataaatggaaccatttcacatgtatccttttgtgtctacttctttctttgactcagcataatgttttcatggttcatccaatttgtagcatgtattttcttttccctttttttttttttgagatggcatttcgctcctgttgcccagagtgcaatggcacgatcttggctcactgcaaactccacctcccgggttcaagcgattctcctgcctcagcctcctgagtagctgggattacatgcgtgcgccaccatgcctggataattttgtatttttagtagagacggggtttctccatgttggtcagtctggtctcgaactcccgacctcaggtgatccacccgcctcggcctcccaaagcgctgggattacaggcgtgagccactgtgcccagcctgcagcatgtattagtactttgtttcttttgggggtaatattccattctgtatatatactacaatttaactgttcatctgttgatggacatttatattatttccatgtattggttaaaatgaataatgctactataaacaattgtgtacaaatttctatgtggacttaaatgttttaatttctttccttctttcttggggaggagacggtctcactctgtcacctaggctaaagtacaatggtgcaaacacggctcattgcaacttcgacctcccagacccaagtgatcctcccacctcagcctcccaaatagctgataccacaggcatgcatcaccatgcctggcttattttttctgtttgtttgttgtggtagagatgaggtctccctatgtagcccagccaggctggtctcaaactcctaggctcaagcagacatcctgcctcagcctcccaaagtgctgggattataggtgttagcctctgcacctggctgtgttttcatttttcctgggtatatatttaggaataaaattgttgagtaatatggtaactccatgtttaattttttgagaaactgccaaactgttttcctcacaactgtaccattttatccagcaatagtgagagtccctgttttcttcacattctttctaacaattaataattattttattatttaaagctttcctagcaggtatgaagtagtacctcatgcttttgatttgcatttctttaatgaccaatgatattgggcatcttttcatgtgtttcttggccatacgtatagctttttttttttttttttttttgagactgagttttgctcttgttacacaggctggagtgcaatggtgcgatctcagctcaccgcaacctctacctcccaggtttaagtgattctcctacctcagcctcctggcctcctgagtagctgggattacaggcatgcaccaccacagccagctaattttgtatttttagcagagacgggttttctccatgttggtcaggctggtctcgaactcctcacctcaggagatccgcccacctctgcctcccaaagtattgggattacaggtgtgagctaccgcgcccagccgttgtatagctttttaaagaaatatctattgaaggtgccgattttaaaattaggttgtcaggccgggcacctcaggaggctgaggcaggagaatcgcttgaacccaggagggggaggttgcagtgagccgagatcgcaccgctgcattccagcatggcgacagagcaacactgcatctcaaaaaagaaaaaaaaaattagccaaatgtggtggcacatgcctgtattcccagctacttgggaggctgtggtgggaggattgcttgatcctgggaggcagagccaagattgctccactgcactccagcctgggtgacagagtaagaccttgcctcaaaaaacaagtaaataaaagactgacattcctatttatgtagataagttcattttttctcattgtactgtatttaccaaataaatttaagacaaaaatgcccttttttatagagtaacacagcatctggtggaatgacacgacgaaatacttatgtttgcagtgagagaactacagctgatagacactcagtgattcagaatggcaaagaaaacaggtaggagattctacctgtttgtaagaaaagttgtttttcccaagagaaatggaagcatgttatttactgctttgttcttataatcattttcaaattaaaactgtaagtattctctgaaggtaagttaaatttgtatactaatttttagcaagatactagaattctaaattctttttgttgtccagagcatcatcctcctgcctggctgtgtatgatgattaaaaggcttgagttaaacccagggggtttcctagaggaagtagatagtaagctgtggttatgttgtagaacagtgaataaggaaatggagattgtcttgtgctcattaataacttgaacaaaagccgaaagtgggggaagataaggacgtgaggcagagagtcatacctcaggagaatgtacagcaccaggtagcattaaaggtccgcagtttaccaaagggtccagatggctgagtctaaatagaaacactggagaagccaagagaagtggaaagtccagccttctgaatgcttttaatttggctacatagcaagcatacataggatgagcgtgactttaaaaagacaatgatgttacatgtcaataaggagagcatcctatcatgcacatgattttcttggggttttgaaataaaataagtagagtcagtaaaatgggattggataggtgtagagactctgaggtggggttagtctgggtggagagaaaagagaagttagattggtagagaatagctaaatatgctatattctgttcagaacaaatttcccaggctggcatggattttccttctttgtttttggaagagcagtaagtgtacatcattcttttaacttgaacattgtttgcatcagaattgttctgacatttactttctgcagttacggtgtgaggttctgtttcttaatcctaacctatgtttgatctcattagtcaaacaaaatgtttgatcactacattttgtgacagcctaatcaaaaattctctcctccttcatccttagttccaaactgcttatcacttccctgttccataggccacttaggtaagagttgacatgaggagtaacatttggtctgtaagattatggttattattcgttgaatttttagcaatatttacattctcttgttctcttttatgactcgtgtgtgtgtgtgtgtgtgtttcaacattgtcttttcttatgattaaaaactactaagaacttgagtatagcagctggggtagatagtttacagataatgattgatataggtatttctttttttttttttttttttttttttttgagacagagtctcactctgtcacccaggctggagtgcagtggcctgatctcggctcactgcaagccccgcctcccgggttcacgccattctcctgcctcagcctcccgagtagctgggactacaggcgcctgccaccactcccaggtaattttttgtatttttagtagagacggggtttcaccatgttagccaggatggtctcgatctcctgaccttgtgatccacccacctcggcctcccaaagtgctgggattacaggcgtgagccaccgtacccagccaggtatttcttaatagtagtctactctctggtagatttgtattatagttcagttcttaactttcaaatttcttctagttcaaaagtgacttaatagaaaatatcaatagaagacttaattagaagtttctggtgttacagattgtagtctacaggactacagaaatgtttcatggtcaggcacagtggctcacacctgtaatcccagcactctgggaggccaaggcaggtggatcacttgaggtcaggagttcgtgaccagcctggccaacatggtgaaaccccgtctctactaaaaatacgaaaattaaccatgtgtggtggcacgcgcctgtagtcccagctaccagggagactgaggcaggagaattacttgaacccaggaggcagagtttgcagtgagctgagatcgcgccactgcagtccagcctggacaacagagcaagactcatctaaaaaaaaaaaaagttgtttcattacctttactacttctaaattctgaaaatgcactacccagctccttctgaactttaggatatgtgactgtctgaggtgcagagtcagtctcctcaagggtgttaagactaagatctgctctctgcttccatcctgtgctacacgtatcatacaccaggcacatgcatatatgcctgtgtcttctgattctcttttcctaaaatttttcgtttcactctttggaaataatatttaagacttctttaatttctttggcaatatttcctttctgcattccccctggagacacctgccttgttggggccaactctttcatatcctgacctgtctcgttgcttctcttagcatcagtcattgaaatactttgcttctgaaggtgtcgtctttctctttagtcaaagagagtctcaccgccaaaccttaaaagacagggcccattgttttaataatatttggactttcctttcctatcttataaatgaattaaaagactggaaaattattgggtttaacttctttagttaaggcactaaatgtgacagctttcccttaaaattgatgcttgagtcttcagtgagatacaattagctttccctgcacagatgacttcttcggcaaattgttccttttccctctcttcacccacccatatatcttatttcttcactaatttaaaatatgagtgagctgtaggatgcctggacctatgttaacttctgaaacaaacatgttaagttccaattttagccttaaatattttcgacatttagccttaaatgttttcttctttatatgagtgttcatacggaatttcaacatgagaataatgatggctgattttttaaaaactgtgtgaaggtttaaaccagagactccacatatcttaagcccttactaccttcaaaatcctactgtaaacaggatattttaaaggcttactaaatgcaaggctttttctcgtcataggcaatataattaattttaattattttttcttttgaaaattagttttattaattggttcttactaggccaatctttgttttatcagctttcctgtgggaacaataaagttaatgacacagggagcataggttagggccagttgttactttggcacaaacacctgtgattcgttttctgagactagttttaaactggtcgtgctgaaggccagcccactttctgctgtaattattctgccttctgatgttattctcgaaaaatggccagattccaggcgtgactaatggttggtgtaaactaggcatgagaaggtttgattacaccttcaattgtatgattctatcatgatggtataggtttgcagtgagtcttaaaccacatagcactgacacgtagtgagtgctcaaacaaatgttagctttcattattaattatagactgttcagacaaggttatgcagaattttcttagtttgcactgactaaacctaatctttcaagttaataatgttgctaaaccacctacatagcagagacactctgctcctacgatttcatatgctttagatacccggacgacactgtttagactacttcatttaaagaccccagagaagtgacgtgctggtgttacagtaatgcaaacagaatcttttcttttttttttttctttttttctttttttttctgcgatggagtctcgctcttttacccaggctagagtgcaatggcacgatctcgggtcactgcaacctccatctcccgggttcatgcagttcttctgcctcagcctcccagtagctgggattacaggcacacaccaccacacctggctgatttttgtatttttaatagaaatggggtttcactaggccaggctggtctcaaattcctgacttcaagtgatccacctgccttggcctcccaaagtgctgtgattacaggcatgagccactgcaccaggcccagaatctttcaaataaattttagatattggatattactgtaaagtttcaaaattgtgaagtggcttattattttatccactttaccctgcatcaagtcacatagagattgagcagagaaggattgaggacacttagcgtatgtatctttggactacatataaaagttgctttttttaggctgggcgcggtggctcccacctgtaatcccagcattttaggaggctgaggcaggtggatcatgaggtcaggagatcaagaccatcctgaccaacatggtgaaaccctgtctaaaattaattagctgggcgtggtggcatgcgcctgtagtcccagctacttgggaagctgaggcaggagaatcacttgaacccaggaggcagaggttgcagtgagccgagatagcgccactgcactccagcctggcaacagagcaagactctgtctcaaaaacaaaaaaaaagggctgagcacagtggcttacgcctgtaatcccagcactttgcgaagctgaggtgggcggatcacctgaggtcaggagtttgagaccagcctgaccaacatggagaaaccccatctctactaaaaatacaaaaaaaaaaaaaaaaattagccaggcatggtggcgcatgcctataatcccagctacttgggaggccgaggcaggagaatcgcttgaacccaggaggcagaggttgcggtgagccaagattgcaccattgcactccagcctgggcaacaagagcaaaaccccatctcaaagaaaaaaaaaaaaggctgcttttttttttttttttttttttttaagatggatggagtcttgcagtgtggcccaggctgcagtacagtggctagtcacagacatgatcatagtgtactgtagccttgaactcctgggctcaaatgatcctcctgtgttggcttcttgagtagctgggactacaggcatggaccaccacacctggctaattttttattttttgtagagatgaagtcttcccatgttacccaggctggtctcaaattcctggcctcaagggatcctccagtctcagccttccaaaacactaggtttacaggcatgagccaccatgcctgtccttggactatatttttaattctgcttttgcccagtcacttgagtatgcttttaatcagcagccaatacatttcttatcagaatgttctgataggggctagaggtcatagcaacaaattcaaagtgcctatcctttagtaaccttaagtggattaatgttttagaaaagatagtcaagactgggcacagtggctcacaagccctgtcatcccagcacttcgggaggcctagacaggaagatcacttgaggccaagagttcaaggtcagcctggacaaagtagcctgagacccccgtctctataaaaatatatatattttttaattttaaaagatagtcatgaatacaaaacagttgggaagattaataggaactctcttcatgcaacttgaattttaagaaaaacattgctatttctatcaattaaggtttaaatgtagaccaggcatgatggctcacgccaccatgtaatcccagcactttgggaggccatgacaggaggattgcttgaacccaggagttcaagaccagcctgggcaacatggtaaaattccatctctaccaaaaatacaaaaaaattagctgggtgccaggcacagtgcctcacacctataatcccagcactttgggaggccgaggcaagtgcatcacctggggtcgggagttcaagaccagcctggccaacatggtgaaaccccatctctactaaaaatacaaaaattagctaggtgtggtggtacatgccggtagtcccagctatttgggaggctgaggcaggaggatggtttgagcctgggagatggaggttgtagtgagccgagatcacaccattgtattccagcctggacggtagagccagacccagtctcaaaaaaataaaaataaaaaaattaatgtaatacagctactatgaacccacaaaaactttaaaaaaattttttaattattaaaaaaatgtaatgctgctactgttttgcttatgtagattgtgggctagaataggaaataaaactatcatttttaacacttttctggggggaaatattattcgaatttcataacaattagcttgatgaccttttagaatatatatgtagaccattgtgatgttggggctgcctgttgtaaataggatttttgtgagcttgattgtacaaaattgaaatttgcaaacatcttactgagtttactgtttccttctgggtgttaggcctactgtagaaatcagaaaaatcggaaatattttgttgcttgctttgtgaaactcatgatgtgacatggattaaatttctaaaaagtttatttaattgcctttaaaattagtatgtcaaaaagtttatttatttatttatttatttattttaatttgaaacagtctctctctgtcacccagactggagtttagtggcatgatctcagctcactgcagctaccacccccgggtttaaacgattcttatacctcagcctcctgagtagctaggattacaggggcccgccaccacacccaactaatttttgtatttttagtagtgatgggtttttgccatgttggccaggctggtctggaactcctggcctcaagcaatccacccgcctcagcctcccaaagtgctgggattacaggcgtgggccaccacgccagcctcaagttaataatttataatcccagcactttgggaggccaagacgggcggattgcctaagctcaggagttccagaccagcctgggccatgacgaaaccctatctctacaaaatttttttttttaatttataatgagaaaataaatttacatttccttcttaggtctctagaggatccattttttttctgcaaagcatctgtccacaccctcttaccatgcttgtatgccttaaagatctagcttggcctgtcagcagtgtgcttcattgggaatcgatgcagcaccctcctgcctgcaagctgactaaaagccttttccttctccaaagactttgggaccatttgtattcaccagggaaagggtcaaacaactcctgcatcttcttcccctgcttttcttggcacatctactgatactagctcctaatttgggcaagaaaaaagtcaacaactggaggtagagtgtgttgaccctggactcaccctgaaaggtaagggcacaagagatagttgtatttagctgtatcttgttagaaaaatacatttgtgtagccaggcgcggtggctcacacctgtaatcccagcactttgggaggctgagccgggtggatcacgaggtcaggagttcaagaccaccctggctaacatggtgaaatcccgtctctacgaaaaatacaaaaaattagccgggcgtggtggtgggtgcctgtagtcccagctacttgggagactgaggcaggagaatggcgtgaacccaggaggcagagcttgcagtgagcagagatcacactgcactccagcctgggcgacagagtgagactccgtctcaaaaaaaaaaaaataaataacatttgtgtgcattcatgtgtacgtgtgtctgtacacatgtacaagaaacaaccgagcatttctttaaaaaccttagtcagttagaactgtctctgttgcaggtgacagaaaacccagtctaaacaggcttaaatataaaagggctgttagttcatataactaaaaaaagtccagggctagagttacggtccatctgcttctgcctccttggccgtagttccatgattgggctcggcaccatcagacataacttcttcccacacacagctgtgctcaagcagaagccctcaggtggtctccttgatctgtgtggggcctagagttacttccaccacagcaaaatctcattattgttgctgcaggaaaagaatggatactgagtggcagaaatacgaaactggataaatttttgcctttataagacatttgtttccagtccttctcagactgtataaattctcccaagtcagagagcagaattctcaaacaaaaatgcagggacagaaccaggcacagtggctcacaaggcctataatcccagcactttgggaggctgaggcagaaggatcagttgaacccaggagttcaagaccagcctagccatcatagtgagacaccatctctacaaaaaatttaaaaattagccaggcatagtggcacactcctgtggctgagataggaggatcgcttgaccccaggaggttgaggctgcagcaagctgtgatagtgccactgcactctagcctgggtgaatacagcaagaccctgtctccaaaaataaaaatttaaataaaaatgttttaattcagggacaagcagttcttgattttaaagacgtatctgctttatgttggggctatcagaattccagttgctaattgattaatctgctctgttaggagaacgtttgttgaatacctgccctgccaggctttctgcttacactggtggggggcacattgacaagattttgggctgtgttttcagggacctccagcagagaagggtcactaggatacaatgtggcatgcatgagctaaaaacagaagtgatttaactctcagagggaaaatggatcagataacacttcatagagatgacgacatctggttcatttttgaagagtgaatagaaagatcccagccctccataccaagagaataactcctgcaaacattttctgacctggtgcctgaccaatggaccacacatcatcaggaaggctagaaagttgagttccaggagggaatgatagaaggcaaagcctagagagatggcaggggccagacttcaggggcctggggatgtgtacttgcactccaagtcgaggagactgaactttttaccaaagacttggtgttctgtagaagtatgagcagatgagtgacaagatctggtttatatgttaagaagttctcagctgtaaggtgaatagattggaggtgttggggcaaaggcaggggacccagtgaagacaaggagcgaggctctatactgaggccctggtagaagtggagcagatgggccacctgaagagctactaggaagttgacaccaataagatgtcgttagtctgtgtatggggagtgagggaaaggaagaacttgccagtttccaggttttaatccttccaaaggatttctgcagaaagacactggaagagctgtattcctacttatccttaaaggaaagaaactgcccttgaattccaaggacatgattactgagctggaattccaaataatgtgtcccagtgagactcctgggggtagttttgtccggtaactgtgtgtgttagatgaaactgcagacttccagccactctatcttaccatgtctgttaacagttaatttgctctgatgaatttgcccatcttggagaagggggctctgctgactgttttttatcttggagtaaatgtcctttgattaggaaggttctagactatattgttaaaacaacattggaaggctgggcatggtggctcatgcctgtaatcccaacactttgggaggccaaggcaggcgtatcgtttgagcccaggagttcaagaccagcctgggcaacatgacaaaactctctctactaaaaatacaaaattagccaggcatggtggagtgcgcctgtattcccagccacttaggaggctgaggtgggagaaccacctgagcccaggaagttgaggctgcattgagccatgatcgtaccactgcactgcagctaggtgacagcaaaaccctgtctcaaaaaaacaccaaacaacataggatactgttatataacagctagttcctatacctgtaatcttattaattcatttaaaatacatcagtgcgggccgggtgtggtggctcacacttataatcccaacactttggaaggccaaggcgggaggatcacttgaagccacaaatttaagaccagcctggataatatagcgagaccctgtctctacaaaaaaaataaataaagaaaaaataaaatatgtcagtgtgttttgggaacaggttgagagcatagcatgctcatattatatattcattttaccacttagatttgaattgaggcatctcttagaataggttttattttgtgcataccctcagaggacattgtccctctcatagaaacagatattcaaacatgtaatctgctattttattttaaggtaatagatttttatgattactgtttggaaaaaaaaaaaagcaactataggttagcagttgctccagaatctccaaaacaagcttaggagatttttattctttaccagaaatgagatggcttgggaggaaggtgtgtgcattacacacaggttgctctgtggtcactgctccttcatactgtgtttctgcctctgcctgaacccaaacccctcccagcctgacagaaatgttcgcttacgcagctagccctgcctcagtttgtacatctacctgtcggctgagacatcagaagtcgatgtccatgtcagcctctgggcaccccaagatgatgttacctccaatagacagtgaaggagataacttcaaggctatgtaagaaaaatgcacattctttgtgaaactaatgtgtacccactgcttcttaattttgtgctgtggattttatagtctgagattttgttacagttgtccacaaggcgtccttcctccatgtgattttagttaagcacatcttttgtcatgatgtcctcggttgtgtattgtgtgtcttcgtgccttcgcgtactacaaaatgtataagaagttcctgctcctcccaagttgctttcagcatgtggaattttatacatatatcatttgtttacttccaaaactttttagttgcctgttcttcagttacgccagcatatcctttatttctttcgtattggcacagttctctatgtaagcaatttgagagggaagcaaaggggaaaagtttgagttagctgttctctgtcctagaatttccctgcattaatcttgtccttgaaaatatatataatactggtcccttaaactccatgaggctttgtctcattatgtattgttcttttggtaccctttcccacttaacttaccttttgctcctaagtcctataaaataccccttggatctggattttttatacccgattttctccactgtgtataaaaggtatattgtgactgtaaatttttgtatatcatgttctgagagcttcttactttctgatctcatagcactattcctgatcagagaactccagttgcttcaacacacagtatcagtagtgcagccaccccagatcgaatccgcttcccaagaggcactgccagtcgtagcactttccacggccagccccgggaacggcgaaccgcaacatataatggccctcctgcctctcccagcctgtcccatgaagccacaccattgtcccagactcgaagccgaggctccactaatctctttagtaaattaacttcaaaactcacaaggaggtaagtgctaggtgctggttgttttggagtgaacacatagagcaaaaggaaagatgtcttttttgttgtgtgaagccactgctacctggatgcttttcagtctgccttcagctcatggttttctggttttatatatatctaactttatactttaaaacctttaaagtagaaattgtagagctcagagtcttcataacactaaaagttaactagcatttaggaggtttttgttactgttctttaattattgttccttttgctcacgtatctgtctgcatggcatgttcgttgttgttgagcaggcagacctcgagttctggtgtggggtggggggctggcactctgtaacaatcagcaggaaagaccatgcatgtctttcataatcatctccagccccagaggaaagagacagcttctcttttctcactttattgttgttaaggagcagtaaatttcttaagagtccaaatcttgaaagtttctctctcagtcttagtaatttatattgagagcaaggtaatgtccttaaatggtatagttttggagataaaatctctggtttattatcaaaaaataatgttactattattaagttatttttattaaatgctgcatgattcttggctgatggtcctggaaattttttaaaatgttccatgtgtctagtaggctagcatctggggcctcagtaaactctcaagggtcctttgagattaacttcatttccgtaaccttgttacctgttacaaaagcccagaaatactggctgcttcaagaggaaaaagaaaggataccactttgaaccgtaaacaatagtgaaaggcacctttccgagaaggagcccaggaaacccaagagcccctgcagtttcaggacatccttggagaaatgttttgaaattaagcctagctgtggatgagtctgtctgtggtatcttgcaggtttgcctaggacggaccctcttatttgtcatctgtagcttacaggacagcagtaggagtctttcccgagtctgaaatgatcagtaccctcctctgtttttctgcattccctatggcctatagcctattacttcatttcactccatctccattatttaaactaagctaaatgtaatcttgtattcgatcatctgaaacttcggtgagtcacattaaagtctgatctacttattattaggacatggaatagattagggagtattccttttttttttttttttaattttttttttttttttgagacggagtctcactgtcgccaaggctggagtgcagtggtgcaatcttggctaacttcaacctccgcctagattagggaggatctctgacatccattagcattaactagaagtcagacgcatcagaaggtttctatttaccctcttactcacttcttagcccctttattaagccacctcattttaaactgggcaaaacagaatcagccaaagagctttgccaggtttgggacacccattcatgaccagccagcaagagagacagtgagttcaatctgagaagagtctggtgactcccagaataaaccattccttcctggccagccgtggtggttcatgcttgtaatcccagcactttgggaggccaaggcgggtggatctcctgaagtcaggagtttgagaccagcctgaccaatatggtgaaaccccatctctactaaaaatacaaaaattagccaggcatggtggtgggcgcctggagtcccagctacccaggaggctgagacaggagaattgcttgaacccggaaggcagaggttgcagtgagccgagatcgtaccactgcactctagtctgggtgacaaagtgagactgtgtctcaaaaaaaaaaaaaaaaaaactttgagtttatttttcttctttgtactcttttttcagtcattttaagactagtattgggctgggccggatggctcatgcctgtaatctcagcactttgggaggccaagaggggcggatcacctggggtcaggagtttgagacaggcctggccaacatggcaaaaccccatctttactaaaaatacaaaaattagccaggggtggtggcgctcgcctgtagtcccagctactctggaggctgagccaggagaatcgcttgaacctgggaggcggaggttgcatctagccaagatcgcgccgctgcactccagcctgggtgatgacagagcgagactccatctcaaaaaaaaaaaaaaaaaaagactagcattgattggccaggcatggtggctcacgcctgtaatcccagcactttgggaggccgaggcaggtggatcacctgaggtcgggaatttgagaccatcctagccaacatggagaaacccagtctctactaaaaatacaaaattagccgggcatggtggcacatgcctgtaatcccagggagactgaggcaggagaatcacttgaacctgggaggcagaggttgtggtgagccgaggtcacgccattgcactccagcctgggcaacaacagtgaaactctgtctcaaaaaaaaaaaaaaaaaaaaagactagcattgattttattacatgtatataatggaaaaaaggaaacaagattatcattgataaaaatatcagctacctctttttttttccccacagagtctcactttatcgcccaggctggagtgcagtggcatgatctcagcccatggcaatcttcgccttccaggttcaagtgattcctgtgcttcagcctcccgagtggctgggactacaggcgcccaccatcgcgcctggctaatttttgtatttttagtagagacccggttttatcatgttggccaggctggtcttgaactgctgacctcaagtgatccaccgcgcccagccaaagctaccattatttgaatgcttattatgtgctaaggtagatgtctatatacatagatacagtcatattcattttatacatataaatatgtatgtacattatatatatgcatattttatgtataaaatgagtatcatatatatacacttatatgtgtgaaatgagtatatttatacacatgtacaagtgtgcacacacactcatttaatttaatctccatagtccaccccattttgtaaaagaaactgaaggtgaagtttggagagattaaggcacatattttaaaaagtatcagggcctggtgcagtggcttacgcctgtaatcccagcactttgggaggccaaggcaggtagatcaggtagatcactcaaggtcaggagttcaagaccagcctggccaacatggtgaaaccccatctctactaaaaatacaaaaattagcttgatgttgtggcacatgcttgtaattccagctatttggaagggtgaggcaagaggatggcttgaacccaggaggcgtaggttgcagagagccaagatcacaccattgcactccagcctggcgacagattgacactccatctcaaaaaaaaaaaaaagtatcaggctgagccaggtctatctgaccagactctgcccttttagccactacactgtgctccctttagaaaaaacagttgcaggcgtgacagttgcattacatttatttcatatatttgaattaaaattggagactcaggcttgttgtttaaaaaaattctaagtggtcatcttgtttacaatttccaggctatttccacacccccagatttttgcagaaagatagtcttttatcctgtcttgttaaagtttattaactgaggtctgttgtctcccttagtgctatacttaatcagctactgacagtttgttcttaaaaacaatcaaaatccttgctagagtggttgaaagttcttatcctcctttagcaataattggtaggattaaaattgcattgcctgaaaggctgaggtgtttgcacttagatgctgcaagggagacctggtgtggccaggtctggagagggctgcagtcaggaagcctgcactctgcttggagagcacatggctttggagagctatgggctatttgtagtcgggagcaaaactctctctccttaggatcaggcctggccttgctcagagactgcagagtcacccataccctgcaggcagaacagccaggcacacgcaagtgcctctgccctcaggttgatccatgttgccatgggcagtgtgaaggcctcctcctgcagctgcctccttcctctttatacctcaagggattataggaggaaaagttaagaaaagcacttctatagtaattgaccagtaaccctgatttttccggtggaagattaggaaatgtccaggcaccatggctcatgcctataatcccagcactttgggaggctgagccacatggatcacttgagcccaggagttcaagaccagcctggacaacataatgagaccccatctctactttttttttttttgagacggagtctcgctctgtcacccaggctggagtgcagtggcacgatcttggttcactgcagtgtctgcctcctgggttcaagcgattatcctgcctcagcctccccagtagctgggactacaggtgcatgtcaccacgcccagctaatttttgtatttttagtagagacagggtttcaccatgttggccaggctggtcacaaactcctgacctcaagtgatccgcccacctcagcctcccaaagtgctgggattacaggcatgagccaccacacccagccttttatttttttaataaaaagaaaaaaagttgggaaatgggccaggcactgtacatggctcatgccagtaatcctgacactttgggggaaggtgaggcaggaggatcatttgaagccaggagttcaaggctgacctgggcaacataatgagacccccatctctacaaaaacattttttaattagccaggagtggtggtgcatgcctgtagtcccagctacttgagaggctgaggcaggaggattgctcaaacccaggagtttgaggttacagtgagctatgatcacaccactgtactccagcctgggtgattgagcaagaccttgtctctaaataaataaatatttaaaagtaaaagaaaattaggaaacgaaaatatatcttaaagacttttaatcattttcaactaaaatattttggataatactgccttatatttaggcagtatatattaaagattttcacatgcatgattgtactgtcgatgaccctgctgtatactactgatctgattatgaagtggttggcagttatttatagtagttagactttttttaaattggtagattaatacctaaagcaatgccaaagttatcccaaccaaggatttcattaatttagtcattcagcagatatagatgactgcctgctatgtacagttacagaactggactttacaaatagaaattaacaaactcagcctatttttgcccagggaagctgatcgcattgatcataaaaacctcattcgtagtttgaaaaatattttgtcagattattttcagcacaacctgcacatctccttaaatttttttaatgaccagagttaccccttttaaatagaattcttcgtgtttactacataaaagtaaaattcatactgttgtcttgacacttagtttttattcattttgagatctaagactgaaaagtctacttgtttaaatccccaatcacctatttttttcttaaaaagtgatttatgtcataccactgtagcaaataatatgttaatgtttgtttcattttcctgaaagaagtaatgatttttacttagtggttaaatattttataatgaaatttttaatgtttatgtaataaggcaagatttttgttcataaggtattctgaagaaaattgaaaaatgttttattactagtacattgcaaatgtcttgtcacttctttaacataagacataaattttatcttagaaagtgtatctggccattgcagtggctcatgcctgtaatcccaacactctgggaggccgaggtgggctgatcacttgaggccaggagttcgagactagactggccaacatggcaaaaccctatctctactgaaaatatagaaattaactgggcatggtggcgcgcgcctgtgattccagctactcaggagactgaggcacaagaattgcttcaacccgggaggcataggttgcattgagctgagattgcaccactgcactgtgacagagtgagactctgtctttaaaaaaaaaaaaaaagtgtgtccatctgaagaacttttaattacagctaatgtcaatatgtactgctaaaccttttcttacttttttttgatatattaaaagatcacatactcatttaattacctgtaataattttactttttcaacaaatgtcagcatttctttgttcattggccagagaaggaaccctgctttgttttttttctttctctctgtaattgattagattttctgtttaatttgtgcgagttatttttgttaatttttttttttttttacttaatttcttttagaaacatgtcattcaggtttatcaaaaggtaggatttatatatacacatttatttttcaatcctcactcccaaatggctcctgcaattaacattaggtttggctttctggccctgttttttccttataaactaaactttctgctgataactaaatacttaattccttgaaaggaaattgaaaagaaatagattaactctgtcaggcattttaaagggactatggtacccatgcaacaaaaggctgatgcatgctctgtgtattttctttctttggtagaattatttagcatccaaataattctgtcttcatactaataacacttagcatgctcctgtttgaagaatgagatgctcagtaatgttaatgtacaattaatgattatccacaggcatgcaaaaggtaagtattagttgtgttatttttatttcactgaggatggaattagcaaaaggctttaaaatgacaggaaaattagctaatacagaaaacaagcataaaattcaaagctacagcctcatttgatttggctttttcagaaattaaaatgtgaacagctgcgtagcagaaatgttttaatattttcagagttgaaagccactttccagcaaccactgaagaaagagtatctcattatttttacttaaagcactacagaaagtggtgttctgattttattaatattttttaggccaggcatggtggcttatgcctgtaatcccagcactttgggcggatcacttgagcccaggagttcaagaccatcctggacaacatggcaaaaccccgcctctacaaataatataaaaattagccgggcatggtggcacgcatctgtggtcccagctactcaggaggctgaggcaggaggatcacctgagccctgggaggtcaaggttgcagtgagccatgatcatgccactgtgctccagcctaggggagtgagaccctgcctcaaaaaagaaaaacatattttttgatggtgataatcaagaaaccaaaaatattgctttcttaatgcacacatgaggcaggaaatctttcctgaagggctacattgtacctgtgcctctcaagtcaccagaaggccaagctgcaggtcaaaactgcgggaaaagcactttcttcctgttggcagttccattctattattattttttaattgatcttcccacttgtctgatttttccttggacagaacaggtaataactgaatatagaatccagctgatagcctcattggcttttaattggaaacccattatactgtgtggcacaattagaaagtgagaataaccccattctgaggccgagtgtgctcaggctgaagagccagcaggagtgcccgctgtgcgtgcgtggtgtgcggtgtgtgcagtgtgcagcgtgcagcggtatggcatgcaatgtgtgtgatgtatgcagtgtgcagcatggagctggcccctgtgcacacccctgcagccttgtggaagaaggtagcgctggctcagtcaaatgagaggaagagttttcataagcccggctggtgtttaaaacgtgttttggctttgttcattttatggtgttggtgttggtattggtggtcatgtactggcatgtaagatttcttttctctttccctcttctctctgcttctacattctgttcattgaggcttccaactgaatatgagaggaacgggagatatgagggctcaaggtgagggaaatgatttttacttaaaatttttttcaggtgtttacttcatttctgtggcagaggcgactattttctgaatgttccctactgtattcctgctgtctctgtaggagttacgtagagagggtggccacaagggggcgccagcctgccatgagcaccgtccagatccagcttggcctccgctctacatttgtgtttgtgttcaaagcacggcgaggccttcagccttcctgcctgggcgttaacagcctttggaggtctgggttgggtagcagtgctcagagaaataagccctcagttcatcactgacccctcacatggttctcttcacaaggaataaaagcaaagtacttaatagaatgtccatatttcaaactagatatgttttcttctaagaatggtgattatatagttgagtgttttgcttttcttttttttttttctgagacacggtgtcgctctgtcacccagtctggagtgtagtggcgtgatcagggcttactcgagttcccaggcttatgcgatcctcccacctcagcctcctgagtatctggaaccacaggcactgccaccatgctggctaatttttgtattttctgtagagatgggggtctcgccatgttggccgggctggtctcaaactcctaggctcaagtgaacctcccacctcaacctcccaaagtgctgggatgacagacatgagcccccgcacccagccttgcttttccattttgtatagttatcattgcatggatttgaggggaggcaatcaccaggtagccttaggactctatgtcccttgttctaggtctcttccacttgtgccctttttttatgccagtcaccagcaggctatttcaggtcctcattcaccgtttgtccttttggtctttctaaaagcccgcttctggtcatatgacctttctgaattaaaaccttcagtgacctccactatttcacctggccacgtccctgcgaggccctgagtggcgtggtccaggctgccccagcagccccagctctgctgccccatcaaggcagagcactagggtgagtgccaggcagcattccctctccaggcctacccatcccagccaggagcaggctctagatcctggtttgtttccccacccataataggaaggtgacataataggacctacgtgggcatcaagtaagttggggcctgaccaccacaagtgctcattaagtgccaccagctgttgtgggggtgatgacactgtgcctccagttccactcagtctgtgtactttattatgccacagacacatcctgtactttcctacctcccctttggctgtgatcccctctactcaaaacaaacactcttccctatcttcattgcattttgttgaaatcccatggctcttcatagctctcctcagatgcaggcccacccccacccgtgctgtttcctccttgtctcatcctgcctgtcacgttctcctgctcggcgggctccacctcttctgctgccctctaggagatggccagcctttcctgtgctgccactgttgtctcaccttacagtcttcctggctccagatgagtttgagagcttttgcttatctttgtaacccatttagtatctaacgtggcattttatacataggaagcttctctcatcagtattggtggatgtgaaccaaattgaatactggcaggttggtgacacggagagctatgtgcatatgcaaaagctgtagcccctcacctctggttagttggccataggatggagtgtacttaaggtacatagactattttactcccaagaatgctaggcactcactgtcttaattgaggccaccagatacacacatgagaatataaataacggcttgtggcaataatgactaaatgccaaggagtggctggtaaaccgcggtgttccctagagaccccggcctgggctctacttaggctgcctcttggacatcagaccaaggcttacattctgaatccacagggcatccacatgggtggtgtcagtcccccacagacagagaagtgtcccgttgcatttttccatctattccagtagtaagattgtgtcatttgagattttctttaactgtataattggacgtttaattaacaaaccagagaggaggaaaaacaatgaggtgggtagagcatcatgttcagcctcagggctgtacagcaaagcaattttagactgcggatgttgagtctccagttaccctgagtgccagttacagtgattcacatctgaaagaacagtactgcaggagagggacagcccagggtggatgggtggggtgggcaggagctggctggcaactccttccctgagctgggcctgcagagccctgaggagtggggcatgctgtcctttttgcctgatttccaaggattctgcttaacgaattacttcgttcattttagtaagcacaggtggctggtgaagattttccagctaggtagatctttttgtgtgtggcttatgacttttagggggtgagggaagaaaatagacgaaaatagacttagttacaaatgtgagtctgtgcaggaaaatgtggaggtcagtcgttagttgtgttgtatcaaagacgtgaatgaggaactagctgaagtgtaagaggttgattttcctgtacgattaaaaataaacctgcctctatgcatttcagtcgcaatgtatctgctgagcaaaaagatgaaaacaaagaagcaaagcctcgatccctacgcttcacctggagcatgaaaaccactagttcaatggatcccggggacatgatgcgggaaatccgcaaagtgttggacgccaataactgcgactatgagcagagggagcgcttcttgctcttctgcgtccacggagatgggcacgcggagaacctcgtgcagtgggaaatggaagtgtgcaagctgccaagactgtctctgaacggggtccggtttaagcggatatcggggacatccatagccttcaaaaatattgcttccaaaattgccaatgagctaaagctgtaacccagtgattatgatgtaaattaagtagcaattaaagtgttttcctgaacactgatggaaatgtatagaataatatttaggcaataacgtctgcatcttctaaatcatgaaattaaagtctgaggacgagagcacgcctgggagcgaaagctggccttttttctacgaatgcactacattaaagatgtgcaacctatgcgccccctgccctacttccgttaccctgagagtcggtgtgtggccccatctccatgtgcctcccgtctgggtgggtgtgagagtggacggtatgtgtgtgaagtggtgtatatggaagcatctccctacactggcagccagtcattactagtacctctgcgggagatcatccggtgctaaaacattacagttgccaaggaggaaaatactgaatgactgctaagaattaaccttaagaccagttcatagttaatacaggtttacagttcatgcctgtggttttgtgtttgttgttttgtgtttttttagtgcaaaaggtttaaatttatagttgtgaacattgcttgtgtgtgtttttctaagtagattcacaagataattaaaaattcactttttctcagtaaaatctt

SEQ ID NO: 6764 - DNA, 115 bp, Homo sapiens
tggctaacacggtgaaaccccgtctctactaaaaatacaaaaaaattagccgggcatggtggcgggcacctgtagttccagctacttgggaggctgaggcaggagaatggcgtga

SEQ ID NO: 6765 - DNA, 324 bp, Homo sapiens
gtttcctaacctgtctcagtcgtctgtctctgtatactggagatgatcatactcagctgatagagttgtgaaaattaagcttagataagactgtgaatgtgaagcatctggctctatgcgtcagacacagcaggcactagataactgttagcttcctgcttcctccctgtcctgcttgtttaacttagcataaagcttatttacacatttgctgcctgccagtatctacctaatacataattccaatagagaggtgaatacataaagttatttgggctaatatcctgccactacctctcttgggattctttggctgctcttttt

SEQ ID NO: 6766 - DNA, 433 bp, Homo sapiens
attgaaatttccccaaacctaagaggtttcatctgtacatagaaatattttcaccatggaatgtatagtggttgaacttttgaagaaaagttgacttattgtctaaaagttttccatttgccctcttctaggtttgcactcaagactgacatttaccgtaatggaagctgttcatatgcccccaggaaagaatgaacaatttaatagaaaatgctaaaggagtgatattaggtgagcatctcatgtcatccgaagaaaaacataggcagattttctactctttaccttatttcccactttattttcaggatgtggggataaaaatgtagggtctgatgaatttttcaacagcttataattattagtgttattgttagaataccagaatataactaataaccaaatgtaaaatgtttggtaaggaaattgcttt

SEQ ID NO: 6767 - DNA, 433 bp, Homo sapiens; identical to SEQ ID NO: 6766

SEQ ID NO: 6768 - DNA, 433 bp, Homo sapiens; identical to SEQ ID NO: 6766

SEQ ID NO: 6769 - DNA, 433 bp, Homo sapiens; identical to SEQ ID NO: 6766

SEQ ID NO: 6770 - DNA, 4779 bp, Homo sapiens
gaaaaaaatttagacgaatgtataactagaataaccaatacagagaagtgcttaaaggagctgatggagctgaaagccaaggctcgagaactacgtgaagaatgcagaagcctcaggagccgatgcaaccaactggaagaaagggtatcagtgatggaagatgaaatgaatgaaatgaagcgagaagggaagtttacagaaaaaagaataaaaagaaatgaacaaagcatccaagaaatatgggactatgtgaaaagaccaaatctatgtctgattggcctacctgaaagtgacggggagaatagaaccaagttggaaaacactctgcaggatattataaaggagaacttccccaatctagcaaggcaggccaacattcagattcaggaaatacagagaacgccacaaagatactcctcgagaagagcaactccaacacacataattgtcagatttgccaaagttgaaatgaaggaaaaaatgttaagggcagccagagagaaaggtcgggttacccacaaagggaagcccatcagactaacagtggatctctcggcagaaactctacaagccagaagagagtgggggccaatattcaacattcctaaagaaaagaattttcaacccagattttcatatccagccaaactaagcctcataagtgaaggagaaataaaatactttacagacaagcaaatgctgagagattttgttaccaccaggcctgctctaaaagagctcctgaaggaagcactaaacgcggaaagcaacaaccggtaccagccactgcaaaatcatgccaaattgtaaagaccatcgaggccaggaagaaactgcatcaactaatgagcaaaataaccagctaatatcataatgacaggatcaaattcacacataacaatattaactttaaatgtaaatggactaaatgctccaattaaaagacacagactggcaaattggataaagagtcaagacccatcagtgtgctgtattcaggaaacccatctcacgtgcagagacacatataggctcaaaataaaggatggaggaagtttacctatcaaatggatactcatatgtcaggtgttgcaatcctagcctctgataaaacagactttaaaccaacaaagatcaaaagacacaaagaaggccattacataatggtaaagggatcaattcaacaagaagagctaactatcctaaatatatatacacccaatacaggagcacccaggttcataaagcaagtcctgagtgacctacaaagacacttagactcccacacaataataatgggagactttaacaccccactgtcaacattagacagatcaacgagacagaaatttaacaaggatacccaggaattgaactcagctctacaccaagcagacctaatagacatctacagaactctccaccccaaatcaacagaatatacatttttttcagcaccacaccacacctattccaaaattgaccacatacttggaagtaaagctctcctcagcaaatgtaaaagatcagaaattacaacaaactgtctctcagaccacagtgcaatcaaactagaactcaggattaagaaactcactcaaaaccgctcaactacatgcaaactgaacaacctgctactaaatgactactggctacataacggaatgaagacagaaataaagatgatctttgaaaccaacgagaacaaagacacaacataccagaatctctgggacacattcaaagcagtgtgtagagagaaatttatagcattaaatgccctcaagagaaagcacgaaagatccaaaattgacaccctaacatcacaattacaagaactagaaaagcaagagcaaacacattcaaaagctagcagaaggcaaggaataactaaaatcagagcagaactgaaggaaatagagacacaaaaaacccttcaaaaaattaatgaatctaggagctggttttttgaaaggatcaacaaaattgatagaccgctaccaagactaataaagaaaaaagagagaagaatcaaatagacgcaataaaaaatgataaaggggatatcaccactgatcccacagaaatacaaactaccatcagagaatactacaaacacctctacgcaaataaactagaaaatctagaagaaatggataaattcctcgacacgtacaccctcccaagactaaaccaggaagaagttgaatctctgaataaaccaataacaggctctgaaattgtggcaataattaatagcttaccaaccaaaaagagtccaggaccagatggattcacagccgaattctaccagaagtacaaggaggaactggtaccattccttctgaaactattccaatcaatagaaaaagagggaatcctccctaactcatttgctgaggccagcatcattctgataccaaagccaggcagagacacaaccaaaaaagagaattttagaccaatatccttgatgaacattgatgcaaaaatcctcaataaaatactggcaaaccaaatccagcagcacatcaaaaaggttatccacgatgattaagtgggcttcatccctgggatgcaaggctggttcaatatatgcaaatcaataaatgtaatccagcatataaacagaaccaaagacaaaaaccacatgattatctcaatagatgcagaaaaggcctttgacaaaattcaacaacgcttcatgctaaaaactctcaataaattaggtattgatgggatgtatctcaaaataataagagctatctatgacaaacccacagccaatatcatactgaatggacgaaaactggaagcattccctttgaaaactggcacaagaaagggatgccctctctcatcactcctattcaatatagtgttggaagttctggccaggtcaatcaggcaggagaaggaaataaagggcattcaattaggaaaagaggaagtcaaattgtccctgtttgcaggtgacatgattgtatatctagaaaaccccattgtctcagcccaaaatctccttaagctgacaagcaacttcagcaaagtctcaggatacaaaatcaatgtacaaaaatcacaagcattcttatacacaaataacagacaaacagagagccaaatcatgagtgaactcccattcacaattgcttcaaagagaataaaatacctaggaatccaacttacaagggatgtgaaggacctcttcaaggagaactacaaaccactgctcaatgaaataaagaggatacaaacaaatagaagaacattccatgctcatgggtaggaagaatcaatatcatgaaaatggccgtactgcccaaggtaatttatagattcaatgccatccccatcaagctaccaatgattttcttcacagaattggaaaaaactactttaaagttcatatggaaccaaaaaacagcccgcatcgccaagtcaatcctaagccaaaagaacaaagctggaggcatcatgctacctgacttcaaactatactacaaggctacagtaaccaaaacagcatggtactggtaccaaaacagagatatagatcaatggaacagaacagagccctcagaaataacgctgcatatctatagctatctgatctttgacaaacctgagaaaaacaagcaatggggaaaggattccctatttaataaatggtgctgggaaaactggccagccatatgtagaaagctgaaactggatcccttccttacaccttatacaaaaattaattcaagatggattaaagacttaaacgttagacataaaaccataaaaaccctagaagaaaacctaagcattaccattcaggtcataggcatgggcaaggacttcatgtctaaaacaccaaaagcaatggcaacaaaagacaaaattgacaaatgggatctaattaaactaaagagcttctgcacagcaaaagaaactaccatcagagtgaacaggcaacctacaaaatgggagaaaattttcgcaacctactcatctgacaaagggctaatatccagaatctacaatgaactccaacaaatttacaagaaaaaaacaaacaaccccatccaaaagtgggcaagggacatgaacagacacttctcaacagaagacatttatgcagccaaaaaacacatgaaaaaatgctcaccatcactggccataagagaaatgcaaaccaaaaccacaatgagatactatctcacaccagttagaatggcaatcattaaaaagtcaggaaacaacaggtgctggagaggatgtggagaaataggaatgcttttacattgttggcgcaagtataaattagttcaaccattgtggaagacagtgtggccattcctcaaggatctagaactagaaataccatttgacccagccatcccagtacggggtatatacccaaaggactataaatcctgctgctataaaaacacatgcacacgtatgtttattgcagcactcttcacaatagcaaagacttggaaccaacccaaatgtccagcaatgatagactggattaagaaaatgtggcatatatacaccatggaatactatgcagccataaaaaatgatgagttcatgtcctttgtagggacatggatgaaattggaaatcatcattctcagtaaactatcgcaagaacaaaaaaccaagcactgcatattctcactcataggtgggaattgaacaatgagaacacatggacacaggaaggggaacatcacactctgtggactgttgtggggtgggggaaggggggatggaaagcat

SEQ ID NO: 6771 - DNA, 7384 bp, Homo sapiens
gaaaaaaatttagacgaatgtataactagaataaccaatacagagaagtgcttaaaggagctgatggagctgaaagccaaggctcgagaactacgtgaagaatgcagaagcctcaggagccgatgcaaccaactggaagaaagggtatcagtgatggaagatgaaatgaatgaaatgaagcgagaagggaagtttacagaaaaaagaataaaaagaaatgaacaaagcatccaagaaatatgggactatgtgaaaagaccaaatctatgtctgattggcctacctgaaagtgacggggagaatagaaccaagttggaaaacactctgcaggatattataaaggagaacttccccaatctagcaaggcaggccaacattcagattcaggaaatacagagaacgccacaaagatactcctcgagaagagcaactccaacacacataattgtcagatttgccaaagttgaaatgaaggaaaaaatgttaagggcagccagagagaaaggtcgggttacccacaaagggaagcccatcagactaacagtggatctctcggcagaaactctacaagccagaagagagtgggggccaatattcaacattcctaaagaaaagaattttcaacccagattttcatatccagccaaactaagcctcataagtgaaggagaaataaaatactttacagacaagcaaatgctgagagattttgttaccaccaggcctgctctaaaagagctcctgaaggaagcactaaacgcggaaagcaacaaccggtaccagccactgcaaaatcatgccaaattgtaaagaccatcgaggccaggaagaaactgcatcaactaatgagcaaaataaccagctaatatcataatgacaggatcaaattcacacataacaatattaactttaaatgtaaatggactaaatgctccaattaaaagacacagactggcaaattggataaagagtcaagacccatcagtgtgctgtattcaggaaacccatctcacgtgcagagacacatataggctcaaaataaaaggatggaggaagatctaccaagcaaatggaaaacaaaaaatggcaggggttgcaatcctagcctctgataaaacagactttaaaccaacaaagatcaaaagacacaaagaaggccattacataatggtaaagggatcaattcaacaagaagagctaactatcctaaatatatatacacccaatacaggagcacccaggttcataaagcaagtcctgagtgacctacaaagacacttagactcccacacaataataatgggagactttaacaccccactgtcaacattagacagatcaacgagacagaaatttaacaaggatacccaggaattgaactcagctctacaccaagcagacctaatagacatctacagaactctccaccccaaatcaacagaatatacatttttttcagcaccacaccacacctattccaaaattgaccacatacttggaagtaaagctctcctcagcaaatgtaaaagatcagaaattacaacaaactgtctctcagaccacagtgcaatcaaactagaactcaggattaagaaactcactcaaaaccgctcaactacatgcaaactgaacaacctgctactaaatgactactggctacataacggaatgaagacagaaataaagatgatctttgaaaccaacgagaacaaagacacaacataccagaatctctgggacacattcaaagcagtgtgtagagagaaatttatagcattaaatgccctcaagagaaagcacgaaagatccaaaattgacaccctaacatcacaattacaagaactagaaaagcaagagcaaacacattcaaaagctagcagaaggcaaggaataactaaaatcagagcagaactgaaggaaatagagacacaaaaaacccttcaaaaaattaatgaatctaggagctggttttttgaaaggatcaacaaaattgatagaccgctaccaagactaataaagaaaaaagagagaagaatcaaatagacgcaataaaaaatgataaaggggatatcaccactgatcccacagaaatacaaactaccatcagagaatactacaaacacctctacgcaaataaactagaaaatctagaagaaatggataaattcctcgacacgtacaccctcccaagactaaaccaggaagaagttgaatctctgaataaaccaataacaggctctgaaattgtggcaataattaatagcttaccaaccaaaaagagtccaggaccagatggattcacagccgaattctaccagaagtacaaggaggaactggtaccattccttctgaaactattccaatcaatagaaaaagagggaatcctccctaactcatttgctgaggccagcatcattctgataccaaagccaggcagagacacaaccaaaaaagagaattttagaccaatatccttgatgaacattgatgcaaaaatcctcaataaaatactggcaaaccaaatccagcagcacatcaaaaaggttatccacgatgattaagtgggcttcatccctgggatgcaaggctggttcaatatatgcaaatcaataaatgtaatccagcatataaacagaaccaaagacaaaaaccacatgattatctcaatagatgcagaaaaggcctttgacaaaattcaacaacgcttcatgctaaaaactctcaataaattaggtattgatgggatgtatctcaaaataataagagctatctatgacaaacccacagccaatatcatactgaatggacgaaaactggaagcattccctttgaaaactggcacaagaaagggatgccctctctcatcactcctattcaatatagtgttggaagttctggccaggtcaatcaggcaggagaaggaaataaagggcattcaattaggaaaagaggaagtcaaattgtccctgtttgcaggtgacatgattgtatatctagaaaaccccattgtctcagcccaaaatctccttaagctgacaagcaacttcagcaaagtctcaggatacaaaatcaatgtacaaaaatcacaagcattcttatacacaaataacagacaaacagagagccaaatcatgagtgaactcccattcacaattgcttcaaagagaataaaatacctaggaatccaacttacaagggatgtgaaggacctcttcaaggagaactacaaaccactgctcaatgaaataaagaggatacaaacaaatagaagaacattccatgctcatgggtaggaagaatcaatatcatgaaaatggccgtactgcccaaggtaatttatagattcaatgccatccccatcaagctaccaatgattttcttcacagaattggaaaaaactactttaaagttcatatggaaccaaaaaacagcccgcatcgccaagtcaatcctaagccaaaagaacaaagctggaggcatcatgctacctgacttcaaactatactacaaggctacagtaaccaaaacagcatggtactggtaccaaaacagagatatagatcaatggaacagaacagagccctcagaaataacgctgcatatctatagctatctgatctttgacaaacctgagaaaaacaagcaatggggaaaggattccctatttaataaatggtgctgggaaaactggccagccatatgtagaaagctgaaactggatcccttccttacaccttatacaaaaattaattcaagatggattaaagacttaaacgttagacataaaaccataaaaaccctagaagaaaacctaagcattaccattcaggtcataggcatgggcaaggacttcatgtctaaaacaccaaaagcaatggcaacaaaagacaaaattgacaaatgggatctaattaaactaaagagcttctgcacagcaaaagaaactaccatcagagtgaacaggcaacctacaaaatgggagaaaattttcgcaacctactcatctgacaaagggctaatatccagaatctacaatgaactccaacaaatttacaagaaaaaaacaaacaaccccatccaaaagtgggcaagggacatgaacagacacttctcaacagaagacatttatgcagccaaaaaacacatgaaaaaatgctcaccatcactggccataagagaaatgcaaaccaaaaccacaatgagatactatctcacaccagttagaatggcaatcattaaaaagtcaggaaacaacaggtgctggagaggatgtggagaaataggaatgcttttacattgttggcgcaagtataaattagttcaaccattgtggaagacagtgtggccattcctcaaggatctagaactagaaataccatttgacccagccatcccagtacggggtatatacccaaaggactataaatcctgctgctataaaaacacatgcacacgtatgtttattgcagcactcttcacaatagcaaagacttggaaccaacccaaatgtccagcaatgatagactggattaagaaaatgtggcatatatacaccatggaatactatgcagccataaaaaatgatgagttcatgtcctttgtagggacatggatgaaattggaaatcatcattctcagtaaactatcgcaagaacaaaaaaccaagcactgcatattctcactcataggtgggaattgaacaatgagaacacatggacacaggaaggggaacatcacactctgtggactgttgtggggtgggggaaggggggagggatagcattaggagatatacctaatgctaaatgacaagttaatgggtgcagcacaccagcatggcacatgtatacatatgtgactaacctgcacattgtgcacatgtaccctaaaacttaaagcataataataataaaataaaataaaaagactttaaactttacttctaaaaaaaaaaataaagagagtcaactttccttcacattgtttacatgtaaatgtgtctggtattttcagtttaaacagtgggagaaaggcactgtccctcaacaagactcataaagtgaaaaggtccccaaatatataaaggaatttcaaatcagatgtatggaagttaaaaacaacaacaaattcagaggtagaatgatagacattttgtagttaaaaattatgtttggagtaattctgacctgagttcacgggttaagcaaagtactcaatcttgctgatcctcaatgtcctctgaaaaaaaaacttggaagataatatctatataaaatagtgtagtatagattaaatgaattatatatacaaagtgcttaggacatcctaagcattttattaaactgtttattattattattattattattattgttactgaccagttaaattactgcaagaattaacagagtaatgatatatgtaacacagtgctaaacatcacatttaccatctcgcctaagcaggtgttcattcaacaaatattctatatatcagacaataattcattagtatttttttacagaaaaaaaatcatgaggaatatgaagcataaacaatggaccagaagtcactcaattaagacataatggaagtgagattccaacccagaattattgagcttgagaaactatactgttttcttttactattattatactttaagttctaaggtacatgtgcacaatatgcaagtttgttacataggtatacatgtgccatgttagtttgctacacccatcaactcatcatttacattaggtatttctcctaacgctatccctaccccagcccctcactcccaaacaggccccggtgtgtgggtgtgtgatgctcccctccctgtgtccatgtgttatcattgttcagctcccacttatggtgacaacatgcgggactacactcttaaccataacaatgtagtacccttcagatcgaatgtacaacatggtgactatagttaataatacagcactggttacttgaaatttgccaagagagaaaatcttagtgtcctcaccatacacacacacacacccacacacacacacacacaatggtaactatgtgtggcaatagatgtgctaattatttagattgtggtaaacattccacaatgtatacatatatcaaatcatcttgtggtacatgttgaatatatacaaattttaactgtcaattatatgtcagtaaagctgaaaagaaactcaaactaacttgaaaacaaaatatagcatccatcaatatgttaataattataaaatacttaatagactggagaccttcaataagtgatatttcttgtaactattattagttattaattgtgtggcactgtttacttgtaatgacaaggatgtaagatgaggttgctgctacaaaacttcagagcccctgcgggcatttgtggggtaaacacagaaggaaatgaggtctctcaatttccaacacagaaactctttaagttggttggtcttcataatacctcccttataataagaaaataatgcttttcctacatttgcaccggacatgggaataaatccatatttctgggtgtgtggtaggaggcaggactaggctttgggggtcgggcttggatacctgaccaaatgatggactagctcaaacaggtcagggtggaaacacctccgcataagacactcccaccaatgtgccatcttggtttatcattgccatggcaatacccataaattactgccctttttcacggcaacaacctggacaacccggaagttacaaccttcatcctagaaatttctgcataagttgccccttaatttgcatataattaaaagtgggtctaagtatgactgcagaactccctctaagctacctaagctgggcacgctgcctagggggtagccctgctctgcaagaagcagtacctctgcggctgctgtaggctactgcttcaataaaagtcgttgtttaacaccactggcttgcctttgaaattgtttcgtgggtgaagctaagaaccctctcgggctaagcctcaatttgggggtctgcctgtcgtgcatcaggtgtgtatagaaccttcacttaaattctcatctgctcagacttattatactaagaatgctttatttcattaatgcaaattttccagggatagaaataatgtatatatgtggagtattggaagagttcaagaacatcaccactcatcattctgcagtccttaaaggcatgtgttatttctacctcacatgaagaaaactgtgtctggccgggcgcggtggctcacgcctgtaatcccagcactttgggaggccgaggtgggtggatcacgaggtcaggagtttgagaccagcctggataacatggtgaaaccctgtctctacttaaaatacaaaaa

SEQ ID NO: 6772 - DNA, 7380 bp, Homo sapiens
gaaaaaaatttagacgaatgtataactagaataaccaatacagagaagtgcttaaaggagctgatggagctgaaagccaaggctcgagaactacgtgaagaatgcagaagcctcaggagccgatgcaaccaactggaagaaagggtatcagtgatggaagatgaaatgaatgaaatgaagcgagaagggaagtttacagaaaaaagaataaaaagaaatgaacaaagcatccaagaaatatgggactatgtgaaaagaccaaatctatgtctgattggcctacctgaaagtgacggggagaatagaaccaagttggaaaacactctgcaggatattataaaggagaacttccccaatctagcaaggcaggccaacattcagattcaggaaatacagagaacgccacaaagatactcctcgagaagagcaactccaacacacataattgtcagatttgccaaagttgaaatgaaggaaaaaatgttaagggcagccagagagaaaggtcgggttacccacaaagggaagcccatcagactaacagtggatctctcggcagaaactctacaagccagaagagagtgggggccaatattcaacattcctaaagaaaagaattttcaacccagattttcatatccagccaaactaagcctcataagtgaaggagaaataaaatactttacagacaagcaaatgctgagagattttgttaccaccaggcctgctctaaaagagctcctgaaggaagcactaaacgcggaaagcaacaaccggtaccagccactgcaaaatcatgccaaattgtaaagaccatcgaggccaggaagaaactgcatcaactaatgagcaaaataaccagctaatatcataatgacaggatcaaattcacacataacaatattaactttaaatgtaaatggactaaatgctccaattaaaagacacagactggcaaattggataaagagtcaagacccatcagtgtgctgtattcaggaaacccatctcacgtgcagagacacatataggctcaaaataaaaggatggaggaagatctaccaagcaaatggaaaacaaaaaatggcaggggttgcaatcctagcctctgataaaacagactttaaaccaacaaagatcaaaagacacaaagaaggccattacataatggtaaagggatcaattcaataagaagagctaactatcctaaatatatatacacccaatacaggagcacccaggttcataaagcaagtcctgagtgacctacaaagacacttagactcccacacaataataatgggagactttaacaccccactgtcaacattagacagatcaacgagacagaaatttaacaaggatacccaggaattgaactcagctctacaccaagcagacctaatagacatctacagaactctccaccccaaatcaacagaatatacatttttttcagcaccacaccacacctattccaaaattgaccacatacttggaagtaaagctctcctcagcaaatgtaaaagatcagaaattacaacaaactgtctctcagaccacagtgcaatcaaactagaactcaggattaagaaactcactcaaaaccgctcaactacatgcaaactgaacaacctgctactaaatgactactggctacataacggaatgaagacagaaataaagatgatctttgaaaccaacgagaacaaagacacaacataccagaatctctgggacacattcaaagcagtgtgtagagagaaatttatagcattaaatgccctcaagagaaagcacgaaagatccaaaattgacaccctaacatcacaattacaagaactagaaaagcaagagcaaacacattcaaaagctagcagaaggcaaggaataactaaaatcagagcagaactgaaggaaatagagacacaaaaaacccttcaaaaaattaatgaatctaggagctggttttttgaaaggatcaacaaaattgatagaccgctaccaagactaataaagaaaaaagagagaagaatcaaatagacgcaataaaaaatgataaaggggatatcaccactgatcccacagaaatacaaactaccatcagagaatactacaaacacctctacgcaaataaactagaaaatctagaagaaatggataaattcctcgacacgtacaccctcccaagactaaaccaggaagaagttgaatctctgaataaaccaataacaggctctgaaattgtggcaataattaatagcttaccaaccaaaaagagtccaggaccagatggattcacagccgaattctaccagaagtacaaggaggaactggtaccattccttctgaaactattccaatcaatagaaaaagagggaatcctccctaactcatttgctgaggccagcatcattctgataccaaagccaggcagagacacaaccaaaaaagagaattttagaccaatatccttgatgaacattgatgcaaaaatcctcaataaaatactggcaaaccaaatccagcagcacatcaaaaaggttatccacgatgattaagtgggcttcatccctgggatgcaaggctggttcaatatatgcaaatcaataaatgtaatccagcatataaacagaaccaaagacaaaaaccacatgattatctcaatagatgcagaaaaggcctttgacaaaattcaacaacgcttcatgctaaaaactctcaataaattaggtattgatgggatgtatctcaaaataataagagctatctatgacaaacccacagccaatatcatactgaatggacgaaaactggaagcattccctttgaaaactggcacaagaaagggatgccctctctcatcactcctattcaatatagtgttggaagttctggccaggtcaatcaggcaggagaaggaaataaagggcattcaattaggaaaagaggaagtcaaattgtccctgtttgcaggtgacatgattgtatatctagaaaaccccattgtctcagcccaaaatctccttaagctgacaagcaacttcagcaaagtctcaggatacaaaatcaatgtacaaaaatcacaagcattcttatacacaaataacagacaaacagagagccaaatcatgagtgaactcccattcacaattgcttcaaagagaataaaatacctaggaatccaacttacaagggatgtgaaggacctcttcaaggagaactacaaaccactgctcaatgaaataaagaggatacaaacaaatagaagaacattccatgctcatgggtaggaagaatcaatatcatgaaaatggccgtactgcccaaggtaatttatagattcaatgccatccccatcaagctaccaatgattttcttcacagaattggaaaaaactactttaaagttcatatggaaccaaaaaacagcccgcatcgccaagtcaatcctaagccaaaagaacaaagctggaggcatcatgctacctgacttcaaactatactacaaggctacagtaaccaaaacagcatggtactggtaccaaaacagagatatagatcaatggaacagaacagagccctcagaaataacgctgcatatctatagctatctgatctttgacaaacctgagaaaaacaagcaatggggaaaggattccctatttaataaatggtgctgggaaaactggccagccatatgtagaaagctgaaactggatcccttccttacaccttatacaaaaattaattcaagatggattaaagacttaaacgttagacataaaaccataaaaaccctagaagaaaacctaagcattaccattcaggtcataggcatgggcaaggacttcatgtctaaaacaccaaaagcaatggcaacaaaagacaaaattgacaaatgggatctaattaaactaaagagcttctgcacagcaaaagaaactaccatcagagtgaacaggcaacctacaaaatgggagaaaattttcgcaacctactcatctgacaaagggctaatatccagaatctacaatgaactccaacaaatttacaagaaaaaaacaaacaaccccatccaaaagtgggcaagggacatgaacagacacttctcaacagaagacatttatgcagccaaaaaacacatgaaaaaatgctcaccatcactggccataagagaaatgcaaaccaaaaccacaatgagatactatctcacaccagttagaatggcaatcattaaaaagtcaggaaacaacaggtgctggagaggatgtggagaaataggaatgcttttacattgttggcgcaagtataaattagttcaaccattgtggaagacagtgtggccattcctcaaggatctagaactagaaataccatttgacccagccatcccagtacggggtatatacccaaaggactataaatcctgctgctataaaaacacatgcacacgtatgtttattgcagcactcttcacaatagcaaagacttggaaccaacccaaatgtccagcaatgatagactggattaagaaaatgtggcatatatacaccatggaatactatgcagccataaaaaatgatgagttcatgtcctttgtagggacatggatgaaattggaaatcatcattctcagtaaactatcgcaagaacaaaaaaccaagcactgcatattctcactcataggtgggaattgaacaatgagaacacatggacacaggaaggggaacatcacactctgtggactgttgtggggtgggggaaggggggagggatagcattaggagatatacctaatgctaaatgacaagttaatgggtgcagcacaccagcatggcacatgtatacatatgtgactaacctgcacattgtgcacatgtaccctaaaacttaaagcataataataataaaataaaataaaaagactttaaactttacttctaaaaaaaaaaataaagagagtcaactttccttcacattgtttacatgtaaatgtgtctggtattttcagtttaaacagtgggagaaaggcactgtccctcaacaagactcataaagtgaaaaggtccccaaatatataaaggaatttcaaatcagatgtatggaagttaaaaacaacaacaaattcagaggtagaatgatagacattttgtagttaaaaattatgtttggagtaattctgacctgagttcacgggttaagcaaagtactcaatcttgctgatcctcaatgtcctctgaaaaaaaaacttggaagataatatctatataaaatagtgtagtatagattaaatgaattatatatacaaagtgcttaggacatcctaagcattttattaaactgtttattattattattattattattattgttactgaccagttaaattactgcaagaattaacagagtaatgatatatgtaacacagtgctaaacatcacatttaccatctcgcctaagcaggtgttcattcaacaaatattctatatatcagacaataattcattagtatttttttacagaaaaaaaatcatgaggaatatgaagcataaacaatggaccagaagtcactcaattaagacataatggaagtgagattccaacccagaattattgagcttgagaaactatactgttttcttttactattattatactttaagttctaaggtacatgtgcacaatatgcaagtttgttacataggtatacatgtgccatgttagtttgctacacccatcaactcatcatttacattaggtatttctcctaacgctatccctaccccagcccctcactcccaaacaggccccggtgtgtgggtgtgtgatgctcccctccctgtgtccatgtgttatcattgttcagctcccacttatggtgacaacatgcgggactacactcttaaccataacaatgtagtacccttcagatcgaatgtacaacatggtgactatagttaataatacagcactggttacttgaaatttgccaagagagaaaatcttagtgtcctcaccatacacacacacacacccacacacacacacaatggtaactatgtgtggcaatagatgtgctaattatttagattgtggtaaacattccacaatgtatacatatatcaaatcatcttgtggtacatgttgaatatatacaaattttaactgtcaattatatgtcagtaaagctgaaaagaaactcaaactaacttgaaaacaaaatatagcatccatcaatatgttaataattataaaatacttaatagactggagaccttcaataagtgatatttcttgtaactattattagttattaattgtgtggcactgtttacttgtaatgacaaggatgtaagatgaggttgctgctacaaaacttcagagcccctgcgggcatttgtggggtaaacacagaaggaaatgaggtctctcaatttccaacacagaaactctttaagttggttggtcttcataatacctcccttataataagaaaataatgcttttcctacatttgcaccggacatgggaataaatccatatttctgggtgtgtggtaggaggcaggactaggctttgggggtcgggcttggatacctgaccaaatgatggactagctcaaacaggtcagggtggaaacacctccgcataagacactcccaccaatgtgccatcttggtttatcattgccatggcaatacccataaattactgccctttttcacggcaacaacctggacaacccggaagttacaaccttcatcctagaaatttctgcataagttgccccttaatttgcatataattaaaagtgggtctaagtatgactgcagaactccctctaagctacctaagctgggcacgctgcctagggggtagccctgctctgcaagaagcagtacctctgcggctgctgtaggctactgcttcaataaaagtcgttgtttaacaccactggcttgcctttgaaattgtttcgtgggtgaagctaagaaccctctcgggctaagcctcaatttgggggtctgcctgtcgtgcatcaggtgtgtatagaaccttcacttaaattctcatctgctcagacttattatactaagaatgctttatttcattaatgcaaattttccagggatagaaataatgtatatatgtggagtattggaagagttcaagaacatcaccactcatcattctgcagtccttaaaggcatgtgttatttctacctcacatgaagaaaactgtgtctggccgggcgcggtggctcacgcctgtaatcccagcactttgggaggccgaggtgggtggatcacgaggtcaggagtttgagaccagcctggataacatggtgaaaccctgtctctacttaaaatacaaaaa

SEQ ID NO: 6773 - DNA, 559 bp, Homo sapiens
atataaatcactgaaaaacctcatacagctgtttaaatatttctaaaaattcaccgaaggccaaaggtattcctaagtacttgatgaagtattattagaaacattaataaatatttcaatgtcctaagacatctcttgacacagatggagaaatcagagattcaaggcagaccgctgatccattaatcactcattatgtcatgccctcttctttgcgtaaattgctgggacagggtggccagactcattttgtagatggagcaacttgaaacacagggtaatagttcacgatttgcctgaatcttattcaaaagttgtgactgagtttctaactgctataatagttatatatagcaagttatataaagcaagaaagaccttgctaatttttagaaaaccagtgctttaaaactgcaaaattgccatgcagtagcaaagaaaataaaattttatataatttctatgttaaactggggaccttttctattcaatcagtgaaactgaagcatatataattttaacgaaaaaaacccacgtgaaataaaatgtcaatttcaca

SEQ ID NO: 6774 - DNA, 13392 bp, Homo sapiens
ctggcagagatcagcatgtattgaggtcagctggtttgtattcatctgcatcttgtctatggcttgcttaaggatgccaattcctcgcaggggctgtcagaaatgacatctctttcagataagttctcaaagatggcagcacattggatcttatgttgtcacttataaataaaaaataacactaattgataggttcctttaaatagcaatatgaggtttccatactctttcaggaaatttctgtcccatttaagtcagaaaacttttcttaagctgtttcttggaatttttagataactcagcaccattttttaaatcataaaaagcttttatttttacaatgaagatcaataatcaaaaacagtattactttctcaacagtttattatattaacatctaaacaaatgaaaactttccaaatcacttattatacaagagacaacagcctatgcttaggaaaattacttgtggctaagggtgttggcattttcccatagggcagtctaccccttacctggtagtaaattactaccaaaactaacaccatagatttcaaaaggactgtttcctgccctgattataaataagaagaccaagtgtcaagtaaggcataatcagtttttggcagactaaaatatagtctcttccaaaattgctgggcacggtggctcacacctgtaatcccagcattttgggaggccaagatgggtggatcatgaggtcaggagatcaagattatcctggccaacatggcaaaaccccatgtctactaaaaatacaaaaattagccgggcatggtgggatgtgcctgtggtcccagctactcaggaggctgaggcaggagaatcgcttgaacccgggaggcggaggttgcagtgagctgagatcgcgccactgcactccagcctgggcaacagagcaagaccccatctcaaaaaaacaacaacaacaacaacaacaacaaaaatatatatatatatatgtgaagagactaaaaatagctcaataacttacagctttttcaaaaactcatgatttttcttaaccatctctttcaaacatggttacttagtactacaaaataacaactggttctattttcagcctctttcaaaccactaatcttaaatttactttcaaattaaaaagaaacacctggctgggtgaagtggctcacacctgtaatctcagccctttgggaggctgaagcaggcggatcaccagaggtcaggagttctagaggctagcctggccaacatggcaaaacctcacctctattaaaaatacaaaaatcactgggaggccgaggcaggcggatcgcctgtggtcaggagtttgacaccagcctggcaaacatggtgaaaccctgtctctactaaaaatacaaaaattagccgggcatggtgtcaggcacctgtaatcccagctacttgggaggctgaggcagaagaactgcttgaacccaggaggcggaagttgcagtgagccgagattgcgccattgcactccagcctgggtgacagagcgagactctgtctcaaaaaacaaaacaaaacaaaaatcagctgggaaaggtgacatgcgcctgtagtcccagctactcaggaggctgaggcacgagaatcgcctgaagctggaaggtggaggttgcagtgagctgagatcacaccactgcactccagcctaggcaacagaatgagactccatttcaaaaaaataaataactaaataaattttttaaaaatccacattataaattatgtattataaaagataaagaatgaaataactgttcagattaagggacactaaagaaacaaagcagtctaatgcaatccatggtccacggttttcttttgctatataatatatagtacactgtccaaacagctaatgtccttttatagcaaaagacagtccttttcactgggggaaaatctaaatggggtctgtcaatttgttgatgcattatattaacgttcatttctgggccgggcgtggtggctcacgcctgtaatcctggcactttgggaggccaaggcgggaggattgcctgagctcaggagttcgagaccagcctggcaacatggtgaaaccccgtctctactaaaatacaaaaaattagctgggcgtggcagcatgcacctgtagtccccagctactcaggaggctgaggcagaagaattgcttgaacctgggaggtggaggttgcagtgaccagagatggcgccactgcactccagcctaggcatcagagcgagactctgtctccaaaaaaaaaaacagtaagagttcatttctggatgctgaccattacactatactatgtaacagaatgtcctaatttttaggctttacccactgaagtatttagggataaagaacagcaatagcatatgtgcaacttactctacaatggctcagaataaaagaggaagagaaaaaaaaaagaataagtgcggtaaaatgttaacatttggaaaatctaggtaaaatgtatgagaattttttatattatttttgaagctttttgtaaggctaaaataatgtcctaattaaaagttaaaagaaaaaatgtaacagacaaaacccagcatattacaacataaagggtactggcttggtaattccaactacttggtagttccagcagcagcctccctgaggtgccaaaccaccccgtgcctccacctcattcaggggatgcggggactgcctgagcttacagcaatggctgtgagtgctctcaagtgaccacagatgtctaggtggtggatgctcagtactaactggaatcttgataaagtaattcattgtgtaagctagttacatattataacaaaactaggaatacttgaatagtatttcttacctgttttctttccacaagtgcatttgttagctgatggcaaagcccagcaactagatacaataacaaaatattcaaaatataaatataaccacaagggcaaaatattttcaatggagaataaaatgttatttagcttacaagtgtctgttgcatatcgaatgtgctccccattacaagtgctgatgaagagctgaacctgtgagaatagcgtttcgaagtcaggaacactgggcatagaaaacttcacaaacctagaataaggagaaaagaatcaaattaccctgatagttcatgggataaaatacagaaacaatgtatgcaagaaatccatcctgcctccaatactctgtaaaattaaatgagcaacagtattttttagaattaagaactaggccaggacagtggctcatgcccgtaatccaagcactttgggaggctgaggcaggaggactgcttaaggccaggagtttgagaccagtctgagcaacatggtgagaccctgtctctactacaaaaaataaattagccaggcgtgggggtacatgcctgtagttgcagatacttgggaggctgaggctggaggatcacttgtgcctagaaggttgaggctgcagtgagctatgatcatgccactgcactccagcctgggtgacagagcaagatccagtctcaaaaaacaaataaataagaactagaatccatgagattttcctgacctggttattttgcacaatcactatacagaacggacacaaataagggttaagaaaaatatgtttaggcctggcgcagtggctcatgcctgtaatcccagcaccttgggaggccaaggcgggaggatcacctaaggtcgggagttcgagaccagcctgatcaacatggaaaaacctcgtctctactaaaaatacaaaaaaattagccgggcgtggtggtgcatgcatgcctgtaaccccagctactcgggaggctgaggaactgcttgaacccgggaggtggaggttgcagtgagctgagatggtgccactgcactccagcctgggcaacaagagcgagactgtctcaaaaaaaaaatctatatatatctatatatatatatatatacacacatacacacacatatgtttaataatatatattaaataataaacatgtatatattaaacatatatgttttatatatatatatatgtttaataaggaacaactttcaagatgaaaaattccactaaatgaagccaaataggctgggcatggtggctcaagcctgtaatcccagcactacggaaggccaaggtgggcagatgggcagatcacaaggtcaggagttcgagaccagcctagccaatatggtgaaaacccatgtctgctaaaaatacaaaaattggccaggcacggtggctcacgcctataatcccagcactttgggaggccaaggcgggtggatcacctgaggtcaggatttcaagaccagcctgaccaatcgggtgaaaccccatctctacaaaaaatagaaaaattagccgggcgtggtggcaggtgcctgtaatcccacctatttgggaggctgagacaggagaattgcttgaacccaggaggcagagtttgcagtgagctgagatcgtgccactgcactccagcccgggtgacggagtgagactcgtctcaaaaaaaaaaactcctttatgtttatacaaatcctgaaaatttgttttaaaaaatggccatctcaattgtggggactatagtttgcatttatctgaatacttttatccatgtaatccacaggaatgtccacattttctaaattaaaaagaagttcggaggagtactgccacagggcatggcagaatacattgaatgaaaatattggctgggcacagttgctcataatcccaacactttgggaggccaaggtcggaggatcatttgaggccaggagtttgagaccagcctaggcaacataatatggccctatctctgcaaagaataaaaatattagctgggtgtagtggtacatgcctatagtcctagcttctcaagatgctgaggtgggaggattgcttgagcccagaagttcaaggcttcagtaagctacaattaagccattgcactccagcctacatgacaaagtgagaccttttctcaaaaaaagaaaaagtatcaaagatccaaagcaacattgcttagaattcccttcaaacaaatttaagctatttaagaccaaattaaatagaccttattttaattggggttccttgtaaccgtgtacttgacagtagaattctttttctcttgatgttatagtattataaattgggatattgtggttgtcatgacatttgaaatgatataaataaactgagaagaaattgacttaaagtgagagtctggcttcacttacgctgggattcctgagacaaaggtatgtgtccggagcagagtttagagaagaagctttgtcagaatggaaggatctagagttatgctctgcagtatggtggccactagccatatgcagctatttaaattaaaattaaagattcaggtgcacttgccatgtttcaagtactcagtagccacatgtggtcacatgtccttgtcttagcacaggtttgtaacatttccaccactgcagatagttctattggacagtgctggtaaggatttctactgtctgtattttcttatttatatgaaagagcagatgctgggcacagtggctcacacctgtaatcctagcactttgggaggctctgtttgagaccagcctgggaaacatagcaagaccccatctctacagaaaaaaaaagtggccaggtatggtggcttatgcctgtaatcccaggactttgggaggctgagatgggcagattgcttgagctcaggagttcaagaccagcctgggaaacgtgatgaaaccctgtctttacaaaaaaacacaaaaattaggcgggcgtggtggtgtacacctgtggtcctggctactcaggaggctgaggttggaagatcacttgagtccatgagattgaagctgcagtgagctgtgctcatgccactgcactcctgactgggtgacagaacaagaccttgtccccccaaaagaaaaaaagttagctgagtgtggtggcacatgcctgtggtcccagctacccaggaggctaaagtgggaggactgcttgagcctgggaggtcgaggctacagtgagctatgcttgcaccactgcacttcagcctgagtgacatcaagaccctatctcaagaaagaacagagagcatgcatgttttatacacacataaactcacataaacatatatatcaggtgagtaatggacatgaatgcattttgaaggtataaggtgtttaccgttgtatatgttagataaggtatggaaagaaccctgagcttctggctgaggaccctggttttgaatctacatattcttccaattttgagttgtggggccctgagcttcatatttttatttataaactggcagtcgcaatgcctcactgacctattgtgaaccccagatgaaattgtttctgacatgtcttgataattacaaagtgtaaatacagatgtatggtgacattgttaagtcaaataatacagtatagatggaagcagataaaccaaaagatgtagtagaaattatgattagcttttcttttttttttttttgagacagagtctcacactctgtcacccagactggagtgcagtggcgttgtctcagctcactgcaacctccgcctcccaggttcaagccattctcctgcctcagcctcccgagtagctgggactacaggtgcatgccaccacacccggctaatttttgtatttttagtagagacagggtctcactatgttggccaggctggtcttgaactcctgaacttgtgatccacccgccttggcctcccaaagtgccgggattacagatgtaagccactgtgtctggcctaatttttcttgaaattacatttcaatcgtgcttttttttttttttaaagaatttgaaatttacttacaaccaatgccttaatagtgctaagtttacatgatttctcccctaaaacctatcaccagtgcctccttggagtgtttctcatggcagtctgagttacttgggaaggatcacctgagtcctccctcttctcaccactctactcctcttgtcctgcctatcagttgttctgtcagtgttattctcagatagaccacacagctggtggcagcatctttaacttaagctgctgcccacctccagccagcccatagctctcactcttggcccccttagtatgttctcaaagcaggaaaagcaacaactgattttttttttttttttgagagagtctccctctgtcgcccaggctggagtgcagtggtgcaatcttggctcactgcaacctctgccttccaggctcaagcaattctcatgcctcagccacctgagtagctgggactacaggcatgcgccaacacacccggctagtttttttattagtagagacagggtttcaccagttggccaggcaggtctggagctcctggccccaagtgatccacctgcctctgcctcccaaaatgttgggattagaggcgggagccactgtgcccagctgcaacaactgattttatttttttgagacagtctcgctctgtcacccaggctagagtacagtggcgcgaccttggctcactgcaacctctttatgcccggatacataaaagagtttttaaaaatgataaagttgaacaaaatataacaagcaattattagctggaatcaataaactgtaactgccataactttagttttgcaaaagagctcaatgttatttacaatggtttactttctacaccaaaaaataaataaataaataaaaataaagccagggctgggcgtggtggctcacgcctgtaatcccagcattttgggaggccaaggtgggcggaccaagaggtcaggagatcgagatcatcctggctaacatggtgaaaccctgtctctactaaaaatacaaaaattagctggggcgggtggcgagtgcctgtagtcccagctactcaagaggctgaggcaagagaatggagtgaacccgggaggcggagcttgcagtgtgccaagaatgtgccactgcactccagcctgggtgacagagcgaaactccatctcaaaaaatataaataaataaataaaaataaagccaggaagtgcacagtgttccattttaacaagcacagaactataaaagaagatgctccttacaaaacagcaaggacgcccaaggagtgttcttgtacatccagagccccgagcacagtgtccagatgggataagttcttcgcaaggagttccccactcttgttgatcagttcacaaagctgtgtcatttgccctggaaaacaggaacaacactattgcatttcagctacagcactaaccaaactgatggaactctaaccacaactttgtacttcagagcctgaagttcccaaaattgattcttaatctccttcacttcggatgaggatccagaaggaccagaggagtgaaacaacctgtccgtggtctcaaaacgaattagagattacactggacctcccacttctctctgaccctgaatgtttcacctttttctctattctgttttctagtctcccaagccagaaatgcacgttactattaacagctctctgcatccaaatgatttagttttacttccaaagtctctcagctccatttctttctctctcccctctctgccctaattcagatcctcatcattttttgtctggactacatcttttttttttttttaagatggagtttcactgtgtcgcccaggctggagtgcagtggcgcaatctcggttcactacaacctccgccctccaagttcaagcaattctcctgcctcagcctcccaaatagctgggattacaggcgcctgccactgcacctggctaatttttttgtatttttagtagagacgggggtttcaccttcttggccaggctggtcttgaactcctgacctcatgatccaccgcgcccagcctacatcataaatcttctaaatggtctgcctactgtgatctttctctcctccaacccgcactccatattagtactgtctgttctataaactgtgcattcaatcaagttattccaatgactttaagaagtgcaaacgcctcagcctgaactaaggcccttcaataactggtccctgctacctttccagccttatctcctgctacttcccctcacacacctactcttcgatcacagcaagctcagaaaatcaacattctatcttctctcctctttatgcttctacacatgctgttctctgtccttctcccccacatcctctgctacctgactgagcctcatccagcattcagcaatcaacttgtggcgtctctagaccctcatctcagctcccttccccatggctaagctgggtatctgccctctctgcctcgcatgggactgtagtggttaggtatttcagtaaactcaggtggagggattgtccctttctccagctctagaatacatcacctgcttagcagttcatcaagcagctacttgttgaattaatctcctaattgatctatttttcccctatactgcaatactatgtttgttttgttttgttttttgagacagggtctcattctgtcgctcaggctgcagtgcagtggtgtgatcacagctcaacgcagcctccatctcctgggctcaagcaatcctcccaccttagcctcccgagtagctggaactacaggtgtacgtcaccatgcccatcttattttttaagttttttgcagagacaggggtctcactatgttgcccagtctggtctctaactcctgggctcaagcaatcctcccaccttggcctcccaaagtgctgggattagaggcatgagccaccacactcagcctgcaatgctacattttaacaactaaggtacagaatctattaataattaggcctcagccgggtgctgtggctcacacctgtaatcccagcactttgggaggataaggtgggcagatctctcgaggtcaggagttcaagaccaggctggctcacacctgtaatcccagcactttgggaggataaggtgggcagatatctcgaggtcaggagttcaagaccaggctggccaacatggtgaaaccctgtctccactaaaaatacaaaaattagctgggtgtggtggcacacacctgtaatcccagctactcgggaggctgaggtgggagaatcctttaacctgggacaatccttgaacccgggagatggaggctgcagtgagctgagattgcgccactgtactccagcctgggcaacagagcaagactccgtttcgggggaaaaaaaaaattaggcctgaattggtacctttaagtagacccatcaattttgacaattactgtcatgacagataccatggtcacactctgtctttctggtaacagtgaggatatatttaagtccatgggcattaacctcaagtttccaacttctctatttctacagagcaactgcataatcttttccttactaaaagaatacaacatagtataatgcttaaaatacaagtgactatagctaggtacttttgataatttaacacttttcaatttgatacattttactgaaagcaaaggaaatgtatcattattatacatgcattacaaaacaagaataaaacagctgtgatcttattaggtgtcacctcttgagatcacacagatttaactgggaaataccaactcatcatcattgtattacagatctcactggtaggtatgaagtaacttctagttgaataatttgcctttgtaaaccattactctaaatatattaacaataatttgtaacacccagaaataagcattgcaatccattagttctctactagttaacaatcagtgcccagttgagactgaaataaaagctgggtcactatgaaatcaccagataattaattagtgcagggccaagggcagagtaaaaaaaaaaagtttaagtgtcacagagtgcatttgaaatcagtgtaaccagagatgtggccaataaaattcttttttttcttttttttttttttgagacggagtcttgctctgtcacccagactggagggcagtggcgcgatcttggctcactgcaagctccacctcccaggttcatgccattctcctgcctcagcctcccgagtagctgagattacaggcgcccgccaccatgcctggctaattttgcatttttagtagagacagggtttcaccatgttggccagggtggtcttgaactcctgacctcagatgatccgcccgcctcggcctcccaaagtgctggaattacaggagtgagccactgcgcctggcctgaaactcaaagatttcctatccagtgagtgtgaggcacagtagccgacagcaatgaaagttaccatatttatctctgtctagcagactgttcctatagcatcctataacctgaagaccacaacagccctagttctgttttgtaattaagaaaattggcccagggaaattaagtggttcacccaagaagtgaccgcgacaggatttcaacctgaagcttctaactacactacaccccaggaaggagaacactaagtatttgtcgaataaattaacaaaccagtggttcctttattcatagaaaaggcaagcctgtgccttccctgtgaacctcatttctattaataaaaaggaaaaagaggaagaattcttattaagtgcagctccatatcagaccatttgtcttacaccagtgaggtaaaagcacccctccatttttacaatggagatgcaaaagactcagagattaaaggttatttgtccaaggtcaagcagctcctagaactttgcaattaatgacggtaacaataatttgcagctatatttattgcaccccttatgacaggcactgttccaactgcttttacatggtttctctcattgaatcttcacaactctacataaactagggacttattttgcagacgaagaaactgaagcacgggatagttaaaagggccttcacagccagcatctaatcattcgaatttcaggtccagaattcggtacattcatacgcaatgaatgaaccaaacaacctggaaagtgcgagtaaaatcatcacaattctacccctagaaatggagtcctggccgggcgcagtggctcacgcctgtaatcctagcactttgggaggccgaggtgggcggatcacttcaggtgaggagttcgaaaccagcttggccaacatggtaaaaaccccatctctattaaaaatacgaaaaaattagccgcgtgggctggccgcggtggctcatgcctgtaatcccagcactttgggaggccgaggccagtggatcacctgagatcaaggttcgagaccagccaggccaacatggtgaaaccctgtctctactaaaaatacaaaaattagccgggcaggcgcctgtaatcccagctactcgggaggctgagacaggagaatcgcttgaacctcgaaggcgaaggttgaggtgagccgagaccgcgccactgcactccagcctgggagacagtgagactccgtctcaaaaaaaaaaaaagccgtgtgagctggcgggcgcctgtaatctcagctactcgggaggctgagacaggagaatcgcttgaagccgggaggctgaggttgcagtgagccgagatcgcgccactgcactccagcctcggctaaaaaaaaacaaagaagaagaaatggagtcctacgagcgagagcttccgcagcattctgtaggaccaaaataggcgcacaggttcccgagcgtgcgccgcctggcagcggaggagctggcagaggcgagccatagagccaagacacccagaacggactcgcctcccgcccgctcccggcggcctagtcagcaagctgcggatcggcggcaaagatgacatggcggtgcgccaatcaccgaaggcaagagagacagaaggaaccaatagtcgcccgagatggctcctggcggaagtcacgcccccaaactgtcaagcaaagcgcccggtggaaggggcccaggccggggggagggggctcccggcggcccgagggaggggaggccggccggcgaggacagcggagcgcgagggggctgcctacactcggccgcgctcgatcctgccctgatctaaacgccgcaaccccaagcccggccccggagaagagtctcaggactaaaagggctgttccagccgtccgtgctggcgcctggggatccaggccagttcccggtacccgcccatgcccagcccggcggcctagggcgttaccttgagctgagagctgtcggacactgttcacgaactgctccagggcagacgccatgttttcccccgggcggcccgagcggcgaaggcagcacgcgcgggaaaaggctgccgctctgggaggaggggccgcggcgatccacctgag

SEQ ID NO: 6775 - DNA, 8253 bp, Homo sapiens
  SITE (231): n equals a,t,g, or c
  SITE (236): n equals a,t,g, or c
  SITE (721): n equals a,t,g, or c
  SITE (4744): n equals a,t,g, or c
  SITE (4816): n equals a,t,g, or c
  SITE (7425): n equals a,t,g, or c
  SITE (8170): n equals a,t,g, or c
catctgcatcttgtctatggcttgcttaaggatgccaattcctcgcaggggctgtcagaaatgacatctctttcagataagttctcaaagatggcagcacattggatcttatgttgtcacttataaataaaaaataacactaattgataggttcctttaaatagcaatatgaggtttccatactctttcaggaaatttctgtcccatttaagtcagaaaacttttcttaangctgntttcttggaatttttagataactcagcaccattttttaaatcataaaaagcttttatttttacaatgaagatcaataatcaaaaacagtattactttctcaacagtttattatattaacatctaaacaaatgaaaactttccaaatcacttattatacaagagacaacagcctatgcttaggaaaattacttgtggctaagggtgttggcattttcccatagggcagtctaccccttacctggtagtaaattactaccaaaactaacaccatagatttcaaaaggactgtttcctgccctgattataaataagaagaccaagtgtcaagtaaggcataatcagtttttggcagactaaaatatagtctcttccaaaattgctgggcacggtggctcacacctgtaatcccagcattttgggaggccaagatgggtggatcatgaggtcaggagatcaagattatcctggccaacatggcaaaacncccatgtctactaaaaatacaaaaattagccgggcatggtgggatgtgcctgtggtcccagctactcaggaggctgaggcaggagaatcgcttgaacccgggaggcggaggttgcagtgagctgagatcgcgccactgcactccagcctgggcaacagagcaagaccccatctcaaaaaaacaacaacaacaacaacaacaacaaaaatatatatatatatatgtgaagagactaaaaatagctcaataacttacagctttttcaaaaactcatgatttttcttaaccatctctttcaaacatggttacttagtactacaaaataacaactggttctattttcagcctctttcaaaccactaatcttaaatttactttcaaattaaaaagaaacacctggctgggtgaagtggctcacacctgtaatctcagccctttgggaggctgaagcaggcggatcaccagaggtcaggagttctagaggctagcctggccaacatggcaaaacctcacctctattaaaaatacaaaaatcactgggaggccgaggcaggcggatcgcctgtggtcaggagtttgacaccagcctggcaaacatggtgaaaccctgtctctactaaaaatacaaaaattagccgggcatggtgtcaggcacctgtaatcccagctacttgggaggctgaggcagaagaactgcttgaacccaggaggcggaagttgcagtgagccgagattgcgccattgcactccagcctgggtgacagagcgagactctgtctcaaaaaacaaaacaaaacaaaaatcagctgggaaaggtgacatgcgcctgtagtcccagctactcaggaggctgaggcacgagaatcgcctgaagctggaaggtggaggttgcagtgagctgagatcacaccactgcactccagcctaggcaacagaatgagactccatttcaaaaaaataaataactaaataaattttttaaaaatccacattataaattatgtattataaaagataaagaatgaaataactgttcagattaagggacactaaagaaacaaagcagtctaatgcaatccatggtccacggttttcttttgctatataatatatagtacactgtccaaacagctaatgtccttttatagcaaaagacagtccttttcactgggggaaaatctaaatggggtctgtcaatttgttgatgcattatattaacgttcatttctgggccgggcgtggtggctcacgcctgtaatcctggcactttgggaggccaaggcgggaggattgcctgagctcaggagttcgagaccagcctggcaacatggtgaaaccccgtctctactaaaatacaaaaaattagctgggcgtggcagcatgcacctgtagtccccagctactcaggaggctgaggcagaagaattgcttgaacctgggaggtggaggttgcagtgaccagagatggcgccactgcactccagcctaggcatcagagcgagactctgtctccaaaaaaaaaaacagtaagagttcatttctggatgctgaccattacactatactatgtaacagaatgtcctaatttttaggctttacccactgaagtatttagggataaagaacagcaatagcatatgtgcaacttactctacaatggctcagaataaaagaggaagagaaaaaaaaaagaataagtgcggtaaaatgttaacatttggaaaatctaggtaaaatgtatgagaattttttatattatttttgaagctttttgtaaggctaaaataatgtcctaattaaaagttaaaagaaaaaatgtaacagacaaaacccagcatattacaacataaagggtactggcttggtaattccaactacttggtagttccagcagcagcctccctgaggtgccaaaccaccccgtgcctccacctcattcaggggatgcggggactgcctgagcttacagcaatggctgtgagtgctctcaagtgaccacagatgtctaggtggtggatgctcagtactaactggaatcttgataaagtaattcattgtgtaagctagttacatattataacaaaactaggaatacttgaatagtatttcttacctgttttctttccacaagtgcatttgttagctgatggcaaagcccagcaactagatacaataacaaaatattcaaaatataaatataaccacaagggcaaaatattttcaatggagaataaaatgttatttagcttacaagtgtctgttgcatatcgaatgtgctccccattacaagtgctgatgaagagctgaacctgtgagaatagcgtttcgaagtcaggaacactgggcatagaaaacttcacaaacctagaataaggagaaaagaatcaaattaccctgatagttcatgggataaaatacagaaacaatgtatgcaagaaatccatcctgcctccaatactctgtaaaattaaatgagcaacagtattttttagaattaagaactaggccaggacagtggctcatgcccgtaatccaagcactttgggaggctgaggcaggaggactgcttaaggccaggagtttgagaccagtctgagcaacatggtgagaccctgtctctactacaaaaaataaattagccaggcgtgggggtacatgcctgtagttgcagatacttgggaggctgaggctggaggatcacttgtgcctagaaggttgaggctgcagtgagctatgatcatgccactgcactccagcctgggtgacagagcaagatccagtctcaaaaaacaaataaataagaactagaatccatgagattttcctgacctggttattttgcacaatcactatacagaacggacacaaataagggttaagaaaaatatgtttaggcctggcgcagtggctcatgcctgtaatcccagcaccttgggaggccaaggcgggaggatcacctaaggtcgggagttcgagaccagcctgatcaacatggaaaaacctcgtctctactaaaaatacaaaaaaattagccgggcgtggtggtgcatgcatgcgctgtaaccccagctactcgggaggctgaggaactgcttgaacccgggaggtggaggttgcagtgagctgagatggtgccactgcactccagcctgggcaacaagagcgagactgtctcaaaaaaaaaatctatatatatctatatatatatatatatacacacatacacacacatatgtttaataatatatattaaataataaacatgtatatattaaacatatatgttttatatatatatatatgtttaataaggaacaactttcaagatgaaaaattccactaaatgaagccaaataggctgggcatggtggctcaagcctgtaatcccagcactacggaaggccaaggtgggcagatgggcagatcacaaggtcaggagttcgagaccagcctagccaatatggtgaaaacccatgtctgctaaaaatacaaaaattggccaggcacggtggctcacgcctataatcccagcactttgggaggccaaggcgggtggatcacctgaggtcaggatttcaagaccagcctgaccaatcgggtgaaaccccatctctacaaaaaatagaaaaattagccgggcgtggtggcaggtgcctgtaatcccacctatttgggaggctgagacaggagaattgcttgaacccaggaggcagagtttgcagtgagctgagatcgtgccactgcactccagcccgggtgacggagtgagactcgtctcaaaaaaaaaaactcctttatgtttatacaaatcctgaaaatttgttttaaaaaatggccatctcaattgtggggactatagtttgcatttatctgaatacttttatccatgtaatccacaggaatgtccacattttctaaattaaaaagaagttcggaggagtactgccacagggcatggcagaatacattgaatgaaaatattggctgggcacagttgctcataatcccaacactttgggaggnccaaggtcggaggatcatttgaggccaggagtttgagaccagcctaggcaacataatatggccctatctctngcaaagaataaaaatattagctgggtgtagtggtacatgcctatagtcctagcttctcaagatgctgaggtgggaggattgcttgagcccagaagttcaaggcttcagtaagctacaattaagccattgcactccagcctacatgacaaagtgagaccttttctcaaaaaaagaaaaagtatcaaagatccaaagcaacattgcttagaattcccttcaaacaaatttaagctatttaagaccaaattaaatagaccttattttaattggggttccttgtaaccgtgtacttgacagtagaattctttttctcttgatgttatagtattataaattgggatattgtggttgtcatgacatttgaaatgatataaataaactgagaagaaattgacttaaagtgagagtctggcttcacttacgctgggattcctgagacaaaggtatgtgtccggagcagagtttagagaagaagctttgtcagaatggaaggatctagagttatgctctgcagtatggtggccactagccatatgcagctatttaaattaaaattaaagattcaggtgcacttgccatgtttcaagtactcagtagccacatgtggtcacatgtccttgtcttagcacaggtttgtaacatttccaccactgcagatagttctattggacagtgctggtaaggatttctactgtctgtattttcttatttatatgaaagagcagatgctgggcacagtggctcacacctgtaatcctagcactttgggaggctctgtttgagaccagcctgggaaacatagcaagaccccatctctacagaaaaaaaaagtggccaggtatggtggcttatgcctgtaatcccaggactttgggaggctgagatgggcagattgcttgagctcaggagttcaagaccagcctgggaaacgtgatgaaaccctgtctttacaaaaaaacacaaaaattaggcgggcgtggtggtgtacacctgtggtcctggctactcaggaggctgaggttggaagatcacttgagtccatgagattgaagctgcagtgagctgtgctcatgccactgcactcctgactgggtgacagaacaagaccttgtccccccaaaagaaaaaaagttagctgagtgtggtggcacatgcctgtggtcccagctacccaggaggctaaagtgggaggactgcttgagcctgggaggtcgaggctacagtgagctatgcttgcaccactgcacttcagcctgagtgacatcaagaccctatctcaagaaagaacagagagcatgcatgttttatacacacataaactcacataaacatatatatcaggtgagtaatggacatgaatgcattttgaaggtataaggtgtttaccgttgtatatgttagataaggtatggaaagaaccctgagcttctggctgaggaccctggttttgaatctacatattcttccaattttgagttgtggggccctgagcttcatatttttatttataaactggcagtcgcaatgcctcactgacctattgtgaaccccagatgaaattgtttctgacatgtcttgataattacaaagtgtaaatacagatgtatggtgacattgttaagtcaaataatacagtatagatggaagcagataaaccaaaagatgtagtagaaattatgattagcttttcttttttttttttttgagacagagtctcacactctgtcacccagactggagtgcagtggcgttgtctcagctcactgcaacctccgcctcccaggttcaagccattctcctgcctcagcctcccgagtagctgggactacaggtgcatgccaccacacccggctaatttttgtatttttagtagagacagggtctcactatgttggccaggctggtcttgaactcctgaacttgtgatccacccgccttggcctcccaaagtgccgggattacagatgtaagccactgtgtctggcctaatttttcttgaaattacatttcaatcgtgcttttttttttttttaaagaatttgaaatttacttacaaccaatgccttaatagtgctaagtttacatgatttctcccctaaaacctatcaccagtgcctccttggagtgtttctcatggcagtctgagttacttgggaaggatcacctgagtcctccctcttctcaccactctactcctcttgtcctgcctatcagttgttctgtcagtgttattctcagatagaccacacagctggtggcagcatctttaacttaagctgctgcccacctccagccagcccatagctctcactcttggcccccttagtatgttctcaaagcaggaaaagcaacaactgattttttttttttttttgagagagtctccctctgtcgcccaggctggagtgcagtggtgcaatcttggctcactgcaacctctgccttccaggctcaagcaattctcatgcctcagccacctgagtagctgggactacagggcatgcgccaacacacccggctagtttttttattagtagagacagggtttcaccagttggccaggcaggtctggagctcctggccccaagtgatccacctgcctctgcctncccaaaatgttgggattagaggcgggagccactgtgcccagctgcaacaactgattttatttttttgagacagtctcgctctgtcacccaggctagagtacagtggcgcgaccttggctcactggcaacctctttatgcccggatacataaaagagtttttaaaaatgataaaattgaacaaaatataacaagcaattattagctggaatcaataaactgtaactgccataactttagttttgcaaaagagctcaatgttatttacaatggtttactttctacaccaaaaaataaataaataaataaaaataaagccagggctgggcgtggtggctcacgcctgtaatcccagcattttgggaggccaaggtgggcggaccaagaggtcaggagatcgagatcatcctggctaacatggtgaaaccctgtctctactaaaaatacaaaaattagctggggcgggtggcgagtgcctgtagtcccagctactcaagaggctgaggcaagagaatggagtgaacccgggaggcggagcttgcagtgtgccaagaatgtgccactgcactccagcctgggtgacagagcgaaactccatctcaaaaaatataaataaataaataaaaataaagccaggaagtgcacagtgttccattttaacaagcacagaactataaaagaagatgctccttacaaaacagcaaggacgcccaaggagtgttcttgtacatccagagccccgagcancagtgtccagatgggataagttcttcgcaaggagttccccactcttgttgatcagttcacaaagctgtgtcatttgccctgga

SEQ ID NO: 6776 - DNA, 676 bp, Homo sapiens
catggaaacagcctgaattcgccgtagccggaaattagtgttccatagtcccctgcatctttattcactgcacttctgaaatccctccgcaggttaaatggggatagtgggcaaaagaaggaaggaaactcataattaagcaagtattttctggttctggattttgctagagaggccctgcggttttccacctggacagatacttcaatgaagcacaacttcgttgccacgtctcccgtgaggttttccccgtgatattagactctggagccaagcagcctgggttcaactgccttttctaccacttagtagctgtgtgacgttgagcgggtcacttgactgtcgtgtgcattgttttccccatctgtaaaatcttagtgtccttaaccacgtaaaacacttaggacagtgcataggacgtagggagaactatagttattcattcaaggtgtacgttgaatgaatcgatcccttccctgcaaaaaataaataaataagtaacaccacacacagaaagtgaattgatttttcccatctgggattgatgtctccctcctccgcttgtcgcctaaagcactttgttcttctcatgttgcacttctactctgttacagaaatgtgtctctatagtccatgtgatatctgtaaaccaaaaataaaagtctaagccccccaa

SEQ ID NO: 6777 - DNA, 635 bp, Homo sapiens
ttgtatttttaatagagatggggtttcaccatgttggccaggctggtctcaaactcctgacctcaggtgatatacctgcctcagcctcccaaagtgctgggattataggcgtgagccaccgtgcccggttgtgcacttatgtttgatttttgcagaaccacccttccctaatggttgtctcctagatccaaggtgactttattcattttagaatgaacttaccccattgatactgtaaccagagttggcatacatcacgattggcagaacttggtcatgtttagcgagacggaagtgttctggaaactcctccttatagacgtggaggtgacggtgcgcattcttcagtgcctggtaaagggcttcctcttgccccagtttgggtaggggcatcccaaagccaccgtagcccacaatatcaaacttgaccaggtccctgaacttgacgtagtaggacaaggggatcttgttgacattgggtctcttcttcatggttgtcatcccatggcctcatgtgatgatgacactgaggtgctctgcaggctgtgcttctctgtggctcctaccagatacccgatggtcctgtcgatttgctgaatcatcaacttcctgttctctgcctctggcccgaatcg

SEQ ID NO: 6778 - DNA, 519 bp, Homo sapiens
ccaccgtgcttggctgtgcacttatgtttgatttttgcagaaccacccttccctaatggttgtctcctagttccaaagtgactttattcattttagaatgaacttaccccattgatactgtaaccacagttggcatacatcatgattggcagaacttggtcatgtttagcgagatggaagtcttctggaaactccttcttgtagacgtggaggtcagggtgcacattcttcagtgcctggtaaagggcttcctcttgccccaatttggttaggggcatcccaaagccaccgtagcccacaatatcaaacttgacacagtccctgaacttgatgtagttggacaagggatcttgttgacattgggtctcttcttcacggtggtcatcccatggtctcatgtgatgatgacgctgaggtgctctgcaggctgtgcttctcagtggctcccaccagatacccgatggtcctgttgatttgctgaatcatcaacttcctgttctctgcctctggcctgaatcg

SEQ ID NO: 6779 - DNA, 519 bp, Homo sapiens
ccaccgtgcctggctgtgcacttatgtttgatttttgcagaaccacccttccctaatggttgtctcctagttccaaagtgactttattcattttagaatgaacttaccccattgatactgtaaccacagttggcatacatcatgattggcagaacttggtcatgtttagcgagatggaagtcttctggaaactccttcttgtagacgtggaggtcagggtgcacattcttcagtgcctggtaaagggcttcctcttgccccaatttggttaggggcatcccaaagccaccgtagcccacaatatcaaacttgacacagtccctgaacttgatgtagttggacaagggatcttgttgacattgggtctcttcttcacggtggtcatcccatggtctcatgtgatgatgacgctgaggtgctctgcaggctgtgcttctcagtggctcccaccagatacccgatggtcctgttgatttgctgaatcatcaacttcctgttctctgcctctggcctgaatcg

SEQ ID NO: 6780 - DNA, 638 bp, Homo sapiens
ttgtatttttagtagagctggggtgtcaccatgttggccaggctggtctcaaactcctgacctcaggttatacacttgcctcagcctcccaaagtgctaggattataggcgtgaaccaccgtgcctggctgtgcactaatgtttgatttttgcagaaccacccttccctaatggttgtctcctagatctaaggtgactttattcattttagaatgaacttaccccattgatactgtaaccagagttggcatacatcacgattggcagaacccggtcatgtttagcgatatggaagtgttctggaaactcctccttcttgtagacgtggaggtgacggtgcgcattcttcagtgcctggtaaagggcttcctcttgccccaacttgggcaggggcatcccaaagccaccgtagcgcacaatatcaaacttgaccaggtccctgaacttgacgtagttggacaaggggatcttgttgacattgggtctcttctttacggtggtcatcccacggtctcatgtagtgatgacgctgaggtgctctgcaggctgtgcttctcagtggctcccaccagatacccgatggtcctgtcgatttgctgaatcatcaacttccttttctctgcctctggcccgaatcg

SEQ ID NO: 6781 - DNA, 638 bp, Homo sapiens
ttgtatttttagtagagatggggtttcaccatgttggccaggctggtctcaaactcctgacctcaggtgatacacctgcctcagcctcccaaagtgctgggattatgcgcatgagccaccgtgcctggctgtgcacttatgtttgatttttgcagaaccacccttccctaatggttgtctcctagatccaaggtgactttattcattttagaatgaacttaccccattgatagtgtaaccagagttggcatacatcacgattggcagaacccggtcatgtttagcgatatggaagtgttctggaaactcctccttcttgtagatgtggaggtgagggtacgcattcttcagtgcctggtaaagggcttcttcttgccccgatttgggcaggggcatcccaaagccaccatagcccacaatatcaaacttgacccagtccctgaacttgatgtagttggacaaggggatcttgttgacattgggtctcttcttctcggtggtcaccccatggtctcgtgtgatgatgacgctgaggtgctctgcaggctgtgcttctcagtggctccctccagatacccgatggtcctgccgatttgctgaatcatcaacttcctgttctctgcctctggcccgaatcg

SEQ ID NO: 6782 - DNA, 636 bp, Homo sapiens
ttgtatttttagtagagatggggtttcaccatattggccaggctggtctcaaactcctgacctcaggtgatacacctgcctcagcctcccaaagtgctgggattataggcgtgagccaccgtgcctggctgtgcacttatgtttgatttttgagaaccacccttccctaatggttgtctcctagatccaaggtgactttattcattttagaatgaacttatcccattaatactgtaactagagttggcatacatcacgattggcagaacccggtcatgtttagcgagatggaagtgttctggaaactcctccttcttgtagacctggaggtgagggtgcgcattcttcagtgcctggtaaagggcttcctcttgccccaatttgggtaggggcagcccaaagccaccgtagcccgcaatatcaaacttgacccagaccctgaacttgatgtagttggtcaagggatcttgttgacgttgggtctcttcttcacggtggtcaccccatggtctgatgtgatgatgacgctgaggtgctctgcaggctgtgcttctcagtggctcccaccagatacacgatggtcctgccgatttgctgaatcatcaacttcctcttctctgcctctggcccgaatcg

SEQ ID NO: 6783 - DNA, 438 bp, Homo sapiens
ttgtatttttagtagagctggggtgtcacgatgttggccaggctggtctcaaactcctgacctcaggttatacacttgcctcagcctcccaaagtgctaggattataggcgtgaaccaccgtgcctggctgtgcactaatgtttgatttttgcagaaccacccttccctaatggttgtctcctagatctaaggtgactttattcattttagaatgaacttaccccattgatactgtaaccagagttggcatacatcacgattggcagaacccggtcatgtttagcgatatggaagtgttctggaaactcctccttcttgtagacgtggaggtgacggtgcgcattcttcagtgcctggtaaagggcttcctcttgccccaacttgggcaggggcatccaaaagcaaccgtgcgcacaatattaaacttggaccaggtc

SEQ ID NO: 6784 - DNA, 637 bp, Homo sapiens
ttgtatttctagtagagatggggtttcaccatgttggccaggcttgtctcaaactcctgacctcaggtgatacacctgcctcagcctcccaaagtgctgggattataggcgtgagccaccgtgcccggctgtgctcttatgtttgatttttgcagaaccacccttccctaatggatgtctcctagatccaaggtgactttattcattttagaatgaacttaccccattgatactgtaaccaaagttggcatacatcacgattggcagaacccggtcatgtttagcgagatggaagtgttctggaaacccctccttcttgtagatgtggaggtgagggtacgcattcttcagtgcctggtaaagggcttcctcttgccccaatttgggcaggggcatcccaaagccaccgtagcccacaatatcaaacttgaccaagtccataaacttgatgtagttggacaagggatcttgttgacattgggtctcttcttcacggtggtcatcccatggtctcatgtgatgatgacgctgaggtgttctgcaggctgtgcttctcagtggctcccaccagatacctgatggtcctgtcgatttgctgaatcatcaacttcctattctctgcctctggcctgaatcg

SEQ ID NO: 6785 - DNA, 1148 bp, Homo sapiens
atccagaagtgggatgtggctctggcctggccagaggacagaggatgctgcatgccatggctacagcaactggttcagtttgggctcatgtcctagtcagagccaatgagatataatcttgggatatctgctgggctgttgggaaagggacaggctgccctgttcatccccattcctgatgctgagggatctgagaaaatcacttgtaaaatttgggggtgtttggaagaaggggagactgatgtctccttctctctacaggcatctgatcagctacagagcttgactgacctacccagaggcagaatgatatggtggttaaaattgtgctctgggcctgtaggggtgggttgcctttccacacctgtgggtgttcctcgaagagggggatgtgtcagggtcacaagacaattgtggggagagggtcagcagacaaacacgtgaacaaaggtctttgcatcatagacaatgtaaagggttaagtgctgtgcttttagatatgcatacacataaacatcttaatgctttacaaagcagtattgctgcctgcaggtcctacttccagccttaaggcggtttttccttatctcagtagatggagcatacaatcgggttttatactgagacattccattgcctagggacaggcaggagacagatgccttcctcttgtctcaactgcaagaggcattctttcctcttttactaatcctcctcagcacagaccctttacgggtgtcgggctgggggacagtcaggtctttcctttcctacgaggccatatttcagactatcacatggggagaaaccttggacaatacctggctttcctaggcagaggtccctgcggccttccgcagtttttgtgtgcttgggtacttgagattagggagtggtgatgactcttaaggagcatgctgccttcaagcatctgtttaacaaagcacatcttgcaccgcccttaatccattcaactctgagttgacacagcacatgtttcagagagcacgggattggaggtaaggtcacagaatctcaaggcagaagaatttttcttagtacataacaaaatggagtctcctatgtctacttctttctacacagacacagtaacaatctgatctctcttgcttttccccacatttccc

SEQ ID NO: 6786 - DNA, 170 bp, Homo sapiens
gagagtgagcgcgagggctgctagcatgctgtcacctctcaatagcacttgagggttcttgtctttacccaggaaagaattcaagggcaagccggaggtttagaagaaaacagctttattgaagaggcagcattacagccctgtgactgctcctgtagggcagggctacc

SEQ ID NO: 6787 - DNA, 512 bp, Homo sapiens
atccagaagtgggatgtggctctggcctggccagaggacagaggatgctgcatgccatggctacagcaactggttcagtttgggctcatgtcctagtcagagccaatgagatataatcttgggatatctgctgggctgttgggaaagggacaggctgccctgttcatccccattcctgatgctgagggatctgagaaaatcacttgtaaaatttgggggtgtttggaagaaggggagactgatgtctccttctctctacaggcatctgatcagctacagagcttgactgacctacccagaggcagaatgatatggtggttaaaattgtgctctgggcctgtaggggtgggttgcctttccacacctgtgggtgttcctcgaagagggggatgtgtcagggtcacaagacaattgtggggagagggtcagcagacaaacacgtgaacaaaggtctttgcatcatagacaatgtaaagggttaagtgctgtgcttttagatatgcatacacata

SEQ ID NO: 6788 - DNA, 674 bp, Homo sapiens
tcagccttccaagtagcagggattacaaagccagctagctttaagatacggtgttgggcatcacgttttggcatggagcaggcagtcttttctttgcccccaggtgggactaagccaccacaagccttccctggtgtgtgcagtgggtgatgaatgcttgcctgctcagcacccacttcctggtgggctgggtcacattactatgactcccccttgagcttcagtccgcgcctggttggagattattgactcaacccggggatccagaggtgggatgtagctctggcctggccagaggaccgaggatgctgcatgccatggctacagctactggttcagctttgggctcatgtcctagtcagagccaatgagatgtaatcttgggatatctgctgggctgttgggaaggggacaggctgccctgcacatccccattcctgatgctgagggatctgagaaaatcacttgtaaaatttgggggtgtttggaagaaggggagattgatgtctctttctctctacagacatctgatcagctacagagcttgactaacctacccagaggcagaatgatatggtggttaaaagtgtgctctgggccgagattttgccactgcacttcagcctgggtgacagagtgagactccatctcaaaaaaaaaaaaaaaaaaaaaaa

SEQ ID NO: 6789 - DNA, 632 bp, Homo sapiens
aaagccagctagctttaagatacggtgttgggcatcacattgtggcatggagcaggcactcttttctttgcccccaggtgggactaagccaccacaagccttccctggtgtgtgcagtgggtgatgaatgcttgcctgctcagcacccacttcctggtcggctgggtcacattactctgactcctccttgagcttcagtccgcgcctggttcaagattattgactcaacgcgaggatccagagatgggatgtagctctggcctggccagaggaccgaggatgctgcatgccatggctacagcaactgggtcagctttgggctcatgtcctagtcagagccaatgagatgtaatcttgggatatctgctgggctgttcggaggggacaggctgccctgcacatccccattcctgatgctgagggatctgagaaaatcacttgtaaaatttgggggtgtttggaagaaggggagattgatgtctctttctctctacagacatctgatcagctacagagcttgactaacctacccagagacagaatgatatggtggttaaaagtgtgctctgggccgagattttgccactgcacttcagcctgggtgacagagtgagactccatctcaaaaaaaa

SEQ ID NO: 6790 - DNA, 336 bp, Homo sapiens
ttttttttttgagacacagtgtcactctctcacctaggctggagtgcagtggcacgatctcagctcactgcaacttctgactcctgggttcaagcaattctcgtgcctcagcctcccaagtagctgggattatagacacgtgccactatgcccagctaagttttgtgtttttagttgagatagagttttgtcgtgttggccaggctggtttcgaacccctgggctgaagtgatccacctgccttggcctcccaaagtgctgggattacatgtgtgagccactgtgcctagccctaatttttttttttttttttttttttttagtgtttgtagagat

SEQ ID NO: 6791 - DNA, 672 bp, Homo sapiens
tcagccttccaagtagcagggattacaaagccagctagctttaagatacggtgttgggcatcacgttttggcatggagcaggcactcttttctttgcccccaggtgggactaagccaccacaagccttccctggtgtgtgcagtgggtgatgaatgcttgcctgctcagcacccacttcctggtgggctgggtcacattactatgactcccccttgagcttcagtccgcgcctggttggagattattgactcaacccggggatccagaggtgggatgtagctctggcctggccagaggaccgaggatgctgcatgccatggctacagctactggttcagctttgggctcatgtcctagtcagagccaatgagatgtaatcttgggatatctgctgggctgttgggaaggggacaggctgccctgcacatccccattcctgatgctgagggatctgagaaaatcacttgtaaaatttgggggtgtttggaagaaggggagattgatgtctctttctctctacagacatctgatcagctacagagcttgactaacctacccagaggcagaatgatatggtggttaaaagtgtgctctgggccgagattttgccactgcacttcagcctgggtgacagagtgagactccatctcaaaaaaaaaaaaaaaaaaaaa

SEQ ID NO: 6792 - DNA, 666 bp, Homo sapiens
tcagcctccaagtagctgggattacaaagccagctagctttaagatacagtgttgggcatcacattttggcacggagcaggcactcttttctttgccctcaggtgggacttagccaccacaagccttccctggtgtgtgcagtgggtgatgaatgcttgcctgctcagcacccactacatggtgggctgggtcacattactctgactcccccttgagcttcagtccgtgcctggttcaagatgtattgactcaactcgaggatccagaggtgggatgtggctctggcctggccagaggaccgaagatgctgcatgccatggctacagcaactggttcagctttgggctcatgtcctagtcagagccaatgagatgtaatcttgggatatctgctgggctgttgggaaggggacaggctgccctgctcatccccattcctgatgctgagggatctgaaaaaatcacttgtaaaattcgggggtgtttggaagatggggagactgatgtctccttctctctacagacatctgatcagctacagagcttgactgacctacccagaggcagaatgatatggtggttaaaagtgtgccctgggccgagatcttgccactgcactccagcctgggtgacagagtgagactccgtctcaaaagaaaaaaaaaa

SEQ ID NO: 6793 - DNA, 365 bp, Homo sapiens
cttaactgtcttctacaatgctgcctgaaatattaggtttctcaatccaattgtcacatggcatcaaaattacaccattaccactaggcatttctcagcagagagttttctaggcaacaatgcttcttttcttcctctttctcttcataaacagaaaaacatggaatccatattttcccagaagataaacatgtgattcacttaccacgggactgtctgtaaaataactctggctcagggtgtggacatcatctcacccattgtcatcacaatattctttaagtaaccactttctgggatagaactgccccaacaaggtagcagccaggtcacatggtggttttagtttactctctcaaacatgc

SEQ ID NO: 6794 - DNA, 365 bp, Homo sapiens; identical to SEQ ID NO: 6793

SEQ ID NO: 6795 - DNA, 470 bp, Homo sapiens
ttcttctccctccatacaaaggaaaagcttatttctgtttgattttgagacatttgcagatatctgaggttggcatgttcttcctattgcaatagtctttttgagtaaagtctctctttatctaagtcttatttgtttttaattaatatcatgcaactggatactttatagaaataagaataaatgagacacacatatatgcaacaacatgagtgaatctcacaaatataatgtgaagcataaaaagcaagaactaaatggctatatgctgtatactttatatgaagttcaaaagaggaaaaatgaacataaattgttgaaagtcaggatagtggctcccttcaggggggcaattgctggagggggacaaagagggctcctagggcactgatagtattctgtttcttgatctggaatatattcaatttgtgaagagtcacctcatgacagactcataatttggaaaactt

SEQ ID NO: 6796 - DNA, 470 bp, Homo sapiens; identical to SEQ ID NO: 6795

SEQ ID NO: 6797 - DNA, 300 bp, Homo sapiens; identical to SEQ ID NO: 730

SEQ ID NO: 6798 - DNA, 402 bp, Homo sapiens
ggtagccagaggcaactccaattcctgctaaacagtaggaagggttcttactagagacggctcttctgcctcctggggtggaggggtgccgtcaggcatggaggaaggactagcctcattgtcagtggtcacgtctccatctgtcagcgcatcaaatgagggcaatccgtcttcatccacagggagactgtctagtgtctctgtgaggactgctagcaagtttgcctcattctcttcatctatcttctgcagaaagagaaaaaaacagaagatgtgagttgaccctgggaggcaggtaacactatgcatcaacatgtttgaccaaatgagtgaaccatacgtgaaatctagaatgcccattccagaacacaaagatcatgtctttctcaaactccaaattca

SEQ ID NO: 6799 - DNA, 1100 bp, Homo sapiens
tttctgttctctgtgggtttggtgtgaggagggtcatcgtttgtggtcagatatttgagaagctccgagcagggacgtctttgtggcttttgctgttgacaaatactcttcgctttattgctccatgaattctcagtcttaaaaacaaggcataaagaaagctaaaattagtgaactgaaccttatcagaatggatataggttttctggagagatgggatttttcaatgaagtgttcagtctaagtgtactagatctatgagctgtgaataactgtttgcagaacaaggaaagaaaattacatttaaaattcctaaatgacatttatgcagctttttattttatttctcctacatttcaatgttcctactcagcaacatgtaactaacaagaccctacagcgcctttattgtgaataaaaaaaatcggctggcttaaaccttaatttgccactgattgctgacgcccagtactcacaactctcttaagtaccccttaatgctccgttttcactcacagtgaatagcaagacaaacattgtttaatacagcccactagctgaattatggcattgccagcattccatccaattaatggcagagatagatgttttgtggtgattccaaaagcaatctttctcaggttagacagctagcaaaacagcaattctgcatcttaaagccactcatagataataccagcttatcagcaaattttaccgtggcccacaatgctgcaggtaacaataaagtgggcaagaactaacagacagtggcacttccattccaaacacccaaagacgatgcgtaaatgaactctgcctagtttaaagtagctcaagcgctgtttacggaatcccattcataatctatttcatcattatgaggcagcttcggggtcccagctgaattaatacctacaaacttatttgttttactgcttcaagccaaaatcctttggtacatcccccctgtattaaaaaatttacatttgtaccttaacaattgcagggtttgttctgatcctgtgattgtgatttgcatggttctgggtactgagaccactgcattcattataacttagctgagtgttggctggtgc

SEQ ID NO: 6800 - DNA, 305 bp, Homo sapiens
tttctttttctttttttttttttttgagacagggtcttgctctatcgcccagactggagtgcagtggcgcgatctcggctcactgcaagctccgcctcctgggttcaagccattctcctgcctcagcctcccgagtagctgggactacaggtgtccgccaccacgcccggctaatttttttgtatttttagtgaagatggggtttcaccatgttagccaggatggtctcgatctcctgacctcgtgatccacccacctcggcctcccaaagtgctgggattaccggcgtgagctactgcgcccgg

SEQ ID NO: 6801 - DNA, 482 bp, Homo sapiens
gtttcttcctaaatattttctatctgtaggtggctaaatctgtggctgtggaacccatatatatgaaaggctgactgtatattcttcaattagattactttcaaagtcataggttagtggaaatcctttaggaaaaatattatttttagcacctatagaagatcaggtgttccaagtgatatatatggttttaaaatttttaatacatgaattactaaacatttttaaatttaatactgcattttaaatttttcttgtatggcttataaccaccgcagaagatagaaaatgttattttgattttactgatggggactagaggtacagagacgttaaataacttgctcagttacatacttagtcgataaaaaagtcaaaatttgagcctaggtaatctgaccccaatttacagtccctggagtataaaggaaaaagagggactagaattcagctctaatgcaatttaacattttgaagtcacg

SEQ ID NO: 6802 - DNA, 482 bp, Homo sapiens; identical to SEQ ID NO: 6801

SEQ ID NO: 6803 - DNA, 482 bp, Homo sapiens; identical to SEQ ID NO: 6801

SEQ ID NO: 6804 - DNA, 338 bp, Homo sapiens
ggagattgtaagggctgtatctccgcgattactggtactggtgctccacccataggggccctgttctctctggggtcccacactggggtcatgagagctagttagtactcagcctgacccctaggtctggtcctgccagcctgggatgggggtcaatgtatgctacacatcttgggctcacaagtgaggctgtggaggccaggaggttcaagtatggagggtaggagtgcaacccaggagcaacgctcaaggtggccgagatgcagggaggattgtggcgatccggttgcacactggcctctgtggaggtcagggaggtgggaaggtggggtgggcct

SEQ ID NO: 6805 - DNA, 2776 bp, Homo sapiens
  SITE (2030): n equals a,t,g, or c
  SITE (2087): n equals a,t,g, or c
  SITE (2267): n equals a,t,g, or c
  SITE (2273): n equals a,t,g, or c
ggagattgtaagggctgtatctccgcgattactggtactggtgctccacccataggggccctgttctctatggggtcccacactgcggtcatgagagctagttctcatgagagcagcacccctaggtctggtcctgccagcctgggatgggggtcaatgtatgctacacatcttgggctcacaagtgaggctgtggaggccaggaggttcaagtatggagggtaggagtgcaacccaggagcaacgctcaaggtggccgagatgcagggaggattgtggcgatccggttgcacactggcctctgtggaggtcagggaggtgggaaggtgggtgggcctgaactcaggcagcccttcagtggcttcttcaggcctaggataaccctggccaggccccatggtcctgctctgggtcagctgtcagggagacctcccttcagcctgagccaagctgcattgggaggagaaggcagggtgagggatctgggagagcaggatgttgagatatcctgaccctctgcttcctagcctgatgatggggaacacagagccacccgctatgagcacaggccgggggtggaaggcccagtagagctgcccttccccagatggaagcttcctccaaccttcagtttggccagtgggtgggtttgggcatctgtgcccctggtggcctccaaatccttcctgggattcccccaaacccacactgatgcgaagctgttcttgaccctcccatagcatcaactcagttcagctcaaagctagaaacaccaaggtctttgaaaatgtttattggctcaggatagcttcagcatccaatctgcgaaggcccctgatggagctatttcttcctagtatcaggagcaattgagacccctcaggagtttccacactgctgtggacgggatagccagggcagacctgcatcccagagcaagcctagatccttgaaagcaatgtcaggcgtggcagtggggaagccatggaggctgggaagggcaaagtgtggagagaggagtgaccgggactggagccagggtctggggagagcaacagcaccaggcttttcctggtagttggattggtacattcactgctgccaggtacccagagatgtcatctctctccaggtagagcatcaccagctcctgtggccttgtagatgactctgtacctcagtgaagagtgcagacaagtagagtgatggggtcagtgtccatccagtttacgctgagtcagtccatacagcaagacacctggcacttggcaggtactcctggatgttgatgagcaaggaagagcaacggccctgtcagctggcagtggtcctcacagccttcatcccaggtctgcctacgtgggagatctcatcagaaacaggaacggggatctgtctgtgcttgcaggaaagtccatttgtttttctccaagttaggtctcatctacagctcttagcttctcagtaaagaggatactctcccaaccagccaaggaataaaagctgatctgtatgtagggcagaagtgtggcaaatgcatcaggaaccggttagaacagaacagagaaaccctgactgtctacagattccaactttaatagcaagcctgtggagttacacaaacctgtgttaaaacatgtaatttttatggatttcatctcccgttgtggatcaatttggaaaaaccaaaatatgtaattttaaaaaactaaaacacatcctggtagtcccagtgatgtgtaaatgagagagaagaatagacaggcttccaaaccctgggaagaaagctgcttaattatgtgaacatcttataatgaagtctcttgcagctaaaattagattttgagtgcatgaatctgtgataatgtttgcatatcagaatgcattctccccttaaaagtagcagtagccacttggttcttagggggccccaagaggagaggagaagtgctgaggttgatgttacgactgcaagaattcttgggacacaggtttgttttctgctgacttgctcggaaacccattggagngtatctgaaatgtgatgactccaaaggggttcatttcactatagggagaaattgatntcgtctgacttcctatttatcaccactcaatattgggtgagttggtctgaacaaggtggggataaagtagagtggaaataatgtagagtcgtcagactgaaaggccaggttgtagtcccagctcttatctgccatcttggacaaagcttttcccatctccagtctcagtttcccatccantaaaantgggggaagtggtaggtcttgctgattgcatccacattcattcctccatttcctttcccagcaaccccccatttctgtttgggaattcatatgatctgccagagcctctccaggggtggaatacatgtcctggactaagccaatgacaccttccatctttccagctatggtgactgggttaggtatgatcttgtgagttaagacaatgaagccagagggaatttcaagacttatgggaatgctgggtagaagctgttttaattcccctgttgaatgtgaaaaaggtagtagtattcctgggtctttatgatgaccaccttgggccttgggatcatgaccaggaatcacgtgaagctgacaccactgaagggagagttgagaggcagaaagagatcaagtccttggtgaaattgtttaagtacaggatcaagccttgcttgagattggccttacctctggactttttttgttatatgagctaataaattctgtttattgtttaa

SEQ ID NO: 6806 - DNA, 912 bp, Homo sapiens
  SITE (3): n equals a,t,g, or c
  SITE (13): n equals a,t,g, or c
  SITE (65): n equals a,t,g, or c
  SITE (137): n equals a,t,g, or c
  SITE (443): n equals a,t,g, or c
  SITE (697): n equals a,t,g, or c
ccnacgaccctgnagcccttcaccccggagatgaaagacttgatcaatggctacatccggacggntggaccaagccctgcgtgaccacaactggacggggctgcccagggagtatgtgcccagatgataggcctggncccacgccgccgcccccgctgagtgacgcaatcgcaccacggggctgcgctccccactctgatgctcaggcccgtggcctcactgggacgaacggtgggtggggggctcaccctggtgctgcctcccgcacaaggagacctggacacaacagacacacatcacaaggcgaacacaaatggacacacatacctggccacgaacccacacctcctcagacactcagacaccactccaggctcatagccccgtcttgatgcagagaagccacccacgtggggtgtgccaggcacccccagatacaaatngcagccacgcacagacgtaacacacaggtgccaggccgtgtgctcctggaggctggctggctgtctctctcacacagatacacgtgcgctccctgggatccgggaggccctgggcttcctgtgtgtagccctggcatagacttgctcgtcagggtgttcgactctgggatgctgggccgggcagacatttatgctctgagcagcaaggaccattgggatggaggtgggcacaaagactgctgcttccagggtgntgcggccctggccgtgtgtctgacatcccataaatgtgtgtgtggtgtgactacgggcaccacaaactccgcagccttgcctctcttttctctgtggctgggctggctgcaccatgggcagggttgaggactgccccccaccccgcccaagccaatgcagacactgacctcaagaccagccacaccaagtctgtgcactgcccaccacccccttc

SEQ ID NO: 6807 - DNA, 560 bp, Homo sapiens
aaccctgacatacacacacacacacacacaccagcattcttgagttagcagcctgctcgccactccagacctgggtcctgtggtttcacagtgaccaccccagagatgaaggtgaggtgcttagctgccttgttcgtcttgtccccacaccctagcacatactgggtggtcaataaggatagactgttgagtgagttgagggataaatgaaggttgtgccttctcaggcagtgccaggagtccctgctccagaactgaggaatgagcaccagtgaagcctatttcccaacctctgcagcctccagtaggcagaacttcaagagcctctcccactgcactctcctattatggaggggtttctgaaagactgcagcagatggggcaggaaagaggcaagtgcgacctctggacattttcccaaaggtcagggtctcaggccctacgaagccactgtccacctgaagcttccatagtaagctgctgttcctgaccactcaagtattggtcatttcctgcacagatagggtaagcgtcagactggacccaaagtaacccttcgt

SEQ ID NO: 6808 - DNA, 1798 bp, Homo sapiens
agcacacactgcgccgtcacgctgtgcaggccatctgcaggcgggggcaggggcagtggtcatcctggggacagtggccacccctccctgggacacaagagggctggggccagcgatagcctaggcccccagaacctctaagtcagcaggctgaccccaccaggacacaagggagtctggggctagtgaccaccagctcccccagcatcaaggtgtcaaaaagctgctgcttcctcccccaatccccaatacacggaggggtctgggccaaggatcaagcaaccccacacagtgcccatgggttagcaagtcactcccgcaacagcactcaagtaccctaagtactcagtaacccacacttccccaagttatcatggtcagcaggccaccccaactcaggacacagagaggagctagggccactggccactcattcccagccacctttcccttctcccctcctccagcatagcagaaccagcaaaacatccccctccagaaaagaagggttccagatcagggatcacctatctcctatttttggtcagcaaattgctcttccatgacactagaaggggccctggcccagtgaagactcaatgccatcctccagaatcctgggttatcaagctccaggggggtcttgaaccctgacatacacacacacacacacacaccagcattcttgagttagcagcctgctcgccactccagacctgggtcctgtggtttcacagtgaccaccccagagatgaaggtgaggtgcttagctgccttgttcgtcttgtccccacaccctagcacatactgggtggtcaataaggatagactgttgagtgagttgagggataaatgaaggttgtgccttctcaggcagtgccaggagtccctgctccagaactgaggaatgagcaccagtgaagcctatttcccaacctctgcagcctccagtaggcagaacttcaagagcctctcccacctgcactctcctattatggaggggtttctgaaagactggagcagatggggcaggaaagaggcaagtggacctctggacattttcccaaaggtcagggtctcaggccctacgaagccactgtccacctgaagcttccatagtaagctgctgttcctgaccactcaagtattggtcatttcctgcacagatagggtaagcgtcagactggacccaaagtaacccttcgtctgaacatgggcatagtgtggactgactggcccatactggctttgcctaggacctccagaggattaccccaggacctctgaccttttatcaggaggggagatatccctaggtagcagacagttctttacaggctttatggggtctgctagatgccttggaatcactgggattctgtggagattatccaggaacctaagcagagtccttgtgaggtctgtggcagatcttgtagggtgcaggaaccctacccttaaggggttcttggaaggcttagaaatccctctttggtttgaggtgccctgtggagtccctgaggcccaacaggttggtgtcactgggtcacttgcctgccccctgcccctcacctgtgacagtcaccaacatggaggccaccagtgggcggttattgtctagctttcggctgagtcgcagctccccactggtctggttgactaccagcagctgcagctcattgccacgctcaaaggagtagaagaggtggtcggagacatcggggtcataagctgggatgcgcccaataatgcccgacgggaaggtgtctgaacggttggatacatagttgttgaagag

SEQ ID NO: 6809 - DNA, 721 bp, Homo sapiens
ggaacagctcaagggatgttcccctccacgatctggtacattatatgggcattggggccttcgtcagggtccactgcagtgatctgggccaccactgagcccacaatgctattctctttcacccgcacctcaaactcctcagctgggaagacaggtgcattgtcgttcacatcctgcaccatcacctggatactgactggagtccggagtgggggcacacctctgtcccatgcgtaggcagtcaactcatacactgatactgctgcccggtctagccgccttactgtacggacaattccagaggtgggctcaatggtaaaatctccatccccatcttcaccattctggaaagtgtactggacccggccattggcatgagcatcccggtcagtggctgagatctgcaggacactggtgaaaggtggggcatcctcagagaccagccctgtatagtgggaggccacaaattgtggagcattgtcattcacgtcattgaccatcacctccacataagtagtgtctgccttctgtgggatgccattgtcccgagctgtgatagccagggtgtaggtcacctggtcctcatagtctaatggggcctgtaatgtaatggctcctgagtctgcatcaatgcggaactggggcaggttgtcctccaggagataggtgatacgagcattctcacccacgtcatcatcagaggcactgatgaccactatgg

SEQ ID NO: 6810 - DNA, 749 bp, Homo sapiens
cgtcagttctccagagaagatgtccatttggaacagctcagggatgttcccctccacgatctggtacattatatgggcattggggccttcgtcagggtccactgcagtgatctgggccaccactgagcccacaatgctattctctttcacccgcacctcaaactcctcagctgggaagacaggtgcattgtcgttcacatcctgcaccatcacctggatactgactggagtccggagtgggggcacacctctgtccactgcgtaggcagtcaactcatacactgatactgcctcccggtctagccgccttactgtacggacaattccagaggtgggctcaatggtaaaatctccatccccatcttcaccattctggaaagtgtactggacccggccattggcatgagcatcccggtcagtggctgagatctgcaggacactggtgaaaggtggggcatcctcagagaccagccctgtatagtgggaggccacaaattgtggagcattgtcattcacgtcattgaccatcacctccacataagtagtgtctgccttctgtgggatgccattgtcccgagctgtgatagccagggtgtaggtcacctggtcctcatagtctaatggggcctgtaatgtaatggctcctgagtctgcatcaatgcggaactggggcaggttgtcctccaggagataggtgatacgagcattctcacccacgtcatcatcagaggcactgatgaccactatgg

SEQ ID NO: 6811 - DNA, 1002 bp, Homo sapiens
agttctcggggaggttggggacacctcccagaagaagagggcccgtcaggtccagggacctggggatcaggggtctgggtcattggtgggactggggccagagtagagttgctcctggggggccacaggaagcaggggggtaggacccagagggtagggtgattgagggaggaaaataaggccgagctgtggaaggagttaggatcttacttcagttggggtgcaaaggggcacccgtgatgggccgatggtctggggaaaggtaggtgaatgggggttgagagctatgatgaaagaatgaggcatctggctggctggggaggggatggagacgtgaagactctgggggactggacatgagatgaagggactcggaggggatgtgggacattagtgagactggggtggggaggtggaggctttggaggactgcctggggactgtgtgtgggaggagggagtatggggtggaatacaggattgggggctagggtgagtaggctttcagggtctttgagaggagaggggaatcttggtggtttgggggaaagatgggagagtttggcaggatgggatgaggaatgggatgtgaagggttggagtgggctttggtaggcaggggacaaggggactagggggcaggggcctcacttcttggagcttgtttgcacaccagcagccgcgcatgagtagttgccaatctcagcaccaaactgcagagccacggccacatcacaatcatccacgcttagcacagccaccttgtccttggaggggccctgtgcaccccctagggcatctgtccggggctgaagacgcaggcacaccagtcaacagtgcccccagtaacccctgaggagcagaagtcagcatcccaactcccctcatacccgatgccagggatggcccccaccttgttgtagtatctcagatgcactgtatgccattgcccgtcactcaagccccctggaactgtggggctgaccacggtgttggattcacc

SEQ ID NO: 6812 - DNA, 350 bp, Homo sapiens
tgagagaatagtggagatgcagaacgacagtctctgtgtggtgagtaaatacaggtttagcatcttagatctgaaaatctgaaatccaaaatgctcccaaatctgaagttttttgagcactgatgtaacacttaaagaatatgctcatacaacctgtaatgcttcaaagaagcatccaggattcatcattctcagtgagaatctaaatcagtggagctagaaagaacaagaatttaaattattactttagagtcatgtaaggagataaatttacaaggagtatttctatgcatgttcttcattttcgtaatttggatcagggtaaaaaaattagagaaagaattgctaaa

SEQ ID NO: 6813 - DNA, 378 bp, Homo sapiens
gaccatttcacatgccaacatgataaagctgttcattattcccaggtttggtcatcctggttgcttaatctagcaatgttgacttaaaatgactagacagcccacagtgattgcccccggctcagggtcacactgggccctgtaacttctcattttacatcatccaaggataagactccagtacaactgtagtagatgtttgtgatgaaaatgagccctttgctgagatgttcctctgaattgagttgcaagttggccaaagctggccagagtgcagctgtaaagggagctttgtagtctccttttgttcctttgttgaattgtaaccaaagctaagggagctaccctgggctttatcccgtccccacctcttcacct

SEQ ID NO: 6814 - DNA, 378 bp, Homo sapiens; identical to SEQ ID NO: 6813

SEQ ID NO: 6815 - DNA, 322 bp, Homo sapiens
gtgagacttcccctcaaaaaaaaaaaaaaaaaaaaaaaaaagcaggggaaactagacttattttgtggcccaaactgaaaagtctgtaaacataaaaatactcattgtatttgttttcaaatttctgcttctggccaagatgtagtagtagagatcttatttacctttcctcctgaaatgacaaagaaaaaagtcaagaaaatatatgaaagaataattttcaagacactggatattagacaacaaaggacagcaattacagaggtgggaaacagatgaagtaagcctataattacctcagcttattgccttgagagagttt

SEQ ID NO: 6816 - DNA, 115 bp, Homo sapiens
acggctgtaatcccagcactttgggaggccgaggcgggtggatcacgaggtcaggagatcgagaccatcctggctaacatggtgaaaccccgtgtctactaaaagtacaaaaaaa

SEQ ID NO: 6817 - DNA, 117 bp, Homo sapiens
ccggacacggtggctcacgcctgtaatcctagcactttgggaggccaaggcgggtggatcacgaggtaaggagatcgagaccatcctggctaacatggtgaaaccctgtctctacta

SEQ ID NO: 6818 - DNA, 434 bp, Homo sapiens
agtgagccaagatcgcgccactgcactccagcctgggtgacagagcgagactccatctcaaaaaacaaaataaataaaataaaaaataaaacaattttgatcttacagatcccctaaatatcccctggggacccccagagaccctggtctaccctgtccagtagaatcgggttattgctaatcggttaacctgtgtgatcaggaaaatgttacatgggtgacatttgcacaagttctgtgttgacctttgagctgggtttggaacagttaatgaagagggatcttggaggtagtggtgtagagatcctgttttcctgatcccaagaggtgagatcccaaatgccctccaacagccatggcgaagagctgtcactgtctccttgaggcacagcagcgtcccccgcggcacccacttgcacagtctcaggtggggt

SEQ ID NO: 6819 - DNA, 261 bp, Homo sapiens
ttttttttttttttttgacgtcacaagagtggtatttgtcaggtgctaagtcgagaataatgacactgtataaaagaaatagcctgggtgacctgttccttcctcgagatgtggatgggtgcttttgaattacagaaaaacctctgctttttgaactactgagtaaaaagggaaaaaataaccacaacccagagcttttacatttcacatatgctctctgggtatgcagtgcagggtgccatgaatgagcgcaggatttgg

SEQ ID NO: 6820 - DNA, 385 bp, Homo sapiens
gccaaaggcaaatgaggtaattaattatggggcttatttattttagcattttatgtattttcttaggttttttttaattaaaaatatttttccagttgcaagatttacataaagggaaacaaaataatttaaatgtgtcaactctaatcacagatcttttcaagttaattaattttatgttataagaagctgttgctatagtttggtgtaagtcatcttacctttgctgtaacatgattgaaaatataattttttaatcctgacacaacctatgcctgtatattattgcagggaccaatcagttctttgttacttaatcacaagtgctaaatatgatgttagattgctttcttaatagccatgctgttgtatctaaataggatcc

SEQ ID NO: 6821 - DNA, 385 bp, Homo sapiens; identical to SEQ ID NO: 6820

SEQ ID NO: 6822 - DNA, 9407 bp, Homo sapiens
agctaagcttttcttcaaagtgttttcttaatgaagattgtattcactcacaaatagttctccaaaacagagattgataaaaggatggaatgagactcatacactccttttctgattaagataactctgtattttacgccacttatatagactcagtgtgttaagacgtatcttggggaaaatatggctactttctcaaagttgtaagctttatttctatgtataaagtccagctttattagatgtttctgattcccaaaataatagtattaggatattccttattttaggctttaaataatttgtataataaaatagtgtcagtaggtccaaagctgaaatgcaaagttcagatttctaatacaaaggagaggagtattttgtttcttttggtacagccatggttcccaaactgtgtagcagggcaccttagcaaattaacatgggtgccacacaatattttaaaatttttgagaaaaacatagcaacacctgttggacatcacataaactactactttgaggtagtttacattttcaacattaaatagcattatattcctttctataacaacatatctttacaaaactgggttttcagcagtttgataaaaagtactgtgcaagaagcagagaggaaaagaaaatgatactgattccaaggtttgagacatgcagtgtccacagttactagtggtgatgatgtacattcttattaagctgttggatctaactgcttaataaacacaagtattagatattttcttttggaccaggtatgctgtgaaaaagtactgaggcactaaatagtgtcatgagctgagaaagtttgagaatatctgtgctataggcaagaaaaatacaaaacatcatttagtttttcacctagaaattttctaaataaatagtcatacaaaaaagggaaaatatatacaaacgtacatacaaagtttggatttttattgaaatcttgttaggtatcaaacaaattctgctttcttcagataaaaatattctctcagatgtctccagataactgctaagtctaaattggtccttcaatgtcttatttttattgtcctcgtgaaatgttcatatacagttaagatgttcccaaaaggatttttatcgtgtaaaggagcgtacatgacgacctctaccactgcctccactaacaaactttcctcttgagcctccactgccgctatttgcactagcccaggaaggtccaagtcccccacgacctctagaagcacggtcccgaggacttgggcggtaacctgtaaaagaaagaatacagtttttagttccaatgtcctttcttttccaagattataaatactaatctacgacactgagctcaaaccaagaattactctattctcttttaaagctcacgtgcaagcacggtgaatgggccaaagatttttgaattatacattttaaacaggtaaactatatggtatatgagaattatatcctaaataaaactattattttttaaaaatgtgcatttgaaaccaaaagctacttctgataagtaaaattctggactagataaatgttttaaaaaaaaaggttatgtgcttacacacctaagacaatactataaccaaaaaaatatatgctgtataaaggtatctctgttattaaaatactttgtggtcagaaagataccttaagcattggctttcattactgaaacataaaaataagagcacatcaccatgaaactgttcagattatacaaacagttcagaaactaaaaatttgattatttttacagaagatgtatattgggcattcattcaaggatataaactttagaactttaagtctatactctaaaatattctcttccagaatgagagtacagttgacccttgaacaacatgggtttcaactgcctaggtccacttatatgaggattttcttccacctctgctgctcctaagaaagtaagacctctcctcctcttcctcagcctatggaatgttatgacctttatgaagatccacttccacttaatagtaaatgtattttctcttccttatgattttcttaataacattttcttttctccagcttatttaattgtaacacattatataatatatatataacatataaaatatgtgtcaatcaactgtttatgttatctgtaaggcttccagtcaacagtatactagcagtagttaagttttggggaagtcaaagttatacttagatttttgactgtgtggagcaaggagatggggagattagcacccctagccccctctgtatatgatatcaacaattttaaaggaggaatttacttcccttctctcagcaatatcaagtagcaaggatgtatacctgtagaactaaggggtcgtaatggtggaagagggcctctgttaaaattgctctggcctccacgactttcattgtaatttcctcgaggagtattctgagcactccaactggagcctcttgttccttcccgacgactgtagtttcctaaacacaaacagcacaatcaaaatcacttttttcacaacttcagttggattcttttaagtgacagatttttcttaatcttcaaaagaatggaaaagaaactgaaattctgcaaactgactgtactatatagtggcaacatcacagtggttaagagcagaggctctagagccaaactgccagggatcaaatactggttctaccacttgtatttatgtgccctggtcagctgactgacaattttctcttctgcaaattgggagtactaagagaacttgcctcatggggttgacatgaggttataatatgtaaagtgcttataacagttcctgacacacctaatctaagtgtttgttattaatataaacacagattctctttcactctcaccctcctaactcagcaggtatgaaaacatgtttatcaatccactactaaagtataatttctgtaagtatccctagtttctaaaatcttgtaaggccaggtgcagtggctcacgcctgtaatccctgcactttgggaggccgaaggtgggtggatcacctgaggtcaggagttcgagaccagcccggccaacatggtgagaccccgtctctactaataatataaaaattagccgggtgtggtggcgcatgcctataatcccagttactcgggaggttgaagcaggagaatcgcttaaacccaggaggcagaggctgcagtgagccgagattgcgccattgcactccagcctgggcaagaagagcaaaactctgtctccaaaaaaaaaaatcttgtaacaatttcaaacagactaaatataacattagaaaacaagcagattaggcagatcaatggtgaactgcacagaacaatcttaagaaaactgttaagtataattgtgaaaataatgtaagggtattactcagaaaatgtataattctcaatgtaaaaaggaaaataaggctgagcacggtggttcatgcctgtaatcccagcactttgggaagccaaggggggtgaatcacttgaggtcaggagtttgagactagcctggcaaacacggcgaaaacccatctctactaaaaatacaaaaattagttgggcattgtggtgcatgcctgtagtcccaaatacttgggagagctgaggcaggaaaatcacttgaaccagggaggcagagtttgtagtgagctgagatcacaccaccgcaccccagcctgggcgacagagcaagactcttgtctcaaaaaaaaaaggccggggggaataattagccaagacttctaaactcattattaaaagtacaatgcatgaaaggttcattgaaaaaaagtttctttcttctatccaatagagtactctgcaaacagtaccactagtccagaggtggctcaactgcagcaacaggaaaactgtttatctgaatctcttccatctaaatcactttcattcaatattttaacattccaatattctaacccattagaaaatacatactaattagttaccttttgaagcaggtggtgtgaaaaacctattctgactgtggaaagcaccccgtcctcctctattgcctgaaaacccaccacgggaagaaatcttctgtgatactttgagtggccgttttggtggaggtattccatcttgaggaaccacttctttactttcagcagcaacaaagtcatccacatgcatagatggtggtctacttgtgttctgttttctctgacgaaaaatatcatgaggtcgtataccctgtccaaatcctcccctgccccttcctcttggtggtggcacaacatgagctcttttggcaggttcaatgtattcagattttccactattaaaacaaaaacatgccataaaacatttttctttcaggtttctagcaaaaataatctttataatacccaaaattatatttcagtttttttgtactccaattctgctaactttgcaagtatctatcatacttctgggataatataacaaactagctaagaaaagtactcacatttcattgttatgaataacaatgttttaaaataatccagttcacttcttattcaaaccttccaaaatcttgtagaaaacaatataacaaatgtactgggtatatcctggccaaattattacgtttaaatttaaaaaattcaaacaatgttcatgattcgaatgctatgttaatttcctttctagtttaatagcatgtgtctttttttttttttttgagagacagagtcttgctctgtcgcccaggctgcagcgcagtggcgtgatctcggctcaatgcaatctccacctcccgggttcacaccattctcctgcctcagcctcccgagtagctgggactacaggcacccaccaccacgaccagctaatttttttttttttatttttagtagagacagggtttcaacatgttagccagaatggtctcgatctcctgacctcggcctcccaaaatgctgggattacaggcgtgagccaccgcgctcggccgcatgtgtctatcttaaaatatactaaaatacataagcttatgtgatgacatttgagatcttcagtggaataaattttaccttgacgttataaaggtctcatgcttgtgcttcccaagtttgaatcctttagtagtcttggttcttcctggagatgatggttctgacaaaaatgagcgctctaattctgagtgcaaatcaaagtcactacagcatttttcagagagttcaattaagtcaacctttacctgcagtcataataatgaaacaaaacacatattaaatgtaattattagcataacatttgactacagaaattcttattacctataaattatatttgcctctcataagaaataaattatagatctacctctttcatcttttcaaaaagcaaatggcattggtagtttaaaaacaaacacacacacacaccttagtaatgctactttttttgtgtgtggcattcttcaaagcagggctattaatctaggagaactttgatgcctgagcaggaaactcagtatttgtctatataaattaacactgtaatatctcctgaacttttccaaaaaaagaatctgaaaataacatactctgccagccttatatagtcaacatttctattacaaaaagattctgtgccacagattcccaaaagctctatgcatttaatgaggttcccatctaagtttaatttcagggaaatcaacattcagtttacttaggttttattcaaatttatcaaatgtaagatacctaaaatttctctaatccagagggttacaattatcatcacaagacagttgtgattcaacttaaagttaaaaaattagtaacttttaacaaatattttatacctgtgctgcccaacgtggtagccactaacaacatgtgcctatctaaattaatcaaaattaaatcaaaataaaattcagttccctagtcatccacatttcaattgtacaacaggcacatgaggctactgttttggacagggcagactacaaaatatttgcattattgcataaaattctactggagaggacagttttaaagaaccactgaacagcttgcactaaaaagaaattaatttttaatgcacttttaattgaattgtatgtggttttttaaaaaaggaaaagcagccctcaacacactaaatacaaatgtgaagcaaatcattctcttagttttattgtatatgatgaacaccagtatgtttctttgataaagaaaaggaacaatgtactgtataataagatgtggctaaaataattcgccttaccacatctctgagaagcatagaacagactgcaataaattttaaatagttaattatactcttacctattcagcattatgtttaagaatgtcaattcccattcatactatactataacaaatacattcttcacaagtttccaaactgagagccacaccatagcacaacccttcctctccttgaacccaaatgcaagaataaactgttgttttatgggatacttttccctgttctataccccgtcaagtaagaaaacaaagtgcttcatagaacttatgcaaaagtgtgatttttcccttaaaaaagttacattctctggccaaatgtggtggctcacgcctgtaatcccatcgctttgggaggccaaagagagaggattgtttgaggctaggagtgagaccagcctgggtaacagagtgagactttatctatattaaaaaaaaattttttttttggctgggcatggtggctcacgcctgtaatctcagcactctgggaggccaaggcaggcagatcacaaggtcaggagtttgagaccagcctgaccaacatggtaaaacccagtctctactaaaaatacaaaaaaattagccaggcgtggtggcacaggcctgtaatcccagctactcaggaggctgaggcagaagaatcacttgaacccgggaaacggaggttgcagtgagctgagattgtgccactgcactccagcctgggtgacagagtgagactctgtctcaaaaaaaaaaaaaaaaaaaaaaaaaaaaaaattagcaaaaaagtcacaacctcaaaatacagatcactaactagaaagaagcaaaaaaagcaggaaaaaaaactttctggatgccatgaagtgggcaagtggcataaaaataatgtaggacttgcttccaagtagactttaacagccataaaatatggaaactattataatgctaacaatatataaagaaacagaaaaaacaataacgtttttctaaatatttagtaataatttataccaaatccagatctgtatctatctcttcagcctgaaatggagtgaaccacatagatttcaactgatcatccatgacatcagcaagcacataggcagtcctggaacaagaaaagtatctggtgaaaagcagaattctaaaatcaaatttcaattttttttttttgagacacagtcttgctgttacccagctggagcgcagtggcacgatcacagttcactgcagccttgatctcctgggctcaagtgatcctcccaccttagcctccctagtagctgagaccacaggtgtgtaccaccacacccagctaattaaaaaaaatttttttgtagagagagggtctccctatgttgcccaggctagtctcaaactcctgagctcaagctatcttcctgcctcagccttccgaagtgctgggattatagtcgtgagccaatatgcccagtcttttagcttatcttcaagtaaaatctgtggaaggtacaattaaaattattactttctaaagtattattaaaagtagtacctaaaaaagaaactcccaaaagcaattaaaaattaagtatcctcaaaaacaaataacttgaaaactaattctgctgtaacaagttttgacctttcagtaaaataaaacaatgccctgattttatctgctagtttgtttctgtacagcctgcaagctagcatagtttgtataaattaaaaaaaaaaaaaaaaaactaaagaagaatacacaacagaggctgtatggcctgcaaagcctagaattcttactatctggccctttatagaaaaaaacgtttgctggcaccccctagactacagccattttaaaaccaacagctattcaatcataaaacattgtgtattttacctattgttaaacagattctgaagagattctggagctgaaagtactggttctacatcctggtcactgagaggtaaagggtcacctgatgactccagcatctgcttaagtccaactacactgtccaacaaagaatccagattgtcatcatcttttgaatgttcctagatacaaataaaggcagaataagaaggtgcaggtaaaacttatgtctgtaaacctactgactctttcgtagaaaaggctatatgtattattactaagaaatttggaacactgtccagaaattattaacattaaacacattaaaataaaacaaacaccaaaacacttgtcattttatttctaaacaatagcagcagagggtaccctgcttccaaggaacagacaattcaaaaagtaccgtcttcatgtactccttaaaattcataacaggatggaggacttcacttcaaattattaattcaaagagttatttgaaatggtacaaacacccagctaaagattcactattttaaaaaaggtcactacgaaatacttgtactagtcaaactgagaggaaaataggccttaagaacgctctgtttttttcttttttaccaaaacaagcttctctagttcaaggaacaaattttctggactttcttctttgctttgtagaagctgttttaactctgcagcattaatactcatcgtccgtgatgtatgagctccctctacttccatgagaccattatcatctccacagcatccctgtaaatgtcacacataagttaaatttgagaacagagaaatttacaaagatgcatccacacttattcatattatctaagccatatgctgcaatctttccttcaatgttttcatttttacatcagtacaaatggctagttttaaggatttagatgaaaggtgaagtatgttttctttgagtaagactcacaaaatatttaaataagcaaacatatattttactggcaccaagacttttcaacaaaataccgaatggcaaaacactggcagttgtaggacgtgacacactgattgatgctcaagaattaataaaatgcttgctataacaaagaactgatgaaacctgaaattatctttctgaagataacacaaacaactaaagaaaatagtaactatcatatttaagactatattctgtcacatagaaaagttaatattttctgctttaaaaagtatgctacataataaagtgaattctggagtgataacatttcaataccagaaaat

SEQ ID NO: 6823 - DNA, 464 bp, Homo sapiens
tgtggactctaggggttcaaggatcccaggcctgctctagaatgtgaagaaatgggctttaagctgttggctgaagttcttcgagatgaattttctgaagcagtgctgtcaaagagaattttcttgaggtgatggaatgttctacatttatgctaatatggtaatcactaataacatgttactaagcataagaaatgtagctggtgtacctaagaaactgaaaatttaattttatttaggttttttttttttagttttttgctcttgttgcccaggtcagagtgcaatgatgcaatcttggctcactgcaacctctgtctccagggttaatgtgattctcctgcctcagcctcccaagtagctgggattacagtacccgccactatgcccagttaatttttatatttttagtagagatggggtttcgccatgttggccaggctggtcttgaactccagacctca

SEQ ID NO: 6824 - DNA, 464 bp, Homo sapiens; identical to SEQ ID NO: 6823

SEQ ID NO: 6825 - DNA, 464 bp, Homo sapiens; identical to SEQ ID NO: 6823

SEQ ID NO: 6826 - DNA, 643 bp, Homo sapiens
acaggtacacagaggtcacagataagcaactcctttctaaagtttggcctagactccaagggataaagtccaaaatggggtagatggagaacaacttttagttccctgataatacttatggttattactctttgtcatatttctctttcatatttgtgattcctatactgcagtggttcttagccagagggcaatctgtcccccaggggacatttggcaatgtctggagacaaactgataggcatgactagagatgctactgctttctattgagtagaggccagggatagtatgaaatatcctgtaatgcagagaacagccctacccctatcccaacaaagaattatccagcccaaaatgtcaatgctgctaaggttgagaatgcctgctatggtaaaatttattttcttacctaactgctacctgcaattaggtaagaaaattagtaccaaacacaaagctcaatcatataaatgatattttcttctgatagatcagaacaaattaagatgttaaatggacacggtatccatccctgtaccagattggtatgggtttgtttttctttggaagtgctcctccttgaatcagtgagtagtaatttttcattacaactacctttataagacaaaaatgtcagatc

SEQ ID NO: 6827 - DNA, 4431 bp, Homo sapiens
cctaaaaatagaaaaagtttgtagttactctcaaaattcccccaaatcccctactttaatgcattagaaccctcttttttttcttcactgtgtccataatatattttccaacaggtctaatcaatggtgctctaactacagaacagcgaatcttaacctggggaccatgggtcatgaatggactgcagaaattctgtgacctcctggtaatttatacaaaatttgtatgtatgcattaggttgaataatacattttggcctggcatggtagttcatgcctgtgatctcagcattttgggaggccaagctggaggattgctcaagcccagaagcttgaaactagcctgggcaacatagtgagaccctgtctctacaaaaaaattaaaaaattaggctgggcgtggtggctcacatctgtaattccagcactttgggaggctgaggtgggagaactgcttgagctcaggagctcaagaccaacctgagcaacaaagcaagacctcatctctacaaaaaattaaaaagaattagccaggtgtggtgctgtgtgcctgtggtcccagctatttgggaggctgaggtgagagaatcgcttgagcctgggagctcaaggctgcagtgggctgtgattgcaccactgtactccagcctgggggtcagagcaagaccctgtctcaaaagaaaaaaaaaatccatgaaaatgataataaaacttttttttttttaaagagatggagtcttgctatgttattcaggctggccttgaactcctgggctcaagccatcttcctctctcagcctcctagatagctgggaacataggcatgcaccactatgtactacccagctgaaaatgttaattttgtatgattgaacctaatatgcttttggatggagaaagaaatatctcacctaaaaagaggttaagaacctctgactatgggagatctggatacattctattaaaatttattttgtgtagagtttgataggaaatattaaaaatcttaaagcttttaaaaattatttgatttataatttatataaaatttacttgactattttcagtgccatattataaaatttatttaatggaatacacttaaagacagataagaaagccagtatgagtcacaggttataatttttatatattcccatacatataatcaaagaacttcatgtaattcagtgttgaatctcactgaaattcatgcttaaagcatgctgctatatagaatctctccacaataagcaggaaaagtcattttcttttctttttccttttcttttcttttttttttttttgagacagggtctcgctctgtcatccagtggtgcaatcacagctcactgcaacttcaatctcctggggcccaagcgatcctcccaccccagcctcctgagtagctgggactataggtgcatgccacatacctggctaattaacattttttttgtagagatggggtctcactatgttgcctaggctggtcttgaactcctgggctcaactgatagtcctgcctcggcctcccaaagtgatggggttacaggtgtaagccccattttctaaattaggcaccaatggggcatctctttcaatcttatttgccatgcatttctgtacttcagtgtatcctgtaataaggttacagcgaataatgacgactatactataacaactaatatactatgacttgctgcatgatgtacttggtgctaagtgcttaatgatacattttcacaagtattttatagctacaaaaacagttcttttataatctgtattttacagaggatacaactaaagctcagtaaagtaaaatgattgccaaaaaccgcacagctaagtaagtgatgtagacagaatgtgaaaccatgtatattctgattctagagtgtctactcttaatcactgcattatctttccagatactataaatataataatagtaacagtaacagtaagtaagtggagaagccagacttccaacccagggttgttagactccaaagtctgttttattttttttaaactaccatatgatactttctgaacagttaagctgtaataaatgaattagaacagtgagttattgagacttttatagacaaagtaagaggtcttagtctctgattttgagagtttttaaaatcttatagtagaatcagagaaaaatccaagatgaaaaccagcatatattttcctaattaaatatcatgtaataactttctttgactctttacagaagagtcaataaggaaaaaaaaaagtattttttctgcagttggcttaccaaataaaagagccagtttttgccaaaggtgaaattactaaggttaaaaaataaattaaaagagccagttttgcatccctattttcaataatctttaaaattgcttttggaagtattattaagttgttttgggaaatattcatatttccagatttttttctctttgcttgggcagttaaaatggtattcgagaacagagccagataagattcagatgccctttaatcttgagttttgccttactctatgagttttataaagcggtattggtaacgccttccttcccctcatttagaacaatgagacagcacagagaccttacgtggttaaagctatcttctatttcctttctttcttttctttctctctctttttctctttctttccctccctccctccctctctctctctcttttttttttttttgacagagtttcgctcttgttgcccaggctggagtgcaatggcacaatcccgactcaccgcaacctgcgcctcccgggttcaagcgattctcctgcctcagcctcctgagtagctgggattataggcatgcgccactatgcctggctaattttgtatttttagtagacacggagtttctctatgttggtaggctggtcttgaactcccaacctcaggtgatccgcccccctcggcctccgaaagtgctgggattacaggcatgagccaccgcacccgaccttctttttctttttttttttttttgagacagagtctcactctgttgtccaggctggagtgcagtggtgtgatcggctcactgcagcctctgcctcccaggttcaagttattctcatgcctcagccacctgactagctgggattacagacacatgccaccatgccccactgatttttgcgtttttagtagagatggcattttgccatgtttcccaggctggtcccaaattcctggcctcaagtgatccacccgccttggcctcccaaactgctgggaatacagatgtgagccactgagcccagccatttctttattcagactgtacagctgccactgtgatactggggactaagcaatcttagactgagtgttaagaattttagtattggccgggtgcggtggctcacgcctgtaatcctagcactttgggaggccgaggcgggcggatcacaaagtcaggagatggagaccatcctggctaacatggtaaaatcctgtctctactaaaaatacaaaaaaattagccaggcgtggtggcatgcgcctgtagtcccagctgctggggaggctgaagcaggagaatggtgtgaacctgggaggcagagcttgcagtgagccaagatcgtgccactgcactccagcctgggtgacaaagcaagactccgtctcaaaaaaaaaaaaaaaaaaaaaagaattttagtattgctagtcataattctttgacttttcctcctatttcccacctcttttaggtggaggttccagtttactaaatggaaacatttcttctgagaggatctgttccctggatctacttaaaaagctcagggttaaatgagaaggacctaacccttctcatatagcccaccaaggcttgtatcaagaacattagattacttccatgattgcttttaattctgacagtccatgaaatggtcataaggtatgggttgataaggacatggttctctagtattacagttcaccctaatatgttttaaattctcatttctaaggttaagtactaaccaatctgctaatttcctcttgtctatctggtgcagatcttgctgttgccttgatcatagtggaagtctgattgtctgttagcttcttgatacatcgttgccctgccacaatattacagacctacaaatggaaaaaagttttgtactacatgtatatatcttttttttttagctcttacttagtgccaattacatgtaaataaaaatttaaaatcaacttcattaaaccacttattttcaatatgttaagtaaaaaagtagtaaacaagacagctctacagtaattaagtataattaagtaaaatgtacaccagatgaagactgaaagaagtatagtataccaaaatgttaacagtggttacattagagtggtaggattatggatgaacttgtttcgt

SEQ ID NO: 6828 - DNA, 976 bp, Homo sapiens
caaagtcaggagatggagaccatcctggctaacatggtaaaatcctgtctctactaaaaatacaaaaaaattagccaggcgtggtggcatgcgcctgtagtcccagctgctggggaggctgaagcaggagaatggtgtgaacctgggaggcagagcttgcagtgagccaagatcgtgccactgcactccagcctgggtgacaaagcaagactccgtctcaaaaaaaaaaaaaaaaaaaaaagaattttagtattgctagtcataattctttgacttttcctcctatttcccacctcttttaggtggaggttccagtttactaaatggaaacatttcttctgagaggatctgttccctggatctacttaaaaagctcagggttaaatgagaaggacctaacccttctcatatagcccaccaaggcttgtatcaagaacattagattacttccatgattgcttttaattctgacagtccatgaaatggtcataaggtatgggttgataaggacatggttctctagtattacagttcaccctaatatgttttaaattctcatttctaaggttaagtactaaccaatctgctaatttcctcttgtctatctggtgcagatcttgctgttgccttgatcatagtggaagtctgattgtctgttagcttcttgatacatcgttgccctgccacaatattacagacctacaaatggaaaaaagttttgtactacatgtatatatcttttttttttagctcttacttagtgccaattacatgtaaataaaaatttaaaatcaacttcattaaaccacttattttcaatatgttaagtaaaaaagtagtaaacaagacagctctacagtaattaagtataattaagtaaaatgtacaccagatgaagactgaaagaagtatagtataccaaaatgttaacagtggttacattagagtggtaggattatggatgaacttgtttcgt

SEQ ID NO: 6829 - DNA, 643 bp, Homo sapiens; identical to SEQ ID NO: 6826

SEQ ID NO: 6830 - DNA, 4433 bp, Homo sapiens
cctaaaaatagaaaaagtttgtagttactctcaaaattcccccaaatcccctactttaatgcattagaaccctcttttttttcttcactgtgtccataatatattttccaacaggtctaatcaatggtgctctaactacagaacagcgaatcttaacctggggaccatgggtcatgaatggactgcagaaattctgtgacctcctggtaatttatacaaaatttgtatgtatgcattaggttgaataatacattttggcctggcatggtagttcatgcctgtgatctcagcattttgggaggccaagctggaggattgctcaagcccagaagcttgaaactagcctgggcaacatagtgagaccctgtctctacaaaaaaattaaaaaattaggctgggcgtggtggctcacatctgtaattccagcactttgggaggctgaggtgggagaactgcttgagctcaggagctcaagaccaacctgagcaacaaagcaagacctcatctctacaaaaaattaaaaagaattagccaggtgtggtgctgtgtgcctgtggtcccagctatttgggaggctgaggtgagagaatcgcttgagcctgggagctcaaggctgcagtgggctgtgattgcaccactgtactccagcctgggggtcagagcaagaccctgtctcaaaagaaaaaaaaaatccatgaaaatgataataaaacttttttttttttaaagagatggagtcttgctatgttattcaggctggccttgaactcctgggctcaagccatcttcctctctcagcctcctagatagctgggaacataggcatgcaccactatgtactacccagctgaaaatgttaattttgtatgattgaacctaatatgcttttggatggagaaagaaatatctcacctaaaaagaggttaagaacctctgactatgggagatctggatacattctattaaaatttattttgtgtagagtttgataggaaatattaaaaatcttaaagcttttaaaaattatttgatttataatttatataaaatttacttgactattttcagtgccatattataaaatttatttaatggaatacacttaaagacagataagaaagccagtatgagtcacaggttataatttttatatattcccatacatataatcaaagaacttcatgtaattcagtgttgaatctcactgaaattcatgcttaaagcatgctgctatatagaatctctccacaataagcaggaaaagtcattttcttttctttttccttttcttttcttttttttttttttgagacagggtctcgctctgtcatccagtggtgcaatcacagctcactgcaacttcaatctcctggggcccaagcgatcctcccaccccagcctcctgagtagctgggactataggtgcatgccacatacctggctaattaacattttttttgtagagatggggtctcactatgttgcctaggctggtcttgaactcctgggctcaactgatagtcctgcctcggcctcccaaagtgatggggttacaggtgtaagccccattttctaaattaggcaccaatggggcatctctttcaatcttatttgccatgcatttctgtacttcagtgtatcctgtaataaggttacagcgaataatgacgactatactataacaactaatatactatgacttgctgcatgatgtacttggtgctaagtgcttaatgatacattttcacaagtattttatagctacaaaaacagttcttttataatctgtattttacagaggatacaactaaagctcagtaaagtaaaatgattgccaaaaaccgcacagctaagtaagtgatgtagacagaatgtgaaaccatgtatattctgattctagagtgtctactcttaatcactgcattatctttccagatactataaatataataatagtaacagtaacagtaagtaagtggagaagccagacttccaacccagggttgttagactccaaagtctgttttattttttttaaactaccatatgatactttctgaacagttaagctgtaataaatgaattagaacagtgagttattgagacttttatagacaaagtaagaggtcttagtctctgattttgagagtttttaaaatcttatagtagaatcagagaaaaatccaagatgaaaaccagcatatattttcctaattaaatatcatgtaataactttctttgactctttacagaagagtcaataaggaaaaaaaaaagtattttttctgcagttggcttaccaaataaaagagccagtttttgccaaaggtgaaattactaaggttaaaaaataaattaaaagagccagttttgcatccctattttcaataatctttaaaattgcttttggaagtattattaagttgttttgggaaatattcatatttccagatttttttctctttgcttgggcagttaaaatggtattcgagaacagagccagataagattcagatgccctttaatcttgagttttgccttactctatgagttttataaagcggtattggtaacgccttccttcccctcatttagaacaatgagacagcacagagaccttacgtggttaaagctatcttctatttcctttctttcttttctttctctctctttttctctttctttccctccctccctccctctctctctctcttttttttttttttgacagagtttcgctcttgttgcccaggctggagtgcaatggcacaatcccgactcaccgcaacctgcgcctcccgggttcaagcgattctcctgcctcagcctcctgagtagctgggattataggcatgcgccactatgcctggctaattttgtatttttagtagacacggagtttctctatgttggtaggctggtcttgaactcccaacctcaggtgatccgcccccctcggcctccgaaagtgctgggattacaggcatgagccaccgcacccgaccttctttttctttttttttttttttgagacagagtctcactctgttgtccaggctggagtgcagtggtgtgatcggctcactgcagcctctgcctcccaggttcaagttattctcatgcctcagccacctgactagctgggattacagacacatgccaccatgccccactgatttttgcgtttttagtagagatggcattttgccatgtttcccaggctggtcccaaattcctggcctcaagtgatccacccgccttggcctcccaaactgctgggaatacagatgtgagccactgagcccagccatttctttattcagactgtacagctgccactgtgatactggggactaagcaatcttagactgagtgttaagaattttagtattggccgggtgcggtggctcacgcctgtaatcctagcactttgggaggccgaggcgggcggatcacaaagtcaggagatggagaccatcctggctaacatggtaaaatcctgtctctactaaaaatacaaaaaaattagccaggcgtggtggcatgcgcctgtagtcccagctgctggggaggctgaagcaggagaatggtgtgaacctgggaggcagagcttgcagtgagccaagatcgtgccactgcactccagcctgggtgacaaagcaagactccgtctcaaaaaaaaaaaaaaaaaaaaaaaagaattttagtattgctagtcataattctttgacttttcctcctatttcccacctcttttaggtggaggttccagtttactaaatggaaacatttcttctgagaggatctgttccctggatctacttaaaaagctcagggttaaatgagaaggacctaacccttctcatatagcccaccaaggcttgtatcaagaacattagattacttccatgattgcttttaattctgacagtccatgaaatggtcataaggtatgggttgataaggacatggttctctagtattacagttcaccctaatatgttttaaattctcatttctaaggttaagtactaaccaatctgctaatttcctcttgtctatctggtgcagatcttgctgttgccttgatcatagtggaagtctgattgtctgttagcttcttgatacatcgttgccctgccacaatattacagacctacaaatggaaaaaagttttgtactacatgtatatatcttttttttttagctcttacttagtgccaattacatgtaaataaaaatttaaaatcaacttcattaaaccacttattttcaatatgttaagtaaaaaagtagtaaacaagacagctctacagtaattaagtataattaagtaaaatgtacaccagatgaagactgaaagaagtatagtataccaaaatgttaacagtggttacattagagtggtaggattatggatgaacttgtttcgt

SEQ ID NO: 6831 - DNA, 643 bp, Homo sapiens; identical to SEQ ID NO: 6826

SEQ ID NO: 6832 - DNA, 605 bp, Homo sapiens
aatactgagttttgagtggatgatgtaagtgtttatagttcaggagatgaattgaattgtgttcccctaaaattcatatgtcgaatctctaatccccagtacttcatatgtgactatatttgagcttaaggccttgaaacagtgattaagttaaaatgaagtctttagggtgggccttaatgtaatctgaatggtgttcttataagaagaagaaatctgggcacacctaaaggcagtggacttaagcatggagaaataagggaccatgtcaggacacaatgaggggacagctatcacaagccaaagagacaggccctgggagagcccaaccctggcaacacgttgattttagacttccagcctccagatctttttgagaaaataaatttctgttgtttaagccactcattatacagtattttgttatggcagcccaagctgactaatttattgatttatttattcaacgaatattcaccacaattctccactttactccagatacattcctagtgccttagcatgcacggttggataaagtgaagcgtcctggaaattatgaattgtctgtagaatgttactaccatggatgaaaagaacagagt

SEQ ID NO: 6833 - DNA, 605 bp, Homo sapiens; identical to SEQ ID NO: 6832

SEQ ID NO: 6834 - DNA, 639 bp, Homo sapiens
gtgaaactgctaaaaaaagaattcttaaaaaaatttcaaaacttatttacccccaaacatagcaagtaatgacaatatatatttatcactttctaagagttaggaatctgacaatgacttagatgggtgattctggctcaggatcccttatgaggctgcattcaagctgctggctggggctgcagtcttctgagggcttgtctggggtaggaggacccatgtgtaaggtggctgtgaagaagaagccccagttttttgccacatgagcctctcactaggttacttatgacatggcagctagttttccccagaccatgtgctacaagagagaaagagagtaagcaagctggaagctgtcctgtgttttacaatctgattttggaagtggtatttcatcacttctgctgtattctgttggtcagtgtgggaaaggactgtatagaggtatgaataataggaggctatctgtgagccttcctggaagttggctatcacactttctacaattttaatactttttcttggttgagaattgggaaaaacatcttccatgaattgtctttttgggcaccttttgcccgcttcttccatgataatatttaaaggttatctaatttgatcattctcttgttagcttag

SEQ ID NO: 6835 - DNA, 639 bp, Homo sapiens; identical to SEQ ID NO: 6834

SEQ ID NO: 6836 - DNA, 769 bp, Homo sapiens
ggagaagggacatacatttggtaagtgtaaataagagtctttgctgattaattcagtgtggcccatgagaaagagtggaagtgtccaaggttccctcaggtttacagcttgggcaactgactgagaacagaaaggagctgccattgagaggaagaaaagaaaatgacactgagtccatgttgggacacattgggtttaaagggatatcattatgacctaagctctctgaattccagtgactgggaatatgggaagatacatctttaacagttgaagcaatttatacactttaacaattgaagcaatttatacaccagagcctaaggaatatttatagatgagggctgtgctgcaatgacagatagggttgtatgaaacatacactaatctgaccattctatcctccagactcagggaaggaaataataaaagtaagtaaccataaaaaatagacttttatgcataaataaataaaaatcagctaggagacagttcatccctgtataagtaaaacaggcaaatttatctttcctctgattaataatttaagaaaaaatcccaagcaagctgcctatggaggtgtaggagtagctcctataattagactccaatttgaaccatgagggtgaggatcagaaagctgactcagagcctggtgtcaattatttgcagtttgtacaacgaaaggctaaaaatttgggagatgcaggatgactgaagcccgattctgggggttgttacaagcacagttacagggtaagttttttcc

SEQ ID NO: 6837 - DNA, 768 bp, Homo sapiens
ggagaagggacatacatttggtaagtgtaaataagagtctttgctgattaattcagtgtggcccatgagaaagagtggaagtgtccaaggttccctcaggtttacagcttgggcaactgactgagaacagaaaggagctgccattgagaggaagaaaagaaaatgacactgagtccatgttgggacacattgggtttaaagggatatcattatgacctaagctctctgaattccagtgactgggaatatgggaagatacatctttaacagttgaagcaatttatacactttaacaattgaagcaatttatacaccagagcctaaggaatatttatagatgagggctgtgctgcaatgacagatagggttgtatgaaacatacactaatctgaccattctatcctccagactcagggaaggaaataataaaagtaagtaaccataaaaaatagacttttatgcataaataaataaaaatcagctaggagacagttcatccctgtataagtaaaacaggcaaatttatctttcctctgattaataatttaagaaaaaatcccaagcaagctgcctatggaggtgtaggagtagctcctataattagactccaatttgaaccatgagggtgaggatcagaaagctgactcagagcctggtgtcaattatttgcagtttgtacaacgaaaggctaaaaatttgggagatgcaggatgactgaagcccgattctgggggttgttacagcacagttacagggtaagttttttcc

SEQ ID NO: 6838 - DNA, 768 bp, Homo sapiens; identical to SEQ ID NO: 6837

SEQ ID NO: 6839 - DNA, 1446 bp, Homo sapiens
cagcctcctctggatcttttctggttccttcgctcctagaactgtgtctgatggcttatgaaggcaaatgacaaatgtttgccatatgcacatgtatgtgcatgaatgaatacatccaggttctgacttcctcggggcaacctctactttctcaatgcccctcttaagatgggggtgggggagggtcctcctagaactgaacatgatattccaggtgtgatctaatacatttaaatgtccaaaagctctttcttccctaaacgttcctttttaaaagctactgttctcaattaatgggtgtctcatcttcttaagtatattaataagaggtattttgatgtttccctccattctgtggattacctcttgattctctggattctttgtgattccgttttgttttaaggatgtcctcaggtgtctggtgatccttgcttataagtccaaattaatgatgaggcactaaaatgctgattggaagctctctgtgcaggcaggtattgttgaatagtggtaaacaggggacatgttcattttggagacactcaaatatcaggacctataaatctctatgccaagtcagtttccccagagtctcttaatatcatttctttcaggttaaaagcctggttaccaggttctgggagtgaagggaggagtggggcttagacaagggtgggggcgggggtatgtctcacaattcactaaataccttcttttatatatgtgttctctgtgcagcattttacccccaccatcgtccatgtctgatgcctcaggttcaatcttgttcagtctttccaaagaggaaacattggttgggtgggaatgattggcaggtcgaagagagaatttgaagctatagctgctccttttaaaacttctaactcatctttgttttttcaggccttcctcacacccatgtcttcagatacccaaggcctttaatacccaagtccttccaggattctgcacatctcattagcttcatattcccgtaagtacttgggtttctgctttctcagctctgatgtgtcattttctaatcaatcatcagcattccagcttccaaagttttgttcatatatcttacatgtgttgtcttgaccgacttctttttggaccttagattatttacctatttaaattccttaattgttactttagtggagttttggaagggaacaaaaatataggcaggtgtttatcacatttaacaaggaactcaaaatttatatttaattctatttaatctggctgccttcttgccatcagtctatttgaaaagttcatatggacccagctctgtcatcatcacatgttctatatccccaaaccttgtgacatctgcaaagaagtacagaagacctcaagagaagataagctagaatttatttatttttataccttttattcagtttttattaaagctttcctacctttcca

SEQ ID NO: 6840 - DNA, 409 bp, Homo sapiens
catattaatattgcgagtattttgtgttatgcagccagaaaaatcacataatgggaacttacccacagcccccaaactcataaacaggagctgaatagaaattcctcagtgcaatttatggtaacaatttcatgctcagtttagttacttccatgactcagaaaagaaatttcttttgcttatttcagtaatttttttctaaaaaattgttcccctaatttttggcaaaggatctatgagaaagtgaagaactccctggttgtacatggatttggaattgtcacttaagtgaggccaaaatgtaaccctatgccattcattgcatagtaccatttgttataaatttgacctctaaaacaaagatattacaaagccattgagtgtttttttaagggatatattatatttg

SEQ ID NO: 6841 - DNA, 409 bp, Homo sapiens; identical to SEQ ID NO: 6840

SEQ ID NO: 6842 - DNA, 1446 bp, Homo sapiens
cagcctcctctggatcttttctggttccttcgctcctagaactgtgtctgatggcttatgaaggcaaatgacaaatgtttgccatatgcacatgtatgtgcatgaatgaatacatccaggttctgacttcctcggggcaacctctactttctcaatgcccctcttaagatgggggtgggggagggtcctcctagaactgaacatgatattccaggtgtgatctaatacatttaaatgtccaaaagctctttcttccctaaacgttcctttttaaaagctactgttctcaattaatgggtgtctcatcttcttaagtatattaataagaggtattttgatgtttccctccattctgtggattacctcttgattctctggattctttgtgattccgttttgttttaaggatgttctcaggtgtctggtgatccttgcttataagtccaaattaatgatgaggcactaaaatgctgattggaagctctctgtgcaggcaggtattgttgaatagtggtaaacaggggacatgttcattttggagacactcaaatatcaggacctataaatctctatgccaagtcagtttccccagagtctcttaatatcatttctttcaggttaaaagcctggttaccaggttctgggagtgaagggaggagtggggcttagacaagggtgggggcgggggtatgtctcacaattcactaaataccttcttttatatatgtgttctctgtgcagcattttacccccaccatcgtccatgtctgatgcctcaggttcaatcttgttcagtctttccaaagaggaaacattggttgggtgggaatgattggcaggtcgaagagagaatttgaagctatagctgctccttttaaaacttctaactcatctttgttttttcaggccttcctcacacccatgtcttcagatacccaaggcctttaatacccaagtccttccaggattctgcacatctcattagcttcatattcccgtaagtacttgggtttctgctttctcagctctgatgtgtcattttctaatcaatcatcagcattccagcttccaaagttttgttcatatatcttacatgtgttgtcttgaccgacttctttttggaccttagattatttacctatttaaattccttaattgttactttagtggagttttggaagggaacaaaaatataggcaggtgtttatcacatttaacaaggaactcaaaatttatatttaattctatttaatctggctgccttcttgccatcagtctatttgaaaagttcatatggacccagctctgtcatcatcacatgttctatatccccaaaccttgtgacatctgcaaagaagtacagaagacctcaagagaagataagctagaatttatttatttttataccttttattcagtttttattaaagctttcctacctttcca

SEQ ID NO: 6843 - DNA, 409 bp, Homo sapiens; identical to SEQ ID NO: 6840

SEQ ID NO: 6844 - DNA, 1446 bp, Homo sapiens; identical to SEQ ID NO: 6842

SEQ ID NO: 6845 - DNA, 4492 bp, Homo sapiens
catgtgttctcattgttcaattcccacctatgagtgagaacatgaggtgtttggttttttgttcttgtgatagtttactgagaatgatgattttcaatttcatccatgtccctacaaaggacatgaacccattattttttaaggctgcataggattccatggtgtatatgtgccacgttttcttaatccagtctatcattgttggacgtttgggttggttccaagtctttgctattgtgaatagtgccacaataaacatacgtgtgcatgtgtctttatagcagcatgatttatagtcctttgggtatatacccagtaatgggatggctgggtcaaatggttttctagttctagatccctgaggaatcgccacactgacttccacaatggttgaactagtttacagtcccaccaacagtgtaaaagtgttcctttttctccacatcctctccagtacctgttgtttcctgactttttaatgattgccattctaactggtgtgagatgatatctcattgtggttttgatttgcatttctctgatggccagtgatggtgagcattttttcatgtgttttttggctgcataaatgtcttcttttgagaagtgtctgttcatgtccttcgcccactttttgatggggttgtttgttttttcttgtaaatttgtttgagttcattgtagattctggatattagccctttgtcagatgagtaggttgcaaaaattttctcccattttgtaggttgcctgttcactctgatggtagtttcttttgctgtgcagaagctctttagtttaattagatcccatttgtcaattttggcttttgttgccattgcttttggtgttttagacatgaagtccttgcccatgcctatgtcctgaatggtaatgcctacgttttcttctagggtttttatggttttaggactaatgtttaagtctttaatccatcttgaattaatttttctataaggtgtaaggaagggatccagtttcagctttctacatatggctagccagttttcccagcaccatttattaaatagggaatcctttccccattgcttgtttttttcaggtctgtcaaagatcagatagttgtagatatgcggcgttatttctgagggctctgttctgttccattgatctatatctctgttatggtaccagtaccatgctgttttggttactgtagccttgtagtatagtttgaagtcaggtagcatgatgcctccagcttttttcttttggcttaggattgacatggcgatgcgggctcttttttggttccatatgaactttaaagtagttttttccaattctctgaagaaagtcattggtagcttgatggggatggcattgaatctataatttcacgatattgattattcctacccatgagcatggaatgttcttccatttgtttatatcctcttttatttccttgagcagtggtttgtagttctccttgaagaggtccttcacgtcccttgtaagttggattcctaggtattttattctctttgaagcaattgtgaatgggagttcactcatgatttggctctctgtttgtctgttattggtgtttaagaatgcttgtgatttttgtacattgattttgtatcctgagactttcctgaagttgctttccagcttaaggagattttgggctgagacagtggggttttctagatatacaatcatgtcatctgcaaacagggacaatttgacttcctcttttcctaattgaatacactttatttccttctcctgcctaattgccctggccagaacttccaacactatgttgaataggagtggtgagagagggcatccctgtcttgtgccagttttcaaagggaatgcttccagtttttgcccattcagtatgatattggctgtgggtttgtcatagacagctcttattattttgagatatgtcccatcaatacctaatttattgagagtttttagcatgaagcgttgttggattttgtcaaaggccttttctgcatctattgagataatcatgcggtttttgtctttggttctctttatatgctggattacatttattgatttgtgtatattgaaccagccttgaatcccagggatgaagcccacttgatcatggtggataagctttttgatgtgctgctggattcggtttgccagtattttattgaggatttttgcatcaatgttcatcaaggatattggtctaaaattctcttttttggttgtgtctctgcccagctttggtatcaggatgatgctgccctcataaaatgagttagggaggattccctctttttctattgattggaatagtttcagaaggaatggtaccagttcccccttgtacctctggtagaattcggctgtgaatccatctggtcctggactctttttggttggtaagctattgattattgccacaatttcagagcctgttattggtctattcagagattcaacttcttcctggtttagtgttgggagaggtatgtgtcgaggaatttatccatttcttctagattttctagtttatttgcatagaggtgtttgtagtattctctgatggtagtttgtatttctgtgggatcggtgttgatatcctctttatcattttttattgcgtctatttgattcttctctcttttcttctttattagtgttgctagtggtctatcaattttgttgatcctttcaaaaaaccagctcctggattcattaattttttgaagggttttttgtgtctctatttccttcagttctgctctgattttagttatttcttgccttctgctagcttttgaatgtgtttgctcttgcttttctagttcttttaattgtgatgttagggtgtcaattttggatctttcctgctttctcttgtgggcatttagtgctataaatttccctctacacactgctttgaatgtgtcccagagattctggtatgttgtgtctttgttctcgttggtttcaaagaacatctttatttctgccttcatttcgttaggtacccagtagtcattcagaagcaggttgttcagtttccatgtagttgaatgcttttgagtgagtttcttaatcctgagttctagtttgattgcactgtggtctgagagactgttataatttctgttcttttacttttgttgaggagagctttacttccaagtatgtggtcaattttggaataggtatggtgtggtgctgaaaaaaatgtatattctattgatttggggtggagagttccgtagatgtctattacgtccgcttggtgcagagctgagttcaattcctgggtatccttgttaactttctgtctcgttgatctgtctaatgttgacagtggggtgttaaagtctcccattattactgcgtgggagtctaagtctctttgtaggtcactcaggacttgctttatgaatttgggtgctcctgtattaggtgcatatatatttaggatagttagctcttcttgttgaattgatccctttaccattatgtaatggccttctttgtctcttttgacctttgttggtttaaagtctgttttatcagagactaggattgcaacccctgcctttttttgttttccatttgcttggtagatcttcctccatccttttattttgagcctatgtgtgtctctgcatgtgagatgggtttcctgaatacagcacactgatgggtcttgactctttatccaatttgccagtctgtgtcttttaattggagcatttagtccatttacatttaaagttaatattgttatgtgtgaatctgatcctgtcattatgatgttagctggttattttgctcgttagttgatgcagtttcttcctagcctcgatggtctttacaatttggcatgattttgcagtggctggtaccagttgttcctttccatgtttagtgcttccttcaggagctcttttagggcaggtctggtggtgacaaaatctctcagcatttgcttgtctgtaaaggattttatttctccttcacttatgaagcttagtttggctggatatgaaattctgggttgaaaattcttttctttaagaatgttgaatattggtccccactcccttgtggcttgtagagtttctgccgagagatccgctattagtctgatgggcttccctttgtgggtaacccgacctttctctctggctgcccttaacattttttccttcatttcaacattggtgaatctgacaattatgtgtcttggagttgctcttcttgaggagtatctttatggcgttccctgtatttcctgaatctgaatgttggcctgccttgctagattggggaacttctcctggataatatcctacagagtgtttttcaacttggttccattctccccgtcactttcaggtacaccattcagacatagatttggtcttttcacatagtcccatatttcttggaggctttgttcatttctttttattcttttttctct

SEQ ID NO: 6846 - DNA, 378 bp, Homo sapiens
tattgattattctagttatactttcatctaaatttttttcaaagtttttaacttcttccccttcggtttgaatttcctcctgtagcttggagtagtttgatcgtctgaagccttcttctctcaactcgtcaaagtcattctcagtccagctttgttccgttgctggtgaggaactgtgttcctttggaggaggagaggtgctctgctttttagagtttccagtttttctgctctgttttttccccgtctttgtggttttatctacttttggtctttgatgatggtgatgtacagacgggtttttggtgtggatgtcctttctgtttgttagttttccttctaacagacaggactctcagctgcaggtctgttggagtt

SEQ ID NO: 6847 - DNA, 352 bp, Homo sapiens
ttctcataactctgcagagaaattatgttttgcatttggtaggtgagcaaactgaagctagagtttaaatgacttgtcgaagattacactgccgataagcagcaaatctggactttgtgctttattttatgtcaagacccaaattcctgcatgaaaggatgataagggtattgttagaattatttgtatttttcatttcatcgagtttgaaatggtattgtctcattgtggttctcattttcattttcttgattactaatgagcatattaagtatatttactgagcatttttagtacatttattagacaatcatgtttcttcttctgtaaagtactcatttgtatctttgtt

SEQ ID NO: 6848 - DNA, 129 bp, Homo sapiens
tttttgtgtgttttagtagagacagggtttcaccatgttggccaggatggtctcgatctcctgacctcgtgatccacccgcctcagcctcccagagtgctgggaatacaggcgtgagccaccgcacccg

SEQ ID NO: 6849 - DNA, 3492 bp, Homo sapiens
caccttcttcccgtatttcctaagtgctcgcagttgcttagctttttcagacctctccatggcagcctgtttagtctgcagcttctgtcgaatctacaacacaaaatgctgtcagttcatgtcatttgaatctggaatgaccactacttaggattcgctagagcagggaacagatattccctgttctttaaactgcggaacttataaatcatcagttccaacccctgaggacaatggggcccacaggctgagcactttaccaaaagtgccagagtgaagccagagattgaaagtcaccttcccgctcccagtgtgctgtctgtttcattatacaaactgcctatttgtagcccaggaaagaagacaaacttctccccatttctactgtcagtagactgaggctggaaaccagtatgcggcctcagtgtccttttctagtataccacatacacaataaaaacccaggcagataccaggtgcctagccttttcagtcaaacatacacattttagttaaaggatgagaagttgtcagtgagaatttgtacagagttcacagtaagaaggtgaactactaccacgacaaaagctccctaaaatccagcttgagaccccagggtactatttaaatatacttatccctcagtatccatagaggattagttctaggacccactacagatatcaaaatccacagatgctcaagtcctttatataaaaatggtgcagcatttgcatataacctacactcgcctccagtatcctttaaagtcagaggacctcaactcccaggccacagaccgctacgaacccactatgaatctgtggcctgttaggaaccaggccgcacagcagaaagtgagtgacaggcaagcaagcattaccacctgagctccacctcctgtcagattggtggtggcgttaaattctcataggagtgcgaactctactgtgaactatgcatggaactatgcatgcaaaggatctaggttgcctgctccttatgagaatctaatgcctgatgatctgagatggaacggtttcatcccaaaactatcccctccccaagttcatgaaaaaattgtcatccacgaaactagtctctagtgccagaccgcttctttaaatagtctctagattacttataataccaaatacaatgctatgcatcacctcattctcatggattcaatgtagttctcggcacacggaaaattcagttttccttttgcaatattttcaaatttttttccccaatatttttgatccaaggttggttgaatccacagatgctgaacccatggctatggagggctgaatgtatgttggattacatgctggcaatcccttcttccaaagttaaatgaggtccaagttctacccaactctaaattgtactatatctgaaccatctaagaatccctcattttacagaggagaaaactgaggcccagagaaaagtaattgtctacaagttctagcactgacagtggcaagggcacaagaatgctgtcctctctgcacaccatgtcatgaccatgccagctaggaaatgcactgggccatcttcacctcggggaccacacttcacacagcactgttcctctccttaattgctgattttagaaaaaatgtcatttttatatgcatctaattggtggtaactggcatgactctgaagtagccaatctatggaagaggtaataattgtcctctgacaactggctccccgttattgggctcatagctatctttctaagccagctgaatatgcttaagtacaaagttttgactttccagaggaaaacttctatttcttaccttctgcatctgcagatcagatttggccatttccgcaaaataatcagtgggtcgcttcgtagggactttgagctgatggaggcggggtaagactgcaagcactgcggcctgggcttggcgatagctgagaatcgtaggacaaaatgtgtaatgaggtgaaggaggaggccttacgttccttttcaccgccaatcatgagttatccaagctcagaaggactctcaaaatctgacctccattagcaagaacaaacaaacaaaaactgtctcactgatttagtatctaaaagaaatgtagccgtatactagtttttaaaaaggggaggggtgttgctaaaaatagtttaagagaatgactactctaaaggtacccattaacacaaacgaatgtcgattatggattcttatgtaattactaaagcaattccacacaagaacatcccataagcaatgtttgtttgtttgttttcctaataactgaagcatgcacaaaaagttttaacatgaatatttcaaattagcccataaagtggattttggatcgtgaccgtggaccaaagagctcttctctcaaacaggaagaatctcctagctattcttagtcaaaagaagccgctctctctactcctaggcttattctgagtgcagacttactaatttcccctctttcccactctcctgcacaaggatcctcaacttctccaacatttgaaaacaaacatacaaactcatctctcgctggaagtcgtcttctggatcaacagctttctggtccttgttctgaggtgctggcgcctcagatccaccgatctccggtaccggacccagtgtcacatcgagcctttcaacccattccagatcccgcttgaattctgccaaacattgcttcaggccattctaggaaatccagacactgagctcacaagaagggaactctgagtttgtctttcccaagcacaggctgttaggcgaagggacaaagtgctaatccccaatacccagacaggtaattgaccctcttggcgaggcgcagggtgcatctttcctgggacaagaatcggtctcccaagcccaacagcgcctgaagcgcatcccatgtccgagtacccccgaccctgtgcccacgctcaccacgtcgttcacggccttcttcggcccctctagcacgacattgaggcctggcttcagaagccctcgggaaaacgcatcctgcaactgcaggacacaatcacggtcactcccaggggtgtaaggccccctctcccacgcccagccccacgagctcggctgacacctacctctctgtctgtgacaagggattcatcggattccgactccgaatccgagagcgggggagtgtccatctcgccgcacgcacgtcccacacctacaggaagaaacggggtatcccgagacccaagcggctagcagagggcggccctggccgctgctgcctgccttcagccccctactcccacgccgtggctccacgtgccaccgaatcgctccagcgccagcaactcacagctactgctcaacttttgattgggacttccgcttccggcggcaaaccatacttccggtttgtcgttgctataggaaccgctacggcgtttgaaagtgtccgggttgcttaggatccctacaggtagcgcctctggatacatgcgtgg

SEQ ID NO: 6850 - DNA, 7599 bp, Homo sapiens
  SITE (7589): n equals a,t,g, or c
  SITE (7599): n equals a,t,g, or c
tgagaaggtgtcagttaaatcattatttatcataaaatgaaggcaatttgaactcaatgtctaaattatcaatagatagcaatggaaagtaacttctcaatcttttagtctagactatttaaccaaaggtatgtgttcctttaataatttttctttagtttattgaaagaaatgtttacaacatgacaccaacagaagggatcaaagtgtgtcgtgaaattgcgagtcttcattcctttttcttggttctttgtattcaaagatgctatttagtgtgttctgttcttcatcttctctcttgttcgttttccaggtctcttctacagaaaaagacataccacatctggtcacatagcagcttgccttctgccccagggtgaggacgaacagaactgaagggagagggcagggttgggagtgggaggggaggctgagcctgctcctcacccgggcacctgggctcacttacatttgaccctttcttgccaggcctcttgaggcctctgccatgagctgtcttggcccggaagctagatacatcatcatagctctcccgagtgttccactttgagcctttcttctttccaccaaaaccaaacttctggtttttataccgtcgtttagcactgggcctggaaaagaatggtcctagacatcactacagcactgtaaagcctgatgaacctgatggcccagcaatgctctcagtttcctttctataagcaaagccccttaggcacgtctgtaacccagaatctcatccttggccccacaatcctatgctacagcctctctagacaaactcatctagctcacctatttacagttttgaccaccagggcaggaaaataaagcaagaagcagggaaggctctacatatattacatggcttcctgctgtctttagaaagctttctattttaaccaaatcttattaaatcaccctcagttgtgtctattcctctcaagggtaaatacatgcagttaacatccaaatgtaatatgttacatttgtaacattcaaatgtaatgtaatgaatacgttcaaatgtaaacattcaaatgtaattataggcattcaaataacattcaaatggaataacattcaaatgtaaaactggtcatccaataggaatcttgaattcagcatctccaaattcacatcatctcctggactggctctgcttcctgtacatatgccctcacttgaggctggcgctgctcccaccaacccagacacacaggctaaacatgtgggagtcagccttggttcttctctcactctttatacccaattcaattactgagtcctgctcatttcacctcttaaatgtttcttcaatccttatctcgacttttgcaatagtacccttgtcaatttcccagcttccctcaagtctgtcacttatacaaaatccactgtgatctttttaaaaacatgaatataacctgctcattactgttagtacaacctacaacctagtctctccactgccttctgacaaagcccaagctcctcaacaaggcaaacccacagcccaggtccccccaaacacattgcacccctccttgctttgcactgtattcccagtgacaccaagggcttactgttcctcacaaaaccctgaggtttcacatctcgatggctttgctcgttcaagctcttacttcttcccaaacccagcttctcttctattctcgtggttaattcctactcatgcttcaagcaatgctcaagtcgaacgctcctccagaaatccaccccagaccctgtcaggtatttataaaagctgactcagtactaatccccaaatgcctctatcatagcacttactatcttacatggaaattatcatttcccctaggcctggtatccaggtatgcaaaaaagcagactagaaaaaacaatgagagcccacattctctctttcagtcttcatactatgaggcagacactatttcctcaacttagcagatgaggcaattagcatttagaaaggcatggtaactcgttcaaaactgccctcctactgagtggtagagtcgggatctgaaccctaggtctgaactctcaaccatcgcactgtgtgatggggaatcaactttactcagcattcacttaaagggtgccacatacttaaaagtaccttcttaggatgggtgcagtggttcacacctataatcccagcactttgggaggctgaggtgagtgaatcacttgaggccaggagttcacaaccagcctggccaacatggtgaaaccctgtctctactacaaatacaaaaattagctgggtgtgatggcaggcacctgtagttccagctactcaggaggctgaggcacagaattacttgagcccaggtggcagaggttgcagtgagccaagactgtaccagtgcactgtagcctgagtgacagaatgagactgtccaaaaaaaaaagaagtttaaaaagtgccttcttttactcttcaaagactgacatggctaaaagggcccatcacacagtcataggggtcctggccccaggcagcagctgcactctctggactctatggctgcgccggtggaggtgctatgtctgccatactcgtgacctgtggccccatcgcacctcacagaaccaaagaaaccatgccaaaacccttctcaccccttcctcatctgctggcctttggctcctgccttcttgcgctgtgccagaggtttctgatctccctcaaggaaatccagtttatcagagaagcctgtaagtgaagaagtagttttgatcagcaccattgtattttaagaataaaagtttaaaccaccatatgaggctgttatttgctacactgattttaagagtcacatcctgctctccaacaccattcccaaaactttgatccgacaggtccacatcaaccaagaaggctccaaagcactaagtgttcaaatcaactctaaagtacctgctaccctcgttcccctattagagatgtaccaacctttctgatatttcttaatagcattcatcatatgggctttctcctgctgcctcttctgaagaacctccgtttgcacctgtgatatgaacacaaggaccgttacagccattccataccattactccagtgtctacattgtcttaatagcaacaccatgattaataccactaccctctgacatttactacgtgccaaaaactgtgttagggactctaagtatattctcagatctaggtatattcttcatagatgaagatatatctgtctcataacaatccagtgaagttgaaatttgtgttatcccctaaactgaagcacaggggagttaacttgcccaagtcgcacagtgaaaaaatgcacagccaagatgacccaggctgtttgactccaaagccagcactcaccctattatacaatcctgcctacaaaactgaagtaaatcatgtttaagactacatcgatttttcgcatcacatttggacagattaattatctaactcactgttactaggcatgaaagtaccaaaaggaagagaaaaaaacaatgtccccaggtaaagaaaagaaaaaagtttgaaggataaaaggagacactttataatactctaacagagggtttctcaatcttgatactgctacagtgtggagagaataattctttgctggggggtaggggcctgtcctacactgtaggatatttagcggcacccctgccctctacctactagatgccagtagtaccctccctcccaaatttgacaactaaaaatatctccaggcagtcacagaaaactcttggggagcaaattcacccccagttaacaaactcttccccagtgtttccttaaattaggacagtgaactaataggcccaagtgagtttgtctttgcttttggtaacttatgtgctatgttaaattaattactggtgtctttgagagaatctcagccatccacctccagatcaaagaaataataaatccgcagcaggccttttgtagaggacaggatcccagcctattcctactttgctgagaatgtatcagtgaaatgactccaaacgtggacaagagttctgcagcccagatcacaagtgcttatgtccaaatgttgacgaagtcttaacacccacaccaatcttcctcacattcatttcttcccacaatcctaactttaaaatctgtcatcttctttcttagatgaccatgaaataaaaaaggaaaaccaagaaaagttttagggtatgcctgatctggtgttacattagaactcagacattcatagttcaaacacgcaggcaatctttcagattggatgacaatcattatgataatttcttcaggtacgtgattatcacatagatcagtgaatcccaaaccaggatgcatttcagaatcacctggaaagcttacggggaagaggggaaaacaggcacagattcctggggattctgaagtctagaattctgttttgaaaaatttcccctggtgattttgctataaggtcaggtttggaaaccactcatctggacccagtgtacagatgtgaaaactaacgcccagagaggtgattggctcacctgcagtcaccatactactcctggggaaccactcatgtccaggcaagattgtgctcatgaataccagcacatacactgagagacggtaaatacatgatcaacacacagttccgttcagttcaggggaccaagtcagaccacggcaatctcatctaacacacactccgcctcttcctgttccctgcacacttttcttctcaccttcttcccgtatttcctaagtgctcgcagttgcttagctttttcagacctctccatggcagcctgtctagtctgcagcttctgtcgaatctacaacacaaaatgctgtcagttcatgtcatttgaatctggaatgaccactacttaggattcgctagagcaggaacagatattccctgttctttaaactgcggaacttataaatcatcagttccaacccctgaggacaatggggcccacaggctgagcactttaccaaaagtgccagagtgaagccagagattgaaagtcaccttcccgctcccagtgtgctgtctgtttcattatacaaactgcctatttgtagcccaggaaagaagacaaacttctccccatttctactgtcagtagactgaggctggaaaccagtatgcggcctcagtgtccttttctagtataccacatacacaataaaaacccaggcagataccaggtgcctagccttttcagtcaaacatacacattttagttaaaggatgagaagttgtcagtgagaatttgtacagagttcacagtaagaaggtgaactactaccacgacaaaagctccctaaaatccagcttgagaccccagggtactatttaaatatacttatccctcagtatccatagaggattagttctaggacccactacagatatcaaaatccacagatgctcaagtcctttatataaaaatggtgcagcatttgcatataacctacactcgcctccagtatcctttaaagtcagaggacctcaactcccaggccacagaccgctacgaacccactatgaatctgtggcctgttaggaaccaggccgcacagcagaaagtgagtgacaggcaagcaagcattaccacctgagctccacctcctgtcagattggtggtggcgttaaattctcataggagtgcgaactctactgtgaactatgcatggaactatgcatgcaaaggatctaggttgcctgctccttatgagaatctaatgcctgatgatctgagatggaacggtttcatcccaaaactatcccctccccaagttcatgaaaaaattgtcatccacgaaactagtctctagtgccagaccgcttctttaaatagtctctagattacttataataccgaatacaatgctatgcatcacctcattctcatggattcaatgtagttctcggcacacggaaaattcagttttccttttgcaatattttcaaatttttttccccaatatttttgatccaaggttggttgaatccacagatgctgaacccatggctatggagggctgaatgtatgttggattacatgctggcaatcccttcttccaaagttaaatgaggtccaagttctacccaactctaaatgtactatatctgaaccatctaagaatccctcattttacagaggagaaaactgaggcccagagaaaagtaattgtctacaagttctagcactgacagtggcaagggcacaagaatgctgtcctctctgcacaccatgtcatgaccatgccagctaggaaatgcactgggccatcttcacctcggggaccacacttcacacagcactgttcctctccttaattgctgattttagaaaaaatgtcatttttatatgcatctaattggtggtaactggcatgactctgaagtagccaatctatggaagaggtaataattgtcctctgacaactggctccccgttattgggctcatagctatctttctaagccagctgaatatgcttaagtacaaagttttgactttccagaggaaaacttctatttcttaccttctgcatctgcagatcagatttggccatttccgcaaaataatcagtgggtcgcttcgtagggactttgagctgatggaggcggggtaagactgcaagcactgcggcctgggcttggcgatagctgagaatcgtaggacaaaatgtgtaatgaggtgaaggaggaggccttacgttccttttcaccgccaatcatgagttatccaagctcagaaggactctcaaaatctgacctccattagcaagaacaaacaaacaaaaactgtctcactgatttagtatctaaaagaaatgtagccgtatactagtttttaaaaaggggaggggtgttgctaaaaatagtttaagagaatgactactctaaaggtacccattaacacaaacgaatgtcgattatggattcttatgtaattactaaagcaattccacacaagaacatcccataagcaatgtttgtttgtttgttttcctaataactgaagcatgcacaaaaagttttaacatgaatatttcaaattagcccataaagtggattttggatcgtgaccgtggaccaaagagctcttctctcaaacaggaagaatctcctagctattcttagtcaaaagaagccgctctctctactcctaggcttattctgagtgcagacttactaatttcccctctttcccactctcctgcacaaggatcctcaacttctccaacatttgaaaacaaacatacaaactcatctctcgctggaagtcgtcttctggatcaacagctttctggtccttgttctgaggtgctggcgcctcagatccaccgatctccggtaccggacccagtgtcacatcgagcctttcaacccattccagatcccgcttgaattctgccaaacattgcttcaggccattctaggaaatccagacactgagctcacaagaagggaactctgagtttgtctttcccaagcacaggctgttaggcgaagggacaaagtgctaatccccaatacccagacagtanactgaccctn

SEQ ID NO: 6851 - DNA, 273 bp, Homo sapiens
cagcatagcctagcccttgatgtctctgagttgggagaacctgttactccagttaggaaatgggataccctattgatgcggctgggaacctctgttgcttattgtacctgagggcagagaccatgtgccaaaggctttattttaggggaagtggtaagaaagttcaggctgtaggtatgttcttagccacttctttcagcttcagcaaggtcttacaagagataaatttaggttacactggattctaagagcatagagggaagatcatgcagc

SEQ ID NO: 6852 - DNA, 273 bp, Homo sapiens
cagcatagcctagcccttgatgtctctgagttgggagaacctgttactccagttaggaaatgggataccctattgatgcggctgggaacctctgttgcttattgtacctgagggcagagaccatgtgccaaaggctttattttaggggaagtggtaagaaagttcaggctgtaggtatgttcttagccacttctttcagcttcagcaaggtcttacaagagataaatttaggctacactggattctaagagcatagagggaagatcatgcagc

SEQ ID NO: 6853 - DNA, 1105 bp, Homo sapiens
gtaggtaataaaagtccacatggagatggctacagctcaggggttattaaagacatttggacaaagatggcagacacaaatttctgtggctacagtagaaatagaaagaactgatgctgagttgttttcggcagatgtaaataactactgctgctgtctagatgctgaagctgaactggagacccttcaggagcctgataaggctgtgcggaggtcagagtaccatctgtgggagggacagaaagagagcctggagaaaagagcatttgcttctagtgagctatcaaacgtggatggtggtgattatacaacaccctctaaaccctgggatgtagcccaagataaagaaaacacattcattcttggaggagtttatggagaactcaaaaccttcaatagtgatggggagtgggcagtcgtaccacctagtcacacaaaaggaagtctgttacagtgtgcagcttctgatgttgtgacgatagctggtacagatgtctttatgaccccaggaaacagttttgctcctgggcacaggcagttatggaaacccttcgtgtcatttgaacagaatgatcagccgaagagtggggaaaatgggttaaataagggattttcttttatcttccatgaagacttactaggagcttgtggcaactttcaagtcgaagatcctggacttgaatactcattttcttcctttgacttaagcaatccattttcacaagttcttcatgtagaatgctcatttgaacctgaagggattgcatctttcagccccagttttaaaccgaaatcaatcctctgttctgattcagacagtgaagtgtttcaccccaggatatgtggtgttgacagaacacaatacagggctattcggatctctcctcggactcactttcgcccaatttctgcatccgaactgtccccaggaggaggaagcgagtcagaatttgaatctgagaaagatgaagcaaatattcccattccttctcaagttgatatatttgaagatccgcaggcagatctcaaacctttggaagaagatgcagagaaagaaggccattactatggaaaatcagagcttgagtctggaaaattccttccc

SEQ ID NO: 6854 - DNA, 10533 bp, Homo sapiens
aaaacaaatttagtaatggcacaattgaagaaaagcctgctttgtacaaaaagcaaatccgacataaacctgaaggaaagattcgccctcgctcgtggtcttctggctccagtgaagcaggctcaagttccagtgggaatcagggagaattaaaagcatccatgaagtatgttaaagtaagacacaaggcacgagagattcgaaacaaaaaagggcggaatgggcaaagcaggctttctttgaagcacggtgaaaaggctgaaaggaacattcatactggaagtagtagcagtagcagcagtggttctgtcaaacagctgtgcaagcggggtaagagacctttaaaagaaatagggagaaaagatcctgggagcactgaaggaaaagacctgtacatggagaatagaaaggacacagagtataaagaggagcccttgtggtacaccgagccaattgctgaatattttgttcctctgagcagaaaaagtaaactagagaccacataccgaaacagacaggatacaagtgatctgacatcagaggcagtggaagaattgtctgaatcagtgcatggtctttgtatcagcaacaataatcttcataaaacatacctcgcagcaggtactttcattgatggtcattttgtagaaatgcctgcagttataaatgaggatattgacctcactgggacctcattatgttctctaccagaggacaataaatacctggatgatattcatctatcagaattaacgcacttctatgaagtggatattgatcaatccatgttggatcctggtgcctcagaaacaatgcaaggagaaagtcggattttgaatatgattcgacagaaaagcaaagagaacacagattttgaggcagaatgttgcatagtgttagatggtatggagttgcaaggggaacgtgcaatatggacagattctaccagctccgtaggtgctgagggcttattcctgcaggaccttggcaatctggctcagttttgggagtgctgttcatccagctccggtgatgctgatggggagagttttggaggagactctccagttagactctctcccatcttagacagcacagtgctcaattcacacctgcttgctggcaatcaagagctcttttcagatattaatgaaggatctggtataaactcttgtttttcagtgtttgaagtgcaatgcagtaattctgttttaccattttcttttgaaacactcaacttgggaaatgaaaatacagattctagtgctaatatgcttgggaaaacacagtctagattgctaatatggaccaaaaatagtgcctttgaagaaaatgaacactgttctaatctttcaacaagaacttgtagtccatggtcccattcagaagaaacacgttcagacaatgaaacattaaatattcagtttgaagaatccacacagtttaatgccgaagatattaattatgtagttcctagagtctcgtcaaattatgtagatgaagaacttctagattttttgcaagatgaaacttgccagcaaaacagtagaactttaggtgagattcctacattagttttcaaaaaaacatctaaactagaatccgtctgtggtattcagctagaacaaaaaacagaaaacaaaaattttgaaactacacaagtatgtaatgaaagtccacatggagatggctacagctcaggggttattaaagacatttggacaaagatggcagacacaaattctgtggctacagtagaaatagaaagaactgatgctgagttgttttcggcagatgtaaataactactgctgctgtctagatgctgaagctgaactggagacccttcaggagcctgataaggctgtgcggaggtcagagtaccatctgtgggagggacagaaagagagcctggagaaaagagcatttgcttctagtgagctatcaaacgtggatggtggtgattatacaacaccctctaaaccctgggatgtagcccaagataaagaaaacacattcattcttggaggagtttatggagaactcaaaaccttcaatagtgatggggagtgggcagtcgtaccacctagtcacacaaaaggaagtctgttacagtgtgcagcttctgatgttgtgacgatagctggtacagatgtctttatgaccccaggaaacagttttgctcctgggcacaggcagttatggaaacccttcgtgtcatttgaacagaatgatcagccgaagagtggggaaaatgggttaaataagggattttcttttatcttccatgaagacttactaggagcttgtggcaactttcaagtcgaagatcctggacttgaatactcattttcttcctttgacttaagcaatccattttcacaagttcttcatgtagaatgctcatttgaacctgaagggattgcatctttcagccccagttttaaaccgaaatcaatcctctgttctgattcagacagtgaagtgtttcaccccaggatatgtggtgttgacagaacacaatacagggctattcggatctctcctcggactcactttcgcccaatttctgcatccgaactgtccccaggaggaggaagcgagtcagaatttgaatctgagaaagatgaagcaaatattcccattccttctcaagttgatatatttgaagatccgcaggcagatctcaaacctttggaagaagatgcagagaaagaaggccattactatggaaaatcagagcttgagtctggaaaattccttcccaggttaaaaaaatctgggatggaaaagagtgctcagacatcactggattcccaggaggaatcaactgggattctttcagtaggaaagcaaaatcagtgtttggaatgtagcatgaatgaatccctggaaatagatttagaaagctcagaagcaaattgtaaaataatggcacaatgcgaggaagaaattaataatttttgtggttgcaaagcaggttgtcagtttcctgcttatgaagataatccagtttcttcgggacagctggaagaggtatgtgtctgcgtgttggtatttgacaaaaggatttgatcagagtttaacccaagaacagacatgccagtcaatgaaagatagggttaaattattgggaaattagcttaaatgtcttaaaacttaaattgttctaattttacatgtaaggacttaaaatggatttgatatttatgaatttgaactagacagtagagtttttctggagagaaaaagcttttaaaaatcacaggatgtaagattcctatgtgttgtcttaagatgcatgttattggccgggtgcagtggctcacgcctgtaatcccagcactttgggaggccgaagtgggtagatcatttgaggtcaggagttcaagaccagcttggccaacatggtgagaccccgtctctactaaaaatacaaaaattacccaggcgtggtggcaggcacctgtaatcccagctccttgggaggctgaggcaggagaatcacttgaacccgagaggcaaaggttgcagtgagccgagatcgtgttctgtactccagcctgggtgacagggtgagactccatctcaaaaaaaaaaaaaaaaaaaaaatacatgtattatgcttaaagcaaaaacctaacatgaaagtgttctaacattcaaagttgatgaatcaggaagtggctgctattaaagtgtagcaaacctgtctaactgactcttagaagttgatcactttatcaaaacttgtgttttacatataaaacaaattatatctctatggagttctcaaaaatacattgtggtacatgtagaaattcacccacagcccaaatgcaacaaaatttcttctacagaacctatacagatgtatcttgctttatacaaagtacatattccagaagctgtgtggattatatgttaaggctatggaatgaggatcacattaagttgtgttaatgagagtcattgtacctctccactgtatgcccaagaaatggcttaaggttaaactgattgtacaagaaataacacttaagacaataaactgtttcacaaaaaaagcacagcagtctgcccatttttccactgttttcgatatgtgagtgcctagcctttctccagaaatagtttatttaattttgtttttgtttttgttttgttttggggacagagtctcgctctgtcgcccaggcttgagtgcagtggtgcgatctcagctcactgcaacctccacctcccaggttcaagtgattctcctgcctcagcctcccaagtagctgggattaaaggcatgcgccaccacgcccggctaattatttgtatttttagtagagacggggttttaccaggttggccaggctggtcttgaactcctaacttcaagtgatccacctgccttggcctcccaaagtgttgggattacaggcgtgagccaccgcgtccggcccagcttattgaaaaaaagagatggaggtgtttagaagccatgccacctgtggccagagagcagatgagtgttgcacttcctcccaactgtcctgcacaccctacccaccattgcacatccaaatcctacccataccatgagacttatttcatataccacctccttcactgacactttccctaattccctctctcccctgctccagccccactctgcatcagaattaattttgcccctctcttaattttcatgcactttatgcctctttttgattgcatttttcatttctcatgagttatttatatcctggactataagctccttgtggctgtggaccatgccttacttatttgtcgcatcagagtgcccaggtgtgggactgcttgcctgtgattctaggaagcccccaggcgacttgagaggcactgctctaatcagctacctagagacccgtagaggatgaatttaatcccattgaaacactgctaagaaaaaacccaataatattgttagcctttatctgtttgtttattgccccatttttcatccttaaatattcctttatgtactttgtatttcacctggttccagattgggaagaaagaaaaagaggaaagaagcaagattctacatcataccactaccatattccttcgctttctagtatgttgatgtatttatgtgttatcagaattccgggtttccttgaaaggtcttagctgccaaaaaaattcccagaggacattttgggattgtctgatagtttagatgttgtcagcactgctctctcggcagcattgttatactttagaagccaggttgaagcttacttcatagattcatctgagatgtgcaggaggctgagtgacctgaagggacagtttggggccagcctgggactagaacctgtatctttctgttctgtcacattgcttggtcagtctgaaaggtgcttttaagaggatgtgcttccggcccttttcctgagtcagtacagtcttttcaggaagcaatctgggaggcctgtttaaagatcagtagaaccccatctgtttcagacttagatgatgaaaatgtaggatttccgatagaactggtgtctaagagcatgaaaataatatgattattttcaaaagtttagttcaattcagcaaacatttagtgagtacctgtttacatgcctgttgctaaagtaggtgtcctggatgaataagactttgtccttgcccatacagaattcagcgtagtgaagatgaccaacttgtaccatgttacttattttaactgaaataggtaatttattcatatggttcaaattcagaagttacaagtgtatgtgtacatacacagtgaaaggtttcctccccagcggcaaccactagtgtgagttctgatgtattctccaaggatattttttgcgcgtattaacaagtaaatgttcacatgtatttcttcctattttttctttttgctgaaatggtactttattgtaatcacccttcctttttttattttctgcacactattccatcgtatggatataccgtaatctacctagtcagttctttatgttttagggcatttgaccaatgcagttttaggtgctgtaggtagaatggtggaggggagcacagaatgctgtgggaacctgcaggagaacccttccagcctgtgaaggttgaggaaggtttcttgagcatatctgagtgtccagagtagaaggacggaggcagggcagtccaggcagaaggaacagcagaagcaagggtaaagagatttgaatctgctgatgtgtgcagggcagctgtgaacagggatctcacggtctctggagtataagccatacggttaagagtagcacagatgaagcacagtgtgccttggtatctggacatacatttgtggtgaaaatgttcttgtcgtttctttggttgccaacttagtaccaagcaccttgaggcacagaaaataagcaaaagtcttacttgctgtcttcagggaatttcagtccactcaggagaggagctcactgtgctgtggaggtcagcaggtctggagggacaggaaggctctgatgagtaaagaaggagtgagggtcaggggtcatcctggtgatgtgccacccggcacatctatgtagaggcttctgtcaccactatcctactggatgcccatgtagacctcatgcggtaggttattttccccacttctaaagacacataggctctgagaggtgagacagctgccccagatcccagtgtgggggacaggcaaagcattttccaccactctgcacctctgtgaactgaggaagacttagaccagcagttctgtgtctcttgtttgtctctgttgcactcagtatctcttcattgatgtttcatttcttccttcccagagaacaaggtacatggaagtcttgcttttcctggtgtgacccaaatgagagctgattgtggcaaaggggcaagattcccagagtaaaactaaaaccaagcacctttctctttacccaaactaggagtattctgtgagaatttacagctgtgaagcctttgtttccttcacccagcttccaccttctaaagaatttctcaattttacatctgttgctaaaaacatttctggttaggctttttggattaagtttatgtcttcttttcactgtttcattcattcatcaagtatttcttatgtacctgctcggccaggtactattcttggtgctgggaataagtaacaaagctcttggtgctggtggagtcacatcccaccttggggagctgacaataaacatgttaagttatatagtgtgttacaatataaatgctgttggaaaggaggatcgctggacgaggggcattgggtttgggagtgatggcaggagtttgctgtgttatgggcggtgtgagagcaggcttcctcgccaaggtgcaatttaaggaaatacttagaggtaagagagtgagctgagaggatgcctggcaggaaagggagggcagcactgaggccgctgctgtgcctgcctgtccatgacagcgaccttctgatccgctttcagcttcctccattgtctcttcattcttttcattcccagccacagcagaagttgaattaatacattcgatgatgtattagatgaatatagcatgatccagcctaaaagttataaatgagtggagagatgtcataacaagatgcatattccttgaatatgtttagtataaaacgggacaaataagtccctgccataggaattgacattcaaatggaggatgcagaaaaaagactcccaaatttatggtagaaactggtgtgcccttcacagtggtttcagcaagagagagaagaaatgatgtatgagatagtcagagactgttggcctggcggaaacttttcttcacgtcagcagacactgagtatctgctttgtgcggggccccatacttgggaatgcaaagatgaggaagacgtggtcccgcccctcaggaagcttacagtcgggttctgctgggatctaaactcgtcttggttcatgctgcccctgctcccaggttcctggcccctctagcctgctttccctgacctgtcccatcccccaccatgaactcactccctttcttgatcttaatcctcaagaaaggatgaaaagataagcagtgtatttaaactgatcattcctgcaaagagctttttctttctcaaataagaacctgttaacctctaaatccacttatcttcaatagcgccttagggaggtgatggagagagttctggctggggcaccttccttgctccccctgagtagcactaagtaatctcacaggacaggcaaggcctttctgaagaggtcttagagtgcagggaattgcatgacaggtgctgttagccaccttggaagaactgcaggccttgcgtggtgccaccttgtttgcgggaagcccagccctgtccattcccctggccctagcatctgtttatctaatagcagtaccaatttttattgttaggataagttgtaggagaaattagcaaaggttaactgactgctgtgggtagacagtacaattcttcttcagtttctgacttaggagtgtttccgaaaagttaagtgaaaacaaaagtttgaagtgtttcccttttagttacataacagacactcattacggaattgaacagttttagacccataaataattaagttaaaagcataacaaaatcctgttaggaaactgatgaaaaatttgtttctaaaacactttagattttaaacttgaacacgtagtgaaatgtcttttaaaacaatgaagatgggtgcagtgttcacaggcctctccactaagcagatgtctactgagaacacagtattaggggatgtgggtggtagaaagatgcagtggccaagcctcaccctgggcgagctggggcaggctcactctctcaggcacagtgaggaaggcacactgaagggggttgccctgactgccagcatgccaggtatacatggtgactgaagctgccacaggtcttctattgaccacactacaaggactcttcttggtcactgatgacagctgttgtctgtctgccattggccacactatccagttctcactggccaagcaggtgggcggggcccagccaggacttgagaatcccactgggaaaggacagagcctgggttcaggctaggtccctcttctgggcctgggcagcttccagatgtgaaggatatgagtctctcccgctctcaggaatcattctctcatctcatttggatggctatctcctattttaaatttgaatcatggaatttgaatttgtaatttggttttagccttagtttccttctggttcgcacctaagcaagataattttaagacacttaggtcaataactgtgcctataagaatttcctttgggccaggcatggtggctcacgcctgtaatcccagcactttgggaggccaaggcgggcagatcacctgaggtcacaagttcgagaccagcctggccaacatggcaaaaccctgtctctactaaaaatacaaaaattagccggggtggtggtacatgcctgtagtcccagctactcaggaagctaaggcacgagaatcatttgaacactggaggcagaagttgcagtgagctgagatcgtgccactgcactccagcctgggtgacagagtgagactctgtcttggaaaaaaaaaaaaaaggaagtttctttgattccatttcttcttttacttacttctgcctgaatgtatgagggagaagagggttccccctgttctcttcagagcacctcatgccagtaaaggctcagggcttccccattacctgtatgcacttggggaatctagaagtttgccttgcttgggagcgtttttattacattatattttgggcttgtaagagtttttttagttaagattttcatgtcgcttcccatctaagtacttcttaagcaatactttctttatacactgtgaacacgctggcttttaaaatgcactttttttcagaacattataaaaactcaccagttggctgggcatggtggctcatgcctgtaatcccagtactttgggaggccaagcttggcagattgcttgagcccaggagttcgagaccagcctggccaacatggcgaaaccccatttctacaaaaagcacaaaaaatgagccagacatggtggttcccgcctgtagtcccagctacttgcaaggctgaggtggaaggatcacttgagccctggaggtggaggttgcagtgagccaagatcgtgccactacactccagcctgagtgacagagccagaccctatctcaaaaagaaagaaagaaaaatcaaaaaacctcaccagtttaaaagttctgggtttataatctgtagttaataatgcttgaatattcttcctctaacctgaaagtttataaactttttctgtatttggtttaatctaaacagttccctgtattgaacactgatatacaaggaatgaatagaagtcaagaaaaacagacctggtgggaaaaagccttgtactctcctctttttcctgcatcagagtgtgaa

SEQ ID NO: 6855 - DNA, 241 bp, Homo sapiens
gtactatgaagcatttccaccactttctgagaaaccagtttgcctgcaagaaatcatgactgtgtggaacaagtctaaagtctgttcttactctagctcttcttcatcatccacagccccaccagctagcacagatacttcctctcctaaggactgcaacagtgaaagtgaagtcaccaaggaaagaagcagtgaagtacccaccactgtgcatgagaaaacccagagcaaaagcaaaaac

SEQ ID NO: 6856 - DNA, 784 bp, Homo sapiens
ttagagctctccccgaagagctgatgagctctctgtccctggtggtgtacaggcagtggggaggaagccagggaggccttcctggaggaggtgacacactgatggaaccagccataagcaaagacctgggggctgtgggctgggctggcctgctctcagctttctctccagtccctctgggtctcttctcaactaagtcctcactcatcccctgcgcctccacacagacctcttgaaatcacatgttctgagatctccaagtggagatcagagtgcaccaatcagggagaaggatggatagaaattattggggggagaaacacatccagggaccgtttctgcagcatcttctccatgcctggtgctgtgccggggaacagaggtgggacatggaatggagagagggagagggaggaactgagggtgaattagccagactcctttggttcctgtgagaaaagtctaatcaaacagatttaaaaggaagggtgggccgggtgcgttggctcacgcctgtaatcccagcactctgggaggctaaggcgggtggatcacttgaggtcaggagtttgagaccagcctagccaacatggtgaaaacccatctctactaaaaatacaaaaattagctgggtgtggtggcgcacgcctgtaatcccagctactcgggaggctgaagcaggagaatcgattgaacttggggggcggagatggcagtgagccgagatcgcaccactgcactccagcctgggcaacagggtgagactccgtctcaaaaaaaaaaa

SEQ ID NO: 6857 - DNA, 784 bp, Homo sapiens; identical to SEQ ID NO: 6856

SEQ ID NO: 6858 - DNA, 2349 bp, Homo sapiens
ccgggctgggagtgcagaatcagaggcagcgtgggacgctcctgcagtatggttgtctcgggagccaagacaggcctggcagaggctggcacacttgtgagtgtgcatatggagctctgtgcctatatgtgtctgggtgtgtgtccctggtgctgagtgcccacatgtgggtacccttatgtgtacatatggctgtgcccatgtctgccctgtggccaagtgtctgggtggccagtgtgtgtcccctgtgtgtggtgcatcttgtccactcacagtgactctgcagaggtctcctggaggccccagggccactggagggggctcagcccctgctggggtcctaggggtgcccagtagcccctgcctgcctttgccgtgtgattctgagagctctaccctccccatttttaccatggttccgaaccagaactgctaaatggagtccagggcaggctgacccagggcccaaacaaggaccatgaagtcctagtcccccggaaacttctggcgtccaaaagagccctccttctgtcccaccagtccccagaacctcagagccggccaggtggacccagggccagaccccagccttgacctctcctctctcttgttcagaaactaatttgacatctgtgatgtctgagcttgtgagggaaactgaggcccagagaggggcagtggggtttccaggtccacagcaagtcagcagcaaacccagggttgcagctgagccctcctgacccccaggcctctgctgtgccttctccttcctcaccatcacaaggggctgtggatcctttctactgggcactgatggtgggatgccaggtacaggacgggccggaagtccacccttagtatcactcctgaccgtccctgggagaggctgtctgcgcaggcccagcctacccttgctggaagaggctgggggaaggctgtcctctctctgcccctgcggctccctagttctgctttcagatctgcaggtgtgaggggcaccaggtccctcctctgtgtgtgtcacaggctgtcagcgttggagggacccacccattcccagccgtagcctatgccccaagctgctgcccagccgggaacctatacctccagtgacggggacctcactaccgtcctcctgcctgtcttccctcccaagactgtctaatcagtttccaaatggatgtggcccttctcggtgtctgtggggctcaggaccacagggattagccaggatctcacagcttagtaagagactaaccaggatttgaacccacctgcatggctccaaagtcagccttgatattctggaaaggcaacctcctcagagagagggcactggcctgcccacgtcacacagcagagggtggaaggaaggcagagtccgtcatcaccagcaacccccagggctgcaggcccaggcttccagctcctgctcaggctgtggtgcctgctgtctcttgcgccctcgtctggccactgctcagtactgcactgacctctcagccaggaacccacagcggcaaaccgaacccctgacccagcctggacttggtcttggcatctccggactcagcttcctaaccggcccgtggggcacgggttgcaggggaccaccccccccaagagtgcactcagctcagcactttgctgtttcctgaggagggctttgctttcatgtctgatcctgtgggcactgccaggggatggaaaggagcatgagagaagagccaggcccccgtgtcccagacacagggcaaagcctgggtgggggatgggtggacacagagacagacctggacagagggacaaacgccagagcacaactcagacgaagggtgggaggtcccgagactcagagatggacagagttactgaggctgagcagggaggctgagaagccaagaacacagactcaggaggaaaaccgaggccatggtctccgccagtcatgctcctccaggagatcctgggcaagtgcaggcagtgagtgggcctgagaccagaaggctgagctgagctgaccctctcagatccagttaagatggtctcagttaaggctgggcacagtggctcatgcctgtcatcccaacactttgggaggctgaggtgggaggatcacctgaggtcaggagtttgagatcagcctggccaacatggtgaaaccccgtctctactaaaaatagaaaaaattagctgggtgtggtggtgcacgcctgtaatcccagctacttgggaggctgaggcagcagaatcacttgaaccctggaggcagagtggagctgagattgccccattgcactccagcctgagtgacagagtgagactccatctcaaaaaaaaaaaaaaaaa

SEQ ID NO: 6859 - DNA, 2349 bp, Homo sapiens; identical to SEQ ID NO: 6858

SEQ ID NO: 6860 - DNA, 1408 bp, Homo sapiens
aaatgaatatataaataaaaggaaaggtgggggtatccggtggtttatgtaactgaaaaatcagtgtgggtttcaggcccggctggatcctccaggatgaagacacaggaggagtaaggtttagaggggagaggggatgaggaattcctgcgggtccagtcttggttctcaaaagaagctgcccatgacctatctccctttcctggctcttctttcctctgtggaggcttcattctcaggcaagttctctgtcttcacagtggtgaaacggccaccagcagctccaagctaacatctcaccagtttagccactcccgaggcacaagagtggctccttctccagagctccagcaaaagtctcaggttcaattcttattggccggggtcgggtcccgtgcccaccccagaaccaatcaatcattgcagtcaaggaaacggaatgccctgattggaggagcctggttgcgtgcccacccttccaggctctcctgtcgggacacagtgtgaaccaaggtcttggggccggagaggaatagagaaggtgtcactgggactaggctgaaggggccataaaaggagcccaagggagaggctgtgaaagggagagcaggggcgatggcgaaggcctttgaacaccaggctgaggcgcccggatttcttctgcaggcagaagggagccaagacaggatgtctagcaggggagggcctggagcaggcaggggtgggcgtggggaccggaggcaggacagctgtgaagaggccgcagggatgggaaggggggacggggcgggacccaaggcagaggcagtgagcacgggtgacagatgtcgtcaccccggcaggcctcacgcctggggcggcccctgctcagcttctgcccattgttgccgcagcacgtaacacctggcacagccagagcttccgacgtctcaagagaagtgggaagtgagatttatgcatgaaagaaaccgcttggtttttagagattggtgacgtattcaaaaaaaaagaaagaaagaaagaaagaaaaacagaccgggtgccatggtgcacgcctgtaaacccagcactttgggaggccaaagtgagcggatcacttcagctcaggggtccaagaccagcctggccaacacagtgaggccctgtatctaaaaaaaaaaaaaaaaattacccaggtgtggtggcgcgtgcctgtagtcagtcccagctactcaggaggctgaggtgggaggatcacctgagcctggaaagttgaggctgcagtgagccacgactgcaccagtgcactccagcctggaggacagagtgacaccctgtctcaaaaataaataaagaacaataaaaataaaataattaaaaacacaaatggttggcctgagattcaattccacattcagttagtcattca

SEQ ID NO: 6861 - DNA, 1545 bp, Homo sapiens
tagcctagcactaaatttgcttagctttatagtaggatacaggacaggaaattaagcatgcatgatgcttgggtccctcctcacctgcctaaagagcgtgcatgagcttgtggtatttggatgaggttgtggtatgtgggggtttgccttgatgcaaagaagcttctatgtgggtttcccaccagtcatataggcctacggttcacaggtctcccagccccatgtactgtcccatagattgtaggtttcacagtgcacaaaatggatgtctgtccctggtacccaatattccaaatttatcttaatttgggtcatttacaagaaactcgtgctgggataagacaaacctaaaatttcccaagcaggcatagttctgggagaaaaatggtacagacctgctattaactctttgctcacacatacataaagaaaagtacacaaatcatgagtatgtaacatcattgatattggcaaagtgaatacatctctgtaaccagactcagatcaagaaatgatacattctggccaggtgtggtggctcatgcctgtaatctcagcactttggcaggccaaggtgggtggatcacttgaggccaggagttcgagaccagtgtggccaacatggtgaaaccccacctctactaaacacacatacacacccacaaattagccaggtgcagtggtacattcgtgtaatcccagctacttgggaggctgaggtgcacaagtgagaatcgcttgagcctgggaggcagatgttgcagtgagccaagatggtgccactatactccagcctgggcaacagagtgaaactctgtcaaaaaaagaaaaagaaaaagaaaaagaaaaagaaaagaaaagaaagaaagaaaacattctagaattccagaagccattctcattccctatttaagtcactaacccaagagtaattaatatcctgagttccaacaccttggatttgtatgggttatttttaaaccttctataaatggaattttatgatatgtttgtttgatccacctatgttgtatgtagttgtatttcatttattcccatttctgcattgtcttgaattgtacaactattttacatatttatctattctaatttcaatggatatttgagttgtttccaatttttaactattttttaaaattatactctaagttcaataaacatacatgtgcatgtgtctttatagtagaatgatttataatcctttgggtatatacccagtatatacccaagtaatgggattgttgggtcaaatggtatttctgattctagatccttgaggaatcaccacactgtcttccacaatggttgaactaatttacactcccaccaacagtgtaaaagcatttctatttctccacatcatctccagcatctgttgtttcctgactttttaatgattgccattctaactggtgtgtgatggtatctcattgtggttttgatttgcatttctctaaagaccagtgatgatgagctttctttcatatgtttgttggccaaataaatatcttcttttgaaaagtg

SEQ ID NO: 6862 - DNA, 350 bp, Homo sapiens
ctaggatttttatggttttagaccttacatttaaatctttaatccatcttgagttaatttttgtataaggtgtaaggaaggggtccagtttcagttttctgcatatggctagtcagttttcccagcaccatttattaaatagggaatcctttccccattgcttgtttttgtcaggtttgtcaaaggtcagatggttgtagatgtgtggtgttatttctgaggcctctattgtgttccattggtctatatatctgttttggtaccagtaccatgctgttttggatactgtagccttgtagtatagtttgaagtcaggtagtgtgatgcctccagctttgttctttttgctt

SEQ ID NO: 6863 - DNA, 745 bp, Homo sapiens
atagttgtaccaggtacagagcaaagagtgacacccagaggcaaatcattctaagagggcaacaactatgacagtgcctggcacttctaagagggtgcagcacttctaaggtgctaggcaagctctattccttttgttttaacacctcgggaaaatttgaggtaccaaattaggtacaagaataactgggggtatgtcctaggtaactaagagtccagataatgtgtgaattttgaatgtgcgtggaaagagatttaccattctttgtctaactaaacaaaaaagtttccttaagaggtagtcagccaggcacaatggctcatgcctgtaatccagcactttgggaggccgaggcgggtggatcatctgaggtcaggagttagagatcagcctggccaacatggtgaaaccctgtctctactaaaaatacgaaaagttagccaggcgtggtggcacgtgcctgtaatcccagctactcgggaggctgaggcaggagaattgcttgaacccaggaggtggaagttgcggtgagctgagactgtgctactgccctctatcctgggtgacagagtgagactctgtcaaaaaaaaaagagatagttatacaagttctcctggaaaggaactatgttttgcaaccaatcttaatattagttattgatatgagggttctctgggtcatttgaggtgagatagtgcaatatttaaacagctctgcataaaaaaatgaataggaggtttaggg

SEQ ID NO: 6864 - DNA, 490 bp, Homo sapiens
tcacataagcttcctaggtggttctaatgtgcatccccaataaaaagcagtgctcttatgtgctgttgccgaactttttcactctgtgtcatgtcaagaatgtttggtattgtgatccagagtaaaagaaaaatttcacaaaacggtacttacccttgtcacaagtaaaacactctggttttattaagttttttaatgctgccacccagggtcttgactgatgatcttgacctgtagtttgaaaaacactgttctgaaacttagtaaccattgctgcccttggggttaatgataattgaaaccgtgtcttctgggtcacttaactataaatgccactgactcaaagttaactatataggccaggcgtggtaactcacacctataatcccagcactttgggaggctgaggcaggcagatcacctgaggtcaggagttcaagaccagcttggccaacatggtgaaactccgtctctacaaaaatattttaaa

SEQ ID NO: 6865 - DNA, 491 bp, Homo sapiens
tcacataagcttcctaggtggttctaatgtgcatccccaataaaaagcagtgctcttatgtgctgttgccgaactttttcactctgtgtcatgtcaagaatgtttggtattgtgatccagagtaaaagaaaaatttcacaaaacggtacttacccttgtcacaagtaaaacactctggttttattaagttttttaatgctgccacccagggtcttgactgatgatcttgacctgtagtttgaaaaacactgttctgaaacttagtaaccattgctgcccttggggttaatgataattgaaaccgtgtcttctgggtcacttaactataaatgccactgactcaaagttaactatataggccaggcgtggtaactcacacctgtaatcccagcactttgggaggctgaggcaggcagatcacctgaggtcaggagttcaagaccagcttggccaacatggtgaaaccccgtctctactaaaaaattttaaaa

SEQ ID NO: 6866 - DNA, 298 bp, Homo sapiens
  SITE (296): n equals a,t,g, or c
tctcaaaaaaaaaaaaagaggctcacgcctgtaatcccagcactttgggaggccgaggcgggtggttcacgaggtcaggagataaagaccatcctggctaacacggtgaaaccccgtctctactaaaaatacaaaaaattagctgggtgtggtggcgggcacctgtagtcccagctacttgggaggctgaggcaggagaatggtgtgaacccaggaggcagagcttgcagtaagcccagatcgtgccagtgcactccagcctgggcaacagagcaagactctgtctcaagaaaagnaa

SEQ ID NO: 6867 - DNA, 475 bp, Homo sapiens
gggaggctcaggcaggagaatcgtttgaatccgggaggtggaggttgcagtgagccgatatcgtgccattgcactccagcctgggcaacaagagcaaaactccgtctcaaaaaaaaaaaaagaggctcacgcctgtaatcccagcactttgggaggccgaggcgggtggttcacgaggtcaggagataaagaccatcctggctaacacggtgaaaccccgtctctactaaaaatacaaaaaattagctgggtgtggtggcgggcacctgtagtcccagctacttgggaggctgaggcaggagaatggtgtgaacccaggaggcagagcttgcagtaagcccagatcgtgccagtgcactccagcctgggcaacagagcgagactctgtctcaagaaaagaaggggagatagagcctggttttgaatattttatatgtatttagtgtgaggtcttagtccccacaaagcataagca

SEQ ID NO: 6868 - DNA, 32195 bp, Homo sapiens
caggttttccagaagccccacgaggtggtaatggtgctgctgattcagaccctgggggccctcatgccctcgctgccctcctgcctcagcaacggcgtggagagggcagggcccgagcaggagctcaccaggctgctggagttctacgacgccaccgcccacttcgccaagggcttggagatggcactgctcccccacctacgtaaacattccttcctgccagttctctagcttgtctttactcgctctttctgaagcttctggggcctggatttgtttgccttttcagatgactgattttacagaaatggaagggatcggtgttttccttctcagcagatgtggagggcttttccatgaaaaaacattgccatcaaggaaatagttgtttaatatctttgcctggctccagtgctgcctgggtgccttacatgctctggggaagtgatggacacctctgtggggcttgggatataaaagaggcatcacagtgaggcaggtagatgttatggcaaagagttggcggcagattacaccaggaggcaagtgtgcttatcctttgaagtcatcacgaagcctcagacatttcaacctcaaaagtcagttttagagaacaaacaggctacaagggcttttttttttttttttttttttgagatggagtttcgctcttgttgcccaggctggagtgcaatggtacgatcttggctcaccacaacctccacctcctaggttcaagcaattctcctgcctcagcctcccaagtagctggaattacaggcatgcagcaccacgcctggctaattttgtatttttagtagagattgggtttctccatgttgaggctggtctcgaactcctgacctcaggtgatctgcccgcctcggcctcccaaagtgctgggattacaggcatgagccactgtgcccagcctacaggggctttttgaaggagcaacagcaagtgtcccagggcaggggagctgtgttaggactacaggtggttgtagagaaaatgggctttccccggtggccgactgagagcagagcaccccttactcccatttgggtaaacagtgcctggtgtgtgatgctctccaagctctttcccgtctatgttaaaagctttataaatttttaaagaacacagaccccgtgacgcatgttgctgtcaaatcaggaaattgcttcaggaaggccttgttctgctgttcggcggctgtgtgtcactgacttggtttatttaatagttcttctctttaattacatctgtgtataattgccttgtacgttccagggagtgtgtttattgttcggattcctgatgactcatcggtgtttttggcatgctcacaggtcaggccttagttatgggaaaggcccagtggatggggaagcttccaagggaccgtgatgcctttgtggaagtggctaaggagagttgagagagctgggctaaggcgagttgctgcagcacagtgggacgaaggtggagcaaggaatggctgcatccttcccctggggatggatgtagtggggaagagaaccacccttgagacagatctggaagtgctttgctagtcagccatgggacgagtctcactctcgcccaggctggagtgcagcggtgtgatcttggctcactgtaacctccacctcctgggttcaaacaattctcctgcctcagcctcctgaatagttgggactacaggtgtgtgccaccacaccaggctaatttttgtattttttagtagagatgggttttcgccatgttggccaggctggtctcgaactcatgacctcaggtgatcgacccgcctcagcctcctgaagtgctgggattacagcaggtgtgagccaccatgcctggctgggactttagatttcatttttttttttttttttttttgagacagagacttgctttgttgcccaggctggagtgcagtggcgtgatcttggctcactgcaacctccgcctcccaggttcaagcaattctcctgcctcagccttctgagtagttgggattacaggcacacactaccacacctggctaatttttttgtatttttagtagagacgaggtttcaccatgttggccaggctggtctcaaactccttgcctcaagcaatccacccatcttggcctcccaaagtactgagattacaggtgtaagccaccacacctgacctagattactaatgattctccctgaggttttccaaaagagttttagtttttcttttaacttaaaaattttttggaaacacacacaaaaataaaaagagagcaagaacaatccataaactcatcagtcagagccaccaacaacattatttgcttccagtaatacaaatataaatatacattgttcacaaatattaatatacttaatatctaccatataaatattatgtaataaatacataacatattaaatatattaaatacttttatatatttacatgtaataatatatgttatataatatatacaaaatatcttaaaatattggttgtagacagtcttatattttcattttttgaaatgctcaaaataatataatgggcattttcttatgtcattaaatgttttcctaagacatagttttgttgtctttattttttttttgtttttttgagacagggtcttgctctgtcgcccaggttagagtgcagtgacactatcacagcttactgtagccttgaaccttctgggctcaagtgattctctgaactcagtctcctgagtagttgagaccacgggcacatgccaccaaggctgactcatttttaaaaattttttgtagagacagggtcttcctattttgctcaggctgatctcaaactcctaggctcaagtgattctcctgccttggcctctcaaagtgctgggattacaggtgtgagctaccacacctggccaatttactaccatttttaatcactatgatatataaaactataatgaactgttttatacattagtttttgagcctagctccgattattccttaggataagtttaaatttgcagttgctcagaaatgaaaactttgaagatacttgtcacattttgttcttttttttttttttttttttgagatggagtctcactctgttgcccaggcgggagtgcagtggcacaatttcggctcactgaagcctccacctcctgggttcatgccattctccttcctcagcctcctgacacattttgttctttagacctgtttttgtatctatcagtagtgaacgaaggtgcctgtgttgccatcccctcaccagcactagattctttttttctcctgtcattgccaggttcttagacaattactgatatgccattttagtttttcactttggttattagcaagtttgaaagttacatgataaaaagtatcttttctcttttgaattgcttattctttagcctgttattctgtttgggagtttaacctatttctggttaatttataagagcaatttatttaaaataatatattattaaatatattataaaaagcaacaaaatatgtattataagaattaatgatatagaaatctgtgacacaaaataactctcctataatcccactttaaccactgttacaaatttggtgcatattcctgaaagatccttatatagtgaggaatttttaccattgcttatcaaatatgttgtaaatatattgcctaacttttaattttacccttaacattttttctattattttaatagttaatacatgtacctaatacaattcaaaatataaaagattatgcaatataaagtaaatttttaaaaatttaggttgactttatcattatagaaaaatctaggaaaaaacaaggaaggaaaaagaaatcattctcaactcaccattcagaaacagcattttgggccaggcatgggggctcgcacctgtaatctcagcactttgggaggccaaggtgagggagtcatttgattctaggagttcaagatcagctctggaaacatataccccatctctacaaaaaaaaaaaaaattagccaggtatagtagcatacacctgtagtactagctactcaggaggctggggtggggagatctcttgagcctgggaggccaaggcaatggtgacctgtggttggaccactgcaccttagtctggggaactgagtgagatcctgtctcgaagaaaaaagaaaagaagaagaaaaaagaaataacactttggattctatacatgtgcagatttgattattaccatgttagacccacattactttacctaatctctacaaaaccttgtaaaattggtgccagaaatcaagagcagcagactttagctgagtgagtattgaaggagaagtaggagttaactagataaagaggggaagggacgaagccggtccttccagacagaggatcagcatgtgaacagaaggaagcttttaggaactgagagaaggctgggagctagaggaagagggaaggaggatgaggctgtagaagtaataataaaactagctgaaggaggggaccagaaggatgtgaggataccagtaagtaggctattacatttactaatcccctgttgagactgtgtccaaagctttctgattctgagccatgtttccatgaacatccttctgtctctgtgtatttgttgatttctttgagatgattttcaggaattgaattactgtgttgtagaatatgcacatttacattctgatacagcgtgttttacatttttatgtggttgaacgtaggaatttttggaatgcctgggctatggggtatccttttgttttttgtttttgttttgagacggactctcgctctgtcacccaggctggagtgcagtggtgtaatctcagcttcccgggttcaaggaattctcttgcctcagcctcccaggtagctgggaccacagatgcatgctaccatgcccagctaaattttttttgtatttttagtagagatggggtttcacagtattggccagggctggtctcaaactcctaacctcaagaaatccgctcacctcggcctcccaaagtgctgggattacacgtgtgagccaccacgacctgccagtgggggtattctgtttctaggaagtcctaggaacatgtggcatgggaattgttcttcctgtattgccttttctctgtggcagttcttttttttttttttttttttttgagatgaagtcttactctgtcacccaggctggagtgcagtggcatgatcttggctcattacaacctccacctcctgggttcaagcaattctcctgcctcagcctcccgagtagcaggaattacaggtgcccgccactacgcccggctaatttttgtatttttagtagagatcgggtttcaccataatgggtaggctggtctcaaactcctgacctcaggtgatacgcccacctccgcttcccaaagtgctgggattacaagtgtgagccaccgagcccagcctctgtggcaattcttgaacctgaccttgatgagggttatcttttttttttttttttgagatggagtctcgctcttgttgcccaggctggaatgcaatggtgtgatctcagctcaccacaacctccacctcccaggttcaagtgattctcctgcctcagcctcccgagtagctgggattacaggcatgtgccaccatgcccagctaattttgtatttttagtagagacaaggtttcggtttctccatgttggtcaagctggtctcaaacttctgacctcagttgatccgcccgcctcggcctcccaaagtgttgggattacaggcgtgagccaccacgcccggccaatgagggttatcttttgaagggattcttatttgtggtgggtcatgggattcagggggctggtgtctttaatagtgctttaggcaaacaatgtgcaaagcccaaatttatccagatatttgctgaactgattgtaggagaagcttccatgaatgataaaagctgcttaacaaaatatagtcccctctggagatcaaatggggaaagttctagtagagcgcctcttgattgttgctttcccacagttaatttcagattctttgttcattatcgttttacatttctgattccctaaagatgaacacaatctggtaaaagtcacggagctggtggatgctgtgtatgatccatacaaaccctaccagctgaagtatggcgacatggaagagagcaacctcctcatccagatgagtgctgtgcctctggtaaagtcgcagtgtcctggggccactgaggaagcattctgttagccagggtcttggccacgtctgggagagggctgggggttgggatccggggtgctgaaatatgacctttaagcacttgtgggctcttgtaatcccaatgtaaaatgagaccatatatttgctaccaattttctattgattgatggattgagacagagtctccatctgtcgcccaggctggagtgtagtggtgcgattgattacaactcactgcagccttgatctcctgggctcaagtgatcctcctgcctcagcctcctgagtagctgggactccaggcatgcaccaccacgcctggctcatttttgtgtattttttgtagagacagttttgccatgttgcccaggctggtctcaaactcctgggctcaagcaacccacccaccttgggcttccaaagtactggaattacaggcatgtgccaccctgccgggccctagttttctatttaaaatccccaatgaaggttaaacaaaatgagaggcttaaatcttttgggggataagttgattatctccctggtttactaatttcttactaaggcggtcttttgtttaaggaagacatgcaaatgggcacaggatcttagcactcatgggcaatgctgcaggggcaggttcactatgctatgtgggcaccaggggtggaactgaggccatttccatttcaaatattattttgttttcaagtcataaggttgtctagcatgaggtacattgatatttcagaattgatcttatagtagttcaaatctactgcctcttaccattttcttgttttctagggatatacctagaaagtctattgcacttcagtgccatacttgcacctgaaggaaggaagcattttccttttgccttattttttatttttatttttttgagagggtcttgctctgtcatacaggttgaagtccaatggtgcccaggttggagtgcagtggcacaatcacagctcacttcaaccttgatctcccaggctcaagcgatcctcccacctcagcttcccagtagttgggactacaggtgcatgtcaccatgccaggctaattttttgtagagatggggtttcgccatgttgaccaggctggtctcaaactcctgggctggagcaatctgcccacgtctgccatccaaagtactgggattacaggcttgagccactgcacccagcccccttttgctacattctttggagcgtctgataaggagaatttgaatcgtagctcgagagccagaggaagagatgccatcttaataatcacagaaaaagaggaaagcaatgaaaaacattaggatcaagtagacagacattcgatcatgcttttctgccaggagtgaatttccatgatcccactgatgacttagactgttctcccttgattcaggctctagagaagcattcaaacgttgggactatatttctgacatcgttattaagtgattttactacagatgagaaggcttggaggtcttcccctatctcagcattgtctgttctaaagcctaatgcagctttgtctgtatttgctgaccaggagcatggggaagtgattgactgtgtgcaggagctgagccactccgtgaacaagctgtttggtctggcgtctgcagccgttgacagatgcgtcagattcaccaatggcctggggacctgcggcctgttgtcagccctgaaatccctctttgccaagtaaggctggggaactggggaccagacgggccacattggagcagtgtctgtcccagataaaaatgcacgtgttctgtatttgttctctgaaccctgggaaacacttgcacctgaacccaagaggatgttgttaaggatattcatagtggcattgtttgtaatggtggaacatttgaaacaacgtaaatgtctacccattagggaaggttacttaagatgtgacatattcgtatgagggaaacttgtgcagcagttaaagtatgttaagaaaaaaaaagaaaccttagacaagttaaatttaacaaagtttatttgaacaagaaaaaggacctttggcctggtgcggtgaatcacgcctgtaatcccagtactttgggaggccaagacaggtggattgcttaaactcaggagttcgagaccagcttggccaacatggtgaagccctgtctctgattgttccagaaatactgagcatgcctctgtgaactgtggaggctccttggacccagagctccctggcattgccatcgggcatccagcacctcccagggcagttccacgtaggcatttctataggaacacatcatctggtgtggccggatgagcctgaatgtgttcctgcagaaaaagaaacatcaggctgggtgtggtggctcacgcttgtaatcccagcactttgggtggctgaggcaggtggatcacttgaggtcaggagttcgaaaccaccctggtcaacgtggcgaagctcatctctactaaaaatgcaaaaatcaggtaggcatgatggtggatgcctgtaatcccagctgctcaggaggctgagacataaaaattgctgaatccaagaggcagagcttgcagtgagccaagactgtgccatggcactccagcctgtgcaacaagaacaaaactctgtctcaaaaaataaaaaataaaaaaaaatcaaaataatacatttccatattaagcattcaaactgtacaaaagtatatctggaaaacccaggccatcttctctaaaagggaagattttgaagttaccaaaatagctgatgcttataaaatcagggaaatcaggttgaagctaacttgagcagggttcaaatggcacattgttcagtagtgaggagggtttggggaagggtattaagggaggcaggggcaaggagaacagggtatgcaggaaaggcaggtgcaggttggcctaactcgaactaggatgaagcatagagtatagtggccaaccggtggttcaagaaggaggggtattaagactgtgatgggcatgggagctctggacacttactagtggggaccttagagatggtagtgttcctctctgagtaaactgatgatgacaatatctcctttccaaggaggttgtgaatattaaccaaaagcatatcattaaagcccctaacacggtgactctgacatggttgacaattggaaatgtgtattgtgagaaacagctggagggtttgggaacaaaaatgatgtgatgaaagctacacttttcctctgagatttcatgacaaaccatttagaattctggattgacagctaatgaaatagagaaagcatttgcttataaccatacctgagaatagtggctaaacaaaactccttctcctgcagtgtgtacctgctctttctgcagagcacatggatatttgccatagttgcagaggtggtgacatggttgtttaacttcccatggctaaagcacaatcatgttccttaacattcccctgtcagtttgtgcttgaggccagcccctctccttcctgggacttataaccctagaaagctgtcacctctcttggtgcaaggggaaggtgttgtcagtggtactctgggttttgcagctttccacctgaaagcatcgagctctctgtaaagggagcagcaggatcatttgcagtcagtggagtgacctgaagccgtttcttccagttggttcattgagtggcctgtgtctccactgcatggactgaccttttggggctgtgccctgggtcctcacatttcactttcctcatttagagcttcgttttgggaggggcaagcggcaaggcctcttgtgatgcatgcaaatgtcacaggtttcgtagctttcagaggacatgactccctcctttatgtccagctctgtgctagttcctggggatataagtatgtggcacaggtttcgtagctttcagaggacatgactccctcctttatgtccagctctgtgctagttcctggggatataagtatgaggcacagactctgttctcccagagcttaaagtctagcagcagcaataagcatcatacaagctatttctttatctggagacagggtcttgctctgccacccaggctggagtgcagtggcgtgctcatggcccactgcagccttgacctcctaggctcaagccatctttccaccccagcctcctgagtagctgggactacaggcatgcgccaccacgccaggctaatttttgtattctttgtagagacaaagttttgccatgtcacccagtgtggtcttgaacttccatgcacaagtggtcctcttacctcggcctcccaaagtgctgtgattacaggcatgagctaccacacccgcctaatttttttgttttttttagagatgggatctcactctgttgcccaggcaggtctcgaactccttgagctcaagtgatcctccctcctcagcctcccaaggtgctgggattacaggtgtgagccaccatgccctgtctaaacaagctgtttaattacagtgttttagatgctgtgagggaaaagtatgtgtgtacagtgagagcaaacaacgcagcctgtgagggaggatctcctggctttgaatccactttcatgcgtctgtcccattaaagtcagacacttgccagccgtgaaactttaatctttttgccacgggtatttaatctaaatttagaggatgagaatgatgcagaggtaccttggatgtcatgaccttccttacgttatcccaggtcacagtcagttattaccatgggaccgtgatgtttaaacagttcttcaaacctgctttcacagaaatgtacttatctggatgaggggggatttatcagcatcatctctcacctggttgctccctggagtcaacttcacgattattccttccttctcctcttgggcatctcttttagaaactgctcaaccaggtggtgaagacagtcttgccacatagagaagaactttttgtgttcagaggtttacaagcagtttcactcgtcggtgggagcctctaaagatgctctcaaggccattagcaatttgtccagagctgtagaattccaggtctctttagagttggggaatcagtggtgacctccctaccattttcttccctttcccggcaggtatgtgtctgatttcaccagcactctccagtccatacgaaagaagtgcaaactggaccacattcctcccaactccctcttccaggaagattggacggcttttcagaactccattaggtaaaccgggggttgtaattcaagcttgttcctaatgtagccagcataaacatgcatgatatagtatataaaaatgacaaatgtgtttggaaggggttcgttttttttctttcactgcctttttaaaaagcaaatactccagactctaaacacaaaccaataaaacccaacccaaaccaaccaacaaaaagacccctccagctcttaagatatttttaaaagttctttacaaatgcctcatctcctttaatgacttaaattttttatatttgatgtgagattttttacccccaccttagcgtatagtttttatagacctaaaataacttagggcttatgtattagaaaatgcataggtgatcggatcctgtttctggatctgagaaccatggtacatggtactaaatggttccaggcaacgctatttggcctggaaagggccatttaagagttcagtgaaagggctgggcttggtggctcatgcttttcatcccagcactttgggaggctgaggcgggcagatcacttgaggtcagtagttcaagaccaacctggccaacatggtgaaaccccgtctctactaaaaatacaaaaattagctgggtgtggtggtgtatgcctgtaatcccagctacccaggaggctgaggcaggggaattgcttgaacctgggaggtggaggctgaagtgagccgagatcctgctgctgcactccagcctgggtgacagggcaaaaccctgtctcaaaacaaaaaaggttcagtgaaaggaattgaggtgaccttctcaagtcgttgttgagggccagattctggaatagcctgtgtggcctgtgggccactaggtagacaccctattttgccccagtccctgaggcttgatggaggttcgatcagcagttgcctgagaagatttggtccttgacatgtccagctggagagcatggactgttggcctatggccagatttgacctatggacatgtttgatcattgcagtttttaacaagtggatttgttgccaatatttaaaaactagatttaacatgatccggatttctaatgtcacctaaaaaatgagatgctcaggcaacactgggcctgcattgtcatagccactggggctggcagcaggggtccctgagaaactgggcacgggttccctgttgtgcagtgcttctctcctctcccaagtgggctaatagtgatacgattaggctctcagaccacttggcagagaagagaagcaccatacaacagatgaaaagcaggctgggcacagtggctcacacctgtaatcccagcactttgggaggtcgaggtaggtggatcatctgaggtcaggagttcaagaccagcctggccaacatggtgaaaccctgtctctactaaaaatacaacaattagctgggcatggtggcacgtgcctgtaatcccagctacttgggaggctgaggcaggagaattgcttgaacctgggaggtggaggttgcagtgagccaagactgcaccattgcactccagcctgggtgacagagcaagacctcatctcaaaaaaaaaaaaaaaagcaatctggaagtttctttttcttaaaaccattcttcctggatatattttcccaagagagaaatggccgttcacttggcgcacttcacccactttcatgtcttacctgacccttgcccgtgacacatgtggttcttaatgcggtggcccatgccagagcagacccagacccacccaaggccgttgggtagatccaggaccactcaggaccattttagattattacctcacctcacaggctctgttctggattgttttgatgaaatttaatgttctatgggttgataggtgcagcaaaccacgatgacacacgtttacctattaacaaacctgcacgtcctacacatgtatcccggaacttaaaataaaatttaaaaaaaatgtaatgttctagatgctaactgtatcccttatcacccgtggtggtttggtattctggaaaatattatgcacaagtttgttctgttgcacgtaagggaagtggaatattttaccttctcataaacttttcttatgatggaatgcctagataccctggtgatgatgggcacttttagagaaggttaaaagttaactagacttaagatgtttttaatccttggatttgtcctgacattatgagtttggtgttgaaggacccagcagctgggagtttgaggcttggcataaaattacttgaaaattaaaggatcattcaatacggatatgatggtcatttgggcttatctctgagaaacaaatggattaatcttcatctgcctttcatatgatcagggaaagatacttctagtaccaaaacattttctgtgtctggaaactagcaggcatctagcaaatattaagtgatacattttttttgtttttaattttagatacaggcaggatgtggtggctcactcctataatcccagcattttgggaggccaaggcaggcggatcacttaaggtcgggagtttgagaccagcctggccaatatagtgaaaccccgtctctactaaaaataacaaaacttagccaggcgtggtggcgtgcgcctgtaatcccagctacttgggaggctgaggcaggagagtcacttgaacctgggaggcagaggttgcagtgagccaagatgacgccattgcactccagcctgggtgacagagcgagacttagttgcaaaaataaataaataaataaataataaattttagatataaaatatctctaccctgtttttctcaaggacaaagctgagtattttggaaatgtaaaattatttgagggggccatggatagaattgtgctttcgtagcagagatgccagtgacaatggaggttattggaagggaccagcattttctttttacattaatgactaatgaatgaaacatttcaggccagcagatgtttaacggctttcccagaaccagaactacccaaaggagcaaatagttaggatttttatgaataagacaatgtttgtcctgtaaaggctggcattccagatacttgaacttgaagtgctttttgttttgtttaggataatagccacctgtggagagcttttgcggcattgtggggacttcgagcagcagctagccaacaggtaggagagaggagtcattgtcctctacaccctggggttcctgatcagcacgagcttggtctagtacacagtacagcaaggacagcatatgccagatgtgaaggccacagggctggaggactgtctgtacctagatacagcgtgtcattattgtcatcattaaacgtttattgagcacctaaaaagggcaaggctttgtcctacttggcaggggtcacgtaattttggtttgatatggtggtttcagcctaaatgaggaaacagtgcatcttgtctccaaattaggaatgggcttggttccgactgcttgtttataaattagttgttgggactaaaaataaatttccatatagaaacggtgtgacaagtggtggtgaagtcccttgggccagccttcaggatcggggtgaacttaggcagcctgccttctgggtcctgcagtcaaattccgtgctgctgaagggctgtgtatcaaaggggaatctctggggtctgccctggaaaagcttgtcctactcccttcctctcttctcatacctgccagggcttttatgttgccctgaggtggccttcctcagacagtttttcccttcaaggggctctggcttcccacatttctttctttatccctttaaatgaaatctcttgattcccttggtatggctgatgcctctattccttaggagttaaggggaagaagtctgtttcatacagttgtttgagggaccagcagcaatcccttaacctccttcttaggtgattctttattgccctaaagtaatctctgggtgatgaaatttttagtggtggtacaaagtgaaatgaaagcaccactgttccaaaagtaagtaatgggtgctaggaaaatacagaggagccacagcaatctccctatatctggcccaagctgcccaggatgagagaaatctctcagatgagatttcaactcggccttgctttactcagcccgtaaatcacaaaatgatccctttctgcagagaagtgatcataagagctgggtggccaatgtcaatcttgtcactggagcggcccagcgcgttctgacctgttgcctctgccacccgcctgttggtggggagtggtccttggtaggagtctaggtgctgctggtgagattgatggggagataagataagctttacaggtgcctgccacatacacacacacacacacacacacatgcacgcgcgcacacacacacacacacacacacacacacacacacacgcatgcacactgtgcagccttccagccaggaacacagatggtgactgtccctttccaggcttagtgcttccaggatgacatcatctctttcaggagctcccttggatacacccaggctgttcttgacttgaagctcagccaggctttcagcctctctgggctgcaaaatgcagcccagagaggcccatcttttatctattgtgtccccattcgtgctcctaaccagtctctccttacccttcagaatgtaatacttgatttcattaagagattaaggaaaatctgtgtcctaggaattaccatttacttcatttatattatttacacacactctactgtatgcctgtggcactttggttttattcactcccgaaagtcaggcaatttctgtgctgggcattcaggagtgagttaggaacagcagcagctgctcccactctatcctgctgtgagcctttccccataatgagaaccatcacaaaaaatcttggactaaagacagttggtggtctcagaaatgacggaaaacaaagaatcgtgagaagaaactgccaacaaagagcacagaccttccttagcaactcgcccctacctcctgccccaacctccccccgccactcggcctctcccttctgccctgctcaccccctgcctcccgccccactcgcccctacctcccgccccactcgccccctacctcccgccccactcgccccctacctcccgccccactcgccccctgcctcccgccacactcgccccctgcctcccgccccactcgccccctgcctcccgccacactcgccccctgcctcccgccacactcgccccctgcctcccgccacactctcccactgcctcccgccacactcgccccctgcctcccgccacactcgccccctgcctcccgccccactcgccccctgcctcccgccccactcgcccctatctctcgccccactcacctctgtctcccactttactcacccctacctcccttcccactgtgccacagctttcctgggctctgagctaggtcttggggatatcagttaattaaactcaatcctcgccctcaaagagcttagaaattaatgggagcatccagcatgtgccagtatgctcattgctgtgccaagagaacgcagtgtgcacagaggagggaggattacaattccattggttccctcaactgtgacaagttattgcccacttctcagccatgggaacttgtaaatttatgctagatttccagaacctgactgtctcattgaactgtcccccgaagacctggtcactaaagccagggtcacccatccttcaacagttgtggagcccctgccacgtaccaggcactgtgctagtgctagtaattcacaaatgaagaacagtccgtgttttgtcctcaccgtccagttggagggaaatgagacagcatgtgttaaatgcagaacagaagcaagagccctttgggagctctgccattggctgatggcgcagagggctgaaacctcctggggtccttaaggcctctcctctaccaagcctttctaatgcccctgtgaagcactatctttgggaaaaagccaaaatcagatttgccttctgggaagatcattctgctaacccttaggaggacagattaagtagaacttcgaggactagaggaaggggaagccagttagttggaagcctgctgtgatccagacaagaactagtgaagactggaagtaaggcaatggcagagacaggccacagtttgacagataagagacccaaccaaagttactggttggctcaagcaacaggaagaacgaacttgaacttaatggcagaggcaggtagctgcttatgtcagcagtggcttctgaggaagatcgtatcacagggatttatttgcaagtacaggcatttcttgaacaactcaaggatctgtttttgaaatagtgagtgcatcctaaaaactgctatgtccaaagcaatgttttcataagaaattacagtaaaagagaaggcagggaattagccacatttgggatgtgtcataatgtgttacacatgttcatgtaattctgtacatatttagatgggtaggatgggtggtaaagttgggctaaggaaaacagggtggaggtcaagattccacttccccagcagtacaaggggtggattatcatatgaaacctcctctaggcgtttgtctttctcaaagagtttggaaagtgccagcctcaatagatctctctgtagcacctaaaccacaaaaataaacctcccagtgccaccaaacacaaataccatgcaagctcggcatgtaggacaggtgggcccatgggtaaagaggcgtgcagcgagctgctgtcactgttctctaggagccagccagctgctatcctgcccagcggtctctctgatggtggtgctggtggtccatgctggcatttgactgttctacaccctgatgctcatatagcaagaaaagtctccatagaaggtgcacagtgttccagactaaactgagagctgcccctatgtaggctgtcggtcatattagggagatagcatgttctggcactgtgaatgttcagcaggaataaaaacactgggttttttttattgtgcacctgaggtccagctcactcctcaatgatgaagggcagcctttcgttgccttataaactggaccttaattcagtctgtctcatgaggattatctttgaatttagtaaggagcaatctgactgctccaagaagaaagttccatgcaaatagctcagggcataatggtcattcctttcattacaggattttgtccacagctgggaagtatctatctgattcctgcagcccccggagcctggctggttttcaggagagcatcttgacagacaagaagaactctgccaagaacccatggcaagaatataattacctccagaaagataaccctgctgaatatgccagtttaatggaaatactttatacccttaaggtatgagaccaaatgaatggcattcttgcaaatgaaaggcttcttctcatcactcaccctctccctctctgggttacaggcgggccctgtgtgtggccctgggctgtgacgtaccctgctactacctctctgtctcatttatgttgggattttaaggagctaagatattaaacttgaaacccattgagatacagatgtagaggttagaagagatggatctttattactgataaaagccaggttagagaatgtggctttaggccaggtgtggtggctcacacctgtaatcccagcactttgggaggccgaggtgggtggatcccctgaggtcaggagtttaagaccagtctggccaacatggtgaaacccggtctctactaaaaatacaaaaattagccaggtgtggtggcacgcacctgtagtcccagctacttgggaggcagaggtgggagaatcacttgaaccagggaggcaccggttacagtgagctaatattgtgccactacactccagcctgggtgacagagcgagactccatctcaaaaaaaaaaaaaaaataggaaaaaagagaatggtgggtttagcatctgcggctagggggacttgctgtaattcactccagaatgaaacttgtcagccggtcagacagagctggacagcccctggccctgttcagggtcagcctcctgagaggggaccagatgtgtactgcttgcaggcaggcagaacctgtaatagaggatcccaacccaggataccaggaggagcaagagaagtcattactcttttccaagggagaagccaggctgcagagtcaccaggagtctacccaagtacaagttcttccacatgggaccatgaggacttggggattggtgttccctcctggtttttttctttaaactcttagtttgcctgccataacgctgcccttgactttgagccccttggggtccagggacaggagaacttcctaacaaatggaatgagtcacacaattccttgggaatggcttccagggtcataagaagaccgtgggcatcctttgcagaactgtcctcctccctcactggtctggctttaacttcactcttggtgatagacagaggagacattgctgttcctggagcaccagatgcagtagaaaattttttcttttgagatggagtctcactctgtcgcctaggctggagtgcagtggcacaatctcggatcactgcaacctctgcctccccgcttcaagcgtttcttctgcctcagcctcctgaatagctgggattataggcatgcgccaccacacctggctaatttttgtatttttagtaaagaaagggtttcaccatattggccaggctggcctcgaactcctgacctcaggtgatctgcctgtctcagcctcccaaagtgctgggattacaggcgtgagccactgcacctggccagatgcagtagaaaattatccacagcctagagctctggaatgaactgcacagggggcctgaacatgtctgaggcttcagtgctattctcccagggcctccccatctctttgcaccttgacccaccaactggttgcattgagcttgacaaacacttcgtaaagcaattctggaaactcattcatccatgcttctgtgattaggttaaagcaactctgtttatctttattgctaatctgatttatgtctgttgtaatcagttcatttataataacaaaactaaggttacactttccatctctattttctcaggctatttggaattccttgggactcatggaggttgtacatactttggctttcagccaagtatatttgacctgacctccccgggaattagggctctgtccatcactctgatttatatgtgaagcttctgatcttgtttcccccctctttcccacctcctctatccctgagggatggtcacaggtgaatttttcctaaactgcttgtccatgagctcatgttagcccaagtgcatcagaatcacctgggaaagtgaatttaaaatctagatttctgggctccaaccccagtgaactctgatgcagtagttctggggtggagcttgggaatctgtaattcagcatgttctccagaggggcctggggcacagccaggtttgggaaccactattgcatagaacccccagttctcctgtgagttttcaaaatggttaactagctaatacttgggttgggtttcaggcctaacaactgccttttgcattttcttgtcttaggaaaaagggtcaagcaaccacaacctgctggctgcacctcgagcagcgctgactcggcttaaccagcaggcccaccagctggctttcgattccgtgttcctgcgcatcaaacaacagctgttgcttatttcgaagatggacgtgagtttctcactgaccacatcaatttttcccgggtcctgcctccaactcaagcatactgagtgtgggcttaaccctccctgttccaagagctttgggaagatcccgctttaactttcccaagccggaaagagccactttccaatttcacctcattgcttagcatgaatttcttatctttattgtagttactctgatactttattcacaggcggttctcaggattattaaaattgcttgattaactttccctatttggagcagcagagaagtaatagagattatgtgcagcttcgtaggttaggccaggtcagaagagctaattgtcttttgagattgaattattttcacaccacacgaatcatttctggagaattggttctggaactttactcaggggagtaccttatcagaattgaacttgtgtttttgagggggctttggagggttctgttcctttctttccttgataccttttctgtttggctgtttctagaatcgactcactttcctttcctcacaccctcttctcttttctggttgtccgaattatttttcaaggcattgcctgttctattttctctacttgctgtctttcccctgctccagatcttgttactttccttttggattactgggcgggacagccccctggttaatgtatcttactgacccttcagggccatttggattccagttatgggcctttaataaccaagagatctttttacaaaatgacaagaactcatctggcaaaatcaaacgtgctctcctttctgccaccctctagaaagcctgcaaggctgggagtccagggctcctgcatggtctcagtcaggcctcaccccctcactgggagtcaggattcccatccgtaaaattgctcagttaaacgacatgatcgtgaggttccttctacccttgaagtttgtgattttcactctttatgatttttctgtgcaaaatgccatgagatctatttcaatcagattttgtatttgtagcgcagaaggggacgtaaagtggaggagagctgtagcagaaatgaggcgggtgccatcacatggctgagttattccttcctccgtgagcctccgtttcctcatctgtgtgatggggatatagtaattcttatatagattgatgaggattaagtgagattttgtatattgatagaatttagcatagcactggccacagagtagatgtgtaataagtggtagttttcttcttttctgtggttctcatttttaagaagaatgacttacttgatttttttaaaataaaaattgtataggtatttatttttagaaactcaagcaatacaagaaaatacaaaaaaaaaaatctaataaatacctccaagatcccaccattgagaaataatcagcgtcagcagtttgatgtccagcaacccagacatctctttctgcacgcctatacatgttaaaggctgattgggcatcagtggatagatctataggaagaaatggaattatactataatgctgtttttaagaaaaacaagatatgcacaatataattttatttgaatttaaccagaaaaaagagacactaaatgaatctaaaggaattattgaacttgagacatttttcttttcttttctctttttttgagactgagtctcactctgtcacccaggctggaatgcagtggcacaatcttggctcactacaacctctgctgcctgggttcaagtgatcctcctgcctcagcttctcgagtagctgggactataggcgcctgccaccactccaggctaatttttgtattttttggtagagacggggtttcgtcaggttgcccaggctggtcttgaactccagacctccagtgattcacccacctcggcctcccaaagtgctgggattacaggcatgagccaccaagcctggtcgagattttttttttttctccacgaaagatactcattccccagaagctctctccaaggttatgaaaaaaagattatgagtatgaagagattggagttgccattgctttttgttaatcctgtttccattgcagacagatactgatacatatgatccattgaaaaacgaaaggattagctttctttgtctctctcctgtctcctccctcacctgcagattgggttgtttgtattatttttattttgtcaaagctgacggtactgaccttctgttctgaaacctcagtgcttcccagcttagttctacatttaaacaggggtggtgcttcccccgtccttttccctctacttctgcattccagagttcattattgatggtggagttcctgggtgcttggccctaccttctcattccggcttcaccacagcaccgtggccccttgggaatgggcgcaggtggctttggagattaggaggagcactccgagggtgccagcacacaataccaaggcaaacactctggccttaaggatttgaaaattaaaccctggtcatcaaatgtttgttttcagcatttgctggtaaattctattgcccttttatattccgagactacaaaccaacgctatatttgatttcaaaatggattattgaagtttacctattttacctggtgacagatggatagaaaagcccatttgaaggacactttaaataaattttgaacaattaaaaaatgacctgcagcatttccctattgccctcaagtgacattctctgctgtttttcccccccccttttttttttgagacaaagtctcactctgttgcccaggctggagtgcagtggtgtgatctccactcactgcaacctccgcctcctgggttcaaacacttctcatgcctcagcctcccaagtatctgggactacaggcaagcgtcaccacacccggctaatttttgtatttttagtagaaatggggtttcaccatgttggccaggctggtctcaaactcctgggctcaagtgatccgcccgcctcagcctctcaaagtgctgggattagaggcatgagccaccgcagccagccatctgctgctttttaagcaccctcctatttcaagccactctgtcttgcgcttcttccaaacttctttcccactccagctgttctttccctctctcctctgcctgttcatgttttgaggctgctcctcctgcctcccctttgaggcctttcctggggcctccaggctgcagttcctgggatggatggcagcagtgcttgtcttcgccctgcacattgttacctgctcttggtctcctggaagccgttgcttctccccacactctgcttcccagcctgtcaccatctgggctcccttgctgcacccctctttgccgacaaaccaccaaggattgctgtcccttccttttctctgtgtcccacacctgtttccacaggggattctcatcatctctgagctgtttttgagcttttcatctgccccccaccccaattttctgcagagctgctgtattcaccttcacaaagcattgttttggttttatctctcctcattcaaaaccctccccagggctagtctgattgtctgtttttagcaacttcttatggaccttttcacgcatacacagaagtagggagaagagtataaggaactccatatactcatcacctgctccaaccatgatccactcctagccatcctgtttcatacataccccctcatctgaaatagaaggactctaaaaataatcacagtaccatagtcaaccctaaaaaagaaaaagaaaaggaattcctaatgtcatcagtgttcaaatttccagttgttttataaatggcataatttattttaaccctttgagtcaggatctaggatccaggatcctgcacgtagagatttattgggatgtcttttttgtcatttttgaatggtaagtttcctctctctttctttttcccttgcaatttacttgttcaaggtaaaggctttacttagcctggtgtttaaagctgtgccttctccctccagcctctgtctgcctctgtgtaccgcatacatcctatggccagccgcttctctaatcgccctgagctcttcttgctccttgcctctgacaccgagagctctagaagtgggaggcagcactcatgtgtctgcaggggggagaggggaggggccagaacaggataggaggtgtgggggtgtacagggtgggagtatgtcagggggtcttgcttccccaagtagctcccttctagagagcaaggagcaaatcttacatttctttgtctcttctctgcaaagcttagcacaagacactcgacatcctgggtacttggtaaatgtggatggttggcgtgttccttctcgctggattgggagttagctggaaaaaatgtaggctcttttgagacaaaagagcattcgcaggcaagaacaaagagtctagaaaactgtaggacaagggttgggggcacctggggtggggaagaaaagagctcatttacatcaaagaaaataagaccgaatcaagtgggcgctagagagcacggggagggctgccgaggctgagcctgggctgggagcccagggttggacatggtcattcctttcccggaatgctacttaaaggatcaggcaaccggatccagcatcaggtggctgcagacagtagttcctacatgaccgccggagtcactcccggagttcagccagaaagggccttgttttccaggctggctttagagtggctcaggttggaagtaagaagcgagatttttgtgtgaaggtgtgccactctgaagtctgtgagcacatgtgcacaggtcctttacccaactctatataaactgctgggaaggcttccacaacaacacggaagatgtttccactccaaatggcaagaaacacgtgttagtgctgaggttctcctcgcacagggggactacagagaggccagaggggcagctgttggggtttggaagtgccgtcccatccccatccctctgagttctgatgagttgagaaacagatccagaaggtggtgagaaataaagcagcagctttagttgaggtaaagcagtattgccgatgaggcttggctcttcctgcagccagaggggcttcctaggtctccctcccagataagagactgacacgtggcctctgtgggggacctcagggtgccctgttctccttagggtgctaaggacccacgaagtagtgaggctgtctgcacccagcacctctctacacagtggccccgctacgcagagaaacttggaccaaaaatatccaactttctcctgttacaatctcagcgagataaatgaaagggatcagttcccaccccacagttcagccaatgtggcagttcctgtttcatggacctgcaggaatgcggagagagaaatcgttgccttctgtatggcgggcttccaggtgaagctttaaagaagagaagcccctgcctgctgagtggtggaggctccaacggtcagctccaaccaaagacagtgcctccagggaaggccatgttcttcttgtgtatttctgggtggcgtcttcacagctgcctggctgctaggtactgattgtgtcctctcgttccacccttagagctggaatacggctggcatcggagaaaccctcacagatgaactgcccgcctttagtctcacccctctcgagtacatcagcaacgtaagagcttctgtgtgcttctccagggtggtccaagtctttcagaccttccttgtcttttgattcttgcccttatagtcatttccccatgggtgctatctgacccttttgggtagcctgtgctttggggtagtctgcacccagatcctggactttaagaagatcagcagagccacatggcgattccagaccccagcacattctcactccttcaccatctctccctatatgagatgtggccagtacctgagggcgtcagagttgagagtctaatgggaaattctgacttgggaagacaggaggcagatggccaattcttctctgtgactttcagaagagtagtgtgtgtttgtggttgtgaattcaaattcagccagcttttagtgatcacctactatgtgccaggctctgtgtggagtgctttcatgtttaacttcatagcaacaaacaaatctcttcagaagaattgcagttatagaggcttaatattaaaagagaacagaataaaccatgcaggggaatgggggcacgtggagtccttgctgccctccccattcacccctgggaattgacagtcacccagacacctgcacatggcctttccttccgttacttcctgcagtctagctcaggtgctcttaaatgtcagtgcgcacaagaaacactatagaggagtaatatgtgccaaaccacactcacctcacacaatgggagatttctgagacttttcaaggtgatttctgccttacgctcttgccttagaatccaacccctacgtgtaagttgtgactctgccaaaatgactagaaaggaattttagaagtattataaatgttaggctgggcatggtggctcatgcttatagtcacagcactttgggaggtagaggcgagagaattgcttgagcccaaaaatttgaaaccagtctgggcaacatagcgggaccccgcctctacaaaaaagtaaaaaattatccaggcatggtggtgtgtcctgtggtcccagctacttggggtgctgaggtgggagaatcgcttgagcccaggaggtcgacgctgcagtgagctgtgattgcaccactgcactcctgcctgggccacacagcaaccccctgcctcaggaaaaaaaaagaaaaaagtacatgttgtataattgcaagaagtgcatggcagtccctctggcaggcagtgaggtggctggctctctgctctctgttcatttggggcagtatcaagtctaaaacaacagtcatttcccttctatttcccagggcacctgataccctctactgatgaaactgttaagatgtgggttggtctttacaacccatgggaataatctgattttatttttatttatttatttatttttgagatggagcctctgtcacccaggctggagtgcagtggcgcgatcttggcccactgcaactttggcctcctagattcaagtgattctcctgctacagccttccgagtagctgggattacaggcgcccaccaccacacctggctaatttttctatttttagtagatacagggtttcgtcatgttgaccaggctggtctcaaactcctgacctgaagtgatctgcccaccttggcctcccaaagtgctgagtttacaggcatgagtcactgtgcccggctgaatgatctgattttagagcagagatagtatgcttgcagtctaaattgattcagaaaatgatggtgctggaagggacctgagtggctaccaagttgattctaaagttgaagaaactgaggtctagagagggaatgagggctaggaggagtttccaggcccgggcccttccctgcctgctgctgtcctcctgagctgtacggaggctgatgacctgaacccaggaaaggaacacctaattgaacacgtactgtgtgcagagacagtgccaggttgtttagtggctgggccagatcatgtccatgagacaggtgtggcagccctccttcacagtgggagtggggctgggaggaagcagcgacttacccagtggctgctctgttaggacgccagctgctttacgtgcatagcacacgtattaattctaccctcaccacaaccttttgaagtaatatgaggtcatcctcatttcagcgatgatgatccgaggtcctgacagattaagttgcccaggttctcacagtgatagagccaaaactccaacccaagtctgtctgacctcaaaacttttcatttttcccaagtcagtgagttaacccaaccaggatatcaagaaatattgattgcatatgtgagaatagtagacaaatacccacaggtgggatgctaagcagccctttccatattgatttccaaggagtgaatagagacaagatccctgagagaaacctgcactgtgagatctaggaaccccagcaatccctacagtctaaggccaattgattgaagttagagatgtcagattactgaaatttttcacctaaatgatactttgccttgttggtgaaagccctcacccacacagaatcatgtgagcattgtaaagagatgaaataggagaaaatgctttgaaatttaaaaacaatatatatgcaaggtaaaactgagtctgtggacttagccaaagcttatggctacagatgaaaggtataccaaatataggagtatgtctggggtctttgtacgtagtaggtgttcaggaagggcttgttgagaggaattattgtagtacagagaaattccaacaccagaaatcagcatccttctcttcccccagccttggggaaaaatgatgaatttgttaacacttcaagctgaaatttacagtagctgttgttattagtgaggtaagtggccacttgcttactttgggtgaaagattatactaagtacatgaaagaaaaaaatgatttattttaccatctgtgtacctcttataaagggacgccagtccaggcacagtgggtcacgcttgtaatcccagcactttgggaggccgaggtgggcggatcacctgaggtcaggagttcaagaccagcctggccaacatggtaaaaccccgtctctactaaaaatacaaaaaaaattagccaggtgtggtggtgggcacttgtaatcccagctactcgggaggctgaggcaggagaattgcttgaacccaggaggcggaggttgcagtgagccgagattgcaccattgcactccagcctgggcaacaagagcaaaactctgtctcaaaacaaaaaaaagaaaaaagaaaaaaggaacaccaaactaataatggatgtttacacttacacagccaaaccatattgaatgtttggaaagaagggcatgatcatcctgtagttctctggtctgggtagattttcgagtctgtgttaacttctggacactacaccctgaaaggagcccgctgttacgtagacatgtgtgaggccagattgagaagctcttgctttgatagtctcctgacttttagtttacagagttaattaacagtgacaggaatgtcatggaatgaatatgtagcaggaagaaaaaaaaaacaacaacaggcagaaagaccttttaaaaacatatattatcattttgaaacctgaaaagtcaacccccttattttgaaacaaaacacatacttaaccttaaaacacaaaacaatgaattacaatagaaataggaaacagtggtctaaaatacactcttggcatcacgtggatatctgacaaacacatgaccaagactgtgctaattgtgggcatgtcctaaatgtcttttaggacaattgcaaatgaccttttgcaattccccaccagccaaggttttgtctatctttagtttcaagagtttatattatgaaaacaatatagttttttctccaaagtaatttatagttataaatggctttttttcaaacagaattcctttcttcttctggttaaattatctaggagggagagaatcagatccaaatccagaagacaggtttttttttttttttctgagacagagtctctttttttttgagacagagtctgcccaggctgcagtgcaatggcatgatcttggctcactgcaacctccgcccccgccgagttcaagtgattttcctgcctcagcctcccgagtagctgggattacaggtgcctgccaccatccccggctaatttttgtacttttagtaggatagggcttcaccatgttggccaggctggtcttgaactcctgacctcaggagatccatccgcctcggcctcccaaagtgctgggattacaggtgtgagccactgtgcctggcctcagaagacaggatttgaattcttgcttggccccacacattctgacactagtatcttactggtttttcacctatgaacagtaataatacttatatttacacaatgcttcaaattttacaaagcattttgatatccattacttcattggagatagagattgtgttgaatgcatttcaaaaatattgaggtcattataagaaggatgaatctataatctatatgcaagctaccagtgattcttttttagggtactgccataacaagcatcgccacatactagaaagatcagacttgggatcacccgaggtctagcaattttgtctctctgccgtttgccttcacacaaatgtacccataaagtaataacccgtatgtgtcaatgtcaggctaacagcgctttcttttgtttcagatcgggcagtacatcatgtccctccccctgaatcttgagccatttgtgactcaggaggactctgccttagagttggcattgcacgctggaaagctgccatttcctcctgagcagggtaagcggggaccgtttctggcgatgttacaagtcaagctgtcagtttccagggtagaaactccagatgacaccttatccttgggctcatttgtcaccaagtcctgtttttttttaaccttctaacatgtactttttgtacacatgctgtatctaaaacaatatcacaacttgaaaaatctataaccacatcccactgtggaacgcactggtatttccactttcgcttgtgccttctggctctgctctgtaagcagatggtattttgtatgtaactttgtattctgtattattgttattattgagacagagtcttgctgtgtcacctaggctggagtgcagtggcgcgatcttgactcaccacaacctccgcctcctgggttcaagcaattctcctgcctcagcctcctgagtagctgggactacaggcgtgcaccaccacgcctggctaatttttgta

SEQ ID NO: 6869 - DNA, 30573 bp, Homo sapiens
caaagtgttgggattacaggcgtgagccaccacgcccggccaatgagggttatcttttgaagggattcttatttgtggtgggtcatgggattcagggggctggtgtctttaatagtgctttaggcaaacaatgtgcaaagcccaaatttatccagatatttgctgaactgattgtaggagaagcttccatgaatgataaaagctgcttaacaaaatatagtcccctctggagatcaaatggggaaagttctagtagagcgcctcttgattgttgctttcccacagttaatttcagattctttgttcattatcgttttacatttctgattccctaaagatgaacacaatctggtaaaagtcacggagctggtggatgctgtgtatgatccatacaaaccctaccagctgaagtatggcgacatggaagagagcaacctcctcatccagatgagtgctgtgcctctggtaaagtcgcagtgtcctggggccactgaggaagcattctgttagccagggtcttggccacgtctgggagagggctgggggttgggatccggggtgctgaaatatgacctttaagcacttgtgggctcttgtaatcccaatgtaaaatgagaccatatatttgctaccaattttctattgattgatggattgagacagagtctccatctgtcgcccaggctggagtgtagtggtgcgattgattacaactcactgcagccttgatctcctgggctcaagtgatcctcctgcctcagcctcctgagtagctgggactccaggcatgcaccaccatgcctggctcatttttgtgtattttttgtagagacagttttgccatgttgcccaggctggtctcaaactcctgggctcaagcaacccacccaccttgggcttccaaagtactggaattacaggcatgtgccaccctgccgggccctagttttctatttaaaatccccaatgaaggttaaacaaaatgagaggcttaaatcttttgggggataagttgattatctccctggtttactaatttcttactaaggcggtcttttgtttaaggaagacatgcaaatgggcacaggatcttagcactcatgggcaatgctgcaggggcaggttcactatgctatgtgggcaccaggggtggaactgaggccatttccatttcaaatattattttgttttcaagtcataaggttgtctagcatgaggtacattgatatttcagaattgatcttatagtagttcaaatctactgcctcttaccattttcttgttttctagggatatacctagaaagtctattgcacttcagtgccatacttgcacctgaaggaaggaagcattttccttttgccttattttttatttttatttttttgagagggtcttgctctgtcatacaggttgaagtccaatggtgcccaggttggagtgcagtggcacaatcacagctcacttcaaccttgatctcccaggctcaagcgatcctcccacctcagcttcccagtagttgggactacaggtgcatgtcaccatgccaggctaattttttgtagagatggggtttcgccatgttgaccaggctggtctcaaactcctgggctggagcaatctgcccacgtctgccatccaaagtactgggattacaggcttgagccactgcacccagcccccttttgctacattctttggagcgtctgataaggagaatttgaatcgtagctcgagagccagaggaagagatgccatcttaataatcacagaaaaagaggaaagcaatgaaaaacattaggatcaagtagacagacattcgatcatgcttttctgccaggagtgaatttccatgatcccactgatgacttagactgttctcccttgattcaggctctagagaagcattcaaacgttgggactatatttctgacatcgttattaagtgattttactacagatgagaaggcttggaggtcttcccctatctcagcattgtctgttctaaagcctaatgcagctttgtctgtatttgctgaccaggagcatggggaagtgattgactgtgtgcaggagctgagccactccgtgaacaagctgtttggtctggcgtctgcagccgttgacagatgcgtcagattcaccaatggcctggggacctgcggcctgttgtcagccctgaaatccctctttgccaagtaaggctggggaactggggaccagacgggccacattggagcagtgtctgtcccagataaaaatgcacgtgttctgtatttgttctctgaaccctgggaaacacttgcacctgaacccaagaggatgttgttaaggatattcatagtggcattgtttgtaatggtggaacatttgaaacaacgtaaatgtctacccattagggaaggttacttaagatgtgacatattcatatgagggaaacttgtgcagcagttaaagtatgttaagaaaaaaaaagaaaccttagacaagttaaatttaacaaagtttatttgaacaagaaaaaggacctttggcctggtgcggtgaatcacgcctgtaatcccagtactttgggaggccaagacaggtggattgcttaaactcaggagttcgagaccagcttggccaacatggtgaagccctgtctctgattgttccagaaatactgagcatgcctctgtgaactgtggaggctccttggacccagagctccctggcattgccatcgggcatccagcacctcccagggcagttccacgtaggcatttctataggaacacatcatctggtgtggccggatgagcctgaatgtgttcctgcagaaaaagaaacatcaggctgggtgtggtggctcacgcttgtaatcccagcactttgggtggctgaggcaggtggatcacttgaggtcaggagttcgaaaccaccctggtcaacgtggcgaagctcatctctactaaaaatgcaaaaatcaggtaggcatgatggtggatgcctgtaatcccagctgctcaggaggctgagacataaaaattgctgaatccaagaggcagagcttgcagtgagccaagactgtgccatggcactccagcctgtgcaacaagaacaaaactctgtctcaaaaaataaaaaataaaaaaaaatcaaaataatacatttccatattaagcattcaaactgtacaaaagtatatctggaaaacccaggccatcttctctaaaagggaagattttgaagttaccaaaatagctgatgcttataaaatcagggaaatcaggttgaagctaacttgagcagggttcaaatggcacattgttcagtagtgaggagggtttggggaagggtattaagggaggcaggggcaaggagaacagggtacgcaggaaaggcaggtgcaggttggcctaactcgaactaggatgaagcatagagtatagtggccaaccggtggttcaagaaggaggggtattaagactgtgatgggcatgggagctctggacacttactagtggggaccttagagatggtagtgttcctctctgagtaaactgatgatgacaatatctcctttccaaggaggttgtgaatattaaccaaaagcatatcattaaagcccctaacacggtgactctgacatggttgacaattggaaatgtgtattgtgagaaacagctggagggtttgggaacaaaaatgatgtgatgaaagctacacttttcctctgagatttcatgacaaaccatttagaattctggattgacagctaatgaaatagagaaagcatttgcttataaccatacctgagaatagtggctaaacaaaactccttctcctgcagtgtgtacctgctctttctgcagagcacatggatatttgccatagttgcagaggtggtgacatggttgtttaacttcccatggctaaagcacaatcatgttccttaacattcccctgtcagtttgtgcttgaggccagcccctctccttcctgggacttataaccctagaaagctgtcacctctcttggtgcaaggggaaggtgttgtcagtggtactctgggttttgcagctttccacctgaaagcatcgagctctctgtaaagggagcagcaggatcatttgcagtcagtggagtgacctgaagccgtttcttccagttggttcattgagtggcctgtgtctccactgcatggactgaccttttggggctgtgccctgggtcctcacatttcactttcctcatttagagcttcgttttgggaggggcaagcggcaaggcctcttgtgatgcatgcaaatgtcacaggtttcgtagctttcagaggacatgactccctcctttatgtccagctctgtgctagttcctggggatataagtatgaggcacaggtttcgtagctttcagaggacatgactccctcctttatgtccagctctgtgctagttcctggggatataagtatgaggcacagactctgttctcccagagcttaaagtctagcagcagcaataagcatcatacaagctatttctttatctggagacagggtcttgctctgccacccaggctggagtgcagtggcgtgctcatggcccactgcagccttgacctcctaggctcaagccatctttccaccccagcctcctgagtagctgggactacaggcatgcgccaccacgccaggctaatttttgtattctttgtagagacaaagttttgccatgtcacccagtgtggtcttgaacttccatgcacaagtggtcctcttacctcggcctcccaaagtgctgtgattacaggcatgagctaccacacccgcctaatttttttgttttttttagagatgggatctcactctgttgcccaggcaggtctcgaactccttgagctcaagtgatcctccttcctcagcctcccaaggtgctgggattacaggtgtgagccaccatgccctgtctaaacaagctgtttaattacagtgttttagatgctgtgagggaaaagtatgtgtgtacagtgagagcaaacaacgcagcctgtgagggaggatctcctggctttgaatccactttcatgcgtctgtcccattaaagtcagacacttgccagccgtgaaactttaatctttttgccacgggtatttaatctaaatttagaggatgagaatgatgcagaggtaccttggatgtcatgaccttccttacgttatcccaggtcacagtcagttattaccatgggaccgtgatgtttaaacagttcttcaaacctgctttcacagaaatgtacttatctggatgaggggggatttatcagcatcatctctcacctggttgctccctggagtcaacttcacgattattccttccttctcctcttgggcatctcttttagaaactgctcaaccaggtggtgaagacagtcttgccacatagagaagaactttttgtgttcagaggtttacaagcagtttcactcgtcggtgggagcctctaaagatgctctcaaggccattagcaatttgtccagagctgtagaattccaggtctctttagagttggggaatcagtggtgacctccctaccattttcttccctttcccggcaggtatgtgtctgatttcaccagcactctccagtccatacgaaagaagtgcaaactggaccacattcctcccaactccctcttccaggaagattggacggcttttcagaactccattaggtaaaccgggggttgtaattcaagcttgttcctaatgtagccagcataaacatgcatgatatagtatataaaaatgacaaatgtgtttggaaggggttcgttttttttctttcactgcctttttaaaaagcaaatactccagactctaaacacaaaccaataaaacccaacccaaaccaaccaacaaaaagacccctccagctcttaagatatttttaaaagttctttacaaatgcctcatctcctttaatgacttaaattttttatatttgatgtgagattttttacccccaccttagcgtatagtttttatagacctaaaataacttagggcttatgtattagaaaatgcataggtgatcggatcctgtttctggatctgagaaccatggtacatggtactaaatggttccaggcaacgctatttggcctggaaagggccatttaagagttcagtgaaagggctgggcttggtggctcatgcttttcatcccagcactttgggaggctgaggcgggcagatcacttgaggtcagtagttcaagaccaacctggccaacatggtgaaaccccgtctctactaaaaatacaaaaattagctgggtgtggtggtgtatgcctgtaatcccagctacccaggaggctgaggcaggggaattgcttgaacctgggaggtggaggttgaagtgagccgagatcctgctgctgcactccagcctgggtgacagggcaaaaccctgtctcaaaacaaaaaaggttcagtgaaaggaattgaggtgaccttctcaagtcgttgttgagggccagattctggaatagcctgtgtggcctgtgggccactaggtagacaccctattttgccccagtccctgaggcttgatggaggttcgatcagcagttgcctgagaagatttggtccttgacatgtccagctggagagcatggactgttggcctatggccagatttgacctatggacatgtttgatcattgcagtttttaacaagtggatttgttgccaatatttaaaaactagatttaacatgatccggatttctaatgtcacctaaaaaatgagatgctcaggcaacactgggcctgcattgtcatagccactggggctggcagcaggggtccctgagaaactgggcacgggttccctgttgtgcagtgcttctctcctctcccaagtgggctaatagtgatacgattaggctctcagaccacttggcagagaagagaagcaccatacaacagatgaaaagcaggctgggcacagtggctcacacctgtaatcccagcactttgggaggtcgaggtaggtggatcatctgaggtcaggagttcaagaccagcctggccaacatggtgaaaccctgtctctactaaaaatacaacaattagctgggcatggtggcacgtgcctgtaatcccagctacttgggaggctgaggcaggagaattgcttgaacctgggaggtggaggttgcagtgagccaagactgcaccattgcactccagcctgggtgacagagcaagacctcatctcaaaaaaaaaaaaaaaagcaatctggaagtttctttttcttaaaaccattcttcctggatatattttcccaagagagaaatggccgttcacttggcgcacttcacccactttcatgtcttacctgacccttgcccgtgacacatgtggttcttaatgcggtggcccatgccagagcagacccagacccacccaaggccgttgggtagatccaggaccactcaggaccattttagattattacctcacctcacaggctctgttctggattgttttgatgaaatttaatgttctatgggttgataggtgcagcaaaccacgatgacacacgtttacctattaacaaacctgcacgtcctacacatgtatcccggaacttaaaataaaatttaaaaaaaatgtaatgttctagatgctaactgtatcccttatcacccgtggtggtttggtattctggaaaatattatgcacaagtttgttctgttgcacgtaagggaagtggaatattttaccttctcataaacttttcttatgatggaatgcctagatagcctggtgatgatgcgcacttttagagaaggttaaaagttaactagacttaagatgtttttaatccttggatttgtcctgacattatgagtttggtgttgaaggacccagcagctgggagtttgaggcttggcataaaattacttgaaaattaaaggatcattcaatacggatatgatggtcatttgggcttatctctgagaaacaaatggattaatcttcatctgcctttcatatgatcagggaaagatacttctagtaccaaaacattttctgtgtctggaaactagcaggcatctagcaaatattaagtgatacattttttttgtttttaattttagatacaggcaggatgtggtggctcactcctataatcccagcattttgggaggccaaggcaggcggatcacttaaggtcgggagtttgagaccagcctggccaatatagtgaaaccccgtctctactaaaaataacaaaaattagccaggcgtggtggcgtgcgcctgtaatcccagctacttgggaggctgaggcaggagagtcacttgaacctgggaggcagaggttgcagtgagccaagatgacgccattgcactccagcctgggtgacagagcgagacttagttgcaaaaataaataaataaataaataataaattttagatataaaatatctctaccctgtttttctcaaggacaaagctgagtattttggaaatgtaaaattatttgagggggccatggatagaattgtgctttcgtagcagagatgccagtgacaatggaggttattggaagggaccagcattttctttttacattaatgactaatgaatgaaacatttcaggccagcagatgtttaacggctttcccagaaccagaactacccaaaggagcaaatagttaggatttttatgaataagacaatgtttgtcctgtaaaggctggcattccagatacttgaacttgaagtgctttttgttttgtttaggataatagccacctgtggagagcttttgcggcattgtggggacttcgagcagcagctagccaacaggtaggagagaggagtcattgtcctctacaccctggggttcctgatcagcacgagcttggtctagtacacagtacagcaaggacagcatatgccagatgtgaaggccacagggctggaggactgtctgtacctagatacagcgtgtcattattgtcatcattaaacgtttattgagcacctaaaaagggcaaggctttgtcctacttggcaggggtcacgtaattttggtttgatatggtggtttcagcctaaatgaggaaacagtgcatcttgtctccaaattaggaatgggcttggttccgactgcttgtttataaattagttgttgggactaaaaataaatttccatatagaaacggtgtgacaagtggtggtgaagtcccttgggccagccttcaggatcggggtgaacttaggcagcctgccttctgggtcctgcagtcaaattccgtgctgctgaagggctgtgtatcaaaggggaatctctggggtctgccctggaaaagcttgtcctactcccttcctctcttctcatacctgccagggcttttatgttgccctgaggtggccttcctcagacagtttttcccttcaaggggctctggcttcccacatttctttctttatccctttaaatgaaatctcttgattcccttggtatggctgatgcctttattccttaggagttaaggggaagaagtctgtttcatacagttgtttgagggaccagcagcaatcccttaacctccttcttaggtgattctttattgccctaaagtaatctctgggtgatgaaatttttagtggtggtacaaagtgaaatgaaagcaccactgttccaaaagtaagtaatgggtgctaggaaaatacagaggagccacagcaatctccctatatctggcccaagctgcccaggatgagagaaatctctcagatgagatttcaactcggccttgctttactcagcccgtaaatcacaaaatgatccctttctgcagagaagtgatcataagagctgggtggccaatgtcaatcttgtcactggagcggcccagcgcgttctgacctgttgcctctgccacccgcctgttggtggggagtggtccttggtaggagtctaggtgctgctggtgagattgatggggagataagataagctttacaggtgcctgccacatacacacacacacacacacacatgcacgcacacacacacacacacacacacacgcatgcacactgtgcagccttccagccaggaacacagatggtgactgtccctttccaggcttagtgcttccaggatgacatcatctctttcaggagctcccttggatacacccaggctgttcttgacttgaagctcagccaggctttcagcctctctgggctgcaaaatgcagcccagagaggcccatcttttatctattgtgtccccattcgtgctcctaaccagtctctccttacccttcagaatgtaatacttgatttcattaagagattaaggaaaatctgtgtcctaggaattaccatttacttcatttatattatttacacacactctactgtatgcctgtggcactttggttttattcactcccgaaagtcacgcaatttctgtgctgggcattcaggagtgagttaggaacagcagcagctgctcccactctatcctgctgtgagcctttccccataatgagaaccatcacaaaaaatcttggactaaagacagttggtggtctcagaaatgacgggaaacaaagaatcgtgagaagaaactgccaacaaagagcacagaccttccttagcaactcgcccctacctcctgccccacctccccccgccactcgcctctcccttctgccctgctcaccccctgcctcccgccccactcacccctacctcccgccccactcgtcccctacctcccgccccactcgtcccctacctcccgccccactcgcccctacctcccgccccactcgccccctacctcccgccccactcgccccctgcctcccgccccactcgccccctgcctcccgccacactcgccccctgcctcccgccacactcgccccctgcctcccgccacactcgccccctgcctcccgccacactcgccccctgcctcccgccacactcgccccctgcctcccgccccactcgcccctatctctcgccccactcacctctgtctcccactttactcacccctacctcccttcccactgtgccacagctttcctgggctctgagctaggtcttggggatatcagttaattaaactcaatcctcgccctcaaagagcttagaaattaatgggagcatccagcatgtgccagtatgctcattgctgtgccaagagaacgcagtgtgcacagaggagggaggattacaattccattggttccctcaactgtgacaagttattgcccacttctcagccatgggaacttgtaaatttatgctagatttccagaacctgactgtctcattgaactgtcccccgaagacctggtcactaaagccaggggtcacccatccttcaacagttgtggagcccctgccacgtaccaggcactgtgctagtgctagtaattcacaaatgaagaacagtccgtgttttgtcctcaccgtccagttggagggaaatgagacagcatgtgttaaatgcagaacagaagcaagagccctttgggagctctgccattggctgatggcgcagagggctgaaacctcctggggtccttaaggcctctcctctaccaagcctttctaatgcccctgtgaagcactatctttgggaaaaagccaaaatcagatttgccttctgggaagatcattctgctaacccttaggaggacagattaagtagaacttcgaggactagaggaaggggaagccagttagttggaagcctgctgtgatccagacaagaactagtgaagactggaagtaaggcaatggcagagacaggccacagtttgacagataagagacccaaccaaagttactggttggctcaagcaacaggaagaacgaacttgaacttaatggcagaggcaggtagctgcttatgtcagcagtggcttctgaggaagatcgtatcacagggatttatttgcaagtacaggcatttcttgaacaactcaaggatctgtttttgaaatagtgagtgcatcctaaaaactgctatgtccaaagcaatgttttcataagaaattacagtaaaagagaaggcagggaattagccacatttgggatgtgtcataatgtgttacacatgttcatgtaattctgtacatatttagatgggtaggatgggtggtaaagttgggctaaggaaaacagggtggaggtcaagattccacttccccagcagtacaaggggtggattatcatatgaaacctcctctaggcgtttgtctttctcaaagagtttggaaagtgccagcctcaatagatctctctgtagcacctaaaccacaaaaataaacctcccagtgccaccaaacacaaataccatgcaagctcggcatgtaggacaggtgggcccatgggtaaagaggcgtgcagcgagctgctgtcactgttctctaggagccagccagctgctatcctgcccagcggtctctctgatggtggtgctggtggtccatgctggcatttgactgttctacaccctgatgctcatatagcaagaaaagtctccatagaaggtgcacagtgttccagactaaactgagagctgcccctatgtaggctgtcggtcatattagggagatagcatgttctggcactgtgaatgttcagcaggaataaaaacactgggttttttttattgtgcacctgaggtccagctcactcctcaatgatgaagggcagcctttcgttgccttataaactggaccttaattcagtctgtctcatgaggattatctttgaatttagtaaggagcaatctgactgctccaagaagaaagttccatgcaaatagctcagggcataatggtcattcctttcattacaggattttgtccacagctgggaagtatctatctgattcctgcagcccccggagcctggctggttttcaggagagcatcttgacagacaagaagaactctgccaagaacccatggcaagaatataattacctccagaaagataaccctgctgaatatgccagtttaatggaaatactttatacccttaaggtatgagaccaaatgaatggcattcttgcaaatgaaaggcttcttctcatcactcaccctctccctctctgggttacaggcgggccctgtgtgtggccctgggctgtgacgtaccctgctactacctctctgtctcatttatgttgggattttaaggagctaagatattaaacttgaaacccattgagatacagatgtagaggttagaagagatggatctttattactgataaaagccaggttagagaatgtggctttaggccaggtgtggtggctcacacctgtaatcccagcactttgggaggccgaggtgggtggatcccctgaggtcaggagtttaagaccagtctggccaacatggtgaaacccggtctctactaaaaatacaaaaattagccaggtgtggtggcacgcacctgtagtcccagctacttgggaggcagaggtgggagaatcacttgaaccagggaggcaccggttacagtgagctaatattgtgccactacactccagcctgggtgacagagcgagactccatctcaaaaaaaaaaaaaaaaaggaaaaaagagaatgtgggtttagatctgcggctagggggacttgctgtaattcactccagaatgaaacttgtcagccggtcagacagagctggacagcccctggccctgttcagggtcagcctcctgagaggggaccagatgtgtactgcttgcaggcaggcagaacctgtaatagaggatcccaacccaggataccaggaggagcaagagaagtcattactcttttccaagggagaagccaggctgcagagtcaccaggagtctacccaagtacaagttcttccacatgggaccatgaggacttggggattggtgttccctcctggtttttttctttaaactcttagtttgcctgccataacgctgcccttgactttgagccccttggggtccagggacaggagaacttcctaacaaatggaatgagtcacacaattccttgggaatggcttccagggtcataagaagaccgtgggcatcctttgcagaactgtcctcctccctcactggtctggctttaacttcactcttggtgatagacagaggagacattgctgttcctggagcaccagatgcagtagaaaattttttcttttgagatggagtctcactctgtcgcctaggctggagtgcagtggcacaatctcggatcactgcaacctctgcctccccgcttcaagcgtttcttctgcctcagcctcctgaatagctgggattataggcatgcgccaccacacctggctaatttttgtatttttagtaaagaaagggtttcaccatattggccaggctggcctcgaactcctgacctcaggtgatctgcctgtctcagcctcccaaagtgctgggattacaggcgtgagccactgcacctggccagatgcagtagaaaattatccacagcctagagctctggaatgaactgcacagggggcctggacatgtctgaggcttcagtgctattctcccagggcctccccatctctttgcaccttgacccaccaactggttgcattgagcttgacaaacacttcgtaaagcaattctggaaactcattcatccatgcttctgtgattaggttaaagcaactctgtttatctttattgctaatctgatttatgtctgttgtaatcagttcatttataataacaaaactaaggttacactttccatctctattttctcaggctatttggaattccttgggactcatggaggttgtacatactttggctttcagccaagtatatttgacctgacctccccgggaattagggctctgtccatcactctgatttatatgtgaagcttctgatcttgtttcccccctctttcccacctcctctatccctgagggatggtcacaggtgaatttttcctaaactgcttgtccatgagctcatgttagcccaagtgcatcagaatcacctgggaaagtgaatttaaaatctagatttctgggctccaaccccagtgaactctgatgcagtagttctggggtggagcttgggaatctgtaattcagcatgttctccagaggggcctggggcacagccaggtttgggaaccactattgcatagaacccccagttctcctgtgagttttcaaaatggttaactagctaatacttgggttgggtttcaggcctaacaactgccttttgcattttcttgtcttaggaaaaagggtcaagcaaccacaacctgctggctgcacctcgagcagcgctgactcggcttaaccagcaggcccaccagctggctttcgattccgtgttcctgcgcatcaaacaacagctgttgcttatttcgaagatggacgtgagtttctcactgaccacatcaatttttcccgggtcctgcctccaactcaagcatactgagtgtgggcttaaccctccctgttccaagagctttgggaagatcccgctttaactttcccaagccggaaagagccactttccaatttcacctcattgcttagcatgaatttcttatctttattgtagttactctgatactttattcacaggcggttctcaggattattaaaattgcttgattaactttccctatttggagcagcagagaagtaatagagattatgtgcagcttcgtaggttaggccaggtcagaagagctaattgtcttttgagattgaattattttcacaccacacgaatcatttctggagaattggttctggaactttactcaggggagtaccttatcagaattgaacttgtgtttttgagggggctttggagggttctgttcctttctttccttgataccttttctgtttggctgtttctagaatcgactcactttcctttcctcacaccctcttctcttttctggttgtccgaattatttttcaaggcattgcctgttctattttctctacttgctgtctttcccctgctccagatcttgttactttccttttggattactgggcgggacagccccctggttaatgtatcttactgacccttcagggccatttggattccagttatgggcctttaataaccaagagatctttttacaaaatgacaagaactcatctggcaaaatcaaacgtgctctcctttctgccaccctctagaaagcctgcaaggctgggagtccagggctcctgcatggtctcagtcaggcctcaccccctcactgggagtcaggattcccatccgtaaaattgctcagttaaacgacatgatcgtgaggttccttctacccttgaagtttgtgattttcactctttatgatttttctgtgcaaaatgccatgagatctatttcaatcagattttgtatttgtagcgcagaaggggacgtaaagtggaggagagctgtagcagaaatgaggcgggtgccatcacatggctgagttattccttcctccgtgagcctccgtttcctcatctgtgtgatggggatatagtaattcttatatagattgatgaggattaagtgagattttgtatattgatagaatttagcatagcactggccacagagtagatgtgtaataagtggtagttttcttcttttctgtgattctcatttttaagaagaatgacttacttgatttttttaaaataaaaattgtataggtatttatttttagaaactcaagcaatacaagaaaatacaaaaaaaaaaaatctaataaatacctccaagatcccaccattgagaaataatcagcgtcagcagtttgatgtccagcaacccagacatctctttctgcacgcctatacatgttaaaggctgattgggcatcagtggatagatctataggaagaaatggaattatactataatgctgtttttaagaaaaacaagatatgcacaatataattttatttgaatttaaccagaaaaaagagacactaaatgaatctaaaggaattattgaacttgagacatttttcttttcttttctctttttttgagactgagtctcactctgtcacccaggctggaatgcagtggcacaatcttggctcactacaacctctgctgcctgggttcaagtgatcctcctgcctcagcttctcgagtagctgggactataggcgcctgccaccactccaggctaatttttgtattttttggtagagacggggtttcgtcaggttgcccaggctggtcttgaactccagacctccagtgattcacccacctcggcctcccaaagtgctgggattacaggcatgagccaccaagcctggtcgagattttttttttttctccacgaaagatactcattccccagaagctctctccaaggttatgaaaaaaagattatgagtatgaagagattggagttgccattgctttttgttaatcctgtttccattgcagacagatactgatacatatgatccattgaaaaacgaaaggattagctttctttgtctctctcctgtcccctccctcacctgcagattgggttgtttgtattatttttattttgtcaaagctgacggtactgaccttctgttctgaaacctcagtgcttcccagcttagttctacatttaaacaggggtggtgcttcccccgtccttttccctctacttctgcattccagagttcattattgatggtggagttcctgggtgcttggccctaccttctcattccggcttcaccacagcaccgtggccccttgggaatgggcgcaggtggctttggagattaggaggagcactccgagggtgccagcacacaataccaaggcaaacactctggccttaaggatttgaaaattaaaccctggtcatcaaatgtttgttttcagcatttgctggtaaattctattgcccttttatattccgagactacaaaccaacgctatatttgatttcaaaatggattattgaagtttacctattttacctggtgacagatggatagaaaagcccatttgaaggacactttaaataaattttgaacaattaaaaaatgacctgcagcatttccctattgccctcaagtgacattctctgctgttttccccccccccttttttttttgagacaaagtctcactctgttgcccaggctggagtgcagtggtgtgatctccactcactgcaacctccgcctcctgggttcaaacacttctcatgcctcagcctcccaagtatctgggactacaggcaagcgtcaccacacccggctaatttttgtatttttagtagaaatggggtttcaccatgtaggccaggctggtctcaaactcctgggctcaagtgatccgcccgcctcagcctctcaaagtgctgggattagaggcatgagccaccgcagccagccatctgctgctttttaagcaccctcctatttcaagccactctgtcttgcgcttcttccaaacttctttcccactccagctgttctttccctctctcctctgcctgttcatgttttgaggctgctcctcctgcctcccctttgaggcctttcctggggcctccaggctgcagtccctgggatggatggcagcagtgcttgtcttcgccctgcacattgttacctgctcttggtctcctggaagccgttgcttctccccacactctgcttcccagcctgtcaccatctgggctcccttgctgcacccctctttgccgacaaaccaccaaggattgctgtcccttccttttctctgtgtcccacacctgtttccacaggggattctcatcatctctgagctgtttttgagcttttcatctgccccccaccccaattttctgcagagctgctgtattcaccttcacaaagcattgttttggttttatctctcctcattcaaaaccctccccagggctagtctgattgtctgtttttagcaacttcttatggaccttttcacgcatacacagaagtagggagaagagtataaggaactccatatactcatcacctgctccaaccatgatccactcctagccatcctgtttcatacataccccctcatctgaaatagaaggactctaaaaataatcacagtaccatagtcaaccctaaaaaagaaaaagaaaaggaattcctaatgtcatcagtgttcaaatttccagttgttttataaatggcataatttattttaaccctttgagtcaggatctaggatccaggatcctgcacgtagagatttattgggatgtcttttttgtcatttttgaatggtaagtttcctctctctttctttttcccttgcaatttacttgttcaaggtaaaggctttacttagcctggtgtttaaagctgtgccttctccctccagcctctgtctgcctctgtgtaccgcatacatcctatggccagccgcttctctaatcgccctgagctcttcttgctccttgcctctgacaccgagagctctagaagtgggaggcagcactcatgtgtctgcaggggggagaggggaggggccagaacaggataggaggtgtgggggtgtacagggtgggagtatgtcagggggtcttgcttccccaagtagctcccttctagagagcaaggagcaaatcttacatttctttgtctcttctctgcaaagcttagcacaagacactcgacatcctgggtacttggtaaatgtggatggttggcgtgttccttctcgctggattgggagttagctggaaaaaatgtaggctcttttgagacaaaagagcattcgcaggcaagaacaaagagtctagaaaactgtaggacaagggttgggggcacctggggtggggaagaaaagagctcatttacatcaaagaaaataagaccgaatcaagtgggcgctagagagcacggggagggctgccgaggctgagcctgggctgggagcccagggttggacatggtcattcctttcccggaatgctacttaaaggatcaggcaaccggatccaacatcaggtggctgcagacagcagttcctacatgaccgccggagtcactcccggagttcagccagaaagggccttgttttccagggctggctttagagtggctcaggttggaagtaagaagcgagatttttgtgtgaaggtgtgccactctgaagtctgtgagcacatgtgcacaggtcctttacccaactctatataaactgctgggaaggcttccacaacaacacggaagatgtttccactccaaatggcaagaaacacgtgttagtgctgaggttctcctcgcacagggggactacagagaggccagaggggcagctgttggggtttggaagtgccgtcccatccccatccctctgagttctgatgagttgagaaacagatccagaaggtggtgagaaataaagcagcagctttagttgaggtaaagcagtattgccgatgaggcttggctcttcctgcagccagaggggcttcctaggtctccctcccagataagagactgacacgtggcctctgtgggggacctcagggtgccctgttctccttagggtgctaaggacccacgaagtagtgaggctgtctgcacccagcacctctctacacagtggccccgctacgcagagaaacttggaccaaaaatatccaactttctcctgttacaatctcagcgagataaatgaaagggatcagttcccaccccacagttcagccaatgtggcagttcctgtttcatggacctgcaggaatgcggagagagaaatcgttgccttctgtatggcgggcttccaggtgaagctttaaagaagagaagcccctgcctgctgagtggtggaggctccaacggtcagctccaaccaaagacagtgcctccagggaaggccatgttcttcttgtgtatttctgggtggcgtcttcacagctgcctggctgctaggtactgattgtgtcctctcgttccacccttagagctggaatacggctggcatcggagaaaccctcacagatgaactgcccgcctttagtctcacccctctcgagtacatcagcaacgtaagagcttctgtgtgcttctccagggtggtccaagtctttcagaccttccttgtcttttgattcttgcccttatagtcatttccccatgggtgctatctgacccttttgggtagcctgtgctttggggtagtctgcacccagatcctggactttaagaagatcagcagagccacatggcgattccagaccccagcacattctcactccttcaccatctctccctatatgagatgtggccagtacctgagggcgtcagagttgagagtctaatgggaaattctgacttgggaagacaggaggcagatggccaattcttctctgtgactttcagaagagtagtgtgtgtttgtggttgtgaattcaaattcagccagcttttagtgatcacctactatgtgccaggctctgtgtggagtgctttcatgtttaacttcatagcaacaaacaaatctcttcagaagaattgcagttatagaggcttaatattaaaagagaacagaataaaccatgcaggggaatgggggcacgtggagtccttgctgccctccccattcacccctgggaattgacagtcacccagacacctgcacatggcctttccttccgttacttcctgcagtctagctcaggtgctcttaaatgtcagtgcgcacaagaaacactatagaggagtaatatgtgccaaaccacactcacctcacacaatgggagatttctgagacttttcaaggtgatttctgccttacgctcttgccttagaatccaacccctatgtgtaagttgtgactctgccaaaatgactagaaaggaattttagaagtattataaatgttaggctgggcatggtggctcatgcttatagtcacagcactttgggaggtagaggcgagagaattgcttgagcccaaaaatttgaaaccagtctgggcaacatagggggaccccgcctctacaaaaaagtaaaaaattatccaggcatggtggtgtgtcctgtggtcccagctacttggggtgctgaggtgggagaatcgcttgagcccaggaggtcgacgctgcagtgagctgtgattgcaccactgcactcctgcctgggccacacagcaaccccctgcctcaggaaaaaaaaagaaaaaagtacatgttgtataattgcaagaagtgcatggcagtccctctggcaggcagtgaggtggctggctctctgctctctgttcatttggggcagtatcaagtctaaaacaacagtcatttcccttctatttcccagggcacctgataccctctactgatgaaactgttaagatgtgggttggtctttacaacccatgggaataatctgattttatttttatttatttatttatttttgagatggagcctctgtcacccaggctggagtgcagtggcgcgatcttggcccactgcaactttggcctcctagattcaagtgattctcctgctacagccttccgagtagctgggattacaggcgcccaccaccacacctggctaatttttctatttttagtagatacagggtttcgtcatgttgaccaggctggtctcaaactcctgacctgaagtgatctgcccaccttggcctcccaaagtgctgagtttacaggcatgagtcactgtgcccggctgaatgatctgattttagagcagagatagtatgcttgcagtctaaattgattcagaaaatgatggtgctggaagggacctgagtggctaccaagttgattctaaagttgaagaaactgaggtctagagagggaatgagggctaggaggagtttccaggcccgggcccttccctgcctgctgctgtcctcctgagctgtacggaggctgatgacctgaacccaggaaaggaacacctaattgaacacgtactgtgtgcagagacagtgccaggttgtttagtggctgggccagatcatgtccatgagacaggtgtggcagccctccttcacagtgggagtggggctgggaggaagcagcgacttacccagtggctgctctgttaggacgccagctgctttacgtgcatagcacacgtattaattctaccctcaccacaaccttttgaagtaatatgaggtcatcctcatttcagcgatgatgatccgaggtcctgacagattaagttgcccaggttctcacagtgatagagccaaaactccaacccaagtctgtctgacctcaaaacttttcatttttcccaagtcagtgagttaacccaaccaggatatcaagaaatattgattgcatatgtgagaatagtagacaaatacccacaggtgggatgctaagcagccctttccatattgatttccaaggagtgaatagagacaagatccctgagagaaacctgcactgtgagatctaggaaccccagcaatccctacagtctaaggccaattgattgaagttagagatgtcagattactgaaatttttcacctaaatgatactttgccttgttggtgaaagccctcacccacacagaatcatgtgagcattgtaaagagatgaaataggagaaaatgctttgaaatttaaaaacaatatatatgcaaggtaaaactgagtctgtggacttagccaaagcttatggctacagatgaaaggtataccaaatataggagtatgtctggggtctttgtacgtagtaggtgttcaggaagggcttgttgagaggaattattgtagtacagagaaattccaacaccagaaatcagcatccttctcttcccccagccttggggaaaaatgatgaatttgttaacacttcaagctgaaatttacagtagctgttgttattagtgaggtaagtggccacttgcttactttgggtgaaagattatactaagtacatgaaagaaaaaaatgatttattttaccatctgtgtacctcttataaagggacgccagtccaggcacagtgggtcacgcttgtaatcccagcactttgggaggccgaggtgggcggatcacctgaggtcaggagttcaagaccagcctggccaacatggtaaaaccccgtctctactaaaaatacaaaaaaaattagccaggtgtggtggtgggcacttgtaatcccagctactcgggaggctgaggcaggagaattgcttgaacccaggaggcggaggttgcagtgagccgagattgcaccattgcactccagcctgggcaacaagagcaaaactctgtctcaaaaaaaaaaaagaaaaaagaaaaaaggaacaccaaactaataatggatgtttacacttacacagccaaaccatattgaatgtttggaaagaagggcatgatcatcctgtagttctctggtctgggtagattttcgagtctgtgttaacttctggacactacaccctgaaaggagcccgctgttacgtagacatgtgtgaggccagattgagaagctcttgctttgatagtctcctgacttttagtttacgagagttaataacagtgacaggaatgtcctggaatgaatatgtagcaggaagaaaaaaaaaacaacaacaggcagaaagaccttttaaaaacatatatatcattttgaaacctgaaaagtcaacccccttattttgaaacaaaacacatacttaaccttaaaacacaaaacaatgaattacaatagaaataggaaacagtggtctaaaatacactcttggcatcacgtggatatctgacaaacacatgaccaagactgtgctaattgtgggcatgtcctaaatgtcttttaggacaattgcaaatgaccttttgcaattccccaccagccaaggttttgtctatctttagtttcaagagtttatattatgaaaacaatatagttttttctccaaagtaatttatagttataaatggctttttttcaaacagaattcctttcttcttctggttaaattatctaggagggagagaatcagatccaaatccagaagacaggttttttttttttttttctgagacagagtctctttttttttgagacagagtctgcccaggctgcagtgcaatggcatgatcttggctcactgcaacctccgcccccgccgagttcaagtgattttcctgcctcagcctcccgagtagctgggattacaggtgcctgccaccatccccggctaatttttgtacttttagtaggatagggcttcaccatgttggccaggctggtcttgaactcctgacctcaggagatccatccgcctcggcctcccaaagtgctgggattacaggtgtgagccactgtgcctggcctcagaagacaggatttgaattcttgcttggccccacacattctgacactagtatcttactggtttttcacctatgaacagtaataatacttatatttacacaatgcttcaaattttacaaagcattttgatatccattacttcattggagatagagattgtgttgaatgcatttcaaaaatattgaggtcattataagaaggatgaatctataatctatatgcaagctaccagtgattcttttttagggtactgccataacaagcatcgccacatactagaaagatcagacttgggatcacccgaggtctagcaattttgtctctctgccgtttgccttcacacaaatgtacccataaagtaataacccgtatgtgtcaatgtcaggctaacagcgctttcttttgtttcagatcgggcagtacatcatgtccctccccctgaatcttgagccatttgtgactcaggaggactctgccttagagttggcattgcacgctggaaagctgccatttcctcctgagcagggtaagcggggaccgtttctggcgatgttacaagtcaagctgtcagtttccagggtagaaactccagatgacaccttatccttgggctcatttgtcaccaagtcctgtttttttttaaccttctaacatgtactttttgtacacatgctgtatctaaaacaatatcacaacttgaaaaatctataaccacatcccactgcggaacgcactggtatttccactttcgcttgtgccttctggctctgctctgtaagcagatggtattttgtatgtaactttgtattctgtattattgttattattgagacagagtcttgctgtgtcacctaggctggagtgcagtggcgcgatcttgactcaccacaacctccgcctcctgggttcaagcaattctcctgcctcagcctcctgagtagctgggactacaggcgcgcaccaccacgcctggctaatttttgtatttttagcagagacgggggtttcaccatgttggccaggctggtctcgaacttctgacctcaaatgatccgcctgcctcatcctcctaaagtgctgggattacaggcatgagccactgcacctggccctaagatgtaactgttttcggtttcctgtgtttgccattgagatcagaagcttcctggtactttggtgcattcagcagctactgcaggcctgtgttttccttggtgacctccttttcttttcaggggatgaattgcccgagctggacaacatggctgacaactggctgggctcgatcgccagagccacaatgcagacctactgtgatgcgatcctacagatccctgagctgagcccacactctgccaagcagctggccactgacatcggtgggtccccacaagacaggcggtgggagggacagctcttgcctgctgcatctgtcagtttctcctttgccctccaggaatctcatcccaagtcttcccttagcttcagctgtggatttggctctgaagctggttgaaaattcaggttctccaggccctgccccagagattctgacttagcaagaccgggctgaagctcagacatctatgttttcgaagaggacttgagaaccgttgaggggagcttcagtgagataagattcagcgagtcctgcagcctggccccacctggcccgctccatttgtgccataattcccaaccagtgtttaatgagctcttactgcataccaggcatgcctggcgctggaccaagcactcgcacccatcgtcttatgtaattccaaactcccctgtgaggtgggtgctctcttctccatcataccgatagggaacggaggcccagggcagttccataacaaggccatgtggccagggtcactttgtggtctccatccagatagcatcctgcctgccaagtcagtgggcgtgtcccctttgctcctgcctgccctcttcactggagggcctcactgcccaggtgtactctgagcatggggctactgctggcaggtggcagggagtctccccagtctcttgatgccattccaataccttgtctgctctttagcctaacgcacctctcggggtggtcaggagagcgggtggtagaagcctgaaagatcagctccctggggacacagccagagcttcgtcctcagtgaccacagggctgagccaggctcaaccggcttctggctcttgttttgcagaagaagaactagaagcaaggtgctttcctccgggtcccagagctgttagtgatggagccaggcctgggatccagctttcctgagttcctgacccctgctcatttcatagtcagctctcagcacttaccagaggaacaggcagccttttggctactgcccttcagagaaagagagatgagagaattcaaatgcgtgttggtgttccctgttagtacaagcagcagcagggggaagaactggaactagtgagtggagtgaaatctagggattgcccctcagtttcagttgtccttgttattcctccctgttaagctccccctgcagattcatttcttcactcattcagcattgctcgagcatctgtgtgccagctgtagttctaggagatagagacaacaaagctttaggcagctcccatgcttagtgagcttacactgtaaggatgtacggttaggggcagggaaggtaaggctagtatatgaaactgacagggtataaggcgacagagtggtgaggtctgtggcaaagcatgcacacctgaaagacattcaaattaagcatgagcacaaacagaacaaaaaacactgctcgccaaacaaaaatgtcctagtagactgtgggcccgctctttgcagctcttggctgacagtcaagtggagctcacggttttatggataaacttgtaaaggagtaagtacgtgcctggcggcacctttgctgggaagcagctcttcctgagtcagccgtgacagagcaggcatctcctcctggccctgccctgagtggggcctaaaaagaaaacacagggggctgggcaccatggctcatgcctgtaatcccagcactttgggaggccgaggcaggaggatcgcttgggcctaggagtttgaggccaacctgggcaacatagtgagaccctgtctctacaaaatattaaaaacaaaacaaaacaaaaaacacaaggaaagttgaggccttgcctggagctccactttagtcaaggagaagagatgaacccaagatcagaaagtagccggtgggggggcactgagcgcggtggctcatgcctgtaatcccagcactttgggaggctgaggtgggtggatcacctcaggtcagaagtttgagaccagtctggccaacatggcgaaaccccgtctctactaaaaatacaaaaaattagccaggcgtggtggtaggcgcctgtaatcccatctacttgagaggctgaggtaggagaattgcttgaacccaggaggcggaggttgcagtgagccgagatcgcagcattgcactccagcctgggcaacaagagtgaaactctgtctcagaaaagaaaaaaaaaaaaaaaaaaaaaactagccaggggcatatcgggtggtgctgtcttctagtctttccaagcatgaactgggaggagctggagaaggctttgcaaggcttcccttgggttgggttgcactgcccaggcaggagggaaaggcagcattgatatattgatcacctgcgacacatcaggtgctctcatgttcgtttcccgcttcatcccctatccatgctgccggatgggtggtaactgtggacagatggaagcagagactcagggaggtagaagggcttctctgaggtcacacctggctgcacctggtttgctcccccatgctgtctgttttgcccaagcttgcctggtggttagaaccaccggggtcgctttgtagaatgacagaaccctagaatcctctcttgggatgctcatcaacctagtctgggggtaggctcagaaatctgtatccgattgtatccccagtgcctcaggggtcatctgggaaatgtggaaacctgtgttataccagggtcccaccccagacactgtccttgtcttcactgcggcgttctgactggaggtctttagtaactgctcagacaagcttgtgtgtctcctgaccctctgggttttccaagtggtcagtggataccctgggggccagggcttggaacccaggagtccccagaacagagctttgggtgaggtcagctggtccttcagactggtgctgaaggcgggtgtgtgcatgtgagtgtgagtgtggatgtgagagtgtgtgcatgtgagtgtgtgtacatgtgagtgtgtgtgcgagtttgtgtgagtttggatgtgagagtgtgtgtgcgtgtgtgtgcatgtgagtgtgtatgtgtgtggttggggatgggagtgatgttggttagttctttattaaattagagttcctagactcgagccaagctcacagtctggtctgacactgtgggaagaacctggtgagtaaagggcctattgagggcagggttggcgccccacatctagggacttggcagggcagcttctctgtgtcgtattcaggggaggccctgtggggctctgacctgcttggtgctgagtctgtggagctctgtctgtctcctctccgcccccacagactatctgatcaacgtgatggatgccctgggcctgcagccgtcccgcaccctccagcacatcgtgacgctactgaagaccaggcctgaggactatagacaggtcagcaaaggcctgccccgtcgcctggccaccaccgtggccaccatgcggagtgtgaattactgaccccaccacacaccggaccaccaagagagccagggctgctgtttcgcgactcaccagcacagatttgctcagaaactctgcccaagattgggcagaagttactttaaaaagacttggttcagctggtcacggtggctcacgcctgtaatcccagcactttgggaggccaagccagatggatcatgaagccaggagttcgagaccagcctgaccaacatggtgaaaccccatctctactaaaaatacaaaaattaacagcagagcgagactctgtctcaaaaaaaaaaaaaaaaaagacttggttcatttgtataatcaaaaagagttg

SEQ ID NO: 6870 - DNA, 433 bp, Homo sapiens
ggtgactcatggtttcacctcctttgtccacttgggttttaaattgtaagtctggaagttactagaacaatcccagaattagctcacacactttcactctgtttttccctttcttcctggggttatattttacccagcattcctaggtgtttgtggtgggagattccgcccctacgttatcttaatttgttgccatatttctgaaccaggaatcccatttaccacattgagttctggacatcaaggttctccgggcatcactttctatgctgtgtcatcagtgaagcccataaacttacccattatcagaaaagcgaagatttcgagatcttgttgagacggtaggtatatagtatgtcctgaggggtttagaaaaaatagctacctttatttccaacccatggtaacttcattggtaaatccagacagacct

SEQ ID NO: 6871 - DNA, 433 bp, Homo sapiens; identical to SEQ ID NO: 6870

SEQ ID NO: 6872 - DNA, 1097 bp, Homo sapiens
tttttagtagagatggggtttcaccatgtcggccaggctgttttcaagctcctgacctcgagtgatctgcccactttggcctcccaaaatgctgggattacaggcatgagccaccacacctggccatattgtgatatagctaacatagaatagaactcactttaagtgtacagcttgatgagttttaacatatatatacacacactgtagtcatgtaaccactgccccatcaagatacagaacatttcatcacccctagaacttcccttgtgacttttagctgtcaattacttctctctaccccccacattccccactcctgttcctaacaagcactgatctgcttttgcactaaagtcttgcctttcttaaagtttcctatagatgcagtcatacagatgtagtctcttgtgtctcacttcttttgctcaacacaatgtttttgaaattcatccatattccccgtccgggagggaggtggggggggtcagcccccctgcccggccagccgccccgtccgggaggtgaggggcacctctgcccagccgcccctactgggaagtgaggagcccctctgcccggccaccaccccgtctgggaggtgtacccaacagctcattgagaacaggccaggatgacaatggcggctttgtggaatagaaaggcgggaaaggtggggaaaagattgagaaatcggatggttgccgtgtctgtgtagaaagaagtagacatgggagacttttcattttgttctgcactaagaaaaattcctctgccttgggatcctgttgatctgtgaccttacccccaaccctgtgctctctgaaacatgtgctgtgtccactcagggttaaatggattaagggcggtgcaagatgtgctttgttaaacagatgcttgaaggcagcatgctcgttaagagtcatcaccaatccctaatctcaagtaatcagggacacaaacactgcggaaggccgcagggtcctctgcctaggaaaaccagagacctttgttcacttgtttatctgctgaccttccctccactattgtcccatgaccctgccaaatccccctctgtgagaaacacccaagaatat

SEQ ID NO: 6873 - DNA, 105 bp, Homo sapiens
tttttttgtatttttagtagagaaggggtttcaccatgttagccaggatggtcgcgatctcctgacctcgtgatccacccgccttggcctcccaaagtgctggga

SEQ ID NO: 6874 - DNA, 278 bp, Homo sapiens
ttttttttttttttttttgagacggagcctggctctgtcacccaggctggaatgcagcggcgcgacggtggctcactgcaacctccacctctcagattcaagtgattctcctgcctcagcctcagtagctgggattataggcgcgtgccaccatgcctggctaatttttatatttttagtagagatgaggtttcaccatgttggccaggctggtcttgaactcctgacctcaggtgatccacctgcctcagctcccagagtgctgggattgtacaggc

SEQ ID NO: 6875 - DNA, 13435 bp, Homo sapiens
ggagggcggcggggacagacccgtcgccccggctccgcagccccgccccggccccgcctccgctccggccgccgaaggctataagatctaggaacccgagccggtggtagggcgggcgcggaccgtgctgggagcggcgcggctggagcgcagcgccgaagggactggcagggctgaagtgtgcgggacagcaagcccccgaatagccccggctgccacctcgcaggacccaaggccacgcgcgccgggcccagctgagccgcctcatgaagccgcccgcggcgcagggcagccccgcggccgccgcggccgcaggtgagtgcggggtccggggtccccttaaagtctcggctctgcagatggcgggtgagaaaggaggggccccgtgtcgtcccttcacaccccccacccttccatcctccccggcgggaacctgtccccggtcttcccgcgcgggcggctgcagcctcctttccggcccgggctggcccccatgtcccaccttccctccaccaccagctccgcgcgcgcccggggttggggggagcggcggggacaggtaaccggcagcgcctggggaggaatctggccgcgccaagtcgctgggtgaccctgggcctggcgaaggctcagttttcttgtctgtaaaacggacttggtaatagaacgcacttcgggggtggtggagaagattacaaggtaacagcgactgcgtggctgtcacttggcagaggcgccaagtgtcagttatcttcgggaaccgtggcggcccctcctggccctgggaggtggtcccgctgcccccctgacttccgtgcactgagcccctggccctgcccgcagccccggccctggactcggcggccgcggaggacctgtcggacgcgctgtgcgagtttgacgcggtgctggccgacttcgcgtcgcccttccacgagcgccacttccactacgaggagcacctggagcgcatgaagcggcgcagcagcgccagtgtcagcgacagcagcggcttcagcgactcggagagtaagtgcggcccccgctaggatggcgccgggatctcccagctcccaggacctgccccgcgaaggctgcggcctcagttttcttatcagtaaactgaggaatggtttcctgaagctcaacgcagtaggccgagtggtggcggggcccctgacgataatcacgggaaaggtcgctggagggcaggttggttcacttgccgcccacgggtgtgtcaccaggcaggcgagtttaagcagcttgtcccgactcagccagacaggactccctggacctgcaccaggcctttccgcagtttccctcctcttctcctttccgtgcctctcccctctcagctgtaactttgcagatgtggaacaagtgccagtggaatgagggggcacagtggggacatgggagggcgcagaacggaaatattcatgaaaccaggaaaggtttcataagcccaaactgctgttcttgggatttatgaaataactgcttgcattgtcttctggcccttagctctcagacttgttgctccattgcatgcagttatgaaaatctttggcactgctgagttcaagtatttttcagccaggtcctccaccaggctggagggggagccagagagcacatgggcatgaaggtggttcctggtgatctttctcacaatggagactaccccagggtctctttgtcctgaacaactttgtcaacaacagcaacaacaacaaaaacaacaaaagagacagctttttccaggaactcacatgtcctgggaggattacaggtacctcaaacagcaaattaggtgcctttttaatattacatgattgttggtttcaaatccagaattgcttattgtttttcaaagggcaaagtcaattttaaactcttctgtgttattcttcagcctttaatccttagatgggttacaggcatgaatgtcactccttttgctgcccttgactcaggacgtgaaagtaatggcctttccgtgtgattctcttattttgaaacctggagctcttccttgttcctgggctaagattcggggctagacatgaacatgagctgcccttctgcaaagggataaatgcgctcaccaccctggtcagggtttgactcaggaagctgagttccagcttgtttccttggcagcactgccaaagagttagaccaagctgcagcttttgaggtgaaaggggatggaagaaagtactgttacttttccacttagaatttttggactttgttcttaatgaataggttcattttcaatttcaaagcaaagtgttaacatttttgaaatttgtctcaattctaaaggccaaacttaaatatgtctcctcctactggggcatggagcaagttattcatcaaatacagattctcgcatggaaaagaaagctaggatagtgtgtcgctgctgctctgtggcaaagaacagctcctttctaagcaacagcctcactctactagaataggtctgagcgcgcccattcatggctgattgcaacttccactgggtgggatttcagatctagaatctgttttcagatgccttaaagagaagacatagaaacacattcttaacagtttcaggggagatagttgggatagtttgtagttttgcttaggttatatgtgtctgttttctgcttttgttgttaacggactaacccttagtttggtggttagagaagtgatgggaagaacataaagaaagctcagatgacatttgtctttgctttaaatgtgtagtttttctctcacaaggctagtcagaaatattgttggcagaagctgtgtgtatctaaatagtaatttcttaaggaagcataatatgtatatcttaattgctgccaagaattgagtacagacatttgttatcctcgtttgtctgtttaatgcttttctatgggagagaatgcttaagagaggtagatactactgaaatttagctcatcaagagggagacacaccaggataaggataataacagcagctcacttttagcaaacgcttgttatgatgatgatgatgatttattagctggaatgggaaccatgtcttcacgaatagactgaagtccttttgagcccagatcacatgcctgtttgtcaatgatggctgtttatgaaggtgtctctttgaggtggtggtcatctggcagggtcagtagagcttagattgagccttgtcaaggccctgggtgatgagtgggatttagtttctctagctgtgaaattgaaaggatgctatttaatagtgctattagggagaaaatatttgctctgttgaatactttcaaaatatcattacaatgtacatgctgtgctataccatatagatacattggagccagtgtctcgcatgaaaatattttggatgaatatgtaaaccaatgttacctttgttttttgctctagtttttacagctctgtctgaaggtgcaccaaccttacaaggaagatcaaacagcaagcctgttctttgaagaatacttctttattatcattaaaaaaaatttaggttgcttgcacccaaaggcaaaaaatagccattcctcgtactgaaagaaacaagttactcagataggaaagaagaacagatatttaataaggaaatattccttcctgttcccactttcagggaggcctcttaagacatgaagaggaccaaaataacaattgcagtataacttcacatggtggggtggggggtgtggagttcaaatgtggttgatcaaaatagtgttgttactttcgtttagacttgattccaacatgtaaaaaaatcaggcactttagtgggagtgattttaacttcagtagtgaaagggcaatgcaattaagagttagggtagtgtttctcaaacttcatcctcagaggtgctttagaaattgactacctttggtttgaatttatttttagaaatatatcttcttttcagtatttttaaaactgtaaaaggtaaaccatgttttctcaaatgtgttaaatggaattttaactcattatgtttcaagttttaaccagtgtgttgactttataagaagtttataatattaacttaaactttaaaaggtggtatgcacttatacctttaaggtattggggtttcacataatttttcctttgacgggggagtgttttgctgctcaacagaaaaggtctgaagtctactgtgtatgctagggttattatgatattgtaggaccatttaggaaatgaggaactggcttctttagcatcagcaagacttagaacacctgcatatctttgcttaggctattctggcctggccctgggagaggggaccttgtgggccctggagaaccagcatgacagatggcttatgtggcttagaagccactgaggtagaacctgaacttgttcaagccatgagagaataaggccaatgaggagccttcagggttccctggtactgtgttagcaattctgcatgggtaatggatcttgtgatgcttggcaaggcatatagagggacagtgcgatcccagaaagggagctgggacaacagtggagaagttgaggaaagatgctctttcttattttgcccccctttggcgaggctatcagaatttagattttcaggaggagaagtcaacccacacccccagccattccctgtggcaaaagggaggtaggtccaaagctttctttttcttggttaattactatagtttgcttgctttaaacgtgtgggatcgttctatatttacaggagccttgggtaaggtttactgtctgtggttttacttccccctggagcagcacgttgacatgcgctaaccctaaattacctttctcccaacccccctagctaaaaaaacacacctaccttttaaacaagcctctattttgcagcagtgtttctcagactctgttagttgtatatttcatatgcttttctttcttttgatggtgccttagaaaacacggtcccagaatttgaggttcctgacttcagtacactaactagacttgccagggatgtttctaatgggaatttgagatacatgtgagatggtgctttagagctgattgaagccgatattgtaaggccctcaaatatccagccttaccacctgccagggttccccaaattatcactgttctaggtccttcgagcccctattaatagcagcacctgatacccacgcggggcaataatacatgaatatgtgatcagccagcaacacattgctgtcatttaatcagactaactggctattacttttgcaaggaatagagttccaggggagggaaaagaacaggatgtccggctttgcctaccttgaaatctgtcttgcgtgagattttgcccattgtatgttcttaataaaactctatggaaagaaattttattggttaagggtaaagagaggtctagagcttggggtacctctatgttgagagtttgttcttgggaggtttgttctaggatgccactgaagagaaagttctcttaagaatgttgctgctctctctcaagaagagggaggatcttgattctgtttattctctgtgattaccttttctctctcaggagtgctattctgcactttgctaggaactttagagttaaatcattaaaaccacaggcattatacacagagcacctaggttattgttcttcttctaacaaggaagaaacagagtgactctacagggtcatgcagttttcacgtggcctctagacacccactcgacagtggcatagatgctagatgcccactcgccagtggtgtagctttggggccttgagggctctcttttcatctgtgccatacacgatgtgtagatatcatcacagggtgcgcctcagctgcagcaggtttggctcaaggatgctggcggtcggcttcttcttggtggtcgaaggttgaacagttcaaaacttggagttgggtctgtcccagattgtacacctcacggaaagggagtgaagtcatggtgtggcaacgagctggggcgtgagctaatgtgtatctgtgtgtgtgtgtgtgtgtgtgtgtgtgtgtgtggtgggcagggcgggggcgggcaggaggaagtgagtgtagctgtgctgccatgcctctgtttgcgtgtgtttctatataaatagatattgtaactagtatttttcctcctcttcctccctcactgtgggagtggctgtcagtttgtctgtatattttctcagtttgggaaaaattctcacatcaagaaggcatttagcctgtgaacctaaaggatcagaggacagtcctggcaatattctggatctacggctcattctctacagattctctccaggccccatgagttatgctgagtctttcctgaatctttgctggattccttttttcccctgctaacatcctcttttgtaatggcctttccatatctagattgttccttcttccaacattcaatagcgtttggcctccttgcctgtgaggtgaacaaattgtggtgtctttctcccctgcagaggagtgtacgtggatggaaacttgctggagagtaggggcagaagagagctgaagttcaaagtcagggtagggcctgtggtgcatgccgggtgggtggagtgagcagtggtgtggaaagttgctctcccaggccagctgcttgtgggagatagagagcggaggtgtggtccctgcgatctgggccagccagcctctgggcccagggatgggggcgaagctctcaggtatccttcatagccacggataatgtgccaagggcctggtattttctggctcagagtctaggcatgaggcctgcctcctcaggaccctctgtggttttcttgcccctaaattttgccttatcttctccccatgagtttctcaggctgtatttgtggcgattctcctggtgactgcatggtgacaacagtaaggcttccttgcaggtctgcagtgggtgtggccagcttcctgtgtgtaggggaaagggcttcccttgggagaattggagagcccacctttggaggtgggctcggttgagggagccagcaggagggcttcccaagtaaggttccacggagtccaagggtcctgagaagtagtagcaggagcaccacaaagaagtgtcccgtggtcaggtacactggggaaatggggctggttttgtttaaccgcaagtcttttcaggatgttggaagtgggcatacccatgggaatgagcaaggctgtttggtgtttctcaggtgtacctgatcacacagccctcggaggaccagcactctgaggaatgtatttttggggaagtgtaggtatcaggtccaggattttggatctcagtccatgttcatcctcaaagcccagtgatggtggtcatttcaggtgagctgggctggacctctgaaggaagcaaagattgtgagggttgctctcaagggtcttctgggcatgtttggaaaagtggacaagatggcggtgtcagcgaaaaagagcagggggcaggtgggcccctgggcaggagagggtggggggaaagggagccaggtgaggcacctgagaagttgtggcagcctcttagggacaaagctgaatttccctgagactagaaacctcttcttccgaaaactctgatactttttgtactgggcctatctcttgtcacttaggcaaattccttttcagttaatgggaccaaagagagatgtttttgcctccccctaagctggaggtagttggcttaaagtggaagaatcccgaggaggcggggacctggtaaggcccccatcattcagctgccctctcacacctgaagagccacttctctgctccaactgtggctggctttgtgttttgttttaaccaggaaggctgttccccgtgacctcaggggccacatcctgcttctgctgcctgccttgcctttgcaccctttgagtcagtgctgctcagccagcagcccctttctgagtcacagccacacagctgggccaaccgtgcgttggtttccttccccttagcaggacttagagaatctcagaactttagagctagaagtgcctttaaggattatttagtccgccttcccattctattgataagtaagctaggcccagagatgtactagctcaaaggcaccctagtacttagtagttgactggatggtccccttgactcccagttcagccttgaacttctggggcctcatcttgctgtggttcaagtctttggaggtatgagaatagagggagccatgatgtcactccaagtgtctaatagatgaacttccaggagaagatgtctttatctttgaccttctggcttatctgaagagtacagactcttaggaaaacctctcttaagtaaaagagaggattattaaattataggacagcaagagagcaaagatctctcttgagcagggaaagaggcttaagtcatgggatactggatgtttgtattttaggaggctcagagggcagaagggacatatttcacttgagatgattccttttgcctaaaatccttacccccacactcccaccatcaaccaagcactggtcatgatgatcctatcacccccttcctgtattggggaagcaagggcctttggtatacttgatttgacacacacacactctctcacttctcactcacactctcacactcacatgctctcacacacacactctcattttctcacacacactccacactcacacacgcacacactctcacacactttctcacacacacactcacacacactcatacactcacacactttctcacacacacatattctcacacacacccacactcacacactcatgcacacacacacactttcacacaaacacacacacacactttctctctcacacacacacactccctctctcccctgtctcgaatcattttgggggcataaacataaaacctggaaatcaacctgttttctaatctttttttttgagacagagtctcactctgtcacccaggctggagtgcagtggtgtgatcttggctcactgcaaactccacctcccagattcaagcgagtctcctgcctcagcctcccaagtagctggggctacagacacacaccactatgcctggctaatttttgtatttttagtagagatggggtttcaccatgttggccaggctggtcttgaactcctcatctctggtgatccacctgcttcagcttcccaaagtgctgagattacagccgtgagccaccccatgcctggctgttttctttactatagagttgcagctttggcttattttgaagacaaattgttggttatcaatagactataaagtgctaagtctataatctcatgagtactatttctaatgagtatattttccttcctgaaaggtgcagattcactttataggaacagcttcagcttcagtgatgaaaaactgaattctccaacagactctaccccagctcttctctctgccactgtcactcctcagaaaggtaaggtcattagttggaatttgagttttttgcttttttattcctctctccttctcaatcccttctctgtcccttttatccctaaacaatctttctcaaatgtacaaaacaaataggtaagactaatgtcttaatactgtagagtatacagtggaattttttatttctcaggattttaatcagtgtgaacatgaaatcagataatttggggcagaaaacctgaagtcacagggagaaagaaaatttggagactagactgttctctctcatgtgatgtaatcaagactgtgcaaatgacagtgtttcttaggagtctcctcccagacttgttggttctagaatttaaaactcagcagtttgcctttgcagatagtgggattctttttattgcattaattatttaaccaatgctttcagatgaccaatttagcaattaaatggggttgtcattattagataagctatgatctaacatgatttaaaatagcagctccagcctgtctctactgtggtattaatagacctaaaatgtctttaaagatgcatgagcagtttcttattttttggaactggtaaaatgtctccagctagagagttgaatgttctgttacattggacaagtgcctttttgaaaacaaaaggagctttttttcttaagaaaagttatacttgctgaaaatagttgcagaatgcaataaaaatggaacatagttaaaaagaaatgacaattccatcactcttttcactttggcaataagacaggacttcactcttttttcagaagaggcatttgaaagttcccttctcaacatagcaacgttagcacccactgggaattctgccactatccagccctcagtctgtaatgaatcagttgaattcagagacagagcagtctaaaaagtggcttaaaacgtgctcagatttgttacctgatcctcaagaggtaggaattaaagagggaaaaaaagcccctagtggcaaattgacttaaaaggctaagaacaattagccatttgtagccagcaggtgttaattaataaaactgtccagtactgcatttcagggaaggcatgaatgatgtgatgaactctacaaaaataaagtcagctatatgaaaaaaatctctacatctcaggctctagagagaaccaaatcagaatgaggactcgtttccttgtgtgggcacctggaggggatgaggctgtcctgggcccagaagactcatggcaccttccctgtaccattttgataagaaacagtgaactcttcattcatttcatattggaggaactctgagggctgcagcgttgccctggggggacagcacaagcaagaatgcatcagaaggctagtgccgcaggaatgacacaatctaggtgtctgctctgcacagtgctatgcttactgaattttttgactaataactcatattctacacaatacaaaaaccagactccttttatcttcccttcctgctcctcactctcctgcaaacatttaagacagtgaaggaagattcctcttctaggtgagggagaagtggggtgggatgtttggagagggtggtgatgaactaaaaaataaagaaacacttaggctagtcttcagaatcagtttctgagtttactgtatcaaaacactggagcacacacttagggttggcccaggacactcttcaataaaagtctctgaagataaggaggtagatgtaaaatagaaataatccattctataactctggaagttccaacttcctggaaaactcaatatggagtcatcagctgtctttgttatggaaactgaactctctctctctctctctctccctctcctgtttcacagctaaattaggagacacaaaagagctagaagccttcattgctgatcttgacaaaactttagcaagtaagtacatgtctgatattaaaaacaaaaaaacaaaaaactaacagacacttctgataaagtgttgtaatgttaaccagcttgccctggggcagaaagtttcatcctaagccttctataggtttagaaacaggaccctaggccggggcagtggctcacgcctgtaatcccagcactttggaaggctgaggtgggtggattacctgaggtcaggaattcaagtccagcctggccaacatggtgaaacccaatctctactaaaaaatacaaaaattagctgggcatggtggcgcacacctgtagtcccagcttcttgggaggctgaggtaggagaatcacttgaacccgggaggcagaggttgcagtgagccgagattgcgccactgtactccagcctggtgacagagcaagactccgtcaaaatagtaataataataataataataataataataataagaagaagaagaagaagaagaagaagaagaagaagaaacaggactctagtggctaggaatgaaattctgggataagcttgtgttaaagtagaccatgtgcgtttccaaacagtgagaacaggtcactagcaaacaatggcattttgtttgagaaatggagagcgagcaagactggagcattaccatcatgatggcctgtcaggcttttcagagaagaaatgaactgattaaccacaagtgcattattccaacaagccaaaagtcttccatcccatgggccagggtaattttcccaggttagatccagggtttgggtgaaatttaactttaagatgtgggtgccaaaagagagaattggcttgtggggcctttcaccagagacccatgccagtgactgaatgacctggattaggtatgcatacttgcaagcctcttatttgggaattacactaatggttacctgttttgtgtgaccaaaaatgttgagaactgaagacatcaaattataactgcagtataggggcccagaagaagggaccctcacaatctatctacacactctatttccaaaggataagattgcaagagccaggaggaccaactccagcttctgggatggaaggttcagcaactctactacggggggtcctgtttagtcacagagtgggctaggaaaattttgtcccagccccttaattttccagggtaagggttgattttctgtgagaagtatttaatgctattctttgctaaagagccgggtaaactctgaaaaattaaatccaaagctggttatttaaaaataactatgttcttaacactcttgcagacaaacctaaatatcagatagaaagtccttgtatcatttctatttgaaaattgaagattttattgcctcttttcttatgtactgcaccatcttacatcagaagaccagggcttgttttgacagggattattataattgcagcataatttgtattagacccatgtaacaagcctgtctacttcatggaaattgcagtgggttgcccagtcattccagttaatcagacactcatcgtgtgggaagcccagcattgagtttggtgctttgatgcacgtctgagacagtgtgatgtggttaagcataggaattgtgagcctctgagtggataaccttacctatctctcatttacaggtatgtgaaacaagaagttctgggtcctttcatcataagggagaagcttcagaaagttccgaggacctgctaaaatcagctactagaatctgctgccagaggggacaaagacgtgcactcaaccttctaccaggccactctcaggctcaccttaaaatcagcccttgatcccatttctgggcaatttagacagtgaaactgactttgtttacctgcttgcagcatattagaacagacgatccatgctaatattgtattttctcttaaaacatagctttcctgtaatttaaagtgcttttatgaaaatatttgtaattaattatatatagttggaaatagcagtaagctttcccattataatatatttttgtatacaaataaaatttgaactgaagtctg

SEQ ID NO: 6876 - DNA, 121 bp, Homo sapiens
attctcctgcttcagcctcccgagtagctggactacaggcgcccgccaccacgcccggctaattttttgtatttttagtagagacagagtttcaccatgttagccaggatggtctcaatct

SEQ ID NO: 6877 - DNA, 1128 bp, Homo sapiens
ggcccctgccccggagggaaaaacaaggccctctctgggggattttctgccagcttgtgaaaacaggcctggagtcagccagcgcccccatgcttagacacttcgtgtggttttcaaagtgcttttatgttgctagctcatatgatcttccccaaaaccccataagggagggcaggaagtttgagcaacagcctgtcaagcacccatacagcaggtggtttcattgccctccatttacagacaagtaaactgagcttcagggtggctaccgcttgtctcccaagccacccagccatttagccacggaagaggtcatgactttttacaccccagtgaagctgaagatttttctttccgtttttaaaaatgtttactccccagggcagtgaacacctggtgcctctgtctagcgcaagaggtgaacgtttgccacttccgtttctttcctcctaccagacctgaccctccttttgtgacgggaacatcctgcaggcagtctgtcctgctttcatagactttgagaaacggggtccaaattgccggctgtgggtgggacaggcgacactgcagtgaagaggtggagtatttttgtagcggggaagaaatacatttcctctaccctcttaggttcagtgtttgggggtctgtgaattaaactcactcaagataaattaatgagagaaaagacagatttaatcacatacgtatgggatttcactgaaaaacgtgactcaaaagagcaggtagaaggtggggcccgtgactggtccgaaggtagtgagttatctcagttgattgttcacagtcagttacagattagactccttgttccactgtctcccctcttcccacttgttttgttttttttgagtcagagtcttgcactgttgcctgggctggagtgcaatggcacgatctcggctcactctaacctccgcctcccgggttcaagcgattcccctgcctcagcctcccgagtagctaggattacaggcacccaccaccacgcctggctaattttttgtatttttagtagagacagggtttcactatgttggccaggctggtctcaaactcctgacctcgtgatctgcctacctcggcctcccaaagtggtgggattacagg

SEQ ID NO: 6878 - DNA, 1159 bp, Homo sapiens
ggcccctgccccggagggaaaaacaaggccctctctgggggattttctgccagcttgtgaaaacaggcctggagtcagccagcgcccccatgcttagacacttcgtgtggttttcaaagtgcttttatgttgctagctcatatgatcttccccaaaaccccataagggagggcaggaagtttgagcaacagcctgtcaagcacccatacagcaggtggtttcattgccctccatttacagacaagtaaactgagcttcagggtggctaccgcttgtctcccaagccacccagccatttagccacggaagaggtcatgactttttacaccccagtgaagctgaagatttttctttccgtttttaaaaatgtttactccccagggcagtgaacacctggtgcctctgtctagcgcaagaggtgaacgtttgccacttccgtttctttcctcctaccagacctgaccctccttttgtgacgggaacatcctgcaggcagtctgtcctgctttcatagactttgagaaacggggtccaaattgccggctgtgggtgggacaggcgacactgcagtgaagaggtggagtatttttgtagcggggaagaaatacatttcctctaccctcttaggttcagtgtttgggggtctgtgaattaaactcactcaagataaattaatgagagaaaagacagatttaatcacatacgtatgggatttcactgaaaaacgtgactcaaaagagcaggtagaaggtggggcccgtgactggtccgaaggtagtgagttatctcagttgattgttcacagtcagttacagattagactccttgttccactgtctcccctcttcccacttgttttgttttttttgagtcagagtcttgcactgttgcctgggctggagtgcaatggcacgatctcggctcactctaacctccgcctcccgggttcaagcgattcccctgcctcagcctcccgagtagctaggattacaggcacccaccaccacgcctggctaattttttgtatttttagtagagacagggtttcactatgttggccaggctggtctcaaactcctgacctcgtgatctgcctacctcggcctcccaaagtggtgggattacaggcatgagccactgcacccagccaactagtctt

SEQ ID NO: 6879 - DNA, 422 bp, Homo sapiens
ctttagggttttaaggcacagatacatgaagcttgtcagtgagcagctgctgcttattcctttttctcttccaattcagagcggcctgcgtcccaagcggacagctgctcccttcctcttggctccctgctgcccacgctcccacagaagcagggagaagaggcaggaaggtgacgcgtgatcatccgctgggcgcccgcacagtgccgtctgcacaggtgccatctcctttacttgtcactctcctcgctgagccctttcccctttttgcagatgagagagcattgcctcccagaggttaagaaatgggcccagagtcactcagctgatcagcgtgcagccagatttgaaccacatcctgctgatctccatgcctgcaggcctggcctgatgagatggacagctgggtggtggagaccttg

SEQ ID NO: 6880 - DNA, 422 bp, Homo sapiens; identical to SEQ ID NO: 6879

SEQ ID NO: 6881 - DNA, 403 bp, Homo sapiens
ttgaaatccaaggggttgaaactgggttcccgatagcttccagtttgggcctgacaagaccatattggactggcaccctaggtacctcctgagtcaggacttgtcctagccacagcatcccaaattgtcattctctctaggctgagaaagctggtgggatttcataatcaccacttccttgagaagccggagcagagagaactttatagtgattgcatgcgtatcttttcacgatttacgcatcatcgtagggacccaaatgccctttaaacataaggcaactgaatctagcagtttggaggtcttagagcatttgtaataacatgctggctctctgtgaatgtcccagaaggaacatcttccatggaatggacttgtccaaaaagggagaaaaaattcccca

SEQ ID NO: 6882 - DNA, 403 bp, Homo sapiens; identical to SEQ ID NO: 6881

SEQ ID NO: 6883 - DNA, 403 bp, Homo sapiens; identical to SEQ ID NO: 6881

SEQ ID NO: 6884 - DNA, 344 bp, Homo sapiens
ctcttgtgtttggtttgttgaagggagacaactacctaaattaagtcacattcatccagaggcacggccaggttctcacttcaggacttgctgttctggagcttgtggaagacagaacccaggtgttggagagggaaggagcaggtgtgcttggaaggccccgctgtcgggttccctctgcacccatcttgtgtcccccgctggtgctctgccatgggtttctcacagcctctctgacgtcgtctcattgcagctgtacagaaaatgcaaaccgtggtcttgacgcttatacttcacttctggtcaccaaacgtgggtttttttttttttttttttttccacac

SEQ ID NO: 6885 - DNA, 242 bp, Homo sapiens
  SITE (6): n equals a,t,g, or c
atccanagcacggccaggttctcacttcaggacttgctgttctggagcttgtggaagacagaacccaggtgttggagagggaaggagcaggtgtgcttggaaggccccgctgtcgggttccctctgcacccatcttgtgtcccccgctggtgctctgccatgggtttctcacagcctctctgacgtcgtctcattgcagctgtacagaaaatgcaaaccgtggtcttgacgcttatacttca

SEQ ID NO: 6886 - DNA, 324 bp, Homo sapiens
gaagcaagaggagggagagcatgtatgggatttctggaacctagtcccgcttaggctgcatgactaacaggcaagataagacaagtctttcaagttctaaagactacagtgttgctatctgggaagatagcaagctcgcctgatgggaaaacattctacctactctgcctcaaatgcctccagaagcacccagaactttctggaaggcaattagcaaactatctccaaagtcttgctagcatgcagggacggtgtttctaaaaggagaaattggattcacttaaataccgccaagtaggggattggtcgagttatgaagtatgc

SEQ ID NO: 6887 - DNA, 2194 bp, Homo sapiens
agaaaacgaaatactagattctgacatttcagtgagatttagttgtcaaatttctggaaggatatttaaaagttcatgcttctttattctttataagaagtttgttttagatcaagtcataagcatatgtttccaggctgccgcaatataataagcccaattcttcgttaggtgagaaattagactgggcaactggagagggtagatggtgtccccgtctttcaggaccgttctatcttcatgaagcccttcatgatttcttctgccaggagcaatgtctccaccctccaacctccaggaatgtttcatacctttcttattacattggtcgtgttttgtgtgtgcttgtttcattaccattcttttttccttccttcatttggtaggtctttgttgtctttgttgagcacttatgtgtcagacactatgctttctaattgggttgtaataaatcatgcattaaatgtagcaattgccacatttaatagcagtctaaaggcctggcgtggtggctcatgcctgtaatcccagcactttgggaggcctaggtgagaagatcacttgaggccaggagttcaagaccagccttggcaacatagtgagtccccatctctacaaaaaaaattttaaaattatgtaattagggcggggcacggtggcttatgcctgtaatcccagcactttgagaggccgaggcaggtggattacctgaggtcaggagtttgagactaacctggccaaatggtgaaacttcatctctactaaaaatacaaaactcaaccgggcgtggtgttgcacgcctgtggccccagctacttgagaggctgaggcaggagaattgcttgagcctgggaggtggaggttgcggtggccgaaattgtgccactgtactccagcctggtcgacagagcgagactccgtctcaaaaaaacaaaaaaaaaaaaacaaaaaaggaaagaaattagctgggcatggtggcttgcacctgtggtcccagtctaggttcttgtacattcttatattggacaataatagttggatgaatagtgatgcttgagatgcagattcccatctataaaactataatttcacttagcaaagacctcaaataaatcacttcaatgctgtattttaaaagtacctttgcttcccattactacatgaagagacttctgtaactttttccagacgacacaattagatttactgtgtcttcaggactgtggaggaagttattgcaagttttactcagacagttacaaaaataaacatatgtaaggtcgaaggactaaaacaattggagatcactgccgagatcaatgcaacctcaggagtttaatctatattgagggtgtgctttctcttgaatttaggaccaactagcaataacaaatattggagttaccagagacttccaatggtctgttggttgctgttctccacttgaaagggttggttggttactcccgactccagacttcctttccatttatgtatgtatgtgtatatatgtatagacagggtctcactatgtcgcccaggctagagtgcagtgactgcggttgagctcactgcagcctcaacttccccaggctcaggtgatccttccacatcagtctgcaagtagctgagactacaggcacacaccaccacaccaagcaaatttttgtattttttgtggagacaggattttgccaacttgcccaggctagtctggaccttctgggctcaagggatctgcccaccttggcctcccaaagtgctgggattataggtgtgagccaccatgcccaatctccttttcctttgccctaacaaacattctggttgttgctactcatttttttttcaaaggaatgcaaacacacttaaatgtaacacataaatctgctttatagaaatttcatcattcattacatttttttgaatgtttgtattattcgttaatattacttgtgaatacagttagttgcattactgacttttatgatgtttgttaacttgtctgaacctcatctatgacctagggcaataatagccacattataggattactgtgattaaatgaaacaatatgtgtaaaatgcttggcaccagcctggcacataatacctgcaaactctctctgcctccattttcttcttaaacatttgcttgggactgtgaaacatacagtggggcacttgcacatgtg

SEQ ID NO: 6888 - DNA, 251 bp, Homo sapiens
gtttttctgagatttaaatttgtttctgtttatacttttactcaattggagaaaataatggaggtcttgaaggaatttgtgccaatttgcttacataactattgcatatgtatcagagttcagtgactcatctctttaccatcatggggtttttgacatgcaaggctagaaaatttcatgagattggttggctaaattgaactggttttgtagaatgaatacataaaaattagtgcattccttatataaca

SEQ ID NO: 6889 - DNA, 331 bp, Homo sapiens
agacaagagagcgcaggatgtgtcgtttttctctgaactgagccactccaacaggtgggggccaggtagggaccatagtgaggacccagctgcctgctgagctgagccaggtctctgtggtgctgaattttcctctctgatcccatgggggctcagcagaaatagctcagggcttgagccttaaactgcctatccttagtaggaattattctttgccaaggacagtgtttcttccaagtctgattgtgacatttattcaggacagctatagaaagcacagataagaaaaaaatatttccaatcccactcatgagagagagaaccattttgg

SEQ ID NO: 6890 - DNA, 9733 bp, Homo sapiens
cggagcgtagcggcctctagctcgagcagcaggagcagcccgcaccggacaacttgcgagccatggggctggcggatgcgtcggggtgagttcagcgcacattcccggtggccccgcgcgagcgcctcgctggagcaggcattctccgcttgcgacgcctcgctggagcaggcattctccgcttgcgacgcctcggtttacctctgctgattttctgcaggcggctgcccctctgcagcaaggggtgggggcgggagccggcgcgaccccagtcccttgggctgtgcggaaagccgctggtgtgacgcccgagggccatcccgggccacagggaggcagctgcgtgcggaggagcccggccaggagatgtgccggcgggggtgcgtggggcacgggagtccctggcagcggcccgtggactagctgctttcagctgagtcccgagtccacccagctccactgatcccggagtgagcgctccggcctttctggccccagttgccttcctacagggaggggccaatgatcaaggctccgccctccaaacgcgggtcccaagttgtcgggggagggagccctttaagaagacctgagtgactcacgtaggaaaggagagggggctctacgatctccttgagatagcggtcccaagagtctctgaggatcttccttgcacccactccacactcctccaacagtacagccaggttagaggcgcttcccaggtgagttcctgtccctcaaatgggatcctctccccaggtcagggcttttcctagatcagaactttcctgactggtgaaagcttccccaacaggctagagttttcccccaggtaagatccttctgtgagatctattcccaggtgacagcttttccccattccacgtgggagcctcgcccgaggtcagagctttctctatgggagagtaccccccaggtgagaaccctctccctctaggtcttttcttcccatgtgagatctttctctgacttcaagtaggtgcctctgggcagagggaagattccccctgtatcagaacttgccaggctgataaagattccctggtaggtcagagatccctctaggtgagattccccttgaaagcttctattcccaggtgagctctttcccccacttcaagtgggtacttccctttccatgtgggagcctctccctctaggtgagagattgccactccaagagcaagctccttctcaggtgagagccagtccttggcttccccataacaggcctgagccgtctacaacctggaccctggggctggaggcccaggggcaagcttggctccaacactttccttcccttagaggggagggtctcatctgaggcctgaggcttgggaaaggagttgcttgaggagctggacccctggtttgctggaccccttccctgagtgtgctctcagccagcagtgggctcccggggcagctggaggaggacctggggactggagagggactgggtgggggagggagcagcctgggacctggactggtagaacactcagcactgggctgccacatctcggctggaggtatagctagtgctcatcctgcagtccctacttgggggactttgtcctagaaagaggctttctcaccagccaaagttcaggtactgcccctgtctgagtttggacatgtggcccacagatgccagctgggggctggaatactgtaccttgatcttagggcctggaaaaatcaggtaggtaactctctggtcctaggtggaggtgtaggggaggttgggccagggatgccttcactgtgtctctctggtcttgccaccccagaccgagggacacacaggcactgctgtctgcaacacaagcaatggacctgcggaggcgagactaccacatggaacggccgctgctgaaccaggagcatttggaggagctggggcgctggggctcagcacctaggacccaccagtggcggacctggttgcagtaaggccaagattggggcctgggggcgctggcgggcccaggtagcccctgttcctgacacctacccctcatatcatgtccctaggtgctcccgtgctcgggcctatgcccttctgctccaacacctcccggttttggtctggttaccccggtatcctgtgcgtgactggctcctgggtgacctgttatccggcctgagtgtggccatcatgcagcttccgcagggtgagccaccttcagtgcgtcggcctggaaaccctgtggtctgtgatgcccaaaactggggccatgacctctaccttggaactatggcacctaacccagggctgggattcccttatcgtttcaagatctgctctccaggcctgcactgctaccattctacccctaggcttagcctacgccctcctggctggattgccccccgtgtttggcctctatagctccttctaccctgtcttcatctacttcctgtttggcacttcccggcacatctccgtgggtaagtggaggcaggcctagccttccaggaggatgcccacatccatcatggagggcagggtgagggggcactgagcagggcaggagcggctggggaagagggcagcattggtgctgcatccctgggctagcccacgagtcatccccaggcaggactagacccctgactgtaggaccacagaggcaggtgacctcaaagccctggctccaggaagatgagagtgggtgaggcagcccaaggcgctggaacttggcagaggcctgagcagcctaagccagccctgaccccttccctactccacagagagcctctgtgtcccgggaccagtagacacaggtgggacagggtagatgagacagggccagcatttctagccatgcttaagggcctgtgagctcagggtttactcctggcctggcaaacctgaaccgccagcactgtccctgttcatgcagccataatctgagtacatttatccagaactggaagtctcctggcctctctcttaagaccagggctccagggcagggcagtgtcctctcctcttcagacctgccccgtgccgtccttacagggacctttgctgtcatgtctgtgatggtgggcagtgtgacagaatccctggccccgcagctcttgaacgactccatgatcaatgagacagccagagatgctgcccgggtacaggtggcctccacactcagtgtcctggttggcctcttccaggtgtggaacagtcaggagtatgtgccccccaccaccacttctgctcccgccactgtcctgtctgtactcccctgagtgtctgaccatcgtcgtcctcctcttgccgtctactcatccccctcccatcccacttgccctgcgctcctcattagcaaccccaggacccctgcctctcctgactgcccctggccgccccacaggtggggctgggcctgatccacttcggcttcgtggtcacctacctgtcagaacctcttgtccgaggctataccacagctgcagctgtgcaggtcttcgtctcacagctcaagtatgtgtttggcctccatctgagcagccactctgggccactgtccctcatctatgtgagtgagggtagggggagggaggggtaggtgtgccccatggccttgagtgctagctgtgacctggcctctcctcagacagtgctggaggtctgctggaagctgccccagagcaaggttggcaccgtggtcactgcagctgtggctggggtggtgctcgtggtggtgaagctgttgaatgacaagctgcagcagcagctgcccatgccgatacccggggagctgctcacggttcgagggccagggagtggagggcaggggagaagggcaggtcaggctgggtccttgccacgtgggcagcctcctgtatttgagggccagctggaggggggctgggagggttcttgggtattgtggggggcacagcagaaagcccctatgttggtttcttcctgcccctgacagcatctccccatagccgaaatggtgttgcctgtctctcaccctacgtgactttttcccaccctcgaagaaggttttgcccagtatctccctcctcacctcacagtggtttatgtgtccccctgaccatggtgccagcacctgcctccctgactctgtcctctcccacagctcatcggggcgcacaggcatctcctatggcatgggtctaaagcacagatttgaggtagatgtcgtgggcaacatccctgcagggtgagctctggcctccatcaggtcagggagggttgggcagccaggacaggaccttgctttggcctcacagatacctctcacaggctggtgcccccagtggcccccaacacccagctgttctcaaagctcgtgggcagcgccttcaccatcgctgtggttgggtttgccattgccatctcactggggaagatcttcgccctgaggcacggctaccgggtggacagcaaccaggtctgggtgatgcgggatgtgtaggaggcatccaagtgtatggaggcgccagcaacgggtgggggaggaaccggtgggacacagggagacagcagatgtgctgaggccacgtgggggactgagggtgggagagcaggacgtgtgggacagcatccagtctctgggggccacttggtggggatggagattggggatgcacaggcctagatacagtggaacagtgaccagccacttctaggaagtcttctcacacccgtactgtcccccgtcaggagctggtggccctgggcctcagtaaccttatcggaggcatcttccagtgcttccccgtgagttgctctatgtctcggagcctggtacaggagagcaccgggggcaactcgcaggtgggctttgggtgtgggcatgggtgtgggcatgcacattgctttgcctggggaaggaggtctctcccctgctcactccctccccgaacaggttgctggagccatctcttcccttttcatcctcctcatcattgtcaaacttggggaactcttccatgacctgcccaaggtgagcccccacccagccaggtttcaggtcttggccaggccagggctctcaaatcagccagtctaggttcaggcgaggggtggggacacaaggttaggttctgtttttcaaggctgagatcttcaaggtgagatttggagacaagggtcaggggctgggtgggggtttgtgtctggggtactgcctgagtgcttgggcttagtctggctttgcctcggtgaggagggttgtcagcatcgggtgccctcaatggcccctggtggcactgtccccaccccaggcggtcctggcagccatcatcattgtgaacctgaagggcatgctgaggcagctcagcgacatgcgctccctctggaaggccaatcgggcggatctggtgagtgcactgggagcccagggcagggactgggcagccccatggctcctcgccgccctccaaccgctgccctctgttctcagcttatctggctggtgaccttcacggccaccatcttgctgaacctggaccttggcttggtggttgcggtcatcttctccctgctgctcgtggtggtccggacacagatgtgagtccgccatgttggtcccctcattccagctagtgagagagtaccacagggctccccgcagctttccccacatctctggggacttcaggctccttcggacccctctgttatcccctttttctgccccctcttcgtgcattctctctctccttcacaggccccactactctgtcctggggcaggtgccagacacggatatttacagagatgtggcagagtactcagaggtgagtgtcaggggctgagtgagatggtgtggatggggagacggaggaagaatgagcctttgtggattcgttccacacttggccagggaactgggggctgaggatactttggctttggtctttgggatttcaagggaggagtttaggtctatgaccccctctagaggtatgaagggacagagggagagtggacagagatgggtctggggctggggaggggtctgtcgtggagtcaacagcacaagctccacctgcagagcagccgtgggtcagagagccggaatggcagctccctggggcgccaggttggaagggaggcatttcctgatctgatcagtggggttactaagtcctcagtcatccatttatctcctgagaggtcttgggccaagtgctaggaacataggtggggggctctggaataaaacaagctgttgcctgcaacatgggcacagtgcaattaggcagtgcggggaggaattaaggggtctgagacatgggagaggatgagggggcagcccagcccttaccatgcatgcctggagcccagcagagacccgggctgtgacccgaatggggtgggagcggggaaggtctgattgatatgacagcctaggaggacctctgtctgggtgcagaaaacagaacacaaggcaggggttggaaacccaagagaaaggttaagagcctgtgaagcctgcctgggtggtggcaggagaggtggggagggagaggcactgtggggggatggggatgacaccgtcgggcttgtggcctaagcccctgggagggcctggactgcagcctggggagcagagggctgggcggtggcaggcactgggcacactagggaaggaaaggcaggagaacaggatgcagccaggagagaggagattcagccaccaccagttctgcctcatccccaggccaaggaagtccggggggtgaaggtcttccgctcctcggccaccgtgtactttgccaatgctgagttctacagtgatgcgctgaagcagagggtgagacggagtccccaggatgggtgtcaggccccagctcccagagagctcaccaacccttctctgatgtttgcctccagtgtggtgtggatgtcgacttcctcatctcccagaagaagaaactgctcaagaagcaggagcagctgaagctgaagcaactgcagaaagaggagaagcttcggaaacaggcagggcccttttgtctggtgacccccatctcctgccccctgttccctgccccagcctttctcctggcccccgactcctccctcgtcctcactcctcatcccttcccctttctccctcatgctcccagggaccctgcttcactcccctagcaggtccgggctctaggcagcattttctctcccatcatctgaaccagtgacagtgagaaccgtcacagtcctcttccctttcacggctgttccaggagcttcagcctggctgctgcaggtcccacagcttctggtcctggcccacccacctgcccagcaccagggggcatcaccaggcctatgtgacatggctgtcatggcagccgggctagctgtttcccattccctgtcttccctggtgtaggctgcctcccccaagggcgcctcagtttccattaatgtcaacaccagccttgaagacatgaggagcaacaacgttgaggactgcaagatgatggtgagactggaggtgggaaaggaggtgacagctgtgagctgcagagatgcaggatccacatgtctcatgaggaatgccatggacccagcagctgtgggctcgagggtgttgcgccgatggcaggaggagtggggaggctgggtcagatattcttcagggagcgtcgtgatatgccacagaatctaggcttagattctcaggcctagatgaagaccttgaatttgtagatcccacaagacttcccccagagtctgctcatgggtagaggaaagggatggggtatatgggagaaaatcaaggggtcaaaggcaggcgtggtggtacgcgcctgtagtcccagctcttcgggaggctaaggcgggaaaatcatttgagcccaggagctcggggctgcagtgcgctctaatggtgcctgtgaataaccactgcattcagcctgggcaatgaagcgagaccccgtctctaaaaaaaaaattgaggggtcaaagaggatgccaaacttaattagagactgagacagggcagggtgccgaggtgtctgcatgcgtttcatgtggatgcccgtgtctattctggcctgctcctgggccccctccccactcagccctggctgatgagaatgggacagggactcccttctcgtgtccctgtgcagcgtcggcccaggaggtagcagagcagtatatgcacatctgggtgtgccctcctgcatgtccccacacatctgtcattcctgtctttgcacacctatgtgactcccgcatgtttgtgtccttatgtgtcccatgcatgctccccatctgaccttgcgtgttctcgcgtgtctgtgtgcggccagtcctgccttcactctctcatgggtggccctggcagcatgtctggctccccagcaggtgagctcaggagataagatggaagatgcaacagccaatggtcaagaagactccaaggccccagatgggtccacactgaaggccctgggcctgcctcagccagacttccacagcctcatcctggacctgggtgccctctcctttgtggacactgtgtgcctcaagagcctgaagaatgtaaggacgggggcaggccaaggcccctcgagcttccacactgaccctgtaatttgccctgagagcactcccagcctctgactccccaaaccctcaaagctccccttctaaactccctccccaagcctgcccgagcccccctctgagtccctgagcctccctctgaggctggcccccttttccgctacagattttccatgacttccgggagattgaggtggaggtgtacatggcggcctgccacagtgagtagggtgggaacagcaggagggacctgggaagagggtaggatacttttggccaaggggttttccaagtagcacaaggaaaaagtctttctctggaactggaggtcagaggtgtcctgggagacaggagtccagggttacaagtgatgtggattcagctgtagcctcaggggtggaggtcaggggtgatgaggtcagggcattctgttggctcccgggagttgagttcctagaggttctgagagtcaggggaggcctacttcttgcccacaggccctgtggtcagccagcttgaggctgggcacttcttcgatgcatccatcaccaagaagcatctctttgcctctgtccatgatgctgtcacctttgccctccaacacccgaggcctgtccccgacagccctgtttcggtgagcctacctctggcctgccaagctcttttttgttaatctattgcttgtccccaccctggccccagctccagggagtctttcctggtggccatggctctgtccccagtgggcccagtgctttctccgctgtctttggataaagctgttctaggggcgggggttggtctgtgtcctttggaaactgactagagcctcccctcctctgcctgctcaggtcaccagactctgaacatgctacatcctgcccaagactgcacctctggaggtgcagggcacccttgagaagcccctcacccctaggccgcctccaggtgctacccaggagtcccctccatgtacacacacacaactcagggaaggaggtcctgggactccaagttcagcgctccaggtctgggacagggcctgcatgcagtcaggctggcagtggcgcggtacagggagggaactggtgcatattttagcctcaggaataaagatttgtctgctcaactcca

SEQ ID NO: 6891 - DNA, 9738 bp, Homo sapiens
cggagcgtagcggcctctagctcgagcagcaggagcagcccgcaccggacaacttgcgagccatggggctggcggatgcgtcggggtgagttcagcgcacattcccggtggccccgcgcgagcgcctcgctggagcaggcattctccgcttgcgacgcctcgctggagcaggcattctccgcttgcgacgcctcggtttacctctgctgattttctgcaggcggctgcccctctgcagcaaggggtgggggcgggagccggcgcgaccccagtcccttgggctgtgcggaaagccgctggtgtgacgcccgagggccatcccgggccacagggaggcagctgcgtgcggaggagcccggccaggagatgtgccggcgggggtgcgtggggcacgggagtccctggcagcggcccgtggactagctgctttcagctgagtcccgagtccacccagctccactgatcccggagtgagcgctccggcctttctggccccagttgccttcctacagggaggggccaatgatcaaggctccgccctccaaacgcgggtcccaagttgtcgggggagggagccctttaagaagacctgagttactcacgtaggaaaggagagggggctctacgatctccttgagatagcggtcccaagagtctctgaggatcttccttgcacccactccacactcctccaacagtacagccaggttagaggcgcttcccaggtgagttcctgtccctcaaatgggatcctctccccaggtcagggcttttcctagatcagaactttcctgactggtgaaagcttccccaacaggctagagttttcccccaggtaagatccttctgtgagatctattcccaggtgacagcttttccccattccacgtgggagcctcgcccgaggtcagagctttctctatgggagagtaccccccaggtgagaaccctctccctctaggtcttttcttcccatgtgagatctttctctgacttcaagtaggtgcctctgggcagagggaagattccccctgtatcagaacttgccaggctgataaagattccctggtaggtcagagatccctctaggtgagattccccttgaaagcttctattcccaggtgagctctttcccccacttcaagtgggtacttccctttccatgtgggagcctctccctctaggtgagagattgccactccaagagcaagctccttctcaggtgagagccagtccttggcttccccataacaggcctgagccgtctacaacctggaccctggggctggaggcccaggggcaagcttggctccaacactttccttcccttagaggggagggtctcatctgaggcctgaggcttgggaaaggagttgcttgaggagctggacccctggtttgctggaccccttccctgagtgtgctctcagccagcagtgggctcccggggcagctggaggaggacctggggactggagagggactgggtgggggagggagcagcctgggacctggactggtagaacactcagcactgggctgccacatctcggctggaggtatagctagtgctcatcctgcagtccctacttgggggactttgtcctagaaagaggctttctcaccagccaaagttcaggtactgcccctgtctgagtttggacatgtggcccacagatgccagctgggggctggaatactgtaccttgatcttagggcctggaaaaatcaggtaggtaactctctggtcctaggtggaggtgtaggggaggttgggccagggatgccttcactgtgtctctctggtcttgccaccccagaccgagggacacacaggcactgctgtctgcaacacaagcaatggacctgcggaggcgagactaccacatggaacggccgctgctgaaccaggagcatttggaggagctggggcgctggggctcagcacctaggacccaccagtggcggacctggttgcagtaaggccaagattggggcctgggggcgctggcggggcccaggtagcccctgttcctgacacctacccctcatatcatgtccctaggtgctcccgtgctcgggcctatgcccttctgctccaacacctcccggttttggtctggttaccccggtatcctgtgcgtgactggctcctgggtgacctgttatccggcctgagtgtggccatcatgcagcttccgcagggtgagccaccttcagtgcgtcggcctggaaaccctgtggtctgtgatgcccaaaactggggccatgacctctaccttggaactatggcacctaacccagggctgggattcccttatcgtttcaagatctgctctccaggcctgcactgctaccattctacccctaggcttggcctacgccctcctggctggattgccccccgtgtttggcctctatagctccttctaccctgtcttcatctacttcctgtttggcacttcccggcacatctccgtgggtaagtggaggcaggcctagccttccaggaggatgcccacatccatcatggagggcagggtgagggggcactgagcagggcaggagcggctggggaagagggcagcattggtgctgcatccctgggctagcccacgagtcatccccaggcaggactagacccctgactgtaggaccacagaggcaggtgacctcaaagccctggctccaggaagatgagagtgggtgaggcagcccaaggggcctggaacttggcagaggcctgagcagcctaaggccagccctgaccccttccctactccacagagagcctctgtgtcccgggaccagtagacacaggtgggacagggtagatgagacagggccagcatttctagccatgcttaagggcctgtgagctcagggtttactcctggcctggccaaacctgaaccgccagcactgtccctgttcatgcagccataatctgagtacatttatccagaactggaagtctcctggcctctctcttaagaccagggctccagggcagggcagtgtcctctcctcttcagacctgccccgtgccgtccttacagggacctttgctgtcatgtctgtgatggtgggcagtgtgacagaatccctggccccgcaggccttgaacgactccatgatcaatgagacagccagagatgctgcccgggtacaggtggcctccacactcagtgtcctggttggcctcttccaggtgtggaacagtcaggagtatgtgccccccaccaccacttctgctcccgccactgtcctgtctgtactcccctgagtgtctgaccatcgtcgtcctcctcttgccgtctactcatccccctcccatcccacttgccctgcgctcctcattagcaaccccaggacccctgcctctcctgactgcccctggccgccccacaggtggggctgggcctgatccacttcggcttcgtggtcacctacctgtcagaacctcttgtccgaggctataccacagctgcagctgtgcaggtcttcgtctcacagctcaagtatgtgtttggcctccatctgagcagccactctgggccactgtccctcatctatgtgagtgagggtagggggagggaggggtaggtgtgccccatggccttgagtgctagctgtgacctggcctctcctcagacagtgctggaggtctgctggaagctgccccagagcaaggttggcaccgtggtcactgcagctgtggctggggtggtgctcgtggtggtgaagctgttgaatgacaagctgcagcagcagctgcccatgccgatacccggggagctgctcacggttcgagggccagggagtggagggcaggggagaagggcaggtcaggctgggtccttgccacgtgggcagcctcctgtatttgagggccagctggaggggggctgggagggttcttgggtattgtggggggcacagcagaaagcccctatgttggtttcttcctgcccctgacagcatctccccatagccgaaatggtgttgcctgtctctcaccctacgtgactttttcccaccctcgaagaaggttttgcccagtatctccctcctcacctcacagtggtttatgtgtccccctgaccatggtgccagcacctgcctccctgactctgtcctctcccacagctcatcggggccacaggcatctcctatggcatgggtctaaagcacagatttgaggtagatgtcgtgggcaacatccctgcagggtgagctctggcctccatcaggtcagggagggttgggcagccaggacaggaccttgctttggcctcacagatacctctcacaggctggtgcccccagtggcccccaacacccagctgttctcaaagctcgtgggcagcgccttcaccatcgctgtggttgggtttgccattgccatctcactggggaagatcttcgccctgaggcacggctaccgggtggacagcaaccaggtctgggtgatgcgggatgtgtaggaggcatccaagtgtatggaggcgccagcaacgggtgggggaggaaccggtgggacacagggagacagcagatgtgctgaggccacgtgggggactgagggtgggagagcaggacgtgtgggacagcatccagtctctgggggccacttggtggggatggagattggggatgcacaggcctagatacagtggaacagtgaccagccacttctaggaagtcttctcacacccgtactgtcccccgtcaggagctggtggccctgggcctcagtaaccttatcggaggcatcttccagtgcttccccgtgagttgctctatgtctcggagcctggtacaggagagcaccgggggcaactcgcaggtgggctttgggtgtgggcatgggtgtgggcatgcacattgctttgcctggggaaggaggtctctcccctgctcactccctccccgaacaggttgctggagccatctcttcccttttcatcctcctcatcattgtcaaacttggggaactcttccatgacctgcccaaggtgagcccccacccagccaggtttcaggtcttggccaggccagggctctcaaatcagccagtctaggttcaggcgaggggtggggacacaaggttaggttctgtttttcaaggctgagatcttcaaggtgagatttggagacaagggtcaggggctgggtgggggtttgtgtctggggtactgcctgagtgcttgggcttagtctggctttgcctcggtgaggagggttgtcagcatcgggtgccctcaatggcccctggtggcactgtccccaccccaggcggtcctggcagccatcatcattgtgaacctgaagggcatgctgaggcagctcagcgacatgcgctccctctggaaggccaatcgggcggatctggtgagtgcactgggagcccagggcagggactgggcagccccatggctcctcgccgccctccaaccgctgccctctgttctcagcttatctggctggtgaccttcacggccaccatcttgctgaacctggaccttggcttggtggttgcggtcatcttctccctgctgctcgtggtggtccggacacagatgtgagtccgccatgttggtcccctcattccagctagtgagagagtaccacagggctccccgcagctttccccacatctctggggacttcaggctccttcggacccctctgttatcccctttttctgccccctcttcgtgcattctctctctccttcacaggccccactactctgtcctggggcaggtgccagacacggatatttacagagatgtggcagagtactcagaggtgagtgtcaggggctgagtgagatggtgtggatggggagacggaggaagaatgagcctttgtggattcgttccacacttggccagggaactgggggctgaggatactttggctttggtctttgggatttcaagggaggagtttaggtctatgaccccctctagaggtatgaagggacagagggagagtggacagagatgggtctggggctggggaggggtctgtcgtggagtcaacagcacaagctccacctgcagagcagccgtgggtcagagagccggaatggcagctccctggggcgccaggttggaagggaggcatttcctgatctgatcagtggggttactaagtcctcagtcatccatttatctcctgagaggtcttgggccaagtgctaggaacataggtggggggctctggaataaaacaaggctgttgcctgcaacatgggcacagtgcaattaggcagtgcggggaggaattaaggggtctgagacatgggagaggatgagggggcagcccagcccttaccatgcatgcctggagcccagcagagacccgggctgtgacccgaatggggtgggagcggggaaggtctgattgatatgacagcctaggaggacctctgtctgggtgcagaaaacagaacacaaggcaggggttggaaacccaagagaaaggttaagagcctgtgaagcctgcctgggtggtggcaggagaggtggggagggagaggcactgtggggggatggggatgacaccgtcgggcttgtggcctaagcccctgggagggcctggactgcagcctggggagcagagggctgggcggtggcaggcactgggcacactagggaaggaaaggcaggagaacaggatgcagccaggagagaggagattcagccaccaccagttctgcctcatccccaggccaaggaagtccggggggtgaaggtcttccgctcctcggccaccgtgtactttgccaatgctgagttctacagtgatgcgctgaagcagagggtgagacggagtccccaggatgggtgtcaggccccagctcccagagagctcaccaacccttctctgatgtttgcctccagtgtggtgtggatgtcgacttcctcatctcccagaagaagaaactgctcaagaagcaggagcagctgaagctgaagcaactgcagaaagaggagaagcttcggaaacaggcagggccccttttgtctggtgacccccatctcctgccccctgttccctgccccagcctttctcctggcccccgactcctccctcgtcctcactcctcatcccttcccctttctccctcatgctcccagggaccctgcttcactcccctagcaggtccgggctctaggcagcattttctctcccatcatctgaaccagtgacagtgagaaccgtcacagtcctcttccctttcacggctgttccaggagcttcagcctggctgctgcaggtcccacagcttctggtcctggcccacccacctgcccagcaccagggggcatcaccaggcctatgtgacatggctgtcatggcagccgggctagctgtttcccattccctgtcttccctggtgtaggctgcctcccccaagggcgcctcagtttccattaatgtcaacaccagccttgaagacatgaggagcaacaacgttgaggactgcaagatgatggtgagactggaggtgggaaaggaggtgacagctgtgagctgcagagatgcaggatccacatgtctcatgaggaatgccatggacccagcagctgtgggctcgagggtgttgcgccgatggcaggaggagtggggaggctgggtcagatattcttcagggagcgtcgtgatatgccacagaatctaggcttagattctcaggcctagatgaagaccttgaatttgtagatcccacaagacttcccccagagtctgctcatgggtagaggaaagggatggggtatatgggagaaaatcaaggggtcaaaggcaggcgtggtggtacgcgcctgtagtcccagctcttcgggaggctaaggcgggaaaatcatttgagcccaggagctcggggctgcagtgcgctctaatggtgcctgtgaataaccactgcattcagcctgggcaatgaagcgagaccccgtctctaaaaaaaaaattgaggggtcaaagaggatgccaaacttaattagagactgagacagggcagggtgccgaggtgtctgcatgcgtttcatgtggatgcccgtgtctattctggcctgctcctgggccccctccccactcagccctggctgatgagaatgggacagggactcccttctcgtgtccctgtgcagcgtcggcccaggaggtagcagagcagtatatgcacatctgggtgtgccctcctgcatgtccccacacatctgtcattcctgtctttgcacacctatgtgactcccgcatgtttgtgtccttatgtgtcccatgcatgctccccatctgaccttgcgtgttctcgcgtgtctgtgtgcggccagtcctgccttcactctctcatgggtggccctggcagcatgtctggctccccagcaggtgagctcaggagataagatggaagatgcaacagccaatggtcaagaagactccaaggccccagatgggtccacactgaaggccctgggcctgcctcagccagacttccacagcctcatcctggacctgggtgccctctcctttgtggacactgtgtgcctcaagagcctgaagaatgtaaggacgggggcaggccaaggcccctcgagcttccacactgaccctgtaatttgccctgagagcactcccagcctctgactccccaaaccctcaaagctccccttctaaactccctccccaagcctgcccgagcccccctctgagtccctgagcctccctctgaggctggcccccttttccgctacagattttccatgacttccgggagattgaggtggaggtgtacatggcggcctgccacagtgagtagggtgggaacagcaggagggacctgggaagagggtaggatacttttggccaaggggttttccaagtagcacaaggaaaaagtctttctctggaactggaggtcagaggtgtcctgggagacaggagtccagggttacaagtgatgtggattcagctgtagcctcaggggtggaggtcaggggtgatgaggtcagggcattctgttggctcccgggagttgagttcctagaggttctgagagtcaggggaggcctacttcttgcccacaggccctgtggtcagccagcttgaggctgggcacttcttcgatgcatccatcaccaagaagcatctctttgcctctgtccatgatgctgtcacctttgccctccaacacccgaggcctgtccccgacagccctgtttcggtgagcctacctctggcctgccaagctcttttttgttaatctattgcttgtccccaccctggccccagctccagggagtctttcctggtggccatggctctgtccccagtgggcccagtgctttctccgctgtctttggataaagctgttctaggggcgggggttggtctgtgtcctttggaaactgactagagcctcccctcctctgcctgctcaggtcaccagactctgaacatgctacatcctgcccaagactgcacctctggaggtgcagggcacccttgagaagcccctcacccctaggccgcctccaggtgctacccaggagtcccctccatgtacacacacacaactcagggaaggaggtcctgggactccaagttcagcgctccaggtctgggacagggcctgcatgcagtcaggctggcagtggcgcggtacagggagggaactggtgcatattttagcctcaggaataaagatttgtctgctcaactcca

SEQ ID NO: 6892 - DNA, 10467 bp, Homo sapiens
gttctgcccacaagcagcagcatagaaaactccaccacctcaagtgtggtccccccaccagccccgccagagccagagcctgggatctccattatcattctcctcgtttaccgcaccttagggggactgctccctgcccagttccaggcagaacgccgaggtgccaggtactcaggcccctcacccctgagcttcctacgaacttctcagcctggcagccccttttttggtgggtagatgcgtaggttcacaacacacagagaggagcacagctccagggagccccatccttgccgggttctgtgtgaatcttattctctggagttgtgcagagtgacagagccacaggctgacagacacagagccacacacaggagggatccatgagccaggtacagacagaccaaagggctgacagagacagacaaggacaggctgactgatgggggtaggagggagggcaatcagaggcaaacagttgcaggtcccctggagctgctcagcccctcagcagcccagcagaagctggagggattcttagaaacagcttccactctggggacatcccagaccctgggtcagccctggcgagtggcatgaagacggggtgaggcaagcaggctgagcatggggaggtcagcagtgcgtaagcccagatgggtgtctccccaggcttcctcagaaccccgtcatgaactccccggtggtcagcgtggctgtgttccacggacgcaacttcctaaggggaatcctggagtcccccatcagcctagagtttcgcctgctacagacagcgaatcggagcaaggcgatctgtgtgcagtgggacccacctggcctgtgaggacccccattctggaaacccttggtcccgttagcccttgggaggccaactaatagtcccagccttcccctggggcccccactagtgctgttgtgcaacccggaccatgaggaatgctgtaccccaactccaggcaccctcagcccttcccatgatctctcacaaacccctgcctgacactgggtcacagttgtgtctaactgccctgtggctgcagggcggagcagcatggtgtgtggacagcacgggactgcgagctggtgcacaggaatgggtcccacgcacggtgtcgctgcagccggacagggacctttggggtcctcatggatgcctctccccgtgaggtggggctgtgttcagtgtcccaaggaagtggggggtcaaagggacacggggattctgcccaacaacccatcaaccatccctgtctctgtagaggctggagggcgacctggagctgctggctgtgttcacccacgtggtcgtggctgtgtctgtggctgcgctggtgctgactgcagccatcctgctgagcctgcgcagcctcaagtccaatgtgcgtgggatccatgccaatgtggcagccgccctgggggtggcagagctcctcttcctgctggggattcacaggacccacaatcaggtgcaggatcagggccagggaacttgtgtcctgatgaccctactggcccaggaggcctggggccaaaactcagggtcagaggtcagggatgctcaggttggggccagggttttcagcaggatgctggggtaagatattgtggtttaggggtgagaggtgggaagcagatgcctggggtaggggtcagaggtgggtgaggcaggagaggtcctgacacgcccccctgccctcagctggtgtgcactgcagtcgccatcctcctgcactacttcttcctcagcaccttcgcgtggctcttcgtgcaggggctgcacctctaccgcatgcaggttgagccacgcaacgtggaccgcggcgccatgcgcttctaccatgccctgggctggggcgtccctgctgtgctgctgggtgagggctgtgacccccaacctccaaccatcacatggcctgacccctgaccctgtccccactcctgctcatgacccccaacctcaaaccccaagccatctattcatggggttgctgctctgccctcacccatgctttctcccatacatgggctggtcagcagctctggaacacacaccctcagtcctaccctttctcttcccaaggccttgctgtgggcctggaccctgagggctatgggaaccctgacttctgctggatctcagtccacgagcccctcatctggagctttgctggccctgttgtcctggtcatagtggtgagtgccctggacttggtgccccctctgtacttccctccctcattgggggaggaggtgcagtggactcagctgagggcggtcaggtggcattctgcaggcttcctgggctcggccttcattttttctgtcctctggtcagtagccacccccattcaactggcatggagatgggggcgcggggtcagagattcagttgcctgtccctgcctctgtctctgcttctctctctcagtccctctctggttcccaatttctttttctgtgatgctaagctcctttggtgtgtgtgtatatgtgtgaatttctcactggttctgcctctctccgtgaatcttagtctctctctgtctctcattgcctctctctctctctctctctctgccctgcccggccccacatgtctggccgtgggtccagatgaacgggaccatgtttctcctcgctgcccgcacatcctgctccacagggcagagggaggccaagaagacctctgcactgtgagttggctggctggaggaagggggcttctcaggatggcaggtccctcctgggtggggtctggggcccccagatcttccctggtgcaggttgggctccaagttctagatgaaggaatgaagtcacacctgccctgacctgtggtccctctctggcgccctcgctatactgtagccccacatgtgcttctgccctgctgtctctccttgtcctctgggtccccccagagtctcccatggcctgggtggctcactttgccccctgccctgtgtgttcccacctgtcttccgtgccctcccttgtggctcccatacccctgtgttttccccacgtgtcctcatggctctttgactgctctcctgtttctttgtgggacctcccatctcccccagtgtcctccagagacctccatgttcccgtgtgagttcctttttttcacgtttcgtgtgtggcccctgtgtgtcctcccgtgttccctgcatgagtcctacatgagccttgcatgtcctcctgtgtcttcccatgtccccacagcaggacccttcgcagctccttcctgctgcttctgctggtcagtgcctcctggctctttgggctcctggcagtcaaccacagcatcctagccttccactacctccatgctggactctgcggcctccaggtgactctggtgcccctcccttgccccagaaccaggtgggccttcagtaggctggggccatccctaggcagacgttgaccctaggcctggagctgactcttactggataactttgccaggctgggtactaccccagaccagacactggccctagctgctgcccccaggcctggagctgactctaacttaggcactgatcccagactgagtgctgatcttggatcgaccttcaccaacaccaaggctcccgaccccttgctgatccacaccgaccttacagactccagccactcctgctgctccatcctctcccctgctgaccttccccaactcccttactgagtcccgcatgggctcctcactgacccacactagcctacagtgactgaccccattgctgacccacagtgacttatactggtccctgattgatccctgccgactctgctttgaccctcgctgacccacagggcctggcggtgctgctgctcttctgtgtcctaaatgcagatgctcgggctgcctggatgccagcctgtctgggcaggaaggcagcgcctgaggaggcaaggccagcacctgggctggtgagtcgggatgggggccctgagaagccagagttttaggctgcttcagggttagctcacactctgtccctaccacccccagggacctggggcctacaacaacacggctctctttgaggagagtggcctcatccgcatcactctgggcgcctccaccgtctcctctgtgagcagtgcccgctccggccggacccaggaccaggacagccagcggggccgcagctacctcaggtgagaggaagagcctccttgtgagggaacactcagcttagtccagccccaccttaccagggcttggctgaccaggtcctagggcgggtggctccacccatcttggccatctggggccctgcttctgcctctgccctaaatgcttcccaccacacacacccagggatgccattccacccgcagctggctgtgcactcaaagacactccagcctccaaggcaccccatcacatccctctttcatggtgggggggctcctgcttttccagggacaatgtcctggttcgacatggctcagccgctgaccacactgaccacagcctccaggctcatgctggccccactgacctggacgtggccatgttccatcgagatgctggtggagttggggcctggggcagggaggagggaggcagaggatctctccccatccccttttcttctaccccatactgggagcagtggctgactggggtgggacgatctcccccagggtccctgcctcaggaggcacctacctctccagccctggttctcccagtccactcctgattcgtccttccctctgataagtcccagcccttctgctgctacctccacttcaagccccggttcctgtccccaaccctaacccccttgccgtacccacctctagaccctcaactccaaattcccttatctccaagtcccttacctctgaaagtacttctgactttcccaactccaggcgcagactccgactctgacagtgacctgtccttggaggaggagaggagtctctccattccatcttcagaaagcgaggacaatggccggacgcgggggcgcttccaacggccactctgccgagcagcccagagtgagaggctcctcacccaccccaaaggtgccaggcgccctctgaccccttgggtgaccaagggatgccccatttgttatccctccagctccccatctttcctgcggttggggttcatcctggtctttctgacccctcagtcatcaggttccccaacttttagtctctgtccacctccagttaaggggagggagctcaccagtcacccccacccattgatctctgaggagataccctcctgttcccacctctgctcaatgagaacagccagggtttcaagggtcattagggtcaggggtcatgagtcactgggatcaacccagaagctcctgtaacctgacctggctccacagatgtggatggcaatgacctcctgtcctactggccagccctgggggagtgcgaggcagccccctgtgctctgcagacttggggctctgaaaggcgcctggggctggacaccagcaaggatgcagctaacaacaaccagccagacccggccctgaccagtggggatgagacttctctgggccgggcccagcgccagaggaaaggtacagtccctgagccctggcccacaccgcagacacgctgggggctgctcatgccctgagccaagggattgcagcttcctcatcccaaactgagagctcttcttactctgacctagggcgcttctgcttctctagcctgcttcacggtcctcagggactgctcctgtcctgacctgggaattctctgtccccctctaccctggccagcaccacagggggaccacaggcgaccactcctgccccagcccatctgtttttcagagaccctaggagctgcttccccctgccccccacccagatcccagagcccgtgctctgatctggaagatttctgccccctactctgcttttatggggacccggagaagaggtttctgccctcacccttgcatcacagggacctggggactgctcctgtccaacccggggggttcctgcatttcagccaggcctgcattgtcaggacctgagggctgcccctcttctgacctcagggagtttgccccatcccctgcaccatgagacctgcccgccctccccctgccccgggaccacaactggaagatgactgcccttccactctgacccctgtcctgctgcctctctgggaccaccagggttgcctctgctgctccccaaggggttcctgctcccatccctgtgttggaaggatcccaagggctgccacacccctagactcagcaattcctgcctgccctccccctcccacacaaaccctgccccccattttcttcctctcacaggcatcctgaagaaccggttgcaatacccactggtgccacagacccgaggtgcccctgagctgtcctggtgccgtgcagccaccttgggccaccgtgcagtgccagctgcctcttacggtcgcatctatgctggcgggggcacgggcagcctttcacagccagccagccgctactcttctagagaacagctggacctgctcctccggcggcaactgagccgtgagcgactagaggaagcccctgcccctgttctacgtcccctgagccggccagggtcccaggaatgcatggatgctgcaccaggccgactggagcccaaagatcggggcagcaccctgccacggaggcagccacctcgggactaccctggcgccatggctggccgcttcgggtcacgggatgcgctcgacttaggggcacctcgagagtggttgagcacgctgcctccgccccgccgcacccgggaccttgacccacagcccccacctctgcccctgtctccccagcggcaactctcaagggaccccctcttgccatcccggccgctggactctctgtctaggagctcgaactctcgggagcagctggaccaggtgcctagccggcacccctcacgagaagcccttgggccactcccgcagctgctcagagctagggaggactcggtcagtggccccagccatggcccctccacagaacagttggacattctttcctccatccttgcctctttcaactcctcggccctctcctctgtgcaatcttcaagcacacccttgggccctcacaccactgccacaccttctgccacagcctctgtgcttgggccctccacgccacgttctgccacgtctcacagcatctcggagctgtcgccagactcagagtaagtatggtccagccacctgcttgcaccctcatcagcttagggcaacctcctgtgtgccctgccctgtgttctgccacagaaggggatgagggctggcagacaggtgtgggctaccccaggctcagcacagccagagggccacaggctggggacaggaatctggcaagaaatgggggtgtgactagcagggacttgctggctgtgtgactggagccagccagccttcccagcacctcccaggctaaggagaaataggtgccatccgatgggctgagctagcgaatgggagggcaggagctgaggcctagaagtgggagatgacctggaatatgcaaggggcagggaggagagcaggaggccttgcttgggaaggttcgcctagggggtcatataggacaaggagaggctggaagtggtgccaggatataccaggctgaagggcttgctttgttgaggataaatcattcattcatcgatgtattcagtcaacattgagttcctcctgtctgtggacactttggggtggggctcacaggaactgagttggaacctggttcatctcgggtatgtgtgaagcatctgtggggaaggggatggcggacagacccaggaaatagctggatacacaggagtccgagagggactggtgggagtggggaggaaccaggagcttccaggtctcttgtaagccaagaggagagttgagtttcaaggaggagaaacagctgggtcaggctctgggggtttgtggggtaagagatggcttggggaggaagggggccctaggggtggggcaggggatcgacagaactgagcaggacccagggcagagagaggacaaaggaaggaggaaagagcaggggtttggggatcctggggcttgggcactgagggctgctgggggtggggaccagagggagctaacccacggcctgggtccccctgcagtctagctttggggtctggctgtttgggaggtagactagggactgagcaggggtccaggctctggagtcgcacaggtttgagtttgagctctgtgtcttaccttactagctgcgtgaccttaggcagaggcaagcttttctgggcctcagtttcctcatctgtaaagaagtctgtagtaacaaactctttgagatgtggaaatctatgagataatatctgtcaagtgctcaatatagcatctgtaaacagtaggtgctcttgaagcacttagagaaaacacctgggcagccaaggagcctggctgagtctaggggcgcggaatggaggactctgagaaccctggagtgggcatgaaggggctgggggctaagaggcgagagcagtggtggaggcaagggaagcagccaggccaaatgtggtgggggagtccagagccgcctgactcggagtcctctgggcatcaacctctgatttcctcatgtgcctccagagttcccagaagtgagggtcactcctgaggggatgacggcgtggacgaggaacagctgagggcgacagaggatctaggctaacaggagagactccaggagtgggggcagatcccaaggcagcctcctgctccccagtggtgggtgccccagctctacctggtgtggcagggctgaggctccatgtgcatctgtgagcatgcgtgtgacaggtgcagagacgggggactggagggagacttttatacgttttgtacctttgtaaccagagagatgcttatgttatttttcagcttttctgtctcctggggggtttgaggctgggctgggagggggagggagatagagggagagatgcagtttgaccccatttgggtcctgagcaaaccctatgctcatctctctctccttcctggggtggactcagatgggtgggacacatgccttcctccccctattccacccccaagttgatctgagtatcgtcaggggcccaaagtacagaattgttctttgctttttattgaatgctccaaaggccaaacttctggggctgggggttggtcttggaaacaggggtcctctgacttcctcatgggggcttgctcataccgcccctcctggtggatgtgtgtgtttattatgtggagtccctgccacttactgccttatgacctaggactgatgctgtggggtgctggtggagcagctgatgtcgtgtttacagagcaaggcttccctgtctcccacggggaggggctcgggcctctagtcagacattcctgcagagggtcggtggaggggtcattcacctgcccctgcagcaagcaaaagttgtctgtggtgccatttgattccctgacactgccccctgcttgaattgattccgaagggtagggtgggaaggtgagcaaagggagcagaaacaagggaattcaagacccagaatgtaggtgccactgcctcctatgtttacaggatcctccgtggccctaggcacctgggctgcaggaagtgactccgttccactcctcctttattcccttaaaaagggaaaaatgactgttacgaccctgttcacaaaactcttacttttgctattttgtctgctgtccagaactgaagactttaaaattttgttactgtttacaagtccagattcaaaaaatgtttttactttgtttacaactcaaaactttgagttttacactttgtttacagtagataattttttttcctttgtttccaagtgaaaggtagggaaagtgggagagggacttggaggacccacctgtgaggaccctgacctggccatcttgaggggttttctaacccccaggtctcccaggccgaaggtcagccttgagtcccgtttaacagcagatccagaagaccttgagagtaggcgtcctctaaccacgggggagagtggctgtgcagggctggggggtggtctgtgcagacacctcctcacccaccaccccatgcatactcttgggaagcagcttcctgggagattagaaattctacttccctgactggagctaaatcccaccagccaggacccaaactctccttaccgagaaggaccccagctcttgaagggctgagtggcctgctgggggtgggagggtgtctttactatgtcctaggtttcgtagatgcccctctctggggttcccctcctccagcccagcggccctctttcctgtctgtgtaaattgttccgtgaagccgcgctctgttttgggaataaacttctatagaaaaca

SEQ ID NO: 6893 - DNA, 549 bp, Homo sapiens
ctgcttgcccaggagagtattaccctaaccaggatacattcatgcctcttggctctggattttactgcctcataaacagcatttcagcagatgaaaagctcactttgtactagttcccagagatggtaagagctaatttggcgcctttacatccactctcagccctgcttagcttgtaactaactaatcaccagtcttttaccaaggtgcccaggagacagtccctgccagccgcaggacagatagcttcgctggtcagggacaagttcatcacagcctctcctgctcactcttccctctctgctccctctgttcccactctggtccacctggctggagacaggacctcatgcctggccttctttgtttacttgtgctgatccgccgacagcaccacgttcctcatggcacacctccgggcaagaacctttgtgtgtgtgcatatttgcacccctgccccacctccgcatcttctccctcctcctctaaccacaggacctccagtcagggcagcccctcatctgtgcctcttcacttgctccgactccc

SEQ ID NO: 6894 - DNA, 98 bp, Homo sapiens
cctgtaatcccagcactttgggaggctaaggcaggcggatcatttgaggtcaagagttcgagaccagcctggccaacatggtgaaaccccgtctctac

SEQ ID NO: 6895 - DNA, 471 bp, Homo sapiens
atattttgtgacctctcactgaaatatgagtgtttgatttttgttttctaattctaattttagaaaatttggaaagtagagaaaaatgcaaagaaacaagactatccccaagaggcaatgaatgttcaaattttgatgtattttttccagtttttaatatatatacgtagttaagatcatagaacttaacacagcttcaccttctgctctgtttgtttgaagttcacagtgcctcttaatccatagtcagaaaatagagtaacagttgcctgggtttgaagaaaaggagaattgggactgactgcttacagatgcccggtttctttttggggttatggagatgttctagaattaaatagaggtgatgggtgcacaactttgtgaatgtactaaaaactacctagttgaacactttgaaaatggtgaaatttttgttatgtgaaatgttatatgaattatatctcaatttaa

SEQ ID NO: 6896 - DNA, 1277 bp, Homo sapiens
aaagaaagtaactttcaaatctaaaattctgtacctggtaagcatattctttaaatatgaaggtggttgaaaaacgtttcaggcaaaataaactgggagagcatatccctgctaaactctcatttaaagtacctcttagtagaagaaaaataataggagatacagaaaggaaaatggagcaataggtatgagtaaatctaaatgaatgttgacttaggaaacaataatatcttgttgatgtggtgtgcgtatatgtatatcacatagcagcaaatgtactaaaagggtatggaatttatgttctaaggtccatgcatagtctaggaagagggtgaaaagtaccaatattagatgatatgtaaaaatctgttcttgtaatgtctagagtagtcactaaaagaataataagtacatataattaccaaggtgtggagagttgtggggatgtggaatagttaatcagtataaacaaaggccaaaaaaatgagaaaaagaaataaagaacagatggaatataatgagaccttggtaagttggtagatctacaaatatactataattatactaagtgtgaacagacaaaatgttccaaattacaagacaggtttcggactggataagaaggaaaatagaaaaatgtgctattttctttttatgagaaatatctaaaaactcaatgtataaaatacttaatgggaaaagacacaccatataaatattaaccaaaggcaagatggtatagtagacaaaatccattatttgaggtaaagagggacactttgtaaggatgaaagtctctcttcatctgaaagatatgagttgtaaatttatacaggttataaacttacaaaaaaatgacagaatttcaaactaatagaaaactccatagtcacagtggaaaatcttaccactttatgcaataattgaagccgagcagtgtggcaggtgcctgtaagtgctagctacctagctactcgggaaactgagaaatcacaggtgggaggatggctgaagcccaggagtttgagttcagcctgggcagcatagcaagacctatctctaaaaaataagtaagtaagtaaataaataaataacaaaacaagcagactaaaaaatcagtaaagatagagaaataagggccaggtgcagtggctcacacctgtaatcccagctactcgggaggcttaggcaggagaatcactcgaacccaggaggtggaggttgcagtgagctgagatggcaccattgcaccctggccgaggcgacaacagcaaaac

SEQ ID NO: 6897 - DNA, 1277 bp, Homo sapiens; identical to SEQ ID NO: 6896

SEQ ID NO: 6898 - DNA, 838 bp, Homo sapiens
tcctagcaaagctcacttttaaatctgatctcaacagtcattcaaaggtcagcaacagatgatttagacagtaagattcggattgatacaaatataattgcttatgatggtctaggctcccgataatggcagactagataatttggatcaacagtgagaatgactagaaaacctgcacaaaatacagaaattgtctatatgaaatgctagagcaaatagtaaagcattattggacaggattgggttggagttggggctaagaatggtgggggcctttttctccccttgaggtatttgcccagagattgaggagtaattttgataggctcacagggctgagaaatcacagcttagagtgcaaggatcatgcatggtgaatgtgtctccttgtcttgagttgggaccctgaaagtctgcactattatagtaaagataaattagctagtaagttgttcctcacagggactaaagctcagcaactaaaattggattaaagtgaaatcatatcgctggctcctcaagtttccttgtagaatcaaatgtaaatccttgctagaaagaaaaagaaaacatctaggcctccaacttattcaataatgaattttgcaaaaacagtattcacagaattagaaataaccaggtttgttaggagattagacaatgcgaacatagtgagaccccatccccacaaaaaattagctgggcaaagtggtgtgtgcttgtattcctagctacttgggagactgaggtgggaggattgcttgagcccaggagttcaagggtgcagtgatagtgccactgcactccagcctaagtgacagaatgagaccctgtcttt

SEQ ID NO: 6899 - DNA, 308 bp, Homo sapiens
cttttggccgggcgaggtggctcacgcctgtaatcccagcacctggggaggccgaggcgggcggatcacaaggtcaggagattgagaccatcctggctaacatggtgaaaccccgtctctactaaacatacaaaaaattagccaggcgtggtggtgggtatagtcccagctactcgggaggctgaggcaggagaatggcgtgaacccaggaggcagagcttccagtgagccgagatggggccactgcactccagcctgggcgacagagcgagactccgtctcaaaaaaaaaaaaaaaaaaaaagcccc

SEQ ID NO: 6900 - DNA, 303 bp, Homo sapiens
ggccgggcgaggtggctcacgcctgtaatcccagcacctggggaggccgaggcgggcggatcacaaggtcaggagattgagaccatcctggctaacatggtgaaaccccgtctctactaaacatacaaaaaattagccaggcgtggtggtgggtatagtcccagctactcgggaggctgaggcaggagaatggcgtgaacccaggaggcagagcttccagtgagccgagatggggccactgcactccagcctgggcgacagagcgagactccgtctcaaaaaaaaaaaaaaaaaaaaagcccc

SEQ ID NO: 6901 - DNA, 838 bp, Homo sapiens; identical to SEQ ID NO: 6898

SEQ ID NO: 6902 - DNA, 437 bp, Homo sapiens
cagcctggcgacctggcatggtgtgttaccctggccaaagctccccaacctctgttcatgatttccctctgtaaaatgggaataacaatagtatccatttcttttgggtggttataaggaatacttaagttaactcattcatgtaaagcacttgaatagtggcttgtatacagtaagcacacagtaaatgtacattgtcattgtatctttgtacctcaacatctgaaactatggtttatacatagcacatactcattcatgctttgttgagtaaatgtaatattcagaaggtgggaaagtgatttccttctctcttatcataaaataagagttatatttggttgaaataaggcatcataggcctgaagacatttactccctggctgctggcaggggagtagaatgttccaaactctatgttgataactgggtgccta

SEQ ID NO: 6903 - DNA, 416 bp, Homo sapiens
tttttttttttttttgagacggagtctcactctgtcacccaggctggagtgcaggtgatcatatctacaaaggtgacaagaacatgaacctgcagtcctgttatcagcattttgtaagtgcttcttctcattctaaaaatatgtattgattttaaaaatgaattctgtaacaggatagcaacagtagtaaaaatcctttttatggagaaatttagagctttcagctaacatacacacatactcattcaaatgaaacagcttgtcttgttttaaagaaatatttctgttgtccattgtacaaattttaataacttgtctttcctttttttaggtctctgtgttccagatttttttttgtaactatgaaatccttgccttgtagtcaacttaaaatgaaataaatttatcagtgcaaa

SEQ ID NO: 6904 - DNA, 417 bp, Homo sapiens
agaaaccccacccaccaccaaaccaggagaaaccagggggatgtccgtgagagaatcaggagcaaccctcactgctgggctccagccacagttgctggggcttcatggggcataggaacaagcgagtgtgacatatacacacgtgttcatatattttgtggggtttttgttgttgtttttgaaacagagcctcgctctgtcacccaggctgcactgcaatggcccaacctctgcctcccaggttcaagtgattctcctgcctcagcctcccaagtagctgggattacaggcacacgccaccacacccatataatttttgtatttttaatagagatggggtttcaccatgttggccaggatggtctcgatctcctgaccccgtgatccacctgcctcagcctcccaaagtgctgggat

SEQ ID NO: 6905 - DNA, 9969 bp, Homo sapiens
tacactgggccgggctgcctgtgtgctcacaggctgtttatttatccaagagtaaggaggagagagacaggatgaagagaaaaaccagactccccacggtggcagggctgaggggaaaaacaaacagaaaatctcctcttctttctcttgctgctgaccccagggtactccagcttcagatgggacctctgggggtggcttaggggcctcgaggaggcccggcagctcagctgttggctggggtcaggatccgcacaggggcaggtcccagactcggaatggcttctgtgtacacaaaatatctctctgcaaaaggcactggtggaggggggcagcaggaaggccaccccatcacaggcagagtccactctgtcctgcgtctgggtcctgggccccaagaccaatccagtctccctcagggttggggtttcggaggcccttgttcctctcctctcccttccctcagcccaggggtgagcaggcagtcggtggaggcccagctcaggccatgtcatggacacccctcttcagggctagtgcatccggcgacttctaggccaacagcccgaggcgggtgactttggccgacaggaaggagtggatgatgaagactatggttttgggacacgagtgcaggtccagctgctggagggtggatggagagaagagtcagggccctggccagcctggcctccgagagtgcacaccccctcctccccagggtgcagaggcagcccctcactcacgatctcgccttcagcacctccaaaatccaggaaaaggagactggcaccgtcatctgaagacatctgcagcttctcgaagggctgtcgcaggagcacagctcgggctgcacctggctcagccgcccacagtgtgaagcccttgtcgatgtgcacagacaggctgcagggacgcccattccacgtgcaggctgcagggagggcacataggtacaggcacagctggcacctcagagactacaccccaacctccaacccccaccgcagcttacaaagtggggcctgaatgcctccagggatgggaggctcactgtttgtcgtggcaccagtacacccaccctgcagagagtcatcacccccaccctcagaggacctacacccacttccagtcccacttccagcagcacaagtagaaagggggagcttaaaatgtgccatggacaggaggctcactgctgataaaggcatcatcagatctaccaagcaccgcccttggagacctgcagagttacccggctaaatttaaatttcagataaacaatgactaatttgggcatacttctgtgaaaaaagtattcattgttaacctgaaattcaaatgaggctgggtgtcctgtatttatttcctctggcaaccctaccccaagtgccatctctcacatcctcaccagcagattgacaaaactggggcaagaaaaccccagggagaagagtctctgcctgctagggcacctgcacatccaaaacagagggcccaaacccaacttccttttttttttggagaaacagtctcactctgttacccaggctggagtgcagtgggcgcaatctcggctcaccacaacctccatctcccgggttcaagtgattctcgtgcctcagcttcctgcgtagctgggactacaggcacctagtaccatgcccggctaatttttgtattattattttttttttttgagacagtcttgctctgtcgcccaggctggagtgcagtggcacaatctgggcccactacaacctccacctcccagattcaaacaattctgcctcagcctcccgagtagctagtctacaggcgcccaccaccatgcccggctaatttttgtatttttagtagagacagggtttcaccattttggccaggctggtctcaaactgctgacctcaagtgatccacccgcctcagcctcccaaagtgctgcgattacaggcgtgagccaccgcacctggccaatttttgtattattagtagagacagggttttgccatgtttgccagactggtctcaaacttctgacctcaggtgatccacccaccttgacctccaaaccccattttctatcccctcctgaagtgccctaaagaaggaagcttgaatgcccctggggataagaggcttattaccagagggacactcccagatcctcccagcacacctgtagacacctcctgcacaccctcggcggcccggtgacagccatccacaagctggcgggtccaggcagccagctcctgcggtgactccacgctgaacaggtgagtgtccacaccgtgacgcgtgcccgtgcgcagggcaaaagagagctctgcatcgtagggcactgagcccttggaggggcctgagtgcaccagtctgggggttgggggcagagggctgagcatgaggcctcaggccggaggcaaatagttctgggcaaaggggccagtgacctgggaagaaaccctgtaaatcctttaccacctaacaggacaggacttgccagggggcactgattgactcagcaggagacatctcctgccaccctccccgtcactcccttggctctggctatactggtgtcatcacacacacctagcacatgcctgcctcagcacctttgcatatgctcttccctctgcctatacatgcttccctgattatctgcacggctcactccctcacttccttcagatgttagtttaaatgtcacctcctctgagaagccttccctgacctcccagtccaaaatagcacccttgtcactcactagccttactttttaatcatggtaccagaaattatactttttattatttgttttcgttggtttttgactgtctttttcactagaatgtcaactaggttagaaattttgatcttgtgttcaccactgtattcccagtaactaaaaccatgcctgcccacagtaggtgctcagtaaacttttgttgcctaacttgaatcacttgattaggcagacagtccaggacctagttatccctagtagccagcaggctcctgacacacgggccagagccagcctgaggtaaggagacatgggggacaaggacttcagacccctgcagcttgactctcacttgctgtgtggccttggtaagccaactgcccctctctggggcagaaagttctgccccatatccctctttgttcctccctccacccactctttctcctatagctcagttccccccgccacagactgctgctgacacccgccttcgactttccagccctgagctgcagaccctcgagtccccaggcttcctatccaagctccctctccatcccacacacactctggacttaactcagcatcttgctccagcctcctccctttccacccccacccccagtcccacgctcacccagacacaagctccaaacctcctgttcattccggacccctccttcacccgccccatctggcaagcacggagccctgttaattttacacccatgtggtttccaatgccaatgctgcctttcttccccatctgctcctgccacccacctccacctcccccagccaccatcatctctcctgcatgactgcagcacctccccacttccatcctgcactctccgctgcattctccacgtggcagccacagggattctcttaaagcaaccagagcacctcgctccccagcttaaacccttcaacactaccaaactcttaagctaaagctaacattccttaatcaggcaatagaagctcttcaagatcaggccctgccaactcccttctctccatttcctgcatgaattctggttatcacaaactcatagctccatgaacatgctatagcccttcatgcctctgtacttttgaccatgatgttctctctgcatgggatgctctttcaccctttcttaaacagaaaacttctactcatccatcaaagtccagctcaaatgtcacctcctccctgaagccttcctctactaccccaacagagttaagtggctcctacaaaccctgcactgtaatggctgttcctgggtctgtctccccagccagacaaggttctctctggaggcagaaactgttggggtcagctctgtgccctctgaaccatgcagcacaaggcataagtgtcagcgaatgagtggctaatggggaccttatatccttttgttccaagcacccattttacagatgaggaaactgaggcccagacagggcagagacttgcttcaggtcacctggggaatagctgagggtggacagggctggagttcccagcttctggggccctgctggagcatctcctggcaagttctgggggagacatactgcccctgcctgtgggtacctggtggcgatgagtggggcagtacgggctggccggctcagggcctcgcgggtctcggggagagacaagtagaggagcagttccttttcagttagcagggccagggtgggggctgtgcccccactgggcagctgcagagaacaaaacagcagtgaggatgggtgggggaagagagggcagagggccagggcagggtgaggtggccaggggcactgggaacagggccagctccaaaggagcggaagagagagagggataggtcccaggcccagcaggtacctgctcagttagccagccaatctgcttgatgtcctggctcccagctgtgctggtggctgccaacagtgcctgcagctcatccttgacccgcggcgtcagagtattgacctgggcttggatggcagtcgcccacgacctcgcactagcctcatccttggccctcaggaagagggtgtcttgaccatctgccgagcagatctccagatacctgcaggcacaaatgggtggagacaaggacctgaccattaggctgcagctgcccaaccctggcccaagaaaccccacccaccaccaaaccaggagaaaccagggggatgtccgtgagagaatcaggagcaaccctcactgctgggctccagccacagttgctggggcttcatggggcataggaacaagcgagtgtgacatatacacacgtgttcatatattttgtggggtttttgttgttgtttttgaaacagagcctcgctctgtcacccaggctgcactgcaatggcccaacctctgcctcccaggttcaagtgattctcctgcctcagcctcccaagtagctgggattacaggcacacgccaccacacccatataatttttgtatttttaatagagatggggtttcaccatgttggccaggatggtctcgatctcctgaccccgtgatccgcctgcctcagcctcccaaagtgctgggattacaggcatgagccaccatgcctggccttatttttttatttttagtagagatggggtttcaccaagttggccaggctggtctcgaactcctgacctcaaatgatcaccccgccttcgccctccaaagtgctgggattacaggcatgagccaccgtgcccagcctacacgtatgcagatacacacaaatatacacacacactgaaacatgcatgatggtgtgatagggcctaaattattgctgtgtggctattcctaatcttgcccctttctcctggtttctaaggaacatcctcttctgggccagctcccaggttctccttgttgcacagaaccaaactaattcactaataagagcaggggaaaaaaaaaaaaaaaactaagctgggcatggtggctcacgcctgtaatcccagaacttcgggagactgagccaggacgatggcttgagcccaggagttcgagaccagcctggacaacaaagtgagacactcatctctaaaaaagaaaaaaaaattttttttttaattagccaggcatggtgacacgtgcctatagtcccagctacttagaggctgaggcaggagaaccacttgagcccaggagtttgaggctgcagtaagctataagggtgccagtgcactccagcctagatgacagcacaagacctcatcttaaaaaaacagaaaaacagacagggtgtgatggctcacgcctgtaatcccagcactttgggaagccaaagcgggtggatcacctgaggtagggagttcaagaccagcctgatcaacatggagaaaccccatctctactaaaaatacaaaattagctgggtgtggtggcacatgcctgtaatcccagctactagggaggctgaggcaggagaatcgcttgaacccagaaagtggaggttgtagtgagctgagatcgtgccattgcactccagcctgggcaacaaaagcgaaactccgtctcaaaaaccaaaaaaaaaaaaaaaaaaaaaaaaaaacagaaaaacaaaacaacaacaaaactaaagaggcttgaggccaggcatggtggctcacacctgtaatcccagcactttgggaagctgagccgggcagatcacttgaggccaggagttcaaaaccaacctagccaacagggcaaaaccccatctcctctaaaaacacaaaaaattagccagacgtcatggcgggcacctgtggtcccagctacttgggaggctgaggcaccagaatcacttgaacctgggaagcagaggttgcagtgagctgagatcacaccactgcactccagcctgggtgacagagcgagatcccccatctcaaaaagaaataataaattattgttttctaaaccactaaattttagggttggtttgtgatacagcaacagatagccaaaatactagcagaaaagactctttggcttttgtcttatttctgcctggaatatgaacacaattcttgggatgcagccaccatcctgcctccacgaagaagaaaaccgcccataattaaaatggtagagcaggaagctagaagcctagttccttgatggcatccttgagcatctacagcagcctgaatagctgacccctggacttctttttaaacatgtgggaaaattaaccccttttatttaagtcattgcttgttggagtttctgtacttgcagcccagtgcaatcctaacactgagtaaaagtttgaagcagttttcattatattttggttgccaggctgtatccctatgactgggatactgcactgacagtgggccatatggaaccccagttatattgaggttacctatgtaggtactcaggcatgtacatgttaaaacacacatgcacacacatatgtgcatacacatacaaataacatataaacaaacacacatgtacaaatctatactcatacatgcaaatgctctcatatatacatacaagcacttgcatttacatgtcatctacacgtgcgcacacttagaaacatatacacacgtttcaggtaatgtctgggatcaggctgggaatctaaggttctatgagtctctagaaggactaatactacttcaccttcacactcacagaaggcccttccgggccgggcatggtggctcacccctgtaatcccagcactttgggagcccaaggtgggtggatcttgaggtcaggagtttgagatcagcctggccaatgtggtgaaaccctgtctctagtaaaaatacagccgggcgcggtggctcatgcctgtaatcctagcactttgggaggccgaggcaggcagaatgcctgagctcaagagttcaagaccagcctgggcaacatggtgaacccccgtctctgctaaaatacaaaaaaaaaaaaaattagtcaggcatggcggcgtgcacctgtagtcccagctactcaggaggctgaggcaggagaattgcctgaacctaggaggcggaggttgcagtgagctgagattgtaccactgcactccatccagcctggcaacagagaagactctgtcccaaaaaaaaaaaaaatacaaaaattagtctattaaaaatacaggcgatggctcatgcctgtaatcctagcacttcaggaggccaaggtgggcggatcacctgaggtcaggagttccaaaccagcctgaccaacatggtgaaaccccatctctaataaaaatacaaaattagctgggcatgttggcaggtgcctgtaatcccagctactcagaagtctgaggcaggagaatcgcttgaacccgggagaaggggaccgcagtgagccaagattacaccactgcactccagcctgggcaacagagcgatactccgtctcaaaaacaaaaacaaaggctcttttttagagcatcggcaagtgacctgtgaatcaccagtttttgcctcatgggggcaggcaagaggtgtggcatcgagtgagaccaagagatttggatgctggacgttaaccagccctcccagccaatgttgggcatttgcttggcattgaacctaggctgtcactaggacccacagcccaagcttgtaatgcatatagcagttaagcatcacctccaacaatgcatatcccacttgaccaaatatgctccatttagccaccaccatcactcaggtatcttgcaccttccaaagcagaaaggactaccaggattgaggcaagtgccaccctttctggttgtgtgatctcaagtaggttacttcccctctctgtcctcatctataaaatggaggtgagccgggaacgatggctcatgcctgtaatcccagcactttgggaggccgaggcaggcagatcacctgaggtcagcagtgcgaaaccagcgtggccaacatggtggaaccccatctctacaaaaaatacaaaagttaggcagggcacagttgcttacacctataatcccagcactttgggaggctgaggcgggggaatcacctgaggtcaggagttcgtgaccagcctgaccaacatggagaatcccgtctctactaaaaatacaaataattagccaggcatggtggcaggcgcccgtaatcccagctacttgggaggctgagggaggagaattgcttgaacctggaaggcagaggtttcagtgagccaagatcatgccattgcactccaacctgggcaacagagtgagactctgtcaaaaaaaaaaaaaaaaaaaaaaaagttagccaggtgtggtggtgggcgcctgtagtcccagctacttaggaggctaaggcaggagaatcacttgaacccaggaggcagaaattgcagtgagccaagatctttgcaccactgcactccagcctgggcgacagagcaaaactctggctcaaaaataataataaaataaaataaaatggaggtgaaataataggactttgcccattgggcctctgtgagagctaaataatattgcacagggaaagcactcaacacagtgctgggtacacagtaaacactcagtaaatgttaggtggtttcagtattatcaatgaactgttaaaggctgctcagatgtgaaggatgtaaccttccatggccctgataaaaaggttaccagacatctcagagctccagcagagtgggaagagacgagaggatcagtgagtccaacaacctcatctcacaatggagaatctaaaggtcagtgaggaaaagggcctagttcaaagaggaccaggactggaacgcagggttcttcctcagaccaagttcatccccagatgtgagctgcccagaggaagaagtgagaagcaaagcacaccatcatctccatggcttcactcaggcttccagtcaatctattttttaagcacctactatgtcctggcattgtgctggtcattcgtacaacacagaggtgtctttccattggtcccaccacctgacgccagggcatctgtccatctgagttgctcccaaccccagccttacctgggctccgggtcattgggggtgcacctcttcgagacatatgccatcttcaaggacatgtgtttggcctcgctgaagttccggggtgtggggccaggggaggaaggctgccgctgaaggggtgaggcaggaggtgagtcccagccgaccgaggtcccaccagtagagttcttgaaatacggtgagacgtccttcatatacttgac

SEQ ID NO: 6906 - DNA, 32148 bp, Homo sapiens
tacactgggccgggctgcctgtgtgctcacaggctgtttatttatccaagagtaaggaggagagagacaggatgaagagaaaaaccagactccccacggtggcagggctgaggggaaaaacaaacagaaaatctcctcttctttctcttgctgctgaccccagggtactccagcttcagatgggacctctgggggtggcttaggggcctcgaggaggcccggcagctcagctgttggctggggtcaggatccgcacaggggcaggtcccagactcggaatggcttctgtgtacacaaaatatctctctgcaaaaggcactggtggaggggggcagcaggaaggccaccccatcacaggcagagtccactctgtcctgcgtctgggtcctgggccccaagaccaatccagtctccctcagggttggggtttcggaggcccttgttcctctcctctcccttccctcagcccaggggtgagcaggcagtcggtggaggcccagctcaggccatgtcatggacacccctcttcagggctagtgcatccggcgacttctaggccaacagcccgaggcgggtgactttggccgacaggaaggagtggatgatgaagactatggttttgggacacgagtgcaggtccagctgctggagggtggatggagagaagagtcagggccctggccagcctggcctccgagagtgcacaccccctcctccccagggtgcagaggcagcccctcactcacgatctcgccttcagcacctccaaaatccaggaaaaggagactggcaccgtcatctgaagacatctgcagcttctcgaagggctgtcgcaggagcacagctcgggctgcacctggctcagccgcccacagtgtgaagcccttgtcgatgtgcacagacaggctgcagggacgcccattccacgtgcaggctgcagggagggcacataggtacaggcacagctggcacctcagagactacaccccaacctccaacccccaccgcagcttacaaagtggggcctgaatgcctccagggatgggaggctcactgtttgtcgtggcaccagtacacccaccctgcagagagtcatcacccccaccctcagaggacctacacccacttccagtcccacttccagcagcacaagtagaaagggggagcttaaaatgtgccatggacaggaggctcactgctgataaaggcatcatcagatctaccaagcaccgcccttggagacctgcagagttacccggctaaatttaaatttcagataaacaatgactaatttgggcatacttctgtgaaaaaagtattcattgttaacctgaaattcaaatgaggctgggtgtcctgtatttatttcctctggcaaccctaccccaagtgccatctctcacatcctcaccagcagattgacaaaactggggcaagaaaaccccagggagaagagtctctgcctgctagggcacctgcacatccaaaacagagggcccaaacccaacttccttttttttttggagaaacagtctcactctgttacccaggctggagtgcagtgggcgcaatctcggctcaccacaacctccatctcccgggttcaagtgattctcgtgcctcagcttcctgcgtagctgggactacaggcacctagtaccatgcccggctaatttttgtattattattttttttttttgagacagtcttgctctgtcgcccaggctggagtgcagtggcacaatctgggcccactacaacctccacctcccagattcaaacaattctgcctcagcctcccgagtagctaggactacaggcgcccaccaccatgcccggctaatttttgtatttttagtagagacagggtttcaccattttggccaggctggtctcaaactgctgacctcaagtgatccacccgcctcagcctcccaaagtgctgcgattacaggcgtgagccaccgcacctggccaatttttgtattattagtagagacagggttttgccatgtttgccagactggtctcaaacttctgacctcaggtgatccacccaccttgacctccaaaccccattttctatcccctcctgaagtgccctaaagaaggaagcttgaatgcccctggggataagaggcttattaccagagggacactcccagatcctcccagcacacctgtagacacctcctgcacaccctcggcggcccggtgacagccatccacaagctggcgggtccaggcagccagctcctgcggtgactccacgctgaacaggtgagtgtccacaccgtgacgcgtgcccgtgcgcagggcaaaagagagctctgcatcgtagggcactgagcccttggaggggcctgagtgcaccagtctgggggttgggggcagagggctgagcatgaggcctcaggccggaggcaaatagttctgggcaaaggggccagtgacctgggaagaaaccctgtaaatcctttaccacctaacaggacaggacttgccagggggcactgattgactcagcaggagacatctcctgccaccctccccgtcactcccttggctctggctatactggtgtcatcacacacacctagcacatgcctgcctcagcacctttgcatatgctcttccctctgcctatacatgcttccctgattatctgcacggctcactccctcacttccttcagatgttagtttaaatgtcacctcctctgagaagccttccctgacctcccagtccaaaatagcacccttgtcactcactagccttactttttaatcatggtaccagaaattatactttttattatttgttttcgttggtttttgactgtctttttcactagaatgtcaactaggttagaaattttgatcttgtgttcaccactgtattcccagtaactaaaaccatgcctgcccacagtaggtgctcagtaaacttttgttgcctaacttgaatcacttgattaggcagacagtccaggacctagttatccctagtagccagcaggctcctgacacacgggccagagccagcctgaggtaaggagacatgggggacaaggacttcagacccctgcagcttgactctcacttgctgtgtggccttggtaagccaactgcccctctctggggcagaaagttctgccccatatccctctttgttcctccctccacccactctttctcctatagctcagttccccccgccacagactgctgctgacacccgccttcgactttccagccctgagctgcagaccctcgagtccccaggcttcctatccaagctccctctccatcccacacacactctggacttaactcagcatcttgctccagcctcctccctttccacccccacccccagtcccacgctcacccagacacaagctccaaacctcctgttcattccggacccctccttcacccgccccatctggcaagcacggagccctgttaattttacacccatgtggtttccaatgccaatgctgcctttcttccccatctgctcctgccacccacctccacctcccccagccaccatcatctctcctgcatgactgcagcacctccccacttccatcctgcactctccgctgcattctccacgtggcagccacagggattctcttaaagcaaccagagcacctcgctccccagcttaaacccttcaacactaccaaactcttaagctaaagctaacattccttaatcaggcaatagaagctcttcaagatcaggccctgccaactcccttctctccatttcctgcatgaattctggttatcacaaactcatagctccatgaacatgctatagcccttcatgcctctgtacttttgaccatgatgttctctctgcatgggatgctctttcaccctttcttaaacagaaaacttctactcatccatcaaagtccagctcaaatgtcacctcctccctgaagccttcctctactaccccaacagagttaagtggctcctacaaaccctgcactgtaatggctgttcctgggtctgtctccccagccagacaaggttctctctggaggcagaaactgttggggtcagctctgtgccctctgaaccatgcagcacaaggcataagtgtcagcgaatgagtggctaatggggaccttatatccttttgttccaagcacccattttacagatgaggaaactgaggcccagacagggcagagacttgcttcaggtcacctggggaatagctgagggtggacagggctggagttcccagcttctggggccctgctggagcatctcctggcaagttctgggggagacatactgcccctgcctgtgggtacctggtggcgatgagtggggcagtacgggctggccggctcagggcctcgcgggtctcggggagagacaagtagaggagcagttccttttcagttagcagggccagggtgggggctgtgcccccactgggcagctgcagagaacaaaacagcagtgaggatgggtgggggaagagagggcagagggccagggcagggtgaggtggccaggggcactgggaacagggccagctccaaaggagcggaagagagagagggataggtcccaggcccagcaggtacctgctcagttagccagccaatctgcttgatgtcctggctcccagctgtgctggtggctgccaacagtgcctgcagctcatccttgacccgcggcgtcagagtattgacctgggcttggatggcagtcgcccacgacctcgcactagcctcatccttggccctcaggaagagggtgtcttgaccatctgccgagcagatctccagatacctgcaggcacaaatgggtggagacaaggacctgaccattaggctgcagctgcccaaccctggcccaagaaaccccacccaccaccaaaccaggagaaaccagggggatgtccgtgagagaatcaggagcaaccctcactgctgggctccagccacagttgctggggcttcatggggcataggaacaagcgagtgtgacatatacacacgtgttcatatattttgtggggtttttgttgttgtttttgaaacagagcctcgctctgtcacccaggctgcactgcaatggcccaacctctgcctcccaggttcaagtgattctcctgcctcagcctcccaagtagctgggattacaggcacacgccaccacacccatataatttttgtatttttaatagagatggggtttcaccatgttggccaggatggtctcgatctcctgaccccgtgatccgcctgcctcagcctcccaaagtgctgggattacaggcatgagccaccatgcctggccttatttttttatttttagtagagatggggtttcaccaagttggccaggctggtctcgaactcctgacctcaaatgatcaccccgccttcgccctccaaagtgctgggattacaggcatgagccaccgtgcccagcctacacgtatgcagatacacacaaatatacacacacactgaaacatgcatgatggtgtaatagggcctaaattattgctgtgtggctattcctaatcttgcccctttctcctggtttctaaggaacatcctcttctgggccagctcccaggttctccttgttgcacagaaccaaactaattcactaataagagcaggggaaaaaaaaaaaaaaaactaagctggacatggtggctcacgcctgtaatcccagaacttcgggagactgagccaggacgatggcttgagcccaggagttcgagaccagcctggacaacaaagtgagacactcatctctaaaaaagaaaaaaaaattttttttttaattagccaggcatggtgacacgtgcctatagtcccagctacttagaggctgaggcaggagaaccacttgagcccaggagtttgaggctgcagtaagctataagggtgccagtgcactccagcctagatgacagcacaagacctcatcttaaaaaaacagaaaaacagacagggtgtgatggctcacgcctgtaatcccagcactttgggaagccaaagcgggtggatcacctgaggtagggagttcaagaccagcctgatcaacatggagaaaccccatctctactaaaaatacaaaattagctgggtgtggtggcacatgcctgtaatcccagctactagggaggctgaggcaggagaatcgcttgaacccagaaagtggaggttgtagtgagctgagatcgtgccattgcactccagcctgggcaacaaaagcgaaactccgtctcaaaaaccaaaaaaaaaaaaaaaaaaaaaaaaaaacagaaaaacaaaacaacaacaaaactaaagaggcttgaggccaggcatggtggctcacacctgtaatcccagcactttgggaagctgagccgggcagatcacttgaggccaggagttcaaaaccaacctagccaacagggcaaaaccccatctcctctaaaaacacaaaaaattagccagacgtcatggcgggcacctgtggtcccagctacttgggaggctgaggcaccagaatcacttgaacctgggaagcagaggttgcagtgagctgagatcacaccactgcactccagcctgggtgacagagcgagatcccccatctcaaaaagaaataataaattattgttttctaaaccactaaattttagggttggtttgtgatacagcaacagatagccaaaatactagcagaaaagactctttggcttttgtcttatttctgcctggaatatgaacacaattcttgggatgcagccaccatcctgcctccacgaagaagaaaaccgcccataattaaaatggtagagcaggaagctagaagcctagttccttgatggcatccttgagcatctacagcagcctgaatagctgacccctggacttctttttaaacatgtgggaaaattaaccccttttatttaagtcattgcttgttggagtttctgtacttgcagcccagtgcaatcctaacactgagtaaaagtttgaagcagttttcattatattttggttgccaggctgtatccctatgactgggatactgcactgacagtgggccatatggaaccccagttatattgaggttacctatgtaggtactcaggcatgtacatgttaaaacacacatgcacacacatatgtgcatacacatacaaataacatataaacaaacacacatgtacaaatctatactcatacatgcaaatgctctcatatatacatacaagcacttgcatttacatgtcatctacacgtgcgcacacttagaaacatatacacacgtttcaggtaatgtctgggatcaggctgggaatctaaggttctatgagtctctagaaggactaatactacttcaccttcacactcacagaaggcccttccgggccgggcatggtggctcacccctgtaatcccagcactttgggagcccaaggtgggtggatcttgaggtcaggagtttgagatcagcctggccaatgtggtgaaaccctgtctctagtaaaaatacagccgggcgcggtggctcatgcctgtaatcctagcactttgggaggccgaggcaggcagaatgcctgagctcaagagttcaagaccagcctgggcaacatggtgaacccccgtctctgctaaaatacaaaaaaaaaaaaaattagtcaggcatggcggcgtgcacctgtagtcccagctactcaggaggctgaggcaggagaattgcctgaacctaggaggcggaggttgcagtgagctgagattgtaccactgcactccatccagcctggcaacagagaagactctgtcccaaaaaaaaaaaaaatacaaaaattagtctattaaaaatacaggcgatggctcatgcctgtaatcctagcacttcaggaggccaaggtgggcggatcacctgaggtcaggagttccaaaccagcctgaccaacatggtgaaaccccatctctaataaaaatacaaaattagctgggcatgttggcaggtgcctgtaatcccagctactcagaagtctgaggcaggagaatcgcttgaacccgggagaaggggaccgcagtgagccaagattacaccactgcactccagcctgggcaacagagcgatactccgtctcaaaaacaaaaacaaaggctcttttttagagcatcggcaagtgacctgtgaatcaccagtttttgcctcatgggggcaggcaagaggtgtggcatcgagtgagaccaagagatttggatgctggacgttaaccagccctcccagccaatgttgggcatttgcttggcattgaacctaggctgtcactaggacccacagcccaagcttgtaatgcatatagcagttaagcatcacctccaacaatgcatatcccacttgaccaaatatgctccatttagccaccaccatcactcaggtatcttgcaccttccaaagcagaaaggactaccaggattgaggcaagtgccaccctttctggttgtgtgatctcaagtaggttacttcccctctctgtcctcatctataaaatggaggtgagccgggaacgatggctcatgcctgtaatcccagcactttgggaggccgaggcaggcagatcacctgaggtcagcagtgcgaaaccagcgtggccaacatggtggaaccccatctctacaaaaaatacaaaagttaggcagggcacagttgcttacacctataatcccagcactttgggaggctgaggcgggggaatcacctgaggtcaggagttcgtgaccagcctgaccaacatggagaatcccgtctctactaaaaatacaaataattagccaggcatggtggcaggcgcccgtaatcccagctacttgggaggctgagggaggagaattgcttgaacctggaaggcagaggtttcagtgagccaagatcatgccattgcactccaacctgggcaacagagtgagactctgtcaaaaaaaaaaaaaaaaaaaaaaaagttagccaggtgtggtggtgggcgcctgtagtcccagctacttaggaggctaaggcaggagaatcacttgaacccaggaggcagaaattgcagtgagccaagatctttgcaccactgcactccagcctgggcgacagagcaaaactctggctcaaaaataataataaaataaaataaaatggaggtgaaataataggactttgcccattgggcctctgtgagagctaaataatattgcacagggaaagcactcaacacagtgctgggtacacagtaaacactcagtaaatgttaggtggtttcagtattatcaatgaactgttaaaggctgctcagatgtgaaggatgtaaccttccatggccctgataaaaaggttaccagacatctcagagctccagcagagtgggaagagacgagaggatcagtgagtccaacaacctcatctcacaatggagaatctaaaggtcagtgaggaaaagggcctagttcaaagaggaccaggactggaacgcagggttcttcctcagaccaagttcatccccagatgtgagctgcccagaggaagaagtgagaagcaaagcacaccatcatctccatggcttcactcaggcttccagtcaatctattttttaagcacctactatgtcctggcattgtgctggtcattcgtacaacacagaggtgtctttccattggtcccaccacctgacgccagggcatctgtccatctgagttgctcccaaccccagccttacctgggctccgggtcattgggggtgcacctcttcgagacatatgccatcttcaaggacatgtgtttggcctcgctgaagttccggggtgtggggccaggggaggaaggctgccgctgaaggggtgaggcaggaggtgagtcccagccgaccgaggtcccaccagtagagttcttgaaatacggtgagacgtccttcatatacttgactgattgggagagacatcagcagtcaccactgtgacatgggctcccagcacatatcacaattgtcactaatttattaagagtttaatttacgtgtcactattagacccttagtaagcaagagtccagtagtgatattaacaaattcttctaagttaaagtctctgacagggcagtggagcagaaaatactgtatcccttctctctatccctatatagagatagggcccgcctatatcccttctctcattttccccatggttaatagacatacagccacctggaagaaagactctatttcccagcctcctttgcagtgaggtgtggccatgtgacttttttttttttttttttgagacagtttctctctgtcacccagactagagtgccatggtgtgatcacagctcgctacagcctcaatctcccagatcaatcaatcctcccacctcagctccccaagtagctgggtctacaggtacgcactaccacacccagctattaattttttgtagagatggggtcacgccatgttgctggtcttgaactcctagacagtgtatacaagaaggtggttacaagactttcccaggctgggcatgttggctcatgcctgtaatcctagcactttgggaggccaaggcgggcagatcatttgaggtcaaaagtttgaaaccagcctgaccaacatggtgaaaccccgtctctactgaaaatacaaaagctagccgggcgtggtggctcgcacctgtaatcccagctactggggaggctgaggcaggagaatcacttgaacccgggaggaggaggttgcagtgagccaagattgtgccactgtactccagcctgggtgacataacaagactctgtctcaaaaaaaaaaaaaaaaaaaaaaaaaaaaaagactcccaggctgggcatggtggctcatgcctgtaattccagcactttgggaggccaaggcagtgtggatcacttgatgtcaggagttcaagaccaccctggccaacaaggtgaaaccctgtctctactaataatacaaaggttagctgggcagggtggtgcatgcctgtaatcccagctactcgagaggctgaggcatgagaatcacttgaacatgggaagcaaaggttgcaatgagccaagattgcgcactccagcctggacgatgaagtgcgactgcctcaaaaaaaaaaaaatgatgactttcccaagaccttgtctctcttctcccaacaaggatataccctctgtgggtgcctgatgcctgctagcccgtgggcagcctctcttcctctgctctcaaccacacctgctcccagggccatctggcttgctagctatctgacgtctgcagtcaaagcccagccaacgtgccctgtgagtggacagcccaggaaggagttaggaagtaattcttggcccacctccctggaagaaccagataagaagctatttctgtcgcaggagatgcctctgaggctcagataggattcaaagcaaatggaggcaaataagagggagttacaaaccctattggggttgggatagaagcaatgttgaaagaaaccagggtcaggtttttttgggagaagcaagcctgggtctgacttttggggactaggactcaaatgacttatcatcactgtagcaacgacttaccccaggactgactattggattatgtctcaaagggcagcagaagtgggacatatcacagcctacttgacagccaaaaaccatctcccctctttttcctttgctaagagaaccctgagccctagaggctcagcttctccccagcttagagggagaatcttgattggtcaaatcaaatcatgatcattccatcctttttgcttgtgattggtttagaaaggggcaaatgatacagttctggccaatgagatgtgaggaaaaaaacactgccttccttttctcctcctttagcctttcaaagttgctgggagggagcttgttcctagtgcaacgacagccactttttttttctttcttttttttgtgacagagtctcactctgtcgcccaggctggagtgcaatggtgcagtattggctcactgcaacctctgcctcccgggttcaagcgaatctcctgcctcagcctcccaagtagctgggattacaggtgcgtaccaccacacccagctaatttttgtatttttagtagagatggggtttcgccatgttggccaggctgatcttgaattcctgacctcaggtgctccgccggcctcagcctccaaaagtgctgggattacaggcatgaaccactgtgcccagcctactttttgaccacaaagtttgggatccacacattgaggatggtgaagcagaaagatggagagacctgagttttcgatgataccatgagcccctaaattaatcttccctggagccatgctgtctcaagatgttcgggaggataacacattttctttgatgtttaaacctcattgaattggattcctgttacttgcagtcaaaagcatcctgacaaatacagcccccaatggtgcaactgctacatctccttgctacaagtggccacgtcctgctcaaagccctgctctgcctcccctgcaccctttgcctaacttcaatgccctctaggacatgggccctgcccacaggtcctgtcttcctccctggcttcacttcttgccatatccctaatctcaccctctggtccaatcacactaactactcagaggctgtatgagcttccaaacttccacactattgaaaatgcagttcccggccttgtgcggtggctcatgtctgtaatcccagcactttggtaggccacagtgggtggatcgcttgagctcaggagtttgagacgagcctggccaacatggtgaaaccctgtctttactaaaaatacagaaaaaaattagctgggcgtggtcgtgggcacctgtaatcccagctacttgggaggctgaggcaggagaattgcttgaacccgggaggcggaggttccagtgagccaagattgcgccactgcactccagcctgagggacagagcaagaccccgtctcaaaaaaaaaaaagaaaaagaaagtaaaatttaaaaaaaaattagccaggtgtggtgacacatgcctgtgattccagctaatcaagaggctgaggcaggaggatcgcttgaacccagcaagcagaggctgcagcaagccatgattacgccattgcactccagtctggtaacagagtgataccctgtctcaaaaaaaaaaaaaagagaaagaaagaaaatgcaattccctctggagtcagatgctcttggatttgaattccagctccagcactgtctaactgtgtaaccatggacaaggtcatttacctctctgggcctcaatctgctagtcagtaaaagatgaatagggctgggcacagtggctcacgcctgtaatcccagcactttgggaggctgaggcgggaggatcacctgaggctgggagttcaagaccacctggccaacatggcgaaaccctgtctctactaaaaatacaaaaattagccaggccatggtagtgcacacctgtaatcccagctactcaggaggctgaggcaggagaattgcttgaacacaggaggcaaaggctgcagtgagccaagattgtgccattgcactccagcctgggcaacaagagtgaaactccgtctcaaaaaaataataataaaaataaaaaataataaaataataaaaataaaagattaataactacagccagacatggtggctcacgcctgtaatcccagcactttgggagcccgaggcaggcagactgcttgagcccaggagttcaagaccaggttgggcaacatagcaaaaccttgtctctaccaaaaacacaaaacattagccaggcatggtagtgtgcgcctgtagtcccagctactcgggaggctgaggtgggaggattgcttgagcccaggaggcagaggttgcagtaagccaagattatgccactgcactccagcctgggcgacagagcaagaccctgtctccaaaaaaaaaaaaaaaaaaaaaaaagtctgcctcagagagatgtcaggattaaataaaatgttgtaaggcatgtggtgagtattaaggactcaagaagcaggtgtttctcacttatcagcctttcttgcccatacttcctaggtctccgattctgtgtgttagggttgtctcctccacaaaactgggaactcctaaaagaaattgccgggcacagtgcctcacgcctgtaatcccagcacttgggaggccgaggcgggtggatcacgaggtcaggagatcgagaccatcttggccaacgtggtgaaacctcgtctctactaaaattacaaaaattagccgggcatggtggcgtgcacctatagtcccagctactcaggaggctgaggcaggagaatcgcttgaacccaggaggtggaagttgcagtgagctgagatcgtgccattgcactccagcctgggcgacagagcaagactctgtctcaaaaaaaaaaaaagaaaagaaaaagaaagaaactgggcttgctcttcaaacccagagttggctgggcagtagctcacgcctgtagtcccagcacttggggaggctgaggcaggcagatcgcttgagcctaggagtttgagagcagcctgggcaacatggcaaaaccctgtctctaccaaaaatacaaaaaactagctgggcatggtggtgtgcatctgtagtcctaggtacttgggagggtgagatgggaggctaaggtgggaggcttgcttgagcccagaaggttgaggctatagtcagcctggataacagagcaagacccatttcaaacaaaccaaccaacccagaatcagtgttctgtgaatggaaaaatgaatgccagggcaggacaggctcatttagcaggagggaagaggtgccatagcccaggagacaggcccagctcagaggtcacctcagaagaggtgatcagatgctcagtctggatccatcacacccatcacctccgcagtcccctacgcctcactcccctgtgattgtctgtgtagggtctgtgtccccaactaggctgagagcactttgagggcagggacctggtctgactcttctctgtgtccccagaatccagcagagatctcatacgctacatgctcagcaaatgaacatttgtcaactttgaagccagagaaactgccagatcccctgctcgcccagccatcccagatctgggtccccctcctttcccacaggaacatgctataaatggacagcataccagctgatgccagaatcagggcttgcatttcacaaaccaagtggcctgtcccagagtgggggtggggtcctgggggccccggagtgtggccataaatagcccaactctgaggcctcctcccctctctgatttctgcctgagtcacccgacaaggcagggtggggctgccaaagcctatggcctagagagctgagggcacgaccacagccctgtggccagcattctcgagactccaaagataggcccggccagtgcccccaccctccccagccaagcccctggcctgggagcctgataagcagtgacacatgggcccttcctcctcagggaagctgaggcacctataaacagaggccccaatttccagggagctccagctctgccaaggagggaagccaggatctggctctggccccaaagagccaggaatagattccactggaaacacatggaagagaaacagggcaggatcactcatcaggcccagtataagtggactgggggtcacatatgcgttgctgagagaagggaacacatctgtttgggcaacaggatctccagtacttatcccagtgcttaataaatgtctgtgactgaatgtcctggctgaagggaagcctgtcctctaagctcaagctgttccttgtctgttcagtgggtggtcatttacttaccgctgcttgaaattagatgatagagccatttgtttactagcccatggcctttctcccctaaccagaatgtcagttcccggagagcaggggctgccctgttttccagttcactagggtatcctcaccatcaagaatagtacctgacggccgggcgcggtggctcacacctgtattcccaacactttgggaggccgaggcgagtggatcacctgaggtcgggagttggagaccagcctgaccaacatggtgaaaccctgtctctactaaaaatacaaaattagctggatgtggttgcgcatgcctgtaatcccaactacttgggaggctgaggcaggagagtggcttgaacgtgggaggcagaggttgcagtgagccaagattgtaccattgcactccagcctgggcaacaagagtgaaacgccatctcaaaaaaaaaaaaagaaagaaagaaaaaaaaagaaaatagtacttgacatataccaagtaagcagtaaaagaaatctgggccaggcacagtggctcacacctgtaatcccaggactttggaagccttaggtgggaggattgcttgagcccaggagtttgaaaccagcctgggtgacatagggagaccctgtcttgaaaaaattaaaaaaaaaaaaattttgagacagggactcactctcacccaggctggagtgcggtggtatgatcacagctcactgcagtcttgacctcctaggcttaagcgatcctcccacctcagccttccgagtagctgggatcagaggctcatgttattatgcctggctaatttttttattttttgtagagatggggttttgtcttgttgcccaggttagtctcaaattcctgggctcaagcaacccacccatctcaacctccaatgtgctgggattacaggtttgagccaccgtgcctggcctacaaaaaatttttaaaaactaggccgggcacagtggctcgtgcctgtaatcccagcactttggggggccgacgcgggcagatcacaaggtcaagagattaagaccatcctgactaacacggtgaaaccccgtctctactaaaactacaacaaattagccagaagtggtggcacacgcctgtagtcccagccactcgggaggctgaggcaggagaatcgcttgaacccaggaagcagaggttgcagtgagccgagatcacgccactgcactccaccctaggtgacagagcgagactccatctcaaaaaaaaaaaattagccgggcatggtagagcacacctgtagccccagctactcaggaggctgagatgggaggatcacttgagccagggaggtcaaggctgctatgatcatgcaactacactccggcctgggtgacagaacaagaccctgtatctataaataagtacgtaagtaaataaaagaaaaaaatgtgttagatgaataaacactgaaagccctggggcttctcagtgtggagcaaaaacattgaaagtgggtctggggccgggcatggtggctcacacctataattccagcactgtgggaggccgaggcagggggaatcttttgagcccaggagttcaagaccagcttgggcaacatagcgaaaccccatctctactaaatatacaaaaaattagccaggtgtggtagtgtgcagctatagtcctacctactagggaggctgagatgggagaattacttgagcctggaaggcagaggttgcagtgagccatgattgtgccacagcactccagcctgggccacacagtgagaacctgtctaaaacaaaaaggaaagaaagaaagtgggccctggagtgaggcaggcttgtaataacgtccttgctctgtgaccttgaacaagtgacttgacctctgcgagcctctgtttccttattttaaaaatggaagggccgggcacactggctcccgcctgtaatcccagtgcttcgcgaggtcgaggcgggcagatcaactgaggtcagaagttcgagaccagcctggccaacatggtgaaaccctatctccactaaaaatacaaaaaaaaattagccaggcatggtggtacatgcctataatcccagctacttgggaggctgagacaggagaatcgcttgaatcagggagacagaggttgcagtgagccaagatcgtaccatggcactccagcctgcgtgacagagcaagactccgtctcaatcaatcaatcaataaaacattaaaaaaaaataaaagtaaaaatagaagtaaaatatatctactttaaagggtattaaaagattcagctgggccaggcgcagtgactcacgcctgtaatcccagcagtttgggaggctgaggtgggcagatcacctgagggcaggagttcaagaccagcctggccaacatggtgaaaccctgtctctactaaaaatacaaaaaaattagccaggtgtggtggcacacgcctgtaatcccagctacttgggaggctgaggcaggagaatcgcttgaactcaggaggcagaggttgcagtgagccaggatcgccccactgcactccagccagggtgacagagcgagactccttctccaaaaaaaaaaaaaaaagattcagctgcaggttgggcacagtggctcatgcctgtaatcccagcactttgggtggccgaggcgggcggatcacttgaggtcaggagttcgagaccagcctggccaacatgatgaaacctcgtctctcctaaaaatacaaaaattagtcaggcatggtggcagacacctgtaatcccaactacttgggaggctgaggcaggagaatcacttgaacccgggaggcagaggttgcagtgagccaagatcgtgacattgcactccagcctgggtgacagacatctcaaacaaacaaacaaaaacaaaaaaaaagatttgtctgggctcagtggctcacacctgtgagcactttgggagttcaaggcaggacgatcgcttgagcccaggagtttaagagcagcctggccaacatggcaaaactccgtctctaccaaaaatacacaaaattagccaggtgtggtggtgcacacctataatcccagctactcaggaggctgaggtgggaggatcacttgagcccaggaggttgaggctaaagtgagctgtgattgtgccactgtactctagcctgggtgacagagagaaaccctgtctcaaaaaaaaaaaaaaaaaagccaatttaaaaataaataaataagtgaaagattcaatacctgtaaagcaccttctcctgcctggcatagaacagggctgtctggagatagcagtgtggttatgatttctgctgctgttcctagtgtgacagtataaggggataggcatgtaatgtggtgacaggcagacaaggatttgaatccaggccccgtaatatcacttgcatgaggcaaggtctctctgagcctcagtttctttgcctatataatgggcactgatatgtcaaccctcaacttgaacttgaggattcaagttccagctgcccacccatccacccaggatggtgtgaagaggacttgggattccaacaggccctggaagggatgacctttaaggtcttgctggtctagcaaggctgaactataaatagtccccagactctggcaggccctataacagggatgaccagcagagcccaggggttgccacactttgggggataaaatctcaccttaccacacccttgagtagtacaggggttacaacctatacaaaatcccaaaagcatgtgacccttttgacctaacagcaacccttccaggaaccacccttcagatgagtgctcacaggtgcacagaaggcttatagcgctattgtccatcctgcaagaggctagggacaacttgaatattcatgaataggggctgctaaaaacaagatgtgaactccctgactggcagacactcactactcagtcttgttcatagctatatccttggtgcctgcatctagtcctggcacagagcaggggctcagtaaatatatgttacatgaataaacaaatccatgggatttttttttttaatttgtagacatggggtcttgctatgttgtccaagctggagtgcagtggctgttcacaggtgcatcatagtgcactccggcctcgaattcctggcctcaaacaatcctccaacctcagcttcaggagtaaataggactacagatgtgtagtcctccagcccaataatgggacaccacataaccattaaaaagaatgaggggccgggcacagtggctcacacgtgtaatcccagcactttgggaggccgatggtgggcagatcacctgagctcagtagttcaagaccagcctgggcaacatggcgaaatcccatctccacaaaaagcacaaaaatttagctgggtgtggtggtgtgcacctgtagtcccagctattcaggaggctgagatgggaggatcgcttgaatccaggaggtcgaggctgcagtgagcaatgattatgccactgcactccaacctgggcaacagagtgagacactgtctcaaaaaaattataaaataaaaaatattaaaaagataaaaaagaatgagacttacatgttctcaacttattacgtgataaaagcaaatatggaaacttactggaagaaaatgtgtgaaagtatcaacactggttatctctataagatgatccctttacactctcgttggtaattttttttttttaagagacagtgtcttgctttgttgcccagattagagtacagtggcataatcatagtttgggtacagccttgaactcctgggctcaagcaatcctcctacccagcctcctgagtagctgggattacaggtgcacaacactatgcccagctaatttttaaaaaattttttggccaggcacagtggctcacgcctgtaattccagcagtctgggaggccgaggcaggtggattgcttgaggtcaggagttcaaaaccagcctgaccaagatggtgaaaccccatccctactaaaaatacaaaaattagccaggtgtggtggcaggcgcctataatcccagctacttgggaggctgaggcaggaaaactgcttgaacctgagaggcaaaggttgcagtgagccaagatcgtaccactgcactgcaacctgggcaacaaagcaagactcggtctcaaaaaaaacaaaaattttttgtaggccaggcacggtggcttatgcctgtaatcccaggactttgggaggccttaggcagatcacttgaggtcaggagtttgagacttggccaacatggtgaaaccccacctatactatatacagaaattagccaggcatggtggcacatgcctgtgatcccagctacttgagaaggtgaggtaggagaattgcttgaacccaggaggtggaggtttgattgagccaagatagtccactgcactccagcctgggtaacacagtaagactccacctaaaaaaaaaaaaaaaaaaaaaaaaaaaaaaaattgggtcaggcatagtggctcatgcctgtaatcctagcactttgggagtccgaggcaggtggatcacctgaggccaggagtggcgaaaccccatctctactaaaaatacaaaaattagccagatgtgttggtgcgcgcctgtaatcctagctactcgggaggctgaggcacgagaatcgcttgaacccaggaggcagaggttgcagtgagccgagatcatgccattgcactccagcctggccaacaagagagaaactccatctcaaaaaaacaaaaacaaaaacaaaaaaattgtagagacgaggccttgccatgttgcctaggctagtctcgaactcctggtctcaaggaatcctcccacctcagcctctgaaagtgctggaattataggcatgagccacttatttttttttcgagacagggtctcactctgtcacccaagttggagtgcaatggcacaatctcagctcactccatcctccacatcccaggctcaaatgatccttcagcctcagcatcccaagtagctgggactacaggaatgtgccaccatgcctggctaatttttgtaacttttttttggagagacagggtttcgctatgttgctcaggctaagctggatatttttgaatgagtatgtattactttttaaattttctaaaaaatctagtttatttttcaaaaatataccaccacataccaagccatacaagccatagttcagagataatgctcgtatcaactcggaagcctagattcagggttctagaatcttagtgatgggagaaagcagtacttattgagcgcctactatatattggggccaagctcaactctctcgaacacaccttcaccttatttcaccaatttgatgagatgaattaatatccttatttatgttcatttttattacttttttctttttttttttttttttttgagacggagtctcactctgtcgcccaggctggagtgccgtggcgtgatctcagctcactgcaacctccacctcctgggctcaagcaattctcctgcctcagcctcctgagtagctgggactacaggcacgcgctaaattttgtatttttagtagagacggggtttcaccatgtttaccaggctagtcttgaactcctgacctcaggtgatccacccgcctcagcctcccaaagtgctgggataacaggtgggagccaccgcacccagccatagtatctttatttaatgggtgagtaaactgagtctcagagaagtgacataacctgtagtgcagataagtatttaagaaaatgagttttcgccgggcgcagtggctcacacctgtaaatcccagcactttggaaggcagaggagggcggatcacatgaggtcaggaattcgagaccagcctggctaacatggtgagatctcatctctactaaaaatacaaaaattagccaggtgtggtggcacatgcctgtaatcccagctactttagagactgaggcagaagaatcacttgaactggggaggcgcagattgcagtgagccgagatcgtgccactgtactccagcctgggcaacagagcgagactccgtctcaaaaaaaaaaaaagattatgggttttcagccaggcacactggctcacacctgtaatcccagcacgtcaggaggctgaggcaggagaatcacttgagtccaggagtttgagaccagcctggacaatatagtgagaccctgtctctacaaaaaatcaaaacaataatagctgggtatggtggcacatgcctgtagtcccagctactggagaggctgtggtgggaggatcacttgagcccaggaagtcgaggctacagtgagccgtgatcatgcaactgcattccagcctgcatgacagagtgagaccctgtctcttacaaaatttttgtttttgattaaaatatatatatatgagttttggcatctgaaagacttgagctcatattccatctctgccatactgtgaccttgggcaagtaatgtcacctctctgagcttcagtgttctcatctatacaatgaacaatgtacctaattcacagggatgacattgaggattcaattaaataacatagggaagggccgggcacggtggctcacacctgtaatcccagcactttgggaggccgaggcgggtggatcacctgaggtcaggagttcgagaccagcctggccaacatggtgaaaccccatctctactaaaaatacaaaaaattagccaggcatggtggcacgcgcctgtagtcccagctactcgggaggctgaagtaggagaatcgcttgaaccagggaggtggaggttgcagtgagccgagatcgtgccactgtactccagcctgggcaatggagcgagactccatctcaaagaaaaaaacaagcatagggaagggacttagcacagtaggtgctcatggtgttgagcacagtgtggatgctcaataagcagcagatgctaccatcctgattattatcactattatttcctccaccaccagcagcagccagggtcacacagctcgtcagggccagaacctgcctacagaggcccacaagacattttaatcaaggtccggggaacaggccagggctggattaagccaagttttgtttgtggggagtcacatggtccaaagctatgcgtgtgcacagccaagtaaacttttccttgagaacaatggtcagaacaacaggtctttgcggccatgggagaactgaacaggagttccattcatgccctcttcctgggacaggggtccctccagcatctctggggcacagcatgactcagctaagttgaaacagggtggccccaaattagctacatccagaatgacatcccgcttttgacagtggtgatgcatcaagccagatcaaaggcaggacacctggcagtggccatcttcctgggaagagccagtagggagctggccttagagttctgaggactcagaacagaaaagctcaagagtcagtcaagctcagcatgattctcaagtcccatcttaaacatttaggaaagtcaacagcaattgaaaaggtgaaaggtaaagtagaaagggtccaagatataccccactgatcagtctccaaacactcaccaagatctaatgtatgttgggctcagtgccagacctgggggctgagagacaagctacatgtggttcctgccctcaaacagcttccagtttactaaagaaaacaataacaggatcaggcgcagtggctcatgcctgtaaccccagcactttgggaggactgctagagcccaggagttcaagactagcctggacaacacagggagaccctgtttctattaattttttttaattaggcaggtgtggtagcacatgccgtcgtcccagctacttgagaggctgagataggaggatcgcttgagcccaggagttgaggctgcagtgagctgcaatcacacctctgtgctataggctgggcaacagagtgagatcctaaataaataaataaaagcctgatctctatgagggctataccttccttactttatataaagcactaaaattcactttattaattttttttttttgagatagagactcactctgtcacccaagctggaatgcagtggtgcaatcttggctcactgcgacatccacctcctgggttcaagtgattctcctgtctcagcctcctgagtagctgggattacaggtgcctgccaccacgcccagctaatttttatatttttcgtagagatggagtttcaccattttggccaggctggtctcgaactcctgacctcaggtggtccacccacctcagcctcccaaagtgctgggattacaggcgtgagccaccttgcctggccttagtattattttttgttttttgtcgggtttttcttttttcttttttttttgagatggagttttgctcttgttgccccaggctggagtacaatggttcgatcttggctcactgaaacctctgcctcctgggttcaagcaattctcctacctcagcctcccgagtagctgggattacaggcgcgtgtcaccatgctcagctaatttttgtatattattagtagagacggggtttcaccatgttgcccaggctagtctcgaacccctgacctcagttgatctgcctgcctcagcctcccaaagtgctaggattacaggcatgagtcaccgcgcccagccagcattatttttaatgcatgacaggctcactgttgtcacagtcctgccagccacactggaatgggaggagggaagggtgttttccttgaggctgtccctccctcttcccccaggcctggccttcaagggcccaggctggccctggcttgaggtctgcacacacaacgggcctctcgaagcagcggacagacacttgttggctgccaacttgggcccagactgtggtcacaaacacacccctctggctgagaacaggatcaggacatttctgcaaacccctgacctagtagaagaaatgttctaggaggcaggttggggttgctgaggctcagctgagcccccaacttaggccagggaagtaaggctctagctgacacctggagtttgctggtaatgcttgttctcccaggacatcctcaggggattcactatccactgagctggaaaaatatccagttgccttgccaagttcacatccaaaggacaggccatccttccatggccccttggaggcgtcctcagtaatgggatgtgagtggggaaatgttgaacaatgtggtcagtgattcaactccggggaaacctaggcccagagagggtcccaggaaccctggctgctccagactggtgcaactgccaggcccagaccttctccactccccaaagtctcaaggaccagccacagcccagcatcctcctatccttcagacctctctgatcactcttgccattcagagattcctgactccagtgccttccaccactcctcctcccctctttgtgctatcttgagtggaatgacctccttccatgagatcttgggccaggagaataggtcgaaaaagacttcaactaaggaaaagtggggaaaaacatgaaggccacattcttctttctcttacccaggccataggcagggttcaccaaggaatgatctcgtcctgtgaaacatctcagagaatataagagcaggggcccctcagtcctgggatgatacacatgttacttctctactgcatctgtagtagacattgctaatcaattccagctcctttctgctgagcccagacaaagcctcccaatccttccaaatatggaactcacagaaccaccagtggagctgacgcttacactcttttttttttttttcctacagagatgaaatctcactgtgttgcccaagctggtctcgaactcctgggctcaagtgatctgcccacctaagcctcccaaagtgttgggattacaggcgtaagccaccacgcctgcctggagctgccactctaaataaaagctattgatcacctctgatctagcctaacttcaataggaaaactgagtcccctagaaggcaagggtcttacccaaggccaaacagagatttattgcagagcagacaggatttcaggcaccagctttttttttttttttttttttttttttgagatggattcttgctcttgtcgcccaggctggagtgcagcggcacaatcacggctcactgcaacctccgcctcccgtgttcaagattttcctacctcagcctcctgagtagctgggattacaggcacgcgccaccatggctcagctaatttttgtatttttagtagagacggggtttcgccatgttggccaggctggtctcaaactcctggcctcaggtgatccacccgcctcagcctcccaaagtgctgggattacaggcgtgagtcacagcacctagccaccggcttttaaagagtttctgtaggccaggcatggtggctcacgtctgtaatcccagcactttgggaggcccaggcaggcagatcactgaggccgggagttcgagaccagcctggccaacatggcaaaaccctgtctctactaaaaatacaaaaattaaccaggccgtggtggtgcacacctgtaattccagctacagaactgaggcagagaatcgcttgaacctgggagaaggaggttgcagtaagctgagatcgcactactgcactccagcctgggcaacagagtgagaccctgcctcaagaaaaaaacacagtttgtgtagaggagatagtgtttatgttttgtctaccctaccacatggtgagctccttcaggagaggccctgggtgtagtttagcttctgaccttaatatacacagcaggcacacagtagatgtccatgaatgtctcttggcttagtgaggaggaatgcatgacatgagttagagggaaggcttgagtattcactcctaaagtcagaagatgcttcaaggtcacacatttacagatactaccttctcaaaacgacatacatgggaacccagatagatacatttttaatctaaagatgaggaggtgggccgggcgcggtggctcacgcgtgtaatcccagcactttgggaggccggggcgggcagatcacaaggtcaggagatcgagaccatcctggctaacacggtgaaaccacatctctactaataatacaaaaaattagccaggcgtggtggcgggcacctgtagtcccagctacttgggaggctgagcaggagaatggcgtgaacccgggaggcggagcttgcagtgagccgagatcccgccactgcactccaacctgggtgacagagcaagactctgtctcaaaaatataaataaataaaaataaaaaataaagatgaggaggtgaggggacctccgtgtgaatgtggatttgaattgtgtctatagcagaaattttaccatagactaaactttcaaacaacagaagctaaaagagctttcaagtcaactaaaatatgacatttcgatgaatgtcagtggtttcaaaccgcattgctgactataaatatcaaagtaatgaggcatgtggggaaagtctcttatatccatatcatttatgtggcattctattatttaactttgccattaaaatatgattgatacacttaagcttctaaggatcaacactctagagtcagctttttttaagtatcaaaaaaatgcatctagactgggcactgtggcctgcaatcccagcactttgggagacttaggtgggaggatcccttaagcccaggagttggagaccagcccaggcaacatggtgaaaccctgtctctacaaaaaattggctaggtgtggtggctcacgcctgtaatcccagcactttgggaggccgaggcaggcagatcacgaggtcaggagttcgagaccagcctggccaatatggtgaaaccctgtctctactaaaaatacaaaaaaaaaattagccaggcgtggtagtgcgcacctgtagtcccagctactcggaaggctaaggcagaagaatcgcttgaacctggaaggcggaggatgcagtgagccaagatcgcgccactgctccagcctgggcgacagagtaagactccatctcaaaaaaaaaaaaaaaaaaaagctaggcgcaggggctcacacctgtaatcccagcacttttggaggctgaggcaggtggatcacaagctcaggagtttgagaccagcctggccaatatggtgaaacctcatctctactaaaaataaaaaaattagccgggcatggtggtgggtgcctgtaatcccagctactcaggaggcggaggcagaagaattgcttgaacccgggagacggaggttgcagtgagccgagatcatgccactgcactccagcctgggcaacagagtgagactccatctcagaaaaaaaaaaaaattaaccaggtgtggtggcatgcatctgtagtcccagccactcaggaggttgaggtgggaggattgtttgagccccggggggtggagggtgcattgagccaagatcatactactgtactccagcctgggtgatagagcaagaccctgtctcgaaaaaaaaaaaaaacaagaaaaaaaaatgcatccatggcatttaaatagatatacctaaaatataaaataaaactttacattttattttctttatttaaattttattttattttatatctgggtcaaccaaggaccgagaacctatttgcttctgtggcctcttggacactcctttagggaaaccaaggcaacccaccaggatttgggcctgggactcaactcagcagcttctctggccgtgttattctccatcagcccccgccacctccctgtgcctgttctgggccataagccagagacacattcctcaggcccccacggggcttccagagctgacagagtttgaggaaagggctgagcaaagcagaaacctcttgagagacatggcacaagatggtcatgggacaacctcagcaggaggcgtgtaacaactgatggggaaaccgaggcccacagagggcaagggtcccacccaagaccacactgtgagggaacagtggagaaagccattcaaccaaggttcctccacaaaactcctctctgatcctggctggaaggatttgatgtcctactctataaaagccaaggcctctgggcgtggtggctcatgcctgtaatctcagcactttgggagactgaggtgggtggatcacctaaggccaggagttcaagactagcctggccaacatggcaaaaccctgtctctacaaaaatataaaaattagctgggcatggtgacgcacacctgtaatcccagctacttgggaggctgaggcaggaggatcacttgaacccaggaggcagaggttgcgatgaaccaagatcatgccactgtattccagcctggacaacagagcaagattccatctcaaaaaaaaaataaagtaaaataaaagccaaggcttctcccaaaggaggatgggtcttggggttttaaggcccaggcactaaaagaacctgaagtcaagagctctccaggccccacaggaaagaatctgacctgccccttccccagtccgcacccctctctccctgtgtcactcaggtgctggcacactctgccatgtacatttttgccctagtcgcaacaacccagaaaggcaggagctacatccctgttttacaaatgaggaaactaaggatcagggaaatgaagtgacttgtccagggctacacagctagtgactggaagacagaaaatgcaaatcaggtctgcttggctctatgccaactctccctccaccaccccacactgtcttcaggcaggtccccaaattctgtttctgttttcagtcctgcccacctcccagcccccagtgctgggatggggccttctgaggcctgggggaggtagagaagcagtggaacacctccacccagcccctctgaaccctggaacgtcagtgcttaccctccagcaccacctccttgcctgtcttcttgaggacctgcaccgcctcatcatgggtagcagaggacaagtcttccccattcacagacaggatggcatcccccacaaaaagggcctctgtctggtcagctgccaatcccttgaagatcttggaaatgagaataggcatcttgttctcccggccgcctgcacaggtacagaaggaggacaagacttaggcagatactccaacacttgggagtcacatcaagacacaattatttctgaaggcttcccttggtgcctagcccagtgctggaaaaggcaatgggagaataaagggaatctgagaaaaatcttggaagtttgggacactagtaacactaataataaatcatttttgattaggtccggtggctcatgcctgtaatcccagcaccttagaaggctgaggtgggcaggtcacctgaggtcaggagttcaggatcagcctgggcaacatgggaaaaccccgcctctactaaaaatacaaaaattagccaggcacctgtggtctcagctactagggaagctgaagtaggaggatcacttgagcccaggaggtcgaggctgcagtgagctgagattgtgccactgcactccagcttgggtggcagaaggagaccctgtctcaataaattaattaattaaataaatcattttcaaaattcataatgctatagtttgatccctggatcttttgattaagtgctttgggtgttcaccagtgtttgtgcaacttacaaagtgcttcaatcactttttcttaaatgttttcgattttctcatgtaacccataaatatatatgcctactatgtacgcacaaaaattaaaaatgaaaataaccggacaaagtggctcacacctgtaatcccaacactttgggaggccaaggtggtcggatcacttgagaccagtagtttgagaccagcctggccaacatagcgaaatcctgcctctactaaaaacacaaaaaagggccaggtgcggtggcttatgcctgtaatcccagcactttgggaggccaaggctgccaggtggatcacctaaggtcaggagttcgagaccagcctggccaacatagtgaaaccctgtccctaccaaaaatacaaaaaattaactgggcgtggtagcggatgcctgtaatcccagctactcgggaggctgaggcaggagaatcacttggacccaggaggcggaggttgcagtgagctgagatcacgccattgctctctagcctggg

SEQ ID NO: 6907 - DNA, 4786 bp, Homo sapiens
tacactgggccgggctgcctgtgtgctcacaggctgtttatttatccaagagtaaggaggagagagacaggatgaagagaaaaaccagactccccacggtggcagggctgaggggaaaaacaaacagaaaatctcctcttctttctcttgctgctgaccccagggtactccagcttcagatgggacctctgggggtggcttaggggcctcgaggaggcccggcagctcagctgttggctggggtcaggatccgcacaggggcaggtcccagactcggaatggcttctgtgtacacaaaatatctctctgcaaaaggcactggtggaggggggcagcaggaaggccaccccatcacaggcagagtccactctgtcctgcgtctgggtcctgggccccaagaccaatccagtctccctcagggttggggtttcggaggcccttgttcctctcctctcccttccctcagcccaggggtgagcaggcagtcggtggaggcccagctcaggccatgtcatggacacccctcttcagggctagtgcatccggcgacttctttctaggccaacagcccgaggcgggtgactttggccgacaggaaggagtggatgatgaagactatggttttgggacacgagtgcaggtccagctgctggagggtggatggagagaagagtcagggccctggccagcctggcctccgagagtgcacaccccctcctccccagggtgcagaggcagcccctcactcacgatctcgccttcagcacctccaaaatccaggaaaaggagactggcaccgtcatctgaagacatctgcagcttctcgaagggctgtcgcaggagcacagctcgggctgcacctggctcagccgcccacagtgtgaagcccttgtcgatgtgcacagacaggctgcagggacgcccattccacgtgcaggctgcagggagggcacataggtacaggcacagctggcacctcagagactacaccccaacctccaacccccaccgcagcttacaaagtggggcctgaatgcctccagggatgggaggctcactgtttgtcgtggcaccagtacacccaccctgcagagagtcatcacccccaccctcagaggacctacacccacttccagtcccacttccagcagcacaagtagaaagggggagcttaaaatgtgccatggacaggaggctcactgctgataaaggcatcatcagatctaccaagcaccgcccttggagacctgcagagttacccggctaaatttaaatttcagataaacaatgactaatttgggcatacttctgtgaaaaaagtattcattgttaacctgaaattcaaatgaggctgggtgtcctgtatttatttcctctggcaaccctaccccaagtgccatctctcacatcctcaccagcagattgacaaaactggggcaagaaaaccccagggagaagagtctctgcctgctagggcacctgcacatccaaaacagagggcccaaacccaacttccttttttttttggagaaacagtctcactctgttacccaggctggagtgcagtgggcgcaatctcggctcaccacaacctccatctcccgggttcaagtgattctcgtgcctcagcttcctgcgtagctgggactacaggcacctagtaccatgcccggctaatttttgtattattattttttttttttgagacagtcttgctctgtcgcccaggctggagtgcagtggcacaatctgggcccactacaacctccacctcccagattcaaacaattctgcctcagcctcccgagtagctagtctacaggcgcccaccaccatgcccggctaatttttgtatttttagtagagacagggtttcaccattttggccaggctggtctcaaactgctgacctcaagtgatccacccgcctcagcctcccaaagtgctgcgattacaggcgtgagccaccgcacctggccaatttttgtattattagtagagacagggttttgccatgtttgccagactggtctcaaacttctgacctcaggtgatccacccaccttgacctccaaaccccattttctatcccctcctgaagtgccctaaagaaggaagcttgaatgcccctggggataagaggcttattaccagagggacactcccagatcctcccagcacacctgtagacacctcctgcacaccctcggcggcccggtgacagccatccacaagctggcgggtccaggcagccagctcctgcggtgactccacgctgaacaggtgagtgtccacaccgtgacgcgtgcccgtgcgcagggcaaaagagagctctgcatcgtagggcactgagcccttggaggggcctgagtgcaccagtctgggggttgggggcagagggctgagcatgaggcctcaggccggaggcaaatagttctgggcaaaggggccagtgacctgggaagaaaccctgtaaatcctttaccacctaacaggacaggacttgccagggggcactgattgactcagcaggagacatctcctgccaccctccccgtcactcccttggctctggctatactggtgtcatcacacacacctagcacatgcctgcctcagcacctttgcatatgctcttccctctgcctatacatgcttccctgattatctgcacggctcactccctcacttccttcagatgttagtttaaatgtcacctcctctgagaagccttccctgacctcccagtccaaaatagcacccttgtcactcactagccttactttttaatcatggtaccagaaattatactttttattatttgttttcgttggtttttgactgtctttttcactagaatgtcaactaggttagaaattttgatcttgtgttcaccactgtattcccagtaactaaaaccatgcctgcccacagtaggtgctcagtaaacttttgttgcctaacttgaatcacttgattaggcagacagtccaggacctagttatccctagtagccagcaggctcctgacacacgggccagagccagcctgaggtaaggagacatgggggacaaggacttcagacccctgcagcttgactctcacttgctgtgtggccttggtaagccaactgcccctctctggggcagaaagttctgccccatatccctctttgttcctccctccacccactctttctcctatagctcagttccccccgccacagactgctgctgacacccgccttcgactttccagccctgagctgcagaccctcgagtccccaggcttcctatccaagctccctctccatcccacacacactctggacttaactcagcatcttgctccagcctcctccctttccacccccacccccagtcccacgctcacccagacacaagctccaaacctcctgttcattccggacccctccttcacccgccccatctggcaagcacggagccctgttaattttacacccatgtggtttccaatgccaatgctgcctttcttccccatctgctcctgccacccacctccacctcccccagccaccatcatctctcctgcatgactgcagcacctccccacttccatcctgcactctccgctgcattctccacgtggcagccacagggattctcttaaagcaaccagagcacctcgctccccagcttaaacccttcaacactaccaaactcttaagctaaagctaacattccttaatcaggcaatagaagctcttcaagatcaggccctgccaactcccttctctccatttcctgcatgaattctggttatcacaaactcatagctccatgaacatgctatagcccttcatgcctctgtacttttgaccatgatgttctctctgcatgggatgctctttcaccctttcttaaacagaaaacttctactcatccatcaaagtccagctcaaatgtcacctcctccctgaagccttcctctactaccccaacagagttaagtggctcctacaaaccctgcactgtaatggctgttcctgggtctgtctccccagccagacaaggttctctctggaggcagaaactgttggggtcagctctgtgccctctgaaccatgcagcacaaggcataagtgtcagcgaatgagtggctaatggggaccttatatccttttgttccaagcacccattttacagatgaggaaactgaggcccagacagggcagagacttgcttcaggtcacctggggaatagctgagggtggacagggctggagttcccagcttctggggccctgctggagcatctcctggcaagttctgggggagacatactgcccctgcctgtgggtacctggtggcgatgagtggggcagtacgggctggccggctcagggcctcgcgggtctcggggagagacaagtagaggagcagttccttttcagttagcagggccagggtgggggctgtgcccccactgggcagctgcagagaacaaaacagcagtgaggatgggtgggggaagagagggcagagggccagggcagggtgaggtggccaggggcactgggaacagggccagctccaaaggagcggaagagagggagggataggtcccaggcccagcaggtacctgctcagttagccagccaatctgcttgatgtcctggctcccagctgtgctggtggctgccaacagtgcctgcagctcatccttgacccgcggcgtcagagtattgacctgggcttggatggcagtcgcccacgacctcgcactagcctcatccttggccctc

SEQ ID NO: 6908 - DNA, 426 bp, Homo sapiens
cagtgtaaggcttccaagaccgggtcataagaggcactgtttgtggcttcctccttgccctctcttctgtctcactgtggggaaagccaactgccatatcatgagaaaactcaagcagcagctctagggttagccctacatggtgaggaactgagacctcctacccacagccatgtgcatgagcagtattggaatggatcctccagccccagtcaagccttcagatgactgcagccctagccgacaacttgactgcaacctcatgagcgaccctgagacaagaacagcccagcttagcccctctcaaatttctgacccacagaacctaagagataatgaatatttgtcattttaagctgcaaattttggataatttgtcacacaacaatagataaccaatacactgtctttggcccatgtagtaaa

SEQ ID NO: 6909 - DNA, 426 bp, Homo sapiens; identical to SEQ ID NO: 6908

SEQ ID NO: 6910 - DNA, 485 bp, Homo sapiens
ggtttctaatctttgctgcctctgttagctccaagtcgactttggtcccctcacgtcactgctctaggcctcaatttcctcatctgtaaaatgtggatcataataatacctacttcactgggctggtgtgaggattaaatcaatgtgaaaacacgtggtaaactgtgactccctattctatagaaataatcactttcatttagtgaatgcttactcttacctagggctggcagaatattttccaagtgttatctttacattagcctcctggagtagctaagagcacccccagctgggcacagtggctcacacctgtaatcacagctgaggtggcaggatcgcttgagccttggaggtccaggctgcagtgagctgtgattgcaccatcacactccagccttggtgacagagcaagaaaaaagagcacccctattatacagaagggaaaacttggatttagtctaattggcctaggtcacacattt

SEQ ID NO: 6911 - DNA, 299 bp, Homo sapiens
ggaaggctcaggatagcagggaacaggcagcccacagtcctggaagcaggcctggtggcacaggcctgggtatggagtgtcagtggtggcagaagaggggagtcactgttttcttcattagttaatgcctctcccctggagggagggcaagagctatggtctacacagccaaagtgagagggtggttgagcaattctccagcaaactcaggcaaaatcaggcaagcatatttaggcctagaagtcctggttaccacagcctaaagtgatagggacagaaagtgaaaggaacagaaaacc

SEQ ID NO: 6912 - DNA, 321 bp, Homo sapiens
caaaaacaggaaagtctcttgtttgaaaaccctctaaagcaacatgtgggcttagaaaagaagccggcttgtggtttggtgattgtacttccttattgatataatggccgctgacgcaaggcctcctgggattgcagcgcggtgaccgcaggcctgacggttaccctgaccgggttctgaaacagcccggggctttcagcacagatgagaagtctaaaaatttcccttttcatttcctctcttgtgtgactttgtcatttttaaaaaaactggtcacagaaaagggaattttgcccatgcttttaaggagtttatctcgac

SEQ ID NO: 6913 - DNA, 334 bp, Homo sapiens
aaagtttaaaatgggctgggcctcgtggctcacgcctgtaatcccagcactttaggaggctgaggcaggtggatcacttgaggtcagcagttctagaccatcctggccaacatggtgaaaccctgtctctactgaaaatacaaacattagacaggcatggtggtgggcacctgtaatcccagctactcgggaggctgaggcacgagaattgcttgaactttggagatgatggaggttgcagtgtgctgagattgtgccactgtagtccagcctagatgacagagcaagaccctgtcccaaaaaagaaaaaaaaagtttaaaatgagctttaaaa

SEQ ID NO: 6914 - DNA, 15061 bp, Homo sapiens
aatcatttctcccaggcagacgcgtgccatgcctaccagatcattcaccgcaatgggattcctgacgaacagatcgttgtgatgatgtacgatgacattgcttactctgaagagtaagtggggaacacttggaacttggtggggaaggacttcagggtatttaaaaaaaggtcacatagactcacaggaatcctagtggcctaatgttaaaatatataagagactcccagacagaagatcacagggatacctcatgttgagcttttttttttttattattatttatttgagacagtcttgctctgttgcccaggctggagtgcagtggtgcgatctcggctcactgcaacctccacttcctgggttcaagtgatcctcccacctcagcctcccaagaagctgggactgcaggtgtgcactgccatgcccagctaatttttgtatttttagtagagacaggatttcaccatgttggccaggctggtcttgaactcctgacctcaagtgatccggctgccttggcctcccaaaatgctgggattacagatgtgagccaccatgtctggccctcatgttgagcttcgaccataacttgggtgtgccctgggaatggcaaagacataggaagtgggtgctggtcgctgctttgaaagggtctaaagccgagttcctcctcaccttcgaggacttgttggattctatggtgcttgctcctaagctccgagcaggctgcagcacaggggacctgcacgtagaatgtttttgtttgtaggttagatactcctactaccttctttctatacttattttattacttgctgagtttaacttcacaaatagttcccttgtgcctgcttatctgatttcttgcagagatcagaggcagcaagtatgggcataaactcagcgagttctaacctcctagctccgtggtcaccctgctgcggtgaaggacgctacccttactgtggtcacattctcagctcatacatcacccactctgacgctttaacgcctaagctcttgtattaaagtcttgttctctgtcctgtctctttctgaaagtagtttcactctgagagagcttttgatgagaccttgccctcacgatgctctctggtttccagcaggcagccaggcgcacctatgctttggtccctgcccgaggcttttcgggctcagctcctcactgcctctgccaagagctcttgggctgtgggactgctgagatccccaagctgctcaaaccactcacacgttggccaccctgcaggccataagttgtttctttgaccaacatagacgtttactattttttcgcataacatacatgtgtttgaagagagagatttcggaggcatgccacatctcgtttaaattgtgtcctttaattttcagcaatcccactccaggaattgtgatcaacaggcccaatggcacagatgtctatcagggagtcccgaaggactacactggagaggtgagtggcttctacggttggagccagctggtttagttttcattttagtgatgatttttccctctttcttctgtttctagaatcagaatctccctagactggcttctggtcggtgtttcacattcgtattaggatttttgcctgaggagtaaattatgagagttttgaaagaaagcagaggaaaagagaatgtttagaataagttgcaatccactgatagttcccagtcttctcatactttaggcctgaccatgtagtttcatccatattaacctttcttgagatatcaccattaatctgatcatagattacctgtgctcttttataaaaatcagttttctcagtaccaggcttggtgcaaagtatctcaggatttttgctgagatagtttttcatttattattgttatatagtttattatatagtgtattatagctataatagtatattacttccaaaaacttttctgttcctcctagttgattgagactgtctcaattgacacatttttaaaatcgaccgtgatgccttcattcacctggttttcatagtctgttttaaatatcggatcttttaggaattaattatccttttgataagaaacttttatctgatgtttaacaattctttgtttcattttattttatttttcttttaaagtcaaatacaattaaatttaacatatcatacaggtaaaaaagatgaccgtatttaatgaaattgtttctgtatagtgtttgtttgtttgagatggagtcttgcactgttacccaggctggagtgcagtggcacaatcttggctcactgcaacctccgcttcccgggttcaagtgattctcctgcctcagcctccatagtagctgggattacaggcaggtgccatgatgcctggctaatttttctactttcagtagagatggggtttcactgtgttggccaggctagccttgaactcctgacctcaagtgttccgcccgcttcggcctcccaaagtgctaggattacaggcgtgagccacggcacccgaccaaaagtgtttgctgttaagccatgagccttggaatgtgcaggctggtggcatgggtcggttgcagactcagccaactctctgggttggagcgacagctgcatctgattgtggctcctaattctttgtaggatgttaccccacaaaatttccttgctgtgttgagaggcgatgcagaagcagtgaagggcataggatccggcaaagtcctgaagaggtaatgtctgtttacggatactacacttctctcaatggcttgggacccccgtatagagaattgaaacaggtgttgttctgtgcccctagcctgtttacctgtgagaaattacagagtggagagttttgttctgacttaggacaggtgcttagggctgttgtttcagtggcttctcttggtggcccatttctgcactgaattcaccttatgatccagggcccctcattattaataaaatgttcctatcacttaaactcctcgttccttgtctggggatcatagcacagggatgtcccactgccagcggagcccctgaggcaggtgtgaatctgaatccctgtgcccagattgcagggccaccagccctgtgctctgatcacagatcagcccagcggggagaggcacattcgtaagtcccttcatattggaggaagtggactttcatattggggaacacgaaccccagtgcttacccccactggctgtgggctagagatgtcttgttgtttagtaattgctcatgtggcatttttatgtgatgccagagattctagtagcatatttcttttaagctggaagggaggcctgggcacaagtaagctcgtgtggattagtgcagaggctgggtacagtggctcacgcctgtaatcccagcactttgggaggccaaggtgggcggatcacttgagatcaggagttgaagaccagcctggccaacatgatgaaaccccatctctactaaaaatacaaaaattagccaggcgtggtggcatgcacctgtaatcccagctactctggtggctgaaggagaattgcttgaatccaggaggtggaggttgcagtgaggcaagattgtgccactgtactccagcctgagtgacagagtgagactctgtctcaaacacacacacacacacacacccaccctgaccaacagtgtgaatccccgtctctactaaaaatacaaaaattaaccaggcgtggtggcgtgtgcctataatcccagctactcgggaggctgaggcaggagaactgctttaacctgggaggcggaagttacagtgagctgagatcatgccattgcactccagcctgggcgacagggcaagactccatctcaaaaaaaaaaaaaaaaaaaaaattagtatggagatggacatctgtgagggtgaaccaaattggcttcatgtaagttactacatctctgccactttgaagcagcgccatctggtggaagccctggtgaggcaggtaggtgggcatccagactgtgggccacaggaggcctggagggggggaggctgcaggcctgtgttgaggtcattttggggagatctggttggagagtgtggctgcctgggatgaggcccaattgccaaaggaccccactatccacctcacaccaggtctgtctgatgggttgcccaggaaaggcccctcctcctttccagccgtagttcagaatttggaggctctaggatctatactgtggttcagaatcacaccaaggggagtggaggggacaggccagacaccgggcaccgggcccttgtgttcatcttcaaacctggttgggcaactctactccccaaacttcttaattttttgattagggcagcttttcagagaaatagaagtaaaaacagaaaaaggaaatgattgacccccgattccttcttggcagtggcccccaggatcacgtgttcatttacttcactgaccatggatctactggaatactggtttttcccaatgaagatgtgagttttcttaacgttttaaggacaaactagcagaacagaaaagcaagcctaggtgtcgagattaaacccatagcgtgtattttctagtgtcctgccagggttggtttgtacgtgtggtgggtgggagtgggggacaggtttagcagcttgaaatctatccaaggacatctcttccagacagttttccctgcttttctgttcatgtcgcagcgtcggtagctgtctcaggatgtgggtgtatcacactagacctgagaatagaccaaaagctccggacaaagtaatgggtgaagaggtacatcctcttgccctttttaaatgcgtgcataaaacatgtgacgacattctggggttatgttcttcaccatgattacttctagggattggtagaaaagagtttatgaaggatcatcagaactttactagtggcttatccagcaaatagtttctcttgatgtgttggtctgacaatattctcacctttcagcttcatgtaaaggacctgaatgagaccatccattacatgtacaaacacaaaatgtaccgaaaggtaattcagcccttggggcagccttgtgggggcggggggtgtgaggaaagccgtgagtgcagagcccacagtcccgtgaccgtcctccaactgtgggtgctgtgttttctagaaaggggatccttccaatccctggtttcccaggatgaggctttcggctttagctattagactggaatcatggagagcttgttaaaacagtgtgggcctcgcccccagagtttgacccagtaggtctgcggagggggcctgagaatttgccttgggtttccatgtgatcctgctgctgctggtcttcggcccacactttgcagactcctattcctaggactgtcctcaatttcgggcagctggggaggaaaataccactatcttattctcactttgagcctttctcacccctatagcaccctttatggaaactgtgcagggccagagtttttggctgggtgtggtggctcactcctgtagtcccagcactttaggaggctgaggcgggaagatcacttgaggccaggagtttaagaccagcctgggcaacatagtgagaccgtgtctctactaaaaaaacaaaaaaacaaaacaaaaaaaaacctgcatgggttgggtgatacgtgacagtaacgcagaaagatggcctgctgcactgtatggtctttgaaactcctccctgcactggatggtggaaccgttttccttagcatcccatggctccgttttctctgcattatttcagctactagacgattttattccattagcaatgaataaatttgtgtggcagcagcttccatagcttctggcagcagcctctttacagcagtaatgtctccagaagcaagcctggaggacttgttaggaatgggtagagagagtgggcagagctccagtagcatggctggaggcccgtacctggatggggtgagctcacctgccccgtctgcctcacagatggtgttctacattgaagcctgtgagtctgggtccatgatgaaccacctgccggataacatcaatggtaggtggttggggcgccggcctcgacctgggctggcaagcaggttgctcagacaccgctgacatggaactgagcattctccgtaagcaggggctgctgagggcagcctgggccatagaagtggggagatacttgcaggtagctctgggcttcctctgcttctgaagcactggtagtcagggaataaagaatctgtatgtgagcctcacagtgctcttccaggttctcgtaaaactactgaagctaaaactacatgggctttggactagcctccatcctttgcaatgtgttggttgcactctgacctcaaagcaggtgactgactctctttgaccctcagttatccccatctgtaaaatggggataaagatagtgtgtgtctgttgggagacttgtattttaaacactagcatttgtccagcacaattctaagcccatggtagagagatagtaagtggtagcttttgtataggttcagttaatctagatgtttcttcaataaatgtcagatctctctggaaaccaaagtaagcccatattgttcaagtttcctgtgctgtggaaatgtcagcattcttccagaatagcatgatgtcctaagcatgccaatttgccaattgctgcaaaaaacatccaccagctggctcctctttcttccgcatttaattttagatgagttattgtaatcgaatacacaagtctgggtatagttacgtgtccctgccctcctgtgtggatcataagtagcatgcttcgatttcaccgggggagaaagaaggactcaagcttcaagcgtaatccaaggcaggaataaaatgcaactaaaagatcatctttaattcctcgtagtttatgcaactactgctgccaaccccagagagtcgtcctacgcctgttactatgatgagaagaggtccacgtacctgggggactggtacagcgtcaactggatggaagattcggacgtggtgagccctttgggggctggctgttcagctggggtttaaccgtcagactctgattgtcaaaggtctctaatggtctcactttttgcaggaagatctgactaaagagaccctgcacaagcagtaccacctggtaaaatcgcacaccaacaccagccacgtcatgcagtatggaaacaaagtgagtcgggagcctcgcgtgctggccctctgttccttgtgtcctaggtggacttgcctggaatattgatctcttgctaaagagacatgggatctgagtgaggaatgcttgaggcagggatgcctctgcctctcatgccactccatcctggggacctgtgggctttggaatcagacctttctaggttcaaacttgcagagttgtgagactttgggcaagtgatttcacttctgtgaatttgttttctcattggttgaaacccaagcgtacaaggtagctaggagcatgcaagagggctatgcgttacttatgctaaacacaggcctagtgtgcagcaagggatcactgactcaaaagctgctgctttacggtttgtagattgtcccacagccactctgcaccttggattttctggggtcctgcccctttgcaaatggcaggttgttacctttaccctttggctataaattggagacattttatcctcctccaaatatgtccagaagggacctgtgtggttaaatggtgttgcagtaagtggctgctaaaagcttgggccctaagtgaagctgctggggctagcgtttgggatgtgcaaacaccgtaacaaatgtgcagggcctcccaattgttcaccatcccccaagaagcccacccccagcggagagctcgccagctgagatctgttccttgggcacaaacgttggccttctagaagaaactggagtcagtaaatccagccatggttagcccttcagcagggcatgggatgggggacatgagacctgcacccagggcacaatgacctggtcaggcttttgagcaggtgtaggagagagttggagcagagggacggccagggaaaggtgacacggagaaggcagggtcagtggtggcatagccctggccatgtgggggccccgccttgggctttccgttctcttcacagtgtcctcatcattggccatttctgatcttggttgaggagttgtggtggatcttctccaaactctgtgtttttatatagattggtgtgtgtggtattgctgattttagaactgttgttagattattgttgcttgctttaggaagagaacgcttgcagcattttcccttctgattgggagccagtctgtagtgaccgctacagccaaatcgagcctggccgctgtgcccatttggtagctcttgatgccaagcatcagcctggcctctctgtggccttagctctgcccttcccagtggacccagacttcagctctaacctgggcagatgctttgtaccttcccactactggtccttagggacttgcaggtgagtgcgggggagtgagcacatacaggtcacccgcctggataggcggcatcctttgcaggtgacattctttgcctggcatcctttgcagcagaactgctattcttttacatatgaagggcactgctgatgcagtcaggcagagcttggaccagagctgtctggtgaaagaatagcagttctgcaaaggatgccaggcattttgagtcactcactggtagatttcaggggctcccgtgcattgcctgcgtactgctggggtgaccatgcctttcagactgtgactgtggccctgtggtcctgaaagcatgaggagtaaatgtgagcctctgagggagaggctggacttggggtatgttgggcacctctgctcctcccactcaaaccagctctctctctccctctctctctggccttctctcactctctctcgctttctctctcgctctctcttgctgtctgtctccccagacaatctccaccatgaaagtgatgcagtttcagggtatgaaacgcaaagccagttctcccgtccccctacctccagtcacacaccttgacctcacccccagccctgatgtgcctctcaccatcatgaaaaggaaactgatgaacaccaatgatctggaggagtccaggcagctcacggaggagatccagcggcatctggatgtgagtagtggtgaaaggagctgtgcccaggtgctgtccccagcccaggtgggcagcatgcatgagcacggccctgcctcctatgctccctgccacacaggagtatggggggacagaagccagcctttgtcctccatgtaacggaagcgggtgggcggagccgtggttgcctcccatcttcatgagtaaactaaccttgacctcttcggtagtagggagcagtggaatgggggcctatctcccctgtatcgtaccaagaagccatgtacatgggtgtttccctcttttataccttgttgcttagaggatatttttattttgttgcttattaagttattagctaatcatattcattttaaaaatccagagacaggtacggtggcgtgcgcctctagtcccagctacttagggggctgaggcaggaggattccttgagtctgggactttgaggtcagcttgggcaacctagcaaaaccccttctcttaaaaaaaaaaaaaatccaatccacaaaaatttctgctgttctcagaaaaacatagtcatgcctaaaattctttctaaaatgcttatgccgtcctttccaatcagtgagtctgttttcagtagctcatcagtgtgtttggagctggcagaattgctatgtaaattacagctgtgtgctcaccggaatgctgggcagagggctgcctgtcccttcccacaaagccaactctgttagcccttatccccattgtcagcacagcacagtgatggatgtgctgaaatatggcctgagttttctaggcaagatttttttttttttttttttttttttgagacaagagtcttgctctgtcgccaggctggaatgcagtggtgtgatctcggctcactgcaacctccgcctcctgggtttaagagattcccctgcctcagcctcccaagtagctgggattacaggcatgtgccaccatgccccagttaatttttgtatttttagtagagatggggtttcaccatgttggtcaggctggtctcgaactcctgacctcaggtgatccacccgtctaggcaagattctttttttaaatcaatgtggtttgttttaaatgcacatatctagttatctccaaaattggtgccctgtgtgtgaaaaacgtattaaccaggacatatttttagttggtgtcaaacgcagtatagcacagtagtgctcagacattttagtcttgggcctctttatttattaatttttttgtagagctggggtgtcactatgttgcccaggctggtctcaaactcctgagctcaagtgatcttcccacctgggccctgaaagtgctgggattacaggagtgggccactgcacccggccaaacctctttatactctttaaattattgatcccaaagagcttttgttcatggtgggttatgtctattgatatttattgcattaaattaagatgagatgaaaggacatttttgatagttcacagaaagtgaaccagaggttttttggtgattttttttttttttttgagatggagttctgctcttgctgcccaggctggagtacaatggcatgatctcagctcactgcaacctctgcctcccgggttcaagcgattctcctgcctcagcctcccgagtagctgggattacaggcacccgtcaccacgcctggctaattttgtatttttagtagagacggggtttcaccacgttggccagactggtctcaaactcctggcctcaagtgatccacctgcatcagcctcccaaagttctgggattacaggcgtgaggcaccgcacctggctcagagttttcttgtgtttgcttaaacagctgtgtaaatcatataggacttctttggtatctgctgcaaatttgaaaactatttccaagactgtttaactattgcataattatacttttatgtaaagtaaaagattatgaaaaaattaaaactaagatttaaaaatatttaactcatttacaaataacaatattcttaacaaataacattttacactaatatattttctatgagaaataaccattttccaaaacaaaaagcattgggtgagaagagtggcattgctttacatgtgggagtatctcttttgtgtccggcattgctagacgacagctggatccttgaactggcttctgctttcgccgtcgggcgctgttctttcggctgaagtgtaagaagaaaatccagccttgtaaagatacagagttgaggaagggaagaccttctggagcctgagagctcttggggagtctgtggttctggaccacgcctggagaactgctggtctaacacacagtgggtggagggtctttgtggaattcagatatgaagcaagcaaaccctggctggagagcgggtaggacagagcttgcttgtagagtgaaggttttttttttttttagttttttgatttttattttaatagaggcagggtcttcctgtgttgcccaggccggtctggaactgctggcctcaagtgatcctcctgcctcggcctcctaaaagtactgggagtacaggcctgagccactgtgcctggccagagtgagggtagtgtagaagcattttcttctttatgatgctgtttttcattgtctggaaagaaaataaaagtccctctgtgccctgctgtgtaaccattcaatagtttcctgaatgggcagaggtgcccgtggacacagcaccctcacggcacagtcgtctgctttggggcacaggttctgccacctcctttctccacagcaaaggttgttttttgatacaaatgtttgcatcatgccagaagatccccaaaaggcaggtctttctgaccgtcgcacaagtgggcacagacatctctcgcctttctcggagcacattgattgttatttcctctaacctgcgggaggctgagggctgtgtggagagtagcctttgaatgcacttctcaccgcacctgggtccctgagagaccgcattcagggaggcacattctgacaggccgcgtttctccccaggccaggcacctcattgagaagtcagtgcgtaagatcgtctccttgctggcagcgtccgaggctgaggtggagcagctcctgtccgagagagccccgctcacggggcacagctgctacccagaggccctgctgcacttccggacccactgcttcaactggcactcccccacggtgagccagcaggctctccccatgaccagaatccagaagctgaattcatattgtcccctggcagtcacattggttgtacgaccttatagaaggttccatccaggctgagaaacagtgggctcatttcagagaggaagaaggttgtccaaattcactaattttaaatcttggccccagaacactcttcttgtcccagtgggtaggagagtttaccagagccatagatgacagctctcacttctagtttgaagaacagttacttgtgttcacacttctgctgtccctgccaaaccccaccctcgtctctacccctcacacgagccacacacatcttctcccttctgagtctgttctgacctcttcccaagacagttgaagtcaggtgtggcccatggagaagtactgagtttctgcagatgtagaattggaaggcacctgaaaagcctcctggtcagtagcatgtggtgcttcaatccttctagagaaaggttggcaaactggcctacaggtctgtttctcccccataacctgtttttgtaaataaagttttattggggccgggcatggtggctcatgtctgcaatcccagcacgttgggaggccaaggtgggtggctcacctgaagtcaggagttccagaccagcctggccaacatggtaagacctcatctctactaaatataccaaaattagccagacttggtggtgcacgcccgtaatcccaactactcgggaggctgaggcaggagaatcgcttgaaccagggaggtggaggttgcaatgagccgagattgtgccactatactccagcctgggcgacagagtgaaactctgtctccaaaaaaaagttttattggaacatagccacatcctgctcagttccctgttgtccctgtccctggcttctttcacactggggcagagttaaggtagctcgactttacccctccagtcttgttttttttgtttgtttgtttgttttagacacagttttgctcttgttgcccaggctagagtgcagtggtgtgatctcagctcactgcaacctctgcctcctgggttcaagcaattctcctgcctcagcctcccgagtagctgggattacaggcacgcgccaccacacctggctaattttcgtatttttagtagagacagggtttcaccatgttgtccaggctggtcctgaacttctggcctcaggtgacccacctgcctcggcctcccacagtgctgggattacaagcatgagccaccgcacccggcccagtcttggtcttttgacctttggagtcatgcacagtgaacctcttcctttgttctcagagagttcttgggttcccctgaagtttgtttcaagataaacatccccgctgcttcacccttccctggtgtgatccagcgtggctttcacacgccgtccatctccctcgctggcgtgtccctcccagaatcaaaaggcagacttcccggggagatcccaggccatggcggggagcagagccatcgggagttccctgtcaggagtcctgccctcagatttgagagtgcagaaccccgccagccccccaacttgcatgcaaaccctggcatgtgtgcctctttcctgagggatcgtccataaatatcaccagattatctaaaggttgggaaaggatccatgaaccaaaatagggcaagagccactggtcaagatgcttcccctctgcaattgcaaaagtggagtggattgtgtggtgagatgaggaagtttcattcttctcgtttgttttctcccagtacgagtatgcgttgagacatttgtacgtgctggtcaacctttgtgagaagccgtatccgcttcacaggtaactaatgcagcggtgacgcttgaaaggtcgatgtcattctgaaagcagaaggggctgccatcctcttctgcaagtgggcattttcacttctgccaggagctccctccagctttcctctacagccatttgtcagcagggtccagaagccacgttctcagtgacagctgctgggcgggcctgtcataactgcctgcctgccgcatgtgggtttgcgtttgtctgcctttcttcagagttgacacggttcaccaagttctccttcctgtctctcgcaggataaaattgtccatggaccacgtgtgccttggtcactactgaagagctgcctcctggaagcttttccaagtgtgagcgccccaccgactgtgtgctgatcagagactggagaggtggagtgagaagtctccgctgctcgggccctcctggggagcccccgctccagggctcgctccaggaccttcttcacaagatgacttgctcgctgttacctgcttccccagtcttttctgaaaaactacaaattagggtgggaaaagctctgtattgagaagggtcatatttgctttctaggaggtttgttgttttgcctgttagttttgaggagcaggaagctcatgggggcttctgtagcccctctcaaaaggagtctttattctgagaatttgaagctgaaacctctttaaatcttcagaatgattttattgaagagggccgcaagccccaaatggaaaactgtttttagaaaatatgatgatttttgattgcttttgtatttaattctgcaggtgttcaagtcttaaaaaataaagatttataacagaacccaaatattcacgtc

SEQ ID NO: 6915 - DNA, 140 bp, Homo sapiens
gcatgcctgtagtcccatctacttgggaggctgaggcaggagaatcgcttgagcccgggaggcagaggttgcagtgagccaagatcacaccactgcactccagcctgggcgacagagtgagactccgtctcaaaaaaaaa

SEQ ID NO: 6916 - DNA, 8928 bp, Homo sapiens
tgactgtggtggagcagctcagcaggataataagcttactcgcctgaccttgggtctctctctcatcctttctcttggctaaccttcattttggtgccaaaacccaggaaggggataggctctggctgggcgtccttagaggattctctctctctctctcctatcatcccttacccagccaacctccccttcccgaacctgctaaagaccctaaggatctcccaaaattctcccattgttggccacctcatccaccatcaaagcctctgagaggggtgagtaagagagacttttgcctattacctggaacccttgaccatctcttcactcccaaaagacccagcgctgggccaagggcttcctctggcctccaggcctctggttcctctgtttcctggacgcctgactccgcagctacctcctctattccatacaaggcctgcaagacaggcgccgccctctctcgtctttgtcgtctgtggtcccttcttcctctaccctcacctcctccattcactatgggagcctctcagtctacccctcccaagaccaccccccttgggtgtctcctccgcaatcgcaaggctctcggcctccgttcagggatccgttctaagaggcttatcttttactgcaatactgcatggcctcaataccaattggacaatggctcccaatggcccgaaaatggcactttcgatttcaatatacttagagacttagacaacttttgccatcgcaatgagaaatggtctgagattccttatattcaggctttcttcattctccgtaaccacccttctctctgccactcctgctctactttccaaatcctactcaccagctcaaaacctgactcatctcccgtcaccccacccacagacccagccgatgactcctcttcctttgaccccgtggattttctccctcctcgacagcatcatgatcctccaccagagcatcatgatcctccaccgtatgtccctgctccggctctacccctctcccccactctctccaaccaacccacttctgactctgagtcctctctgcctcctcccctcacccgctctcgggcccaatgtgctcagcaaccagctcccttgcttcctctccgggaagtagcgggagttgaggggatcgtccatgtccacgtccctttctccttctacgatctcttacagattgaagaacgtctcgggtccttctcctccgatcctgatacttacatcaaagaatttaaatatcttactcaatcttatgaactcacttggcatgatctctactttatcctctcttctaccctccttccagaagagaaggaaagagtgtggctcgcagcacaggcatatgccgatgaccttcatcagcaggatcctactaagcccgtaggagctgctgctgttccctgggaagagccttcctgggaataccaacccacagaccctggccaagtgtactgtagccatatgattacttgcctcattgcaggccttaacaaagctgcccataggctgtaaattttgaaaaacttaaagacatttcccaaaaggcagatgaaaatcctgcccaatctctttcccgccttacagaagctctccaaaaatatacccgcatcgaccctgcctcctgagaaggaactattgttctttctttaaaaaattttatttattttttaattattattatactttaagttttagggtacatgtgcacaatgtgcaggtttgttacatatgtaggaactattgttcttaatacccgttttatttcccaatctgcccctgacatccggcacaaacttaaaaaggctgaagatggctctcaaaccccacaacaagacctccttaacctggctttcaaagtctttaataacagggacgagcaaaataaattagataaagcccaaagagatcgtgctaaataccagcttccagcagtggctatctgtcagtctagccatagtacccaagggcacaaaagacctgatagcagcaaacctcctgggccttgttttaagtgcggcaaagaaggccactggacggggccatgtccccacccatgagtgccgaagagcccttgcctagtctgccagcagatgggcactggaagtctgactgtcctctcaacagatgggcagacaagcatgctcctcagagccaccatcccttcaacaagacaaaaagtgaagaatcacttgcactcccatagctccttggcctagccactgaagactgatgaggccagggcccctgggccccggctcccggcccccactgccatcactgcatcggagcccagggtaactctactagtagcaggtaagctgatctcttttttaattgatagtggggccacctactcagctttgcctgagttctcaggacccactcatccctctcaagtctcagttgtgggggttgacggactcatctcttgtccgcttgccaccagacctcttacttgttccctgtttgatgccattttctcacactctttccttatcatgcctcattgccccacccccattctaggctgagaccttttagccaaagtcaaagcttctatcaccttttcttgcccccttcaaccagagtcccctcctgctcctctccgctagtccggcccctgacccctttccccagtacccacttcctgcctctctcattaacccttccgtagctgctcaccatgaccccatcagaatccagttaaaagactcttccaaatttcccaatgttcctcaataccccatctctctaacccaccaaaagggcctacagcccatcgtaaacaagctctgctcatgcagtcttcttagaccaacacactctccatataacacccctatcctccctgttaaaaagtctgatggctcataccgactcgttcacaacctccgagccatcagtcaagctgtcctccctattcatcccatagtccataacccctatccacttctctctctcgtcgctaccaacaccaccctctacactgcaattgacctgaaggatgccttctttaccatttccctacaccctgattcccaaaacctatttgctttcacctggactgaccctgacaccctccagtcacaacaactcacatggactgtcctccctcagggcttcagggatagccctcatttctttggacaagctctagcccgaaaccttacttccttaaacctgtctcccagtcatcttcaatatgtggacgaccttcttctttgcagcccctctctaaaagactctcaaactcacacggccactgctctcttaaactttctcgctatcaaagggtatagggtctccccctccaaggcccaactctccatctccatgatgacttacttaggaattcaactttcccctggggcccaggctatgactccagccagggcagcattaatagaaaatctacccccaccctcctccaaaagcgaaatcctttccttcccagggctagcaggcttctttagaatatggatttccaactttgccctcctagctcatcccctctatgaagtggccaaaggccctcccaatgaacccctaaacccctcacataacatactccccagcttccacaaactccaaactgctcttgtcactgcgtcagctccgtccttacctgatatctcccaacctttcactctctatactgctgaaagctgaggaatagccctcggtgtcttaggacaacagaaaggaaatcctccttcctttgcccctgtagcttacctctctaaacaactagataacacagtcaaagggtggccagcctgctttaaagcactagaagtggtagccagcttagctctagaaagcaggaaactaactttcagccagaataccaccgtccacagttctcataatctacaagatctcctctcctcccaagcagtaagctcccttcctccttccaggattcaattactccatgccctctttataaaaaatcccaaattcagtcttaccagaagtgcttccctcaacccagcatccttactccccgtatcctcttcccttcctactcattcttccactgatatcctggaccacgtacagccacatttcccaaacatttcctccgagcctctcaccaaccccgatgatcaactattcatagatggctcctcttccaggcccaccagctaccccccagattgctggatatgcagttgtttcccttgaccaagtaattgaagccaggatcctcctcccaaaaagcagaactcatagctctcaccagggccctaaatctttccaaaggcaaacgagtcaacatttatacagactccaaatatgcctatcacattcctcgttcccacgctgctatctggcaaaagagaggactccttactgccaaaggaacccctatcactaatggccaccttatttactaactccttcaggccacacacctcccagctaaagcaggagttatacactgttgaggacatcgaacaggttcagatgaaatctcgaggcaacagaaaggccgatgaggcagcaaaagaagcctccctttcttctgcctctgcccctctccttcctgttatcccagcaatcctacccaagaactctcccaccgagaaagctttgctatacagcaagcagcctcctttcaaggggactggatagtcaaaaatcaaaagctcgtcctcccctaagagcagaccaaagaaattctgacatctcttcaccaatccttccatatcagtgtgcgcccccatacctactccttcaccctatttctcctccccccatctattcacctcactaagagacataacctcaaactgtcctatatgctctgttacttcctcccaaggggccctccactctccctccatccctacacatcccctcagaggaacactcccaggggaggactggcaaatagacttcacccacattcatcccgtcaagaggacaaaatttattcttactcttatagacaccttctctaggtgggtagaagcatttcctacctcttcagaaaaggccgcagaagtctcccaaattcttgtaacagaaatcatccctacatttggtctccctggctccatacaatcagacaatggcccctagcttcatctcccaaatcactcaacaggtttctcagtcccttggcatccagtggcgtctccatatcccatgctggccccagacatccggaaaagtcgaaagggcaaatgggatccttaaggctcagttaaccaaactcactcttgaagtccaaaaaccatggacctcccttttgcccatagcactggagagcattagagccagtccaaaagcaccctccttcctcagtccatttgagttaatatacggacgccctttcctcttacaaaacaggcccccttctaactctcagctaggagaatacctcccaacagtctccctcatgagctatctcctctgccaacaagccgaccaggccctcccaaaaccccacgaaggggtctccaatcccaaatagacttgctctccaattccaaaagactctttaagcagcagtgacacttcaaaaccatcgaggtttagatctcctcactgccgagaaaggcggcctgtgtatctttttagaagaggagtgctgtttctatactaaccagtcaggactagtacaagatgctgctggacgaataaatgaaaaagcttctggccgggtgcagtggctcacgcctgtaatcccagatctttgggaggctgaggcgggcggatcacgaggtcaggagatcgagaccatcttggctaacacggtgaaaccccgtctctactaaaaatagaaaaaattagccgggcgtggtggccggcagctgtactcccagctactcaggaggctgaggcaggagaatggcgtgtggggtgaacccgggaggcggagcttgcagtgagcagagatgatgccactgcactccagcctgggcgacagagcaagactccatctcaaaaaaaaaaaaaaaaaaagctgctgaaatcaggcagcgcctttcagattcccggcccaggtgatttcgtaactcctgggcaccctggctactgcccttcctaggccctgccattaccctcttcctccatttagcacttggcccatgtctcttacatctccttacccagtttttacagggccgtgttagagccttcacccatggaacagtacaagacatgatgctactccgagaataccgacagctccaggaacagcagtccctactacccagcctctccccccaaccatcgcccctatccagcaagaagcagccagaggacaacggcgcccctcttctattacctattaaaaggctggaatgttaggaacaagttgcaccagaacccctcccccttcccacccgcccccgcacccccccccccccacccaatgcagctgtcccttaccctgaatactctgcagctgcattcctggacccttatctaggcactacagcaaggtcaccagacttgcttacagccctacgggcagcatgggggaggtcacgagaaacgtggataaacctaagttacaccctcttgtaaattcctatattgtaacctggtcacgagatgatatgtggtaaggttaaccaacaaacaaccccagggtctctctcccccatataaaaccctcattttgtaagctcagggctgcctcctttgactgtggtgaagcagcctggcaggttagtaaacttactctcctgaccttgggtctctctctcgtcctttctctcggctaaccttacagcgccctcatccattctccaattataatgtgtttacacctttcctcctgcatgtctcacattttaccttgtcatcctcttacttgtgtatgtgtctatgcctcccagcatttgacagtacctgaaggtcaaagcctatctgctgtttacccttacaattctattcactcggcacgcactaggcacagaataaatgccattcatccctacttttacttcagggtacattttagagatctaagatttggtgtatctttcccattatccattcttattgcctcaaggctctcctcttataaatctagtggtatgcattactttgggggtaaggacaaatttatccagaacagagaagatttagttcagtctttagttttaaaataagcatttttaagtaatagcagagacaaaagtctgaaagccaacatagttttaatttaaaagaaatttgattttgctacagctttttggccaggagtaagtgaggatgctgtttcgaaagctggttttgcatcttaagcagtacggtgtgggtcttaggggctggagtgtatcttgcaggaaacacagagtaggcaagaatgtgaggtggtgtaagactagtttgtctggttcaaaaagtaaaaaagaagactgaaaaaagtaggaaatctaacccaaagcaatcaatctttgagaagagcccagcacacttcccttccaattgatttgtcctacacccctccatgagcctaagcattagagcagaaatgactgagggtagcatccaagccactgggccaaggggcactggtacgatgaggataccgtgtcccacaattctagggtagtctgggaaaaacaaagcagagttcctgagaagaatgcagtagtggctgacagaaccagaaagggtgttgtagtgatatgtggccatgacatcagaagactaaaatgaggctatggatattccctagcaaatgtctggggaacagaggccaaagccgaaagctcaagaattaatggaatgactacacctcaacgaaggttatagattagtgaggactgatgagtacaaaccagactcacacatccatcctcatcctcactccccacccccaggctacaatattacatatatgtcccctactcctgagggatggaaaagaggatgggtaggataagttcaaactgctttaatggctaacaaaattcacctttattcctttttatttttagttgacatgtaaaaattgtacatatttattggctacagagtgatattttgatacaagtataaagtgtgtaatgatcaaatcagagtaattagcacatcaatcacctcaaatagttatcacttatttgtactgggaacactcgaaatccttttctagctttgaaaaaatatacaataaattattgttaactgtattcaccacatagcactatacaacagtagaacagaatttattcctcctatattgctgtaattttgtatctgttaattaacctctccctagcctcccctccccctacccttcccaatctctcataaccacaattctactctctagatctatgagctcattttttaagtccctgcatttgagtgagaagatgaagtatttatctttctgcgcatgacttgctttgcttaacataatatcctccagattcatccacgttggtgcaaatggaaggattccatactttattttatggctgattattgttccattgtgtgtataccatattttctttattcacctgtttatggatatttatgttgattccatacgtttgctattgtgaatagtgatgcaataaacataggggcatgcgtatccctttgatatactaatgtcccttcctttagataaatacccagtagtgggactgctggatcatatggtagttctatttttattttttttgagaaacttccataatgtttttcataatggctgtagtaatttacattaccacagcgtataagagttcccttttctcggcatcctcatgagcatttgtcttttctgtgtgtgtttttgatgacagtcattctaactgggataagatgatatctcatagtggttttgctttccattttcctgataattagtgatgttcagcattttttcatttacttattggccattcaaaattcatttcaataaatcaaaattatttttaaa

SEQ ID NO: 6917 - DNA, 529 bp, Homo sapiens
atcacgtgcataatgtcacggtgtccaccggatttaccaggggtcatcgatgcccataacaagaacattttccgaggaactgtgagagtgaaagtctgactgtgggttaaagactgactggtaaatgaggaagtggagactgttttttcaaagcagcatgactggacaatgggagagggcgtgatcatttataaatagtgaggagaacagggtaaagctgcatcacggaccaaacagcaaggaaacagaacatggggaacatcaggatcagtaactcaccacaggaattcctactcctgggaaatagaattcttcactagtggctgactgtgacatatctttccaagagttaaccccagactccaaatcttaagaatatgggcttttcttccactatcattcacattctgcagttactggtagtattttacagtattttcagatgtaattttactaatttctaaaaatagttcatatctttaaaaatcatgggaaaatcatgactaataaattcaccaactttaaaata

SEQ ID NO: 6918 - DNA, 371 bp, Homo sapiens
caggtgtccgtttctcccaatcactttcttaaaatactaaaaatgtacagcattcctttttcccctggctctaagtcctgaccttttaaggcctctgttcaagagcatgttaattagtaacttccttcagaagaaatctgggaaagcatttcctgggcaggagccctgggcctgagggtatacctggcctttactttctcttggcctgaggctggattctcattaaccagccagagagtcaagtcttggttttgtttgtttgtttgtttgttttctccccaaatctgaagtctccagccccatcttcacccgtgttcagtccaaaggatggacgtagcttctccaaacacagacaaacaaggccagggccg

SEQ ID NO: 6919 - DNA, 406 bp, Homo sapiens
tctgggtccttatccctttcctacaattatgcagcttctttcaattgcagagaagggtcagcctgcaaaaacaacaggtccacaaactaaaacgttgcttgctaataattttatgaatcaatccacaagaagtgggctcctataattccctattatttaaaagcatttattatgcttttaaatcacttctgaatttttttatttttcttgattccagttagtagatggaaaaaaatatataagctctaaggtggtaaatgattagagttttttcacactgctgagtgaagggtgtcacatttaatgcagctctgcataaaaccaggcttcaaaggtggctaatcatctagttgtcaattcatcatttaggtagcagagaaaataagcttcacattaatgtgtattt

SEQ ID NO: 6920 - DNA, 406 bp, Homo sapiens; identical to SEQ ID NO: 6919

SEQ ID NO: 6921 - DNA, 891 bp, Homo sapiens
tactaatgacaacttccttatctttattttggaaatgtggcagcttatcatgctcatatgttcagcagaaacatcaaataacatttacataacttttactaggaaaaagccatgataatgtaatgataaacataaatgcggtttaagtattatttattcctcctgtatctctcactggacatatgtttctcaaggtcaagtttctatcttaactttgcattctcagcacccaccacaggaaatgttatgtagtagatgcagatgaaatacagtatttgttgaatgaaagttaaacaagaaaccatttgcaacctcagcacttaacacagtgttctagtaggcaagcatttgttgaaggactgaattaagtatacaaaatattgcacaacaaaaggacctggttagtaaatatattaaaatggattattatatatgttcttatgtcgcatgagcaggagtgggactaaccaccgggaaacaagggaagtggagtttcaatctgaggaagaatctgtacagttacagctactgaatagcaaaacagagagggggcagacacttctattttccctagctcccaaacgcttctcaccattatcatccactcaccactacactgatttcaaatatttcacagagcaaccactaaatggaaacagataatcacagataatccttattttgcaaatatggaaacagagaaattaagcgagctggctcctattgctctgtgaggctgagaacttggaataagtgtcatcattgatcattcctcttccagaccacctagtttctcattcatgattatatttccctaaagggtacacacttgagagtacttttcgaagacttagctccaaggacattactaacattaatgtaaacttcatc

SEQ ID NO: 6922 - DNA, 891 bp, Homo sapiens; identical to SEQ ID NO: 6921

SEQ ID NO: 6923 - DNA, 309 bp, Homo sapiens
cacacacacaaaaatcccattcccagagcatctttctgtgcattaaaaatgtttgtagagtgtcgttctatagtcaacttttggctataatataaatctctgcacatcactaaatattagctttttaatggctacatgttaatctcttgcttgaaagtactgtgcattattaatcttattttgggacatttggtttgcttcctgtttttcaaactgctccaatgaacattgttgtgcctatcatttgatgcagttttaatatttaagaagtttacttaatgaactatttacacatttttaagccttttc

SEQ ID NO: 6924 - DNA, 306 bp, Homo sapiens
cacacacacaaaaatcccattcccagagcatctttctgtgcattaaaaatgtttgtagagtgtcgttctgtagtcaacttttggctataatataaatctctgcacatcactaaatattagctttttaatggctacatgttaatctcttgcttgaaagtactgtgcattattcttattttgggacatttggtttgcttcctgtttttcaaactgctccaatgaacattgttgtgcctatcatttgatgcagttttaatatttaagaagtttacttaatgaactatttacacatttttaagccttttc

SEQ ID NO: 6925 - DNA, 325 bp, Homo sapiens
gcagtggctcatgcctgtaatcccaacactttgggaagccgaggtggcgggtggatcacttgaggttaggtgttcgagaccagcctggccaacatggtgaaacccagtctctactaaaatacaaaaattagctgggtgtgcttgcgggcgcatgtaatcccagccactcgggaggctgaggcaggaaggtggaggttgcagtgagccagggtcgtgccactacactccagcctgggctacagagcaagactccatctcagaaacaaacaaataaaacaacttataattacctcttcattgtaaaaaaagaaaaagaaaaaaagaa

SEQ ID NO: 6926 - DNA, 1552 bp, Homo sapiens
ttttttttttttttttttttttgagacagaatcttgctctgttgcccagcctggagtgcagtggcagaatctcggctcactgcaagctccacctcccgggttcacgccattctcctgcctcagcctccccagtagctgggactacaggcgcctgtcaccacgcctggctaatttttgtatttttagtagagacggggtttcaccgtgttagccaggatggtctcgatctcctgaccccatgatccacccgccttggcctcccaaactgctgggattacagacgtgagccactgcacctggcatgaagtccattttttatggctgtgtaatattccactatatgtatataccacattttttgattcatctgttagtggacatttgacttgttttcacattttggctattgtgaatactgctgcagtgagcattggcatttgagtttctttttttagttcttttgaatatatacctaggagtgaattggtgggttatatgctaatactctgtttagctttgtgaggaacttccatactgttttccatagtggttgcaccattctacattcccgttagcaatgtacaggagttatttatttttccacatccttgcccagcacacttatttgccacactatgtgtatctgtaaattaccatgaaagcaccacaagctgtaattttttaattttgggattacaaataagttttagtgagcaggcagacttgcaaataaagttatcagtgaagtgaggatcaactatatctaaatgcaaatcatatatatgcattgtgactataacatgttatatgaatacacatagtgtacacctaggtttttacatttctaggtgattttagtgagttgaagtgagcatagtgtcacaatgaggaaacaatagcaggtcattaattttataattaggtaaacctaaaaattcagctatatgttataattttttcagtggtattgtacatgctttcaccaaagattagcataaattatgctccttttttcgaatttctaatagctttttgataaggttttttaaaaataaaaaatcttataaaatgctaatctttaattttcataccagtgtttttagtacgtattcaagtagcaacctttttacctacatagctttaaggttgatggtggggagtgggattttttaaaaataatttcgtttgccaaaaaatgcttattttaattttttttcccaactcctaatccagatctcttgcagctaattaaaaaacttgtaaactctcagcggggcaatgactcatacttgtaatcccagcactttgaaaggtcaaagtgggaggatcgcttgaacccaggtttgagaccagcctgggcaacatagtgagacctgtctctacaaaaaatacaaaaattagccaggcatgctggcatgcacctatagtcccagctacttgggatgctgaggcaggaggatagcttgagcccagaatgttcaggatgcagtgaaccaaggttgtgccagtgcactgcagcctggacaacagcatgagaccctgtctccaaatc

SEQ ID NO: 6927 - DNA, 325 bp, Homo sapiens
gcagtggctcatgcctgtaatcccaacactttgggaagccgaggtggcgggtggatcacttgaggttaggtgttcgagaccagcctggccaacatggtgaaacccagtctctactaaaatacaaaaattagctgggtgtgcttgcgggcgcatgtaatcccagccactcaggaggctgaggcaggaaggtggaggttgcagtgagccagggtcgtgccactacactccagcctgggctacagagcaagattccatctcagaaacaaacaaataaaacaacttataattacctcttcattgtaaaaaaagaaaaagaaaaaaagaa

SEQ ID NO: 6928 - DNA, 870 bp, Homo sapiens
aaaaatcttgaatgactgcttgagaaccaaaaaaattccattatagtttgccatttgtcgtcataaaacatggcctaattaaatatactatttcaataaatggcctaaggaatgcttatgaataagaaaagaattaatatattgaagtacagagaaactagttattatacactaatgcctgtattcagttcatctatgtatctggtttcgtgagatgcttttagagtagcggttctcaaaacgtggtccccaggccagcttggcatcatgagggaacttgttagaaatacacatttttggtcttgcccagactagaatcagaaactctggagtaagggctcagcagtccatgttttaacaagccctcctgctgcttcagatgcatgctcaaagttgagaactactgtaagagagacagctgtttgtggtgtgtttttataagggaacactttgagtaactttcttagttgtaatatctcctgcttttcaccagaatgcagttttcattgcccattttggagatctccacagtgatttaagagttattatcctgcgtgttaatgacccatgaatctcatacttcatgggattgacatttctgagcaacttgtctggaatccagtgtacattagagactgactacattatgaactctttagatattcttgtaataatttccttcaattttgctattttgcaaggggtatgtggtggcagacatacaattatctattctttgttggcaggaataaactctagtggaaactgagatactatcactatagccagtagaaagaagtttgtactaccaacagtctggatatatggatctggttgtgactttgctgttaattaacaaatggccttggg

SEQ ID NO: 6929 - DNA, 586 bp, Homo sapiens
ctttattcaccttttatgataaaggcaaatatagcaagaaatccctcaggtatagctagctttgaattgagaaacatttatgggttttgaacctccaagtttataccactgagaatggtataggggaggcagtttgtttttgtaataaagatctcaggcttttgagttagtcaggctttgggttcagatcctggcttcattgtttactaaattgaccttgacttctctaggctttagttgccttgtttgtaagttggagttagtgtagggcttggaagagatgacatatttacagatttttagcatggatcctggtaggttgtaagggtttagtgagtggtagctttatttatttatttttagctattaaagcggtccagtctaacacagtatgacatttatgtgaaaccaggttggtgttccagttttcattgtaaaatgaatcaagaaggaccagaacaatgccttgatttatttaaaagtataatcagcctgtaattccagcactttgagaggctgaggtgggtgggaggattgcttgagcccaggagttcaagagcagcctgggcaacataaggagacccag

SEQ ID NO: 6930 - DNA, 2445 bp, Homo sapiens
gatctcccaacttgaggatcctcagtagcctcctgagtaactcacgccggctaagttttttatattttgtcgagatagagtcttactttgttccctaggatggattcctttttctgcttcatctggtaccttaggccactaataatttcttctctctttctgtatttttagcttctccctcgctaccactaactcctttcttctctcatgttaaatttctttcatttaacacaaaatagtccccctagcttcttccctctaattactacctgttactaattactaatctaattattatctttccttccagaagccaggctcttggaagaatagtctattctgcaacctttctcagctctcattctcaccagcttttgcccccaccacatccttgaaactcatctttcaaaagacactaactgctaaattcacttcggctttgtggttctttgctttcttgacctctttgaagcacttgacactgtcagttattcctgctttcttgagactcatgtatctgtcttaacttcagcttctccaaatttttctttttcaatctttggcagctccctctcagattcctgtgggggctgcttttgtgtgtttttgtgttgatattctgtagaatttgtcctcagaaacagcaaacatttattgaaccttatgctgaagataatgggaagccattaaagcaagggtttttaatcagggttccaaagattgatatcaaggaatctgtgaactacctgaaattacattcagacttcaaaacttaatatgttaagtgctttacatgatgctaagtgctttacacacattatctgtttggacccacgttgccatcctatgaagtagattcttctgttgacccccaacttaaagctcaggagactcaggattagagaagatgagaaacttgcccaagattgtagttggtaggtgttggagtaaggatttaagtgtaggcagtctgactccagagcttgtacttcaaactgtaatgccactttgccttagcaatgcatgtcccaagacctcttttttatttcagagcctcaaaaactactaaatacctatcttcagctcggatttctatcccatcaactaaatagcttaggtgcctgtaggcccctccagttcagtaagccagaaatggctttgttatctgctttcttcttcctgctcctttccaacccctcttcatgctattattctctatttcagtgaatgacacctaatttcttgggagtcttccttttcttttacattctatatgtaattggtttaccaagttgtattatatttacctcaaatctaacgctttcacttaaggttagtctggtggctaatggcattgattttggggtcgaatttggagctaaactcaagcatttccccttaaaagcagttgaaattggcaagttgctcagtgtcaagtggcaataacaaatgcctgccttccaggaggttggttaggagaatgggtgagtacaggattagttctttccctttactgtgtgctttaaacaagggatcaaactttcttcaggcttagtttgctcatctgtaaaaggatgctgataatagctaactcatagggttgttgcaaaatttaactgagataatttaaatgtgtgtaacatagtgactagcacatggtaagcattaaaaagaaacgtaagctcttaatagcatcgcccactgccactgcttttatgtaggccttctcattttagcctgcctcactgacataagctcttcactaatttccctaatttgtcttacccctttccaattcatgctgctacctgagtgagtttaaaaaacaaacctgatcccatcactgtcttgcttaaaattcttaaaagtagtgattcttaatcatgtgtgaaagacagagagtgcagtgaactcacttgatacaaaatctatgaactgtcttcccagaaaaatgctttaacatactaagttttgaagtttggatataatttctggtagttcacagattccttgatgtcatctttggacccccaattaaaaaacgcttgctctaatggcctcccattatccccagcataaggtcaaactcttttacacagataagagaatccagataagcagaaagaaaagaggcatctattcataatccaactatctagagaaaaccattttctttttttaaagtaaataaaaatgaacttattaaaaaaaaccatttatcatttcacaacacatcaataaccaagtagaaaataaaaaaatatataaaagcctgggcaacatagtgagacctcatctctacaaaaaatataaaaattagctaggcatgatggcacacacctgtagtcccagctactctggaggctgaggcaggaggatcatttgagcccagggttcaaggtggcagtgagccattattacacctgtgaatagccactgcactcc

SEQ ID NO: 6931 - DNA, 2445 bp, Homo sapiens
gatctcccaacttgaggatcctcagtagcctcctgagtaactcacgccggctaagttttttatattttgtcgagatagagtcttactttgttccctaggatggattcctttttctgcttcatctggtaccttaggccactaataatttcttctctctttctgtatttttagcttctccctcgctaccactaactcctttcttctctcatgttaaatttctttcatttaacacaaaatagtccccctagcttcttccctctaattactacctgttactaattactaatctaattattatctttccttccagaagccaggctcttggaagaatagtctattctgcaacctttctcagctctcattctcaccagcttttgcccccaccacatccttgaaactcatctttcaaaagacactaactgctaaattcacttcggctttgtggttctttgctttcttgacctctttgaagcacttgacactgtcagttattcctgctttcttgagactcatgtatctgtcttaacttcagcttctccaaatttttctttttcaatctttggcagctccctctcagattcctgtgggggctgcttttgtgtgtttttgtgttgatattctgtaggatttgtcctcagaaacagcaaacatttattgaaccttatgctgaagataatgggaagccattaaagcaagggtttttaatcagggttccaaagattgatatcaaggaatctgtgaactacctgaaattacattcagacttcaaaacttaatatgttaagtgctttacatgatgctaagtgctttacacacattatctgtttggacccacgttgccatcctatgaagtagattcttctgttgacccccaacttaaagctcaggagactcaggattagagaagatgagaaacttgcccaagattgtagttggtaagtgttggagtaaggatttaagtgtaggcagtctgactccagagcttgtacttcaaactgtaatgccactttgccttagcaatgcatgtcccaagacctcttttttatttcagagcctcaaaaactactaaatacctatcttcagctcggatttctatcccatcaactaaatagcttaggtgcctgtaggcccctccagttcagtaagccagaaatggctttgttatctgctttcttcttcctgctcctttccaacccctcttcatgctattattctctatttcagtgaatgacacctaatttcttgggagtcttccttttcttttacattctatatgtaattggtttaccaagttgtattatatttacctcaaatctaacgctttcacttaaggttagtctggtggctaatggcattgattttggggtcgaatttggagctaaactcaagcatttccccttaaaagcagttgaaattggcaagttgctcagtgtcaagtggcaataacaaatgcctgccttccaggaggttggttaggagaatgggtgagtacaggattagttctttccctttactgtgtgctttaaacaagggatcaaactttcttcaggcttagtttgctcatctgtaaaaggatgctgataatagctaactcatagggttgttgcaaaatttaactgagataatttaaatgtgtgtaacatagtgactagcacatggtaagcattaaaaagaaacgtaagctcttaatagcatcgcccactgccactgcttttatgtaggccttctcattttagcctgcctcactgacataagctcttcactaatttccctaatttgtcttacccctttccaattcatgctgctacctgagtgagtttaaaaaacaaacctgatcccatcactgtcttgcttaaaattcttaaaagtagtgattcttaatcatgtgtgaaagacagagagtgcagtgaactcacttgatacaaaatctatgaactgtcttcccagaaaaatgctttaacatactaagttttgaagtttggatataatttctggtagttcacagattccttgatgtcatctttggacccccaattaaaaaacgcttgctctaatggcctcccattatccccagcataaggtcaaactcttttacacagataagagaatccagataagcagaaagaaaagaggcatctattcataatccaactatctagagaaaaccattttctttttttaaagtaaataaaaatgaacttattaaaaaaaaccatttatcatttcacaacacatcaataaccaagtagaaaataaaaaaatatataaaagcctgggcaacatagtgagacctcatctctacaaaaaatataaaaattagctaggcatgatggcacacacctgtagtcccagctactctggaggctgaggcaggaggatcatttgagcccagggttcaaggtggcagtgagccattattacacctgtgaatagccactgcactcc

SEQ ID NO: 6932 - DNA, 2445 bp, Homo sapiens; identical to SEQ ID NO: 6931

SEQ ID NO: 6933 - DNA, 324 bp, Homo sapiens
ctctctccctaaacacctggggattacaattcaaaatgagatttggggctcggctcagtggctcatgcctgtaatcccagcactttgggaggccaaggcaggtggattacttgaggtcaggagttccagaccagcctggccaacatggtgaaaccctgtctccacacaaaaaaaatacaaaaattggttggctgtggtggcacaagcctgtaatccagccactcgggaggctgaggcacgaaaattgcttgaacctaggaggcggaggtttgcagtgggctgagatcacaccattacactccagcctaggcaacagagtgagac

SEQ ID NO: 6934 - DNA, 148 bp, Homo sapiens
ctggcttacaagtgtatgaagagatcttcaatctcaattagtaatcagaaatgtaaatcaaagcaaaaaaaaacattggcaaatatttttaaacattagatgataccagttgttggtgagaatatgggagaaacaggaacttctgtgt

SEQ ID NO: 6935 - DNA, 324 bp, Homo sapiens; identical to SEQ ID NO: 6933

SEQ ID NO: 6936 - DNA, 148 bp, Homo sapiens; identical to SEQ ID NO: 6934

SEQ ID NO: 6937 - DNA, 324 bp, Homo sapiens; identical to SEQ ID NO: 6933

SEQ ID NO: 6938 - DNA, 148 bp, Homo sapiens; identical to SEQ ID NO: 6934

SEQ ID NO: 6939 - DNA, 1352 bp, Homo sapiens
tttgcctttgacagtgaaaacagatattaaagtgaaaggagaagaaaccgaagagcatcagaggggacgactgggttacttaactgttggggagcaatctgaggagttggttaccagagaaactggcgatggcgatcccgtgagcaacatctctcagacccattttaaatgccgggggatacttaatcatgctgaaaaacagcagagccctgaggttttggactacatgttgcagaaagaagagaaatatatacgtcaacaaaaagcacatacgatatcgcaacagtgcatatcatctagtctgttgttagatgatgcacaaaatcagaaccaaccgaaggctgacaaagatgagtccaccatgatcaatgaaatcaccctagcaaagctggccaaggacagcattgtggcacagactcagaagttagaagaccagaaggaggaaaggttacatcatccattaaggaaggacactgagtcatgcacaagtccttgccttcttggtgcccctcggaaagcacaagacccctcctctgctgggtgtgatcaaatacatggtgcctttgcgaagaaaggagttcttcccttaaagaagcagccccatcgaacttgtaagaaagtttcctatcaggagcaaatcattgttgggagaaaaataggtaaaatcagaagttctgcctttttaaagagttcttccaatcccatccccacaaaagcgcacagacttctcagtttgtgtactctgtctgcacctacacgattagaacctgaaacagcacctaccaagagcttggttagtcacataccaaagcagatgtctacaccgtgccatcccttgaggagcctgaattttaggaagactaccaaagaatcagccttactaaacaagctgtccatccttgcctccaaactggccccagccatgaagactcagaagctaagataccgacggtgttcctctgaacttcttccaatggctaaaagctacaagcgcctcagatataaaagactcctggacggattttcatccagcacagagcagctgaatccatatttggcagctagtggatgggataagaggcctaacagtaagcccatggcactttattctctcgaatccatcaagatgaccttcatagatttgagcaacaagatgccgtccctgctgtttggttctgaaatcttcccagtatcctttcatgtgaaatcatccagctcagattgcacgactgagtcctcaaggacttttcctgagcactgtgctccggcaaggcttgccttaggagaggccctccagtgcccgtctcaacctcccaagtggaccttttctttcttcttgtcccacggttgcc

SEQ ID NO: 6940 - DNA, 184 bp, Homo sapiens
ctactaaaaatacaaaaaaaattagccgggcatagtggcgggtgcctgtagtcccagctactcgggaggctgaggcaggagaatggcatgaacccgggaggcagaacttgcagtgagccgagatcacgccacggcactccagcctgggcgacagagtgagactctgtctcaaaaaaaaaaagaa

SEQ ID NO: 6941 - DNA, 149 bp, Homo sapiens
aactctgagtttggcaaagaaagtacctttggaatttcctcaaaagagtcgatgtcttgccatgatgaaagctctgtttccctaagaagcctgaaatccattgaaataatgccttctcaagaaaattcagaaactaatgttaacagtga

SEQ ID NO: 6942 - DNA, 329 bp, Homo sapiens
ggggaccctgttatcacaagtcagcaccgtgtcggggaccctgttatcacaagtccccgcacctgcccggcgcagcagtcgcagaggcctccgtgcagacagacctcaacccggaggacaactttacgagcggggagcaagaacaccagggccttaggaccccttttatgccaatcagtgccacacagaacagagcacaagggcgcgcatgagcctccctggcgactgcatgagtcacgaagctgcacgcttcttagagaaatgtccatgctttacagccttgcccagaccggctgccgtggctcacacctgtaatcccagcactttgg

SEQ ID NO: 6943 - DNA, 6773 bp, Homo sapiens
ttgcatctcgtgacccgtattgtggctggttaagccagggatcctgtggtagagtgaccccagggatgctgtaagtatactttgtcacatgagctaggatgaactatcctctccagggtctctaaagctagaaattgcagaaaacttccaattatactacttttctttttttttgttgttatgggagaaacaggaaaacgaaaaccaggagacgtgacaaggaagggaataataatacttaagggaaatggtagacctaataatacttaagggaaatggatggagagaaaaaaccaattctcttctgttctcttaagcattctagttcaccagtttttaacagaaatagtcattttagcaagttatgttaaaatgttgttttttttttttctctctctgcccattcttactaatcagtctgtgttcttggttctgctctggttgtcacttgtgttcctatgaaggctgttaaccgaagacttctttgctttccataaccacagtgctgaaggatatgaacaagacacagaattcggcaacacagctcatctaggggactgccatggtaagacagaatcttccattcccacctggagcttctttttgaccacatttgcacgtcgacattattttacaatcagtctttttaatgactcaggacacataccacctagcatttaacttaaacttcgcaaaagctgagctgttcggtcatggggatacattagaaaagaggcttactttttttttccttcaccatttacaattttgtaggaaatctagagagaggtagtctaaccagtaggttaatatttttaatttatagtcttttttttttttacttttttagttaattggaattcataaatttttgctttcttttggttacttttcactgattacttgttcctttaattcttttagaaattttgcctacttcaactacaccagattacaaaatatttggcggtccaacatctggttagttttttttaatttttttgaattaacaaccttttctttccttcagttcagcattttcagccccttctcccctccttttgcgcagtttggcagcccttcatttttccgctttgactcatattcccactgatggtaccaaaagacttttcttactgagcacttcacccttgtttatagcatgttaacacttcatcattgaccaagccacatcctttaagaaaattcaaatgggctaacatagactgcattccagctgcacgcacgcccacccaagcttttttctttctcacctctttgcattgtgaatgtttcttctggtcatctgtatttaatggatggcggaatttcattattttccccatctctcctcacctttcctatgacctagtaaacaaatacacatttcccataaatgtgtatttataagttttagagatctttgaatggtttgcgctaatcctgggaatctttgaatgttgtggtctcagtggtgtgaaaaaagctttaatggagtgaagcttgatttttgatgtattaagatgttcaatgggcttttccaagcctttttgtacctgtttggagctccttctgttaacttgttgcaccagtcagaattgtggtctctgaggttttagcttaaaagcgtaggcttacattttgaggaaaatctaatttgaaggaaatcagtactagacatgttaaaaggttaagttactccccggtcctattgctgcttctaaaactcaccagcaattcctttcctcagggggagaaaaagatggtagatcttatgtatcagaatatcctcattcagtttgtaaatgccattgcctttgcattaggttctgcttggaagaaactccccagcagttttggagagagtacaagcaaagtctgtcccctccttcgttgttttactgtgggtggcagagccttagtatagtgaataatctacaaatggacaggagcccctggtaacaacctcttaggcagagctggtttgtcacgtccaaaatcaagtattttcatagacttaaccagatattttccaacaaagttccatcatagcttcttccccagtaaagcctatagattttctaaccatctgtgaaagtgcttttaaaaatgcataaaaaagaaatgaaatgatgtctcacaagagaaggaagaaacagcaactaatctgccctgggaattatattacctttttcatgagtgtcattagtaaccacaggggctttcctaagagcctttcgagtatctttaattttgaaatctgctgaatatgtctttactgttaatttttagttttcattcttcccttgaaaggaaggaatttgatgtagcttcctcaggcgtgtttttacaaaatcctagagcaaactttctcataaaatttactcaaactttatttaaaaatgcaacagaccaatcaaaaaaaatcttgacactatccatattaataaaaatctgtttgccaccacagacatggaggtatcttcatcttctgttaccacaatggcaagtatcccagaaatcacacctaaagtgattgatacctggagacctaaactgacaagctctcggaaatttgtagttcaagatgatccaaacacttctgattttactgatcctttatcgggtatcccaaagggtaaggcctcagcagggacctcatctctaactgcgtggaaacctgatccttaatgtcactgaggagtatgtggttctccaaaggtgggcctcacaggagcttttgcggttgtacctccaccgccccttgccacagtctttctggctttctgtggttatatctgagtgcattccttaaaagataaaagaggtggaaagctgttggagaaaaggctggtgaagcagccactcagacaatctaatctgtgttgatttctgtctgaagaagcagagagcctgctggatttcagggaatttcgagggtcaccgcagcaacatcaaaaaacaaaactcattaattgcaaatatcctgatatcagatgttttgtctaggagcctttcccagactcttgtttagcttcaattcaaaatgcaatctgaaaaggatatgtgagatgctaagttgcttgaatgccacaagcaataaaacataacagagtgctcgtccataactatcattttcagcccgtaataggagcagttataaaatagctgcctgttgagttagcttattaaatatattactctaggaaaaaaaaatctattctttagtacttactaaactatggtatcaggtttccaatcagtttttatggcagcacattgtcatttatgatttatatcggttgattttcattttatatgttttcgttgtaaccaattttataatcattcttctttctgctttgctttctttagtaacaccatttttttctacttttctttctcggtctttcacagtgccactgaattccataacattaattaaacattaattaaaaacaactaatgttcaaaggccttagtactaacttaaagcaacagaatcttcaaaatcactctgacttaccttactctgggatagctgtgtttatagcatgtaacagacttgaatacctcttaaactaacttttttttattaattgttagatgtctgtggttgcattaaaaggttaagtttaatttcagtaattataaactaatttgctcttctttttctaggtctaatttaaatattttcaaatatcttcagataatttgacagtttacttaactaatacatagtatgtttccttagactgtctgggtttcttacatagtcggtcattcaagagtgcttcaccccaagatggaatgaaaaaaaaaatccaagcaaacatgaaagtctctatttatagctaacagtgatcaagcagatatttttggtttgtgaacaaattatatgttcatattaaagttagtataattgtatcagagtaattattttagcatatgtttatgctaattattacattttcctatatcctagtagctaccttttaatcctgaattaagagaaaattatgagacaaaacatatgagtttaaagttagctatttagaaaatatacacttctaactattttttagatagaaactcttacatttttaacatgtaacaactatttatgagggattggaggaaaagaacagaagaatacagatcagtgggagattagagttatcctggcatttgcagcaatcctgtatgtctctggggatcctagtttgattaaagacaaaatatacaaggaattttggagtctacttgaccctccgagctaagcatatgaaccatatgaaggtcgtgttggctcactgaaagccatttgctatttattattatttttaaaaagcaccttattcacattgtcccatgtgtctatttcaggtgtacgatgggaagtccagtctggagagtccaaccagatggtccacatgaatgtcctcatcacctgtgtctttgctgcttttgttttgggggcattcattgcaggtgtggcagtatactgctatcgagacatgtttgttcggaaaaacagaaagatccataaagatgcagagtccgcccagtcatgcacagactccagtggaagttttgccaaactgaatggtctctttgacagccctgtcaaggaataccaacagaatattgattctcctaaactgtatagtaacctgctaaccagtcggaaagagctaccacccaatggagatactaaatccatggtaatggaccatcgagggcaacctccagagttggctgctcttcctactcctgagtctacacccgtgcttcaccagaagaccctgcaggccatgaagagccactcagaaaaggcccatggccatggagcttcaaggaaagaaacccctcagttttttccgtctagtccgccacctcattccccattaagtcatgggcatatccccagtgccattgttcttccaaatgctacccatgactacaacacgtctttctcaaactccaatgctcacaaagctgaaaagaagcttcaaaacattgatcaccctctcacaaagtcatccagtaagagagatcaccggcgttctgttgattccagaaataccctcaatgatctcctgaagcatctgaatgacccaaatagtaaccccaaagccatcatgggagacatccagatggcacaccagaacttaatgctggatcccatgggatcgatgtctgaggtcccacctaaagtccctaaccgggaggcatcgctatactcccctccttcaactctccccagaaatagcccaaccaagcgagtggatgtccccaccactcctggagtcccaatgacttctctggaaagacaaagaggttatcacaaaaattcctcccagaggcactctatatctgctatgcctaaaaacttaaactcaccaaatggtgttttgttatccagacagcctagtatgaaccgtggaggatatatgcccacccccactggggcgaaggtggactatattcagggaacaccagtgagtgttcatctgcagccttccctctccagacagagcagctacaccagtaatggcactcttcctaggacgggactaaagaggacgccgtccttaaaacctgacgtgccaccaaagccttcctttgttcctcaaaccccatctgtcagaccactgaacaaatacacatactaggcctcaagtgtgctattcccatgtggctttatcctgtccgtgttgttgagaggatgatgttgtaagggtaccttaaaacaagagactcgcttgtattttaagagaaccaagtggccaaagaaactctttctaactttggcaacatcagaacttgccacatgtagctactgcagcaaggcttctgtgtacttgcctgaaaacaaaggaaggtgctggtcattccatttcttttgtttgaagctaaagagatgtgtagctcacaggggctaccttaccagtataaagagctgataacagtactcagaagaatctgtgaacaaatacttgaaaatgggttcaatgtagactgccattatgtgtggtcttcccattaaatgtgaacattttaatatgtatgcattcaccttgcctcttgcacaaatgtcaaaaaaaagatggtaatatctcaaagaaatgaacttgtagattaccaagcagtttgctaaaaattcaatctttgacccaagctgtagcatttttttttcatgtgtggcatctttttcatgccaccaacaaacttgttgtgtgtgtgcgtgtgtgtgtgtgtgtgtgtgtgtgtgtgtgtgttctgtacccactaggatttgtttaggtgcccattgcatctttttgtgctatggagttgtttacattaagcatgaccgaacgagagacaatactatttcccacaggagtccattgggttcagctttgaaagaggaatagaatcgaggctcctttgaccatcaaaatgatgaactttacttatgtggtacccaatgccagaatgtaagagttgcaagtgattttgtgctgctattcattaaaacttgtattccagtcttgccagcttaaggagatcaagatattaagaggtatccttgatttattttccagtattcagtagtaaaattttcctgtccactgtgaatcaaagcctgagtcactctatttaaccttggacacactaataaggttttattttgattgtgttcgtttccccccccccaatagtaaaatttctcctcctttaactcctcctaccccccaaggtaagaaacaaaaaacaaacaaacaaac

SEQ ID NO: 6944 - DNA, 6767 bp, Homo sapiens
ttgcatctcgtgacccgtattgtggctggttaagccagggatcctgtggtagagtgaccccagggatgctgtaagtatactttgtcacatgagctaggatgaactatcctctccagggtctctaaagctagaaattgcagaaaacttccaattatactacttttcttttttttttttgttatgggagaaacaggaaaacgaaaaccaggagacgtgacaaggaagggaataataatacttaagggaaatggtagacctaataatacttaagggaaatggatggagagaaaaaaccaattctcttctgttctcttaagcattctagttcaccagtttttaacataaatagtcattttagcaagttatgttaaaatgtttttttttttctctctctgcccattcttactaatcagtctgtgttcttggttctgctctggttgtcacttgtgttcctatgaaggctgttaaccgaagacttctttgctttccataaccacagtgctgaaggatatgaacaagacacagaattcggcaacacagctcatctaggggactgccatggtaagacagaatcttccattcccacctggagcttctttttgaccacatttgcacatcgacattattttacaatcagtctttttaatgactcaggacacataccacctagcatttaacttaaacttcgcaaaagctgagctgttcggtcatggggatacattagaaaagaggcttactttttttttccttcaccatttacaattttgtaggaaatctagagagaggtagtctaaccagtaggttaatatttttaatttatagtctttttttttttacttttttagttaattggaattcataaatttttgctttcttttggttacttttcactgattacttgttcctttaattcttttagaaattttgcctacttcaactacaccagattacaaaatatttggcggtccaacatctggttagttttttttaatttttttgaattaacaaacttttctttccttcagttcagcattttcagccccttctcccctccttttgcgcagtttggcagcccttcatttttccgctttgactcatattcccactgatggtaccaaaagacttttcttactgagcacttcacccttgtttatagcatgttaacacttcatcattgaccaagccacatcctttaagaaaattcaaatgggctaacatagactgcattccagctgcacgcacgcccacccaagctttcttctttctcacctctttgcattgtgaatgtttcttctggtcatctgtatttaatggatggcggaatttcattattttccccatctctcctcacctttcctatgacctagtaaacaaatacacatttcccataaatgtgtatttataagttttagagatctttgaatggtttgcgctaatcctgggaatctttgaatgttgtggtctcagtggtgtgaaaaaggcttcagtggagtgaagctgatttttgatgtattaagatgttcaatgggctctccaagcctctctgtacctgtttggagcctccttctgttaactgttgcaccagtcagaattgtggtctctgaggttttagcttaaaagcgtaggcttacattttgagggaaaatctatttggaggaaatcagtactagacatgctaaaaggttaagttaactcccggtcctattgctgcttctaaaactcaccagcaattcctttcctcagggggagaaaaagatggtagatcttatgtatcagaatatcctcattcagtttgtaaatgccattgcctttgcattaggttctgcttggaagaaactccccagcagttttggagagagtacaagcaaagtctgtcccctccttcgttgttttactgtgggtggcagagccttagtatagtgaataatctacaaatggacaggagcccctggtaacaacctcttaggcagagctggtttgtcacgtccaaaatcaagtattttcatagacttaaccagatattttccaacaaagttccatcatagcttcttccccagtaaagcctatagattttctaaccatctgtgaaagtgcttttaaaaatgcataaaaaagaaatgaaatgatgtctcacaagagaaggaagaaacagcaactaatctgccctgggaattatattacctttttcatgagtgtcattagtaaccacaggggctttcctaagagcctttcgagtatctttaattttgaaatctgctgaatatgtctttactgttaatttttagttttcattcttcccttgaaaggaaggaatttgatgtagcttcctcaggcgtgtttttacaaaatcctagagcaaactttctcataaaatttactcaaactttatttaaaaatgcaacagaccaatcaaaaaaaatcttgacactatccatattaataaaaatctgtttgccaccacagacatggaggtatcttcatcttctgttaccacaatggcaagtatcccagaaatcacacctaaagtgattgatacctggagacctaaactgacaagctctcggaaatttgtagttcaagatgatccaaacacttctgattttactgatcctttatcgggtatcccaaagggtaaggcctcagcagggacctcatctctaactgcgtggaaacctgatccttaatgtcactgaggagtatgtggttctccagaggtgggcctcacaggagcttctgcggttgtacctccaccgccccttgccacagtctctctggctttctgtggttatatctgagtgcattccttaaaagataaaagaggtggaaagctgttggagaaaaggctggtgaagcagccactcagacaatctaatctgtgttgatttctgtctgaagaagcagagagcctgctggatttcagggaatttcgagggtcaccgcagcaacatcaaaaaacaaaactcattaattgcaaatatcctgatatcagatgttttgtctaggagcctttcccagactcttgtttagcttcaattcaaaatgcaatctgaaaaggatatgtgagatgctaagttgcttgaatgccacaagcaataaaacataacagagtgctcgtccataactatcattttcagcccgtaataggagcagttataaaatagctgcctgttgagttagcttattaaatatattactctaggaaaaaaaaaatctattctttagtacttactaaactatggtatcaggtttccaatcagtttttatggcagcacattgtcatttatgatttatatcggttgattttcattttatatgttttcgttgtaaccaattttataatcattcttctttctgctttgctttctttagtaacaccatttttttctacttttctttctcggtctttcacagtgccactgaattccataacattaattaaacattaattaaaaacaactaatgttcaaaggccttagtactaacttaaagcaacagaatcttcaaaatcactctgacttaccttactctgggatagctgtgtttatagcatgtaacagacttgaatacctcttaaactaacttttttttattaattgttagatgtctgtggttgcattaaaaggttaagtttaatttcagtaattataaactaatttgctcttctttttctaggtctaatttaaatattttcaaatatcttcagataatttgacagtttacttaactaatacatagtatgtttccttagactgtctgggtttcttacatagtcggtcattcaagagtgcttcaccccaagatggaatgaaaaaaaaaatccaagcaaacatgaaagtctctatttatagctaacagtgatcaagcagatatttttggtttgtgaacaaattatatgttcatattaaagttagtataattgtatcagagtaattattttagcatatgtttatgctaattattacattttcctatatcctagtagctaccttttaatcctgaattaagagaaaattatgagacaaaatatatgagtttaaagttagctatttagaaaatatacacttctaactattttttagatagaaactcttacatttctaacatgtaacaactatttatgagggattggaggaaaagaacagaagaatacagatcagtgggagattagagttatcctggcatttgcagcaatcctgtatgtctctggggatcctagtttgattaaagacaaaatatacaaggaattttggagtctacttgaccctccgagctaagcatatgaaccatatgaaggtcgtgttggctcactgaaagccatttgctatttattattatttttaaaaagcaccttattcacattgtcccatgtgtctatttcaggtgtacgatgggaagtccagtctggagagtccaaccagatggtccacatgaatgtcctcatcacctgtgtctttgctgcttttgttttgggggcattcattgcaggtgtggcagtatactgctatcgagacatgtttgttcggaaaaacagaaagatccataaagatgcagagtccgcccagtcatgcacagactccagtggaagttttgccaaactgaatggtctctttgacagccctgtcaaggaataccaacagaatattgattctcctaaactgtatagtaacctgctaaccagtcggaaagagctaccacccaatggagatactaaatccatggtaatggaccatcgagggcaacctccagagttggctgctcttcccactcctgagtctacacccgtgcttcaccagaagaccctgcaggccatgaagagccactcagaaaaggcccatggccatggagcttcaaggaaagaaacccctcagttttttccgtctagtccgccacctcattccccattaagtcatgggcatatccccagtgccattgttcttccaaatgctacccatgactacaacacgtctttctcaaactccaatgctcacaaagctgaaaagaagcttcaaaacattgatcaccctctcacaaagtcatccagtaagagagatcaccggcgttctgttgattccagaaataccctcaatgatctcctgaagcatctgaatgacccaaatagtaaccccaaagccatcatgggagacatccagatggcacaccagaacttaatgctggatcccatgggatcgatgtctgaggtcccacctaaagtccctaaccgggaggcatcgctatactcccctccttcaactctccccagaaatagcccaaccaagcgagtggatgtccccaccactcctggagtcccaatgacttctctggaaagacaaagaggttatcacaaaaattcctcccagaggcactctatatctgctatgcctaaaaacttaaactcaccaaatggtgttttgttatccagacagcctagtatgaaccgtggaggatatatgcccacccccactggggcgaaggtggactatattcagggaacaccagtgagtgttcatctgcagccttccctctccagacagagcagctacaccagtaatggcactcttcctaggacgggactaaagaggacgccgtccttaaaacctgacgtgccaccaaagccttcctttgttcctcaaaccccatctgtcagaccactgaacaaatacacatactaggcctcaagtgtgctattcccatgtggctttatcctgtccgtgttgttgagaggatgatgttgtaagggtaccttaaaacaagagactcgcttgtattttaagagaaccaagtggccaaagaaactctttctaactttggcaacatcagaacttgccacatgtagctactgcagcaaggcttctgtgtacttgcctgaaaacaaaggaaggtgctggtcattccatttcttttgtttgaagctaaagagatgtgtagctcacaggggctaccttaccagtataaagagctgataacagtactcagaagaatctgtgaacaaatacttgaaaatgggttcaatgtagactgccattatgtgtggtcttcccattaaatgtgaacattttaatatgtatgcattcaccttgcctcttgcacaaatgtcaaaaaaaagatggtaatatctcaaagaaatgaacttgtagattaccaagcagtttgctaaaaattcaatctttgacccaagctgtagcatttttttttcatgtgtggcatctttttcatgccaccaacaaacttgttgtgtgtgtgcgtgtgtgtgtgtgtgtgtgtgtgtgtgtgtgtgttctgtacccactaggatttgtttaggtgcccattgcatctttttgtgctatggagttgtttacattaagcatgaccgaacgagagacaatactatttcccacaggagtccattgggttcagctttgaaagaggaatagaatcgaggctcctttgaccatcaaaatgatgaactttacttatgtggtacccaatgccagaatgtaagagttgcaagtgattttgtgctgctattcattaaaacttgtattccagtcttgccagcttaaggagatcaagatattaagaggtatccttgatttattttccagtattcagtagtaaaattttcctgtccactgtgaatcaaagcctgagtcactctatttaaccttggacacactaataaggttttattttgattgtgttcgtttccccccccccaatagtaaaatttctcctcctttaactcctcctaccccccaaggtaagaaacaaaaaacaaacaaacaaac

SEQ ID NO: 6945 - DNA, 1338 bp, Homo sapiens
aaagaaagacatatgaaaggaattgtaattggcttaacagaaacagtctgtaaaaacctaacagtggtgcaatcatgttgtctgtgttgtgttatgtgagaattttctcctaagtcatgcaggtaatgacaatatactgtaaataccacatgtgagtttacctgaatctgtgcattttgtgccttattcatgagaatgatagaagtactaaaatctgtcaagtgttttcagtatagcacattatttactgagtgccagttgtaaatgtttttcaaccagcacctaaaaagactcttttcaaaaaatcacagaaacaacctaggacaattatttgttacataatccgacctcatagcagcattacattctttgccgtgataaacattccactcctgctttcctaaggatgaaacagtgataatgtgaactcaaatgaggtttcctgggtaatgtgacacctgcagaaactatagagcgtcatttatacgtagtttggcagaaaccacttacggctgatgatgcgcaaccctgctgactgtttcagttaatatgctgcacaccacacacttgtttagtgaaccaaatctagaaagtaccaaggcagaggtatgctcctgctgtaatcaggcaaatgagttcaactggatttcttttgacaatactgttggtacctattacttgggggaggacatgttgcagaagaccagatcatttttatacagaatgtgaaatactgatacagttattcttttttttaaagaacattgttttataaagaacgtgatttccagtgatctctggaagcgctaaagctaaaatttctgttcttgaaacacttcagctttgcaactaaaatattacagattaataataaattaaaccaaccaatgataaacactactcagtccaccaacaacaaacgtgtttgaattcaccttaccaatattaatcccagcgtgtgtaaaacagaacagtaactctatgtgaccccagataacattttgtaacattgtgcttccttgtagtttgtaatgtgagttcaatcagtatttatgttgaaatttctaacattaaatctagtctctatcctgttaatttaatttttaaatgctttatccatttgtgcaaaggtaaacgcagattgtatcttttttaatggtacggcataaaaagtaaccctcaagtgaagtgtctctatactgttttatagagtactttaacatgaatagataccttgtaaacttgtattgtggatgtgtaaataatatgtactttgggtttttaacaccgcatgtaaagtcaaaataaaatatacaaatcattatatcctgcctcttg

SEQ ID NO: 6946 - DNA, 1340 bp, Homo sapiens
aaagaaagacatatgaaaggaattgtaattggcttaacagaaacagtctgtaaaaacctaacagtggtgcaatcatgttgtctgtgttgtgttatgtgagaattttctcctaagtcatgcaggtaatgacaatatactgtaaataccacatgtgagtttacctgaatctgtgcattttgtgccttattcatgagaatgatagaagtactaaaatctgtcaagtgttttcagtatagcacattatttactgagtgccagttgtaaatgtttttcaaccagcacctaaaaagactcttttcaaaaaatcacagaaacaacctaggacaattatttgttacataatccgacctcatagcagcattacattctttgccgtgataaacattccactcctgctttcctaaggatgaaacagtgataatgtgaactcaaatgaggtttcctgggtaatgtgacacctgcagaaactatagagcgtcatttatacgtagtttggcagaaaccacttacggctgatgatgcgcaaccctgctgactgtttcagttaatatgctgcacaccacacacttgtttagtgaaccaaatctagaaagtaccaaggcagaggtatgctcctgctgtaatcaggcaaatgagttcaactggatttcttttgacaatactgttggtacctattacttgggggaggacatgttgcagaagaccagatcatttttatacagaatgtgaaatactgatacagttatcttttttttaaagaacattgttttataaagaacgtgatttcccagtgatctctggaagcgctaaagctagaaatttctgttcttgaaacatgttcagctttgcaactaaaatattacagattaataataaattaaaccaaccaatgataaacactactcagtccaccaacaacaaacgtgtttgaattcaccttaccaatattaatcccagcgtgtgtaaaacagaacagtaactctatgtgaccccagataacattttgtaacattgtgcttccttgtagtttgtaatgtgagttcaatcagtatttatgttgaaatttctaacattaaatctagtctctatcctgttaatttaatttttaaatgctttatccatttgtgcaaaggtaaacgcagattgtatcttttttaatggtacggcataaaaagtaaccctcaagtgaagtgtctctatactgttttatagagtactttaacatgaatagataccttgtaaacttgtattgtggatgtgtaaataatatgtactttgggtttttaacaccgcatgtaaagtcaaaataaaatatacaaatcattatatcctgcctcttg

SEQ ID NO: 6947 - DNA, 4338 bp, Homo sapiens
agaaactgacatggcgatcaagacaacaggatcgagaaaactgtgctatgaaaggcaagcataaagtgagtgaaacagaaaaatgtctgctagatttagtctttctgtgggcttgataccacagtgccagcatgttcaaatgtctaatattaatgtaactactactttctttaggatgaatgccacaactttatcaaagtatttgttccaagaaacgatgagatggtttttgtttgtggtaccaatgcattcaatcccatgtgtagatactacagggtaagtatattttatgtgatatgcttcttttgatcaacttttctcccttcactgatatgctgttagagttgaaatctttctgctttccagtaatttgttttatctctagtgcaatgaaagaataaagacagaattcttcaaatggaattttaatacaaataaaatagtattgccttcaaacgggcacgttgaatagatatgacactggctatttacttttcttttgtagttgagtaccttagaatatgatggggaagaaattagtggcctggcaagatgcccatttgatgccagacaaaccaatgttgccctctttgctggtaagatcctttagcgtaatgaatataaatgattaatgacattgaaggtgaaaaaggaatttaatggaagagtaaaagttaataacttggatacccaccttgatctaagtgttcgaaaggctagaatctatgcacaaatttccaaaaaaagaagaaattaagggcaaggatatttcagtgcacactataagtattatgacaccgtgttgttaactaggccagtggcccccgataagttgcttaagtttttgatgcctagatccctgtaaaattagataatatcatggctgacctgtcacatgttgatggtgagaatcaggtgtagccctatttgtatagataatggtaataccagtgagagcgctccaaagggcataacacgctgccaaagctaacacactgcaggataattatggttatcttaccaaaattatacctttggtttcagatgggaagctgtattctgccacagtggctgacttcttggccagcgatgccgttatttatcgaagcatgggtgatggatctgcccttcgcacaataaaatatgattccaaatggataaaaggtacctttgaagagcagtgtcgtggggtcaccaggatagtggatggcccaagtggggacagcagccacggccatcaagaggttcagcgcatgactttatattgtttatttagaacaagtacacactgcttttattgtgaaacaggaactttgacagggaatgaggaggctggtaaccatgttaaaagagtaagttcattccggtgtttatcctaggtgacctcaaaaaaaaaaaggggagatttcatctctgtgtgtgccaatttgtctaacttctaaaatgcacataatactacttgccatctacccatcttggaaagtacccagagagaatcgattagtccgtatgagagccattttgttcttcagagtctagaaatcaagattttttattttcagtgtaagaggttttcttccctagttaaataggttaatgaataaatctgttgaaacaaagacctttgctgtagttcagttccctgtaggtctttttacagtccattagctgactttagagatgactggttccctgaagcttgaacacacccatattgggactcctcaaagtcattggcagattggagttcttgttggcttgaatgtaattgtgcaacatctgtcagtcatgctttgcagtcggggtcttatgctaattgaattatcctttaggaaccagtttgtttttaatttttctttcagagccacactttcttcatgccatagaatatggaaactatgtctatttcttctttcgagaaatcgctgtcgaacataataatttaggcaaggcaagtatatgcatttggcttgaattgtggacttgtactgcatgaaattgagaccactgtgatagagttaaggatgctcacttggcatgttttccagctctcaattcagtatacatagggccaactgcagagaggtgggttgcttatcatgagaataattgctggaaaacatctgaacaataacctgagtgggaacagcagccttgagttttgagaaggtatcgttttttttcctgcagccacagagagtgttctacaggtacccttgagctacggatgctttttttactctttagaaaaccactgatagtctattctttctcagcgtcaaaagacaggatagaaagtagcgaccccattcaatttttagtgtttcagtgaaagcccatgtgattttaaagtattgcaaccccttctatgccaagttgaaagatgacatgtttcattaacaatacaggaagcaaagttggagaccaagtgcagggatggttttcattcagcaaggcagatagacagctcacttcttgggaaggatgcttagcaaaataggaaagtggctcttttttccccacaggtgaatctagtttaccttcttactgaacagatccctagagagaagactgctagatttttttgaaccagatgtatctttagtattttttgtccctcccttaaacagtatcattttgtttccattcctttccatgctcataaccccattgctttgcttctatccgttgggcaggctgtgtattcccgcgtggcccgcatatgtaaaaacgacatgggtggttcccagcgggtcctggagaaacactggacttcatttctaaaggctcggctgaactgttctgtccctggagattcgtttttctactttgatgttctgcagtctattacagacataatacaaatcaatggcatccccactgtggtcggggtgtttaccacgcagctcaataggtgagagcagaaccccggcactgcaaagatattctctgcatgcctgtcagaaccaagacaggcttcatgtcgccagcctcttcctgatgattttcttccttttcagcatccctggttctgctgtctgtgcatttagcatggatgacattgaaaaagtattcaaaggacggtttaaggaacagaaaactccagattctgtttggacagcagttcccgaagacaaagtgccaaagccaaggtaaataaaaaagtagaaaagggttttgtcttgaacaaaaccttccggtcattggaagcatccctcctcagggagcagcttggccaacctcccacaccaggaaggggtccctctctcagacagagccagcagacatagccttgtgacctgcaagcccatgagtgtgaatggagaacccattgaattcaggggcatagcattgctcctttagtttcactcactctccttcctcacttgacctcttctctgagaatatacacttattccttagatacagtacatggtgtggcaggggcagccgagagcataaaataacgctgttttcctttcaggcctggctgttgtgcaaaacacggccttgccgaagcttataaaacctccatcgatttcccggatgaaactctgtcattcatcaaatctcatcccctgatggactctgccgttccacccattgccgatgagccctggttcacaaagactcgggtcaggtgagattgtgtgtgaaacactccttcctattcaacgttttctctgcccgtgggcctccccttctgatctgtgccgcctcctcttgtaggtacagactgacggccatctcagtggaccattcagccggaccctaccagaactacacagtcatctttgttgggctctgaagctggcatggtacttaaagttctggcaaagaccagtcctttctctttgaacgacagcgtattactggaagagattgaagcctacaaccatgcaaagtaggtatatgttacgagaacgcccttcagcactgctcaaaaattttcggcatgtatttcatctagtcatgtccttttggtcctctaaattagcagtggtttggcataatagtgttttgtgttttttttctcattgaaataaatcttgggtttgtttttttcccgagcctgctagggcgaggggggtgaatggttgatgagtttaaaaataatgcagcccttgtttttcacctgtagaatatgagaacattttaacagcacctctcttatcttgcagatatattccaagatgctacatgcagcagacagctgtgagcttgcatacacacacacacaaatatacatgcacatacatacacagaatgcagtactagttaagtatttccttcctatctttaataagtaagagaatatttagaccattaaaaaaaaaa

SEQ ID NO: 6948 - DNA, 1288 bp, Homo sapiens
tgtgcatttagcatggatgacattgaaaaagtattcaaaggacggtttaaggaacagaaaactccagattctgtttggacagcagttcccgaagacaaagtgccaaagccaaggtaaataaaaaagtagaaaagggttttgtcttgaacaaaaccttccagtcattggaagcatccctcctcagggagcagcttggccaacctcccacaccaggaaggggtccctctctcagacagagccagcagacatagccttgtgacctgcaagcccatgagtgtgaatggagaacccattgaattcaggggcatagcattgctcctttagtttcactcactctccttcctcccttgacctcttctctgagaatatacacttattccttagatacagtacatggtgtggcaggggcagccgagagcataaaataacgctgttttcctttcaggcctggctgttgtgcaaaacacggccttgccgaagcttataaaacctccatcgatttcccggatgaaactctgtcattcatcaaatctcatcccctgatggactctgccgttccacccattgccgatgagccctggttcacaaagactcgggtcaggtgagattgtgtgtgaaacactccttcctattcaacgttttctctgcccgttggcctccccttctgatctgtgccgcctcctcttgtaggtacagactgacggccatctcagtggaccattcagccggaccctaccagaactacacagtcatctttgttggctctgaagctggcatggtacttaaagttctggcaaagaccagtcctttctctttgaacgacagcgtattactggaagagattgaagcctacaaccatgcaaagtaggtatatgttacgagaacgcccttcagcactgctcaaaaattttcggcatgtatttcatctagtcatgtccttttggtcctctaaattagcagtggtttggcataatagtgttttgtgttttttttctcattgaagtaaatcttgggtttgtttttttcccgagcctgctagggcgaggggggtgaatggttgatgagtttaaaaataatgcagcccttgtttttcacctgtagaatatgagaacattttaacagcacctctcttatcttgcagatatattccaagatgctacatgcagcagacagctgtgagcttgcatacacacacacacaaatatacatgcacatacatacacagaatgtagtactagttaagtatttccttcctatctttaataagtaagagaatatttagaccatt

SEQ ID NO: 6949 - DNA, 5281 bp, Homo sapiens
aggatatgtaccaccatcgatatatccccttggtgatagtcgtaatcaaagtaagccactgttaataatttaagtgatttatccctcatgtgttctgaggcagaaaaaagatgaagaccaccgctttagctaatagagactacaagggcagaatttaaacaggaactttgcattttatgtgaggcctaggaatctcaattttaaagaattccttaggcagttctgatgtagttaggcaagctccagtctgcctttaaaatctaatgttctgtggcatatatgccaagaattccttgatccccttaggatttgaccaatcctagtattttgagaatataggaagaacctgcagcagaaacttggataagaaaatagtttgtgtattttgatctttaggttgattgcactgccaacactaacacctgtaataaatatggagtcagtggatatccaaccctgaagatatttagagatggtgaagaagcaggtgcttatgatggacctaggactgctggtaaggatcctgaattacattctggaaactgatgttaagtaccttattctttgtagtggaaacataaaaatgtgtttttctacacagtatactttcagtcttaaaacttcctcatctaagaggtcagtttggtggtaacaaaagacctctctaaatgaacagattatataagtaatatagaaaatacacaaacttgatttataaggtcagctcgacattttttcattttacaaatatttattgagtaattactgtgtgccagatattctaaatatactaggtcgttggcatttattgataaaatagacaaggtccctactcttgtgaagcttacattctgggggatgagggggagaaggcaacaaacaagttttaaaaatatagatgagctgggtgcagtggcacgtacctatagttttagctactcgggaggctgaggtgagagactgtcttgagcacagcctgggcaatataagtttgtccccatctccaataaaaagtttgggccggggccgggtgcggtggctcacgcctgtaatcccagcactttgggaggccgaggcaggtggatcacgaggtcaggagatcgagaccatcctggctaacacagtgaaaccccatctctaccaaaaatacaaaaaattagccgggcgtggtggcgggcgcctgtagtcctagctgctcgggaggctgaggcaggagaatggggtgaacctgggaggcggagcttgcagtgagccgagatcgcgccactgcactccaacatgggcgacagagcgagactccgtctcaaaaaaaaaaaaaaaagtgtgggccaggcacagtggctcacacctataatcccagcactttgggaggctgaggtgggcagatcacgaggtcaggaatttgaggccagcctggccagcatggtgaaaccccatttctgctaaaaatagaaaaaattagcactgggcgtggtggcacatgcctgtaatcccagctactcaggaggctgaggcaggagaatcacttgaacccaggaggcggaggttgcagtgagccaagattgtgtcacagcactccagcctgggcaacagagcgagactccatctccacacacacaaaggtatgtgtgttatctccatgtatatatggataaccatctcatacccattaggatggctactatttaaaaaaaaaaaaacaacgaaataggccgggcgcggtggctcacgcctgtaatcctagcactttgggaggctggcggatcacctgaggtcgggagttcgagaccagcctgaccaacatggggaaaccctgtcactactaaaaatacaaaattagccaggagtggtggtacatgcctgtaatcccagctactcgggaggctgaggcaggagaatcgcttgaacctgggaggcggggttgcggtgagccaagatcatgccattgtactccagcctgggcaacaagaaggaaactccgtctcaaaacaacaacaacaacaaaatagccaatgttggtatggatgtagagaaattggaaactttgtgcactattaggaatgtaaaatgggacaaccactatggaaaacacagtatgttggttcctttaaaaattaaaaatagggccaggcctggtggctcatgcctataatcccagcactttgggaggccaaggcaggcagatcatttgagatcaggagtttgaggccagccaggacaatgtggtgaaaccgtctctctactaaaaatacaaaaattagctgggtgtgatgcgcatacctgtaatcccagctacctgggaggctgaggcaggaggatcacttgagcccgggaggcagaggttgtagtgagtcgagatcgggccactgcactccagcctggggaacaacgcaagactccgtctcaaaaaaaaaaaaagattgaaaaaattaaaaatagaaggccaggcacggtagctcatgactgtaatcccagctctttgggaggccaaggtaggctgatcacttgaggtcaggagttctagaccagcctggccaacatggtgaaaccatgtctccaccaaaaaatacaaaaattagctgggcgtggtggtgcacacgtgtagtcctagctacttgagaggctaaggcaggagactcgcttgaacctggaaggtggaggttgcagcgagctgagatcacaccactgcactccagcctgggtgacagtgagaccctgtctcaaaaaaaaaaataaaaatgaaaataaaattactaggccaggcgtggtggctcacgtctgtaatcccagcactttgggaggctgaggcaggcggatcacaaggtcaggagagcgagaccatcctggctaacacattgaaaccccgtctctactaaaaatacaaaaaattagccgggtgcagtggcgggtgcctgtagttccagctactcgggaggctgaggcaggagaatggcgtgaaccctggaggcggagcttgcagtaagcggagatagcaccactgcagtctggcctgggcgaaagagtgagactctgtctcaaaaataagtaaataaataaataaaattaccatatatatgatccagcttctgtatgcccacttctgagtatacatttagttctcacttaatgttgtctatagattcttggaagctgtgacttttaagtgaaacaacctataacaaaacttgtttttttttttcctcatcaatgttacaggaaacagtgttattctaggacttgctatgcattctttctcttgaagttgcagtttctgagaacatatgaataatattgaggacttattgtatacccaaaagaagatagttgtacacctatatccacagcagcattattcatagtagccaaaaggtagaagtaacccaagtatcttatcagtgaatgaatagtaaacaaaatacggtatatgcatccagtggaagattattcagccttaaagaagaaaattctgactacatgctgctatatgattccacttacatgaggtagcacaaatagtatacaaaattgtatgtttaaaaatggttaacaagggccaggcatggtggctcacgcctgtaatcccagcactttgggaggtcgaggtgggcagatcacgaggtcaggagttcaagaccagcctgaccagccaacatagtgaaaccccgtctgtactaaaaatacaaaaaattagccgggcgtggtggcaggagcctgtaattccagctactcgggaggctgaggcaggagaattgcttgaacccaggaggcggatgttgcagtgagccaatgttgcaatcgcgccattgcactccagcctgggtgacaagagtgaaactccatctcaaacaaacaaaaaaatggtttaacaaggctcatgcctgaaatcccagcactttgggaagctgaggcaggtggtttgcttgagcctaggagttggaggccatcctgggcaacatagtgagaccccgtctttataaaaatacaaaaaactagccaggtgggatggtgcatgcctgtagacccagctactcaggagactgaggcgagaggtctgattgaccctgggaggtcgaggctgcagtgagcaatgatcatgccgctggaccccagcctgggtgacagaaggagaccctgtctcaaaaaaaaaataaagaaaagaaaaaaaagattggaaacaaatgtccatcagttttgcaattgtgtctgcttaaataaactgtggcacatttatagtgaaacactatgcattgtaaacaatgtttctgttaaaaaaaaaacttttttttttttttgtgagacagagtctcactctgtcacccaggctggtatgcagtggcacgacctcggctcactgctaagtccgcgtcccgggttcacaccattctcctgcctcagcctcccgagtagctcgggaccacaggcgcccgccaccatgcccggctaatttttttggtatttttagtggagacgggggttcaccgtgttagccaggatggtctcgatctcctgacctcgtgatctgcccgcctcggcctcccaaagtgctgtgattacaggcgtgagccacagcacccggccaaaaaaactttttaataataataaaaaacgctatgccactgtaataaaaggttgaggtagctatgtatatataattgcctgtttatgcagaaaatgtctggaaggatatacaagcaactgaaatcttggctgggtgtggtggctcacgcctgtaatcccagcactttgggaggccaaggtaggtggatcaaaggtcaggagatcgagaccatcctgtctaacatggtgaaaccccgtctctactaaaaaaatacaaaaaaaagtagccgggcatggtggtgggcacctgtagtcccagctactcaggaggctgaggtaggagaatggcatgaacacaggaggcagagcttgcagtgagctgagattgtgccactgcactccagcctgggcgacagagcgagactctgtctcaaaaaaaaaaaaaaaaaaacctgaaatcttacaaggaggaaactgggtgactagggacaagggtggcaagaagatttcatcttatacccttttgtaccttctgaattgtgaatgatgaataattgccttctcaaaaattataaataagttgtgttgtcataacttttattttgacttctaagatggaattgtcagccacttgaagaagcaggcaggaccagcttcagtgcctctcaggactgaggaagaatttaagaaattcattagtgataaagatgcctctatagtaggt

SEQ ID NO: 6950 - DNA, 352 bp, Homo sapiens
gataggaatatcttcagcgttttctaatgcttcttaaactctgagatttgactcacaatagggtagttatgactgaaaataaggttttaaggtaggaagatacaagtaaataataaacctctgctattttcacagaaattagggaactttaaaatcagatcgctaggatttatcttgtttttgcagcattcattgctttctcatgtgttgcagtatctcgttttaaatgacatggagccagttaaaacactttctgcatcttagatgttcattgttttgttttttaaatgtgatatatgataaatttgactaaaaaataaatttaaacataaaagctatgtttgtgcttctc

SEQ ID NO: 6951 - DNA, 431 bp, Homo sapiens
gggacattccaccctttcccactcccccacccagctcttttgtaacagctcactcttcctcacttttcaggtctcaagttaaatatcccccctctgggaagcaccctaggcacccccaaactcgggatggtgctcctactgacctttcacacaggactcacctctcacaagctctacggacaggactgagttcgtcctgcttaccatgatagccccaggacccagcacagggtatagtacacagaaggtgctcagtaaatctttgttaaatgaaagaaacatgggatttttaagtatattagtcttacctgacttccttgactttaaaaaggaaattgagggcacattgagaaaatgagacaaatgtgggggtcaaaatcatgtcatgtgactaaatcacgatcccaaaattttccaacaaactagagcag

SEQ ID NO: 6952 - DNA, 457 bp, Homo sapiens
gtctttatctggctaattcctgttccctacctcttcttctaataagccatccttggtgctgtgtgctcctgtagctcctacccatacctctgccagtgcgtaattgtaattgtctcttgtctgtcatttccatcagtccctgagctctctatgggcagaggctgtgttttactgtctttgtattcccacatcaccagggtagaacatagtgccagctcattgcaggccctgattagatatttattgaataaatgacatattttctctccttctgatctgtatattctgaatcatttctttatgtatagaatgcagagagctggaattccttgtccaacagttgtactactgaagaaacacattttagttatgtcttttattggccatgatcaagttccagcccctaaattaaaagaagtaaagctcaatagtgaagaaatgaaagaagcctactatc

SEQ ID NO: 6953 - DNA, 884 bp, Homo sapiens
atcaaggtatttaaaacaacccttaatgaatttaagaatcgtgacaaatatattaaagatgatttcaggtttaaagatcgcttcagtaaactaaatccacgtaagatcatccgcatgtgggcagaaaaagaaatgcacaatctcgcaaggtaaagaaaatattgtgctagacgtaatcttgggtaaatacctttttgcattaggataaaaaaatccatgctttcttttacattcatttatagaaataatgaaaggccaggtgtataacctcgattcatacttttaggatgaaaaagccattttcttttttctttcctcaatgaagcttgagggaaatctgggcattttctgccttagacactttatcatatatctaaatgccatttttaaattgcttttatcacgaagtaaaacttccagcatccaattaggcttagcataaaaaaatggtttcttttttgtttcagaaaatgtttgttgcatttaatttgttaattttgtgggagtaagttcttaccaatcaaattacattttgttttaatttttatacttgtatctgaattttctaagcaatttattttctatcaaagaatttgttttgtcaaccaagaaattcagtaataatccttctcattaaaaacctttctattatcttaatttattaaaagcttaattttagtttgttattttctaaagatatttgctttcaaaagtaattattcatatatatcagttacaaaattcttctactgagagttccccaccaaaataagccaggcatggtgtgcacgtgtactcccagctacttgggaggctgagatgggaggactgcttgaacctaggagttcaaaaccagcctggaaacgttagactcccaagacctt

SEQ ID NO: 6954 - DNA, 477 bp, Homo sapiens
aaaaattgtgtctgtctttcttccttaaacaatacagtataacagtaatttgcatagcatttacattaggcattttgtgtagcattgtattaggtataagtaatctagaaatgatttaaattatacaggaggatgtgcataggttatatgcaaatactaggacatttcatatcaaggacttgagcatctgcatgcagattttggtatccatcagagttcctggaaccaattcaccacagataccaagggacaactgcacagattaaaaccttaatgcattactaccgtgtacccaccataataactaaaatggaagaaatagaaatgctaggtattggtgacgatatggagcaactggaactcgagtactggtgaatatacccatgacctagcattccttccctaggtattttctcaacagaagtgtgtatgcctttttaccacaagacatatactagaacattcataatggcatta

SEQ ID NO: 6955 - DNA, 650 bp, Homo sapiens
agccttcaggaggaggaaattctgacacatgctgcaacatggatgaaccttgaggacattatgctaagtgaaataaaccagtcacaaaaggacaaatacatgattggacttacataaggtacctagagtagcaaggtctcttcatagagacaaagtagaatggtggttggcagagggagggagagagggatggggagttagtgtttaatgggcccagagtttcagttgaggaagatgaaaaagctctggagacagatgttcttacaacaatgtgagtgtacttaatgccacagaactttacacttaaaaatggttgaaatggtaaattctatatgtattttgccacaataaaaaatccagatacaaactagtacatactgtgcaattctttttatatacagttcagaaccaaggaaacctactctatgatgttaaaagtcagggcaacgattgcctttgttggttgtggggtagtgactggatgtgagtatgaggagggactacagtgctactcaggttctaattctttgagtgcttgttacacaagtgtgttcatgatgagaaaatttatcaatgtgaactcttaggatctgtgcttttttttcccatatgtattttatacttgaataaacaagactttttgccttcta

SEQ ID NO: 6956 - DNA, 16181 bp, Homo sapiens
agagcagagcaaggcggtcaccacaggacctgcgcctcccagtcggggatggcgagtccaggacccaggacgccctgctgcggctttactcacaggagccgcggtctcgggcttggacgctggggccttaaaggtggatgtcgtcctggccgaatctgctctcctgtcggcagctgcccccatggacaagcattccaagtagtcgggtggggggatgacaacactgctattctcagacaagttcacggtgctgatgcttctcactggtgtggggctcaaacccaaaaaggacacagcacgtgttagataatgtctcaccaccaaaccccaaacatcctctgtgtccctgaccaaggacaacagtaatagtacatcaccaatcaaaacctgatcttgatctcacacacacagacacacacagtacatatatcaatacaaaacactgtattttttaaatttttttgcgacagagtctcactctgtcacccaggctggagtgcaatgacatgatgtcagctcactgcaacctctgccttctaggtttaagtgattcttctgcttcagcctcctgagtagctgggattacaggtgcacgccagtgtgcccagctaattttttgtatttttagttgagatggggtttcaccatattggccaggctggtcttgaactcctgacctcagctgggattacagcatgagccaccacacccggcctaaaacactaatgtttttagtggtttctaaacatatcctcacaagaaatttttttttttttttttgagatggggtttccctcttattgtccagggtggagtgcagtggcgcgatcttggctcactgcaacatccgcctccctggttcaagtgattctcctgcctcagcctcccaagtagccgggattacaggcgcctgccaccacgcccagctaatttttttgttttttgtttttttttttttttttttttttagtagagacggggtttcattatgttggccaggctagtcttgaactcttgatctcaggtgatctgcccgcctcggcctcccaaagtgctgggattacaggcatgagcccctgcgcctggccaaaaaattatttaaaagacatgacaaaaggagaggaaaccttttaaattaggggctggctcttgattgatttaatctaaggaaagaaattggagactagcaaaagctggagtgagcaatgagctaagagttaaaaaaaaaaaaaatgtaaacacttgaaattttaacatcctaaaagtgttactcagtttttgttccccagcacaatggcattttagctcttctgctagggatgaagattgcagacagcatcagaccctggggaatgcaacgtcggacctggaggccttctacctggctagctggatgggttatgggggttctgtgaacttcgatcctcccgcctcagcctccagagtagatgggacaatgggcatatgccactatgccctggctaattgtttattttttttgtagagatggggatcttgctatgttgcgcaggctggtcctgaacttgtggcctcaagtaatcctcctgcctccatctcccaaagtgctgggattacaggcacaagccaccgtgcccggccagtttcctcattttttaaagtgggggcccacctcatgggtctgctgtgagaattaagtgaaaaaatcaatgcaaagtcctttggacagtctctaggcaataactactgttagtatctgatctggaatacggatttgggggttttcggcatggaggtgctcagcaaagcccatcagtgtatttcaagccatgggagtggatgagatggcccagcacaggcaggaaggatggacccagggtgactcccaagaacactgatgtttaattgatgggcagaagaggggtgcaaagagctggtgaggcagaagacaaacagagcacaggtcaagcagccggggccagagaacattccagaaaaagcatacaacagcgttaagggctgtaagataagaacggtaagataagtgtaagataaggacggaaaacacatggcttgggtttagcgaccaggaggggcagggcacagggagggagtttcagagggctgcaggactgcgaggagtaggtggcctgggctgggtctcctcacagcagcaaagctcggggacaacagaaatcacggcagacagcactgtgagccgcggtctcatctctgactagtccacgagagctgaggcttagggcagggcctgcgacacagctagatggtggtgtgttacagaaacgacaaggcaggggtttctgtcaccgggagagctcagccacgttcagggctaccttggcgtgggcacggtcactgcttctgtctcattttcttccagcaacttcgtgtacgacgacgggaaccaacccctcctaccggcaaagagggagaaaagaccctatcagcagtagacatgtggacggcaacctccctgaacaacctggtgagagctcagggcagacaggtccactgctccagaaacgcccatgtgtggaggaaatgaaattaaggcttttaataggtaaatatggactttcacatacactgaacaatgtgtattgttaacaatttttttttaatagagacagggtctcgctctgttgcccaggctggagtgcagtggtgcgatcatagctcacagcagcctcgaactcatgggctcaagcaatccccctgcctcagcatccgagtagctgtgactagaagtgtgcaccaccatgcctagctaaaaagcaatatatgttgtatgtataacattaatttgatttggattacccctttttttttccatattggttttatttaatacatctgaacaatctgtctagaaaactgacaagctagttacaggaaggcttgtgcacataattatggctgaaattaagaggattgcattcaaactacctacgtgctaaaccttaacaaagtatatctgatatgcagattatcttcaataaatcaaatgctaattttatttatttttttgagacagagtcttgctctgtcacccaaggctggagtgcaatggcgagatctcggctcactgcaacctgcgcctcccaggttcaatcctgcctcagcctcccgagtagctgggattacaggcgcctgccaccacgcctggctaatttttgtatttttcgtagagatggggtttcaccatgttggccaggctggtctggaactcctaacctcaggtgatctgcccgccttagcctcccaaagtgctgggattacaagcatgagccactgcactggccaaatgctaaattttttttaaaaacaaaagaatgtttaaactactttcagacaggtgacttcatacgctctaataactatgcatgcaccaaatgtatctctacatgcacagacatacagaaaatagcctgggatcgaataacttcagttaactaaactagaactaaaccataaacttaactttggctaaaatgtgagcatgtccacgaagacagtttgcagcttggctgctctggaagggaggggccgtctggtgccctgcggggaccatcacgcccagacttacgccttggacacgtcgtgttctccatagagccagccatccttctcctcggggatgagcagcgtgatgacatctccctgtgcaaagctgagtaaggtcttgttggagcccgcagtgtgcgggaagatggtcttcactttctgcttcttcatcatgttcagtcccgttgcaaccgaaactgatcgctgtaaactgggatcttcggaagtacctgttggagggagtgtagcagtaatggcttttcaaagcatgagaatcaataggcacattccaatgagcaaaccccaggaatccacctgttctcatcttgccaacaatgctccttccacggaaactgaccctgtcctatttcctcgctttgatcattgcccagaaggaacagggactgttgagaaacagaggcagcgtgcagcctgaaggcatgcaccgtgcagaagaggatccctgcggctgcgggctcttttccaggcccaaggacaaggcggtgtgtgccgggttgatctgcactgctttagccaggatggctcttcttagagagacaaaccgctccaacgccaaactgccctcgcaattccaatcgcaaaggcaggctagggccacagttcaaacccaactgccaatgtccacaaagaaaagaagaaagctggaaatgcagttggtcttgccatgctggccgctcagcttctcacccccaggcctaagaaggacaaggtgaggatgagttccatttacagagtcctcaccaggtgccagtcacgatctcaatgtctcacagctgccatcccgccaggctcccaggaggaaggtgctgctatttattatccacaggacagaccccacagctggcaagtggctgggccaggaaccagctagggcaggtttgtcccatactctctacccatgagcacgaggctgtgctgttcatgtctccattcaaacacaggctgatatttccactccaggggaaaaaaggtagaaaaaaatatatatatatgtatgtatatacatttgagacagagtctcactctgttgcccaggctggagtgcagtggcaggatcacagctcactgtagtctggacttcccaggcttaaaggatcctccctcctcagcctcctaagtagctgggactacaggcacacgccgccatgccaggttcatttttaaatttttttgtagagacagtgtctcgctatgttgcccagcctggtcttgacctcctggcctcaagtgatcctcccagcttggcctcccaaagtgctgggattacaggtttgagccactgcttctggccgttttttttttccattcaaattttcccaggctagtaatacaacaagcatctttaatttaaaacaatgcaagatctctttctgctttattcttgcagattcttcatgattacaacataaacctgcgcccccttaacctgccactctctacttcgctggtgttgaacccaccagcagttttctttcttttttgagacagagtctcgctctgtcgcccaggctggagtgcagtggtgtgatctcggctcactgcaacctctacctcctggctgggttcaagcaattctcttgcctcagcctcctgaacagctggaattacaggcgcgtgccaccatgctcggctaatttttgtatttttagtagagacagggtttcaccatattggccaggctggtctcgaactcctgacatcgagatccacctaccttggcctcccaaagtgctgggattacaggcatgagtcaccgcgcccaatcctccaccagcaattttcattctgcttttaccaataagaaccagagtcatctgaatcactgggatgcacagagtattacatactttaactgtgtattttagttaactgacaggacttccttcaaaggcaaatgcctgcagaccatcatcttcctctactgggccatcctagtcatcattctggaaaactctgttcttttgcccaatagcttcacacgctgtggtccagggctctctctcacaaacagcttgactgccgcaaccttcacaccatgggggcctgtgagacaccccacgtggatgggttggggccatggcacaggtctcgagggtcctgggtgctaaagactgtgcagaaggacggggtctgaccagtgaagcagccggcaacatctgcagacagtcactggctccaacttttgtttttgtcactgtgtcacccaggctggagtgcagtggtgcgacctcagctcattgcaacctccgcctcctgggttcaagtgattctcctgcctcagcctcccgagtagctgggattacaggcaggcaccaccacgcctggctaattttttgtatttttagtagcgatggggtttcatcatgttggccaggctggtctcaaacaactgacctcaggtgatccacctgcctcggcctcccaaagggctgggattacaggcgtgagccaccgcgcctggcctccatttatttgtaaatagataattctcaacagtatgtttactctggataaacatcagtcagtgcgtagaactggtaaatgtcagagaaatgtatcacttatcagagcgtctcacagtctagtcctgtatttcttctgaactcacgctctgcaaagccagggctgaatgtatctaccatacctgcttgtttacctccaaaccttgcaatacatttatacaaaatatttatttcacagcttatcttaaaacaaatgtaaaaggtatcttcaaataaatcagactgaatctcttacctgttgaattatttaccctttgtgaattcggggcagccgtggctgggttattaaacatatcgatcaagggactggtatatgctctgcctgaaggagcggggggcatctttggtgagcatttagaaagggtgtcgtaatctttcctaacctgtgaaaaattctttattagtccaatattagtatagtgcagaaccggaattacacagattcccaaggctgttttttttttttaaataataggctatttatttatttattttgagacagagtctcgctgtgttgcccaggctggagtacagtggcacgatctcagctcactgcaacctccgcctcccagtttcaagtgattcttgtgcctcagcctcttgagtagctggataacaggcacgcactaccacatctggctattttttgtatttttagtagagatgaggtttcaccatgttagccaggctggtctcaaacttctgacctcaagtgatctgcccgcctaggcctcccaaagtgctgggattacaggtgtgagccaccatgactggccacatttcagggggtttgagatgggcagaaagagtggatccatgtgttcaaagtacctgctgcatcccaatctccacagagcccaggttcaaagatcagcaaactacaaatgtgtgaattcattactgtgaatactttgatgcctattttttttcctgaagtgccttacgttgtgatgaatgccatcagagtgtgtctaatttattctgagacacctatacttccttacttgggagtaaacttagttggaatgattacaaataaaaacagtaagtatggttgggtgcagtggctcacgcctgtaaccccagcactttgggaggccgaggtgggcggatcacgaggtcaggagatcgtgaccatcctggctaacatggtgaaacccggtttccactaaaaatacaaaaaaattagccaggcatggtggcgggcgcctgtagtcccagctacttggaaggctgaggcagaatggcgtgaacccaggagacggagcctacagtgagccgagattgcgccattgcactccagcctgagtgacagagcaagactgtgtctcaaaaacaaaaaaaataaaaaaaaaacagtaaggataaaatttccaaaacaaagataatagcgccaaacatagtataaaacatgtgcccaacttatggtggctcatgcctgtaatcccagcactttgggaggccgaggcagacagatcacgaggtcaggagtttgagaccagcctgaccaacatggcaaaaccctgtctctactaataatacaaaaattagccaggcatggtggtgcgccccagtaatcccagctactgaggaggctgaggcaggagaatcacttgaacccgggaggtggaggttgcagtgagccgagatcactccactgtactccagcctgggcgacagagcaagaaagactccaccttaacaacaacaaaaaacaaacatgtgcccagctaccttcgcccctaaaggtaaggggatagaggtgcgaaaaggtggtcctggaagtaataaagggggacctgtgattcccaccaacacaggcaaatttggcccagatcaagttaggaaacacacgattgaaatctggaagagaaaactggctcctaccacattgcttctctcgatcatgggtgaagcctgaggagttccagacacgggggtagaggctggggtctttatttcttcgatcatattcatgattttctctggcactttgatggcatcaacacaggtctcctgccaccgaggcagcttggaattcagtagttctgcagactgcaaagccaaaagaagaagactaaagacaaagaagattgtctgaagagctgagaaaaatgacatcacgtcatatcgctgataacagattactggcttagcaccaggagtgtgggggccctgggttaaactcggtgagcactttaagcacctagaggatcagctgtgtctcaccggctgagaggggcaaaggctctgactcaaaaggaaatttcctgatccctcagtgtgaatacagagcatgggactaatacggggatggtaaatggttaagagcaagaacagaaactcaaagggagggagggagcaatctgtatgaatcccgttttccaggtggccccagaaacgccaaccatcactttctccctcccactcctactaaaagcagcacctccaacacaggccacgggccccgtagttgactctgaccgattcagacattagagaagtgaatcagacactgtcctgagagtctgtctatggggaagagggactgtgggtgagtggtgggcagtgctgagggacgcccccaccacaggccaaacaaggttttgcagagcagacctgaccagcaggggtgagaacccgcaaccctggaggcagagtgcccctccagcacccacaagcctggctctgctcctgacaactggattctcagaggccccccaagcgcttccagtgagcaccttttctgaagagcactctggttgggaaaggggaggcaggagcctgtcctgcggctgtgtgcatggcagtcacactgcttttactcagcctctgagtttatcaagagtggtggggggctgatgtcagtcctggggaagggcaaagaccccctcacaccacccctgtccccaaatgccaccccacccccaactgtcaccctgacactctgcagcaccgtggaccagctgcttgggcctgcttcatcccaactccacagaaaggactgaggcgctttagctgaattaagggaagccacaaaaccagttttcagatactcgaagaaacttccagcatagaaacgagcagatttggtctgcgtcactctagaaagcattactgggaccgatggttaagtctaagaaagactctgctgataactggagctccctgaaaaggtgctaggctgcctcatgacacggtggggatatcacgcaggaagagaacctcaaggtcacctctgtcctctccagcctgcgaccctggtgccacaggatgccctcactctgggaagagaagattctaaagtgaactctacattcccgaaactagtacagacatgctgttgacaaaagtgatcacctaatacagcaactatttcctttgctgtaaccattttcttctgcttttttgagagaggattttggctctgtcacccaggctggagtgcactggcacaatcacagctcactgcaacctcgaactcctgggctcaaacaatccttccacctcagcctcctgagtagctggggccacagatgcacatcaccacaactggctaattaaaacttttttttttttttttttggtagagatagggtctcgctatgctgcccaggctggtctggaactcctgggctcaagtgatcctcctgccttgggctcccaaagggctgggattataggcatgagccactgtgcctggcctgctgtactaattttaaatcttatttagggagctgaatactcctttttcttccttttttttttttttttttttgagacagagtcttgctctgttgcccaggctgaagtgcagtggtgtgatctgggctcactgcaacctcagcctcctgggttcaaacaattctcctgcctcagcctcctgagtagctgggattacaggtgctcaccacatgtgattaatttttgtatttttagtagagacagggtttcaccatgttggccaggctggtctcaaactcctgacctcaagtgattcacccactttggtctcccaaagtgctgggattacaggcgtgagccaccatgcgcagtcctgaatattccttaaagttgtaaaaagtttatagaaaatacaacatttgcatacatacaaggccaaagtatttttcctttaaaacaaagacaaagctgacttatattcaagctcttgcaaagcttctcctatattggaacactctctaactttactatgaacaacaatgaatttctgacctcaaccagtgctagttttggatgtttacaaaggcccaacagagttcataatttaaaacaaaggaaaggaaagtgacatgtgttgcatcatgattcctgggggttcgaacctcacagctgtgtgtgttggaaggagggtgatgaggtcattcagttgaataaaccaggaaccaataccaccaagaggaatgaacgcatcactgagcccagctgtcctgatgcgcgtgaatgggggcccgtgggctggggcagagctgcccgtgacccccggacacggacccatgaagggagcatctcaaatcgcccaggtggggtagacctgggcccgctgggactcaccagcagccatggtgaagacactgatgctgaggacacatcagaaagggcctggggaaagctgactcgcaggtgagaagagcaaacatgtgctatttttcaatgatgaagcattattttatgaaggactttaaatatggatgtattattaatttattaaacattatacatggacgtttgaccatttcagctgtatttctataagtttatatgttcaagttggccaaacacagtttctctggaatcttttcattggcaaaatggcccactgctttatattgggcatgtgtggaaggtgagtggcgtgcatgtgtgtatatctctgtacgtatggactgattgagacagggtcccgctctgttgctcaggttggagtgcagtggcacaatcatggctcactgcagcctcaacttcccaggctgaagggatcctcccacctcagcctcctgagtagctgggactacaggcacatgctaccatgcctggctagttttttttttattattttttatagagacagagttttgccatgttgcccaggcccacctcagcctcccaaagtgctgggattacaggcgtgggccacggcccagccttctggggcatttaaatatgaaataaagttattaatacgctcaaggcaatttgccaccacacccacctgtaagtgataataatgtatgtggtttgcaaagccacagtgcttatcaaccagaaagcagaagcgcctcttctcttcaagcagagcctctttgcaaccatctgcaatgaatttctggatttcactctgacgagaagtaacggtctccacatactaaaaaaaaaaaaataataataataataattatataagcatgacatgagcatcagatagcgtgcagcctgacgtttatcttctgccatctttacacctgctttatttgaataatagagtaaatacatgagaggaaagaatgctgtaacctgacctaagtagataccatcgttctccttgaggtccctgactcgtgtgcagagagaagttgcccaagggcttgacattcccacggggcaatttgcacaaatattactttgtacttcagagatatgatcgtgtcctactggaaagcaccacgggctttggaaccagaaagttccaggttcaaacccagttccaaatgccaacaataggtgatatgctttggctgtgtccccacccaaatctcatcttgaattgtagctcccgtaattcctatgtgtttggggagggacctggtgggaggtaattgaatcatgggggcaggtctttcccatgccattcttgtgatagtgaataagtctcacaagatctgatggcttcataaagggagtttccctgcacaagctctcctttgcctgctgccatccatgtaagacgtgacttgctcctccttcccttccaccatgattgtgaggcctccccggccatgtggaactgtgagtccattaaatctctttcttttgtaaattgcccagtctcggggtatgtctttaccagcagcatgaaaatggagtaataaaatatgatttaacctaagcctcattttccccatctgtacaatgggaatagtaacactgatcatggagagtcccttcttctttcagagccaggataaaaagcccatgttttggcaggaggtcactgattaattatacttaactcagggaaactctacagccttcagctctcagtcaaaatgcttatttttaaaaactgatagattatatatttatagggcacatgtgataatgatcaaagcagggtccttgggtggccatcacctcaaattcttattgtttctatgtgttggggacattccaagacctctcttctaactattttgaaataatgcatcgctgttaactatagtcaccctactctgctattggacactagaacttatttcttttatccaattgtatgtttggacccattaaccaacctctccttcatccactccccagtcaacacaatgaccatcctcagctatctagagaatgacaggtaaccatcattctactccccacttccatgagatcaacttcaaaacttttttttttttttgagatggagtctcattctgtcacccaggctggagtgcagtggcataatctcggctcactgcaacctctgcctcccaagttcaagcaattctcctgcctcagcctcctgagtagctgtgactacaggtacctgccatcaccccagctagtttttgtagaggcaaggtttcaccacattggccaggctggtctcgaactcctgacctcatatgatcctactgcctcggcctcccaaagtgctgggattacaggcgtgagacaccgcacccggctaacctcctcttaaactgtgcaaattgtcaacaacaaaagaaaacaagatattgttgaaaagctcacctcaatttctttgtgttcatatttgagtgcgtttcggcttccttggcttttccttctgatcttcttcaactcagcttgggatttctccaaagactctaatttattcttgtgttctgtttggtatctttttagagttgcctgtaagttaaatggctgtgcttattttactgtggcaccacacgaattgtcacacagtttgcctttactcacacttccactgtgtgtggctcaacggggccctgacaccctcacttcacaccatcctcacactggctggggcccccacacccacaccagttcacaccatcctcctgctggccggggtcccatgcccacacttcgcaccatcctcatgctgaccagggccctcatccctcagttcacaccgtctgcatgctggctgggaccctcaccctgcagttcacaccatccacacactggctgggaccctcactcatttcacaccatccttacactggctgggaccatcaccccgcagttcacaccatctgcatgttggctggggacgctcaccacacagttcacatcatcctcacactggccggggccctcgctcatttcacaccatctttacgctggctgggactgtcaccccgtagttcacaccatctgcatgatggctgggaccctcactctgcagttcacaccatctgcatgctggctgggaccctcaccccacagttcacatcatcctcacactggccggggccctcactcatttcacaccatccttacgctggctgggaccctcaccccgcagctcacaccatctgcatgatggctgggacccttactctgcaactcacaccatctgcatgctggctgggaccctcaacccgcagttcacaccatccacacactggttagagccctcacccctcagttcacattgcccccttcatgcaactttaatgtcttggctttgttctaaaggttactgtttaaatgaggagcccccgaccagaagccaagtctctaaggacatcttctctttcttttattccttctttcctcaaaggctttttgatgctgggtggttaactttcttctgccacccaaagtctcaaagttccatccaaagcacttagccaccaaggtggttgcagcaagctgagatcgcgccactgcactctctgcctcccgggttcaagtgattcttgtgcctcagcctctccagtagctgggattacaggcgcacacaaccacgcccggctgtatttttagtagagaccaggtttcaccatgtcagccaggctggtctcgaactcctgaccttggatccacccgccttggcctcccaaagtgctgggattacaggcgtgagccaccacgcccagtgaacacagggtcttaaacggacccgcgtcagaattcaaatccttgttttccctataatctgtgaagtgcagataagaaggatgtctggccggcatggtggctcacgcctctaatcccagcactttaggaggccgaggcaggtgcaccacgaggtcagaagtttgagaccagcctggctaaaatggtgaaaccccgtctctactaaaaaatacaaaaattagccgggtgcagtggtgggtgcctgtaatcccagctaattgggaggctgaggtaggagaatcgctggaacccaggaggcggaggttgcagtgagccccgagattgcgccactgcactccagcctaggcaacagagcaggactccatctcaaaaaaaaaaaaaaaaagaatggtgtctatgttttggagtttctgaaggcatagcaattagataatgtatgtaaatcacttggcatgaaatgcaccttagcagctgtccgggtcctgtggcctcctgccgggagggtgcagccaggcagcagtcctcacgaggacgacaagggagggatgattccagggcaactcgcacactcactgccacatgggggtctgggtgagcaggaaggggactttgggtggcaggagaaagttaagtactctatagagcaagggaagatggcaagagccctcaataccgggtctgtagggccaccctgaaggggacctggataaacctgctgaaatggacaaaagtggatagagaaggggcgccatgcaggagcggtctctgcagatgggccagggcacaccgggagccccggacggtgctctcccgcacaccacccacagcctgaagtgctgctggcttaggaagtgttatgtctgcatcagctgcagcgacagaagcacaaatgtcctacagcgtgaatgtattctgtgaagacaatgctttctggaagcagtgtgatttcctgcaatactttttcctatgccttttttttttttttttgagatggagtcttgctctgtcgcccaggctggagtgcagtggcgcaatcttggctcactgcaacctccgcctccccggttcaagccattctcctgcctcatcctcccgagtagctgggatgacaggcatgcaccaccatgctcagctaatttttttttgtattttgagtagagatggggtttcactatgttggccaggctggtcttgaactactgacctcaagtgatccgcctgccttggcctcccaaagtgctgggattacaggcatgagccaccgcacctggcccctatgctttctaataagatcccaagtgttagcgaaaaccggcccacacagcccaaagagagcttgtcggtttcatgcatctgggcatcatcaacacggagcttctctcctgtctgctgctgatgagtcaacagtgggaacgagttctccccaggctgggaggtcaggcagcccaaggctggggctggaggaaaaccatgcacttacgttcatatatttcacgtcaagttctatcttcttctccagctcatggataatctctttgtggaattttttaaactgttaacaaaaggaaataaattcataccaggtttgagattttaagcaaaataagttctaaaacctgaaatgagtgtattttgtaaatagaaacacagatcacgtacattttcatcaagactctcgttgagtttcttgtgggtacttgaaatctctatgaggacatgtcc

SEQ ID NO: 6957 - DNA, 561 bp, Homo sapiens
ttttgtctacatagggttttgctatgttgccagtttggtctaaaactcctgggctcaagtgatcctcctgccttggcctcccaaagtgttggaattacacagacatgagccattgcacctggcttcaaagacattttgaatgaagtttcaaaagctagcattcctaaaccaaatcatgccaatgcagtctacaatgaggcaggtctacgttcccagactcctcaaggctcacgcgtaggtctggggcaggcacatcttagaagcacatccgtttcatatcatcaagacactccacacctgggcaccactcacagctgaactaaggccccggacacaaggtataggggcctggctccttcgccccaaagcaagacagctcctggagcgaggggtgcagacaccaccacccagcctcctccccttcacccacaggtctcacaccagggcgcactaacctcagccaacccagcccgggagtgatgtccagccgcgctgctccccaccacgccatcacctcaccttgtgttattctctgcatggcttctagtgtcagtgtttttg

SEQ ID NO: 6958 - DNA, 356 bp, Homo sapiens
atcacagtagctaactctaggaataaaaaatgatttatttttatcgaatccccagagtaatctgattatctgtcaggcacgagagataaaggctatttcttttttctcacgttagttcttacaatgttttggaaaatactaacgccaggggaacccgcagcaggaagagtgctcagccctgcctctgctgggaatacaccagcccctgaaaccaagcacagtcacatgatgggcaggatgctccaggacagagaagcctcaccgccgagggcagcaatcacgcccccgggtttgcaatcatatctctgcagtgagtggcagtgcgccagctctctgccacctttctacaggtgaca

SEQ ID NO: 6959 - DNA, 1062 bp, Homo sapiens
taaaatttgccctatttaagctgaagcctggataaactgctgagccagattattcctgtgattggagtttaattgctgtagaacacttgttgagaacacattttttactttttttctttcagaattattcctcaatcattgttctctaatgaaaacaccgagaagtaaatctggtgcttcttagtgtaaatatgtttttctttttaaaaagtcattttaaaacaaagatgagagaactataaagtaaggggaaatatcattttatttaaaaataattattcaatgatagataatggagatacagaatgaatcattgggttcataggtatgatttgtgcagccagtcttagaggaaatacatcattttaacattattcccacaaaatgttaaagctcaatggtttgactatgagagtcaaacaattactatttgaaaatctcttatgacatttttataatctactctgtttttatttgcatgattatgcttatgtgatgaaccatccatgattctgatattgtatttctttccagtattaacatgtgtattgtgtggccaactctgatttgtacaccgtattattgttgtaatgattcaactgttcctacatttaattgcagtttaattattatgccttttggggttaaatgatgtgaagtgtttccacctactgataaataccatatgaaaacacgactaaaagactgatttaagaaacttgttatttttaaaaatatgaatttcaaaagaaatgttctcaaagacacatgcatttattttaaattcaaaaaattcttatgaatttattattgcttgtactttaactttttttattgtagacaatcctaagtgaataatgtctcatgggagaacacatgatatgtgcttgtatttgtgtaatctgatcatgcactcaatggttggaaaaggcactccagtgctaagaaaataaccagaagccaatatatcgattcttatatctcggtttatgttaccaactgaatatggtgtaatgcataactttttccagtaaataaactggttattttttgttcatttca

SEQ ID NO: 6960 - DNA, 1062 bp, Homo sapiens
taaaatttgccctatttaagctgaagcctggataaactgctgagccagattattcctgtgattggagtttaattgctgtagaacacttgttgagaacacattttttactttttttctttcagaattattcctcaatcattgttctctaatgaaaacaccgagaagtaaatctggtgcttcttagtgtaaatatgtttttctttttaaaaagtcattttaaaacaaagatgagagaactataaagtaaggggaaatatcattttatttaaaaataattattcaatgatagataatggagatacagaatgactcattgggttcataggtatgatttgtgcagccagtcttagaggaaatacatcattttaacattattcccacaaaatgttaaagctcaatggtttgactatgagagtcaaacaattactatttgaaaatctcttatgacatttttataatctactctgtttttatttgcatgattatgcttatgtgatgaaccatccatgattctgatattgtatttctttccagtattaacatgtgtattgtgtggccaactctgatttgtacaccgtattattgttgtaatgattcaactgttcctacatttaattgcagtttaattattatgccttttggggttaaatgatgtgaagtgtttccacctactgataaataccatatgaaaacacgactaaaagactgatttaagaaacttgttatttttaaaaatatgaatttcaaaagaaatgttctcaaagacacatgcatttattttaaattcaaaaaattcttatgaatttattattgcttgtactttaactttttttattgtagacaatcctaagtgaataatgtctcatgggagaacacatgatatgtgcttgtatttgtgtaatctgatcatgcactcaatggttggaaaaggcactccagtgctaagaaaataaccagaagccaatatatcgattcttatatctcggtttatgttaccaactgaatatggtgtaatgcataactttttccagtaaataaactggttattttttgttcatttca

SEQ ID NO: 6961 - DNA, 1331 bp, Homo sapiens
ttctgggagctcataatcctgtgattcttttattttaagttttaaaatacattaaaattttactggttaatcataaaatattttatatttgaaaataggatggcaatctttatttttccaagatatttgttggaaaaaaatgatcgttggtattattttttctttcagctatattccatggtatctttaaaattgttcagaatataggacttttactaaaaaaattcaattgtcagagtctaaaaaaacaatgtcctcaggaatacttcagaaatagaaggtatgcaatcccttagtggggggcaaacacatttcagatttcgtctttatttaaaaggatcttcagtctacaacatttgcttttttcgtgctttggaaaatatccttgtgcagataagttcttctgtttgaaacaagcatgaaacattggtccaataacctaagaatgtggagatttcttgatattctgtattaattaaagttctctacatgtctcaaatggagatcacaaaacatgaaaaggaagaaatgaaatatcttttcttctgggatgagtgtcaattttaatgtataattgtcataatcaatcagccaaaagttacaatctgtccctcagagacattgggggaagctgatggatttccagtaaggaactgtggtgggttcaaactcaggctgccacaaatacattgatatggtaggtaggaagtaggactaaatttgaaagaaacttatgggataaagttcacaattttaaaaaggttgccctccagtttttttgtttgttataaactagagtgatttttaagtaacccttatatttaaggctgcaaaaaatgtacaagagtatgttttcaagtaaagggaacataattcttcaaaaagctgttgaactggagttatgataggttatgacagagagcatgatcagtgctgatactgacaagtacttttttaccttaaaatcaacttctatggaactacaagatcaatctagctcccgagtgacattttccattgtctgtaataatgccctcggatgagttgtgtctaaaattaagttcatctttatttatatgcgaacttaactgccatagtccctaatgtattgcgtttgtaacctgatcgtattatgtttacagctgaaagatttcatctagacatgtctttcgtccttattattcaaagtgtaattgaaagagatatttagtattaagacatgttccccaattgagaattttccagaatattctacttaagaagaagaagagcaattaactgcctttagtgtaagggcgagagtgcatagaaatatgcaatgtaaaatgttt

SEQ ID NO: 6962 - DNA, 127 bp, Homo sapiens
tttttgtatttttagtagagacggggtttcaccatgttggacaggatggtcttcatctcctgacctcatgatccacccgcctcggcctcccaaagtgctgggattacaggcgtgagccaccgcaccc

SEQ ID NO: 6963 - DNA, 1332 bp, Homo sapiens
ttctgggagctcataatcctgtgattcttttattttaagttttaaaatacattaaaattttactggttaatcataaaatattttatatttgaaaataggatggcaatctttatttttccaagatatttgttggaaaaaaatgatcgttggtattattttttctttcagctatattccatggtatctttaaaattgttcagaatataggacttttactaaaaaaattcaattgtcagagtctaaaaaaacaatgtcctcaggaatacttcagaaatagaaggtatgcaatcccttagtggggggcaaacacatttcagatttcgtctttatttaaaaggatcttcagtctacaacatttgcttttttcgtgctttggaaaatatccttgtgcagataagttcttctgtttgaaacaagcatgaaacattggtccaataacctaagaatgtggagatttcttgatattctgtattaattaaagttctctacatgtctcaaatggagatcacaaaacatgaaaaggaagaaatgaaatatcttttcttctgggatgagtgtcaattttaatgtataattgtcataatcaatcagccaaaagttacaatctgtccctcagagacattgggggaagctgatggatttccagtaaggaactgtggtgggttcaaactcaggctgccacaaatacattgatatggtaggtaggaagtaggactaaatttgaaagaaacttatgggataaagttcacaattttaaaaaggttgccctccagtttttttgtttgtttataaactagagtgatttttaagtaacccttatatttaaggctgcaaaaaatgtacaagagtatgttttcaagtaaagggaacataattcttcaaaaagctgttgaactggagttatgataggttatgacagagagcatgatcagtgctgatactgacaagtacttttttaccttaaaatcaacttctatggaactacaagatcaatctagctcccgagtgacattttccattgtctgtaataatgccctcggatgagttgtgtctaaaattaagttcatctttatttatatgcgaacttaactgccatagtccctaatgtattgcgtttgtaacctgatcgtattatgtttacagctgaaagatttcatctagacatgtctttcgtccttattattcaaagtgtaattgaaagagatatttagtattaagacatgttccccaattgagaattttccagaatattctacttaagaagaagaagagcaattaactgcctttagtgtaagggcgagagtgcatagaaatatgcaatgtaaaatgttt

SEQ ID NO: 6964 - DNA, 322 bp, Homo sapiens
agcaaagggaaatgtagagagagatagcaaaatgaaattaggcaaagaatttttcagaaatatggaggaggaggtcgggtgtatgtgataagaaacagactcacaacgaccgcaagttaactgactactcgaagcctagcttttctgggtccatggcagtagttccgaaacttcgctgcacattagaattactgggggagatttatcagctctgacagccaggtgtactctgacctgatgaaatcaggaggtcatgggctgggagcaggcatcattgttttttaatgatcccaggatgttcccttgtgcagcaaagtttggg

SEQ ID NO: 6965 - DNA, 258 bp, Homo sapiens
gccaaggtggatggatcaccttaggttgggagtttgagaccagcctgaccaatatggagaaacctcatctctactaaaaatacaaaattagctgggcgtggtggtgcatgcctgtaaccctagctactagggaggctgaggcaggagaatcacttgaacctggcaggtggaggttgcagtgagctgagattgcgccattgcactccagattgggcaacaagagcaaaactccatctcaaaaaaaaaaaaaaaaaaaaa

SEQ ID NO: 6966 - DNA, 32207 bp, Homo sapiens
aaacaaactttccctactttaaatagtctcacgtagtcttgtggcaaaatttaggctgcctactgagtatccagtgcagtataaagcagtgaagaagttgagttgtagtggcgaatcagaattgacataactgtaagatagctctttaaagaagagcatatggcaagaagacttaagttgtggtcatgtttgtgcttaccatgtaatatttccttggttttacttttcctgtttatagtgatagtgggaactgaagagagaagccagagtatattctaattgtagtaaatggttcttttcattccctcccttcagttgccagaactgattttgctctgaagaagtagtttatcaattggagcttctgaaacatctacttgcctcaactcttccctagacctgctgtgccagatggtctagggattgggttctgagcactttcactttataaaaaaaagcttcataaaggacacttatacccatacctgattaaaaaccactgctctgggaaaaaaatgtaattcaaattccagttctggagcccatcatatacctgggatattgagttaaacacaagtagatataggtaattgtactggcaagaagtaaatgaggcatagaaaatataacacaatttcaaataaggtgtaccacttttactctcatggtatcctctgctccatgttgtctctgcaccccagtgtactgtgggagtttttgtggggttttttgggttttggtttttttggcttatgtttttgtttccatccctagagtataagtttctcatgggcagggactggttgttgtctatttctatatcagagttatcagatacaactcagagaatactgaaagatagttaaatgtaaaaacacattcttctttgtagctgccatatgattatgacctttaggaattctgtcttcatgttacatcttacaccactacttctgttgttttttaaaattgtggtaaaatacatataacatgaaacttaccatctgtttttaaatgtgcagttgtcctattaaatacatttacattgttgtacaccatcaccaccacccatctccaaaactcttcatattgcaaaactcaaactgtagtcattaagctactccccattctccctccccacagcctctggcaactactattctttttgtctctatgattgactactctacatacctcatataagtgattatataagtgaaatcatacagtgtttgcctttgcatagctggcttatttcattttaaagtctaagtaatattccattatatgtatataccacattttccttatccattcatttgtcgatggacatttgggttgcttccccatttgagctattgtgaataaggctgccatgaacatggatatacaaatagctgtttgaggtcctgctttcaatatttccaggcatatgctcagaagtggaagtactagatcatttggtgatgctatttttattttattatttattatttttttcagacagagtctcactctgtcacacaggctggagtgcagtggtgctatctcagctcactgcaacctctgcctcctgggttcaagcgattctcctgcctcagcctcccgagtagctgggactacaggcacgcaccaccataccccgctaatttttgtatttttagtagagatgggatttcaccatattggccaggctggtctcgaactcctgatttcaggtgatccacccaccttggcctcccaaagtgctgggattataggcatgagccaccatatgcggccaaattttttgaggaactgttttctagagtgactgcaccattttacattcctaccagcattgcacaagagctccaatttctccatatccttgccaacacttgttatactcactcgttctggtagttgacaccctaattgagtgtgaggtagtatctcatggttttgatttgcatttaccaaatggttaacgattttgagcatctttagctgtgcttattattggccacttgttgatcttctttgtctatttttaaattgagttgtgttgttgagttttaagagttctctgtatgttctagatattaactccatatcagatatgtgatttgcagatactttcttttgttgcctgtacctctgatgtcatatccaagaaatcactgccaaatccagtgtcttgaagcttttgccctatgttttttttttttttttaacagttctgtggttttagctcttacatttaggattttgatccattttgagttaatttttgtatgtagtgtttcataagggctcaactttattcttttgcatgtggattatccagtttacccagcaccatttgtggaagagtactagtcatgcaccacataacaacgtttcagacaattacagaccatatatatgacagtagtccaatgagattataatgtcgtatttttactgtaccttttctatttttagatgcacagattcaccgttggtttgcagttgtctacagtatgtagtacagtaacatgctgtacaagtttacaacctaggagcaattggctataccatctaggtttataggtacactatgatgttcacatgacaaaatacctaatgatgcatttctcagaatttatccctgtcattaagcaaagaatgactatactgatataggtatattttattgacagatctgagcattttatatacaacagctacacaaaggatatattacccccattcacacataaagaaacttgaagcctagaaagtttaagtagtttttacttgctcaaagttacttggtttataagtggtagagcctgcatttatgtctagttcagtctaaattactatgctaatgctacactatattatctatctttcttacacatggtcagggttatttggttatgataactaatatgtgaaatggtggggataaacactaaataactaaaaatttataaattgaaaagtgctttggaaatgagcataataggaatacaaatcatttgttcaataactgcttggcatttgtctcaacgtattttattatactttagctcattggtgacattttttggtttctagagcaatgttgatcccagggatgatgtatttggatatcctcaacaatttgaagataaaccagcattaagtaaaactgaagatagaaaagagtacaacattggtgtcctaagacaccttcaggtcatctttggtcatttagctgcttctcgactgcaatactatgtgcccagaggattttggaaacagttcaggtaaactatggatggacagtaatagagatacttcttaaaatgaacatctcaatacactaacattaaacctctaaaagacatgttggaaggcatctttttttaagcactggtaatattcaaactgtccttaattgggtgggtttttttttttttttttaggtccccttaggaagaagtagaaactgccatagtaagtaagggcaacatcctttagtctcttaaccatattattaactttttattaggaaaacatctaataaatacagaagtagaaaaaatagtatgaacccctgtatacttgtcacccaacttcagtagtagtcaacttgtggccagcctcatttaatctatattcttaacctattttttttttctttttttctttttctttttctttttttcttttttttttttgagatggagttttgctcttgttgcccaggctggagtgcagtggtgtgatcttggctcactgcaacatccgcctcccagattcaagtgattctcctgcctcagcctcccaagtagctgggattacaggcacccaccaccacgcctagctgattttttgtatttttagtggagacggggttttaccatgttggcccagactggtctcgaactcctgacctcaggtgattcccatctcagcctcccaaagtgctgggattacaggcgtgagccactgtgcccggcccctacctatttctttctagattgttttgaagcaaatcttagttccatctgtaaatacttaagtatgtgtctgtagtgtctgtctcaaaacatgatcatgataccattatgtttttttaaaattgcttaatatcaaatatctctgtcagtgtttgaatttaccgagttatctcataactggtttttactgatattttttaaaaataagattcagttgaggtccatttaccacaaatggttggtaatgatcttgattattcatctgtttcttttttccctttacaattatgggggaatcggaggacaaatagtttagcatgtaaattttcccacagtctgaattttgttgatggaatccctgtggtcgtttattattttctgtttttcttggtcacctgcatcttctataaacaccttatgagatctagaggcttgatcagattgtggtattatttttctttttgtggaatggataggcaacgctacttcataggggataatgtttatctccatgaggagtgacattataatgtctgtcttcttatgatgttaacagcaattttttattattattattatatatatacaatttttttttttcccctgagatggagtctttgctctgtcgcccaggctagagtacagtggcgtgatctcagctcactgcaacctccgcctcctgggttcaagcaattctgcctcagcctcctgagtagctagggttaacaggggttacaggcgtgggccaaccatgcccggccaagttttgtatttttagtagagacggggtttcaccatgttggccagtctggtctcgaactcctgacctcaggtgatctgcctgcctcccaaagtgctggattataggcatgagctactgctccctggcctttttttttttttttttttttttttggagatagagtcttgctctgttgcccaggctgaagtgcaatggctcgatctcagctcactgcaacctctgcctcccaggttcaagcaattcttcagcctcagcctctcaagtagctaggacgacaggcccaccacaccccgctaattttttgtagttttagtagagatagggtttcgccgtgttggccaggctggtctcaaattcctgacgtcaggtgatccacccgcctcggcctcccaaagtgctgggattacaggcgtgagccactgcacctggccaattatcattatcttaatacagtatttcttcagggttataaaataacaatattttattttttcatttaatagctagaaaagatctataaagggaaaattgccctcaccattttctttttaagttagaaaactcagattacatttttatcttgtttcctttgactttaagtcagtactacgtcatgcactgtgctaaaataactacagtacaaccacgtaactcttactgtgtatgaaaaggggtataattctttatagcagtgaggtttggtttgttttgttttgtaagtaatcctccttggaatcccttcaaggtgcttcccggccagctgagaggagcggggaacgaagggtcacctgatactctgatccgccttcccttcttctgacaaagcagtataaatttcttttcctcccctaactaggccctctacttactctgtactagtgtcttgcgtggaccaccctccctcccatctctcattttgcttttagtcccgtcacccagcataccattctccctcctctctgactatttcagttctgtcttctttccctaggttattccaattccatctctgccttaaggctattttagcatttctgtttatgctcttccaaactgaagaacacaaacagaggcttatactgggttttttttttttttgagacagagtctcactctgtggcccaggctagagtgcagtggtgtgatctcggctcacggtaacctctgcccgctgggttcaagcaattctcctgtcttggtagctgggattacaggcgcctgccaccatgcccagctaatttttgtatttttagtagagactgggtttcaccatattcatcaggctggtcttgaactcctgacttcaggtgatccacccgcctcagcctcccaaagtgctgggattacaggcgagagccactgcgcccagctgaggcttacactttttaaactttcgtcttgtcattcagttacaattttttctcttgtaatgcctttgcttttttgacttttcagttactcgctgtgctagtggagctcggtttgtatagactagcactttggattatccacactttagacacataatctactcttgacacaagcgggttagttaactacacttcctcaccccactcttttattttgaaaagtttcaaacctacagaaaagatgaagaagaggtataattatcacctttatgttatattctttatgcggttttactaattaacattttgccatatttgcttatcttgccatatgtgtgcttggtttttggtttattttttttttaagttttgtttgtttgtttgtttgttttttgtttttttgagatggagtctcgctctgtcgcccaggctggagtgcagtggcgtgatctcggctcactgcaagctccccttcctgggttcacaccattctcctgcctcagcctcccgagtagctgggactacaggcgcctgccaccaatgcccagctaattttttgtatttttagtagagacagagtttcattgtgttagccagggtggtctcgaactcctgacctcgtgatccacccggctcggcctcccaaaatgctaggattacaggcgtgagccaccgcgcccggccttttttcttaagttgatagtgaagttgcaaacaggacgcttcaccccttcatacttcaacatatatcttataagagatcatatatcagaataaggcaattttcctacttatgtatgatacagttatatccaagtaatataataacgatttttaatctctaatattcatcagtatatattccgatttcccaaaagtggtctttataacttatctctctatcccaatctgatactcatgaaggaatcacaaggatttggctgttagctctttagttgccttttatgtaaaataatctccctaacttgtgacttgtatcgcactgaaatttttaaagaatccaggccagttgtcttgcagaatgtgttttttgatttgtgtgattgtttcctgatgattagctttatgttaaatgttgagggggtgggggcaataaaactacataattgatgttttgtgtttctcactgcactgtattgggaggcatgtgttatccacttaattattaagtgatattaattttgatttcttggtgtcttaacagatctctcctttataaagggtaccttttcccttttgaaattagttgattacatgtttgaaagtttgaggagttgaatatggtttgaaagtaaatagaacggactggtgtaatttccagtaatgaaacaagctgatttttaacaaataatatatttgattttaaacttactgtatacaaatttttacttgtgtaaaatataatagagatcagattatttgctatgtagaaaaggtttttacaaaagtataaacagacagttcttgcatactttaaaatgtcatttcttgcttagaacaaatacacttaaattctctatatacattattctgtatatacaaaatcaggtattattgatagtttccagcagtgcctgagttttagcagtatgagttctcatttttgtggtatgtagtgatggtgtcttttcttagattactcaagagattaactctagaacaagttaaacctttctctcttcacttgggaaaaaaataaatttaagagtaactagatctgatctttttactatttataatccaaaatttaagcaaaatgaaagaaataaaatagtgattgtaacatccacataagagtgagatccaccacctcatcttaatagtatctttaattggattcaaaatgcatgcatgtgtcataccacctgaagcaaccatccttcctggagccgtactatccatcaattacaccactagttttgtggcagttctttgccgctagagtactagttttactatgaggctcactctcttaccccactacattctacagggaaagcacattctttttttcctactttttccatgtaattgaggaataaaatctcggttttatatactgttgtttgtggtcttgttgcttttttttcccctgaaaaatatagttgtacatattgttctgtgaatgttacatgttacatgttttatttcattcatttcttaggctttggggtgagcctgttaatctgcgtgaacaacacgatgctttagaattttttaattcattggtggatagtttagatgaagctttaaaagctttaggacatccagctatgctaagtaaagtcttaggaggttcctttgctgatcagaagatctgccaaggctgcccacataggtaagtactaattacacattgaaagtatatgttgtaccatgtatatactaacagaaataaaatttttactagtacttacatacaaaagtggagtatatcactgattactaaatacctgaaacagaatgatttatatactttgcataccttactgctgtggggcttttttttgtttttgtcagttaacttttagttccttctactctgcctgatctcttagccattttattatattatactcttacagtctctttcttcctttcctttcctttcctttctcctttttcttttcctttctctttttttttctttctttcttttttgaaagagacaaggtttctctttgttgcctaggctggagttcagtggcatggtcgtaactcatagtaactttgaacttgtgggctcaagcaatcctgctgcctcagcctctcaaatagctgggactacaggcatgtgccaccacacctggctaatttgtaaatttttttagagatcgaatctcttgttgcccaagctggtctcaaaactgctgacctcaaaatcagtcgtcacacctcaacttcccaaagtgttgagatgacaggcgtgagccactgcgcctggcctactcttacattcttttacagaagattattcctgaggaaataaaatggcattttgcatatagctacaggtgttatttataaatttgccctttatcttagaacttgagtgattataatagtgtaaatacagtaagtttagaagatgacaaagctatggtagtatttcctatacaaatgaaataatgacttttaaaatagcattgattattgtcattatctttaaggtatatttgtatacaaaacatatcaaacctattgtaaaaaaagattttacccccgtccgggaggtgaggggtgcctctgcccggctgcccctactgggaagtgaggagcccctctgcccggccagccgccccgtccgggaaggaggtgatggggtcagccccccacccggccagccgccccgtccgggagggaggtaggggggtcagccccccgcccagccagctgccccatccgggaggtgaggggtgcctctgcccggccgcccctactgggaagtgaggagcccctctgcccggacagccgccccgtccgggagggaggtgggggggtcagccccccgcccggccagccgccccatccgggaggtgaggggtgcctctgcccggccgcccctactgggaagtgaggagcccctctgcccggccaccaccccgtctgggaggtgtactcaacagctcattgagaacaggccatgatgacaatggcggttttgtggaatagaaaggggggaaaggtggggaaaagattgagaaatcggatggttgccgtgtctgtgtagaaagaggtagacatgggagacttttcattttgttctgtactaagaaaaattcttctgccttaggatcctgttgatctgtgaccttacccccaaccctgtgctctctgaaacatgtgctgtgtccactcagggttgaatggattaagggtggtgcaagatgtgctttgttaaacagatgcttgaaggcagcatgctcgttaagagtcatcgccactccctaatctcaagtacccagggacacaaacactgcggaaggccgcagggtcctctgcctaggaaaaccagagacctttgttcacttgtttatctgctgaccttccctccactattgtcctatgaccctgccaaatccccctctgcaagaaacacccaagaatgatcaattaaaaaaaaaaaaaaaagcctaaaaaaataaaaataaaaaaagattttacaagaaaaacattgacaaaacaaattgtttgacttgaaaattgattaagggcttctattagaaatagttaatgagttcattactgataaatatacatgcctgtcatatggaagttttactttgggacttgttataatatggattaatgttgatttgcaatcgtttttcaccaaaatgtcacagtaagatagtattttctacaatccaaactgtattaaatatagtcatgggttgagtacacatgtggtttgtgggggtgttttgtttttgattaccaggaaatgattgggtgagaggtaatactatataaatgagaaatttctagcaagttatagtcttaccactcattcataattagggaatatacttattcacttagcctaggcaacttttagtccttttgaaaggccttttatattaggtgaacaataaaataaaattttaaccttgtttttaattagtgataaaaacagccaactttggggtcatttgttcatgttactcctccttagttttagacaattttctaaattatttggaaatcactggttttctttggcaagtgaaatgtcaaaagattatggtcttgaaatcagatccttatacctgatcaacagctaaactagtcttatttttttaactagctgggcatgggggtggactcctgtagtcccagctgcttgggaggctgagtcaggaggatcgcttgagcccaggagttagaagttccagtgaactgtgatcatgccactacattccagcctgggtgacagagtgagacctcacctcattaaaaacaaaaaagaaagaaactctactttgagtgcccatacaaccattctgtttttcactctcagtacagtattcattgaattacatgaatctttgtgttacaagattttgcccaactgtaggctaatataagtgttctgaacacatttagggtaagctaggctaaagctatgatgtttggtaggttgggtgtattaaatgcattttcagcttatgatattttcaatttatgatgggtttattgggctgtagccatttcataagcaaagagcgtccgtacttgctgcagagaccatatgcttcacaaagcctaagataaatttactatctggccctttacagaaagactttgctgtcctctaatgttagaacaccttctttttatagatgttgaagaatatcctacttttgaagtgtagtctaagatctaacttttttccctctatgggctgttccctgattatatagtaaaaatttgcttaatacctgctttatattccattcatataatttataaatgcctttgtgtaccttttttccggagtttaaaattccttaaataagggactatcttaaacagtgaatatccctcagtacttttacacatagaaagcactctcagtctatccattggatgaattaatggttaataatgtattcctcacatcccttgttttgcatttatgcatgtgtctcaccagaaattggaaagtctctttggtagaaaatgaccataaactgggattctagctccttctcaggttgctaatcctgtactcatttgtgtgtgcaaacttttgctttactaaggcttccattacagaaaaggaagaatatataaaaatttagcttattcgtagtttatcattttcagaacttaataaattcatgctttggcttcagcatgaattactatctaaacagataacactagaagcagcatcgtatactacaaagagattaagctgtgagcccagacagattcaactttaaaataccatttcacctaataatcttgatcaagttaacttttttattgctaacattctatgacttacgggtttcgcattataaaaatggcaaatgtatgggtgcagcaaaccaacatggcacatgtatacatatgtaacaaacctgcacgttgtggacatgtaccctagaacttaaagtataatttaaaaaaaaaaggcaaatgtagtttacattaagtccataactaaaatgtttacaaaactaagggataaatcctttttttaaatcgtttttaggtacgaatgtgaagaatcttttacgaccctaaacgtagacattagaaatcaccaaaatcttcttgattctttggaacagtatgtcaaaggagatttactagaaggtgcaaatgcatatcattgtgaaaaatgcaataaaaaggtacgggctgtccagttttgtttaattttgattacatttaatggatttagaagaaattggtttttttggttcatcctcacaagtcaccctatttttattttctcctactttggtatagtggtagcagagaagtagtcaatatgataactaatagaaggtttggcaaggaaggaaaaaaagtagtgccaaaggggctaggtaaataagataaaaataggtaaataagagtgaataattttaaaagtcataacgtgatagcacattctcttatataagttacacagacactttccatctctaccgagaaacaaattgccattgaacccctcaaagatacagagctgatagaggaaaacatttctcctgtcatgtccaggattacttgtcaagaccaaaacatttgctgaaaccattaattactttattgaaccacataagatttcttttagactagtcaagtggcccataagatttcttttatcacctatgttataaaaccatttattttggaaacttattagcagttctttgagagagatgattcacacgcattatagtaatgaataaggtgtatctttgggagctcccaaaccctttcaccctcaagtcacttgtgttgttttggccttatgcaccacttagagaagtcctgaagtttaaagattgagattgtgggctgtaaagccatactgcctgccacctgcagctcctgagacctgaggcaagttacttgacctctctgtgattactagttttcatcttttaaggttcagtagtacacacttgagaaggttgtaaggattcggtatgtttttacttgtgcggcacttagtatatattacctggcatctgaattacccaacaaatattagctactcttattgttattgtagttctttggtttgtgcataggaaaccaccttcgtgggaacaacagtaaacatcaaacaggtaataatggctagataacaatgacagaaaccagtcaacaatttaccatttgcatattattaatttcagcatttaaatcagctgataggattatcttgattatgctcattgtcatgtatttgtttatacttaaaaattcagataagtcttaatatcatttaaaagtttgcttggggtttttttttttttcctgtggattttaatagaacatctggtaactttgtcttgtttattttaggttgataccgtaaagcgcttgctgattaaaaaattacctcctgttcttgctatacaactaaagcgatttgactatgactgggaaagagaatgtgcaatcaagttcaatgattattttgaatttcctcgagagctggacatggaaccttacacagttgcaggtgtcgcaaagctggaaggggataatgtaaacccagagagtcagttgatacaacagagtgagcagtctgaaagtgagacagcaggaagcacaaaatacagacttgtgggtgtgctcgtacacagtggtcaagcgagtggggggcattattattcttacatcatccaaaggaatggtggagatggtgagagaaatcgctggtataaatttgatgatggtgatgtaacagaatgtaaaatggatgatgacgaagaaatgaaaaaccagtgttttggtggagagtacatgggagaagtgtttgatcacatgatgaagcgtatgtcatacaggcgccagaaaaggtggtggaatgcttatatacttttttatgaacgaatggacacaatagaccaagatgatgagttgataagatatatatcagagcttgctatcaccaccagacctcatcagattattatgccatcagccattgagagaagtgtacggaaacagaacgtacaattcatgcataaccgaatgcagtacagtatggagtattttcagtttatgaaaaaactgcttacatgtaatggcgtttacttaaaccctcctcccggtgagtatcaagagagtttagcttcttagtaataaagaataatttatagtaggcgtcaacatgtttaagttcataaaattaatgttttcactttaaatgagtctaatttgctgggtgtggtggttcacgcctgtaatcccagcactttgggaggccgaggtaggtggatcacctgaggtcaagagttcaataccagcctgaccaacatggtgaaaccccatctctactaaaaatataaaaattagccaggcatggtggcatgcacctgtagtcccagctactccctgtagtcccagctactccggaggctgaggcaggagaatcgcttgaacctgggaggtggaggttgcagtgacccaaattgatggccactgcactccagcctgggtgacagtgagtctccatctcaaaaaaataaaataaaaaaataaatgggtctaaattaaagtagcctgagaagggttcttaacaaatttaggacttctcaaaattaatggaaacacagacttgtttgaaaatggggttggaaaataaaaatgtgtttttatatctgcattttatttatagggcaagatcacctgttgcctgaagcagaagaaatcactatgatcagtattcaacttgctgctaggttcctctttactacaggatttcacacaaagaaagtagtccgtggctctgccagtgattggtacattgctttggattttcattcctattatactaatgtttggtttgcttctttaatagattgctttatgtttttctaaaccaagagaattttgtttgaagtttggaatatagaataaaaactctgggtcacaatagagaaatcatattaaaatagttacttagtctaaacatggccttttgttattcagaagctgacttctgcttctattaccttgtatcatatctttgacatccctgcaccaaagactacaagctgagactgggggacagtgactcacacctgtaatgccagcactttgggaagccagggtgggaggattgcttgagctcgggagttcaggaccagcctaggcaacatagtgagacccccatctcttcaaagaagattttaaaaattacccaagtatggtggcgcacacctgtaatcccagctactcggaaggctgaggtgggaggatcgctggagcctgggaggttgaagctgcagtgagccatgactgtgccactgcactccagcctgggcagcagagcaagaccctgtctcaaacaaaaccaaagattacaagatgagactgaaaagtgtaagctacttatgaaatttattaggttttagcttacctagattgaattctgacaccgattaaaagggtaaaaaattaaaatggttttcttaagtttctaattgtgaaagtatagaggccattatgatacattgatttaataatttttacttactcatttcaggaatatgtcaagataagggggtggtattttgtcattgaatctaggaagagtttgttaatggatttttagaggacaagctttcacctgtttggtaactctgagagaatagaccaagtcatagtatttatctattgttttaatattagaagcaacctttgctggttctctccagcagtagaggaagatctttgtcttttttttttggttcaatgagactcatccttttactatagagaacaagttattgacttaatagtcataggtttttttgttttattttaggtatgatgcattgtgtattctccttcgtcacagcaagaatgtacgtttttggtttgctcataacgtcctttttaatgtttcaaatcgcttctccgaataccttctggagtgccctagtgcagaagtgaggggtgcgtttgcaaaacttatagtctttattgcacatttttccttgcaagatgggccatgtccttcaccttttgcctctcctggaccttctagtcaggtaattgcacagctttctttctaaatgatgagatgtttacaaataaattgtgtttcctggaagtcgaagtcacaagcatatgtgcatccacttgatatgtttacctaacagaaacacacaatatgatgtcagtgagttccatttaatattactgcatggcaatgaatagtaattattggctctttaaaaatgtaagagaattttctctgttcggttacatgcagtagcttaattataagtttactgttaagtagattttttcctattttgaaggttttttaaatagtcttagatttttttaaaaaattacaagtgtaaaaaattataatgaaatccgcctctgatcttcattccctttcccaagaagcaaaatagtttagtttgtgtgatcagtccttccataaatgtatgcctgtatcagcatatgtgcatgtcctttttatgcaagtagaagtatacatataccttgttgctgtaaaacaggtaatgttttatcctttacaggcttatgacaacttaagcttgagtgatcacttactaagagcagtactaaatctcttgagaagggaagtttcagagcatgggcgtcatttacagcagtatttcaacctgtttgtaatgtatgccaatttaggtaagaatttaagtttttcagaattctgttttgatgtatcatattaaattgtgaagtcatttaggtcaagtgatgaaatataatctgatctgaagtagaaacaatttcccataaaacctgttgtgaattttatctgaacatggcactttcaccttttactttgtttatgcatgtgtctttgtggtagacacaggtcagaatctgtgttttgatttttttttttttttaatctcctaatgcagtggtgccaaatctggctgcttttggaaaatactggtttctaggcctcttctcacactgattgaatcagcatccccaaagctaatgtcagggaatccatgttttcaaaggggtccccaaatggttgtgatactcaccaaatttagatagcagacttggtctgtacataagtttttgtttaagtaaactacaattatggataatataaatactcgcttaaaatattaatttaggggccgggcacaatggcttatgcctgtactcccagcactttgggaggccaaggcaagaggattgcttgagcccaggagactaacctaggcaccatagggagaccctatctctacaaaataaaattttaaaattagctggatgtagtggcatatgcctgtagtcctagctacttgggaggctgaggtgggagaatcacttgagctaaggaggttgaggctgcagtgacccgtgattgcaccactgcactccagcctgggcaacagaatgagaccctgtctccaaaaagcaaacaaaccaaaaagtcatatatccaaaatgaagttctatatccaggcgtacctgtcgtttcaggttttttttctgtgatcttacttaatcaccattggatccatggcccttttaacataagggagattgtacttttcatttgtctatttagtttgtcttcttttcccttgtcttttccgtaattgcagatatttgggtatttgtagatgagaaagagaatatttattacacagacaagcataagtggaatctgtatttcaaacttaaaaatgccaaatttagacattcagaagaatcctattctgttcaactcttttagatattgcctgttcacaaagcacacatcattgttccataatgtaacctacttgtaaaattttcctgctgaaaacaaatactgtagggcctgtaaaccttaatatgaagtccttaagatcagatatgcattgggattgagaattgtttggatttaagaaaagcaaggcagtgcatataccaacatctctatagcagggtctgagacaacaacttacaattgaacacattaatatttctacagtaaaatatgaatatttatactgaagggagaaataaagactataagtagcctttagtcagtttgggctaggttatcccaccaaccacattttgacagcaacttaatgaaaaactttgttgggctgggcgaggtggctcatgcctgtaatcccagcactttgggaggccgaggcaggcggatcacctgaggtatggagttcaagaccagcctggcaaacatggcgaaaccccatctctacttaaaaatacaaaaattagcagggcgtggtggcgggcatctgtagtcccagctattcgggaggctgaggcttgaatctgggaggcagaggttgcaatgagccaagatcgcgccactgcactccagcctgggcaacagggcaagactccgtctcaaaaaaaaaaaaaaaacttgttataataatagcttttgggccaggcgcggtggctcacgtctgtaatcccagcactttgggaggccgaggcaggcagatcacaaggtcaggagttcaagaccagcctgaccaacatggtgaaaccccgtctctactaaatatacaaaaattagccgggcgtggtggcacatgcgtgtaatcccagctactcaggaggctgaggcagaagaatcgcttgaacccagaaggcggaggttgcagtgagctgagatcacaccactgcactccagcctgggagacaaagcgagactccatcttaaaaaaaattaaaaattaaaatagcttttggaatcttaggatttcagataagaggttgtggacctgtttttattatgtttttgggaatatggcaataaataagattgtctaatgggatatagaagcaaataatgtagttgccataaaatatgttaatagctataatagggaaaatgcaaagtgcatcacggggggcatggtacctgaagggatttggggagtgcagaagacttaatggggaatgtaacgtgggaattggttagttgagctttccatctagagtgtgaacagcagatgcaaagacttgataaacttggcgtggcttattggatgggatgaaaattgtccagtctgactagaattgatgtaagatgggaatggcaggagtttctgatcatgcagttctaataggccttgtgagagagactgaggcattggatgagccattgtagggttttgaacagataataccatctagaaagagcactgtggccacagtgtggaatgtattgcagtggagtaagatcccagagagtgttaaaatgatctatagacataagatcattgtgacctgtactggagaactggcagtgagggagatacaagtggacagatagatatatggtgctttttataagaagtggaatcagtggatttggtgatgggatattcagagaaggaggggacagggaagagatgtgaagaatgatgcccaaaattctaacatgaacaactgtgagtggatagtggtaccatttactgaggggaaacacaggaggagaaacatgtatgtatgggaagaaaggggtgagttcagtttgggtagattgagtttgagcctgtgtgacacccaaatggagatatacagtagaacagtaagtaatttgtcttgaaatgtttttgaatcatctgaatgaagatatctagaacattaaagccgtgagcgtgggctagatcatccagggaaatcagtgtgagaagatagcctggcatgggaacttggagaaacatcagtttttaagagacaaggaggagtcgcaaataagaacaaaaagaggtagaaagaaaatcaggaatccagggaggaagaagtggttatggtttgagaactgctccttagcttattactgtgaagaggggccaaaaccaaattggcatgagttgaggaatagaaaatgagaaagtagagagaccaaatgtaggtatctttttcaagaagtttggctgtagaggaaagaagagaggcaggcaatttataaaagagtttttgcttctcatttaatgtagttattttgttgttttcatcctccttacaaatgagggttgcagtgttggttagtccctttagactctccaggctgtagaaagtgttcgtcttctggtcgggcgtggtggctcataatcccagcactgtggaaggccaaggcgggcagatcatgaggtcaagatatcgagaccacccaggccaacatggtgaaaccccgtctctactaaaaatacaaaaattagctgggcatggtacgtgcctgtagtccagctactggggaggctcaggcaggagaattgcttgaacccgggaggcagaggttgcagtgagctgagatcatgctactgcactccatcctggcgagagagcgagactgtctcaaaaaagaaagaaagtgttcatcttccttacagtgagccggtgtgattggaatgtcatagtcatagtcactgttgaacaatgttaatacttatactcaatgggtgagttttcttttctagtaaaataattctctgaatgctaagtaaaagtgataaaattacaaatcaaaatttttctgatcataaaaattatagacaagatattttgtataactacttgttttattcatgaagcccttgccatcttaattttttcctcatatttttctccctctctttcttctccccttcactcctttttgttgtaggtgtggcagagaagacacagcttctgaaattgagtgtacctgctacttttatgcttgtgtctttagatgaaggtccaggtcctccaatcaaataccagtatgctgaattaggcaaattatactcagtagtgtcacagctgatccgctgttgcaatgtctcttcaagaatgcagtcttcaatcaatggtaaatttgaatgctccattctttacactagttttgtttgtttgtttgttttgagacagagttttgctgttgttgcccaggctggagtgcaatggcgtgatctcggctcactgtaacctccgcctccctggtttaagccattctcctgcctcagcctcccaagtagctgggattacaggtgcccaccaccacgcccggctaattttgtatttttagcagagacggggtttcgccatgttggtcatgctggtctcgaactcctgacctcaggtgatctgccgtcctcggcctcccaaagtgctgggattacaggtgtgagccaccatgcccagccctctttacggtagtttttaaatgctgctgggcatatatagtactaagagtctggaggaagatttttgctttggaatattttagccctgtaccttttttacgtgtttaatgggggtcttttttctgtctccttgtgactgaggttgataccatgtttatgaaatagtttaagaattaactttttaggctgggctcagtggctcatgcctgtaatccctatgctttgggggaggccaaggcaggagaatcacttgagctgaagagtttgagcctgggcaacatagcgagacttcatctctactaaaaattaacaacaaaaaagttggctgggtgtggtggtgtgcacctgttgtcccagctactcaggagactgaagtgggagaatcacttcagcccaggagatcaaggctgcagtgagctgtggtcatgccactgcactccagcctaggtgacacagtgagaccctgtgtccaaaaaaaaaattaactttttatatttagattttgtatttttatatcttggtatatctatctgatcattataatgcataatgttactttcttcgttgtgcttaggtaacttgatttaaaatgttatttctctaaaataaaacatttggccagacatagtggctcatgcctgtaatcctagcattttgggaggccgaggtgggtgggtcacttgaggtcaagagttcaagaccagcctggcaaacatggcaaaaccccgtctctacaaaaatacaaaaaaattagccaggcgtggtgacgtgcacctgtagtcccagctactcggaaggctgaggcaggagaatcacttgaacctgggaggtggcggttgcagtgagctgagatcgccccattgcactccagcctgggcgacagagcgagactccatcttaaaaaaaataaaaaaaaattataggctattttctatcgtgaaagttgtgtattattattgtgaagaagcttattagttttttattggtgacaaatctgtattctaggtaatcctcctcttcccaatccttttggtgatcctaatttatcacaacctataatgccaattcagcagaatgtggcagacattttatttgtgagaacaagttatgtgaagaaaatcattgaagactgcagtaattcagaggaaaccgtcaaattgcttcgtttttgctgctgggagaatcctcagttctcatctactgtcctcagtgaacttctctggcaggtaaaaggaaaataacatttgtatgtttataatttgatttgttattcctttcattaagttactcaccatgtcttacttgtttttaggttgcatattcctatacctatgaactgcggccctatttggatctgcttttgcaaatcttactgattgaggactcctggcaaactcacaggtggatactctttttgtgactggaaacaattaggcttgcccaggtgttagagttaactgaaattgacagtcaccacattttttttaacctattggagttctagtgaatgttttatcttaaacctaggacaagggtaaataacaggttctccccttttcctcagaattttatttccttttttattcttttttctcactgcctaagtttcatacttaataagcctgtttctttagaatgacttttttaattaaggaggagctagcttgggcatttggtaaatatttgaatttcattaatgatgcccgaggattattttatgattatattacatttgttttagaattagtcacttgaagcaacttagtcattagtcacatgaagtataatagtatatgtaaaaagtcttcaggtaagtacggtttccatttttcatggtacttatattctgtaaagtcaccacagacactgagttagcaaatactgaaccattactcctaggaggaaatacagaattaggtttctataagcctctgtttacatttttatcaaccagtcaatacataaccttgttgtatgtgtgtttctacttaaagtcatttaatatattttgttgactcataaagttcacagccaacagctctgtaacttaagcctgaacttaagcttctcaatgcattctgcataaggcacatcacagccttcttgtggttaggaacattagatagcacttcaacattatatacttgggtcattttaaacataaaaataaccagcaaaagcacaaatatgtggaaaatgtggcactaaatacaccatgaagaaggacacttgtttacagtttaagctgaaacaagagagaatgacactcttctggacttcagctaggaacgtttgtgttggacaacttgatatttttgctgctctgtatatgtccacagatgacgaagaaagcaccttgatgattgattttgcagttataaataaagtttaggaagtaagcgaattcacaaatgtggaattcatgaataatgaggggatcaattataattagtttttatgagaacttttagaatgttaacttttttcccccgtaaaaactaaggttatccagcttaactggccctcaaactttcactagaatttttctatttgtttttgggggtttttttgtagtaaaagttgaatatattatctttaatcccaagagttatataatagatgataaattatggtattagttgacagcactgccaggttttagaacttcccttcccacatggaagatagtataatagtttgtttgggaaaacaattcaaagtctatgtcgcagtttgcctcccatctgccaaggtaataaaacaaacttaaaaacaagttctgtaacaacaaaatgcttaaagagaagtaacaatctggagttttagtggggattgcgaaagccagaatttgcaacttagtattttcaaattatctccaaatttaccataatagatttcaaacaaatactgtaaaaatagcattaaaccaaaaatcaattttcgtgagacacaaaagatagtagctcagaattatagtcgtttattcaggcagtattcagtgcccttctaaatatgttcataggatttgaaagcttccttcagagtagattttaatgaaatctaacttttactattttcttttttaaaaatgctgtatttctgggcacagtggcttacccctgtaataagcactttgggaggccaaggcaggagaattgcttgagaccaggagttcaaggccagcttgaccaacatagcaagatcttgcctctatttttttaaaaaagaaagtactgtaagcacttacagttttaaaccagttaatcacatcttagctcttgtttgattagagcaagtgataatggcaaagacatacgtgctagattaaatgtgggaattacacttttgtgtaatgagattagtaagatactgttaaatgaatcactggcccaaacgtgaaaataattttctcataatgagcttttagttcattcagtaaacaatgttcaaatatttatagagtgtctaccatgtgcccagcactgcttggcatcaggtaataaggcaagtgaagatagtattaataaaaatggcatttgagagcagttgatgctaatggggagaaaatatgatatggcagaaataatgatttagcacttcattgttacttgaaaaaactgaaggtaaaagcaatttatatgtagtgtttcagatgaaacagcaagagggcctgaacatggttgatttgtctgaaatgattaagctttgcaaaattgttgaagtaatctgttttgtttggaaatcatgaatgcatttgatggaggaaaaaaatcttactttgactttaaacatactgttaagtaaaatacatagtgtatattagaatctttaaattctcagtgtccaggttatgttttctaattgaggtaaaatttacataacaaaactcaccatttcaaagtatacaattcagtgacttttagtacattcacaatgttgtatagccattaccactatctgattccagaacttttttttttttgagagggagtctcactctgtcacccaggctggagtgcagtggcgcgatctcggctcactgcaagctccgcctcccgggtttacgccattctcctgtctcagcctcccgagtagctgggactacaggtgcccgccaccatgcctggctaattatttgtatttttagtagagacggggtttcaccgtgttagtcaggatggtctcgatctcctgacctcgtgatccgcccacctcggcctcccgaagtgctgggattacagatgtgagccaccgtgcccatcccagaacatttttttttattaccccaaaaggaaacccctacccaattaagcagtcactcaccattccttctaaccctggcaaccactaatctgttctctgtctctgtggatttgcctcttccagacatttggtaaaaacgaaatcatgcaatttgtgtgtctgacttctttcacttagcttaatgttttcagagtccatccatgttatagcatgtatcattactttatagctgaataatattttgttttatggatatatatacaccacattttatttactggcacataatctttttaacacaaaagaaacaaggcatgtttgtgcccctacaatcatgttttaagttagttagttcagggaaagacaggactagttggctttgtattattactctgttgtagtttgggagaaactgaaatgaaatcctgtgttattggcaaatcagccaaattgtactattgcctgtcaaaatgctttgcctgccatgtattctcattattagaattcaaatactgtacctccaaattatgtcactgaatcctaacttgccttcagagatgcagttttataaaaggtattgatgtgtagcaaattaccctcaactacagcagtcataaacttagttataacttttttaaagtttgcattactctcgagtgtcctgaattcacttcaggtaatgtgtttaaattacatatatggcagaattattttggactggtaataagttagtaagagcacagactctggagtcacactgctccgcagctatatgacctcggcaagctgtgtaactctgtgccaattttctcacctgttaaaagttttaataataaggccaggcgcagtggctcatgcctgtaatcccagcactttgggaggccgaggcaggcggatcacgaggtcaggagattgagaccatcctggctaacacggtgaaaccccgtctctactaaaaatacaaaaaattagctgggcgtggtggcacgtgcctgtagttgggctgaggcaggagagaggcgtgaacctgggaggcaggacttgaagtaagccgagatggcgccactgcactccagcccaggccgtctcaaaaaaaataaataaataaaaaataaaggtttaataatagtacctattgtctaatgttagattaaatgactaaaagacattattgagtggcacatagtaggcactcagtatatattagctattagattttagatgtttttattttatatctggttctctttcagaattcataatgcactgaaaggaattccagatgaccgagatgggctgtttgacacaatccagcgctctaagaatcactatcaaaaaagagcataccagtgtataaaatgtatggtagctctatttagtaactgtcctgttgcttaccaaatcctgcaggtgaggatttttttcttataattttgtagaaatcttaatcagaattaaggattctgttttaaaagaagagaatcatgagaacttggggttgtcattttaagttaactttgaagtattccaaatcctcttatctatatggttttattttcttttgcagggcaatggagatcttaaaagaaagtggacctgggcagtggaatggcttggagatgaacttgaaagaagaccatatactggcaatcctcagtacacttacaacaattggtctcccccagtgcaaagcaatgaaacgtccaatggttatttcttggagagatcacatagtgctaggatgacacttgcaaaagcttgtgaactctgtccagaggaggtaaaaaaagccaccagtgtgcagcagatagaaatggaagagagcaaagtaattctttattttataggccagtgtttatgtattaatgatattattaaaagattatgttgaagttttgggttttgaaaaatgtttattcggctgggcatggtggctcacgcctgtaatcccaacactttgggaggccgaggcaggcggatcacctgaggtcaggagttcaagaccagcctggccaacaaggtgaaatcccatctccactaaaaatagaaaaattagtcgggcgtggtggcaggcgcctgtaatctcagctacttgggaggctgaggctggagaatgacttgaacccaggaggcacagattgcagtgagcggagatcgtgccagtgggctccagcttgggtgacaagagtgaaactccatctcaaaaaaagaaaagaaaagaatgtttattctatgtcattttaagctaatgaagggagctttcttttggagaaatttctgtgaaattgcctgaaatgtagtagttctgagagaatgcaaatcaggttttttgttttgtttttttttttttgttttttccccaagttctttatctgcagtaaaagaaaagttgctaatgggtcagttttgtagatttttaaaatttatttcaaatagaaaaagttaaaagtaaacttgagtttgcctacgtaattttttatcttgaaatattcaaaattaggagccagatgaccaagatgctccagatgaacatgagtcgcctccacctgaagatgccccattgtacccccattcacctggatctcagtatcaacaggtaaacaggagtcagtttatgcttttatcccctagaactgggttttatgcttaattttagaggatggctcaattgtttgttgtgactacaaagtaagaagtaggattatctagactagctttgggagcatgatccagaagagggatggtttggagtgggggtcatggtgtaacatgtttgaacttaaccactgtagggttttccttgtcaagaaggtgtccttcttgtgctagtagttaataaaactgtatgagaatttatatcaacataaaatgatcattgtttagtgcaaaggattgtggtgacatttccggtgaggtaaaatcttcacctggattccaaaaacattattaagatatggcaatgaagtaagaagtccttggttacttagccacaggtttcagtgatggtaaaaatcactggaaaaaaaaggatttgggtagatttccataggtgattaaagtaaataaactagtaaatagcaaaagaaatgagatgaagaaacattctaaatgataactttttctttctgaaaccaaaatgtgactaaatcagctcttgtgaggcagtggtactcaaacttgcacaggcgtgagtctccctggaagggttgctccagcagagagctagatgctaccctaaagtgtcttatttcataggtcttcaaggggctggaaaatgtacatttctagcaagttcccaagtgatgctgctggtggtccaggaaccatacttggagaaacatttcaggcattctttcttacatttcactgtgtacatagaagcaaactgaatagttaggaagtacacattcagcgtacttattttcatctatagaaagtaaagcctggccaggcgcggtagctcatgcctgtaatcccaacactttggaaggctgaggcaggtggatcacctgaggtcaggagtttgagaccagcctgaccaacatggagaagccctgtctctactaaaaatacaaaattagccgggtatggtggtggcgcatgcctgtaatcccagctactcaggaggctgaggcaagagaatctcttgaacccaggaggcagaggtggtggtgagtcgagatagcaccattgcactccagcctgggcaacaagagcgaaactcccatctcaaaaaaaaaaaaaaaaaagttaagcctaaaatcttggcttggctgatggagcatgtacagaaaaatgagagcactgtagggttcagacattttaaaaggttaaggaaccaaatccacaaggaaggttaacttcctttgaccctgagaaagctcttatgttaatcatgcctggttactttatcatcttgaacattgttctgtttttaatcagcattattgtgagttcagggttactgctcctatatatcttacatcatggttagtcaatcggatttagcatgtggaagagtcaatagatgctcatagatcattctctgaaaattttttaccaagagcaacagtgggttaatcctttatttgccagacttgagtctaaataatttttggcactaaaaatcactttggccaaagatttatgtggacctacacaatcactgctcttattcagggttttggggtttgcatttacactacgtttttcaagcctttttttgtttttgtttttgtttttgtttttgttttgcactatagtagtccaagggtatttacagagtaagtcccaagaataagagtatacatttccagagacttcagaccatgattttgaagttgttttactatgtgaaaagttttaacatacagatcttttctcctttcccagaataaccatgtgcatggacagccatatacaggcccagcagcacatcacatgaacaaccctcagagaactggccaacgagcacaagaaaattatgaaggcagtgaagaagtatccccacctcaaaccaaggatcaatgaaatgcacataattaactggttccatcaagactgtgcacccaggccttacagtccaacctttttctgtgtctggctaatatttaaaactagaaaaactattcctaatcaacatggagtggagagtttattcactgtcttatctgcagaaatttgctgtcaatatataacccgcctgcagtggaaagtgtatagtgttttgtaataaatggcctgatgctaatgtgtaaatggcaaaggtgtatatagtatattaatgttgactgttaattcttaagcaagaaacttttttcttgatgagactcacagatctacacaaactacaaaagttaattttcttgttacacccactgcactctgcaaccagtgttgcctgcctcatggcagttggatcagctcctttacaaaaaagaaaaaaaaaaaaccaacagcaacaaaacagagcccatccatgtcagccacaccaatagtttcatgttaattctttgccactggagtcaattttgctatgagcaatgtaaggctggtaacctttaaattatttggttgatgtggaaaattggtgatgtaacactgtttctagatttttttcattgcctttttattctgatattaggttaatcactttgaagctatagttatgctgtaacatttagcatggcttcacaccaagttagtgtagccaatgaggaaaaagttaccataatgacagcagttgtccgagaagtgacagctgtattactcagagcttttacttcttacacctagaatattaaaatataaaacaaggggagaaatgtgacagtctattttcagttgcacatatgttccttatatataatgtttgacagttcaatctctgggtggaataaagaacacttacgtatcagtaatgggaatttttaaagatttaaaacaaatatgcaaaaatttgctatgccaagatgctggagcataatataagactgtatttggtgtgcttgttttgtttctttggtagagtttattaggtgaatcttctaaaactttccttctgttggatcccagtgacgtggaagtcatcagaaccccacggtacttggagtacctctctgcaccaagatagctggctgattttctgctcagtcacaattttacttgaaagcaagaattgtcctagctccttttccattattccaaaacgtttaacgttcaaagcagggtctcattaaaaaagaaactactggttgatataattgagatattacaatttcagaataaacatttgattaaaaataaggaaatcctcagttcatactgtatttaaaagagaattggtaacttgaatgtgtgtaattttttggaacctgtctaaaaaccaaatacccctgcaaacagatacagcccaccctattctatttaaatattttgctgttttattttatagaaattattttgctgaattcacaaatagaatttgatttaagaagaactttttgtcctgtggtgtgtttttggttttttttttggttactttttttgtcctttttttttttttttaaaagaggactgcatattaaaattcattctgtgcatagcatgcctaggcatgacactgattcaggatttcagtcacatcaagtttttgtgcacagaaagatttgacctttggccctctactgaagattttgagaaatcaggatgttgacactgtaaaagtttcctaacataatcttgtactttttgtatgttttttatatacatgtatatttaatgagcacaagcttggttgtattttttacaattcagttaatagggaaatgttttgtcaaaaggctacacttggaactgaacaaagcagaaacaaaattgagcattgcattattttgtgattaaaaggggcaggtatttaagataa

SEQ ID NO: 6967 - DNA, 32177 bp, Homo sapiens
ttttaatgtgcaccagatgttgcatgggacaccggcctctacttttcttcattactctactctttactgttttgggggtgagactttttaaaatatgcttatcaatgtgattcattctttaagcaagaaacattcagaaatttgtggttttagcttgcattaaagttaggacagtctatatttaataaatgaagtactactttatttcccgcactgtggtagtcatcttctctagttaactctgggtttttaaaaaagtggattttgaggatggacgtgtaaattgatattattctactctgtttccagagcacagcaagagagagagctaaacactcaggcgactactttactcttttaagacaccttcttaattacgcttacaatagtaatattaatgtacccaatgctgaagttcttctcaataatgaaattgattggcttaaaagaattagggtaagttttagttaatactccatttatatgtcattattagtaaatagaatgttttattgatgatttatattttttgagcattttggttaaatggaaaactccaaagattgataaaagggaccaaagaatgtactctgcatcagtggacgttagtaatctgtgattcacaaaatgcatatctagtttagtaaaatgaattgcttacttgacacttgaaatactgatgttcagcttcttttattttagcattttgggcctttttgcaaattctaatttttaaaaaaagtattcttgaattgtttatgtcaaaaatgagtctgatagagcagaactttctaccataacatctgatactttttacttaggcaaaatgatacaagaatttatttctgaagagatttgtagtttttaaccttcaaattagcatttcttctagtagttcataaagccaatttctagaaagttctgaagaaaacaaagttgtttgaatggaaagacttaaggaaattatctcatatccctccagctctgtctcgttctggctcctctctccctctttacctccctttcataagctagacatttgatttcttcccccccccaccccaccccccgcctttggcaggatgatgttaaaagaacaggagaaacgggtattgaagagacgatcttagagggccaccttggagtgacaaaggagttactggcctttcaaacttctgagaaaaaatttcatattggttgtgaaaaaggaggtgctaatctcattaaagtaagttctgtgttcttggttgtaagctacatatcataaccttctaaatgtttataatcaaatttaattaatttatagtagtatcatgtctttgtactttcttgatcttttctcttttttaagaatctttatcaaatttacagtaatttaagaaatacagttatgccttactttattcaagagacatttctaaatttgtatttaaataagatttcatggctggacttgctggcctcatgcctgtaatcccagtactttgggaggccgagtccagtggatggcttgagcccaagagttgaagaccagcctgggcaacatggtgaaaccccttctctacaaaagaaaaaaaaaaaattgccaggtgtggtggcgcacacccatggtccccagctacttgagaggctgagatggaaggatcacctgagcccaggaggtggaggttgcagtgagctgagatcgcaccactgcactccagcctgaaggaacagagcaaggccctgtctcaaaataaatagataaataaataagatactttataaagtaattgttgtttagtttttctctttggaaaatctgaattgttaatttcatttaatgaggcaaacctctgttttgtaagaatgcatcttgtatatctttaatgagttttttcatacatgtagtaacacaaggaaacaaagtttcatttttgtacattttatttctattcaaaatgggtttaatttgctatacacttgattaaaggagcaaacatttaaaataaaaattttgataagtactatattcagttctttcttaatatttacaaatttatttaacctgcgaaattaggtatgttagtgatagtaaatagtgttttgaaggaagatctttttattagaaaatctgagttttctgagatgtaatgagatcttaaattccaatgagtaattttaaaatgatttacttacaagagaactttttttttctaaaaatatatagcattgctaatatgtaatccctttttcaactttttaggaattaattgatgatttcatatttcctgcatccaatgtttacctacagtatatgagaaatggagagcttccagctgaacaggctattccggtctgtggttcaccacctacaattaatgctggttttgaattacttgtagcattagctgttggctgtgtgaggaatctcaaacaaatagtagattctttgactgaaatgtattacattggcacagcaataactagtaagtatttttaatagaatgtgataattgatcatttcaatgtttcaaagttgttttcctgtttttctttcagaaaatatttccaacttacgtatttctttcagtaactagtttaacatttttagtgagtgaatgaacagttaagaccattataggccgggcacggtggctcaggcctgtaatcccagcactttgggaggccaaggtgggtggatcacctgaggtcaggagtttgagaccagcctgaccatggtgaaaccctgtctctacaaaaaatacaaaaattagctgggcattgtggtgcacacctgtaatcccagctactcaggaggctgagacaggagaattgcttgaacccaggaggtggaggttgcagtgagccgagatcgcgccactgcactccatcctgggtgacagagcaagactccatctcagaaaaaaaagaaaagaaaagaaaagaaaaaagaaaaataagaccattataagcagaccaccttgtatagaaaaaaattcaaacatttgttaagtggcatcctataagtggtgtcgccatttggcaagataaatttcatctcatgaaacctgtcataaaattcaaactccagattaaaaggtagccaaagtaaatgccgtagagtatagacgtaaaactttattttatttatttatttttttgagacggagtttcactcttgttgcccaggctggagtgcagtggcgcgatctcggctcactgcaacctctcgggttcaagtgattctcctgcctcagcctcccaagtagctgggcttacaggcgcctgccaccatgcctggctaattttgtattgccaccatgcctggctaatattgtatttttagtagagatagggtttcaccatgttggccaggctagtcttgaactcctggcctcaggtgatccacctgcctcggcctcccaaagtgctggaattacaggtgtgagccaccgcacctggcccagacttaaaactttaagttgcatgtattggaaaacctttcaggtcttcacttagaagttccgtaacgttatgagttcgaagaaaatctggctttgaagattagaacgtgagaagttaccattttggtgcaccttatttatgttctcatttaatgcccacaccaggcgcatgaataggctgcagatttcagaccttacagataaggaattgaagctcaaaagggcaagggcaatataaaatattaataacagaaaaagcagaaataagcataattgatgctgttttaagagaaaatcgctatttagaacacttaagaatataattgattatagtaaatctttaagaacatgtcaaattactttttgatgtgtttcagaatgtttggaagttttaaataacatctcaggaatttctgaataaattgattgcttaaaaggttagacctttagctgtcctatcaaatctatgtattgtgagaattcttgtattttttttttaacttaatgggggttaattttttaatcacagattggagtatagtacaacgttgtttgcatccttccctatctgccattgttccctgtcaacacagaaatatttacctaattccatttttggccatgcagtttggtatgatataattaactggccccctagacaatgatacttaatgttgtttccaggtttatactaggtggagggagataggaagatgtacagtgatttacaattatcacaaatctgctgtcttgcttgctcctcaaaatagcattatagatatcaggaaagcaagtgttacttttattattacatttactaggaagaaacagaaagttacctaaaggtgggggaaaaaaagtggtaagcatcagaaccaggatgtgagcccatgtggttttaggattatttaaaactgagaaaattataatgtgttgatatatttagataacatttcattccttgccaaatttgaaggcaaaagtatcaaatattaagaaagtgaataatggctaaaaataaagatgcaagtaaagttagcatgtagacattagaattatactatcttgtacttttgagactgccatagaagcaacatcatatgaaacgggtttgcgggtgattggataagaagctgcacagtggtgcctgttgctgtatattttagattgttggaagatgaagtgcaaactcagaacactgcttcaggttgctgtagggttagtcgaattatgggtggtagaattattgccagggttgctttgtcagcataatagagtttgaaaggacagaatggccgtgttcatgctacaagaatctttccttctctcagcttgtgaagcacttactgagtgggaatatctgccacctgttggaccccgcccacccaaaggattcgtggggctgaaaaatgccggtgctacttgttacatgaattctgtgattcagcaactctacatgattccttccattaggaacggtattcttgccattgaaggcacaggtagtgatgtagatgatgatatgtctggggatgagaagcaggacaatgaggtaaatttgagttaccatttctgttttctgtgtttcaagttatgataccagatactattctctcttaagagagtgttatactttcatcaaacgtattaaagtatatttgaaagttagggatgggccgagcacacacctgtggtctcagctactcaggaaactgaggcaggaggattgcttgagcctgggagctggaggctgcagtgagccatgatcatgccactgcactccagcctgggttacagagtgagaccctgtctcagaagaaaaagaaaaagtaagtagggatggacttctcccagccagcatgaactgctacctcttaacatagtatagttctcactacctaccagaatttaaactgcagataatttttagaatggtttgtacatttctaaagcaacagttggctgggcatggtagctcacacctataatctcagcactttgggaagctgaggcaggtggatcacctgaggtcaggagttcaagaccagcctggccaacatagtgaaaccccatgtctactaaaaatacaaaaattagctgggtgtggtggcacatgcctgtagtcctagctactcggaaggctgaggcaggagaatcacttgaacccggaaggtggaggttgcgatgagctgagatggcaccagtgcactccagcctaggtgacagagcgagactccgtctcaaaaaaaaaaagcaacagttaatgtactcgtgtttttttgtgtagagtgtttagtataatttggggtttgtttgatggtaagaaccttcatttttgataatagttttaaatttttacttttctatttctaaattttaattttctattttatgccaagttatacagtatctgccaatttcactgtgtgtgcttacttttaggttattctttgaatttcccttagatcatagctcttcttgattaggaaacaaactttccctactttaaatagtctcacgtagtcttgtggcaaaatttaggctgcctactgagtatccagtgcagtataaagcagtgaagaagttgagttgtagtggcgaatcagaattgacataactgtaagatagctctttaaagaagagcatatggcaagaagacttaagttgtggtcatgtttgtgcttaccatgtaatatttccttggttttacttttcctgtttatagtgatagtgggaactgaagagagaagccagagtatattctaattgtagtaaatggttcttttcattccctcccttcagttgccagaactgattttgctctgaagaagtagtttatcaattggagcttctgaaacatctacttgcctcaactcttccctagacctgctgtgccagatggtctagggattgggttctgagcactttcactttataaaaaaaagcttcataaaggacacttatacccatacctgattaaaaaccactgctctgggaaaaaaatgtaattcaaattccagttctggagcccatcatatacctgggatattgagttaaacacaagtagatataggtaattgtactggcaagaagtaaatgaggcatagaaaatataacacaatttcaaataaggtgtaccacttttactctcatggtatcctctgctccatgttgtctctgcaccccagtgtactgtgggagtttttgtggggttttttgggttttggtttttttggcttatgtttttgtttccatccctagagtataagtttctcatgggcagggactggttgttgtctatttctatatcagagttatcagatacaactcagagaatactgaaagatagttaaatgtaaaaacacattcttctttgtagctgccatatgattatgacctttaggaattctgtcttcatgttacatcttacaccactacttctgttgttttttaaaattgtggtaaaatacatataacatgaaacttaccatctgtttttaaatgtgcagttgtcctattaaatacatttacattgttgtacaccatcaccaccacccatctccaaaactcttcatattgcaaaactcaaactgtagtcattaagctactccccattctccctccccacagcctctggcaactactattctttttgtctctatgattgactactctacatacctcatataagtgattatataagtgaaatcatacagtgtttgcctttgcatagctggcttatttcattttaaagtctaagtaatattccattatatgtatataccacattttccttatccattcatttgtcgatggacatttgggttgcttccccatttgagctattgtgaataaggctgccatgaacatggatatacaaatagctgtttgaggtcctgctttcaatatttccaggcatatgctcagaagtggaagtactagatcatttggtgatgctatttttattttattatttattatttttttcagacagagtctcactctgtcacacaggctggagtgcagtggtgctatctcagctcactgcaacctctgcctcctgggttcaagcgattctcctgcctcagcctcccgagtagctgggactacaggcacgcaccaccataccccgctaatttttgtatttttagtagagatgggatttcaccatattggccaggctggtctcgaactcctgatttcaggtgatccacccaccttggcctcccaaagtgctgggattataggcatgagccaccatatgcggccaaattttttgaggaactgttttctagagtgactgcaccattttacattcctaccagcattgcacaagagctccaatttctccatatccttgccaacacttgttatactcactcgttctggtagttgacaccctaattgagtgtgaggtagtatctcatggttttgatttgcatttaccaaatggttaacgattttgagcatctttagctgtgcttattattggccacttgttgatcttctttgtctatttttaaattgagttgtgttgttgagttttaagagttctctgtatgttctagatattaactccatatcagatatgtgatttgcagatactttcttttgttgcctgtacctctgatgtcatatccaagaaatcactgccaaatccagtgtcttgaagcttttgccctatgttttttttttttttttaacagttctgtggttttagctcttacatttaggattttgatccattttgagttaatttttgtatgtagtgtttcataagggctcaactttattcttttgcatgtggattatccagtttacccagcaccatttgtggaagagtactagtcatgcaccacataacaacgtttcagacaattacagaccatatatatgacagtagtccaatgagattataatgtcgtatttttactgtaccttttctatttttagatgcacagattcaccgttggtttgcagttgtctacagtatgtagtacagtaacatgctgtacaagtttacaacctaggagcaattggctataccatctaggtttataggtacactatgatgttcacatgacaaaatacctaatgatgcatttctcagaatttatccctgtcattaagcaaagaatgactatactgatataggtatattttattgacagatctgagcattttatatacaacagctacacaaaggatatattacccccattcacacataaagaaacttgaagcctagaaagtttaagtagtttttacttgctcaaagttacttggtttataagtggtagagcctgcatttatgtctagttcagtctaaattactatgctaatgctacactatattatctatctttcttacacatggtcagggttatttggttatgataactaatatgtgaaatggtggggataaacactaaataactaaaaatttataaattgaaaagtgctttggaaatgagcataataggaatacaaatcatttgttcaataactgcttggcatttgtctcaacgtattttattatactttagctcattggtgacattttttggtttctagagcaatgttgatcccagggatgatgtatttggatatcctcaacaatttgaagataaaccagcattaagtaaaactgaagatagaaaagagtacaacattggtgtcctaagacaccttcaggtcatctttggtcatttagctgcttctcgactgcaatactatgtgcccagaggattttggaaacagttcaggtaaactatggatggacagtaatagagatacttcttaaaatgaacatctcaatacactaacattaaacctctaaaagacatgttggaaggcatctttttttaagcactggtaatattcaaactgtccttaattgggtgggtttttttttttttttttaggtccccttaggaagaagtagaaactgccatagtaagtaagggcaacatcctttagtctcttaaccatattattaactttttattaggaaaacatctaataaatacagaagtagaaaaaatagtatgaacccctgtatacttgtcacccaacttcagtagtagtcaacttgtggccagcctcatttaatctatattcttaacctattttttttttctttttttctttttctttttctttttttcttttttttttttgagatggagttttgctcttgttgcccaggctggagtgcagtggtgtgatcttggctcactgcaacatccgcctcccagattcaagtgattctcctgcctcagcctcccaagtagctgggattacaggcacccaccaccacgcctagctgattttttgtatttttagtggagacggggttttaccatgttggcccagactggtctcgaactcctgacctcaggtgattcccatctcagcctcccaaagtgctgggattacaggcgtgagccactgtgcccggcccctacctatttctttctagattgttttgaagcaaatcttagttccatctgtaaatacttaagtatgtgtctgtagtgtctgtctcaaaacatgatcatgataccattatgtttttttaaaattgcttaatatcaaatatctctgtcagtgtttgaatttaccgagttatctcataactggtttttactgatattttttaaaaataagattcagttgaggtccatttaccacaaatggttggtaatgatcttgattattcatctgtttcttttttccctttacaattatgggggaatcggaggacaaatagtttagcatgtaaattttcccacagtctgaattttgttgatggaatccctgtggtcgtttattattttctgtttttcttggtcacctgcatcttctataaacaccttatgagatctagaggcttgatcagattgtggtattatttttctttttgtggaatggataggcaacgctacttcataggggataatgtttatctccatgaggagtgacattataatgtctgtcttcttatgatgttaacagcaattttttattattattattatatatatacaatttttttttttcccctgagatggagtctttgctctgtcgcccaggctagagtacagtggcgtgatctcagctcactgcaacctccgcctcctgggttcaagcaattctgcctcagcctcctgagtagctagggttaacaggggttacaggcgtgggccaaccatgcccggccaagttttgtatttttagtagagacggggtttcaccatgttggccagtctggtctcgaactcctgacctcaggtgatctgcctgcctcccaaagtgctggattataggcatgagctactgctccctggccttttttttttttttttttttttttttggagatagagtcttgctctgttgcccaggctgaagtgcaatggctcgatctcagctcactgcaacctctgcctcccaggttcaagcaattcttcagcctcagcctctcaagtagctaggacgacaggcccaccacaccccgctaattttttgtagttttagtagagatagggtttcgccgtgttggccaggctggtctcaaattcctgacgtcaggtgatccacccgcctcggcctcccaaagtgctgggattacaggcgtgagccactgcacctggccaattatcattatcttaatacagtatttcttcagggttataaaataacaatattttattttttcatttaatagctagaaaagatctataaagggaaaattgccctcaccattttctttttaagttagaaaactcagattacatttttatcttgtttcctttgactttaagtcagtactacgtcatgcactgtgctaaaataactacagtacaaccacgtaactcttactgtgtatgaaaaggggtataattctttatagcagtgaggtttggtttgttttgttttgtaagtaatcctccttggaatcccttcaaggtgcttcccggccagctgagaggagcggggaacgaagggtcacctgatactctgatccgccttcccttcttctgacaaagcagtataaatttcttttcctcccctaactaggccctctacttactctgtactagtgtcttgcgtggaccaccctccctcccatctctcattttgcttttagtcccgtcacccagcataccattctccctcctctctgactatttcagttctgtcttctttccctaggttattccaattccatctctgccttaaggctattttagcatttctgtttatgctcttccaaactgaagaacacaaacagaggcttatactgggttttttttttttttgagacagagtctcactctgtggcccaggctagagtgcagtggtgtgatctcggctcacggtaacctctgcccgctgggttcaagcaattctcctgtcttggtagctgggattacaggcgcctgccaccatgcccagctaatttttgtatttttagtagagactgggtttcaccatattcatcaggctggtcttgaactcctgacttcaggtgatccacccgcctcagcctcccaaagtgctgggattacaggcgagagccactgcgcccagctgaggcttacactttttaaactttcgtcttgtcattcagttacaattttttctcttgtaatgcctttgcttttttgacttttcagttactcgctgtgctagtggagctcggtttgtatagactagcactttggattatccacactttagacacataatctactcttgacacaagcgggttagttaactacacttcctcaccccactcttttattttgaaaagtttcaaacctacagaaaagatgaagaagaggtataattatcacctttatgttatattctttatgcggttttactaattaacattttgccatatttgcttatcttgccatatgtgtgcttggtttttggtttattttttttttaagttttgtttgtttgtttgtttgttttttgtttttttgagatggagtctcgctctgtcgcccaggctggagtgcagtggcgtgatctcggctcactgcaagctccccttcctgggttcacaccattctcctgcctcagcctcccgagtagctgggactacaggcgcctgccaccaatgcccagctaattttttgtatttttagtagagacagagtttcattgtgttagccagggtggtctcgaactcctgacctcgtgatccacccggctcggcctcccaaaatgctaggattacaggcgtgagccaccgcgcccggccttttttcttaagttgatagtgaagttgcaaacaggacgcttcaccccttcatacttcaacatatatcttataagagatcatatatcagaataaggcaattttcctacttatgtatgatacagttatatccaagtaatataataacgatttttaatctctaatattcatcagtatatattccgatttcccaaaagtggtctttataacttatctctctatcccaatctgatactcatgaaggaatcacaaggatttggctgttagctctttagttgccttttatgtaaaataatctccctaacttgtgacttgtatcgcactgaaatttttaaagaatccaggccagttgtcttgcagaatgtgttttttgatttgtgtgattgtttcctgatgattagctttatgttaaatgttgagggggtgggggcaataaaactacataattgatgttttgtgtttctcactgcactgtattgggaggcatgtgttatccacttaattattaagtgatattaattttgatttcttggtgtcttaacagatctctcctttataaagggtaccttttcccttttgaaattagttgattacatgtttgaaagtttgaggagttgaatatggtttgaaagtaaatagaacggactggtgtaatttccagtaatgaaacaagctgatttttaacaaataatatatttgattttaaacttactgtatacaaatttttacttgtgtaaaatataatagagatcagattatttgctatgtagaaaaggtttttacaaaagtataaacagacagttcttgcatactttaaaatgtcatttcttgcttagaacaaatacacttaaattctctatatacattattctgtatatacaaaatcaggtattattgatagtttccagcagtgcctgagttttagcagtatgagttctcatttttgtggtatgtagtgatggtgtcttttcttagattactcaagagattaactctagaacaagttaaacctttctctcttcacttgggaaaaaaataaatttaagagtaactagatctgatctttttactatttataatccaaaatttaagcaaaatgaaagaaataaaatagtgattgtaacatccacataagagtgagatccaccacctcatcttaatagtatctttaattggattcaaaatgcatgcatgtgtcataccacctgaagcaaccatccttcctggagccgtactatccatcaattacaccactagttttgtggcagttctttgccgctagagtactagttttactatgaggctcactctcttaccccactacattctacagggaaagcacattctttttttcctactttttccatgtaattgaggaataaaatctcggttttatatactgttgtttgtggtcttgttgcttttttttcccctgaaaaatatagttgtacatattgttctgtgaatgttacatgttacatgttttatttcattcatttcttaggctttggggtgagcctgttaatctgcgtgaacaacacgatgctttagaattttttaattcattggtggatagtttagatgaagctttaaaagctttaggacatccagctatgctaagtaaagtcttaggaggttcctttgctgatcagaagatctgccaaggctgcccacataggtaagtactaattacacattgaaagtatatgttgtaccatgtatatactaacagaaataaaatttttactagtacttacatacaaaagtggagtatatcactgattactaaatacctgaaacagaatgatttatatactttgcataccttactgctgtggggcttttttttgtttttgtcagttaacttttagttccttctactctgcctgatctcttagccattttattatattatactcttacagtctctttcttcctttcctttcctttcctttctcctttttcttttcctttctctttttttttctttctttcttttttgaaagagacaaggtttctctttgttgcctaggctggagttcagtggcatggtcgtaactcatagtaactttgaacttgtgggctcaagcaatcctgctgcctcagcctctcaaatagctgggactacaggcatgtgccaccacacctggctaatttgtaaatttttttagagatcgaatctcttgttgcccaagctggtctcaaaactgctgacctcaaaatcagtcgtcacacctcaacttcccaaagtgttgagatgacaggcgtgagccactgcgcctggcctactcttacattcttttacagaagattattcctgaggaaataaaatggcattttgcatatagctacaggtgttatttataaatttgccctttatcttagaacttgagtgattataatagtgtaaatacagtaagtttagaagatgacaaagctatggtagtatttcctatacaaatgaaataatgacttttaaaatagcattgattattgtcattatctttaaggtatatttgtatacaaaacatatcaaacctattgtaaaaaaagattttacccccgtccgggaggtgaggggtgcctctgcccggctgcccctactgggaagtgaggagcccctctgcccggccagccgccccgtccgggaaggaggtgatggggtcagccccccacccggccagccgccccgtccgggagggaggtaggggggtcagccccccgcccagccagctgccccatccgggaggtgaggggtgcctctgcccggccgcccctactgggaagtgaggagcccctctgcccggacagccgccccgtccgggagggaggtgggggggtcagccccccgcccggccagccgccccatccgggaggtgaggggtgcctctgcccggccgcccctactgggaagtgaggagcccctctgcccggccaccaccccgtctgggaggtgtactcaacagctcattgagaacaggccatgatgacaatggcggttttgtggaatagaaaggggggaaaggtggggaaaagattgagaaatcggatggttgccgtgtctgtgtagaaagaggtagacatgggagacttttcattttgttctgtactaagaaaaattcttctgccttaggatcctgttgatctgtgaccttacccccaaccctgtgctctctgaaacatgtgctgtgtccactcagggttgaatggattaagggtggtgcaagatgtgctttgttaaacagatgcttgaaggcagcatgctcgttaagagtcatcgccactccctaatctcaagtacccagggacacaaacactgcggaaggccgcagggtcctctgcctaggaaaaccagagacctttgttcacttgtttatctgctgaccttccctccactattgtcctatgaccctgccaaatccccctctgcaagaaacacccaagaatgatcaattaaaaaaaaaaaaaaaagcctaaaaaaataaaaataaaaaaagattttacaagaaaaacattgacaaaacaaattgtttgacttgaaaattgattaagggcttctattagaaatagttaatgagttcattactgataaatatacatgcctgtcatatggaagttttactttgggacttgttataatatggattaatgttgatttgcaatcgtttttcaccaaaatgtcacagtaagatagtattttctacaatccaaactgtattaaatatagtcatgggttgagtacacatgtggtttgtgggggtgttttgtttttgattaccaggaaatgattgggtgagaggtaatactatataaatgagaaatttctagcaagttatagtcttaccactcattcataattagggaatatacttattcacttagcctaggcaacttttagtccttttgaaaggccttttatattaggtgaacaataaaataaaattttaaccttgtttttaattagtgataaaaacagccaactttggggtcatttgttcatgttactcctccttagttttagacaattttctaaattatttggaaatcactggttttctttggcaagtgaaatgtcaaaagattatggtcttgaaatcagatccttatacctgatcaacagctaaactagtcttatttttttaactagctgggcatgggggtggactcctgtagtcccagctgcttgggaggctgagtcaggaggatcgcttgagcccaggagttagaagttccagtgaactgtgatcatgccactacattccagcctgggtgacagagtgagacctcacctcattaaaaacaaaaaagaaagaaactctactttgagtgcccatacaaccattctgtttttcactctcagtacagtattcattgaattacatgaatctttgtgttacaagattttgcccaactgtaggctaatataagtgttctgaacacatttagggtaagctaggctaaagctatgatgtttggtaggttgggtgtattaaatgcattttcagcttatgatattttcaatttatgatgggtttattgggctgtagccatttcataagcaaagagcgtccgtacttgctgcagagaccatatgcttcacaaagcctaagataaatttactatctggccctttacagaaagactttgctgtcctctaatgttagaacaccttctttttatagatgttgaagaatatcctacttttgaagtgtagtctaagatctaacttttttccctctatgggctgttccctgattatatagtaaaaatttgcttaatacctgctttatattccattcatataatttataaatgcctttgtgtaccttttttccggagtttaaaattccttaaataagggactatcttaaacagtgaatatccctcagtacttttacacatagaaagcactctcagtctatccattggatgaattaatggttaataatgtattcctcacatcccttgttttgcatttatgcatgtgtctcaccagaaattggaaagtctctttggtagaaaatgaccataaactgggattctagctccttctcaggttgctaatcctgtactcatttgtgtgtgcaaacttttgctttactaaggcttccattacagaaaaggaagaatatataaaaatttagcttattcgtagtttatcattttcagaacttaataaattcatgctttggcttcagcatgaattactatctaaacagataacactagaagcagcatcgtatactacaaagagattaagctgtgagcccagacagattcaactttaaaataccatttcacctaataatcttgatcaagttaacttttttattgctaacattctatgacttacgggtttcgcattataaaaatggcaaatgtatgggtgcagcaaaccaacatggcacatgtatacatatgtaacaaacctgcacgttgtggacatgtaccctagaacttaaagtataatttaaaaaaaaaaggcaaatgtagtttacattaagtccataactaaaatgtttacaaaactaagggataaatcctttttttaaatcgtttttaggtacgaatgtgaagaatcttttacgaccctaaacgtagacattagaaatcaccaaaatcttcttgattctttggaacagtatgtcaaaggagatttactagaaggtgcaaatgcatatcattgtgaaaaatgcaataaaaaggtacgggctgtccagttttgtttaattttgattacatttaatggatttagaagaaattggtttttttggttcatcctcacaagtcaccctatttttattttctcctactttggtatagtggtagcagagaagtagtcaatatgataactaatagaaggtttggcaaggaaggaaaaaaagtagtgccaaaggggctaggtaaataagataaaaataggtaaataagagtgaataattttaaaagtcataacgtgatagcacattctcttatataagttacacagacactttccatctctaccgagaaacaaattgccattgaacccctcaaagatacagagctgatagaggaaaacatttctcctgtcatgtccaggattacttgtcaagaccaaaacatttgctgaaaccattaattactttattgaaccacataagatttcttttagactagtcaagtggcccataagatttcttttatcacctatgttataaaaccatttattttggaaacttattagcagttctttgagagagatgattcacacgcattatagtaatgaataaggtgtatctttgggagctcccaaaccctttcaccctcaagtcacttgtgttgttttggccttatgcaccacttagagaagtcctgaagtttaaagattgagattgtgggctgtaaagccatactgcctgccacctgcagctcctgagacctgaggcaagttacttgacctctctgtgattactagttttcatcttttaaggttcagtagtacacacttgagaaggttgtaaggattcggtatgtttttacttgtgcggcacttagtatatattacctggcatctgaattacccaacaaatattagctactcttattgttattgtagttctttggtttgtgcataggaaaccaccttcgtgggaacaacagtaaacatcaaacaggtaataatggctagataacaatgacagaaaccagtcaacaatttaccatttgcatattattaatttcagcatttaaatcagctgataggattatcttgattatgctcattgtcatgtatttgtttatacttaaaaattcagataagtcttaatatcatttaaaagtttgcttggggtttttttttttttcctgtggattttaatagaacatctggtaactttgtcttgtttattttaggttgataccgtaaagcgcttgctgattaaaaaattacctcctgttcttgctatacaactaaagcgatttgactatgactgggaaagagaatgtgcaatcaagttcaatgattattttgaatttcctcgagagctggacatggaaccttacacagttgcaggtgtcgcaaagctggaaggggataatgtaaacccagagagtcagttgatacaacagagtgagcagtctgaaagtgagacagcaggaagcacaaaatacagacttgtgggtgtgctcgtacacagtggtcaagcgagtggggggcattattattcttacatcatccaaaggaatggtggagatggtgagagaaatcgctggtataaatttgatgatggtgatgtaacagaatgtaaaatggatgatgacgaagaaatgaaaaaccagtgttttggtggagagtacatgggagaagtgtttgatcacatgatgaagcgtatgtcatacaggcgccagaaaaggtggtggaatgcttatatacttttttatgaacgaatggacacaatagaccaagatgatgagttgataagatatatatcagagcttgctatcaccaccagacctcatcagattattatgccatcagccattgagagaagtgtacggaaacagaacgtacaattcatgcataaccgaatgcagtacagtatggagtattttcagtttatgaaaaaactgcttacatgtaatggcgtttacttaaaccctcctcccggtgagtatcaagagagtttagcttcttagtaataaagaataatttatagtaggcgtcaacatgtttaagttcataaaattaatgttttcactttaaatgagtctaatttgctgggtgtggtggttcacgcctgtaatcccagcactttgggaggccgaggtaggtggatcacctgaggtcaagagttcaataccagcctgaccaacatggtgaaaccccatctctactaaaaatataaaaattagccaggcatggtggcatgcacctgtagtcccagctactccctgtagtcccagctactccggaggctgaggcaggagaatcgcttgaacctgggaggtggaggttgcagtgacccaaattgatggccactgcactccagcctgggtgacagtgagtctccatctcaaaaaaataaaataaaaaaataaatgggtctaaattaaagtagcctgagaagggttcttaacaaatttaggacttctcaaaattaatggaaacacagacttgtttgaaaatggggttggaaaataaaaatgtgtttttatatctgcattttatttatagggcaagatcacctgttgcctgaagcagaagaaatcactatgatcagtattcaacttgctgctaggttcctctttactacaggatttcacacaaagaaagtagtccgtggctctgccagtgattggtacattgctttggattttcattcctattatactaatgtttggtttgcttctttaatagattgctttatgtttttctaaaccaagagaattttgtttgaagtttggaatatagaataaaaactctgggtcacaatagagaaatcatattaaaatagttacttagtctaaacatggccttttgttattcagaagctgacttctgcttctattaccttgtatcatatctttgacatccctgcaccaaagactacaagctgagactgggggacagtgactcacacctgtaatgccagcactttgggaagccagggtgggaggattgcttgagctcgggagttcaggaccagcctaggcaacatagtgagacccccatctcttcaaagaagattttaaaaattacccaagtatggtggcgcacacctgtaatcccagctactcggaaggctgaggtgggaggatcgctggagcctgggaggttgaagctgcagtgagccatgactgtgccactgcactccagcctgggcagcagagcaagaccctgtctcaaacaaaaccaaagattacaagatgagactgaaaagtgtaagctacttatgaaatttattaggttttagcttacctagattgaattctgacaccgattaaaagggtaaaaaattaaaatggttttcttaagtttctaattgtgaaagtatagaggccattatgatacattgatttaataatttttacttactcatttcaggaatatgtcaagataagggggtggtattttgtcattgaatctaggaagagtttgttaatggatttttagaggacaagctttcacctgtttggtaactctgagagaatagaccaagtcatagtatttatctattgttttaatattagaagcaacctttgctggttctctccagcagtagaggaagatctttgtcttttttttttggttcaatgagactcatccttttactatagagaacaagttattgacttaatagtcataggtttttttgttttattttaggtatgatgcattgtgtattctccttcgtcacagcaagaatgtacgtttttggtttgctcataacgtcctttttaatgtttcaaatcgcttctccgaataccttctggagtgccctagtgcagaagtgaggggtgcgtttgcaaaacttatagtctttattgcacatttttccttgcaagatgggccatgtccttcaccttttgcctctcctggaccttctagtcaggtaattgcacagctttctttctaaatgatgagatgtttacaaataaattgtgtttcctggaagtcgaagtcacaagcatatgtgcatccacttgatatgtttacctaacagaaacacacaatatgatgtcagtgagttccatttaatattactgcatggcaatgaatagtaattattggctctttaaaaatgtaagagaattttctctgttcggttacatgcagtagcttaattataagtttactgttaagtagattttttcctattttgaaggttttttaaatagtcttagatttttttaaaaaattacaagtgtaaaaaattataatgaaatccgcctctgatcttcattccctttcccaagaagcaaaatagtttagtttgtgtgatcagtccttccataaatgtatgcctgtatcagcatatgtgcatgtcctttttatgcaagtagaagtatacatataccttgttgctgtaaaacaggtaatgttttatcctttacaggcttatgacaacttaagcttgagtgatcacttactaagagcagtactaaatctcttgagaagggaagtttcagagcatgggcgtcatttacagcagtatttcaacctgtttgtaatgtatgccaatttaggtaagaatttaagtttttcagaattctgttttgatgtatcatattaaattgtgaagtcatttaggtcaagtgatgaaatataatctgatctgaagtagaaacaatttcccataaaacctgttgtgaattttatctgaacatggcactttcaccttttactttgtttatgcatgtgtctttgtggtagacacaggtcagaatctgtgttttgatttttttttttttttaatctcctaatgcagtggtgccaaatctggctgcttttggaaaatactggtttctaggcctcttctcacactgattgaatcagcatccccaaagctaatgtcagggaatccatgttttcaaaggggtccccaaatggttgtgatactcaccaaatttagatagcagacttggtctgtacataagtttttgtttaagtaaactacaattatggataatataaatactcgcttaaaatattaatttaggggccgggcacaatggcttatgcctgtactcccagcactttgggaggccaaggcaagaggattgcttgagcccaggagactaacctaggcaccatagggagaccctatctctacaaaataaaattttaaaattagctggatgtagtggcatatgcctgtagtcctagctacttgggaggctgaggtgggagaatcacttgagctaaggaggttgaggctgcagtgacccgtgattgcaccactgcactccagcctgggcaacagaatgagaccctgtctccaaaaagcaaacaaaccaaaaagtcatatatccaaaatgaagttctatatccaggcgtacctgtcgtttcaggttttttttctgtgatcttacttaatcaccattggatccatggcccttttaacataagggagattgtacttttcatttgtctatttagtttgtcttcttttcccttgtcttttccgtaattgcagatatttgggtatttgtagatgagaaagagaatatttattacacagacaagcataagtggaatctgtatttcaaacttaaaaatgccaaatttagacattcagaagaatcctattctgttcaactcttttagatattgcctgttcacaaagcacacatcattgttccataatgtaacctacttgtaaaattttcctgctgaaaacaaatactgtagggcctgtaaaccttaatatgaagtccttaagatcagatatgcattgggattgagaattgtttggatttaagaaaagcaaggcagtgcatataccaacatctctatagcagggtctgagacaacaacttacaattgaacacattaatatttctacagtaaaatatgaatatttatactgaagggagaaataaagactataagtagcctttagtcagtttgggctaggttatcccaccaaccacattttgacagcaacttaatgaaaaactttgttgggctgggcgaggtggctcatgcctgtaatcccagcactttgggaggccgaggcaggcggatcacctgaggtatggagttcaagaccagcctggcaaacatggcgaaaccccatctctacttaaaaatacaaaaattagcagggcgtggtggcgggcatctgtagtcccagctattcgggaggctgaggcttgaatctgggaggcagaggttgcaatgagccaagatcgcgccactgcactccagcctgggcaacagggcaagactccgtctcaaaaaaaaaaaaaaaacttgttataataatagcttttgggccaggcgcggtggctcacgtctgtaatcccagcactttgggaggccgaggcaggcagatcacaaggtcaggagttcaagaccagcctgaccaacatggtgaaaccccgtctctactaaatatacaaaaattagccgggcgtggtggcacatgcgtgtaatcccagctactcaggaggctgaggcagaagaatcgcttgaacccagaaggcggaggttgcagtgagctgagatcacaccactgcactccagcctgggagacaaagcgagactccatcttaaaaaaaattaaaaattaaaatagcttttggaatcttaggatttcagataagaggttgtggacctgtttttattatgtttttgggaatatggcaataaataagattgtctaatgggatatagaagcaaataatgtagttgccataaaatatgttaatagctataatagggaaaatgcaaagtgcatcacggggggcatggtacctgaagggatttggggagtgcagaagacttaatggggaatgtaacgtgggaattggttagttgagctttccatctagagtgtgaacagcagatgcaaagacttgataaacttggcgtggcttattggatgggatgaaaattgtccagtctgactagaattgatgtaagatgggaatggcaggagtttctgatcatgcagttctaataggccttgtgagagagactgaggcattggatgagccattgtagggttttgaacagataataccatctagaaagagcactgtggccacagtgtggaatgtattgcagtggagtaagatcccagagagtgttaaaatgatctatagacataagatcattgtgacctgtactggagaactggcagtgagggagatacaagtggacagatagatatatggtgctttttataagaagtggaatcagtggatttggtgatgggatattcagagaaggaggggacagggaagagatgtgaagaatgatgcccaaaattctaacatgaacaactgtgagtggatagtggtaccatttactgaggggaaacacaggaggagaaacatgtatgtatgggaagaaaggggtgagttcagtttgggtagattgagtttgagcctgtgtgacacccaaatggagatatacagtagaacagtaagtaatttgtcttgaaatgtttttgaatcatctgaatgaagatatctagaacattaaagccgtgagcgtgggctagatcatccagggaaatcagtgtgagaagatagcctggcatgggaacttggagaaacatcagtttttaagagacaaggaggagtcgcaaataagaacaaaaagaggtagaaagaaaatcaggaatccagggaggaagaagtggttatggtttgagaactgctccttagcttattactgtgaagaggggccaaaaccaaattggcatgagttgaggaatagaaaatgagaaagtagagagaccaaatgtaggtatctttttcaagaagtttggctgtagaggaaagaagagaggcaggcaatttataaaagagtttttgcttctcatttaatgtagttattttgttgttttcatcctccttacaaatgagggttgcagtgttggttagtccctttagactctccaggctgtagaaagtgttcgtcttctggtcgggcgtggtggctcataatcccagcactgtggaaggccaaggcgggcagatcatgaggtcaagatatcgagaccacccaggccaacatggtgaaaccccgtctctactaaaaatacaaaaattagctgggcatggtacgtgcctgtagtccagctactggggaggctcaggcaggagaattgcttgaacccgggaggcagaggttgcagtgagctgagatcatgctactgcactccatcctggcgagagagcgagactgtctcaaaaaagaaagaaagtgttcatcttccttacagtgagccggtgtgattggaatgtcatagtcatagtcactgttgaacaatgttaatacttatactcaatgggtgagttttcttttctagtaaaataattctctgaatgctaagtaaaagtgataaaattacaaatcaaaatttttctgatcataaaaattatagacaagatattttgtataactacttgttttattcatgaagcccttgccatcttaattttttcctcatatttttctccctctctttcttctccccttcactcctttttgttgtaggtgtggcagagaagacacagcttctgaaattgagtgtacctgctacttttatgcttgtgtctttagatgaaggtccaggtcctccaatcaaataccagtatgctgaattaggcaaattatactcagtagtgtcacagctgatccgctgttgcaatgtctcttcaagaatgcagtcttcaatcaatggtaaatttgaatgctccattctttacactagttttgtttgtttgtttgttttgagacagagttttgctgttgttgcccaggctggagtgcaatggcgtgatctcggctcactgtaacctccgcctccctggtttaagccattctcctgcctcagcctcccaagtagctgggattacaggtgcccaccaccacgcccggctaattttgtatttttagcagagacggggtttcgccatgttggtcatgctggtctcgaactcctgacctcaggtgatctgccgtcctcggcctcccaaagtgctgggattacaggtgtgagccaccatgcccagccctctttacggtagtttttaaatgctgctgggcatatatagtactaagagtctggaggaagatttttgctttggaatattttagccctgtaccttttttacgtgtttaatgggggtcttttttctgtctccttgtgactgaggttgataccatgtttatgaaatagtttaagaattaactttttaggctgggctcagtggctcatgcctgtaatccctatgctttgggggaggccaaggcaggagaatcacttgagctgaagagtttgagcctgggcaacatagcgagacttcatctctactaaaaattaacaacaaaaaagttggctgggtgtggtggtgtgcacctgttgtcccagctactcaggagactgaagtgggagaatcacttcagcccaggagatcaaggctgcagtgagctgtggtcatgccactgcactccagcctaggtgacacagtgagaccctgtgtccaaaaaaaaaattaactttttatatttagattttgtatttttatatcttggtatatctatctgatcattataatgcataatgttactttcttcgttgtgcttaggtaacttgatttaaaatgttatttctctaaaataaaacatttggccagacatagtggctcatgcctgtaatcctagcattttgggaggccgaggtgggtgggtcacttgaggtcaagagttcaagaccagcctggcaaacatggcaaaaccccgtctctacaaaaatacaaaaaaattagccaggcgtggtgacgtgcacctgtagtcccagctactcggaaggctgaggcaggagaatcacttgaacctgggaggtggcggttgcagtgagctgagatcgccccattgcactccagcctgggcgacagagcgagactccatcttaaaaaaaataaaaaaaaattataggctattttctatcgtgaaagttgtgtattattattgtgaagaagcttattagttttttattggtgacaaatctgtattctaggtaatcctcctcttcccaatccttttggtgatcctaatttatcacaacctataatgccaattcagcagaatgtggcagacattttatttgtgagaacaagttatgtgaagaaaatcattgaagactgcagtaattcagaggaaaccgtcaaattgcttcgtttttgctgctgggagaatcctcagttctcatctactgtcctcagtgaacttctctggcaggtaaaaggaaaataacatttgtatgtttataatttgatttgttattcctttcattaagttactcaccatgtcttacttgtttttaggttgcatattcctatacctatgaactgcggccctatttggatctgcttttgcaaatcttactgattgaggactcctggcaaactcacaggtggatactctttttgtgactggaaacaattaggcttgcccaggtgttagagttaactgaaattgacagtcaccacattttttttaacctattggagttctagtgaatgttttatcttaaacctaggacaagggtaaataacaggttctccccttttcctcagaattttatttccttttttattcttttttctcactgcctaagtttcatacttaataagcctgtttctttagaatgacttttttaattaaggaggagctagcttgggcatttggtaaatatttgaatttcattaatgatgcccgaggattattttatgattatattacatttgttttagaattagtcacttgaagcaacttagtcattagtcacatgaagtataatagtatatgtaaaaagtcttcaggtaagtacggtttccatttttcatggtacttatattctgtaaagtcaccacagacactgagttagcaaatactgaaccattactcctaggaggaaatacagaattaggtttctataagcctctgtttacatttttatcaaccagtcaatacataaccttgttgtatgtgtgtttctacttaaagtcatttaatatattttgttgactcataaagttcacagccaacagctctgtaacttaagcctgaacttaagcttctcaatgcattctgcataaggcacatcacagccttcttgtggttaggaacattagatagcacttcaacattatatacttgggtcattttaaacataaaaataaccagcaaaagcacaaatatgtggaaaatgtggcactaaatacaccatgaagaaggacacttgtttacagtttaagctgaaacaagagagaatgacactcttctggacttcagctaggaacgtttgtgttggacaacttgatatttttgctgctctgtatatgtccacagatgacgaagaaagcaccttgatgattgattttgcagttataaataaagtttaggaagtaagcgaattcacaaatgtggaattcatgaataatgaggggatcaattataattagtttttatgagaacttttagaatgttaacttttttcccccgtaaaaactaaggttatccagcttaactggccctcaaactttcactagaatttttctatttgtttttgggggtttttttgtagtaaaagttgaatatattatctttaatcccaagagttatataatagatgataaattatggtattagttgacagcactgccaggttttagaacttcccttcccacatggaagatagtataatagtttgtttgggaaaacaattcaaagtctatgtcgcagtttgcctcccatctgccaaggtaataaaacaaacttaaaaacaagttctgtaacaacaaaatgcttaaagagaagtaacaatctggagttttagtggggattgcgaaagccagaatttgcaacttagtattttcaaattatctccaaatttaccataatagatttcaaacaaatactgtaaaaatagcattaaaccaaaaatcaattttcgtgagacacaaaagatagtagctcagaattatagtcgtttattcaggcagtattcagtgcccttctaaatatgttcataggatttgaaagcttccttcagagtagattttaatgaaatctaacttttactattttcttttttaaaaatgctgtatttctgggcacagtggcttacccctgtaataagcactttgggaggccaaggcaggagaattgcttgagaccaggagttcaaggccagcttgaccaacatagcaagatcttgcctctatttttttaaaaaagaaagtactgtaagcacttacagttttaaaccagttaatcacatcttagctcttgtttgattagagcaagtgataatggcaaagacatacgtgctagattaaatgtgggaattacacttttgtgtaatgagattagtaagatactgttaaatgaatcactggcccaaacgtgaaaataattttctcataatgagcttttagttcattcagtaaacaatgttcaaatatttatagagtgtctaccatgtgcccagcactgcttggcatcaggtaataaggcaagtgaagatagtattaataaaaatggcatttgagagcagttgatgctaatggggagaaaatatgatatggcagaaataatgatttagcacttcattgttacttgaaaaaactgaaggtaaaagcaatttatatgtagtgtttcagatgaaacagcaagagggcctgaacatggttgatttgtctgaaatgattaagctttgcaaaattgttgaagtaatctgttttgtttggaaatcatgaatgcatttgatggaggaaaaaaatcttactttgactttaaacatactgttaagtaaaatacatagtgtatattagaatctttaaattctcagtgtccaggttatgttttctaattgaggtaaaatttacataacaaaactcaccatttcaaagtatacaattcagtgacttttagtacattcacaatgttgtatagccattaccactatctgattccagaacttttttttttttgagagggagtctcactctgtcacccaggctggagtgcagtggcgcgatctcggctcactgcaagctccgcctcccgggtttacgccattctcctgtctcagcctcccgagtagctgggactacaggtgcccgccaccatgcctggctaattatttgtatttttagtagagacggggtttcaccgtgttagtcaggatggtctcgatctcctgacctcgtgatccgcccacctcggcctcccgaagtgctgggattacagatgtgagccaccgtgcccatcccagaacatttttttttattaccccaaaaggaaacccctacccaattaagcagtcactcaccattccttctaaccctggcaaccactaatctgttctctgtctctgtggatttgcctcttccagacatttggtaaaaacgaaatcatgcaatttgtgtgtctgacttctttcacttagcttaatgttttcagagtccatccatgttatagcatgtatcattactttatagctgaataatattttgttttatggatatatatacaccacattttatttactggcacataatctttttaacacaaaagaaacaaggcatgtttgtgcccctacaatcatgttttaagttagttagttcagggaaagacaggactagttggctttgtattattactctgttgtagtttgggagaaactgaaatgaaatcctgtgttattggcaaatcagccaaattgtactatt

SEQ ID NO: 6968 - DNA, 108 bp, Homo sapiens
ctgtcaccaggctggagtgcagtggcgtgatctcagctcactgcaacctccgccttccgggttcaagcaattgtcctgcctcagcctcccaagtagctgggattacag

SEQ ID NO: 6969 - DNA, 112 bp, Homo sapiens
ccaccaccacgcccagctaatttttgtatttttgtagagacagggtttcaccacgttggccaggctggtcttgaactcctgacctcaggtgatctggccgcctcggcctccc

SEQ ID NO: 6970 - DNA, 438 bp, Homo sapiens
ggagcttttggctccacccccaccctccaggaaagggagaggggctggagattgagctaataatccatcacgcgtaagtaatgaagcctccgtaaaaatccctgaactacaggatccagagagcttctgggctggtggacacatccgcatgctgggagggtggcgccccccaactccacggggacagaagctcctgtgcccgggccccaccagagctcgccctgtgtgcctcttcgtcttcctgttcatctgtatcatcaataatgtcctttacaaggacattattgtccttgtgataatgaatgaggaaggaattattccattcaggaaggaatgagaccagatggtatcagatagtatcagggagcaaagactaatgggcccagtttgtataaggtcttagaaacctatacatgtaaccaaagtgtttccctgagt

SEQ ID NO: 6971 - DNA, 83 bp, Homo sapiens
gaggtggagtttgcagtgagccaagatcgcgccattgcactccagcctgggcaacagaatgagactctgtctcaaaaaaaaaa

SEQ ID NO: 6972 - DNA, 324 bp, Homo sapiens
gggggactgcacgttcctgaggccacttcacacttattgagcaaaacgaggtgctgtcctttaagcctggggctgaggtgtttccctcgcttgggtatgcgccgggtggtgggtggactggcctcgaatctggaataagttcaggcattccttttccctctctctttccaagttgaactttaattcttgggtctctggaaccacgtattttgtttggtgtgggaggtattaaatggcagaattctaggaagtaaatattgtgaatccctgattttgctcttttctttattttcttttctctttccttttcttttcttttccctt

SEQ ID NO: 6973 - DNA, 213 bp, Homo sapiens
gctcacacctgtaatcccagcactttggaaggccgaggcgggcagatcacttgaggtcaggagttcgagactagcctggccaatatggtggaaccctatctctactaaaaatataaaaattagctgggcgtggtggcaggtacctgtaatcccagctactcaggaggctgaggcaggagaattacttgaacccgggaggtggaggttatagtg

SEQ ID NO: 6974 - DNA, 350 bp, Homo sapiens
ttttgacaaaaagaattgtatgtaatacagagattatgtaaagcctatttatgaaagaaggtaaaaagaaactagtaaataggtgaaagagatgtaaagagagtcacagatgtaaagatgtatttttggtaacaaagattaagaagaaaagagaataattttgtatgagaaataatcttatgtggtaaatttttgtcctacagtaaaatgactgtttatttaagaaagagggaaatttatgacaaaacaaaaagttcaagcatgttgtaaattgtctgtgtaaatcatgataaggttcataaaaagaaaagctataaaaaattttgtgtatgattaacttggctataatt

SEQ ID NO: 6975 - DNA, 1343 bp, Homo sapiens
agacgtagtcttgctctgtcacccaggctggagtaatcccaaagtgctgggattacaggcatgagccactgcgcctggcctcttatttatttatttatatatctgagacagagtcttgctctgtcgcccaggctggagtgcagtggcgtgatctctgctcactgccacctcagcctcccgggttgaagcaattcttctgcctcagcctcccaagtagctgggattacaggtgcccgccaacacacccggctaatttttgtattttttaagtagagacacggtttcaccatgttggccaggctggtcttgaactcctgaattcgtgatctgcctgcctcggcctctcaaagtgttgggattacaggcgtgagccaccacacccggcctcatttattttttataacaaataatttaatgcctattgattatcctgaagtaaggttaataggtgagtctttaactacattagaatctgacgttacagtgaaataactgagtacctatacctacttacaataaataagttggacttaaaagaaataagatcagaagaactttcattttcctatactatttatagatatgggtagataccagaatgaaaactgttagaatgagtaaaagcagaattatttgcatataagagaaagggggaaataattttgtttgatgtagggataacataagacaaattacatactttccacatggaaaaataaaaatagtatcacatagtcactagtgagtttgacctaattatagtgtcaaaataattcccagttagaggccctgacaggagacaaggaagtgaggaaatctcacagaaaacctggtggcatttacattcagcccctagtacttaaatgtcccctggagaaaatactccttaataggcaatgagtaataaaggatagattagaaaaagaaacaggaatagatgtgtggtagacttcaggggacattaaaaaaaaaagaaaaataatagcaacctcaaaataaataagttcaatatttaatttttacaacatagatttctacctattgtgtcataaaaaattaaatataactaagacgatattgattttttttgagatggagtcacccaggctggagtgcagtggcacagtctcggctcactgcaagctccgcttcccaggttcacgccattctcctgcctcagcctcccgagtagctgggactacaggtgcccgctaccatgcccagctaatttcgtgtttttagtagagacggggtttcaccgtgttagccaggatggtctcgatctcctgacctcgtgatccgcccatctcaacctcccaaagtgctgggattacagccgtaag

SEQ ID NO: 6976 - DNA, 560 bp, Homo sapiens
aatatataccacaaatgtaatttgctaaattgttaggaagtactgataactatacaccacacacactaaaaatccttatttgactctgttgagtgaagggagatttcactttaaaggcagtgaggaagacatggaagaattgtttttgaggaaaatattatttgagtttgccataatgtagagcaatgctctctgataaagccctccttctatggtgatggaaatgttctatatctgcactgtctaatgtggaagccgctaactacatgtggctgttgaacaattgaaatgtggctagtgtactgaggaactgaatttttatttaattcattttaattcaataaatttaaacttaatgtggctgtggctaccacattggacaatgcagctctagagattttatgtctgagtgattaggataacatgccaacagtacagtgaacactttaaaaggtagatatttacagaatctctcatagaccttttttcttcttttcttttttcctatttgaacttgttttgttagttggtaagtataacatttgaatttacaaagcatt

SEQ ID NO: 6977 - DNA, 708 bp, Homo sapiens
gtgaaccatcaccctaatgcattgcatgcccaattatatttcataataaaaaccttgattcctctctctctgctcctcagttaacacctagaaaattctgcactgtgtctctcatatctgttatctatcttctcttttgctttctcacttctgcttgctactccatttcttcattcacaacaaagaaagaaatgcagtgatagttctcttcctcccaaaacctccgctagaaaacattggccatctcaaggtaaacagcaatgggagggcctctcgtgatggccgggaatgatatgcattaccagaaaagcatgagctactactgctcttcactttccttctgccatccatctgcagtgcttccctaaagggggtcatggattcatattctcccataaattttccagtatgggtctgctatgaaccaattcagatcttcaggaagagtaaaggtgaacagaaatatgtttccttctccttgtattttgaaggccagtcttatttcaattagaaaataatgctggaaaagttactttgagaagaagggcaattgacctggattatgagtgacagaatatttttccttggaaacatatattttttcttaagtataactctaacatttggtcttaaaaactttttgaaggccgggtgcggtggctcacgcctgcaatcccagcactttgggaggcccaggagggtggatca

SEQ ID NO: 6978 - DNA, 521 bp, Homo sapiens
attttgtataggtggtcattttcttcaaaaatgttcctcatttctatcccttcgtttctaatcctcatctgttctgattcaaaatgtatcagcttttatttttctctgtttaatagcattattatgtagctatacttactgtgctcctactatgtgccaatatctttgcatatgtaatcttaatccctgggatgacttgacaaaattgcaagtattagctccattttacgaatacaaaaatgtctcaagtcagtttgcccaagatcaaacagctggtaaagtgacagagtcggcatttaatctaggactgtctaacctatgcccatgttctttctaacaaatcacatcgtcgctggagttcagtattaattgaaattgcttttaaagatataatattttatagggctatatctgcccaataattagcagctttaaaccagtcatacctgtcaccaaacagtacaaacgaaaccacaataaaaaatgatcttttgagctccctcttataatccctatatatc

SEQ ID NO: 6979 - DNA, 535 bp, Homo sapiens
cctccataaaatggtgccataatgtcacaatgcctaaagtatggggatttgcctcagattcttctcctacttggtggaacaggtgcaggagctttgtaaaggtgttatgttttaggatgtgcttgcataataatacaaatagttacgtggtgtaaatttgaatcattgtaaaagacgtcttggtaagagaaactgccatttctcatatattgctggtagaaaattagagttttagtattttaaagaagtagactggaaaatgtagtaacagtaataattttcataaactttggctgagcattcttactcctatgagtctacctcccataaatagaagcagcagcatatgatatgtgtacaaaaatgtttattgtgacaatgtttgcagtaacaaaaaaaaaatggaattgagcgattaccatcaagaggtgggatctatgagtgaattgtgttccatatggtattgctgactgaaaaagaaaagctcaagaaaagcacatatatgtcttttttggaaaataataacaaaaaagtg

SEQ ID NO: 6980 - DNA, 617 bp, Homo sapiens
tgaggtcactaataggagtttgaggaggaaagaaggagaaggactttagaagaagaatatatatacatgtttatttatgtacatatttgtatgtatgcattgaaagagagagagaggcagacagggaaaaaaagaaaagagatatattaattttattagtaatttattaccccctcccaaattcacttaggggctcataaaaatcctggtcaatgtaggcatctttaatatttgcagagatgtagaaattctgtccagatatatgtagggaaaaatgggactgaaacacagattctgcatacatatcaccacttattagctgcattacgttgagtaagcctgtaacccctcagctcctcctcttccttagatgcaaaatggagaggacacttcctcccctgacacagctgggagaacccaatgagcttgtgttttctagacggtgatacatgatacagaatgaaaactctcatggttctgaatctgagatatggttcattacgacaaaaaattaattcacattggaggtttgaggcatcctgaagaattgaggtgcaagctgtgaatgcatctgtcatttttattttgtctgtgtctgacttaattatttcctgttc

SEQ ID NO: 6981 - DNA, 1168 bp, Homo sapiens
aggacccccattcccaagtcaaacctgtagatgacataaaatgacagcaaagagactgagagactgttgatcaaagcacagaacaggttcaaataacttttccactgcatgaaagtttaattagacatttctttgttttcaacattagaagtggtgtaacatgtaagctgagcacggtggcatgcctatagtcccagctacttgagaggctgaggcaggaggattgttgagcccaggagtttgagtgcaatctgggtaacattttttagaggtgccagttcccacctctaaaaaaaacaccaacaacaaaagaaatgatgcaacatgtaggcttacttaggaagtccagcattaatggcatagggcataaagctctattttttgttaaaaatacttcttatagagtaaaatttatttagaactgatgtccaaggacctatgcagatttatatgaatgttggaagctatagagattttgatatcatttggcttataaatccacaggaggagataatgtatggaaaacatttaaatcactgtcaattgcagagctgcctgtgatcttcttaggttatagccaagtcagcaacataattcctctaaataaaattacattgtgctcacacagtgctggattattacatttaattgaagacaaagcatgcttgctcctagtactagcagcaagcttttcctcccctcagctggtaatgatggtaggagacagagatgaagttgcctatgtatgtcatatcaattcaatagctgcctggggtcaaacacctaggggttgtacattccattactgtaaatgattgagagctggtttgtggtatggttggctttgcctaagcatttttgaagatgaacagcatgtgcagccaaagaactaatttgctaattaaggtggaacaatcattctgaatgaaatataatcagagtactccgcagtttgttaagaagtattggggaggaggggaatgtgtctcacaataaaatgagttggaattgttgagttaaatgaatttaacctgttttttgactcaggcctactcagagcctctaatgtgtgcacgtgtattgtgaatcctctagagagcttgggtggacggaaaatgaagtgctggtattgaagtaaagaggcttgaggaggctgggcacggtggct

SEQ ID NO: 6982 - DNA, 100 bp, Homo sapiens
cttgaacccgggagacggaggttgcagtgagctgagatcgcaccattacactccagcctgggtgacagagcaagactccgtctcaaaaaaaaaaaaaaaa

SEQ ID NO: 6983 - DNA, 384 bp, Homo sapiens
tggagttgaaggttgcagtgaggcgagatagcgccgctgctctccgacctgggcgacagtgggagacttcatctcataaataaataaataaataaatattacttttacgttttgttaaacttccacttgtttttgtttccgttgcatgaaccttcgtaaagcttcaggaggctgatggcagcctccttccccaggcttccccgtggcgcccgcagccgggttgggccagaggctgggactgtttcctcccgtggggtctttggtggggatgtccccagaggagtggggcaggaggaggggcacggagcgcccccgggagccggtcagagcgcagcgatggtgtctgtggttccaaccactcgggaggctgaggtgggaggatgg

SEQ ID NO: 6984 - DNA, 338 bp, Homo sapiens
cgaggtcaggagcttgagaccagcctggtatggccaacgtggtaaaacgtcgtctctactaaaaatacaaaaattggccgggcgtggtggcgggcgcctgtaatcccagctactccggaggctgaggaaggaggatcacctgaacccgggaggcggaggttgcagtgagccgagatggcgccactgcactccagcctggcgacagagcgagactccctgtcaaaagaaaaaagaaaagattacttttggccgggcgaggtggctcacgtctgtaatcccagcattttgagaggctgaggcgggcggatcgcctgaggtcaggagttcgagaccagcct

SEQ ID NO: 6985 - DNA, 106 bp, Homo sapiens
atcccagcactttgggtggccgaggcgggcggatcacgaggtcaggagatcgagaccatcctggctaacacgatgaaaccccgtctctacaaaaaatacgaaaaaa

SEQ ID NO: 6986 - DNA, 2897 bp, Homo sapiens
acaaggaagtcctggcgagcctggagcagaagctgaaggaaattgacgaggagtgccggggcgaggagagcaggcgcgtggacctggagctcagcatcatggaggtgaaggacaacctgaagaaggctgaggcagggcctgtgacgttaggcaccaccgtggacaccacccacctggagaatgtgagcccccgcgtgagtgctggaactgcggcctctgggctgcttgcagggctccctggacatgggttggggtgggtgggtcacatctccctccccttgactcagcccttgctctcctcctataaccacagcccaaagctgtcacacctgcctctgccccagactgtaccccagtcaactctgcaaccacactcaagaacaggcctctctcggtcgtggtcacaggcaaaggcactgtactccagaaagccaaggtaagcagtcactcccagcctcccttggggccagcagaaatgtcactaaggtaggggcccatcttctgacccaggtggtgctttgtggcttttggcaccagctctgagcaagggctcggcactcaccaaggagtggccatggctttgccatgccttcagctcagtctctggcactgaccaaccagaaaggtgtctgcacttggttcgagcatccttccctgtgagcttggggatgcttcagttctttgccctccacacagctatgggtagattccaggaggccagctgcagctcagggacagattatgactgagttttcaaaccaaaaagtcagtcagtgactccacaggacttctaccattaaaactaaagaaacagactcacataggtggtttgaattgcccaaagttgcccacccaactactggcaaaattctcagcaagttgtgaatgaggaatccatgctatgatgcggtttctccctgatggctagtcaaaaaagtatcattaatcatttactcatttactcatttgtacactaaagaacatgcctagggctgcctttgcttttggcaaattctgctccttattcctatcctccttacctgctggagatatttggaggtcccacaacaatggctaaccaataaatccatgcaagcatctgaacctccactcccttgttgctgtgagagacatcacttataggcactcgctgttgtgccacagtctcaaaatctctgaataggcactctaagcagtgatgaacacacagggtttgaaacatttatcacctctgtgcctaaaatagtttttctcacattttttctatgtatatcaaggttgctacagtggataactaactatctttttggtggggggtgggtgctggtatttgaatggtaccctaggaatgggagaagaaaggagcaagttagaaaacaagcttcatctaaagactctcatgtcaatgtggaccttggtgacaatcctgctttgttaaagcaaaaactatgcgaaagggtgagtctgtttagaagaaaaagcaaagactgaggtactgtgaatggagagcttcagctaagaggaggctctgtcccttttcagagccaaaggaaataatacaacaaaaaggaggcttctttggagacctaagtctattggatgtaaacaagacgttgtatttagggatgttctgtgtttctttcttttttgaagttgtcatcaattgctttactaagatttttaaatagtgaaaacctcctgtttagactttggtggaagatgaatcaaggaagcagggccctgtcttatgggtcacgtgtctttggtgagtgagaagacctaaactcctggccatcatctcttatccaatacttagcagttggggattaaaccatccttgccttcagttctctccaatattaccaggcccaactcagtcttcagtgattttaaacagcattgacatcatctgtaaaaccatcatctgtaaaaccatctatgacatgagttttgagaaacaataatggggaaaatatttgggaccaagctgaagcactaatcccactaagttaaagacttctttccagtccaaggcaggcctgaatcaactgtctttaaataaaattttaagtgatgctgtattatatataggaaaaaatgcttaaaatcctgtcatttagaacagtgaaaagtatcttttgagattaaagtgactctttactgtaggaaaaatattactctgtgtttacagattcattgctgtggtcaggccatttttaagggaagagttatttaatataaatagtctctgattttaagttctgtttaatgttcattctccttccaagaacaaagtggtgatttttggttagggtgatcgccctcttaaaattggcagtgctgttccttgtgctgcccctgtcttttcctctgatggcatttttttttttttttttttttaacacaggttgaaacatttcatctattatctctgcctcatttctggagggttgtgtatcagttctctaacacttgttcctgagaactaaatgtcttttttattctatttcctctctcataaacattggtgaccttttaccaagtggtgagttagttaggttttttaaaataaaatgttcattgtatttgaagttttcttcagttcatgaaatgacttggggcagggcctggggggttctcaagggaggaaatgttttggttatttacacactgaactacaagatgggatcctagcaggaaactcagcctccttgaatcaaagagcatagataaggctgaaagcaaattttagttgtacagttaacaacataccaaagacacaggaaacatctgcagaaattgatcatatataagtgaatgaaaaatcagtactcctcccagaagttaaatatactcctaaagaattcttgggaaaaaagaaacataccaatactggg

SEQ ID NO: 6987 - DNA, 22585 bp, Homo sapiens
  SITE (9701): n equals a,t,g, or c
gaggacggagaggctgtgagcagctcctacgagtcctacgatgaagaggacggcagcaagggcaagtcggccccttaccagtggccctcgccggaggccggcatcgagctgatgcgtgacgcccgcatctgcgccttcctgtggcgcaagaagtggctgggacagtgggccaagcagctctgtgtcatcaaggacaacaggcttctggtcagtctgccttacgtcgtcttgtcccccgactcctctccttggggaaggggcagggacagggaaggagggacaggatggtccctgacctcagaggtttcgagcttgtttatgtcaggagattttaacttctccctaatctgaaattgtatacaggattttgtgtgtatggatgaatgtactttttctgaaccagaaaggtctagtagtttcatcaagttctcaaagggggttgtgactaccaccgcctcccccatccccatcccatcctcctctttgtgagacagatacatctttctgtcccctggtcctttttcacatcctgtccgctggagtccagtcaggctcctccagcccagccccaattctggctactgttttttgttgttgttttgttttgtttgtttgttgttgtttttgagacagagtcttgctctgtcgcccaggctgcagtgcagtggcgcaatcttggctcactgcaagctccacctcctgggttcaagtgattctcctgcctcagcctcctgagtagctgggattacaggcgcccgccaccacgcctggctaatttatgtatttttagtagagacggggtttcaccatgttggtcaggctggtctcgaactccggactttgtgatctgcctgcctcagcctcccaaagtgctgggtttacaggcgtgagccactgcgcccagccctggctactgtttttatctgtgcagcatgagaatgctaggtatcttctcagaagcaacaatattttgaattagtgattacaagaccagacccagcaaggaaccagacattactctgacaacagtcctgtttcctgctattttaaattaaaattcccagttgcgtgtcctgatttgaaattccacggaattattataaacaccttttcttgcctggttacaacaggccctgctccgtgccaatgttatttcaagtaatccttttaagcaaccctgtaaccccattttacaaatgggaagccaagggataaagtattttctctagtaggggaagagtccttcctttctttgttaatacatcatcttcctaactaggcagataagaggcttagtttttgtgccttatggatcctttactccagaagccaagcaagcaatacagagaggtggagaaacagtgaaagtctgtccactttggagaactgaacggtgaacacagaggacgtattttaggccctccaggcctggggcaagtttgagccatttggatggcagcatcctggagcatccttggctgaggccagtgagaaggaggcttgagggagagagggacaatctgatgtgaagaacaggagttgctgatatttgaggttaaggctccaggcctgcttcggggtgtccagcctcttagtcttgctgggttaagtcaggctcttggtgagtcctgcaacgtccagcggcccctcctttgcagacatcacctccgcccggcacccctggcaaagtggtgtatcttctctctttccttccagtgctacaaatcctccaaggaccacagccctcagctggacgtgaacctactgggcagcagcgtcattcacaaggagaagcaagtgcggaagaaggagcacaagctgaagatcacgccgatgaatgccgatgtgattgtgctgggcctgcagagcaaggaccaggctgagcagtggctcagggtgagggcgacaccgagccacttggaggggttcctagagttgtggcccccagcttttctaaagggatggatgatagggtcaggggtagaggatttgtgatccttcaagtttgcagggcttcctgtgttctaagtggtaacgatctgtcttctgcaaatgggttacagcgtgctgctgccagttctgaatccccagtagcccggacttgggtgcagttgaaatccatttccctttttgcctttagtgaggcatccccctcctccttattaaagaagaatacatgtcgctgccatttgccacgtatttgccatagacccaggactattagcatctttaacccacgtaaccacactggggatggctggggaatgttcatgtccccattttacaggagtggtgattaaggctcaaaggatggaggtgatggatcaaagtcgtctgccaagtggtggcagcattggttctcagaccgaggcccgtctacacagtgctgtgcctcctcccaccacgaatgcacgtggcccactctgcccacgcgtccctgggtgtgattatgaggcacttggggaggggcttgcttgcctcaggtgaaagctgggcttgatgcttccagcggatgtaaagtttgcaccaggaatggatccccagttccagagggacctccaaacccagcagggaccctggtgaggccagtgagagccagagcagcccttcccctccttcctgctgcccctcccctccttcctgctgccccctctcccatcacaaccacttcagcccagaagcgttctatccaccccgcaccccaccccactccacctgccacccagctaaacataaccaccttggcgagcctgtcagaaacagatctggaccgctgtggtaaaacaggacctcagtacccgcctgaggcactggtccacccctaggctgagtatcctagatttggagcaggcaggctgtttttgtaaatccactaattgttttggaaatgccaggcctgtcctaaccaagcttctagaaggtgctgacaggtatccccatctttattgcaaaatcttcaagtggtgaaagacagtggtatgtagaaaaaggccactgcatagacaggtttgtggtttggcttcacagatctccatgtagggtggggttcctgagagagctaacaagctctgaaaggccagccctgggcatttaagagccagggctctgagttcaaatcctggcttcacccctgtttagctgagtgatttggggctggatcctttaatgtgcacaaagtgcttagcactgtgcttggtatatactgagtgctccgtgaaacttggatagtacagataagaccactgaggcccagagggaatggggggcttgtcctgggctgcagagctgattaggacccagagctctgggctgttggtttcttaccccagtctcctgcctcacccactacacacacatactcatttgcacacatatatgcacacatgcacattcatgtatacatttgtacacacacggacaaatgcacatgtatgcacatttgcatacacatttttgctcatgcatgcattgcgcatgtatatgtacacacacacacacacacacacacacacacacacacacacacacacactctgctcttgcccccagttccccgctctgttcctctgactgctcaaatccaccgatcttctccctggcccctagcctccctccccaaactctcacgccctcttcctgaggcccctggccccatagcctctgctggtggtttcaaagacaagaacgctttcagcaggcacagactttctgtgtccagcctccacagagagacccttccccccagctcagacaagtgcagaggtggacttggctggaaatgcctgctctcagaagccgcccactcttgcgctttggcagtgggggctggtccacctgtctgatgggctctccacctacctgcattggctttgtgaagcccatctaccttccttggacctctgtgtcccaattctgcatatccgcacccatgcccagggtgagacaggtatatgacagtaaacgggagatgctgactatgggacgacggtcccagtaaaggaaggcacaaggcagggcttttcccaggaagcatgaccctgcccccgccccactcctgaactcctggcttagtggcactttccctgggcagggccatccgtgtatttggcccaagctaatagggatggtaatccatgtgcctgccctgtgctgggtgcttgacatacaagcgctcacagctggctcgtggcaaaggtattgacccagcttacagatgcagtggctgaggctcaggctcaatgtcacacaggtgccaaccctagtgcctgtgctcttcctatgacactgggttgcatattcagtgtggaccacagtcccgaactggagttcttgggctcttctgatttgaaacccatttccacaaactgctctaggcatagactgaaagagggggatctatgaaatcactctaactaattctgcgtttccaaagggcttccaggtgggtagtgtgtttctggtcgccctgggagttcccccggcaagaagggagtgcccctggctcagactgaggcaatgctttcatagtcagagccactgctgactttctgcatctgcccccagcccaggctctgttcctctgactgcccaaacccacctatccttttccggacccagcctcccttcccagagtctcacgccctcttcctgagaccccctgccccatagcctctgcttggggtttcaaagacaagaacgctttcagaaggcacagcctttctgtgtccagcctttacagagagaccctcttcctccactggtcaatgaagccagtgaagaggccccttcccagaggcgggcgggcgggtgggtggcggcaggcgagtcgggagagccagagggtggttggaacaagggagtttgcaggcctgctcctcaggcagcgtggagactccacagagagttgcatgacctctgaaaagccagaggactgtctagcaaggcagttgttgatcacgcctgcaacagaacagtagccctgcctggaatggtggcaggaaaggggctcgcggagccctgggctggtggctctggtcatctttggcctttgctgccaaggccccccctcgcatgcccatgaacgtgtgggacctgcggaaaggagctaaacaacgagccctccccactgcagcctgcccagctgggtctgaggccacatgcaggccttggggctggggtcgggtgggtcctcttccttggaaattcatcttctctctcacctccacccactctcccctgacctgcaggggccctggcttcagcctggctgtgagtgctggccagaggacctcagcctctgctgacggcttccctcttgcctcaggtcatccaggaagtgagcggcctgccttccgaaggagcatctgaaggaaaccagtacaccccggatgcccagcgctttaactgccagaaagtaagcctctgccctgcctggagggagagtccccttccatgttttctctgtaaaaattaaaagtgcaaaattgggagcttcgtttttatatttcagtccaattaataagaaacatacaatgcttgaggccgggcagggtgggctcacgcctgtaagccaagcactttgggaggctgaggcaggtggatcacctgaagtcagggatttgagaccagcctggccaacatggtgaaaccgtgcctttactaaaaatacaaaaatagccaggcgtggtggtgggcgcctgtaatcccagctactcgggagcctgaggcaggagaatcacttgaacccaggaggcggaggttgcagtgagctgagatagcgccagtgcactccagcctgggtgacagagggagactccatctcaaaaaaagaaaaaagagaagaagaaacatacactgcttggaaaagaggagtaactctagcttggcaggaaaatggaggaaacggatacagacctaaaatattttcttgcttgtaggtgccgggggtgggcgaatggggagacagggggaagctttattggaacaacagtcactttggcctgcattcttaagtagggagattgattttatgaggcacttcctttccccttattcctcagtagcgcctctgggcttggggcactatctcaaggctgattgcaaccaaagggctgtagtcctcatttgcatggtgctttcggggagctttaggcttaaaggtcaaggctgaaaaagttgaattaggttctggccaaaaggaggatcatcacctgtggggtcacatttcctgtccctgagtacctgcaggtaggtgtcctgaagcgtgggcacacatagaacagccagaacatcactgtggctcctcttggggtccccaccccagcagggaggaaaacaagaggcacacagagggctcgagcagaaaggaggccacttactctccagaaggcacaggtcatcccacatggagaaatagcccacagtccttccagattccagagtgactcaggaggggccatttttcattatctcatttattccttggccactgacaagaaaacaaaagttggaaagaagttgggttttcttcaaagactcggcatgcagtgcttccttggccagggactgctggccctggaccctgcctaaggccggtcctgttgcttgggagactgtcagcttgttttccagaggtatggagtcggtgactctctaaacgcagcttgattggaatattctgagggtttcatgttctaacagtagcagcagctacacttttctagggatcatcttgagtccccaacacccctgtgagcagactgggatgtcatccctatgtgacacatgcagagtgaggctcagagaggctcatttaacttgggcaccagcctggcagcagaatgctccggccaggactcaaatcacatggtctgctcctgtgcagacgaaccagctcacattgctagaacagtcagctctcaaaagacttcttcacactctcagtatgagtggtttctagcttgacagttaacatcataggggatgcagactctaatgccacccctgagcagcctgcttgccctgcccactggctacagggtcactgtcacatcaggttgagcagccatttggaagctgggccaatgtcctaccagtgacctggattctgccgtttaggtggccggcagggatttgctcagctgacctctggcatacaaccaagagccatctattattttcccttcaattgtggtctccaaggtaactgttcccagccagtgatccccattcatgtcgcttttgtccatagccagatatagctgagaagtacctgtcggcttcagagtatgggagctccgtggatggccaccctgaggtcccagaaaccaaagacggtaacatcatgtggttgggaggggaatggtgtcccaggctgtgaggctgggctgtcaggctcaaccctgatgggttttagcagcggattctaacatggccccctattaataaaccactcggaaatactgctgttagatccaggaaaaagggagactcggccaaattgaagttaagcttcatgaaatgctggggatagaatgttcttccatctcttcttgtttgctaaccctatttcaaatctctttgagccagtacagtgtgtaaagattctcaagtggttgcatattctataagaagtctgtgtacccctcttgagtgtgtgactttaaagacacctgactgtggcctgcaggtcctggtttgaggagatgtgtgtgtgtgtatgcgtgcatatgtgcgcgcatatgtagcggggagggatgggtggatggagtggaaatgggtttgctattttttccatctctcatgggcacgtgggtggaccacgtgcaatacgaattgctttctgtctcatcttgacagtcaagaagaaatgttctgctggcctcaaactgagcaacctaatgaatctgggcaggaagaaatccacctcactggagcctgtggagaggtccctcgagacatccagtaagaattgtagctacctccgggaccacaggctcatttcctgggctggaacctgcaggaaggcgagctcagacagcgaaggcagggggttttaggtcttccgtaaacatctctaggaatggagagcctgcagccctcaggttcccgtctgttgttactgcaggcagttctttatgcctgatccaactctctcttgctgcaatgttggggcctttgtggaagtgaagggtaactgattggtgtcctcctagtattcttttaaaaatgatgttcatttgatctatatttacagggtatatagcagggaccttgctaaaaggggaccaagcagaaggatggcaggcacagtactgagagctcacagcctgcctgagggaggtgatgattttatacccataagcacgcactgtgccatcttcgtagctatcaggactcagggacagagagaacttttcttgccctgtggtcagagatagctttgtggacctgagccttgaggggcatgtaggagtggaatgggctggaatggtgcttgtggacaggagcaatgactctgaaatgggaacaaccgagactatgaaggggacaatgagaaccctgtactggtgcagagggtatgggtgcaggtaggctcttagaggtcatctctacagccttagctcatactcagggaaactgaggttaggaggagcgacaagcctttcttgggaaatatcttggggtgggcctggtatcttgatccccaagcgggtcccacattgggggtcatccttccaggggcctgaaggccattattgtcccatctctgggttcccttcctgagtcccagttgagttttcttgtgttttgaggctggcagggtggtgggggtgggctaggaggtgtgtctttgcattctccggcttctccagccagggtgccaggcagtggcctcagggggcatgatgtttggcctgggagctcagtccctgtgagtcactgtttaagagatgtggctgggtgattgctggatgtctactcagcagtgaagtatgcttcctgcggctaggggagggctgagagagaatacagctgctctccttcccaggactgggggtgcttaatgatctgagatcccacctctcatgatccaaagttctctgtggtccagaggattgtgacgggtgtgtgtgtcatctcagtcctggtctctaattcttccactttgtgttaatgtggcttggcgatatgcatgatccccactgggccaggcaggaaggtagctgtgcattttcacgctattgcctggttcagccagccaaagctcagggcagcttccaatcccttaggacagggaaggtgtctgatgggttctgaagctgagaatctgggggactctaaggaagcctagaggcagtgccagcataggacacacctagacacccatgccctcctgcccccgcatcccctcctgcccccgcgtcccctcctgcccccgcgtcccctcctggatctgcgtcccctcctgcagccccgacgcctcctgcatctgcgtcccctcctgcagccccgaccagtcctgtacgtgcaccccctcctgcatctgcatctcctcctgtagccccatcccctcctgcagccccgctccctcctgcagccccatcccgtcctgcagccccgtcccctcctgcacctgcatccctccaggcatctgcatcccttcctgcatctgcatctccttctgcagccccgtcgcttcntgcatctgcgcccccttctgcatctgtgtcccctcctgcatctgcgtcccctcctgcatctgcgtcccctcctgcagccccgacccctcctgtacctgcaccccccctgcatctgcatctcctcctgcagccccgtcccctcctgcacctgtgtcccctcctgcacccgcgtcccctcctgcccctgcgccccctcctgcacccgcgtcccctcctgcacccgcgtcccctcctggatctgcctcccctcctgcagccccgacgcctcctgcatctgcgtcccctcctgcagccccgaccagtcctgtacgtgcaccccctcctgcatctgcatctcctcctgtagccccgtcccctccagccccgctccctcctgcagccccgtcccctcctgcacctgcatcccctcctgcatctgcatctcctcctgcatctgcatcccctcctgcatctgcatctccttctgcagccccgtcgcctcctgcatctgcgccccctcctgcatctgtgtcccctcctgcagccccaacccctcctgtacctgcaccccctcctgcatctcctcctgcagccccgtcccctcctgcatctgcgtcccctcctgcacctgcgtcccctcctgcatctgcgtcccctcctgcatctgcatctccttctgcagcgccgtcccctcctgcagccccgctctctcctgcagccccgctccctcctgcagcccagtcccctcctgcatccgcgacccctcctgcagctccgtcccctcctgcgtccgcatcccctcctgcatccgcgtgccctcccacatccacgtctcctcccgcagccccgccccctcctttatctgcatgccctcccgcagccccgccccctccttcatctgcgtcccctcctgcagcccagtcccctcctgcagcccagtcccctcctgcatctgcgtcccctcctgcagcccggtcccctcctgcatctgcgtcccctcctggagcccagtcccctcttgcatccgcatccgcttcccctcccgcagccccgccccctcctgcatctgtgtgccctcccgaagccccgccccctcctgcatctgcgtcccctcctgcagccctgtcccctcctgcatctgcacttcctcctgcaggttacctgaacgtgctggtgaacagccagtggaagtctcgctggtgctctgtcagggacaatcacctgcacttctaccaggaccggaaccggagcaaggtggcccagcaacccctcagcctggtgggctgcgaggtggtcccagaccccagccccgaccacctctactccttccgcatcctccacaagggcgaggagctggccaagcttgaggtaccgccggcctgcagggggagcagggccagccagggtgtggcggtggtggctgtttgctgccagtctccaggactgtaatgctactaagggagaatcaatgtccccgcgtgttatttttacttcgtttgcctgagattgtttgcatttttaaaaatttccattccttttctgacctcagagtagttgcgttataagagtggaaccatgcgctacttcctgcacttagggcagaaggagtatttttagttctctgagctactggaaaagctgctggggattcaaagtgggtgttgttttgtttgggtatcaccagctgggagagcctctaggcccagtacgtaaaaaccacactgttagagcttatctgggggaaaaaattcgctttgtgatacaattacattcctctcgctccccatcctccctttgatgtgatgttacgtttacaaaaataagaagtgacataacgctttgcaagctgcggcaggcggagaccgagtcccttccacgcatggaagcacacacttgcccgtgaatgtccgttcacttagtctttgatgtggaggtcctcatccaaactttgctccaatcctgccctctggtggctgaaagacccacatcgcaattgcttcccagggtccagcttgtagcttatattcatccattcagaggttccccatcaacagacatcttctcagcacaggaatatggtggacaagagcaatatggactccgtccttgtggcacttacatcctagtttgggagtgtgatgttattcagcaaattacccagccaatcgctgggctacaatggctggaaagaagtggggagggtgctatagacttgtactggggtctgggtgacaggctggagcgggagggacagggcttgatcctaggagcaacggagccctgatggctttcaggggagggcggcaagctcagatcggggttttgagatgcttcctccagctactggggtgggagtggatcggagggggcaagaagggacctgctaggaagctgtcgcagctgtccagggcagagacgcagcctggactaggggaggcccatgaaaagctgtatttagaatccagttgaaactaagtgggggccgggcatgatggcccacgcctgtaaccccagcactttgggaggctgaggcaggtggatcacccgaggtcaggagtttgaaaccagcctggccaacatggtgaaaccctgtctctactaaaatacaaaaattagctgggtgtggtggtgggcgcctgtagtcccagctacttgggaggctgacacaggagaattgcttgaagccgggaggcagaggctacagtgagccaagatcccaccgctgcactccagcctgggcgacagaacaagattctgtctttaaaataaaaaaaaactgggaaaaggaaaccaactaaatgtcaaattctgctcatcacggcctctttgatgaagagaatgtagcagcaaacgtgatggagctatgggttataccaaagggggctgattttcctcatcaaaataaacctatagctttgattaaatgggcagttttttctcattataaaggtaagaaacagtgtggacattttaattgaggtacccaatggatgcatttgattagaatgcattgtcccctggaaaaaaaaataccaaattcactgggattttgatgatgatttagcagctgagctagtgtaaggtatttaaaagatgtcccgactttactgaagccatgaacaaaataaatttgaatgttgttatttcttggggatccaggaagtcttgttgtatatgggattgggggaatgacatgcattgttcataaaatacaagtgtcaacttaaaagacatacaattttttaatcattttaaaaactattaattaacaggtggtcactaacagtttttaatagtgaccacctggtgataagttttcacctcctagaaacacaatgtatatacatctcatatggcccttgggacaaaagtccacagcattattgaggtggcatcaagatgtcactgacgacaggaaatattatctggggccactggggggtgggataggctggtgaacaggagaagcacagccccgggctgttacagaggctttcgtgggcaggctcaggggtaggggtacggtcatggcctggtggggaggggctggcaccaggcagcactgcctggccctgcttatgtctctcttggcctcgttccaggccaagtcttccgaggaaatgggccactggctgggtctcctgctctctgagtcaggctccaagacagacccagaagagttcacctacgactatgtggatgccgatagggtctcctgtattgtgagtgcggccaaaaactctctcttgtgagtaatttggacccttcctccgtacactctcttattcctggccatgctgtaggccctgggtcagccagagtcaggggcagcagggagcacagggtcccaccccactctgcccagcagcaggaaaatgtgaagccaaggagtagccctcagggaggcccggccaagagccaggagctgagctaagagcaaggagccgagccaggcttcgggccccgggggcagctttggcatcctcagaggcagttagactctccagctcctccaggcagagctgtcacctttcctgacctcctacttgtccttctggtgaatccctcactgggtctccagcacaccctggagaaaagcaggtcagggggtggtgcttctgtttccagatgagcaaactagggctgagggagagggcgttctctggtcagggtggtagagccagtctcgtggaagccggctgagccactgaaacagaatcagttttctcatggaccaaacggggatagtgtctggcctgcgccaccccaagtgtattgtgaagatgaaatgagaaggggttttttgttgtggttgctggaaggagatcctagaagggaggaatgggggagaagatggcaaagggatcctaggacgaggcgtatgggcaagggaagcttgtctttctgggaggaaaatctcgaaccaagaatttcaggaagaaggcactgggaaaagagggaggaggtgccctcagatccatggaggtgagtgtcagcccccagatctcttgtgtggccaccactttcacggcaaccactcctcactgggaatccttggagtctggtgctttcaccaccctgccccggctgcttcatgtgtgccacctcgccctgtttccagactgatgcagagaaagttctcagagcccaacacttacatcgatggcctgcctagccaggaccgccaggaggagctgtatgacgacgtggacctgtcagagctcacagctgcggtaaggacccggccaggcagtggcctgggcctctccaggccctcctcctaccaacctcaacacctggatgccagagatcattagagtatccctgagatgagatgagtgggttctgagtcacctaccaggccagtagtgcagacacctaagtgcaacaaggctgtctcctatatgtgaggctgtgcagtttgcttggcttggggacttatctagatgaaacaccggtgaacccctctcgtcagggctaggggtgtggtggtgggattgggagtggaggtaccagtaggcttccaggtccaaatcggttgttgagtgggatgatcacaccgatggcaacttccacgttttgggcactgaaccctgtgctgagctgaggacctcctgcagatgatctccttgaatcctaaccaccttatgggaagatgctgctcttttcctctttacagatgaggaaataaggttcagggaagttaagtgctctgtctgggtcttccacctcgagtgacatatctaggactcagccagtggcccccccagcagggagggagatctcttggaacactgtgagatgggcaccagaactgtgaggcagggctggtaccccctccacagctgagggagtagaggtaatgttgaatgccccagactcactctctcctgcaggtggagcctaccgaggaagccacccctgttgcagatgacccaaatgagagagaatctgaccgagtgtacctggacctcacacctgtcaagtcctttctgcatggccccagcagtgcacaggcccaggcctcctccccgacgttgtcctgcctggacaatgcaactgaggccctcccggcagactcaggcccaggtcccaccccagatgagccctgcataaagtgtccagagaacctgggagaacaggtacaggcctcccctgcaggacagcaagaccaccttcctgcgccccttcagccagctgagtcaggtctgctttcccccaaagcagctggagagtttggagccagaggatccttccctgagaatcaccaccgtcaaaatccagacggaacagcagagaatctccttcccaccgagctgcccggatgccgtggtggccaccccacctggtgccagcccacctgtgaaggacaggttgcgcgtgaccagtgcaggtacttgtgcttggggaagttagcccgattccatctgtattagtcagggttctctagagggacagaactaataggatagatgtatatatgaaagggcgtttattaaggagaattgactcacacgatcacaaggtcaagtcccacgataggccttctgcaagttgaggagcaaggaagccagtggtggatcagtccaagtcccaaagcctcaaaagtagggaagccgacagtgcagccttcagtctgtggccaaaggcccgagagcccctggcaaatcactggtgtaagtctaagagtccaaaagctgaagaacttggagtctgatgttcaagagcaggaagcatccagcacaggagaaagatgaaggctggggaagactcagcaagtcaagtccttccatgttcttctgcctgctttattctagccatgctggcagctgattaggtggtgcccacccagactgagagcgggtctgcctctcccagtccactgattcaaatgttaatctcctttggcaacacgctcacagacacacccagcaacaatactttgcatccttcaatccaatcaagttgacattcaatattaaccatcacaccatcgttttcagattaggaaacaagttcagagaggtagagggacctgtccaggtctggcatccagcctagcagggctttgtgccaaagccccaggttctatccgagcctggggagtagactggggacagccctcatgatccagctctgcttacctggggcttccctctctgggtctgtagagatcaagcttggcaagaatcggacagaagctgaggtgaagcggtacacagaggagaaggagaggcttgaaaagaagaaggaagaaatccgggggcacctggctcagctccggaaagagaaacgggagctaaaggaaaccctactgaaatgcacaggtaagggggcccccagtggggagggaccctcagctcagagggccgtgtaggcttaactttttggcggaagatctggctgtcaccacaccttctcaatcagtgggccctggccccttcaacccttggcctgggtgggtgctcccttgtgtgtcctttcttccaatcctgtctgaaaggtcattctcctggacagagagagaaagcctctgacggaacatcaataggaccagcaggtcatcgtaaaagctagttaaaggaagttttacagggttatgcataggccgtgttttattgtcacttaaatgcatattccttggcccatcttttgaggacctggcactgcagattttttgagctctggttggctgactggagtctcatgtcatccttcatgcattaactacacctgttaatgcatcagccttcatttccagccttcatttcttgaaagtcaacaaaaacttaagatacttgccaagaagtctttctagattatcttccaaatcacactcgtatcatttgacagctatttcctggcaatctgctgcatttaaaatttcaaaattaaaaaaatattgagatggggtcttgcaatgttgcccaggctggtctagagctcctgagcccaagggacacctgccttggcctcccaaagtgctgggattacaggtgtgagcgtgagccaccatgcccagctgcaacctgcctcttctagaacctttccaaagtatttgacttagttttcatggagtaactttgtgcttatttaaattgtagaggtgtatgaataagcaagagcagcggtgcaggtttgaggacaaactcagctgactggtgagggaaggtcttgagggtgcaaagtcacccactggctttctttttttgagacagtcttgctctgttgcccaggctggagtgcagtggcgtgatcttgggtcactgcaacctctgcctcctgggttcaagcgattctcctgtctcagcctcctgagtagctgggattacaggcatccgccaccatgtccagctaatttttgtatttttagtagagatgggatttcaccatgttggccaggatggtctcgaactcctggccttaagtgatctgcctgcctcagcctcccaaagtactgggattacaggcgtgaaccaccgcacccagcttgaactgtatttttttaaactccaatcttcaaaacattattagtatacgttttcttttccttccctctttagagatggtccttcaatagcatctgtgaatttttcttaaacagtggccctgtgctcaggactctatgtggtacatatgtgataccatcctttcctccagcagtgagcttctaggatacaggccctaggcatcatttcacggtgtggcagcatcaacccaagaggtccagggttaacaggaggagccagggctgaggactcctgctctgttaggcgtagggaagccagaggattgagggaacttggtagggcaggtcaagctgcccagccctcctccatgggccatgaataaagcccctcacccttttgggtcactgtcaaagcaaccaagagtctctgagaacctacaagaagggacttaaggcctcagactcatgccccttagtgaagccagagctctcctccccaagagcctcccagcctttgcagaatgctagctaaaggaggcctccaggctgccccggcatacaggcccctcctggctctgagtgttggggccagacctgtggtccttctcgggtggcggggtatgtagaccctgcctccacccagcagggctccctggcctgggctgagatgctgttctctgacacctgcataattctctctccagacaaggaagtcctggcgagcctggagcagaagctgaaggaaattgacgaggagtgccggggcgaggagagcaggcgcgtggacctggagctcagcatcatggaggtgaaggacaacctgaagaaggctgaggcagggcctgtgacgttaggcaccaccgtggacaccacccacctggagaatgtgagcccccgcgtgagtgctggaactgcggcctctgggctgcttgcagggctccctggacatgggttggggtgggtgggtcacatctccctccccttgactcagcccttgctctcctcctataaccacagcccaaagctgtcacacctgcctctgccccagactgtaccccagtcaactctgcaaccacactcaagaacaggcctctctcggtcgtggtcacaggcaaaggcactgtactccagaaagccaaggtaagcagtcactcccagcctcccttggggccagcagaaatgtcactaaggtaggggcccatcttctgacccaggtggtgctttgtggcttttggcaccagctctgagcaagggctcggcactcaccaaggagtggccatggctttgccatgccttcagctcagtctctggcactgaccaaccagaaaggtgtctgcacttggttcgagcatccttccctgtgagcttggggatgcttcagttcttgccctccacacagctatgggtagattccaggaggccagctgcagctcagggacagattatgactgagttttcaaaccaaaaagtcagtcagtgactccacaggacttctaccattaaaactaaagaaacagactcacataggtggtttgaattgcccaaagttgcccacccaactactggcaaaattctcagcaagttgtgaatgaggaatccatgctatgatgcggtttctccctgatggctagtcaaaaaagtatcattaatcatttactcatttactcatttgtacactaaagaacatgcctagggctgcctttgcttttggcaaattctgctccttattcctatcctccttacctgctggagatatttggaggtcccacaacaatggctaaccaataaatccatgcaagcatctgaacctccactcccttgttgctgtgagagacatcacttataggcactcgctgttgtgccacagtctcaaaatctctgaataggcactctaagcagtgatgaacacacagggtttgaaacatttagactggccccctgaatctccagacaaccaatatcacttaaataagtgatagtcttaatactagtttttagactagtcattggagaacagatgattgatgtcttagggccggagaaacgcagacggcgtaccacacaggaaaagatcgcaattgttcagcagagctttgaaccggggatgacggtctccctcgttgcccggcaacatggtgtagcagccagccagttatttctctggcgtaagcaataccaggaaggaagtcttactgctgtcgccgccggagaacaggttgttcctgcctctgaacttgctgccgccatgaagcagattaaagaactccagcgcctgctcggcaagaaaacgatggaaaatgaactcctcaaagaagccgttgaatatggacgggcaaaaaagtggatagcgcacgcgcccttattgcccggggatggggagtaagcttagtcagccgttgtctccgggtgtcgcgtgcgcagttgcacgtcattctcagacgaaccgatgactggatggatggccgccgcagtcgtcacactgatgatacggatgtgcttctccgtatacaccatgttatcggagagctgccaacgtatggttatcgtcgggtatgggcgctgcttcgcagacaggcagaacttgatggtatgcctgcgatcaatgccaaacgtgtttaccggatcatgcgccagaatgcgctgttgcttgagcgaaaacctgctgtaccgccatcgaaacgggcacatacaggcagagtggccgtgaaagaaagcaatcagcgatggtgctctgacgggttcgagttctgctgtgataacggagagagactgcgtgtcacgttcgcgctggactgctgtgatcgtgaggcactgcactgggcggtcactaccggcggcttcaacagtgaaacagtacaggacgtcatgctgggagcggtggaacgccgcttcggcaacgatcttccgtcgtctccagtggagtggctgacggataatggttcatgctaccgggctaatgaaacacgccagttcgcccggatgttgggacttgaaccgaagaacacggcggtgcggagtccggagagtaacggaatagcagagagcttcgtgaaaacgataaagcgtgactacatcagtatcatgcccaaaccagacgggttaacggcagcaaagaaccttgcagaggcgttcgagcattataacgaatggcatccgcatagtgcgctgggttatcgctcgccacgggaatatctgcggcagcgggcttgtaatgggttaagtgataacagatgtctggaaatataggggcaaatccaacatttatcacctctgtgcctaaaatagtttttctcacattttttctatgtatatcaaggttgctacagtggataactaactatctttttggtggggggtgggtgctggtatttgaatggtaccctaggaatgggagaagaaaggagcaagttagaaaacaagcttcatctaaagactctcatgtcaatgtggaccttggtgacaatcctgctttgttaaagcaaaaactatgcgaaagggtgagtctgtttagaagaaaaagcaaagactgaggtactgtgaatggagagcttcagctaagaggaggctctgtcccttttcagagccaaaggaaataatacaacaaaaaggaggcttctttggagacctaagtctattggatgtaaacaagacgttgtatttagggatgttctgtgtttctttcttttttgaagttgtcatcaattgctttactaagatttttaaatagtgaaaacctcctgtttagactttggtggaagatgaatcaaggaagcagggccctgtcttatgggtcacgtgtctttggtgagtgagaagacctaaactcctggccatcatctcttatccaatacttagcagttggggattaaaccatccttgccttcagttctctccaatattaccaggcccaactcagtcttcagtgattttaaacagcattgacatcatctgtaaaaccatcatctgtaaaaccatctatgacatgagttttgagaaacaataatggggaaaatatttgggaccaagctgaagcactaatcccactaagttaaagacttctttccagtccaaggcaggcctgaatcaactgtctttaaataaaattttaagtgatgctgtattatatataggaaaaaatgcttaaaatcctgtcatttagaacagtgaaaagtatcttttgagattaaagtgactctttactgtaggaaaaatattactctgtgtttacagattcattgctgtggtcaggccatttttaagggaagagttatttaatataaatagtctctgattttaagttctgtttaatgttcattctccttccaagaacaaagtggtgatttttggttagggtgatcgccctcttaaaattggcagtgctgttccttgtgctgcccctgtcttttcctctgatggcatttttttttttttttttttaacacaggttgaaacatttcatctattatctctgcctcatttctggagggttgtgtatcagttctctaacacttgttcctgagaactaaatgtcttttttattcttatttcctctctcataaacatttggtgaccttttaccaagtggtgagttagttaggttttttaaaataaaatgttcattgtatttgaagttttcctcagttcatgaaatgacttggggcagggcctggggggttctcaagggaggaaatgttttggttatttacacactgaactacaagatgggatcctagcaggaaactcagcctccttgaatcaaagagcatagataaggctgaaagcaaattttagttgtacagttaacaacataccaaagacacaggaaacatctgcagaaattgatcatatataagtgaatgaaaaatcagtactcctcccagaagttaaatatactcctaaagaattcttgggaaaaaagaaacataccaatactggg

SEQ ID NO: 6988 - DNA, 534 bp, Homo sapiens
tttatagcataaatgtgtttattttaaaaatgacaaaatcaaaatcgggttcattaaagagacaaatagacaacctaaggcaatatgaaatagcagaactgaaatggaggccttaatacagatactgacaagatttttcaaattataaaaaaatactatgaatatatcagtgtaaaagtttgagaaatatgtattttccattataaggttagtatagctctgataccaaaaattcaaaacaaattgcaaaagaaaacaaatctcattgttggacacagattaaaagaatctgaaataagatgttggcaaatgaaaaattcagcagggtttatagaatgatgcataatgaccaaatagagtttatccaaaaaaatcaagggttgttcaatgattgaaaatacacaaatggataacctatcacattaacagataatacaaaaaatgcattatcttgaggaagaaaaagcataccataaatctcaacatgtaataaacactcttagttcatctaggaattaagcattcttaaactga

SEQ ID NO: 6989 - DNA, 534 bp, Homo sapiens; identical to SEQ ID NO: 6988

SEQ ID NO: 6990 - DNA, 7789 bp, Homo sapiens
accccggtggctgaacccccgagcacagagcccacccagcctgacgggcccaccaccctgggccccttggatctgctgcccagtgaggagctattgacagacacaagtaactcctcttcatccactggggaggaaggtgaggcaggcgggcccaattcattcgcctccggtacttgcaagcctcgctcagtcttaagcaagaggggatggattcgcccgcagcactgagaatccaggggcaggcgggatggcgttcaggcgctgttgctagaaatctctgtctttactctgttttgaaggcagcatggcagggtgaacacaagcacagactgaaggcagcttgccgcggttcacatcctggtcacaccacttcctgaccatgtcacgtgggcaaattatgtaacttctctgagcttgctttcctcctctgaaaatggggttaacaatgataatacccacttcataggattgttgttaagagactataaatgaggctgggtgtgatggctcacacctgtaatcccagcactttgggaggccaaggtaggaaggattgctagaggccaagagttggagaacagcctgggcagcaaagcaagaccccgttttgtacaaaaaagaaaaaaaagaaaaaactaggtgtggtggtgcacacctatagtaccagctacttggcagaccaaggcaagaggatcacatgaggccaagagtttgagacaagcctgggcaacatagtgagacccctgtctttacaaaaaatttaaaaattagccaggcatggggtcatgcaccctatgtagtctcagctactggggaggctgaggcaggaggatcgcttgagcccaggagttggaggctgcagtgagctatgattgcaccactgcacttcggcctgagcaacagagcgagaccctgtctctaaaacgaacaaagggagagaattaagtgatttcatacatttaaagcacttgggccagttagtaagcattgactattagtatttctattatcattattgtattcattttctctctccactaattttcagctagcctctattcttgtctcttatggggcagagatggcctcagccctgccccagaccagcccaatgagagagagcagcctatttttcctagtgtctacagcggacaccctagggttggctctgattgggccaacttgagagtgtgcctgcccctgaaccaatcactgtggttgatcggatagacctgggccacccactcacccctgaaccaattgctgtgcccctaggttgatgctcccaggaggcgtgctatctggtaatgaatccctgtgatttaaatctcagggcctaggtgtgttctccacccagaaccaagcacagtggctgtctgtctgggcctggagcacgtgcccaccctcaacccatccctgagtcacaggagggctctgtgtcagtgtccagctgtgctccaggaggtggggtccgcccatgcacactacaaggcctgggagtggggaggcgtggcccgcagagggagggaggagtggaggcagtcatcatcctcggctctcctctgtctccagcggacttggctgccctgcttcccgacctctccggccgcctcctcatcaactctgtcttccatgtgggcgctgagcggctccagcagatgctcttctcggactcgcccttcctccagggcttcctacagcagtgcaagttcacaggtcagcgggcgcatgaaggagaggctgaggttacccaggtgcaggggaggggtgaggaagggtagcccaggacaggggaaggcactgctagccagtggggcaaggcgaggtggtgaaaagcaatgtctgtcagaccagaagcagctctgccacttactagctgggtaggcttgggcagagttctgagatgctctgtgcctcagtttctccttctgtataatgggggtatgataatagtacctggcttattggttatcatgagaactaagtgagttcatactagaaaagttcctagagcaataccatatagtaagcgtttaataaatacaagttaagaggctgaggcggggctggtgcggtggttcacacctgtaatcccagcactttgggaggccgaggtgggcagatcactagaggtcaggagtgtgagaccagccagggcaacatggtgaaacctcatctctactaaaaatacaaaaatcagctaggtgtggtggcacacacctatagtcccagctacttgggaggctgaagtgggagaattgcttgaacctcggaggcggaggttgcagtgagctgagatcacactgcactccagcctgggtgacacagccaaactctgtctcaaaaaaacaggggcggggggtggggtgctgggcacagtggctcacgcttataatcccagcgctttgggaggccgaggcaggtggatcacctgaggtcaggagtttgagaccagcctggccaacatggtgaaaccccatctccactaaaaatacaaaaatattttagccaggcatggtggcgagcacctgtaatcccagctactcaggaggctaaggcaggagaatcacttgaactcgggaagcagaggttgcagtgagccaagatcgtgccgttgcgctccagcctgggcgacagagcgagactctgtctcaaaaaaaaaaaaaaaaaaggtgggaggagggccaaggtgggaagttcatgtcagcccagaagttggagaccagcctgggcaacataatgagactcagtctttacaaaaataaaaaaaaaaattagctgagcatgatgctgcccacccgtaatcccagctactctggaggctcaggtgagagaattgcttgaacccaggaggtggaggttgcagtgagccaagatcatgccactgcacctcagcctgggtgacagagagagactccattaaaaaaaaaaatgctcctgaggcctccccagaagccgagcagatgtcggcatcatgcttcctatacagcctgtggaactgtgaacccattaaacctcttttctttataagttactgagcctcaggtatttatagtaatgtaagaatggcctaatacagagctcctcagcctgacacgccagcccttttaggacataagcatagttttgggggccttgtagccccccaacacaaggcaccatcttcctgactgcaggggatactgcatgtctcatcaatacagaaaaagaaacaaagagaaactcccatctgacacgctcctcccctgcttgaatctcttttgtagcctcccaagttccttggctggtcccatgtcaacccttcagcctcacccagagctgtggctgcccctctccatacctggctgccccatcccagcctcaggggacttctctcaatattggcctccagcctcagggcctttactggtatcacgcggcctcctgggctcctctgccccgaccccttccttcctcagttcctccttcaggccttggttttgatttcacatcctcctggcagccttcccttaccttcctcagatcccagatacccccagatactcacagcttctgcccttaactcacaccatgccagtagtgtgtggtttttatttatagatatttcctgttgttctcaagagattctgggtgctaaggacaggagttcatctatcctggtctcccactggcctccaagccctgcataggcctgacagagtggacattaaatttgtgatcattaacacatatttatttatttatttatttatttttgagtcaggttcttgctgtcgccccagctggaatgcagtggcacagtcttgagtcactgtagcctctgccttctgggtttaagccattctcctgcctcagcctcctgagtagccgggattataggcgcccaccgtcacgcccagctaatttttgtatttttagtagagacggggtttcaccgtgttggccaggctggtttcaaactcttgacctcaggtgatcctcctgcctcggcctcccaaatttcccgaagtgctgggattacaggcgtgagccactgtgcccggctgcctcagggagcttttgatcatgctgaaaggcaaagggggagcaagtgagagagagtggaggggaggtgccacacacttaaatgaccagatctcggaagaactcactatcatgaagacagcagcaaaccatgagggatccgcccccatgatccaaacacctctcaccaggccctacctccggcattggggattacaattcaacatgagatttgggtggggacaaatatccaaactataccaaactcagactctgttctaggggtactggggagccatggagtgttctaggcagagaagggatagagtcaggcttggctttaacaagatgcccctggaccagatggggagactgaggccagacactcaagggaaggctggcaggggcactgggcaggcaaagatgggctgaaccaggagtgacgctcaggaggtttggtgaacacacagtgtaggtaaccatctaggggtttgagtagggggtgtccagggcaaggcctaccgctccagtgggagcctggaggaccctgggccacccctgagtgggggcctgggagatgcagcaggtttggggagatgctgaggctgtgtggagctcggtgggttcgaggggtccagggaccttccaggggaaggtgttcaaaagattacaggtccaatgctcagggcagaagccaagacgggtgcagagggggaaactgaggctgcagcagtggaggagatggccctgccccaacagctaaggttttaggctcctggaaggaaggtggggacacagaggagtggtggggattgggacaggtccccagagagacctcccagaaggctgagtctcctgtggcctgtgggcaaaggactggggtgtggcctcctcatgctgctcctccctcctctagacgtgacgctgagcccctggagtggggacagcaagtgccaccagcgccgggtgctgacgtacaccatccccatcagcaacccactgggccccaagagcgcctccgtggtggagacacaggtgggccaggtggggcagccgagtgggtggggcagctgggtgagtggggtggccctgacttctccggctctgtccctgcagacgctgttccggcgcggcccccaggccggcgggtgtgtggtggactccgcaggtgctgacgcagggcatcccctaccaggactacttctacactgcccaccgctactgcatcctgggtctggcccggaacaaggcgcggctccggtgagtggtggctgggcccctccacccgatgccctggtggccccagggcctcctgtccactcctcaagtcagcagcagagccttggttcccaccctggtggaggaacagaagcgtggggttcctgaggcccttgtcctccgaatagtggagggtagaggaagagtggccctgggatggctcctcccatctacagagggtgtttgagcctcaagactctgaggatacagcaaagccaggcaatatcacctctctcagggagctcatattctagtggggaattggacaatagagaaatgatcaggaaaatctgcagaacattcactggcagttaggcctatggagaaaaatgaggaaaacacggcaggctaaagaagcagggtgtggaggcttttacacccgacacgctggtcagggaagggcctactgggaaagaaatgtttcaccaagaacctgaaggagctgagagcaactcatttgggacagcaggtgcaaaggccctgaggcaggggtgtgggcaatggctggagtggagtaagattgagtgagtaggagctgagattaaagtggtgaaccggggcccggcacagtggctcacacctgtaatcccagcactttgggaggctgaggcaggagtatcacttgagcccaggagttcaagagtagcctgggtaacgtacggaagccctgtctctacaaaaacaattttttttaaattagccagggtccaggtgcagtggcttacgcctgtaatcccagcaatttgggaggctgaggtgggcggatcacttgaggtcaggggttcgagaccagcctggccaacatggtgaaacccatctctactaaaaatacaaaaattagtcgggggtagtgatgcacgtctgtaatccctactacttgggaggctaaggcacaagaatcacttgaacctaggaggtggaggttgcagtgagccgagatcgggccactgcacttcagcctgggtgacagagtgaaactctgtctcaaacaaacaaacaaacaaacaaaaaacaagttaaaaaattagccagacatggtggagatttcagtgagccatgatcacaccgttgcacttcagcctgggcgacagagcaagaccctgtctcaaaaaaaaaaaaaaaaaaaaaaaggtgaaccagatgtggctcatggtgaagacttgactttacctggagtgaggtgcaaccaggccagggctctgagccaggagggcgctgacctgactcaggtggtcccaggctccttctggctccctctgttctggtgggaacagactgcaaagacaggtacaggagccagggaggccagggaggaggctgctgggacatccaggctggaggggacggaggctgaatcagggtgaggaaatggagggggaagagtttagattctggagagattttgcaggtttagctgacaggatttgctgagagattggatgtggcggtgagggaaagagagctcaaggaatatcccgaggcatttggcccaaatcactacaacttcggagctgcccttgacccagatgggggcggcagggaggaatgggtttggggaaagaccaggaggtcagtttgggactcagctgtctatgttgagctgagcccatgtggagctggggtgcagcagccgaatggaagaggttcaggggcatggtctggttaagacgtcagtctgtgagtagacagggctcaggccgccgggagcgttgcccaggtagtgggcatgggtggagaaggaccgagggctgagttggctggcatttgggctgggcgggtggtgtatggggtatccagggaagccatggggggtagggaacccatctgttttgtctgtgagtgacaaggggccctctctgaattaggggaaggaaaaaactcagcttgtgggacggggcagccagggctggagtcagacccttacctccttcccctgatctcccaaccccagagtgtcttctgagatccgctaccgaaagcagccgtggagcctggtgaagtcgctcattgagaagaactcgtggagcggcattgaagactatttccaccatctgggtagggacagaaggccggctggggcgtgggttgggggatggcctggccaggtatggacatccagagccccctctcttttacgcagagcgagagctcgccaaggctgagaagctgtctctggaggaaggcgggaaggatgcccggggcttgctatccggcctgcggcggcggaagcggcccctgagctggcgggctcacggggacgggccccagcacccagatcctgacccctgtgcccgggccggcattcacacctcgggtacgttccgttggggccgggttggggtaggcggaggatcgggggtcctggactgggccatctgactccaagctgctctcctgcaggctccctcagctcccgcttctccgaaccatctgtggaccagggccccggggcaggcatccccagtgccctggttctcatcagcattgt

SEQ ID NO: 6991 - DNA, 201 bp, Homo sapiens
gcaggacgctgggaggaaacagaagcaggatcccggggttgagcagaccctgcgaggtgagggtcaggccagctacatgctcagcctctgagcctcagctctcagctctcatccagtgagggggcgtggtgctctcagccaagagctgccccgggtgaggagggctgggggtgtcgggggcaggccaggcggcgctcatct

SEQ ID NO: 6992 - DNA, 426 bp, Homo sapiens
gtttttcaatatcttctatgaattgatccaatactacctatcagattttattgcctagagaacctactttcagctggccacatccactgtcttctgctcccaccttgttctttcctaccccttgtacttttgagcgttgttttccatgagccaatatccaatatccactcccacccatttctgttggcaaatgaattttgtcatgagttctggctccagtggatgggcttgggttgcctggagcactgtgttgggtctgagctcagtaggaagtggaaccacactggcatgaagagagtggcagtacacaggcagcatatttgccacatcggcctagctaagtcatatccagccttcaaagaccagcctaagtctcactttctccatgaaacctcaaatcactcttgtccactccaactgaattct

SEQ ID NO: 6993 - DNA, 424 bp, Homo sapiens
gtttttcaatatcttctatgaattgatccaatactacctatcagattttattgcctagagaacctactttcagctggccacatccactgtcttctgctcccaacttgttctttcctaccccttgtacttttgagcgttgttttccatgagccaatatccaatatccactcccacccatttctgttggcaaatgaattttgtcatgagttctggctccagtggatgggcttgggttgcctggagcactgtgttgggtctgagctcagtaggaagtggaaccacactgggcttcagagagtggcagtacacaggcaggatatttgcacatcggcctagctaagtcatatccagccttcaaagacagcctaagtctcactttctccatgaaacctcaaatcactcttgtccactccaactgaattct

SEQ ID NO: 6994 - DNA, 99 bp, Homo sapiens
gtgcttgtaatcccagctactcaggaggctgaggcaggagaatcacttgaacctgggaggcagaggttgcagtgagctgagatcacgccattgcactcc

SEQ ID NO: 6995 - DNA, 233 bp, Homo sapiens
aacgccctacacatagaagatgctcagaatccattggattgcttggctgggggtagttttagcaaaacagaagtgaaaaatgtgcactctgctggtatggtagaaaagagcattcctcttaaaatctccacaaccttcatctgaccttcacggaacaaattaacagaggcttctttgtaacattgagggtcctcattggaggatccttggctacattgggtcttgacatcatg

SEQ ID NO: 6996 - DNA, 162 bp, Homo sapiens
agccttctgagtagctgggattacaggcgcctaccaccacgcctggctaatttttgtatttttagtagagatggggtttcaccatgttggccaggctggtctcgaactcctgacctcaggtgatccacctgccttggcctctcaaagtgctgggattacagg

SEQ ID NO: 6997 - DNA, 3328 bp, Homo sapiens
ctgctttcttcttatagtagaagccatcatattaatgagttgcaaactgctgccctgagctattcccagctaatcagttagtcttcttcctagctattggattaaatcagatgaacacaagtaataacacgtcaggtatcatgtctgtatcaagaaatttgtccatcctttcttgctccagccctgccaagctactgacaatgatgcttttttcatttaactggacaagtcataatgctgacactctcaagcccagccctgtcctgtttatgtgaagcaattctaaccaaggccagcaggacaacaaacaatagggttaaacttgaccagaactccagattgggagactatttttttttaattatactttaagctctggggtacatgtgcagaacatgcaagtttgttacaaaggtatacacttgccatggtggcttgctgcacccatcaacccgtgatctacattaggtatttctcctaatgctatccctcccctagcccccaaccccccaacaggccccggtgtgtgatgttcacctccctgtgcccatgtgttctcattgttcaactcccacttatgagcgacaacatgtggctgtttaaatgatctaatttgtggttctcaatatgagtgaatatgcaaatcatgttagaggctctttcaaacaaacagataaacaaatatttggaacatgagttaggcatggatttttttgttaactcctaagtgggataataacttttccctcaactccaggcttatcatccttaacacaatagttaaggatgtgaacactggagcctgactgtctgggttcaaattctggctttgccacccataagctgtgtggccttgagcatgtcacctaacctcctttgcctcaatttcctcatctgtaaaacagttgtaataatacctacatttgccagggaattgtgaggaataaataagttaacttgtgaagagcacttaggctatataaatgctattattactattacttttattgttgttttataacttctctggagagacaggaagttggtcagagggtgagatgcctgaattagtgatttcaagatgaggcaggttgaggtgatgtgagggttcacagtatgacagtggaagtggatagcagaggtagaatggaggaaagatcatcattggaaggagaaaattagtagtagtattaaagcatgttctttatgagactggagtacctgagttcagatcctgccttcactacttaatggcagcgcaaccatgagcagattacttaattgttttctcatctgtaccactacagaaccatgagcagatttctcctctgtaaaatgaagataataatagtgacctatcttatagggctttcatggaatcaaataagttagtaaataacatactgatttcttagaacagtgactggcatttagcaagtgttagctcaggatacaaaagcaatgtgcaaaatcacaagcattcttatacaccaataacagacaaacagagagccaaatcatgagtgaactgccatttacagttgcttcaaagagaataaaatacctaggaatccaacttacaagggatgtgaaggacctcttcaaggagaactacaaaacactgctcaacgaaataaaagaggacacaaagaaatggaagaacattccatgctcacggataggaagaatcaatatcatgaaaatggccatactgcgcaaggtaatttatagattcaatgccatccccatcaagctaccaatgactttcttcacagaattggaaaaaactactttaaagttcacgtggaaccaaaacagagcctgcattgccaagacaatcctaagccaaaagaacaaagctggaggcatcatgctatctgacttcaaactatactacaaggctacagtaaacaaaacagcatgtcactggaaccaaaacagagatatagatcaatggaacagaacagagccctcagaaataataccacacatctacaaccatctgatctttgacaaacctgacaaaaacaagaaatggggaaaggattccctatttaatacatggtgctgggaaaactggctagccatatgtagaaagctaaaactgaatcccttacttacaccttatacaaaaattaattcaagatggattaaagacttaaatgttagacctaaaaccataaaaaccctagaagaaaacctaggcaataccattcaggacataggcatgtgcaaggacttcatgactaaaacatcaaaagcaatggcaacaaaagccaaaattgacaaatgggatctaattaaactaaagagcttctgcacagcaaaagaaactaccatcagagagaacaggcaacctacagaatgggagaaaatttttacaatctacccatctgacaaagggctaatatccagaatctacaaagaatttaaacaaatttacaagaaaaaaacaaatatacaagaaaaaatcaaacaaccccatcaaaaagtgggcaaaggatatgaacagacacttctcaaaagaagacatttatgcaggcaacagacacatgaaaaaatgctcatcatcactggccatcagagaaatacaaatcaaaaccacaatgagataccatctcacaccagttagaatggtgatcattaaaaagtcaggaaacaacaggtgctggagaggaggtggagaaataggagcacttttacattgctggtgggactgtaaactagttcaaccattgtggaagacagtgtggtgattcctcaaggatctagaactagaaataccatttgacccagcaatcccattactgggtatatacccaaaggattataaatcatgctgctataaagacacatgcacacgtatgtttattgcggcactattcacaatagcaaagacttggaaccaacccaaatgtccaacaatgatagactggatgaagaaaatgtggcacatatacaccatggaatactatgcagccataaaaaaggatgagttcatgtcctttgtagggacatggaggaagctggaaaccatcattctgagcaaattatcccaaggacagaaaaccaaacaccgcatgttctaactcgtaggtgggaattgaagaatgagaacacatggacacagggtggggaacatcacacactgtggcctgaggtggggtgggggtaggggggagggatagcattaggagatatacctaatgtaaatgacgagttaatggatgcagcacaccaacatggcacatgtatacatatgtaacaaacctgcacattgtgcatatgtaccctagaatttaaagtattataattaaactataataaa

SEQ ID NO: 6998 - DNA, 336 bp, Homo sapiens
tatcatgttcacttggagggcattttcaaagtacatgtgcctttgcatcacatgcccctcttgctctgaaattctaataggccaaaggtttgaggggggtttctaggggaactagcattttgtaaaagtttattcttttaaagaatagagatctagacatggaaactctaatcaagacatactcctctcaattccttagttgttattaaaatactacaaaatctgcatttatattataatagtgacacctcttatagttggtcgaaagttggccccaaaaaggatgtgtccatgtcctaatacttggcccctgttaatgttaccttatttaaaaaa

SEQ ID NO: 6999 - DNA, 3196 bp, Homo sapiens
agactttgctgaagttgcttatcagcttaaggagattttgggctgacacgatggggttttctggatatacaatcatgtcatctgcaaacaagtacaatttgacttcctcttttcctaattgaataccctttatttctttctcctgcctgattgccctggccagaacttccaatagtatattgaataggagtggtgagagaggccatccctgtcttgtgccagttttcaaagggaatgcttccagtttttgcccattcaatatgatattggctgtgggtttgtcataaatagctcttattattttgagatatgtcccatcaatacctaatttattgagagtttttagcatgaaggcctgttgaattttgtcaaaggccttttctgcatctattgagataatcatgtggtttttgtctttggttctgtttatatgctggattatgtttattgatttgcatacattgagccagccttacatcccagggacgaagcccccttgatcatggtggataagctttttgatgtgctgctggattcggtttgccagtattttattgaggatatttgcatcgatgtccatcagggatattgatctaaaattctctttttttgttgtgtctctgccaggcttggtatcaggatgatgctggcctcataaaatgagttagggaggattctctttttctgttgattggaatagtttcagaaggaatggtaccagctcctccttgtacctctggtagaattcggctgtgaatccatctggtcctggactttttttggttggtaggctattaattattgcctcagtttcggctcctgttattggtctattcagagattcaacttcttcctggtttagtcttcagagggtgtatgtgtccaggattttatccatttcttctagattttctagtttatttgcgtagaggtgtttatagtattctctgatggtagtttgtatttccatgggattggtggtaatatcccctttatcattttttattgtgtctgtttgattcttctctcttttcttctttattagtcttgctatcagtctatcagttttgttgatcttttcaaaaaaccagctcctggattcattgattttttgaagggttttttgtgtctctatctccttcagttctgctctgatcttagttatttcttgccttctgctagcttttgaatgtgtttgctcttgcttctctagttcttttaattgtgatgttagggtgtcaattttagatctttcttgctttctcttgcaggcatttagtgctatatatttccctctacacactgctttaaatgtgtcccagagtttctggtatgttgtgtctctgttctcactgttttcaaagaacatctttatttctgccttcatttcgttatgtactcagtagtcgttcaggagcaggttgttcagtttccatgtagttgagcagttttcagtgaatttcttaatcctgagttcttgtttgattgcactgtggtctgagagacagtttcttaaaatttctgtttttttacatttgctgaggagtgctttacttccaaatatgtggtcaattttgaaataagtgcgatgtggtgccgagaagaatatatcttctgttaatttggtgtggagagttctgtagatgtctattaggtccacttgctgtggagctgagttcaattcctggatatccttgttaactttctgtttcgttgatctgtctaatattgacagtggggtgttaaattctcccattattattgtatgggagtctaagtctctttgtaggtctctaaggacttgctttctgaatctgggtgctcctgtattgggtgcatatatatttaggatagttagctcttcttgttgaattaatccctttaccattatgtaatggccttctttgtctcttttgatctttgttggcttaaagtctattttatcagagactagacttgcaaccctgctttttttttgttttccatttgcttggtagatcttcctccatccctttattttgagcctatgtgtgtctctgcatgtgagataggtctcctgaatacagcacactgatgggtcttgactctttatccaatttgccagtatgtgtcttttaattggagcatttaactcatttacatttaaggttaatattgttatgtgtgaatttgatcctgtcattatgatgttagctggttattttgctcgttagttgatgcagtttcttcctagcatcaatggtcttcacagtttggcatgtttttgcagtggctggtactgattgttcctttccatgtttaatgcttccttcaggaactcttataaggcaggcctggtgacgacaaaatctctctgcattgtctgtaaaggattttacttctccttcacttgtgaagcttagtttggctggatatgaaattctgggttgaaaattcttttgtttaagaatgttgaggcctggcacgatggctcatgcctgtaatcccagcactttgggaggccaaggcgggcagatcacggggtcaggagatcaagaccatcctggctaacatggtgaaacgccatctctactaaaaaatacaaaaaattagccgggcgtggtggtgggttcctgtagtcccagctacttggaaggctgaggcaggagaatggcgagaacctgggaggtggagcttgccatgatccgcgatctcgccagtacactcctgcctgggtgagagagcgagactccatctcaaaacaaaacaaaacaaaaaagaatgttgactattggcccccactctcttctggcttgtacagtttcttctgagagatctgctgttggagtatgatgggcttccctttgtgggtaacccgacctttctctcttgctgcccttaacattttttccttcatttcaactttggtgactctgataattatgtgtcttggagttgctcttctcaaggagtatctttgtggtggtctctgtatttcctgaatttgaatgttggcctgccttgctaggttggggaagttctcctggataatattctgaagagtgttttccaacttggttccattctccccgtcattttcaggtacaccaatcagatgtagatttggtcttttcacatagtcccatatttcttggaggctttgtttgtttctttttagtcttttttctataaacttgtcttcttgcttcatttcatt

SEQ ID NO: 7000 - DNA, 349 bp, Homo sapiens
agcttctatgaacacctataaaataactgaaaaagccctaaaattaaaaaaaaaaaatctatcagaaccataaggcatattatttctaactatgagtttcaatatatctcctggaaaattaatattttcaaagaaggtacatttcatatgaggtcagtttcatcaactgcctaaacaaatgttctggcagtgaccaaagtagtatcagggataaatcatgattgcctcgttgacatcaacctaagtaaatatacatcatgaaactttctaatctattttttccccactccacttttatgtctctttttttctttttttgagatagggcctcactctgtcacccaggatg

SEQ ID NO: 7001 - DNA, 351 bp, Homo sapiens
agcttctatgaacacctataaaataactgaaaaagccctaaaattaaaaaaaaaaaaaatctatcagaaccataaggcatattatttctaactatgagtttcaatatatctcctggaaaattaatattttcaaagaaggtacatttcatatgaggtcagtttcatcaattgcctaaacaaatgttctggcagtgaccaaagtagtatcagggataaatcatgattgcctcgttgacatcaacctaagtaaatatacatcatgaaactttctaatctattttttccccactccacttttatgtctctttttttctttttttgagatagggcctcactctgtcacccaggatg

SEQ ID NO: 7002 - DNA, 412 bp, Homo sapiens
gctcagcttttctccacactgttcatacacaaccttactatctttagctctgattcttatcacgtacagtgattccaaactacacatactcacaagatctattgagttgtctttttccatttaaaatgaatttatacttattgttgaaatattgaaaataagacggggaaacatcccttgagagtctcaccaatgaatgagaacaaacaactgcatttttcctttctcttttaagcacaggtttttctcttagaatgaatatctgtgagagattactttgattcatttttgattcatgatttccttaacaagagaagctgcaggatagtaaagctgatttacagcaacacagtaggattatcagtgttttagtcgctaaaatattctagaatatgatttttgaatcacaaaa

SEQ ID NO: 7003 - DNA, 412 bp, Homo sapiens; identical to SEQ ID NO: 7002

SEQ ID NO: 7004 - DNA, 4493 bp, Homo sapiens
gtggtccttgtgctggattcatttattttgaaatggcaggcaactgtagctgcaggcctcaatctctggtacatatcagacaattcaattttttcttgcaatgttgtgacttgtctctgcttcctggcagcacttccagcatcactagtcgcacttcgtatgggtcccatggtgttattcagggtttatagtattacatcaaatgttttaaaaatacttaagaaccatgagatataacttattactgcaatattaaatttatgggagagatgaactgctcatgcagaggtgattagcatcacatggcattttcagtgaatacctgcaacacttgagttcactgcagtagcaacagggggtgtccacaaaattattacagtagtatagtatgtactacagttaattttatgcaaccatgatataatatcatatttttatgtttgtttatatttctctgtactgagaatggcatcatgtgtagtctgtgttacttttcataagacatctgtatatattttatggttgtaaatgatgaaatagactagtagccacaaatattttatgctcatcacatacctcacttttcttttttttttttttcagtatttctaggctacacagttagtgttttcaaattattgcaaatctccaaaaaattttccagtatatttattgaaaaaaatgttgcatgggtaagggtacccatgtagttcaatcctgtgttgttcaagagtcaactgaataagaaaatgacactccttgtattatatacagaaatatacctgtgtgtgtataatccatgtgtatgggtgggtgttgtaaaaaagctgccctgattatatatatgttttttaaaactaacaacattttatgaatgtactttttatgctataaaatgtacttcaaaatatgattttaaatgattgtacaatattctctcatgatgtattatagcttatttaattttttccctattatttggcatttatggtattttcccattctaataaataacactgaaatgtcctcaggatccatctatttccttgttttttcacttccaaaatatttaacttgagagaattgtccaaggcttgctggaatttcagtatggcaagccaacgagaggtgatgttagttcagaatagaggagtctcagtttcagtcctctaagcgggcatggtaagatatttctcaatccaggctggtgttgcttttaaaaccagaattgatagcagtagacacatgctgagaagagtatttgtcttggaggcagaaagggcactgtcctggaggaaatgaaagccttaccaagagctagatggcaggactagatcccagctgggagccaaatataatgaagaaacttcatttttttcttgaggtacatttaaaaagataaattatgtttgtatctatctgggcagggctttgggttagaggagaaggagcccaaggcacctttatggacagttgggtacctggcccatcaccaggatttatgcagccagactgtttcttggccttctggataaagaagcagctctttactaggctgcctgaatttgctcacaaagtgtgtgaagctaagcaacagggtgaaggtccttaatccatggctgagagggagtgaggaaggctttgattaaaatggaaagcttatgttcatcaagtttttcacctataggacaacaagagctagaggggtggaagataaaaatactagacataacctcttccttaaacttgtggcctagttacagagacaaccacattatgaaaccattactaaccatatgtgatactgtttatatatagaccagagatgtcataattagtgtctgatgtgcctaagggttggaggacagttatagtggttcatgagttcagtgacaatgtttaaactgtattttccctttgctgataatctaagaaaatttttttttatcaggtagaattataagccttcccatttgcagtaatagtttgtaattcaaagacattttcattggctaaaactttagtgttttaagttaacattgtgcaaaccagggttcaaaacatattttcttaaaaattttaatggtggaagatagaatcctgatctgtccctggaagagtgactaggtcctgatagttgtttctgctagaggagagaatttgcaaggatgagcatagtgcatttggggtactagaaaatttaaaggatataacagtttcaggtttttaaatataccatcccgaccatgtgtcaataattggtggaatacccttttctttgttattacctacctctgatgactaaaggagctttaagtctttttgttgagaaggtaactcccagagtccttgtttaaagaaccatcttctaaccctcatgttattgatcagtgtctaacgtaaacttttttttctctgcccaaatgtgaattttgtttcctcaggactttatttctgaacagttaatgattctagcagagacagctataggaaagtccattgcattatgcctttgggcattagctagtcactagggaagcaggtgttcctcgaagggccagaacattaaggacaaattgtcttttttaatgtaccagcctaatcctgcacctttacttggttagggatttgtttcgctcaaatgtcattgctgtccttttatttctcttttgtacataagttatctcaggtcaatgatctttattctcctttaatttgctgtatggttttaacaggttttttagtaaaactgagtttgtgtttgttagttgcattaggtcagactgcaagattgtttgttcagatgtaggcctaacaagggattgttcttttaaaatcttctttaaggcaaaattttctgttttatttctttacagattccagcaagattatggaagagcatagctacatacaaaaggagctagatttacaaaatggtagcttagaggaagactctgtggtgcattctgttgagaacgattcccaaaacatgatggagagcctcagcccaaagaaatactcttccagtctgagatttaaagccaatggagactattctggctcctatttaaccctctcacaacctgtgcctgcaaagagaagcccttctcctttgggaaccagtgtcagaagcagcccctccttagccaaaatccagggaagcaagcagttctcttatgatggaactgacaaaaatattcctatgaaacctccaactcctttactcaacactacatcctccctcagtggatatccacttggaagagcagactttgatcattatactggccgggacagtgaaagggccttgaggctctcagagaagcctccctattccaaatatagctcaaggcataaatcgcatgacaatgtctactctcttggagggctggaaggtcggaaggcatctggctcgctcctggccatgtggaatggaagttccctgagtgatgctggcccgcctcctatcagcagatcgggagccgcaagcatgccttcaagcccaaagcaagccaggaaaatgagcattcaggacagcctggcgcttcaacccaagttaactagacacaaggagcttgcatctgaaaacatcaatttgagaactaggaagtactccagcagcagcctgagtcacatgggagcctacagccgatcacttcccaggttgtacagagccacagagaaccagctgacacctctcagcttgcctccaagaaactctctgggcaattccaaacgaacaaaacttggggaaaaggatctacctcatagcgtaatagacaatgacaattaccttaatttttcttctttgagctcaggggctttaccctataaaacctctgcttctgaaggcaatccttatgtaagttctaccctcagtgtccctgccagtccacgagtggctcggaagatgcttctggcctccacctcctcctgtgcctctgatgactttgatcaggcttcatatgtggggacaaacccgagtcattcacttcttgctggagagtcagacagagtttttgcgaccaggaggaacttctcttgtggatctgtggaatttgatgaggcagatttggaaagcctcagacaggcctcaggaaccccccagcctgcccttcgggaacggaaaagcagtattagctccatttcaggacgtgatgacctgatggattatcaccggcggcagagggaggaaagactcagggagcaggaaatggagcgattggtaatcttcatctcaacagtgattgacctcactgtttcattaaccagcatctacagggcagccttggagatggactccaggatatgtgggaatataggatattcatgttcactagccacagctgctatctttctcttctctcctgctatccttcttcttcccatatcactattaataggcttgtttggctatcttgaaggcctccaggaattaatgttaatttagttgctctgcggacttctcacaagtataaattctttaaaaacat

SEQ ID NO: 7005 - DNA, 1619 bp, Homo sapiens
gattccagcaagattatggaagagcatagctacatacaaaaggagctagatttacaaaatggtagcttagaggaagactctgtggtgcattctgttgagaacgattcccaaaacatgatggagagcctcagcccaaagaaatactcttccagtctgagatttaaagccaatggagactattctggctcctatttaaccctctcacaacctgtgcctgcaaagagaagcccttctcctttgggaaccagtgtcagaagcagcccctccttagccaaaatccagggaagcaagcagttctcttatgatggaactgacaaaaatattcctatgaaacctccaactcctttactcaacactacatcctccctcagtggatatccacttggaagagcagactttgatcattatactggccgggacagtgaaagggccttgaggctctcagagaagcctccctattccaaatatagctcaaggcataaatcgcatgacaatgtctactctcttggagggctggaaggtcggaaggcatctggctcgctcctggccatgtggaatggaagttccctgagtgatgctggcccgcctcctatcagcagatcgggagccgcaagcatgccttcaagcccaaagcaagccaggaaaatgagcattcaggacagcctggcgcttcaacccaagttaactagacacaaggagcttgcatctgaaaacatcaatttgagaactaggaagtactccagcagcagcctgagtcacatgggagcctacagccgatcacttcccaggttgtacagagccacagagaaccagctgacacctctcagcttgcctccaagaaactctctgggcaattccaaacgaacaaaacttggggaaaaggatctacctcatagcgtaatagacaatgacaattaccttaatttttcttctttgagctcaggggctttaccctataaaacctctgcttctgaaggcaatccttatgtaagttctaccctcagtgtccctgccagtccacgagtggctcggaagatgcttctggccctccacctcctcctgtgcctctgatgactttgatcaggcttcatatgtggggacaaacccgagtcattcacttcttgctggagagtcagacagagtttttgcgaccaggaggaacttctcttgtggatctgtggaatttgatgaggcagatttggaaagcctcagacaggcctcaggaaccccccagcctgcccttcgggaacggaaaagcagtattagctccatttcaggacgtgatgacctgatggattatcaccggcggcagagggaggaaagactcagggagcaggaaatggagcgattggtaatcttcatctcaacagtgattgacctcactgtttcattaaccagcatctacagggcagccttggagatggactccaggatatgtgggaatataggatattcatgttcactagccacagctgctatctttctcttctctcctgctatccttcttcttcccatatcactattaataggcttgtttggctatcttgaaggcctccaggaattaatgttaatttagttgctctgcggacttctcacaagtataaattctttaaaaacat

SEQ ID NO: 7006 - DNA, 340 bp, Homo sapiens
gaaactgcatgttttcctgttccaagaagtgcttgtgatcactcgagccgtcacccacaatgagcagctttgctaccagctgtaccgtcagccaatccccgtgaaagacctcctgctggaagacctccaggatggagaagtgaggctgggtggctccctgcgaggggcattcagcaacaatgagagaagtatggatagcagtcggggttgacctgttgaatgtttttggccgtggtagtttggagggagtgggcagctggtggaaagagaaaagccacggtcttgaagtcaaactgcatttgtatgctatttcatcacttcctgattatgtactttgttt

SEQ ID NO: 7007 - DNA, 201 bp, Homo sapiens
gctccacttcctgggttcatgtcattctcctgcctcaggctcccaagtagctgggactacaggtgcccgccaccacacccggctaattttttgtatttttagtagagacagggtttcactgtgttagccaggatggtctgtatctcctgacctggtgatccgcccgcctcagcctcccaaagtgctgggattacaggcgtg

SEQ ID NO: 7008 - DNA, 1343 bp, Homo sapiens
gccaagatagcaatatctatcgagtatctaacatgatactcggtgaaacaagcaggtaacttccttcccctatggagcttgcattgtgatggaggagaaagatgataaacaaatgaatactccaggtgttgttaagaaaacttaaaacccggtaagggaataggaagggatagcaataggaggtctgttttatttttatttatttatttttttgagacagagtcttcctctgttacccaggctggtgtgtggtggcgtgatctcggctcactgcactctctgcctcctgggttcaagcaattctcgtgtctcaaccttccaagtaactgggagtacaggggctggccaccacacctggctaatttttgtattttcagtagagacaaggttttgccatgttggccaggctggtctggaactcctgaccccaagtaatccacccacctcagcctcccaaagtgctgggattacaggcccccgggcccagcctggaggtctgttttaaatgagatagggaacacttctctgagaaagtaacgtttgagcttcctgggttaacataggcatcatactgtcaaagtaattaacatgtactgccttctccctactgatcaatccctctaccctaggagtaggagtagtagaaataagagcttatgtttcttgagtactgactatgtgccaggcattgtataagcatttacatgtattacatttattcctcataacaaccatataaagtaggttcttgttttctccattttacaagttagaaactaagatacagaggatttaaggtacttgcccaagatcaaagggtggagcctaaatttgaaggacggagaatagcttctagccaaagatggctagcagtaaaacattttggcctcctttccctctgttgcttagcctctaagccattggaagtgggtggtggttcccagtctactggctgcagggttagtgcaaagggactgactgcagatgcttctgtgaaccaagcattgcatgtggcacgcagggccctttaaatgtccattatattgttgttattagattaaataggccaggcacggtggctcacgcctatagtcccatctttttgggaggctgaggtgggtggatcacctgaggtcaggagttcgagaccagcctagccaacatggcaaaaccctgtctctactaaaaaaaatacaaaaatcagccaggcatggtggtgcatgcctgtaatcccagctactcaggaggctgagacaggagaattgcttgaacccaggaggcagaggttgcagtgagcggagattgtgtcactgcactccagagcaagactctgtctcaaaaaa

SEQ ID NO: 7009 - DNA, 432 bp, Homo sapiens
tcgaagaaaatgacctgatcatttgaaaagcttaacgcctgcttaataaggcaccaaaaaggaacaagagccagttgccattgttagaaaacctatctggaccaccctaaactgattttggggggtaaatactgacattttaaaataaaactttaacccttttaaatatatccattgaaatctgtaaaccatcataatttgttacccaccatcatctattaaagaatatattccaatttatttattgggaattttagattgtctctttttctgcttgaattagtatttacatttcttcctccccacagaattttataccgatttaatatatttcaattctataaaatccttaacaattttctgtgttcataagtttctaagtattaaaaaagtctttggaattgagctgacattacaattagttgtataaac

SEQ ID NO: 7010 - DNA, 432 bp, Homo sapiens
tcgaagaaaatgacctgatcatttgaaaagcttaacgcctgcttaataaggcaccaaaaaggaacaagagccagttgccatcgttagaaaacctatctggaccaccctaaactgattttggggggtaaatactgacattttaaaataaaactttaacccttttaaatatatccattgaaatctgtaaaccgtcataatttgttacccgccatcatctattaaagaatatattccaatttatttattgggaattttagattgtctctttttctgcttgaattagtatttacatttcttcctccccacagaattttataccgatttaatatatttcaattctataaaatccttaacaattttctgtgttcataagtttctaagtattaaaaaagtctttggaattgagctgacagtacaattagttgtataaac

SEQ ID NO: 7011 - DNA, 432 bp, Homo sapiens
tcgaagaaaatgacctgatcatttgaaaagcttaacgcctgcttaataaggcaccaaaaaggaacaagagccagttgccatcgttagaaaacctatctggaccaccctaaactgattttggggggtaaatactgacattttaaaataaaactttaacccttttaaatatatccattgaaatctgtaaaccgtcataatttgttacccgccatcatctattaaagaatatattccaatttatttattgggaattttagattgtctctttttctgcttgaattagtatttacatttcttcctccccacagaattttataccgatttaatatatttcaattctataaaatccttaacaattttctgtgttcataagtttctaagtattaaaaaagtctttggaattgagctgacattacaattagttgtataaac

SEQ ID NO: 7012 - DNA, 432 bp, Homo sapiens; identical to SEQ ID NO: 7009

SEQ ID NO: 7013 - DNA, 602 bp, Homo sapiens
ggcgaaggagagactctcaaggctggaaacaccttgcccacattgagctctactattgtgaggggtggtggggttgtgtttgtcaagtcttgtgggtttgtgatcttgacaaaaccaagcaagtccagtgggccaagggaccaaatcaagagccacagggttcttgccttcctgcctttcccactccaggctgcctcagtagtgggagcaccaggccctttgccatctgtggagcaagtggagcccagcagtcctgtatgaacgctgtagtcagtgtcgggtggagtatggggactctgggccacaccgtgctgggtacaattccaactctacccctaacttagctgtgtgccttgggcaagttacagacttgatggcctcagttttcctgtctagtaaatgggttgataataatagcccatactcaggatagttgtgaggactgggtggattcatatgtgtaaggcacttaacgtgtttcctataattatggtccagctggatttgacatccaggatcagacctagggcttaaacagggatgctggaggaagagtaagaacatggctggccatggggaggctgggctggcctcctggcttt

SEQ ID NO: 7014 - DNA, 602 bp, Homo sapiens
ggcgaaggagagactctcaaggctggaaacaccttgcccacattgagctctactattgtgaggggtggtggggttgtgtttgtcaagtcttgtgggtttgtgatcttgacaaaaccaagcaagtccagtgggccaagggaccaaatcaagagccacagggttcttgccttcctgcctttcccactccaggctgcctcagtagtgggagcaccaggccctttgccatctgtggagcaagtggagcccagcagtcctgtatgaacgctgtagtcagtgtcgggtggagtatggggactctgggccacacggtgctgggtacaattccaactctacccctaacttagctgtgtgccttgggcaagttacagacttgatggcctcagttttcctgtctagtaaatgggttgataataatagcccatactcaggatagttgtgaggactgggtggattcatatgtgtaaggcacttaacgtgtttcctataattatggtccagctggatttgacatccaggatcagacctagggcttaaacagggatgctggaggaagagtaagaacatggctggccatggggaggctgggctggcctcctggcttt

SEQ ID NO: 7015 - DNA, 602 bp, Homo sapiens; identical to SEQ ID NO: 7013

SEQ ID NO: 7016 - DNA, 4615 bp, Homo sapiens
ccttttattcctgctgctcctgtcaaaactgccttgcctgctggcccccagccccagccccagccccagcccccactcccaagtcagccccaggcacagaagagacgattcacagaggagctaccagatgaacgggaatctggactgcttggataccaggttaaataaaataccctgttttcctatcttcaccttattcttctactatattctccctttaaaaaagataaattcacatcattctcccagtactaggatttctgctttctggaattcattttggttaggttttttatcctattcaacagactcttgaaagcctctgagagttcttactttcttatacatctcactcaaagctcttgatctaccagtatgtggtttgtatttaaaaccttggctttcagtggtgctctctcttttaccctccacctaaaaaagagagtgatatctccctccagtctccccacccctcaagactgctagaaaaggagtgattctgtacatgtaattgtaaagttagccactaaagttaaaaagattcttaatttgtagttttggtgcaattttatcagaagtacctttccattttgccagaatccttgaatcattctttaaaccaaagcatttttttatagtttctagctaggtttatagaaactagtggagctatgggcagtcagttaaaaacaggccatagatagcataatgaattataacacccctgtccaagtcctatagagaaaaaaaaaaatccctacttttgactacagttacacagcagatcccaaagagctttgtagtagtttaacgtactacaacttatcagaaagatgaggcacttgacagttacattaaggagctaaagtcaatacggcagttgtagatttgctaatgccactgtatttttctgctcatagcatggacccattcatatgactaatttaggtacaggcttctccagtcagaatgagattgaaggtgcaggatcgaagccagcaagttcctcaggcaaagagagagagagggacaggtaagttggaataattatgcaaatgtattcagatgttatttgtttgcaccattagtgagagtaatgatcattgctatgagcttaagtattctgaaactgaaatgaaatctttgaatcaaatatgcttctgtttgttgtaattgatgcaatgaagtaaaatatgataggccttttacagatttagaagcagttatattcggttttgaataatttattacttgttcagacatctttcttgacttccattgtctgcatcttggccattttcctaagggtagacagtaacagaaatgttacataattcagctatttttgctactttagagtcattagaatatcatggatggaagtacatgaatgtgggagttcagcctgccacacagtgcttgaattttcctttcttatattagtatattaaccttcataagaaaggagctgatatctttctataacagttcattcgatttttgtcatggcaattgctgtgtagacaggccttatacttttataaaggggctgggggaaggtggaaggggttgaaattaatggttaaaatgaatttgaaggattgtctgcagacataattgcacttctaatccactggataagttaagaaaatttaaattgtctgaaagaaagtttcattttgtttttcaataggcagttgatgcctccaccagcctttccagtgactggaataaaaacagagtccgatgaaaggaatgggtctgggaccttaacagggagccatggtgagtgtgatatagctgggggaacaggggagtggctaagactggtctaaagctattagttttctcagccgggcgcagtggctcacgcctgtaatcccagcactttgggaggccgaggtgggcagatcacctaaggtcaggagttcaagaccagcttggccaacatagtgaaatcccatctctactaaaaatacaaaaactagcgggcatggtggtgggcgcctgtaattccagctactcagggggttgaggcaggagaatcgcttcaacctgggaggcagaggttgcagtgagccaagatcagaccactgccctccagcctgggcaatagagcaagactccatctcataaataaataaatacataaataaagctattaattttctaacctgatgttcattcaggtgtttaatccaacctctataatctgttggccagtgaaaatacttttgggctgggcacggtggctcacgcctgtaatcccagcactttgggaggccaaggtgggcggataacctgaggtcaggagtttgagaccagcgtggctaacatggtgaaaccccgtctctactaaaaatagaaaaattaagctgggcatggtggtgcatgcctgtaattccagcggcttggaaggctgaggcaggagaatcacttgaacttgggaggtggaggttgcagtgagccaagatcacaccactgcattccagcctgggcactagagtgagactctgtctcaaaaaaaaagaaagagaaagagaaaatagtttctaaaaaattgtatacagacaaccttttatttccaacaaacgtgtgccgagagagagagagagaaaatagttttaaaaaaattgtatacagacaaccttttgtttccaaccaacgtgtatctagaaaagagttagtcgacttattttatacatagcatcagtgaatagtaatgagtggtaggtcatttcaaaatcctgttgcctatattatgtgaataccaggaggtcatctgatacggacttaataaaggttgattttgctttatattgggagctgagccacacctccccttataactctattggtcagtaatggtcagtttgtggctgttaggaaaatgttgccttttagcattccagaactctaaatcctgtagaggtacatgggatattttattctttgcctgtactcataaaaatgaacagaagaaaatacgtttttttcttttcttaacttcttttcttttaactctttaaaaggtgaaatatcagccctcaagagactcacttgctaactttcctttttttctttttttttctttttttgtgtttcttttttctttctctgttttcttacatggttctggtggattcacatttgctgatgctggtgctgtttttcgtgtgatcttcaacgtttttgggtgaccattgaccctgtgacctcaaaatggtgtccaactaaccacttaaaattaacatcttttttttaattaacgaatttatggtatttttttttttcccttggcggggatggggttggggttgttttttctctattctagattatccagccaagaagatgaaaactacagagaagggatttggcttggtggcttatgctgcagattcatctgatgaagaggaggaacatggaggtcataaaaatgcaagtagttttccacagggctggagtttgggataccaatatccttcatcacaaccacgagctaaacaacagatgccattctggatggctccctaggaaacagtggaacagagttttgaccctcagtgactcttcttagcaataatgcatgcatttgatttaacaagactctggggcctgtgctgggaaccatctggacctttgcagaagttagagattcagtgcccccctttcttaaaggggttccttaacaaccacaaaaatccttatttctgcagtggcatagaatctgttaaaatttaattagaatcacaaatttatctcagaagctttttaacagttggtgaaatgtgcttgtccaacaaagcatcctaacagggtcgttcccatacacatttgacctggtcagccttttccaggtgaatagccccagttctgacataaagaaagttttatttgtattttactactgtttggtcaattttgatatataactggttacaaacagagccttactatttattagtggggaaatgattttaagaccgtccttttcagtatttaattctgacagatctgcatccctgttttgttttggattatttctgttttggaaaatgctgtctcatttaaaactgttggatatagctggatcctggataggaaaatgaaattattttttcattgtgttttttaattggggtgatccaaagctggcaccttcaggcacattggtctcatagccattactgtttttattgcccttctaagatcctgtcttcagctgggtcagagaaaacttcttgactaaaactggtcagaactcatcacagaaatgaaatacagtggtctctctctcccagaactggttgcagctaaaacagagagatctgactgctggctataggattttggacttaatgactgaaattgcaaattgtcctttttcttggcattacagattttgccaaaataactttttgtatcaaatattgatgtgtgaaagtgaaggagctagtctgctgaaccaggaatagtttgagatattgaactgtcatttttgcacatttgaatactttgcaggctggctttgtataaacttatcctctggtttcctatatgttgtaaatatttagaccataatttcattataaataaatctataaatattctg

SEQ ID NO: 7017 - DNA, 4614 bp, Homo sapiens
ccttttattcctgctgctcctgtcaaaactgccttgcctgctggcccccagccccagccccagccccagcccccactcccaagtcagccccaggcacagaagagacgattcacagaggagctaccagatgaacgggaatctggactgcttggataccaggttaaataaaataccctgttttcctatcttcaccttattcttctactatattctccctttaaaaaagataaattcacatcattctcccagtactaggatttctgctttctggaattcattttggttaggttttttatcctattcaacagactcttgaaagcctctgagagttcttactttcttatacatctcactcaaagctcttgatctaccagtatgtggtttgtatttaaaaccttggctttcagtggtgctctctcttttaccctccaccttaaaaaagagagtgatatctccctccagtctccccacccctcaagactgctagaaaaggagtgattctgtacatgtaattgtaaagttagccactaaagttaaaaagattcttaatttgtagttttggtgcaattttatcagaagtacctttccattttgccagaatccttgaatcattctttaaaccaaagcatttttttatagtttctagctaggtttatagaaactagtggagctatgggcagtcagttaaaaacaggccatagatagcataatgaattataacacccctgtccaagtcctatagagaaaaaaaaaaatccctacttttgactacagttacacagcagatcccaaagagctttgtagtagtttaacgtactacaacttatcagaaagatgaggcacttgacagttacattaaggagctaaagtcaatacggcagttgtagatttgctaatgccactgtatttttctgctcatagcatggacccattcatatgactaatttaggtacaggcttctccagtcagaatgagattgaaggtgcaggatcgaagccagcaagttcctcaggcaaagagagagagagggacaggtaagttggaataattatgcaaatgtattcagatgttatttgtttgcaccattagtgagagtaatgatcattgctatgagcttaagtattctgaaactgaaatgaaatctttgaatcaaatatgcttctgtttgttgtaattgatgcaatgaagtaaaatatgataggccttttacagatttagaagcagttatattcggttttgaataatttattacttgttcagacatctttcttgacttccattgtctgcatcttggccattttcctaagggtagacagtaacagaaatgttacataattcagctatttttgctactttagagtcattagaatatcatggatggaagtacatgaatgtgggagttcagcctgccacacagtgcttgaattttcctttcttatattagtatattaaccttcataagaaaggagctgatatctttctataacagttcattcgatttttgtcatggcaattgctgtgtagacaggccttatacttttataaaggggctgggggaaggtggaaggggttgaaattaatggttaaaatgaatttgaaggattgtctgcagacataattgcacttctaatccactggataagttaagaaaatttaaattgtctgaaagaaagtttcattttgtttttcaataggcagttgatgcctccaccagcctttccagtgactggaataaaaacagagtccgatgaaaggaatgggtctgggaccttaacagggagccatggtgagtgtgatatagctgggggaacaggggagtggctaagactggtctaaagctattagttttctcagccgggcgcagtggctcacgcctgtaatcccagcactttgggaggccgaggtgggcagatcacctaaggtcaggagttcaagaccagcttggccaacatagtgaaatcccatctctactaaaaatacaaaaactagcgggcatggtggtgggcgcctgtaattccagctactcagggggttgaggcaggagaatcgcttcaacctgggaggcagaggttgcagtgagccaagatcagaccactgccctccagcctgggcaatagagcaagactccatctcataaataaataaatacataaataaagctattaattttctaacctgatgttcattcaggtgtttaatccaacctctataatctgttggccagtgaaaatacttttgggctgggcacggtggctcacgcctgtaataccagcactttgggaggccaaggtgggtggataacgaggtcaggcatttgagaccagcctgggcaacatagtgaaaccccgtctctactaaaaatagaaaaattaagctgggcatggtggtgcatgcctgtaattccagcggcttggaaggctgaggcaggagaatcacttgaacttgggaggtggaggttgcagtgagccaagatcacaccactgcattccagcctgggcactagagtgagactctgtctcaaaaaaaaagaaagagaaagagaaaatagtttctaaaaaattgtatacagacaaccttttatttccaacaaacgtgtgccgagagagagagagagaaaatagttttaaaaaaattgtatacagacaaccttttgtttccaaccaacgtgtatctagaaaagagttagtcgacttattttatacatagcatcagtgaatagtaatgagtggtaggtcatttcaaaatcctgttgcctatattatgtgaataccaggaggtcatctgatacggacttaataaaggttgattttgctttatattgggagctgagccacacctccccttataactctattggtcagtaatggtcagtttgtggctgttaggaaaatgttgccttttagcattccagaactctaaatcctgtagaggtacatgggatattttattctttgcctgtactcataaaaatgaacagaagaaaatacgtttttttcttttcttaacttcttttcttttaactctttaaaaggtgaaatatcagccctcaagagactcacttgctaactttcctttttttctttttttttctttttttgtgtttcttttttctttctctgttttcttacatggttctggtggattcacatttgctgatgctggtgctgtttttcgtgtgatcttcaacgtttttgggtgaccattgaccctgtgacctcaaaatggtgtccaactaaccacttaaaattaacatcttttttttaattaacgaatttatggtatttttttttttcccttggcggggatggggttggggttgttttttctctattctagattatccagccaagaagatgaaaactacagagaagggatttggcttggtggcttatgctgcagattcatctgatgaagaggaggaacatggaggtcataaaaatgcaagtagttttccacagggctggagtttgggataccaatatccttcatcacaaccacgagctaaacaacagatgccattctggatggctccctaggaaacagtggaacagagttttgaccctcagtgactcttcttagcaataatgcatgcatttgatttaacaagactctggggcctgtgctgggaaccatctggacctttgcagaagttagagattcagtgcccccctttcttaaaggggttccttaacaaccacaaaaatccttatttctgcagtggcatagaatctgttaaaatttaattagaatcacaaatttatctcagaagctttttaacagttggtgaaatgtgcttgtccaacaaagcatcctaacagggtcgttcccatacacatttgacctggtcagccttttccaggtgaatagccccagttctgacataaagaaagttttatttgtattttactactgtttggtcaattttgatatataactggttacaaacagagccttactatttattagtggggaaatgattttaagaccgtccttttcagtatttaattctgacagatctgcatccctgttttgttttggattatttctgttttggaaaatgctgtctcatttaaaactgttggatatagctggatcctggataggaaaatgaaattattttttcattgtgttttttaattggggtgatccaaagctggcaccttcaggcacattggtctcatagccattactgtttttattgcccttctaagatcctgtcttcagctgggtcagagaaaacttcttgactaaaactggtcagaactcatcacagaaatgaaatacagtggtctctctctcccagaactggttgcagctaaaacagagagatctgactgctggctataggattttggacttaatgactgaaattgcaaattgtcctttttcttggcattacagattttgccaaaataactttttgtatcaaatattgatgtgtgaaagtgaaggagctagtctgctgaaccaggaatagtttgagatattgaactgtcatttttgcacatttgaatactttgcaggctggctttgtataaacttatcctctggtttcctatatgttgtaaatatttagaccataatttcattataaataaatctataaatattctg

SEQ ID NO: 7018 - DNA, 21371 bp, Homo sapiens
  SITE (6392): n equals a,t,g, or c
gtagtcggatagttggcgggtggttgagtagaagcggtcgccatgtccgcggggagcgcgacacatcctggagctggcgggtacggcttcaggggcgagggcatcggagcgagcactggggcgcaggagaggcggagggaccctgagaagctgcgtatagggtggaagggtccttaagtgggaagtaaagggctggacgtttggggagaaggatcttgagcaggcctggggcccttaaagggccggcggggatccgagggaggaggcaaacggggacttttggaagggcgagccaaggggaaggcgtaaactagagcgtgtaggatagagtggagtctttcgatataggtgacagtagaaacgaaagattttggggaagggttgaaagtgggggtttgttaaataagcaataattgtttaaggagaggggagttttagatttggaaggtgattcggaggtgtaaatggaatataatagagggaaaatggggtgctaaggcgtagtaaggaaagaataacatacacgaaagctttggggcctaatgttttcctttttctccatgtaggcgccgcagcaaatgggaccaaccagctccagccccacttctcttcctcccgccagcggccccaggtggggaggtcaccagcagtgggggaagtcctgggggcaccacagctgctccttcaggagccttggatgctgctgctgctgtggctgccaagattaatgccatgctcatggcaaaagggaagctgaaaccaactcagaatgcttctgagaaggtatttgaagttgaagggtctccactaattgcgaatttaatagttgttttgccgggcgcggtggcttacgcctgtaatcccagcactttgggaggccgaggcgggtggatcacaaggtcaggagtttgagaccagcctgaccaacatggtgaaaccccgtctctactgaaaatacaaaaatagtcgggcatggtggcacgcgcctgtaatcagctactcaggaggctgaggcagaactgcttgaacccgggaggcggaggttgcagtgagccgagattgtgccagtgcactctagcctgggcgacccaatgagactccgtctcaaaaaaaaaaaaaaaaagttgtttgtaatcctgtaatcgcataataatttgtgttagtaaaggataaatggatatagtagttgagagatcatttagttttggaatgttccagaacacattttgttacaaatacatatttacgaggcgtttttgattgggctgattacatttatggaccaaataccttgtcttgtccttgttcacttagttcagcttaagctgtatttccatagtcatttaaagcaacataacatgtttttaatatatgtgctttttccctgaagtcagaggagttcaggtaaatcaagtgagccccatagtgtcatctctaattagaacctgtagggttttatttatttatttatttattttgatagagtctcactctgtcaccagcctgaagtgcagtagtggggtgatctcggctcactacaacctctgtctcctgggttcaagtgattctgattctgctgcctcagcctcccgagtagctgggattacaggtgcatgccaccatgcccggctaatttttttttgtgtttttagtagacagggtttcaccatgttgaccaagctcatctctgcctcccaaagtgctgggattacaagtatgagccaccaggcgcagcctattgtttgcaaagattgtgtgagtcagtcatccatttataaggtttatgaggaaaaattaaaagcatcttgacaaagatgtagtgctccttgtatattaagatttttaatactgatgttaatcgtttaagctctttttttttcttaaaataataatctttaggtagttgacctcagcaggatacataaacactggatttagaatcataaaacctaaaaacccagaatccacagtttgaaacccagaatccacagttactggttacatggctttggcataatgaaactcagctttctcgttggtaatatatacctgcattgtgtagtgcagtagtcactagcttcatgtggcaatttaaattaaaattaaggggctgggtgtggtgactcacacctgtagtcccagctcctctgtaattcttcttggattcttggaaggctgaggtggaaagatcacctgagcctaggagcttgaggttgcattgagctgtcattttgccattgcactccagcctgagcagcagagtgacaccttgtctaaataatacaaataattaaatactctcaggctccatatctgtgagaaataaattcctgttgtttaagcaaaaagcaaagcaaaaccaaaatacaatttaaaatttagacctttagtcacattagccacctgccaagtgctcaagagacacatgtggctaatggctaccatattcgactgatagactagaacccttgtcaccaaaagttctcttggacaacattgataagtactattaaaggcggccataaggattcattgagatgataatgtaaatgaatactataaggggttaaataaaggtaaggtgatattgctgagtttgtatttagttttgcctccacatttaaaaaatgtatttaatgcacaaagtaaacaacagtatgttaccttcttgagcagattttctagacataggttggggagataggcccctgtagtcccagctactcaggaggttaaagcgggtgggtggatcacttgaggccaggagttcaagaacagcctgggcaacatggtgaaaccctgtctctacagaaaatacaaaaacaattagctaggtgtggtgcatgcctgtggttccagggtctggcttgattgcccaggcagtgactgtgcagtggcacagtctcttcctcccaggctcagcctcccaagtagctgcgactacagacgcatgccaccatgcccggctaattttttttattttttgaagagatgggtttgccatgttgcccaccctgcttcagcctcccaaagtgctgggattacaggcatgagcctgtttggttccttcgttcattctttctttctttctttctgtctttctgtcttttttttttttttttttggtgatagagtcttgctttgttgcccaggctggagttcagtggcacaatcactgctttctgctgcctcagcctgctgagtagctgagactacagtctcatgccaccgtgcccagctaatgttttgtatttttttagagatgtggttttgccatgttacccaggctggtctgaaactcttgggctcaagcgatccaccctcctcagcctcctaaagtgctaggattacagatgtgagccaccggtcccagcctttttttgtaatttatatatttatttttgagacagagttttgctcttgttgcccaggctggagtgcgatggcgtgatctcggctcattgcaacctctgcctcccggcttcaagcaattctgcctgagcctccggagtagctgggattacaggcacgaaccaccacacctggctaattttgtatgtttactagagacggggtttcaccatgttgaccaggctgatcacaaactccatgtagtttaaattgaaagaaaccggatcaggttttaccatcttactgttttttcattcttctttgttctgctgtaatagagtgaggaattattagttagatacaatttaagggtttttgagagctttacaaggatggagttagttggattttatgttaggattataggagtggcacaaagacaacttcctattgtatgcatgaggtatatgtattgtaggcattgctcctctaccttctattgtgttttactccatgtacagccaactaactgagctatagagtatcataacttggccctttaattttctttttgaaggttgtagcttctagtccctagagcttctgtaattaggtggtcataaaaatgcacatagggccaaggtcacagagaaatcttgattgtggccttcaagcagattgactttattattgactttatttaatgtcattttagtgagatttttgtttgcttgttaattcgtttatgaagaatgaccaactgtgtttacaggcagatgaagggaagggtagggaggtgtgggacttgggaaaggatagttgtacattggatgactaaaaggctttatctcagctgggcacagtggctcacgcctgtaatcccagcactttgggaggccgaggtaggtggatcacctgaggtcaggagttcgagaccagcctggccaacacggtgaaaccccgtctctactaaaaatccgaaaattagctgggcatggtgctgcacacctgtaatcccagctactcaggaggctgaggcaggagaattgcttgaacccaggaggcggaagttgcagtgagctgagatcacgccactgcactccatcctgggcgacagactccatctcaaaaaaatgaaaaaataaataagtaaataaataaaataaaaaaatagactttatctcatcataaaaactttttaatctaatttctcttttttctagcttcaggctcctggcaaaggcctaactagcaataaaagcaaggatgacctggtggtagctgaagtagaaattaatgatgtgcctctcacatgtaggaacttgctgactcgaggacagactcaagacgaggtgaggaggcattgagactctttggggagggcggtgagtggattcagataaagaagacctctaaatagacaggcgtcagatatttattagtgggtttgggtcatagtctctaaagtcaggattgggtttaatttaacttcagaggaagataatggaatggatataaatgaattctctgggttggtttgagtaagaaaccatggaatcaaaatttcagatacaggagagaattctttccttctttacttggttgaatgaatgaatgggaagaaaatctgtctgccattgaaatcaaccaattgccacatttttttaattgaacatttccttttttagatcagccgacttagtggggctgcagtatcaactcgagggaggttcatgacaactgaggaaaaagccaaagtgggaccagggtgcgtattctcttatcttgtttatggaagggttgggtgtatgactcacgttagcctcatgttttttatccttaggtaatacgtgtacacaatatttgattcaaggtttgaggggtatgtgtgtgcacactatagcagaattctggatatcaaacagatacaagatgttgggacctgtttttggacttttatttcacatttaatgtttttattggaggaaacaaattataggaaagtgtaaaagaagatactaaccactaacatttaatgtatatactcttttttcttctttctgttccatatgatctgcagaaataatgtatatactttttttttttttttttgagatggagtcttgctctgtcgcccaggctatagtgcagtggcgtgatctcggctcacttcaaactctgcctcctgggttcatgccattctcctacctcagcctcccgagtagctgggactacaggcacctgccaccacgcctggctaattttttgtatttttagtagagacagagcttcaccgtgttagccaggatggtcttgatctcctgaccttgtgatccacccccctcggcctcccaaagtgctgggattacaggcgtgagccaccacgcccggcattgtatatacttcttaacttttttctgtggaaatagttcccctcacaaatgggctctttttttttttttttttttttgtctttatgatggttatagtttgtgattattcaggtaaagacttaatctgtttcattttattccttccatcattccgtgtttgagtttctcttcactgtcagttgataggtacttagggaatgcaacatttttaacattagcttaaactacacaaaataaggtggcaaaatttaattcctaccccaagccaagaatttatttatttatttatttattagagaaggagtttttgctcttgttgcccaggctggagtgcaatggcgccatctcggctcactgcaacctctgcctcctgggttcaagcaattctctggcctcaccctcccgagtagctgggattacaagcatgcgccaccacacccggctaaattttgtatttttagtagagatggggtttcacgatgttggacaggctggtctcaaaagtcctgacctcgggtggttcccctgcctcggcctcccaaagtgctgggattacaggcatgagccaccgtgcccagccccaagaatgtatttaaactttctatatgtgttgattgctgatttgaactttgtctataaaaagtattnttacctgctactttttattaactatatatggttattgatcactttattataatttaagtcctcttcacatttagaatctaaattatcagttgatgtagaccttaagaggtttctctatatgcatgatcaatctttccccattaattttgtgtgtgtgtgtgtgtgtgtgtgtgtgtgtgtgtgtgtgtggttttttttttttttttttttttttttttggagacagagtcttgttctgttgccccggctggtgtgcaatggcatgatcttgggtcattgcaacctccacctcctgggttcaagtgattcttgtgcctcagcctcctgagtagctgggactacaggcgtgccaccatgcccggctaatttttgtaatttcagtagagatggggttttgccatgttggccaggctggtctcaaactcttggcctcatgtcatccacccacctcagcctcccaaagtgctgggattacagacatgagccacagcacccagcttgccccattgatttggatagacgagaccacatttgtttataacctattagacaaccagcaaaaaggaattctgttcttaaatattgggttatctcaatagactggaaaataatggtagtgaatccataagaacagatttgatctgaactctgtgggccagttgacttttaaaatcaagaagtttatttgttccccagctgttaaagcatgttctgagacattagctagcaaaaacccttctaatgtatatagtcccttttggttatttggaaacttgaaacattacaaattagatctggtgacccatttgactccttttttggttttgaccacattgagatcatccttttttgtttctctttatagggatcgtccattatatcttcatgttcagggccagacacgggaattagtggacagtaagtaatgtttttggctcacgtagcactttttgtgaagagcaaagtacagggctctgtatagcaagttggcaaagtgtccctgatggctgttctaacccttgttcatgaactatacacgaatttgtatgggagtttagagggatggagagccacatatttgggtaacgtataaagcagatttacggtgaataattgaacactggcctgcctgggcactagtcagttcattccattcagttttactgtctgtgtttttctaaggagctgtaaaccggatcaaagaaattatcaccaatggagtggtaaaagctgccacaggaacaagtccaacttttaatggtgcaacagtaactgtctatcaccagccagcacccatcgctcagttgtctccagctgttagccagaagcctcccttccagtcaggggtatgttttggggagggatcgttaatagcattatcatttctataaaaatgatatgtgctggccaggcacagtggctcattcctgtaatcccagcactttgggaggccaaggtgggtggatcatttgaggtcaggaatttggaccagcctgaccaacgtggtgaaaccccgtcacgaacattacccgggcatggtggcaggcacctgtaaccccagctacttgggaggctgaggcaggagaattgcttgaagccgggaggtggaggttgcagggagctgagaccatgccactgcactccagcctgggccacagagcaagactccatctcaaaaaaaaaaaaaaaaaaaaaagtgccaagtaatacatacaaagaaaaaaaaatcgtgaaattccaaattccaatcccgaaagttacctgccataggtattctgtttgtgtgttatccagctctccacggtataatgaacacctgatcacacatttcttcatattgatatattctagaaaggagattgatagagcagaaggtatacatgttgtacattttgaagttagtggttttaatttgtatttgtaaacttgatgacaactggaggactaagaaggctgagtctgatgaagtaagactttgctgatacattcctcctagaaaaaagggttggagagagcagccttcactgaagagtatcacagggctgactgtactacccaacactctaccccagttttacaggagactgtctttgctataatttcttattgacttatttcaaagattgaggatttaattatatattctgtttaatctgaagtattctgttcttcctacagatgcattatgttcaagataaattatttgtgggtctagaacatgctgtacccacttttaatgtcaaggagaaggtggaaggtccaggctgctcctatttgcagcacattcagattgaaacaggtgccaaagtcttcctgcggggcaaaggttcaggctgcattgagccagcatctggccgagaagcttttgaacctatgtatatttacatcaggtatggatggatagggcaggggacatgtgaattcttgtcaacttgttggtacagtcaggagtgattcagaaggagcaagagaaaactgggtgtaattaatagtaatgagggatttagataaatgctaggagtaattactttataattagttaaagaaattgtagaattggggcacggtggctcatgcctgtaatcccaacacttctggaggccaaggcgtaggaccacttgagcccaggagtttgaggccagcctgggcaacatagcaaaaccccatctctccaaaaaaattttaaaaattaggcgggcacggtggctcacacctgtaatcccagcactttgggaggccgaggcgggtggatcacgaggtcaggagatcgagaccatcctggctaacaaggtgaaaccccgtctctactaaaaataaaacaaaaaaaattagccgggtgtggtggcaggcgcctgtagtcccagctactcaggaggctgaggcaggagaatggcgtgaacccgggaggtggagcttgcagtgagctgagattgcgccactgcactccagcctgggtgacagagcgagactccatctcaaaaaaaaaaaaaaattagccaggtgttatggtgtacaccttaatcccagctgctcagtaggctgaggcaggaggatggcttgagcccaggagattaaggctgcaggtagctgtgtttgcaccactgcactccagactgggtgactgagtgagaccctgtcttaaaaaaaaaaccaggtgcggtggctcacacctgtaatcccagcactttgggaggccgaggcaggcggatcacttgaggtcaggagttcgagactaccctggccaacatggtgaaaccctgactctcctaaaagtataaaaattagccaggtgtggtggcaggcacctataatcccagctattcagcaggctgaggtaggagaattgcttgaaccctggaggcggaggttgcagtgagctgagactgctccattgcactccagcctgggcaacagagcaagactccatctcaaaaaaaaaaaaaaaaagagaaattattgaattaggagacggaattatctctttagtattcaagtcctttggttttgtacaagtctgtacaaaagtgaatcttggcctgtaatcccagcactttcagggccgaggcggatgaatcaggtcaggagattgagaccatcctggctaatacagtgaaatcccgtttctactaaaaataaaacaaaaaaattagccaggcatggtggcaggcgcctgtagtgccagcaactcgggggctgaggcaggagaatgacgtgaacccaggaggtggagcttgcagtgagctgagatcgcgccactgcactccagcctgggcaacagagcaagattctgtcgcctcctgcctcagcgtcccaagtagctgggactataggcacccgccaacatgcccggctaattttttgtatttttagtagagatggggtttcaccgtgttagccaggatggtctcgatctcctgacctcgtgatccgcctgtctcggtctcccaaagtgctgggattacaggcgtgaaccaccacgcccggccaaaaaaaagcaaatcttaaagtgagctgtgataagtctgaaataattttcatttaaacctatgtcaatattaatacgttttatagtaattttatgaactttaaacatttttatatcgagaagtaccattactcagagaaagactaataaaatatttgtggtaatgatagtggttatatcttaaaagacttatgttttgtgtttctgttttgtgattttcagaggcctagatttgagctacagtgaatgtattaatgtagatatgtaaaatagcatggaaaatgaaagcagaattctgcatcttttatttatttttctctcctttgaattcctggttatttctttgcagtcaccccaaaccagaaggcctggctgctgccaagaagctttgtgagaatcttttgcaaacagtgagttgtatttgtctgatactcattcagaagagcaattgccattttggagtatgtcttagctgtttctttcacctgtttagtttcctagtactgctataacaagttatggcagttgggtggcttaaaataacacaaatttattctatcacagtccaggaagcagagtctgaaatcaaggtgctggcagaattggttccttctggagtctttgagagagaaatcatcccatgcctttcctctctcctagcacctggtcattgtgttggttttctttggcttgtattagcataactccagtctgaagtaagggtagaactataataatttaaaaccagttagacatgtttgggggatgattgctcatttgattatgcattctttttattctataaacaaccaaaagttaaaccttaggactgtcttttttttttttttctgtcgcccaggctggagtgcagtggcgggatctcggctcactgcaagctccgcctcccgggttcacgccattctcctgcctcagcctcccaagtagctgggactacaggcgcccgccactacgcccggctacttttttgtatttttagtagagacggggtttcaccgttttagccgggatggtctcgatctcctgacctcgtgatccgcctgcctcggcctcccaaagtgctgggattacaggcgtgagccaccgcgcccggccaggactgtctttatagcacttagaggaaatcaggttttgcactgaatatgttcaaccttgtgttctctggtgccttattgggtagctcatggttggtttttttgtttgtttttttacttttgtacatagcacctgatttaccaacccttgtaccggataattttcttgactatttcccatctttgttggtacttgaggttatggacttaataatatataggaaggaagtatgaggaaaatacgaaacccttactaaatgtgagctccttgaggaaaagtcacccagtaaatgtgaatgaattgaggtctcaccagttatactaacaacttggaaatttcctagttacttaatttctgtggctttctaaatgattctgtaccccagaattgagtatggtttaggggattcaggattattctcctaattcccaaaattggcttaataatttatagatttgccttattaaaatgttgaggtgggttggacacggtggctcatgcctgtaatcccagccctttgggaggccaaggcgggcagataatgaggtcaggagttcgagaccagcctggccaacatcgtgaaacccccgtctctactaaaaatacaaaaactagctgggtgcggtggcacgcgcctgtagtcccagctacttgggaggctgaagcaggagaatcgcttaaaccgtgaaggtggaggttgcagtgagctgagaccatgccattgcattgtaccctgggtgacagagtgagactgtctcaaaaaaaaaaaaaaaaaaaagatttgcagtgatacaagatcgcgccactgcactccagcctgggtgacagagcaagactgtctcaaaaaaaaaaaaaaatgtgggttaaacaagtttaaatttgattggaacattggtagatatattttaattcctaatggctttggtcctagaattatgtaatcagacccttgtaaatgcacagcttcggctgtcccatgttaatttgtttccccctctctttcaggttcatgctgaatactctagatttgtgaatcagattaatactgctgtacctttaccaggtgtgtacatcttgaagtgtttaaaaaatattttgctagtgatagttatgtgtaactatgatacttgaggctagactgtgccagggcactattaatgttccctttaatttagggtaatttggaaagccattcatgcctcagtatttttcttccctagatattaagtttaatattcagctaaattgtctcattctgctgcagctgattaaacactttttttcttccccctcaggctatacacaaccctctgctataagtagtgtccctcctcaaccaccatattatccatccaatggctatcagtctggttaccctgttgttccccctcctcagcagccagttcaacctccctacggagtaccaagcatagtgccaccagctgtttcattagcacctggagtcttgccggcattacctactggagtcccacctgtgccaacacaatacccgataacacaagtgcagcctccagctagcactggacaggtaggatgtcaggatatgcaacaacatattactgaatttaggaaaaactggggaaagaggggaagtagtggtattccagaaataaatcatgtgatgtggaatgtctttttcctgctgtcttctgtgttcctaccaccaacctacctgaatattttggattagtgtgtatgtgtgtatgtcatcctgaagtttatattttcacaagtcttgcacaccaaatagctgtttaaagtggggatggtgggcacacttgctataaagggtcagatggcaaatattttaggctttaagggccatacattctctgtcacaactatcacactcggtggttgtagtgcagaagcagcccgtggataatacctcaatgaataagcatagctgttgtactccagtagaactttatttacaaaacaggtggcaggccacagtcatagtttgccatacccttggccattgtttgcctaaccttacctttgcagtgttaacaaagtcctcaaggagaatggggctaccttcaccacacctctcagtaattggaactgagttagcatttcaaatcttagaaggaaacataatctcagcatctggggaggccgaggcaggattgctttagcacagtttgagaccagcctaggcaacatagtgagactccatctctacaaaaaaaattaactggacatggtggcacatacctgtatttcagctacttaagaggctgagatggaagggtcccttgagcctaggaggtcatggatgcagtgaaccaagatggtgccagtgcactccagcctcagtgacagagtgagactgtctcaaaaaaaattttaaaaagcaacattatgtaagagatatataaacttttcaaatgtaaggattataaatgctggtatgtttcttttataacttaagaaatgtatacttaaaaaaattttttttttgagacagagtctcgctctgttgcccaggctggagtgcagtggcgcatctcagctcactgcaagctccgcctcccaggttcacgccattctcctgcctcagcctcccaagtagctgggactacaggcacccaccaccacgcctggctaatttttttgtatttttagtagagacggggtttcactgttagccaggatgatctcgatctcctgacctcatgatccaactgcctctgcctccccaagtcctgggattacaggtgtgagccaccgcacctggccacaatttcttaaatcatgaaagtagaattttaggaaaagagtagatgtctggataataatctggatggattatatatactggtcttggaggcaggggagagacttaatgagagcatggtaatggatttatggtgggtccttctctgtgggcctctcatagtgtacccatgccatagcaaatggcagcctcgaaccattgcccagtccccttacctgtgggctgtgagcactgaagggggttgcacagtgtgtaacaaaaaagctatgaactaaattttatttgtggtctctagtcaaatttattttattttatttatttattttatttttgtttattattattttttgagacagaatctcattctgtcacccaggctagagtgcagtggcaccatcttggctcactgcaagctccgcctcccaggttcacgcgattctcctgcctcagcctcccgagtagctgggactacaagcgcctgccaccatgcctggctaattgttttgtatttttagtggagatggggtttcaccttgttagccaggatggtcttgatctcctaacctcgtgatccgcccacctcagactcccaaagtactgggattacaggcgtgagccaccgcgcccggcctaatgtttgtatttttaatagagatggggtttcaccattttggccaggctggtcacaaactcctgacctcaggtgatccgcagcctcggacttccaaaatgctaggattatggtgcaaggattacaggcataagccaccgtgcccagccaaaattattttaatttttatatttagacagctctgtaggtctctacttttgaaggtcagtcctttgtaattgggaagcaatacagcagagtggttaaaagcagggagttaaggcagccgcagtggctcatgtagctgtaatcccagcactttgggaggttggggcgggtggatcacttgaggtcaggagttcaagaccagcctggtcaacatggtgaaaccctgtctctgctaaaaatacaaaaattagctgggcgcggtggcaggcatctgtaatcccagctacttgggaggctgaggcaggagaattgcttgaacccaggagtcagaggttgcagtgagccgagattgcatcactgcactccagcctgggtgacaagcaaaactcaaaaaaaaaaaaaaaaaaaaactgggagttagaattagattgacagggttgatcttgctttcccatttttgagctgtgtgatattgggatgtaacttgccctgtctagggtttggttttccttagatgtaaaatgggcacagtgataaaaatctcagaggtttgcaaggattaagtaagatgatccaatctgtcagtaaacgttagctgtgttattaatacagtcagccaccttacaacgttttagtcagtgatagactgcacatatgatgcttgtcctgtaaaattatagtagcatatttttactgtaccttttctacatttagatacacaaatacttaccattgtgttacagcattcagtacagtaacatgctatacaggattgtagcctagaagaataggccatatcgtatagcctaggtgtgtagtaggctattttcatctaagtttgtataagtacacatttgttaaatgacaaaattgccttgcagtgcatttctcaaaacatattcccactcagcgtagtggctcacacctgtaatcccagcactttgggaagctgagacagatggatcacaagtacaaaaaaaaattagttgtgcatggtggcacgtgcctgtagtccctcggcaggctgaggcaagagaatcgcttgaacctggtaggcagaggttgtagtgagccgagttggcaccattgcactccagcctgggagacagagcaagactgagactctgtctcaaaaacaagacaaaacaaaacacgtattaccattgctaagcaatgcatggctgtatagagttttctcttcagacctgcctattcctctgtaatatatactgtcttctgataccccttattcctttttggaacaacatcttcaaacattagacttaatcttgacatagtagcttagtgataactaagggagtggaagatgaaattgcttcttccacaagcattagcagcatttataaataacagaaagcttattacagaaagctaatcacatcgactgtcagtggttggagttctgtttgttaatggtcatgtttactcctagtagcccaaatgcataacagagttttcttaaaagttcaaagcactgtatataggttgtcaatttcatgtttccctaggatgaaggtgagaaggcttaggtgataatgttaccaaattatacatgaaggaaactaaggacctgaagatgcaaaattcatatgatacttattgatccttaaagtatattgtaatcattgtttacttattccttgggcattctcacactttttttcttccttggtttgttttggtcccagagtccgatgggtggtccttttattcctgctgctcctgtcaaaactgccttgcctgctggcccccagccccagccccagccccagcccccactcccaagtcagccccaggcacagaagagacgattcacagaggagctaccagatgaacgggaatctggactgcttggataccaggttaaataaaataccctgttttcctatcttcaccttattcttctactatattctccctttaaaaaagataaattcacatcattctcccagtactaggatttctgctttctggaattcattttggttaggttttttatcctattcaacagactcttgaaagcctctgagagttcttactttcttatacatctcactcaaagctcttgatctaccagtatgtggtttgtatttaaaaccttggctttcagtggtgctctctcttttaccctccacctaaaaaagagagtgatatctccctccagtctccccacccctcaagactgctagaaaaggagtgattctgtacatgtaattgtaaagttagccactaaagttaaaaagattcttaatttgtagttttggtgcaattttatcagaagtacctttccattttgccagaatccttgaatcattctttaaaccaaagcatttttttatagtttctagctaggtttatagaaactagtggagctatgggcagtcagttaaaaacaggccatagatagcataatgaattataacacccctgtccaagtcctatagagaaaaaaaaaaatccctacttttgactacagttacacagcagatcccaaagagctttgtagtagtttaacgtactacaacttatcagaaagatgaggcacttgacagttacattaaggagctaaagtcaatacggcagttgtagatttgctaatgccactgtatttttctgctcatagcatggacccattcatatgactaatttaggtacaggcttctccagtcagaatgagattgaaggtgcaggatcgaagccagcaagttcctcaggcaaagagagagagagggacaggtaagttggaataattatgcaaatgtattcagatgttatttgtttgcaccattagtgagagtaatgatcattgctatgagcttaagtattctgaaactgaaatgaaatctttgaatcaaatatgcttctgtttgttgtaattgatgcaatgaagtaaaatatgataggccttttacagatttagaagcagttatattcggttttgaataatttattacttgttcagacatctttcttgacttccattgtctgcatcttggccattttcctaagggtagacagtaacagaaatgttacataattcagctatttttgctactttagagtcattagaatatcatggatggaagtacatgaatgtgggagttcagcctgccacacagtgcttgaattttcctttcttatattagtatattaaccttcataagaaaggagctgatatctttctataacagttcattcgatttttgtcatggcaattgctgtgtagacaggccttatacttttataaaggggctgggggaaggtggaaggggttgaaattaatggttaaaatgaatttgaaggattgtctgcagacataattgcacttctaatccactggataagttaagaaaatttaaattgtctgaaagaaagtttcattttgtttttcaataggcagttgatgcctccaccagcctttccagtgactggaataaaaacagagtccgatgaaaggaatgggtctgggaccttaacagggagccatggtgagtgtgatatagctgggggaacaggggagtggctaagactggtctaaagctattagttttctcagccgggcgcagtggctcacgcctgtaatcccagcactttgggaggccgaggtgggcagatcacctaaggtcaggagttcaagaccagcttggccaacatagtgaaatcccatctctactaaaaatacaaaaactagcgggcatggtggtgggcgcctgtaattccagctactcagggggttgaggcaggagaatcgcttcaacctgggaggcagaggttgcagtgagccaagatcagaccactgccctccagcctgggcaatagagcaagactccatctcataaataaataaatacataaataaagctattaattttctaacctgatgttcattcaggtgtttaatccaacctctataatctgttggccagtgaaaatacttttgggctgggcacggtggctcacgcctgtaatcccagcactttgggaggccaaggtgggcggataacctgaggtcaggagtttgagaccagcgtggctaacatggtgaaaccccgtctctactaaaaatagaaaaattaagctgggcatggtggtgcatgcctgtaattccagcggcttggaaggctgaggcaggagaatcacttgaacttgggaggtggaggttgcagtgagccaagatcacaccactgcattccagcctgggcactagagtgagactctgtctcaaaaaaaaagaaagagaaagagaaaatagtttctaaaaaattgtatacagacaaccttttatttccaacaaacgtgtgccgagagagagagagagaaaatagttttaaaaaaattgtatacagacaaccttttgtttccaaccaacgtgtatctagaaaagagttagtcgacttattttatacatagcatcagtgaatagtaatgagtggtaggtcatttcaaaatcctgttgcctatattatgtgaataccaggaggtcatctgatacggacttaataaaggttgattttgctttatattgggagctgagccacacctccccttataactctattggtcagtaatggtcagtttgtggctgttaggaaaatgttgccttttagcattccagaactctaaatcctgtagaggtacatgggatattttattctttgcctgtactcataaaaatgaacagaagaaaatacgtttttttcttttcttaacttcttttcttttaactctttaaaaggtgaaatatcagccctcaagagactcacttgctaactttcctttttttctttttttttctttttttgtgtttcttttttctttctctgttttcttacatggttctggtggattcacatttgctgatgctggtgctgtttttcgtgtgatcttcaacgtttttgggtgaccattgaccctgtgacctcaaaatggtgtccaactaaccacttaaaattaacatcttttttttaattaacgaatttatggtatttttttttttcccttggcggggatggggttggggttgttttttctctattctagattatccagccaagaagatgaaaactacagagaagggatttggcttggtggcttatgctgcagattcatctgatgaagaggaggaacatggaggtcataaaaatgcaagtagttttccacagggctggagtttgggataccaatatccttcatcacaaccacgagctaaacaacagatgccattctggatggctccctaggaaacagtggaacagagttttgaccctcagtgactcttcttagcaataatgcatgcatttgatttaacaagactctggggcctgtgctgggaaccatctggacctttgcagaagttagagattcagtgcccccctttcttaaaggggttccttaacaaccacaaaaatccttatttctgcagtggcatagaatctgttaaaatttaattagaatcacaaatttatctcagaagctttttaacagttggtgaaatgtgcttgtccaacaaagcatcctaacagggtcgttcccatacacatttgacctggtcagccttttccaggtgaatagccccagttctgacataaagaaagttttatttgtattttactactgtttggtcaattttgatatataactggttacaaacagagccttactatttattagtggggaaatgattttaagaccgtccttttcagtatttaattctgacagatctgcatccctgttttgttttggattatttctgttttggaaaatgctgtctcatttaaaactgttggatatagctggatcctggataggaaaatgaaattattttttcattgtgttttttaattggggtgatccaaagctggcaccttcaggcacattggtctcatagccattactgtttttattgcccttctaagatcctgtcttcagctgggtcagagaaaacttcttgactaaaactggtcagaactcatcacagaaatgaaatacagtggtctctctctcccagaactggttgcagctaaaacagagagatctgactgctggctataggattttggacttaatgactgaaattgcaaattgtcctttttcttggcattacagattttgccaaaataactttttgtatcaaatattgatgtgtgaaagtgaaggagctagtctgctgaaccaggaatagtttgagatattgaactgtcatttttgcacatttgaatactttgcaggctggctttgtataaacttatcctctggtttcctatatgttgtaaatatttagaccataatttcattataaataaatctataaatattctg

SEQ ID NO: 7019 - DNA, 314 bp, Homo sapiens
aacaacatcttcaaacattagacttaatcttgacatagtagcttagtgataactaagggagtggaagatgaaattgcttcttccacaagcattagcagcatttataaataacagaaagcttattacagaaagctaatcacatcgactgtcagtggttggagttctgtttgttaatggtcatgtttactcctagtagcccaaatgcataacagagttttcttaaaagttcaaagcactgtatataggttgtcaatttcatgtttccctaggatgaaggtgagaaggcttaggtgataatgttaccaaattataca

SEQ ID NO: 7020 - DNA, 11838 bp, Homo sapiens
cgggcgccggtggcgccatcttactcggttgcgggaggggtcacaggtcagtgccggagcctccgcgagtgaaggaagacgaagtgcgtgacccgaccggctgtggtgttccagtccccactgaccagtaggagcagcagggcgtcggcttgtgaggtagaggggtggggagtctggcggcggagcagcagctgggggtggggagggggttcggaggagaatggggagggggcggaatctctgggtaccgcagacgtgagagaacccctgcggcctaaggggccgcatccctttcttcccaaaactttctccttgtccctactgtgccgagacgtaaatttatttgtatctttttatttttctctttggaaaaagtaaaacctgtgatgtgtcatgtgactgaactgtctaggagggagggtgaagatgtggggggtttcttagggccacccgaaagggtgcagtggtgagcaagagggacaggccagagtaagagggacaggccagaatatgtatggaaaggtaaggcactggcttgagggctgtcgccgtggtgtctccatcctggattaagcatttcctcctccttttctaggtggcttttcctcggggcaacccaggaaggccccaagaggacaatggattctggaactcgcccagttggtagctgctgtagcagccccgctgggctctcacgggagtacaaactagtgatgctgggtgctggtggtgtagggaagagtggtaggtaacattttccatttgacaggaagcatggatgaaaagtacttaaatgaccagatgggatacttgctatcttgcaatgttaatacttaaaattctctctgtgggtcacctttgtgaggatttgacttttatttcttcttttgaagccatgaccatgcagttcatcagccaccgattcccagaagatcatgatcccaccattggtaagccagatcatcacttatgtttccaaatataccccataaaaatatcttaatgaatatcagtagtttctaactatttatattttgaggcttttttggagtctaattcagatttatttagaaacaagggtatcagcagttggtaagcaactgaatatttctttttttttcagactttatgtcataagccatctttagtctttgtctcttactgaacattaatgggacaactctctttgttgtatttttttatggttgtatacaggccacttaacgaagccttttcttgctgtcacttctctaagggtatgacttgagactcgctctgtaactgtgagtcagctggtttgaacttccacaaaaggaagcagagaaacaagtagagccaggctgctgaactcttacaacccagacatgccaagcctggacatcttgcacttggagctcttggtttacttccttataccttaagttcattacgtagtaatgtcttctcccatgtctgtctgtttttttttttttttttttttgagatggagtctcgcactgtctcccaggctggagggcaatggtgcgatctccggtcactgtaacctccgcctcccgggttcaagcaattctcctgcctcagcctcctgagtagctgggattacaggcatctgccaccacacccggctaatttttgtatttttagtagagatgggatttcactatgttggccaggctggtctcaaactcctgacctcaagtaatccatccacctcagcctcgaaaagtactgggattacaggcgtgagccactgtgcctagccctccgatgtcttttatggtccttaactcttgttgcagaacgctaatagagtaaaaaagtcattttgtttgctttgacttttttattttttaattgctaatctctacaaagactaagaacattactgtcattcctaaaccataaggaagcaggtttgattctaagggtttatatcttaatatgaaagaaaaatggatgtgggaatgggagagggcacagaaagtcagctgtactgttattttctttttttgtttttttttttggagacggtgtctcaccctgttgcccgggctggagtgcggtggcacaatctcggctcactacaagctccacctcccaggttcatgccattctcctgcctcagcctcccgagtatctgggactacaggcgcccgccaccacgcccggctaatttttttttgtatttttagtagagatgggatttcaccgtgttagccaggatggtctcaatctcctgacctcgtgatctgcccacctcggactcccaaagtgctgggattacaggcgtgaccactgcgccgggccttattattttcagtatgtgacactctttgccatgatcctagttctctaggaaggatttccattgggtcaggcctctgctgctctgtttcccgcaaagccaataatgttttgtggtggcccagctttgatatggtcatttcatagagcacatgactccagggatgggaaaaatagaaaaagtcttgactttttcatgtactatatcaaatttagaacactgttcagagattcaggccaggcgcggtggctcatgcctgtaatcccagcactttgagaggtcgaggcgggtggagcacctgaggtcaggagttcgagaccagcctggccaacatggtgaaaccccatctctactaaaaataccaaaactagccgggcgtggtgctgggtgcctgtaatcccagctactgcgggggctgaggcaggagaattgcttgaacctgggaggcggaggttgcagtgagccgagatagtgccatcacactccagcctgggggataagagcaagcttttgtctcaaaaaaaaaaaaaaaaattgttcagagattcaaattatggcgggagttctaggaataaaatgaatttagggcttacgcatatgtacttgagaactccaaaagcatcttttcctttctttttttttgagacagagtctgactctgtcatccaggctggagtgcagtggcgccgtcttggctcactgcaagctccgcctcccgggttcacgccattctcctgcctcagcctcctgagtagctgggactacaggggcccatcaccacgcccggctaattttttgtacctttagtagagacagggtttcactgtgttagccaggatggtctcgatctcctgacctcgtgatctgtctgccttggcctcccaaagtgctgggattacaggcgtgagccaccgtgcccggccgcgtctttccctttctttaaagtaaaactcaaatactcgtctcctgtaagagttatctgtattttttttgttgttttttttttttagatggagtctcactgtcgcccaggctagagtgcagtggcatgatctcggctcactgcaggctccgcccccccggggttcatgccattctcctgcctcagcctccagcgtggctgggactacaggcacccaccaccatgcctagctaattttttgtatttttagtagagacggggtttcaccgtgttagccaggatggtctcaatctcctgacctcctgatctgcccgcctcggcctcccaaagtgctgggattacaggcgtgagccaccgcatccggccaagttatctgttttaatcaattttcctccagttaactactctcctggcaatattatctgattcaacagcaaatacttatgtcttctgagtttctattatgtgccaagcactgcttaccctcagggtacagtggtgatcaaaaagatgaggtttctgttcttgagtttctaatttagtgcatttgatttcaagctctggctgtaaactcagaaaaactttacattgtaactggtagagatataaaagcatacaaggccgggtgcggaggcttacgcctgtaatcctgagcctgcaatcctgtaatcgaagcactttaggaggccaaggcacctgaggtcaggagttcaagaccagcctggccaacatggtaaaaccccatctctactgaaaatacaaaaattagctgggcgtgttactgctgcatgcctgtaatcccagctactcaggaagctgaggtgggagaattccttgaacccagaaggcagaggttgcagtgagccgagattgcaccactgcactccgccctgagcgacagagtgagactttgcctcaaaaaaaaaaaaaaaaagcatatgaatgtgtgcatatgtatatataaattatatacacaagcgcatgtgtatgtgtagctaaaatattatgaaactttacctcactacatctggtgcactctgatattttcttttcttttctttttttttgagacagggtctcactctgttgcccatgctggagtgcagtgttgtgatcttggctcactgcagcctggacctcctgggttcaggtgatcctcccgcctcaccctaccaaatacctgggactgcaggcgtaggccactaagcccagctaatatttttggatttttagtagagatgaggtctcgctctattgccaaggctggtctcaaactcctgagcgcaagtgatcctcccacctggacctcccaaagcactgagattacaggcgtgagagccactgtacctcacccactctggtattttctttctttttttttctttttttctttttctttttttttttttttttgagacggagaatttcactcctgttgcccaggctagagtccagtggcacaatcttggctcactgcaacctccacctcccagttcaagcgattctcctgcctcagcctcccaagtagctgggattacaggcgcctgtgaccacatccagataatttttgtatttttagtagagatggggtttcaccacattagccaggctggtcttgaactcctgacctcaggtgatccacccgcctcagcctcccaaagtgctgggattacaggcatgaaccactgtgcctggcctggtattttctatttttatttaggtttctgcttgtttattttaatgctggtcccggcccattaagtagatttcacaactcactaatcctaatgaataattgagaagcattgatttaatgagctcttcatctttgaggaagagacagaagcaggaattcaagaaaaaatgttaaaaggaaatacattgagatgtaagcagcagttgttaagtgaatgaaatattgcgtggctttttttttctttttagttttctatattttccaaggttactatagtaatatgcataaagaaatttgctttcagaaaagagaaattacgaaactgtggattatttagaaaatagtcagttagaccgggtgcagtggctcacgcctgtaatcccaacactttgggaggctgaggcaggtggatcatttgaggtcaggcgttcaagaccagcctggccaacatggtgaaaccctgtctatactaaaaatacaaaaattagccgggcaatagtggcatgtgcctgtaatcccagctactcaggaggctgaggcaggagaatcccttgagcctgggaggcagaagttgtggtgagccgagatcatgccactgcactccagtctgggtgatagagtgagagcctgtctcaaaaaaaaaaaaaatagtgaattatatatttttttccttttttgtagtattgaggaggaagtataacacatggttaataatgcttttcagttcagcaatcttggattttaatcctcattctgtcactaattaactaatttagagaagacattaatattttcaagttgaattttctttagctgtaaaatggaggtaataatgcctacttcattggattattgtgattattgaagaattaatatatataagttacttagtataatgtctggtagataataacaatttaataaatggtaaagttacttttcaggcctaattttttttttcccctaagagatggggtctcggctgagtgcagtggcccacacctgtaataccagcactttgggaggccaaggcaggaggattgtttcaacccaggagttcgagactagcctggacaacattgcaaaatcctatgtctaccaaaaatacaaaaaaattagccagacatggtggtagcacgcctgtagttccagctacttgggaggccaaggtgggagaatcactggagcctgggaagtcaaggctacagtgaaccgaaattgcaccactgcactccagcctgggtgacagtgagaccctgtctcaagaaaaaaaaaaaaagatgagctgttgctgtgttgcccaggctggtcttgaactcctgggctcaaacaatactcctgtctcagtctcccaagtagctgggattataggcagtcaccactgtgcccagatagcctaatttttttaagaaagacatcttctcagaatccttttttagcttagaattgtaggtgaaatcttcagctgtgaataaactacatcatcacctatgtggaaaaaaaaacttcagttgaagactcagtttatgtatctcagtggatttagcatgcttcctgagaaaatgtgggcatttaatgaatttggatacaatgtactactctgtaagatgagttttaaataggcatttcttccggcatttatgactttatagtacacctttcttccctcctgtagaagatgcttataagatcaggatccgtattgatgatgagcctgccaatctggacattttggatacagctggacaggtattaaatcccagaatgttatgagtaaaggcttttttactctagcaaaggggaggggaaggcctacacagagaagatcaatagtttatctctcttaatttttcatgcactctgactcaggatagcaggtaatcgacatgcgttttctttaatctgaaagaaatagctaattgtgtgtgtagttgggctagattgcgtcaatacataatgacccttgtttccctctaggcagagtttacagccatgcgggaccagtatatgagggcaggagaagggtttatcatctgttactctatcacggatcgtcgaagtttccatgaagttcgtgagtttaaacagcttatttatcgagtccgacgtactgacgatacacctgtggttcttgtgggaaacaagtcagacctcaaacagctaagacaggtgaggatagagaagaaaatactgtctataatcttatacaattagtcatttttgtttcttggcttacagattcttggcttggcttacagatttttttgccttaaaatagaaaatcaggctgggtgaggtggctcacaccagcactttgcggggccaaggtgggcaggttgcttaaggtcaggagtttgagaccagcctgagcaacatggcgaaaccccatctctacaaaaaatacaaaaaaacatagctgggcatagtggtgcatgcacatgtggtcccagctagttgggaggctgaggtgggaggatcccttgacctggggaggtggaggttgcagtgaggttggggctacagcttactgcagcctctacctccccagctcaagcaatcatcccagttcagctttgagggtagctgggaccacaggcgtgtgccaccactcccagctaattgtttttactttttgtggagacaggatctcactatgttgcccaggctgatcttgaacacctggactcaagtgatcctcctgccttggcctcccaaagtgttgggattacaagtgtgagccacagcgcctggctggaagtagtttgatagtagtcaaattcataatgcttctctgttaatctccattggaaaaaatttatagggatttatatataacatgttcattgcaagactatttatggtagaagaaaatgagaaacaatctagctgtccaaaagtagaaattatggcatatccataattagatgtatcaattatgggctcctaatagttttcagtattttagtgtaagcatatatctctttccctccctttgtgtttctttcttttttttttttttttttttttgagacagagtctcactctgttgccttggctggagtgcagtggcacaatctcggctcactgcaacctcctcctcctgggttcaagtgagtctcctgccttagcctcctgagtagctgggattacaggcgcatgccaccacgcccggctaatttttttttgagacggagtcttgtctgtcgcccaggctggcgtgcagtggcacgatctctgctcactgcaagctctgcctcccaggttcatgccattcttctgcctcagcctcccgagtagctgggactacaggtgtccgccaccatgcctggctaattttttgtatttttagtgagatggggtttcaccgtgttagccaggatggtctcgatctcctgacctcgtgatcagcctgcctcggcctcccaaagtgctgggattacaggcatgagccaccgcgcccggcctaatttttgtatttttaagtagagacggggtttcaccatgttggtcaggctggtctcaaactcctgacctcatgatcttcccacctcggcctcccaaagtgctgggattacaggcgtgagccaccgcgcccagctttctttttttttaatttttattttaattttgttgttttgagacagagtctcactctgttgcccaggctggagtgcagtggcgcaatctaggctcactgcaacctctctgactcctgagttcaagcgattctcctgcctcagcctcctgagtagctaggattacatgtgcctgccaccacatccagctaatttttgtattttagtagagacggggtttcaccatgttggccgggctggtcttgaagtcctgacatcaggtgatccacctaccttggcctcccaaagtgctgggattatagatgtgagccaccacacccagcgtttttttgttttgtgttgttttttagacagagtttcactcttatcacccaggctggagtgcagtggcatgatgttggctcactgcaacctctgcctcctgggttcaagcaattctcctgcctcagcctcccaagtagctgggattacaggcgcctgccaccatgcccagctaatttttcttttcttttttttttttttgatataaaagcatttttaaactttattattaatactcaggacattaggaatttccagatttttttcagtagcatttgtagaaccacttttggtaacaaatacagtagttaggaatatgcatccagttcagaatgcataataatgtttctcctgaatcctttccggctaaaaacagggctggcactgtgatgagatatagaacgagaatctacaaaaaacactgtaacatgtttgttttttcccagaggctacatcctcttttgctggaatactttataaatacatattaaaaagtaaggcaacaactccaaacagtccaagctgtttgctcaactcttttcccaattagatttgcaatcccggtgatcagtttcatggttgtattgtttagtgtttctttcttattttagtagagatggggtttcaccgtgttggccatgctggtcttgaactcctgacctcaggtgatctgcctgcctgcttcagcctcccaaagtgctgggattacaggcatgagccaccgcacccaacttttttttttcttgagacagggtcttgctctgtcactgaggctggagtgcagtggcgcaaacatggcttaccgcagccttgacctcctgggctcaagtgatcctcttaccttagcctcctgagtagctgggaccacaggtgtataccaccacatccaactaatttttttttctttttttgagacagagtctggctctgtcacccaggctggagtgtgacacctggagtgcagtgccgcgatcttggctcactgtaacctccgcctcccaggtttaagcgattctcctgcctcagcctcacgagtaactgggattacaggtgcccaacaccatgcccagctagttttttttaagtggagacagggttttgccatgttgaccaggttggtctcgaaccccagacctcaagtgatccacctgcctcagcctcccaaagtgttgggattacaggcgtgagccaccgctcctggccccagctaaatttttaaaaattttgtaaaagtagggtctcaccatattgcccagcttggtctcaagttcctgggctcaagcaatcctcctaccttagcctcccaaagttctggaattacaggtgtgagccaccaagcccagcctatttatctttcttaaaataaaaagtatggggaaaattaagattgtgtatttgatatctaaaactattccctgttccaaaaagtatcttaaaaatagactagagaccgggcacagtggccgacgcctgtaatcccagtactttgggaggccgaggtgggcagatcacctgaggtcaggagtttacaaccagcctgaccaacatggagaaaccccgtctctactaaaaatacaaaattagccaggtgtggtggcgcatgcctgtaatctcagctactcaggaggctgaggcaggagaatcacttgaacccgggaggccgaggttgtgagccacaatcatgccattgcactccaatctgggcaacaagaacgcaactctgtctcaaaaaaaaaagtagactagaaatagaatcatatcatttgaaggcagaataagaaaccttagaagtaatctagcctaaaattacaaaaattagtgctgtatgcttgaacacctccagaattgagaagctttctttgtgttaaggtggtggtgcattcaggtttttggacaatttaattgtttttcactgttatcttttctcacattttgcctttaaaggtcaccaaggaagaaggattggccttggcccgagaattcagctgtcccttttttgagacatctgctgcataccgctactatattgatgatgttttccatgcccttgtacgggagatacgtaggaaagaaaaggaggcagtactggccatggagaaaaaatctaagcccaaaaacagtgtatggaagaggctaaaatcaccattccggaagaagaaagattcagtaacttgaagagaagatgtgaagtgtttatctgtgaactgcagtgctgtatcaaagcagtccagtaacctgcagtactgagtatggtgcttgctctttcacttaactgataagagggacatgcctactaggagtttttaatgatgtggtatttaaagtattgtctcttagttaagtatgatttattaacccagtggagcactgtctgcttttaaattgtcacattagaatttgttctaccaatgttttgggttctgttgcgctattaattaatgtaaatttgtttatacccaggagaatatgtataccatgtgtgtttgactaagttcacaagggaagtttttggctctgcactccacattatcctttaatttcaatttcctgggactatcccagagaaagacctcagtctcttctattcacactatgcttcctagagacagaacaaaaatcatgtagggaaattggggctaatgagatcagtgccaaatttcagcagatacctgtgaggctgacacctgttgcagactatggagtggtgagatttgggaaagttgggctatatgtttgcagggacttaaaaaggtaggttcagaacagtattctcagtacaagcttcgcttttctaagaagtacacatttggcccaaattcaccgggataagtgagaacagccagaagcataaaatgtgatgaaggtttctcctgggaaccttattttactcttcatttcagggttttcttttttttttttaccttcaaaggtagacattttgggaatcataactgtattactaaacgtgtttaatcaaaattcatagttggatcagcca

SEQ ID NO: 7021 - DNA, 945 bp, Homo sapiens
cgggcgccggtggcgccatcttactcggttgcgggaggggtcacaggtcagtgccggagcctccgcgagtgaaggaagacgaagtgcgtgacccgaccggctgtggtgttccagtccccactgaccagtaggagcagcagggcgtcggcttgtgaggtagaggggtggggagtctggcggcggagcagcagctgggggtggggagggggttcggaggagaatggggagggggcggaacctctgggtaccgcagacgtgagagaacccctgcggcctaaggggccgcatccctttcttcccaaaactttctccttgtccctactgtgccgagacgtaaatttatttgtatctttttatttttctctttggaaaaagtaaaacctgtgatgtgtcatgtgactgaactgtctaggagggagggtgaagatgggggggtttcttagggccacccgaaagggtgcagtggtgagcaagagggacaggccagagtaagagggacaggccagaatatgtatggaaaggtaaggcactggcttgagggctgtcgccgtggtgtctccatcctggattaagcatttcctcctccttttctaggtggcttttcctcggggcaaccgaggaaggccccaagaggacaatggattctggaactcgcccagttggtagctgctgtagcagccccgctgggctctcacgggagtacaaactagtgatgctgggtgctggtggtgtagggaagagtggtaggtaacattttccatttgacaggaagcatggatgaaaagtacttaaatgaccagatgggatacttgctatcttgcaatgttaatacttaaaattctctctgtgggtcacctttgtgaggatttgacttttatttcttcttttgaagccatgaccatgcagttcatcagccaccgattcccagaagatcatgatcccacc

SEQ ID NO: 7022 - DNA, 314 bp, Homo sapiens
aacaacatcttcaaacattagacttaatcttgacatagtagcttagtgataactaagggagtggaagatgaaattgcttcttccacaagcattagcagcatttataaataacagaaagcttattacagaaagctaatcacgtcgactgtcagtggttggagttctgtttgttaatggtcatgtttactcctagtagcccaaatgcataacagagttttcttaaaagttcaaagcactgtatataggttgtcaatttcatgtttccctaggatgaaggtgagaaggcttaggtgataatgttaccaaattataca

SEQ ID NO: 7023 - DNA, 439 bp, Homo sapiens
tcaaccgttaagtacacagatgccagaacagggtgctccataacctatgcttgatcgcctctccagtactcaaccggctttttagcgtcccattcttaaacgctccagcaagatgagcagcttatcttcttcgacctttgcttaatatacaactctatcatacatatttgcctgcgtacctgccttgccacattgagagtaccagaatggcagggcctgcggcttattcatctttttatttttatattccctgcttggtgcacagaaatgaagcaaacaaacagagaaattctccaaatgatctttgcaacgaatccttttccttttcctaagtaacagaaacgtgaaacgggcaaaagccgcgggaaggctgtctccccagacagaaactaggactcaacacaaacgtagcggaatttgaggagaaacctgtttaatc

SEQ ID NO: 7024 - DNA, 124 bp, Homo sapiens
aaaaaaaaaaaaaaactaggtttttgaacttgcttaatcaaagaatttgtttaaacttttaagatgcgttgtcagattatctttccctaaaggaataatttctattcctatcagctgtttatat

SEQ ID NO: 7025 - DNA, 1395 bp, Homo sapiens
cactagatataattgattttcagtttttgccaatctgaggaacaaaaaatgacccttatatgtcaaatttacagtttattttcaaggattttgggattctgatcaaattttggtaccttcatataaaatttggcttttatatcacatcttgtcttctctgctttccaccctcttttatgttgttttttggcttctggccgcatgactataatctccgcttttgtattcacatcaccttctgtcatttttgaccttgcctccgtcttacaaggatccttgtaattaattatattgggcctgctgagataatccaggatattcttcctactcaagttcctcaatttaatcacatctgcaaaaactgccttttgctatagaacaatgacaggagattagaatgtaaacatatttgggggaccgttattcagcttaacacaatacgtcccccttcatcaggtggagcttattttccctccttccttgagtgtgggctggacttagtgactaacttccaaagaacagagtatggaaagggaggaggagagtaacttcatagtacagaaacctggaaacactgtcttggccaggtggtcaaagttaatatcatcaagtcatgttgatagcatatactcccaatatactgtgatgagaagggcaattcacctctgtggtattctcaaaacctataacccaatctagtctaaacatgaaaaaaaaaaaatcaaactaaaattgaaggacattctataaaacacctgatcagtattcctcaaaactatcaacgtcgtggggaacaaggaaagattgaaatactgtaacagaccagaggaaactaaggaaacttaattgatgactgaatgcagtgtgctgtgttgaactggatcctagagaaaatagacattagtggaaaaactactgaaatatgaatagtctcaagtttaatagtagtgtaccattattactttcttagttttgacaaatgtaccatggttatgcaagatgctaacaatacagaaaaataaggggtatttgggacctccctgtattatccttatgcccttacttgaaagttgtttcagcaatagaagtttatttaaaatattgtgaagggcctgagtatttttaaatcaactgcagtgactctcttttgtgtatttgtgtacagatgagtttttctgcatcgaattttatctcctttccttgcagaagaaagagaattagccctttacagagataacagttgcctaagccagctcttttctcctctttttgatgttcttctttttctctcagtttgaaaattgtaggttatttgagtttttaaaatgtctattgctacatacacattctagttatattctagtccaaacaatctagtaaaatatctaaaagaaa

SEQ ID NO: 7026 - DNA, 2939 bp, Homo sapiens
ctagcaggaaggggaataccgagcccagccggctggtcacggagccgggggccaccatgtccgagggctcgcgagtgaagaggaggaaaggtgtgtggcccaccagcacgcgccggcgctccggcagcagctgcgcccgcccgccgtcggctctcgctcaggcctcagtggctctggagcccagcagaggaaggcagcggtgggcggggcccgggcgacgctacgccccagagcgccgccgccatccaatcgccttctttctggcggctttcctcccgggctcgccggggtcgtggttcgcgctgataggctgcggaggccgccgccccgccccgtccctgataggataacgtggaagcacgagacgaggctgcgcccgccggtcgcagagctgtcagcaagctccaaaccgcggctgccgcccggagggaagcagacggggagtcggtggcggccgccgagtccgcatgcgcaggctgcaaaggcccttttgggccggtcccgccgcgctaggttggcgagtgggactatttgatcctttccaggttcgccagcgtggtgttacgagaggaaagcgcagccgcagcgtacgaatgggaaggccaaacacggtcccggggagtctgagggaagctgcagggcgcctggaattggggtctcgagtgagccggtaaaaaccgcctcccgctgagcgtcccggaacaaatactgtctgaactgagccgtaagcaagaaacggtcaggagaagctggggcgatctgatgattagaacatttcagggactaccagagagaagtgcgtaattgctctaaggcaggtaggtaattggcctggaaacttgggaacgccccgccccccaccccgactttcagcaaaccaccgtgcccaggaaaaagagcgattgtggaagaccctgtgaagaagagaccaggaaggcactgtggcttaagagagcaaggcgttcctgaatgcagccaacatcaactggtaaacaaaaaactgtgagaacggatcctgaatcttgcgcttaccaggggaaattcaggagagatatgaacctgagcaagatgaggttgaagttactcaatgcggcattaagcctgttcacggccacttcctccggcgtcaccaacacacacactgtacaccagcagtatttttacacggggtatgtgtgttaagtactatcaggtggataattattacttcacctgtatttgctgccttgataccattagagaaactcatgaattataaatagcatagtgaatttgtgattccctgaagatatactaaggtggacttttaaaaaggcttctattccaaagggaactaatatggaggaaatggtttcgagaaagaaaaaagaaaaaacggagtccttgattagttgtggggaaggcaacataatgtaatgtgaagaataaaggagtcagatccaggaaaccccataactattatgtaagttatcttcatctgtaaagtggttaggatcctgatagtctcaaaggtttgttttgaggtttcatgaagcagataaatattcttgtaaattgtagaatgttataccagtgttactcattattctaacaagagcagagtagtgaagagaggctccttcagaaattccttgggatttttttttttttggcttctgtttttttatatcacaaggtagtgtctctgaaaaatggtagatgatttcaatgtccacaaatatgcaggtgtagacattcaattgaggtactgtacccaaggcagccagcaaaatgctgaacatagaaaataactttgtaaacaaaatgcaatatttctagacagtgagttatcaccagtgtgctgcctatgaccctggccttaaggaaaaagtagcagagctgaagaagttctaaggatggaaattaaaaattattaaggagataatagacttcgtgttataggaaataaaaatagcaagggtcttcaatggtgagtgattttgagattaattacataactatgaattctgtaatattagaactaagctttacaaagcattccttaaaaaaagataattttacaacaaaggtaacattagacagaaaaaaatgtacaaaactaaaattaagtgattaatgcttgggaatgtttcctccaatgttcatctagtcatggttttcacgaatcactcttgccaataaaaccgaaaatcaaagtaatctagtgagtgtaagaaaagttactgtaaatatgtttgcattcgtcagactctatggagtctttttgaagttaaacattaaatctccactgtaattcatactgttaattatagtagcaaaagacttaaaaaacaatggtagcatatttatgatatatccaaaattaagagtattatgcaatttttattaggttgatctatgtttattgactaggaaaaacaatgttggtagagaggagtgaacagatctagaacatattttgtaggtaaagggaataagatttgtttaggaattaactatgagggagaaataaatgttcagaaacaagtagagcacttataaacacctttttgtgccaaattaagaacaaaaaagtcagcattaagttaatgccaccatatacatccttccacatttatgtttacaaacttgtgcttttatttctaggaaacatttctaggctgggcgcagtggctcacacctgtaatgctagcgctttgggaagccaagatgggaggattatttgaggccgggagtttgcgaccagcctgagcaacatagcaggatcctgtctctgcaaaaaaatttaaaactagccaggtgcggtggctcgtgcctgttgccctagctactcagggagactgaggcagaggattgcttcaacccaggagtttgaggttgcagtgagctaagatcatgtcactgcactccagactgagcaacagagtgacactttataa

SEQ ID NO: 7027 - DNA, 472 bp, Homo sapiens
gaatgacggctctcaggagcgaccctacttcatgtcgcccgagctgagagacatcctgttgaaggggagtgcggaggaggggaagcgggcagaagccgaggagtagagagtgagggagactggcgtgggggccaggtttcctccatgtagactgggggtgcatgaagcgggggggttcctggcctgcgagtgtggggatcctgtgtgtccctcggagcccactacagtctgcccctctctggtcccagtgtgtctgctttctaaccctctgaggcttctctgtgaccctcatccacctaccctgtccttgaggcccctgcccgtgggctcccctcatgcctcctgctctgggacctctctccacagtggaggacctggagaggaatgacggctcggccgagaggccttacttcatgtcttccaccctcaagaaactcttgaacaagaccaacaagaaggcagcggagtcctg

SEQ ID NO: 7028 - DNA, 32194 bp, Homo sapiens
agttcgagaccagctgggcaacatggcaaagcccagtccctacaaaaaaatataaaaaattagccgggcgtggtgttgtgtgtctgtagtctcagccacttgggaggctgagggagatgggcttgagctcagggggtagaggttgcagtgagccgagatcatgacactgtactccagcctgggcaatacagccagaccatgtttcagaaaaaaaaaaaaaaagtgttttttttttttttaagcctcagagcctactttggctcaggaggctgctcgatttgcaatacaaaaaagaaaaaatatttttgtagagacgaggtctcaatatattgcccaggctagtgttgaactcctggagtcaagcaattctcttgccaaatgttgggattacaggcgtcagccactacgcctggcctgagattcatttaagtataaaattagcaaatctccgccggacgcagtggctcacacctgtaatcccagcacttccagaggccgaggcaggcggattgcctgagctcaggagttcgcgactagcctgggcaacacagtgaaacccccatctctactaaaatacaaaaaattagccaggcgtggtggcgtgcacctgtagtcccagctacttgggaggctgaggcaggagaatcgcttgaacctgggaggctgaggttgcagtgagccaagatcatgccactgcactccagcctgggtgacagagcgagactccgtctcaaaaaaaatctgcaaatctccaacctgggcaacatggtgaaatcctgtctctacaaaaaaaaatccaaaaataattagctgggtgcaatggtgtgtgggtagtcccagctactcgagaggctgaggtgggaggatcactcgagcccagcaggtggaggttgcagtgagccaagattgtttcaccacactccagactgggcaacagagtgaggctttgtctcaaaaacaaaaacaaaaaaaaaattactgggcgctgtggctcatgcctgtaatcccagcaccttgggaggctgaggtgggcggatcgcctgaggtcagcagttcgagaccagcctagcaaacatagtgaaaccccatctctactgaaaatacaaaaattagcctggcatagtggtgtgcgcctgtaattccagttacccgggggtgctgaggcagaagaatcacttgaacctggatgttgcagtgagccaagatcgggcaacagagcaagactccatctccaaaaaacaaacaaacaaacaaaaaacgcaaattaatttttaaaatatgtacccttagaaaattctaagctcgtttttattttcagtgttcactctacatacatgtattatatattgtggctattcattcaacaaatacttattaaatgtttgttttatgccaggggctatgctgtatactggggacgcagccggaatgaaagacacacaaatccctgtccttatgcaggcaataggcaagagggcagataattaacaaccaataagcaaatgtctaacatgtcagatggtgataagaagcaaaatgtatcacatctgtaatcccagggttttgggaggccgaggtgggaggaaggcttgagcccattgagcacaggagtttgagaccagccttgggcaacatagcgagacactggtctacaaaaaattttaaaattaggcaggcatggtggtgtgtgcctatagtcacagctacttgggaggctgaggcgagaagatcatttgagcctaggaggtttaggctgcagtgagctatgattgctccactgcattccaggctgagtgacaaagcaagactctatttgataataacaacaaagagaaagtcataggggtcaggtatagtggctcatgcctataatcccagcactttgggaggccaaggtgggcagatcacttgaggtcaggagttcgagaccagtagtagagacatggtaaaagccagtctctgctactaaaaatacaaaaatcagccaggcacgttggtgtgtgcctgtagtcccagctacttgggagcctgaggcaggagaactacttgaacccgggaggtggaggttgcagtgagcctagatggcaccactgcactccagcctgggcgacagagcgagactctgcctcaaaaaagaaaaaaaaaatgaaagaaagaaaagaaaaggtcataggacagagaggaaagggatggttgggtgtttttttttttttttttttggtttttgtgggttttcttttagatggagtcttgctctgtcacccaggctggagtacagtgccaggatcttggctcattgcagcctcgacctcttggtctcaggtgatcctcccacctccacctcccaagttgctgggactacaggtatgtgtcaccacacctggctaatttttaatttaatttatttatttttgagacggagtttcactcttgttgcccagactggagtgcaatggcatgatctcagcttgctgcaacctccgcttcccaggttcaagcgattctcgtgcctcagcctcccaagtagctgggactacaggcatgcaccacctcgccccggctaatttttgtagtaatagaaacagggtttctccatgttggtcaggctggtctggaactcccgacctcaggtgatctgcccaccttggcctcccaaagtgctgggattataggcgtgagccactgcgcctggcctcacctggctaatttttgtacttttagtagagatggggtttcacagtgttgcccaggctggtctcgaactactggcctccagtgatctgcctgtctcagcctccccaagtgctaagatgacaggcttgagccaccacgccttgccaaggtgatatttcaggcaaggcctgaaggcaacggagctgtatggatgtctgagagaagagcattctaagcagagggaccgagcagctagtgcaaaggccctgaggtcagaccatgcctgctgagcgtgggacgtacccaggaggccagtgaggctgaacagagtaagccatggagagagagagggaggaggtgagggcagggaggtgacagggcaggtcatgcaaggctttgtgggctgtggcgaagagctgggctttttcctcggaatgaggtgggaaccatggaggtttctgagcagagcagggatgtgtcctgacttaggtgtgcacagatgtctctggccgctatagtgaggatagaaagtgtctgtgttggtccaggcaggagatgacagggctgtgtgaaagggtgggtgcttgaggagcaggtgagaagaggttggattctggatagctctgaaggcaaaactgatctcaagcagagaggcagcccaggttcctggccagagcacgtgggaggatggagcggagtcatgggataatcagaagcttggacaggccaggcacggtggctcacacctataattacagcactttgggaggctgaggtgggaggatccctgaggccaggagttccagaccagcctgggcaacattgcgagaccctgtctctactaaaaatacaaaaaattacctgagtgtggtggcgcgtgcctgtgatcccagctactcaggaggctgaggtgggaggatcgcctgagcccaggaggtcaaagctacagtgagctgtgattatgccactgcattccagcctgggcgacagagtgagaccctgtctcaaaaacaaaaaagcttagatgccgccgcactgagtatgagatgctcacgtgtgttggggggagacagatgtcacataggtgtgcagctcagagacaagggtttccagagggcttaacttttgggactcctcagtgtggagctggtgggtggggcctgaataaattgtccccagggcaccctgtgtagttgggaagagaagaggcctgtggctcgctctctttgtccactgcttggaatgggtagggtgggaccagccagcctttgggctggcagagacttcgagaaccacagggcttctttaggagtctgggtcaccccagggcatgacctggcgcctcaggccttgcctgtggtccaggtgtttagacagggcccctctgctggtggctactaggaggagagggcgcctttttaaggataagttgagttagtgaccagagccctgcctgcgagtcctagagtctaaggcagcagctacaattattggacaccaaatgtatatgatcacgctgactgtataacctcatgctgtctgtgtacacccagcactaaatgtatattcctgctgaggatacctccacaccacctgtataatgccatgttaaccaaataattggctgcactataaatatctataaatattcaagtagaggcaggttgtggcgtggtgactcgtgcctgcaatcccagcactttgggaggttgaggtgggaggattgcttaaggccaggagtttgagcccagcctgggtaacacagtgagatcctgtctctatttttattgtattgtatttttttttttttttgaggcggagtctcgctctgtcgcccaggctggagtacagtggcataatctcggctcactgcaacctctacctcccaggttcaaacgattctcctacttcagcctccccagtagctgggattacaggtgcccaccaccacacctggctaatttttgtatttttagtacagacagggttttgccttgttggccaggctggtcttgaactcctgacctcagtgatctgcccgcctcggcctcccacagtgctgggattacaggcatgaaccaccacacccggctaatttttgatttattgattgattgattttttgagacactcgctctgtcacccaggctggagtgcagtggcacgatctcggctcattgcaacctccgcctctcgggttgaagtgattctcctgcctcagcctcccaagtagctgggactacaggtgcacaccacaacatccagctaatttttgtatttttagtacagacggggtttcaccaagttggccaggatggtctcgatctcttgacctcatgatccgcccacctcggcctcccaaagtgctgggattataggtgttagccaccacacccagcctattttcttttttctttttctttttggagacagagtctcactctgtcccccaggttggagtgcagtgaggcaatcttggctcactgcaacctccacctcctgggtttaagcgattctcctgcctcagcttcccaagtagctgggattacaggcatgtgccaccacactggctaatgtttgtatttttagtagagaaggggtttcaccatgttggccaggctggcttagaaatcctgatcgacctgcctcagcctcccagagtgctgggattacaggcatgagccactgcacctggcctatgcctgctctttgaggtcagttttggtttcatactttagcctcattttgcagttgaggaaactgaggcttaaggaagataagccctttgttaagtatcctctagttcagagggtgcagaaggagcatttgaattcagggcgacccaggaggatgtgggctccacaagggtggagattgggtctctctggttcctcactgtatgcggtgccccgcccaaggcctgcacccactaagggctgaataaatacttgttctaagaccaggcccagtagtgcacgcaggtaatcccagcactttggggggccacggtgggaggagcccacgagtccaggagttaaagatgagcctgggcaacatagcaacatcccatctctacaaaaaaaattaaaaattagccgagtgcagtagagcacctgtagtcccagctactcaggaggcttagtcaggaggatggcttgaggcagggaggtcgagactgcgatgagctgtgattgcaccactgcactccagcctgggcaacagagggagatcctgtctcaaaaaaaaaaagcagcagacagaaagaaaactaatttcctgcacagcttggagaagttttcagcaccaacattccacagttggttgtctgggtttgggcagtaggccgttttccctcccagtgcctcagtttccacacctgcaaaacgaagccacggaaacgccctttcagggtggccaggggttctaggcggcatcgcccggtggcagggtgttcccagggtgaagccgcagggttcccgggtgggggcggggaaggctaaatgcggccggccggtgagtggcgggagcagctgcagccccgcccgcgccctcccgggtcccttagtctgggcagctgcccagctcgggccggtctgaccggtttgggccgccccgcctggcgctgtgctgggaggagccgccgccagtcgcgcggtcagtgcctccctccagactcgggagggtcgagggggcgcgggagagagcgcgggcggccgccggggctggtcgcctgcagggatgggggacgagcggccccactactacgggaaacacggtaggcagcgacccccgcccgtagccccgggccgacccctcggtccctcggagggggccttgagagaacatggggcgcagggaagggggctggagggggagcgcaattgcaaatctgcgcctggagcctccccaccatcagccaggccccttcaccccacttatcccccgcagcctcgcagacgaccctccttactctcccctacccgaaggacctgcccctgtacccctctgcctggcactgctgccggcgcctccttccccctatcccacctcagatcttccccatctccacctggttccgtggtggtcaccatttcagccctcttcccagtgggtggccgccagttaataagtttgttcacagttagtgatccctccttcctcccctgtcctggcctgccagaactgggggcttgggtgtggtcacctggaggtgggtgaggcagaaaattccacaggtctctgaattttattcttgccaaggcaaagacacccctaggggcttttgggagggggctctcccagccctgtcttggttcaggtctccaatcccatccatcttaatcttcttgactttcaggaacgccacagaagtatgatcccactttcaaaggacccatttacaataggtaagagctctgggttttggggggttctccccgctaatactaccccaatccctgtctcttcacaccccctcccatctgttctccaacaaactggtgacaaatatttgaaacttttttttttttttgagatggagtcttgctctgtcaccaggctggagtgccgtggcgcgatctcaatctcggctcactgcaaccttcgcctcccgggttcgagcaattctcccacctcagtctcccaagtagctgggattacaggcttgcaccaccacacctggctaatttttttttttttttgtacttttagcagagatgtttcgctgtgttgcccatgctggtctcgacctcgtgagctcaaagcgatccacctgccttggcctcccaaagtgctgggattacaggtgtgagttaccacacctggcctggacttaatttttaccatgtttatatttatttatttatttatttatttttgagatggagtctcactctgtcacccaggctggagtggtgcaatctcagctcactgcaaccttcccctcctggttcaagcacgtcttctgtctcagcctctccagtagctgtgactactcagaggctactcagaaggctgaggcaggagaattgcttgaatctgggaggtggaggttgcagtaagctgagattgcgccactgcactccagcctggaggacaagagcgagactctgtctcaaaaaaaaataacaaaaaaataaaatacagccaggcacggtggctcacacctataatcccagcactttgggaggccaaggcaggtggatcacttgaggttaggagttcgagaccagcctggctaacatggtgaaaccctgtctctactaaaaatacaagaattagctgggcatggtggcgggcacctataatcccagctacttgggagactgaggcaggagaatcgcttgaacctgggaggtagaggttgcagtaagctgagatcgttccactgcactccagcctgggcgacagagtgagattccctctcaaaaaaaaaaaaaaagtctagcttgggcaacatagcgagaccttgtctctacagaatgtatataaattaaaaaaaaaatgtgtggtggtgtgcacctgtagtctcaactacttgggaagctgaggcaggaggatcacttgagcccaggagttcgaggctgtagtgagctatgatcatgccactgtactccagcctggatgacggagtgagactctgttgcacaaaattaaaaaatgaaatgaaataaaaattaaaatgcatgtgccctttggtacggcattcaaacgactcaggaaaatttgtccaaataacacatggatgagggtgtttgcagagggcagatgggcccatggtgcacacagcaccaagcctcctccaaacactgcccctctgctccccaggggctgcacggatatcatatgctgtgtgttcctgctcctggccattgtgggctacgtggctgtaggcatcataggtgagtagagaatgagcaggacttggagttgcagggtaggcggaggcagccatggcctctggagtgggaacagggctggatctgaggagtggcagtgtctcagtatccctggatctttccacagcctggactcatggagaccctcgaaaggtgatctaccccactgacagccggggcgagttctgcgggcagaagggcacaaaaaacgagtgagttgactccttgcggcctggtggggctggggaagagggggcagaagattctaggcattccccatctctctaagtccagttaacaagtgcttataggctgggcgcggtgactcacgcccgaaattccaacactttgggaggccgaggcaggaatattgctttaggctaggagttcgagaccagcctggccaacatggcaaaaccccgtctccactaaaaatacacaaattagccaggcatggtggcacatgcctgtaatcccagctactcaggaggctgaggcaggagaatcacttgaaccacaggaggcagaagttgcaatgagccgagatcgtgccactgcactttagcctggggcacagagtgagactctgtctcaaaacaaacaagcaaaaattaagtggacgtggtggggcacacctctagtcccagctacccagcaggctgaggtgggaggatagcttgagctgggaggccaaggctgcagtaaggtatgattgtaccattgcactccagcctggacgacagagcgagacctggtctcaacaaaacaacaagaaaagaaaacaagtactgataaacgtcccactaccctcagccactagtctagtccttggggacacacagctctaaatgagatagtaagcatcctgttctctggcagcacacattttaagggcgggagagactgagaggggacagtcctggattacgcgtcaggtggtgatgaacaggtgagacaacagagcaagcatagcctgagtggcgtcacttcctggctctgtgacctagggcaggtgtctcaatctctctgaacctcgttttcctcatctctaaaatgaggatcataacagtcccaccctcatggggctattttgatggttagatgtgccaatacatgtacagagcttagaatgccacctggcatcgctgggcgtggtggctcacacctgtaatcccagcacactttgggaggctgaggtgggaggatcaagaccagcctagtcaacatggtgaaaccccgtctctactaaaaatacaaaaaaattagctgggcattgtggcatgttcctgtaatcccggttactcaggaggctgaggcaggagaattgcttgaacctgggaggcagaggttgcaatgagccgagatcgtgccactgcactccagcctaggcaacagagcaagactccatctcaaaaaaaaaaaaaagaatggcacctggcatagagttgctgatgctgcagtttttaaactattattattattattattactattattattttgaaacggaattttgctcttgttacccaggctagagtgcagtggcacaatctcagcccactgcaacctccgtctcccgggttcaagcggttctcctgcctcagcctcccgagttgctgggattacaggcatatgccaccatgcccagctaatttttgtatttttagtagagacggggtttcatcatattggtcaggctggtctcgaactcctgacctcaggttatctgcctgccttggcttcccaaactgctggtattacgggtgtgagccaccacacccggcctattattattattactattattattattttgacacagtgtctcactctgtcagccagtggcaggatcatagctcgctacagcctggaactcctgggcttaagcgatcttcccacctgggccttccaaagtgctggcacaagacaggcctgagccaccctgcctggccctatataagatatctttttttttttttgagacagagtctcgctctgtcgcccaggctggagtgcaatggtgcgatcttggctcactgcaacctccgccacccaggttcaagcaattctcctgcctcagcctcctaagtagctgggattacaggtgcccgccaccacacccagctaattttttgtatttttagtacagacggggtttcgccacgttggccaggctggtctcgaactcctgacctcaggtgatccgcctgccttggcctccaaaagtgctgggattacaggtgtgagttactgcacccggccatataaaatatcttaaaggaaacaataggccgggcacggtggctcacgcctgtaatcccagtacttagggaggcccagactggaggattgcttgacaccagcctgggcaacatggtgaaattctgtcgctaccaataatagaaaaaattagccaggtgtggttgcgcacacccgtagtctcagctgctcaggaggatgaggtggaggatcacttgatcctaggaggtagaggctgcagtgagccaagattgtgccactgctcgctctgtctgggcaacagagaaagactcttgtctcaaaaaagaaaaaaaaacaaaagaggccgggcgcagtggctcacgcatataatcccaacactttgggaggctgaggcgggtggatcacctgaggtcaggagttcgagaccagtgtggccaacatggcaaaaccccgtctccactaaaaatacaaaaattagctgggcatcgtggcgggcacctacctgtagtcccagctactcgggaggctgaggcaggagaattgcttgaacccaggaggcggaggttgtagtgagcccacatcacaccattgcactccagcctaggcaacagagcaggactccatctaaaaaaaaaaaaaagagaaaaataaaaaaagttttctatagggtggttaagaagtcttaacaggtcgggtgtggtggcttacacctgtaataccaacactttgggaggccaaggcaggcggatcacctgaggtcaggagtttgagaccagcctggccaacatggtggaaaccccatctctactaaaaatacaaaaattagccgggcttggtagcgggcacctgtaatcccagctactcgggaggctgaggcaggagaattgcttgaacccgggaggcggaggttgcagtgagccgagatcacaccattgcactccatcctgggcaacaagagcgagactctgtctcaaaaaaaaaaaaaaatcttaacagtttccattctcccttctctaactccaggaacaaaccctatctgttttatttcaacattgtgaaatgtgccagccccctggttctgctggaattccaatgtcccactccccaggtaacctggtccccaccgttccctttttcctctccccgcttcccatccttttccccctgtgaatgtgggctgcgacctcagtcctgagcagtctgccccaactccacccaatcccttccttctcccctcccagatctgcgtggaaaaatgccccgaccgctacctcacgtacctgaatgctcgcagctcccgggactttgagtactataagcagttctgtgttcctggcttcaagaacaataaagtgagttgtagactgtcctgagagcacaggtatgggcagtggcagtgtactagacttggggactcacctccctccatctctcttggcagggagtggctgaggtgcttcaagatggtgactgccctgctgtcctcatccccagcaaaccctgtgagtcaggggatcccaggaggctcaggtggtgacggggaggctctgcagaggctcagcctgactggtgccatcctctgctccatgcagtggcccggagatgcttccccgctatccacgcctacaagggtgtcctgatggtgggcaatgagacgacctatgaggatgggcatggctcccggaaaaacatcacagacctggtggagggcgccaagtgaggatattggcgcaccgcgccagggtctcactttgctgggtgggacaggcaatcccctgtggttggcctgatcatggaagagggtctgacccgagccttgtcctccttcccccaggaaagccaatggagtcctagaggcgcggcaactcgccatgcgcatatttgaagattacaccgtctcttggtactggattatcatgtaagtcaggagggaaggggcctctcccctggctgccccctctaagcctggctgagggtggagtctgttcatgaccgttttcttttccccagaggcctggtcattgccatggcgatgagcctcctgttcatcatcctgcttcgcttcctggctggtattatggtctgggtgatgatcatcatggtgattctggtgctgggctacggtgcgtcaccccctccctgtggcttctctttcctgaatccgcacactgccctgccctttcccgtggaaatggcccatcaggaaaacaaaaaaaagtcaggccgggcgtggtggctcacgcctgtaatcccagcactttgggaggccgaggcaggcagatcacccgaggtcaggagttcaagaccagcctgaccaacatggagaaaccccgtctctactaaaaatacaaaatcagccgggcatggaggtgcatgcctgtaatcccagctactcaggaggctgaggcaggagaatcgcttgaacctgggaggcggaggttgtggtgagccgaaatcacgccattgcactccagcctgggcaacaagagcgaaactccatctcaaaaaaaaaaaaaaaagaaaaaatgtctcagcaccgtagttaaggatgcatactctggtatcagaatagcagaggttcaaatcctggctttgccaattctttgggcaagtgcctcaacctaactgtgcttcaatttctttcttttttttttttgagacggagttctgttcttgtcacccaggctggagtgccatggcgcgatcttggctcactgcaacctccgcctcctgggtccaagctattctcctgcctcagcctcccaagtagctgggattacaggcatgcacctccatgcccggctgatttcgtatttttagtagagatggggtttctccatgttggtcaggctggtctcgacctcctggcctcaggagatctgcccgcttcagcctcccaaagtgctaggattacaggcaggagccaccgcgcccggactgcttcaatttatttctctataaaatgagggtaattcatatttctagttggcaaactaaatgacaaggaggtaatgagcagataaaatatgggtaggggcctgtttagttcaggcctgtggaatccagaggcacaatatcgtgctcaacaaaacagtgcttcatattttggatttttgttgtttttgagttgttgttttgttgttgttgttgagacggagtcttgctttgtcacccaggctggcgtgcagtggtgcagtctcggctcactgcaatctctgcctcccgggttcaagcaattttcctacctcgcctcccgagtatctgggattacaggcgcacaccaccatgcccggctaattttttttgtatttttagtagagatggggttttaccatattggccaggctggtctcgacttcctcgtgatctgcctgcctcgacctcccaaagtgctgggattacagacgtgagccaccgcgcccagccttgatttgttttttgagacagagtctcactctgtcacccaggctggagttcagtggcacaatcacagctcactgcagccttgacctcctgggctcaagtgatcctcccgtcttggcctcccaagtagctgaaaccacaggcaagcaccatcatgcctggctaaatttttaatatttttgtagagacaggttctccctatgtggcccaggctagtcttgaactcctgagcttgagcagtcctcccgccttggcctccctaagtgttgggattacaggcgcaagccactgtgcctggcccatattttgattattccttgaactttcctggaagaaaaatgcttggcaatccaatttgaggacactcatagtaaaatattcatattaatagtggtttctagctgggtgcggtggcgcacgcctgtaatcccagcaatttgggagacagaggtgggcggatcacctgaggttgggagttcgagaccagcctgaccaacatgtagaaaccccatctctatttttttttttttttgagacagagtctctcactgtcgcccaggctggagtgcagtggcgcgatctcagctcactgcaacctccgcctcccgggttcaagcaattctcctacctcagtctcctgagtagctgagattactggcgcccaccaccacgcccagctaattttttttttttttttttttttttgtatttttagtagacacggggtttcaccatgttggtcaggctggtctcgaactcctgacctcgtgatccacccgtcttggcctcccaaagtgctgggattacaggcgtgagccaccgcgcccggccaaccccatctctattaaaaatacaaaattagccgggcatggtggcgcatgcctgtaatcccagctgctcgggaagctgaggcaggagaatcgcttgaacccgtgaagtggaggttgcggtgagccgagattgtgccattgaactccagcctgggcaacaagagtgaaactccgtctcaaaaaaaaaaaaaaagagagagaacttagaccatggcagcatatgattatgattccaagtagggggaaagggttctggaagttctcttctgaaggtgacacttgagcagagacctaaggatgtgtgggatccagccatggggagagaatgcaccgggcggtgggaactgcaagtgtaaagtccctgaggcagaagcctcgatgtttgcttctgttaaatgggggcagttgtagctgctttgcaaagttgcaggaggcactgctggactgagcttgtggttcccccatgcaggaatatttcactgctacatggagtactcccgactgcgtggtgaggccggctctgatgtctctttggtggacctcggctttcagacggatttccgggtgtacctgcacttacggcagacctggttggcctttagtgagtcacagtctcccattcctgcccccacatgaggccttggagggagtggggagcccagccggctcagcctttgccctttgcagtgatcattctgagtatccttgaagtcattatcatcttgctgctcatctttctccggaagagaattctcatcgcgattgcactcatcaaagaagccagcaggtggggggccagggtgccaggggccaggatggagctgtccctagagttgtgtcttttgccctgacgcctgtgtctctgctcttccctagggctgtgggatacgtcatgtgctccttgctctacccactggtcaccttcttcttgctgtgcctctgcatcgcctactgggccagcactgctgtgtatctgcccccagacactgatctctgaccccagggatggctaaagaccaactttgcctagaagtgacctgcagcttagggatagggctggaaactggtgggagaatggattctttcccacaaaagtccctggggtcctcagtcctagacctctgcttccttaacgaacctccagcttcctgtccacttccaacgaagcggtctataagatctttgatgacagcccctgcccatttactgcgaaaacctgcaacccagaggtgggcgtccccggggtggggagggcaggtattgccccagcaggccccagatgatttgaaacctctcatgtccacttggaggttcagcaaacaattggcccctgttgcatgtcctgtgctaggtgtgggggaggacgcacagtggggaagagactctctaactggatcgaacaacttcccagggcaagctggcttcctctcttcaacttgaccaggccttcaccctgggtgctaaatcacccatttttccctacttcctttttttttttttttttttttaataagacagagtcttgctctgtcaccaggctggagtgcagtggcatgatctcagctcactgcaacttccaactccctggttcaagcgattctcctgcctcagcctcccgagtagctgggattataggcacacaccagcacaccaggctaatttttgtatttttagtaaagacagggtttcaccatgttagccaggatggtctcgatctcctgacctcgtgatccacctgcctctgcctcccaaagtgctgggattacaggtgtgagccacctcgcccggcccatttttccccatttcatttcctgtctccatgccctcttcttgaccccagtgatggccacgtcttgtttctagaatcccttcctttgcacaagccatattctgaactcttaattccttcccttaacttcaatccctatgtctcctgtcctacctcatggttttcctggccccacacctgatgctcagagcccactgtgaacccctggtgcctctttttggactcggttctcccttctctcccacagaccttcccctcctccaatgagtcccgccaatgccccaatgcccgttgccagttcgccttctacggtggtgagtcgggctaccaccgggccctgctgggcctgcagatcttcaatgccttcatgttcttctggttggccaacttcgtgctggcgctgggccaggtcacgctggccggggcctttgcctcctactactgggccctgcgcaagccggacgacctgccggccttcccgctcttctctgcctttggccgggcgctcaggtgggctggcgttgcaggcaggatggggtggaggacgaggcctggcccagccaccgaccactccctcggcccgcaggtaccacacaggctccctggcctttggcgcgctcatcctggccattgtgcagatcatccgtgtgatactcgagtacctggatcagcggctgaaaggtacgtcccacccacggttcgcattagctcctgttgcggggcgaggctgaatagcgaaccaggattgggtcttgcttggaggtgggcggggccaagataatagagcagtgatgggtttctgtctatgacggggtggagttcaggagttggcgtgattgagtcctgcgatggaggagcaaaccagagaacctactgggtggaattcttgctgttgaggggacaggcccaagaggcctggcccaccattggttattaccagagtgaattggagtggtatatatttgcgctgaagagagcaggaataagactggtttattagccgggcgccgtgactcacgcctgtaatcccagcactttgggaggctgaggcgagcggatcacctgaggtcaggagaccagcctggccaacatggtgaaaccccgtctctactacaaatacaaaaattagccaggcatggtggtgtgtgcgtctgcagtcctagctacacgggaggctgagacaggagaatcacttgaactccggaggttgaggtttcagtgggccgagaccgagcgactgcactccagcctgggcaacagagcgagactccatttcaaaaaaaggaaaaaaaactggtttatttttcttagaggaagggctctggggctgggattgatggtactttgttttagagacaggatctctcaccctgtcacccaggctggagtgcagtggcaccatcatagctcactgcagcctcaaactcctgggcttaagtccctgtctctttgacagcgtggactcaggagacctggacattggcaagtgtgtgtgatagggaagaggggatcccttccaagtcaggctggtgtcccctcacttccacatcccttcccttctcttccagctgcagagaacaagtttgccaagtgcctcatgacctgtctcaaatgctgcttctggtgcctggagaagttcatcaaattccttaataggaatgcctacatcatggtgagtgggcctgggacccccaaccaacccgccagctcctgctgggtgagaggaccaccccccatgcccacccagtgggtctgatctctccctcccactctcctccagattgccatctacggcaccaatttctgcacctcggccaggaatgccttcttcctgctcatgagaaacatcatcaggtcgggaatcattatcatcttcctcctgccacccgcctcttcccctagtccctgaagccagcattcacacctgcccctcactgtcccctgcagagtggctgtcctggataaagttactgacttcctcttcctgttgggcaaacttctgatcgttggtagtgtgggtgagtgccgcccacctagcctctcggggtgtgggagcctgatttctgtcttctgtgatgagtgtcatcttcttaggaggctgtttcctatatccagaacccttcgccatcttgctttcttctccttctccagggatcctggctttcttcttcttcacccaccgtatcaggatcgtgcaggatacagcaccacccctcaattattactgggttcctatactggtatggacctctggggagagatgggggtttgggaagaaagaggtgttgggatttgcttggtcttctttgactagataaatgtggatagaggtcagaggtggggaattgattatttattcagaccacaaactttttgtttgtttttgaatcaagagtcttgccctgtcgccctgactggagtgcagtggtgcaatcttgactcactgcaacctctgccttccgggttcaagcgaattctcgagcttttgcctcccgagtagttgggattacaggtgcctgcccccacacctgcctaatttttgtatatttattttttaattttaatttaattttttttttgagacagactcactctgttgcccaggttggagtgcagtgaaatgatcttggcttactgaaaccttcacctctctagttcaagcgattcttgtgcctcagcctcctgtgtagctgggattacaggcacctgccaccacacctggctaacttttttttttttttgagatggagtttcactcttgttgcccaggctggagtgcaatagggtgatctcagctcactgcaacctccgcctcccaggtttaagtaattctcctgcctcagcctcccgagtagctgagattacaggcacgagccaccacgtgtggctaattttacatttttagtagagacggggtttctccatgttggtcaggctggtctcgaactcccgacctcaggtgatccacccgcctcagcttcccacagtgctgggattacaggcgtgaaccaccacacctggctaatttttgtatatttaatagagatggggtttcaccgtgttggctgggctggtctcaaactcctgacctcaagtgatccgcccgcctcgggctcgcagagtactgggattgcaggtgtgacccaccacgcccgacctcagaccacaaacattatcaagcacctactgtgtgtcaggcatcgaggtggagggcttccctctaaaggccttagagtttgggggtaaacagatactcctccataatgatattggtgaatgtatgattgcaaactgggacatgccacgagtatgtctgtatagcacagggaactgtttgaaactgtggtgggggctgggcaggtgtggggggggtccaggtggtgccatgcaggtgatgttggatctgagatctgaagctgcaggcaatatccaggcagagggaacagtacagtggccctgaggtgggagtgtgccaggaagcagtggggctgacgtggaaggagtaaagaagtggagataagggccaggcaccgtggctcacacctgtaatcccagcactttgggaggctgaggcaggtggatcacctgaggtcaggggtttgagactagccttgccagcatggcgaaacccagtctctacaaaaaaaatacaaaaattagcggggcgtggttgtgggcacctgtaatcccagctactcgggaggctgaggcaggagaactgcttgaacctgggaggcagaggtttcagtgagccgagatcgcgccactgcactcgagcctgggtgacagagtgagactctctctcaaaaaaaaaaaaagtggagatacggccaaggaggttaacaaggctgtggagggattgagccttcattgcaagggcagtattgtatctcagtgtaggtcttgaagcccattgacctagtttcttattttagttcctctatttagtagttctaagatgagtaagagtaatcttgggcaaattatttaatcctctaaggtccactgacttttttttttttttttttttttttctgcgatagagccttgctctgtcacccacgctggagtgcgatggagtgatctctgctcaccacaacctccacctcccgggttcaagcgattctcctgtctcagctccctgactagctgggattacaggcatatgccactgtgcccggctaatttttgtatttttagtagagacggggtttcaccctgttggtcaggctggtctcgaactcctgacctcaggtgatccacccacctcggccttccaaagtgctgccaataaaggcatgagcccctgtgcctggccatttcattgttttgaatttttaatttaatataatagagataggccaggtgttgtggctcaggctctactataataacaataataatagaggcagtgtctccctatattgccaggctggtcttgaactctggactcaagggatcctcctgcctcagcctgccaaagtgcaaggactacaggcatgagccaccacgcccagccaggtccactgacttcagtcaacaaatgtttatctagcagctaccaaggccgtgtgagtctccagattgctagggatgcagcagtaaatgggactgggtctagtgaggatgtgagcattaaacctgaaagccctaaacatgcataaaattgcagctgcaccaagagctcaggaggggtgcccagtgctaggaggacataaaataggctctagaggccgggcatggtggcccacacctgtaatcccagcactttgggaagccaaggcaggcggatcatgaacgtcaggagattgagaccatcctggctaacatggtgaaaccccatctctactaaaaatacaaaaaaattagtcaggtgtgctggtacgcacctgtagtcccagctactcaggaggctgaggtaagagaatcgcttgaacccgggaggtggaggttgcactgagccaaggtcccaccactgcactccagcctgggtgacagagcaagattccgtctcaggagggaaaaaaaaaaggctctcagccagacgcaggggcccacatgtataatcccagcactttgggaggccgaggcaggcagatcgcttgagctcaggagtttgaaaacagcctgggcaacatggcaaaaccccatctccacaaaaaaatacaaaaattagctgggtatgctggaacatgcctgtagtcccagctccttgtaagcctgaggtggaaggatcacttgagcctgggaggtcaaggctgcagtgagctgagatggggccactgcactctagcctgagcaacacagtgagaccctgtctcaaaaaaaaaacaaaaaaaaaacgcccactctaggtgtcgtaggtggtttcctggaggaggtgggacttgaggacttgctctttgagctgaaagcagaaggtcgatggggcataaattagatttaagtcaggacaatagcacatgcagaggcccaggggttaaagaaagcaagggtgaggctgagtgcagtggctcatacctgtagtcccagcacttggggaggccaaggtgggcgaatctcttaagcccaggatgggtaatgggtaacgtggcaaaaacccatctctacaaaaaatacaaaggttagccgggcacagtggtgcacatctgtaatcccaactactccggaggctgaggcgggaggatcacttgagcccaggaggcagaggttgcagtgagctgagattgcaccactacaatccagcctgggctacagagtgagaccgtgagaccctgtctcaaaaaaagaaaaaaaaaaaaggccgggtgtgcggtggctcacgcctgtaatcccagcactttgggaggctgcgaggcaggtggatcacctgaagtcaggcgtttgagaccagcctggccaacatggtgaaaccccgtctctactaaaaatacaaaaatgagccaggcgtggtggcacgtgcctgtagtcccagctcctccggaggctgaggcagaattgcttgaacctggaaggcagaggttgtagtgagccaagatcgtaccatggcactccagtctgggcaacagagtgagattccgtctcaaaaaaaaaaaaaaaagacggagagagagaaagaggattttgtgtggatggtggggccctgccagcgggggtgaggggttgggatgtcactaatccaaagagggtttctcagcaggggaaggatgtggtcccagcataggatggactcagggggtgggggctgctctgggaaggacacggagcagggacagctcgtttctccttgcccagacggtgatcgttggctcctacttgattgcacacggtttcttcagcgtctatggcatgtgtgtggacacgctgttcctctgcttctgtgagtgacccctcaccccaaaccttgctgggccccgaatcccttctttccactgggcatcacatcaccctccaacggggcaacacgcttgcctgcccccagcttccccagggcttggctgtccctcgtcctgggtccccagcctgtcttcctggtttccttttgcgcttagaagcagctccgacctcctgtccactggcccaggctgcagcctggacgctgccctggagcccgcccgcgcttcgcagtttctggctttgactggggggaggggatctgtggctgccactaactctggtctctccatctgttttttttgtttgtttttttcttctctcttcctctcctccatgcctgctggcttccctgttcttccctgcctccctctttccctcccttcccgaccaccccattttccccctgccggttcccggggggagcccaggtgaggacctggaaaggaatgacggctctcaggagcgaccctacttcatgtcgcccgagctgagagacatcctgttgaaggggagtgcggaggaggggaagcgggcagaagccgaggagtagagagtgagggagactggcgtgggggccaggtttcctccatgtagactgggggtgcatgaagcgggggggttcctggcctgcgagtgtggggatcctgtgtgtccctcggagcccactacagtctgcccctctctggtcccagtgtgtctgctttctaaccctctgaggcttctctgtgaccctcatccacctaccctgtccttgaggcccctgcccgtgggctcccctcatgcctcctgctctgggacctctctccacagtggaggacctggagaggaatgacggctcggccgagaggccttacttcatgtcttccaccctcaagaaactcttgaacaagaccaacaagaaggcagcggagtcctgaaggccccgtgctccccacctctcaaggagtctcatgccgcagggtgctcagtagctgggtctgttcccccagccccttgggctcacctgaagtcctatcactgccgctctgcccctccccatgagccagatcccaccagtttctggacgtggagagtctggggcatctccttcttatgccaaggggcgcttggagttttcatggctgcccctccagactgcgagaaacaagtaaaaacccattggggcctcttgatgtctgggatggcacgtggcccgacctccacaagctccctcatgcttcctgtcccccgcttacacgacaacgggccagaccacaggaaggacggtgtttgtgtctgagggagctgctggccacagtgaacacccacgtttattcctgcctgctccggccaggactgaaccccttctccacacctgaacagttggctcaagggccaccagaagcatttctttattattattattttttaacctggacatgcattaaagggtctattagctttctttccgtctgtctcaacagctgagatggggccgccaaggagtgccttccttttgctccctcctagctgggagtgacgggtgggagtgtgtgtgcccaggtgggggtgtctcctggctgggaaggagggaaagggagggagagttttgcgggggttggcagtggagagcaggctggagaggagatggctaatagctgtttaatggaaacctgctgggctggagggagttaggctgaatttcccgacttcctctgccagttattgacacagctctctttgtaagagaggaaagaaactaaacccacccaagggatgatgtcagggggagaggtggagggcagatgtcctgggcaaaccgggcccctctgcccacacacctcacttgatccttttgccaaacttgtcaaactcaggggaactggcttcccagttgcccctttgccatattccaagtccccctcagacttcatgtctctgctcatcagcactgtcccaggatcctggagagggagaactcctggccccaggggaaagaggggggggtctcccgtttcctgtgcctgcaccagccctgcccccattgcgtctgcacacccctgcgtgtaactgcattccaaccactaataaagtgcctattgtacaggtccaggcctggtgtgtttgttgggggcagtgagccagtggcggctggtagggggaaccccagcttccaaggccctaggagtctctgaactagggcgattctctcaaagggaacgaggagggggcaggaaacccactggctgctggctctgcctgaattccaaccttcaggcagctcagatttcccgattaggctctaatccctggactccagaaggcagaggcagcctgtccacctccgccatcacccatcctggacacacgcccccaggcctcccctctctcagggcccaggcacctgaggtcctgcagtcactatgctccccagctactttggatctgcgaagggactgactgcccttggggtgggccccactgcctggaagctcgctgctgccccctcgtgccagctgccagtgtcagtcacctccaggcaatccgccccaacatttcaattctttccacctcctctcagggaatttttcttcaatatccacttttttttttttttttttttttcagacagtcttgccctgtcacccagggtggagggcagtggtgcgatctcggctcactgcaacctccacctcccgggttccagcgattcttctgcctcagcctcccgagtagttgggattacaggtgcctgccaccacgcctggctaattttttgtgtttttagtagagaccaggtttcgccatgttgggcaggctggtctcaaattcctcacttcaggtgatccgctggcctcggcctcccaaagtgctgggattacaggcgtgagccacctggcccagccttttttttttttttttttttttgagacaggatctcactctggctgaagctaaagtgcagtggtgcaatcatggctcaccacagcctcaggtgatcctcccatcttagcctcccgagtagctgggactacaggtacacaccaccacacctgactaatttttgtattttttgtagagattgatttttaccatattgcccatgctggttttttttgtttgtttgtttgttttttgagacagagtctccctttgtggcccaggccacagtgcatagtgccacagtgcagtggcacagtctcagctcactaaacctcctggattcaagtgattctcgtgcctcagcctcctgagtagctgggattacaggcgcgtaccaccacatccagctaatttttgtagttttagtagagacggggtttcaccatgttggctagcctggtctcaaactcctgacctcatgtgatccacctgcctcggcctcccaaagtgctgggattacaggcatgagccaccaagcctggccagcatttttgtttgtttgtttccaagaaggcatttgaacccaggtcttggctccagagtcctcaagttctaccctatgctggcactgaccccttcctcgatgcctttgtttccctggatcctttgaatctggcattttattcagccccagctcctgttaccatgcccacctaaaaaatagctcctggcggccgggtgcggtggctcatgcctgtaatcccagcactttgggaggctgaggcgggtgaatcatgaggtcaggagtttgagaccagcctggccaacatggtgaaaacctgctgctactaaaaatacaaaaattagccaggcatggtggcacatgcctgtaatcccagctactcgggaggctgaggcaggagaatcgcttgaacccaggaggcagaggttgtggtgaaccaagatgacaccattgcactccagcctgggcaacagagcaaaactctgtctcagaaaaaaaaagaaagaaagaaaaagatttgtggtacgatacatatagcataaaatttgccatctccatctctttcttatttattaagccactgggtctcactatgttacctgggctggccttgagctcccggactgaagggatcatcccgcctcagcctcccaagtagctgggatgacaggcactcgccactgtgcctggtttatgtttaattttttgaggaaccaccatagtgttttctggcttcatgctttggctccacttctgggttggcttcactctctgccaagttcctttatctgggtatattccctgcctccaaccacactgtgctgtgatagttaattttaggtgtgaacttggctggattagaaaatactcagatttgagctgtgatgtggtaaaaataagacaaagaaaaaaaaaaaaacagtggctgggctccgtggctcacgcctgcaatcagcactttgggaggccgaggtgggcagatcgcttgagcttgaattcgagaccagcctgggcaacatgtggaaagcttgtctcaacaaaaactatgaaaattagcagggtgtggtggtcatgcacatgttgtcccagctactcagtaggatgaagtgagaaggtcactttagctcagggggtggagggtgcagtgagctgagatcacactactgtgctccagcctgagcgacagagcaacacgtctgataaagcattatttctgggtgagcgccatccaacttgctggggctccgacagaacagaaaaaggagagaaagcattttcctcctcagaactgggacactcttctcctcctgtcttgacactccaagacttataccagtgatccctggttctcaggccttcggccttggactgggaattacaccattggtgtccctggctctgaagctttaggattcagactgagcctcgctactggctttgcagggtcttcagctactggagctgctggcttttcagggtctgcagtcaatgcatgtggtaggacatctcagcctccatgatcacatgagccaattattctgctaaatcccctctcatctacctacctcctattagctttctcggagaaacctagtaatacacacatcatacattttcctggcctttttttttttttttttttttttttgagatggagtcttgctctgtcactcaggctggagtgcagtggcacgatctaggctcactgcaagctccgcctcccgggttcacgccattctcctgcctcagctcctgagtagctgggactacagctgcccgccaccacccccggctaatttttttgtatttttcgtagagacagggttttaccatgttagccaggatggtctcgatctcctgacctcatgatccgcctgccttggcctcccaacgtgctgggattacaggcatgagccaccgcacgcagctacattttcctggctttaagatgagaagtcttctctttttttgagacggagtctcgctctgtcgcccagcctggagtgcagtggcatgatcttggctcactgcaacctccgcttcctgggttcaagcaattctctgcctcagcctcccgagtagctgggattacaggagcccgccaccatgcccggctaatttttgtatttttagtagagatggagtttcaccatcttggccaggctgctcttgaactcttgaactcttgatccacccacctcggcctcccaaagtgttgggattagagggccagaaaagtcttttcttgctcctaagtctcaggcctggagctcactgactctgaccagcctgattatgatcatttactcattgtaaatcattgagtcaatcattgtagtcaaggtgtgggcctagtttgggagtcaggcagcagggacctgccatctagactacagtttgatcaagggagaggaatggttccccaacaactgtggtcatcccacagtgtccatcccagagtggtcacccatgtccaccctgggggggggcaagaagggaacaggcataggacaaaaagctttcgagagggaagttaactgggtgtgattgggagagtgggtggaatctttcaagatgaggaagacaatgaatagagaggctgtaaggacagcagagtcactgagagtgacaggacctgtctagactgacagattacaagagggggatgacctcaatcttcaaccaatgagtgggagggagggaagagagaaggaatagccagatgacagatgatgtcactaaggcaaggaggagagaatggtgttgtatacagggtttgtgaccactgagtggtggaaggacaagggcagaggtgcgaggtcgggtcagggtagcagttcagcaagacagggcagatggcatcttgtgtcttccatcctttacggtgaccagggactaggaacctgatggatggggtttattggaaagttgggctgaaaactttttacttcaaaaaatttttttctttttcctttttttttttttttgagacgaagtctcactcttgtcccccagtctggagtgcaatggtgcaatctcagctcactgcaacctccgcttcctgggttcaagtgattctcctgcctcagcctcccgagtagctgggattacaggtgcgtaccaccacgcccagctaattttttatattttaaggagagatggggtttcaccatgttggccaggctggtctcgaactcctgacctcaagtgatccacccgcctcggcctcccaaagtgctaggattagagggtgaaccaccacacctggccctttctttttttttttagacacagtctccctgtcacccaggctggactgtagtggcttgatctcggctcactgcaacctccacctcccaggttcaagcgattctcgtgcctcagcctcccgagtagctggaattacagatgccagccatcatgcccagctactttttgtacttttagtaaagacagagtttcaccatgttggccagggtggtcttgaactcctgacctcaagtgatccaccaatctcggcctcccaatgtgctaggattacaagtatgagccactgcccccagccttctttttgtttttattcttgaaaactttttttttttttaatgtagagatggggctgggtgcagtagctcatgcctgtaatcccagcactttgggaagccaaggtgggtggataacttgaggtcaggagtttgagaccagcctggccaacatggcaaaacccagtctctactaaaaatacaacaattagctgaccatggtggtgtacgcctgcaatcccagtgacttgggaggctaaggcagaattgcttaaactcgggaattggaggttgcagtaagctgagattgttatcactgcaccctagctgggactacagaacgagactccatctcaaaaataaataaatagatagatagataaaaaacatagagatggggtctcactatgttgcccagactggtcttgaacttctgggctcaagcaatccccctgcctcagcctcccaaagtgtaggattacaggcatgagccagcatgcctggccaagacaacatttttcaggaagttctggttggatggggcacccgttcaagaggtaacaatcataaccattactgtttttgaagctttaactccatgccaggtactgaagcaaccccttgatgttgaattaactccgaatcagtcctcctccaaatcaaaccctaggaggtttgggtttgatccaaagactgtgcttgtcatcatgaccctatccgccctttactgtgtttggggtccctggggcaagaaacgccttagcggaatgagatcttcaaaagcgttttaagtaaccttaggctctctggagttgggagtcagaaaactagtaaccatcctcgttctgccatttggcagtgctgttagctcaagcaagtcactaaaactgacctgttccgaaaaaaagccagtctaggctttgttattaacattcgttattatcacagtgaccttcaacaatttaaagctttaaccaattttttggttttgtttttgtttttttgagacagggcttctgttgcctaggctagagagcagtggcccaatctcagttcactgcagcctcaacctcctgggctcaaatgatcctcccacctcagcctcctgagtagctgggactacaggtgtgttccaccatgccctggcattttaaccaattttatcttagtgcatgccccaatcatcttaccaaacctttcttcaatttccagctctatttgtgagacagatctgaggcacaggaaatgaaattaaaaagcctggtgcagaataacttatcaatttatgtgaaaaacaagaatatgattatgcacctctgaaaataaaactctactgtagttacacaaaaaactgtacaatggctggtcgcggtggctcacgcatataatcctagcactttgggaggccgaggcgggtggatcacgaggtcaggagatcgagaccatcctgactcacccggtgaaacccagtctctactaaaaatacaaaacattagccgggcgtggtggtgggcgcctgtagtctcagctactcgggaggctgaggcaggagaatggcgtgaacccaggaggcggacgttgcagtgagccaagatcgtgccactgcactccagcctgggagacagagcaagactccgtttcaaaaacaaaaaacaacaaacaaaactgtacaatggcttctaagagggagggaactggatgtctgaggaagactttgtgctctcatgtctttggcacttttttttttttttgagatggagtctcactctgtcgcccagactggagtgcaatggcacgatctcagctcactgcaacctctgcctcccgagttcatgccatcctcctgcctcagcctcccgagtcgctgagactacagatgcccaccaccacgcccggctaatttttttttgtatttttagtagagacggggtttcactgtgttagccaggatggtcttgatctcctgacctcgtgatccgcccacttcagcctcccaaagtgctggaattacaggcgtg

SEQ ID NO: 7029 - DNA, 1999 bp, Homo sapiens
tgacacgggaaacaggaggatttatttagatgtacaccggctcagtggatttgtatctgaaaagctgaccattgaacaaagactgagtgtggtttttataggcaaacttacagaagcaaaacaaaagcagttaatgatacagtcacaggtcatgtaatctatagcataactgctgacttagcataacttgtggctttgcacagctgttggccttgcagctgtgtcaaaagaaaaacagagtctacaaatcttactaaatacaaccattggcaaacagtcatatttaatggttcagaaaaggagagacagtaaaggaatttttcttttcaactttgctccggaggaggctgtctggagcccattcctttggcctcgacttttcagtgttataactgtccttgaagtaagctggctaagcagaggaaaacttgttcttgttttctttttaacccttaccccctgccacataatcacatctttacacttcttttttttttttttttttttttttaagatgggaagtcggagtctcgctctgtcgcccaggctggagtgcagtggtgccatctcggctcattgtaacctctgcctcccaggttcaagtgattcaagccattcttgtgcctctgcctcctgagtagctgggattataggcgcacaccaccacacctggcgaatttttttttttttttttttttgaggctgagtctcactctatcgcccaggctggagtgcaatggagcaatctcggctcactgcaacctccgcctcctgggttcaagcgatcctcctgtctcagcttcctgattagctgggattacaggcgccctccaccacacccagttaatttttctatttttagtggagacggtgtttcaccatgttggccaggctggtctcaaactcctgacctcaagtgatccgcccacctcagcttcccaaagtgctgggattacaagcgtgagccaccacgcccagccaggaaacccattttcaacacctccttgctcttttttttttctgagacagagtctcgctctgtcgcccagactggagtgcagtggcgcaatctcggctcactgcaacctccgcctgccaggtcaaacaattctcctgcctcagcctcccaagtaggtgggactacaggcatgtgccaccacacccggctaattttcttttgtatttttagtagagacggggtttcaccatgctggccaggctggtctcgaactcctgacctcgtgatccgcccgcctcggcctcccaaagtgctgggattacaaacgtgagccaccgcgcctggccttccttgctcttcttgctccaaatcctgggaacgtctgaatcaacaggcggacatctgtcaaaccttcctagcaactacgcctgcggatggccaacctgaccctggaagacagtggggtttagttaagcacagattgtacatcgggggcctcataaggcgcctggaagcattcaagaacaccacgcttgtaaggacaaagcactcggtcacgggcgcctttacttcggagctccgcgctgctgctggacgagcgtccgttgagtcccagccccaatttttccaggaaatggcggtgagccctctagtgagatattttttggcctgggcctcagtttctccatctgtcaatgggggaaggggaaggcgggctagaggaccccgaccaggtcggctgcagccttcggaagctacggcccagggacgccacaccaaggcaggtctgcgggacgaaagaacccaagaacccgggcgcgcattggcgccggtcccgggctcaaggggcagcaacgaggagacgctggacctggccgttcctcgcacacatctctaaccttctgtgcctctcaagggagatggggtgagcatagccacctccactggagcccgaaaatccccggccgagataccgccactaaaaaggtacacatgcgtcaaagcctctcggagccatttccgctaacgtactcagggcga

SEQ ID NO: 7030 - DNA, 302 bp, Homo sapiens
aaatggggataatgataggaggtgctgtaaagatgaaatgaggcgggctggacatggtggctcacacctgtgatcccagcactttgggcggccaaagcgggattgcctgagccaaggatttagagaccagcctgggcaacatagcgaaaccctgtctctaccaaaaatacaaaaattagccgggcatggtgacatgtgccagctgaggtggaagatcacttgagccctggaggtcgtggctgcagtgagccaagatggtgccactgctttccagcctgggtgacagtgagaccctgtctcca

SEQ ID NO: 7031 - DNA, 294 bp, Homo sapiens
cagactatcacccctttgtgttcctgacattcaagatcctctgatgtccaacccctactccatggagcctgcgtcctcagctggtggatccgtgaaactcatctctggggagcattggcttctgtggtcctgcacctgctccttgcagcctgttagggctcagagaggacacagagagcacacaaggtcccaggctgcacagagagcacataaggtccttgttatttctgtattggggaccactaccatatccatgctgagctcccgggatgcaggaaaactctcccaaatgac

SEQ ID NO: 7032 - DNA, 351 bp, Homo sapiens
cagactttcacccctttgtgttcctgacattcaagagcccctgaggtccaacccctcctccatggagcctgggtcctcagctggcggatccgtgaaactcatctctggggagcattggcttctgtggtcctgcacctgctccttgcagccagttagggctcagagaggacacagagagcacacaaggtcccaggctgcacagagagcacataaggtcctggttatttctgtattggggaccacttaccatatccatgctgagctcccgggatgcaggaaaactctcccaaatgactcaggagctgagtttggatttgtagaacacaggaagtctgaaataattcaatgagg

SEQ ID NO: 7033 - DNA, 351 bp, Homo sapiens; identical to SEQ ID NO: 7032

SEQ ID NO: 7034 - DNA, 294 bp, Homo sapiens
ttggtcctggtggtcctcgggattctgctatttgaggctcagcacagccagagaagcctacaagatgcagccgggaggtgaacagcagagaggacaatgcatccttcagcgtggtggagcctcagggacagatctgatgatcccaggaggctctggaggacaatctaggacctacattatctggactgtatgctggtcatttctagagacagcaatcaatatttgagtgtaaggaaactgtctggggtgattcctagaagatcattaaactgtggtacatttttttgtctatga

SEQ ID NO: 7035 - DNA, 294 bp, Homo sapiens; identical to SEQ ID NO: 7034

SEQ ID NO: 7036 - DNA, 269 bp, Homo sapiens
atataatattagtgatttttttcagtggagccatatttatttttgctggcaagcaggagaaattttcccctaattataattgattttctatagtgtacttgtttgtttgctctgtcttgagggaagggaggggaaacattgttattactctcccgaataatttagaagctgaagactccacctatgaatggaacttttcctgttctgaacaggaccaaacttgatgggatatgataagcatgtatttttcaaatgatgtcatcttccat

SEQ ID NO: 7037 - DNA, 269 bp, Homo sapiens; identical to SEQ ID NO: 7036

SEQ ID NO: 7038 - DNA, 269 bp, Homo sapiens; identical to SEQ ID NO: 7036

SEQ ID NO: 7039 - DNA, 191 bp, Homo sapiens
aaccccgtctctactaaaaatacaaaaattagcagggcatggtggagggcgcctgtagtctcagctactcgggaggctgaggcaggagaatggcgtgaacccaggaggcggagcttgcagtgagctgagattgcgccactgcactccagcctggatgacagagtaagagtccgcctcaaaaaaaaaaaaaa

SEQ ID NO: 7040 - DNA, 276 bp, Homo sapiens
cacgcctgtaatcctagcaatttgggaggctgaggcaggcagatcacgaggtcaggagatcgcgacaatcctggctaacaaggtgaaaccccgtctctactaaaaatacaaaaattagcagggcatggtggagggcgcctgtagtctcagctactcgggaggctgaggcaggagaatggcgtgaacccaggaggcggagcttgcagtgagctgagattgcgccactgcactccagcctggatgacagagtaagagtccgcctcaaaaaaaaaaaaa

SEQ ID NO: 7041 - DNA, 3752 bp, Homo sapiens
tttttttttaacttcagtggaatttactttagatattcattcatcaaatacatgggacttcacaaacaattttccataactttttagcctgtcttttgttatttctgcctaatatgatttgccccgatactcatcttgcacggccagaactgtttggttgattaaaatacatcagctcttaaaaactcattaactgagggtaattacagtagtagacatggtctgggtactatactaccatgtttatttgctgactgaattaagatttaagaatgattaaaaataagcttttactttttaaaaccacttgaggtttcataaagcttggggtttttttttttcctttgttaagaaagccaaccaatcacaatgatatagtcattgttgtgcactcccttttcaccatctgtcaccttcccttgcagcttaaggagcccagtaagttttgaaaatgtttgcgaatcaaactaaatttaagtgggatgattagatatacacaacaccaagtggtacatctgcagagataattcaaaattcctgcttttgagagagcaaatgagtgtttgctgaggaataattaaatgagaatttcataggagctccaccattcctgttactttcatttcattttgattaataattcttggatgcttggcatcgatcgtatcactgctcctagaaggtaaagatcctttaggacatgagactggtagaagctggctgagataaaataagtatttatttaaactaatgttctcttaatttgaccattgcagatttgggtgacttttttttaacctttgtacatatacgtaatttatatgattctaatgtactatatccatacttgaattggttttttcgtattttgcctactggcaaatattttgcctattttcagtcgttctaacctatttgaatacgcttttccttaaagtgatacgataatattactcttgattgctgctgcttaatttgatgtaatatgtttaaagttcagcctctcagttttaatatagctttatttttcagtggagatcattgtttaggatgagacatttttggttttggttttgtttgggtaaattttaaatggtgtgaaaatcgatgacaacagtcctcttacagatagcttgctgtattctgtatagcttactctacctgcagacagaaaatgaaagaaaaaaatggacttgcctagaataatatattgaatgccttttgatttagccagagtctctgatgattagctttcgctgatagagtatgtcttttcagcctgtaattctttgggccccaaagaatgacaaaggaggcactcgttctcttttcttgctgtatgcctagaaagtggttgaaggattcttgatgccctaaaaccatcttgtaagctaaatggtcttgcatccagaaaggccagattttacctaccaagaaaaaaagatatttttccagagagttaggtatatcataattttccatttcaagtcctgtttataagtctagtcattctgcaacgtgacatatcccccaaaatgaagttaccttccaagttggacacgtcccgtagttgggcatatgtctaactaaaagtttctgacttttagtaaattcagcttaaatataagttgaaatttgggaaataatttccaagctcttggaaggggtaacagtgaaccgccctccatgggctccacatcttttcctttggcttccaaagtcaggtcccgcccaccctgcctaaggaactgcagagaggtggcaaatcagcaaaaaggacaccaggctcttcttggccacttgtaggaagatccctttacaattttgactaaggagattttttttttcacagttgagttagtttgtgaaaataaagaactctgtagctcaccaaggtggagaaacgcaattcagaaaagtaatttctccaaggtcacttctttttttatgtcttgccatcactttaaaggactagccccactcccccatgtgtatacacaaggaaattgcagaccaattagttgtcttggcctgactctaatgccttttgcaagtagctttccagaagtaaaagtcccagtgatgtattcccatagaaatatttttcagttgtttatgtcgtttactacaaaaaaaaagattcagagtggatggagtacaactctgagtatttttctagtccggaattttttattaataatcggtgctgccgggtcatgcatgctgcaactctcaacatttcccttatttggttcagcttttagcaaaaagggctacagttcaccctgcagagtattaaggtttctggatttttttctcccaactgtggcccaaaagaattaaaatctgttaatataaatagagaacatatttatcattcctcgatagttaattatagactttggtacctttgtgcctcagggaagccacgtgatataactggttatagaatttcagggttagggtttaaagaaaggagaaagccattggaaaaatgatgggctccattaaggagactaatgaatctggatgcagaaatatgtcagaaactggcataaacatgattgtagtagaatttattttccagtaccaatagggaaattattttaagttattacatttactgtattgggaaacttgaggagaactctttagttcataaagcttcaatgtcttttttttttttttcatggaaaaactcaaacctctgttatttgggagctcagtattgtgtggacacttacgagagttttctgcttaattgaagtgtaatataggttgtagaattgttacctgcagttctatggttttgtttcacttcttttcttttttaaagccattctgttctttggatgtgcttgaaagggtgtgtgattacaccattgttaatgctgggtaaaaactatcttcttgcagccttgcctcataacagtggaatttctgatagacaaaccacaggactttgattttaagccaaatccatctccatccctttactgtcaatcttctgtcccagtagtttagcctttgtggcttaggttatgatgcgcctccttctgtgcgaccaatgagacgacttcagcatctttttaaaataatctaagcatcattgaagcagtaacacaaaaaaaaggttcagtattttctttttagtataacttacatcctttcaaataagtctttgccctcatgaagaatccctagaggaagataaggaaaataagtattttccagttttgcttgacagtttctaaacaaacaaaaataaactcaatgaaaggaaagatgtttctttttagctgagatgacagattgcttctctgtattaaatagtctagaagttaaggggatggtcacatttaccatgtattgtgttattagcagttaaattttatgaatatgtttgtaaaattgttgttttatatttcatgtcaaattgaaaagtttatttcttcactattgtacctgtggaaatacaagccattttacaggaaaaaatcttcaaaaactattaaatggatatcagcctgtttgtgagccattgtcttcagattctgtggttgtcactgagttcattaggacatttagtaggttgatacgagtagaactgatttttttcacttctctaacttccaagttaatctccagctgttgagtttattaattgttttatattctgcacaatacatatttaaaccttgattctgaaaatcccctacattttttaattaaagaaatttccttggtgccta

SEQ ID NO: 7042 - DNA, 3615 bp, Homo sapiens
tttttttttaacttcagtggaatttactttagatattcattcatcaaatacatgggacttcacaaacaattttccataactttttagcctgtcttttgttatttctgcctaatatgatttgccccgatactcatcttgcacggccagaactgtttggttgattaaaatacatcagctcttaaaaactcattaactgagggtaattacagtagtagacatggtctgggtactatactaccatgtttatttgctgactgaattaagatttaagaatgattaaaaataagcttttactttttaaaaccacttgaggtttcataaagcttggggtttttttttttcctttgttaagaaagccaaccaatcacaatgatatagtcattgttgtgcactcccttttcaccatctgtcaccttcccttgcagcttaaggagcccagtaagttttgaaaatgtttgcgaatcaaactaaatttaagtgggatgattagatatacacaacaccaagtggtacatctgcagagataattcaaaattcctgcttttgagagagcaaatgagtgtttgctgaggaataattaaatgagaatttcataggagctccaccattcctgttactttcatttcattttgattaataattcttggatgcttggcatcgatcgtatcactgctcctagaaggtaaagatcctttaggacatgagactggtagaagctggctgagataaaataagtatttatttaaactaatgttctcttaatttgaccattgcagatttgggtgacttttttttaacctttgtacatatacgtaatttatatgattctaatgtactatatccatacttgaattggttttttcgtattttgcctactggcaaatattttgcctattttcagtcgttctaacctatttgaatacgcttttccttaaagtgatacgataatattactcttgattgctgctgcttaatttgatgtaatatgtttaaagttcagcctctcagttttaatatagctttatttttcagtggagatcattgtttaggatgagacatttttggttttggttttgtttgggtaaattttaaatggtgtgaaaatcgatgacaacagtcctcttacagatagcttgctgtattctgtatagcttactctacctgcagacagaaaatgaaagaaaaaaatggacttgcctagaataatatattgaatgccttttgatttagccagagtctctgatgattagctttcgctgatagagtatgtcttttcagcctgtaattctttgggccccaaagaatgacaaaggaggcactcgttctcttttcttgctgtatgcctagaaagtggttgaaggattcttgatgccctaaaaccatcttgtaagctaaatggtcttgcatccagaaaggccagattttacctaccaagaaaaaaagatatttttccagagagttaggtatatcataattttccatttcaagtcctgtttataagtctagtcattctgcaacgtgacatatcccccaaaatgaagttaccttccaagttggacacgtcccgtagttgggcatatgtctaactaaaagtttctgacttttagtaaattcagcttaaatataagttgaaatttgggaaataatttccaagctcttggaaggggtaacagtgaaccgccctccatgggctccacatcttttcctttggcttccaaagtcaggtcccgcccaccctgcctaaggaactgcagagaggtggcaaatcagcaaaaaggacaccaggctcttcttggccacttgtaggaagatccctttacaattttgactaaggagattttttttttcacagttgagttagtttgtgaaaataaagaactctgtagctcaccaaggtggagaaacgcaattcagaaaagtaatttctccaaggtcacttctttttttatgtcttgccatcactttaaaggactagccccactcccccatgtgtatacacaaggaaattgcagaccaattagttgtcttggcctgactctaatgccttttgcaagtagctttccagaagtaaaagtcccagtgatgtattcccatagaaatatttttcagttgtttatgtcgtttactacaaaaaaaaagattcagagtggatggagtacaactctgagtatttttctagtccggaattttttattaataatcggtgctgccgggtcatgcatgctgcaactctcaacatttcccttatttggttcagcttttagcaaaaagggctacagttcaccctgcagagtattaaggtttctggatttttttctcccaactgtggcccaaaagaattaaaatctgttaatataaatagagaacatatttatcattcctcgatagttaattatagactttggtacctttgtgcctcagggaagccacgtgatataactggttatagaatttcagggttagggtttaaagaaaggagaaagccattggaaaaatgatgggctccattaaggagactaatgaatctggatgcagaaatatgtcagaaactggcataaacatgattgtagtagaatttattttccagtaccaatagggaaattattttaagttattacatttactgtattgggaaacttgaggagaactctttagttcataaagcttcaatgtcttttttttttttttcatggaaaaactcaaacctctgttatttgggagctcagtattgtgtggacacttacgagagttttctgcttaattgaagtgtaatataggttgtagaattgttacctgcagttctatggttttgtttcacttcttttcttttttaaagccattctgttctttggatgtgcttgaaagggtgtgtgattacaccattgttaatgctgggtaaaaactatcttcttgcagccttgcctcataacagtggaatttctgatagacaaaccacaggactttgattttaagccaaatccatctccatccctttactgtcaatcttctgtcccagtagtttagcctttgtggcttaggttatgatgcgcctccttctgtgcgaccaatgagacgacttcagcatctttttaaaataatctaagcatcattgaagcagtaacacaaaaaaaaggttcagtattttctttttagtataacttacatcctttcaaataagtctttgccctcatgaagaatccctagaggaagataaggaaaataagtattttccagttttgcttgacagtttctaaacaaacaaaaataaactcaatgaaaggaaagatgtttctttttagctgagatgacagattgcttctctgtattaaatagtctagaagttaaggggatggtcacatttaccatgtattgtgttattagcagttaaattttatgaatatgtttgtaaaattgttgttttatatttcatgtcaaattgaaaagtttatttcttcactattgtacctgtggaaatacaagccattttacaggaaaaaatcttcaaaaactattaaatggatatcagcctgtttgtgagccattgtcttcagattctgtggttgtcactgagttcattaggacatttagtaggttgatacgagtagaactgatttt

SEQ ID NO: 7043 - DNA, 3614 bp, Homo sapiens
tttttttttaacttcagtggaatttactttagatattcattcatcaaatacatgggacttcacaaacaattttccataactttttagcctgtcttttgttatttctgcctaatatgatttgccccgatactcatcttgcacggccagaactgtttggttgattaaaatacatcagctcttaaaaactcattaactgagggtaattacagtagtagacatggtctgggtactatactaccatgtttatttgctgactgaattaagatttaagaatgattaaaaataagcttttactttttaaaaccacttgaggtttcataaagcttggggtttttttttttcctttgttaagaaagccaaccaatcacaatgatatagtcattgttgtgcactcccttttcaccatctgtcaccttcccttgcagcttaaggagcccagtaagttttgaaaatgtttgcgaatcaaactaaatttaagtgggatgattagatatacacaacaccaagtggtacatctgcagagataattcaaaattcctgcttttgagagagcaaatgagtgttgctgaggaataattaaatgagaatttcataggagctccaccattcctgttactttcatttcattttgattaataattcttggatgcttggcatcgatcgtatcactgctcctagaaggtaaagatcctttaggacatgagactggtagaagctggctgagataaaataagtatttatttaaactaatgttctcttaatttgaccattgcagatttgggtgacttttttttaacctttgtacatatacgtaatttatatgattctaatgtactatatccatacttgaattggttttttcgtattttgcctactggcaaatattttgcctattttcagtcgttctaacctatttgaatacgcttttccttaaagtgatacgataatattactcttgattgctgctgcttaatttgatgtaatatgtttaaagttcagcctctcagttttaatatagctttatttttcagtggagatcattgtttaggatgagacatttttggttttggttttgtttgggtaaattttaaatggtgtgaaaatcgatgacaacagtcctcttacagatagcttgctgtattctgtatagcttactctacctgcagacagaaaatgaaagaaaaaaatggacttgcctagaataatatattgaatgccttttgatttagccagagtctctgatgattagctttcactgatagagtatgtcttttcagcctgtaattctttgggccccaaagaatgacaaaggaggcactcgttctcttttcttgctgtatgcctagaaagtggttgaaggattcttgatgccctaaaaccatcttgtaagctaaatggtcttgcatccagaaaggccagattttacctaccaagaaaaaaagatatttttccagagagttaggtatatcataattttccatttcaagtcctgtttataagtctagtcattctgcaacgtgacatatcccccaaaatgaagttaccttccaagttggacacgtcccgtagttgggcatatgtctaactaaaagtttctgacttttagtaaattcagcttaaatataagttgaaatttgggaaataatttccaagctcttggaaggggtaacagtgaaccgccctccatgggctccacatcttttcctttggcttccaaagtcaggtcccgcccaccctgcctaaggaactgcagagaggtggcaaatcagcaaaaaggacaccaggctcttcttggccacttgtaggaagatccctttacaattttgactaaggagattttttttttcacagttgagttagtttgtgaaaataaagaactctgtagctcaccaaggtggagaaacgcaattcagaaaagtaatttctccaaggtcacttctttttttatgtcttgccatcactttaaaggactagccccactcccccatgtgtatacacaaggaaattgcagaccaattagttgtcttggcctgactctaatgccttttgcaagtagctttccagaagtaaaagtcccagtgatgtattcccatagaaatatttttcagttgtttatgtcgtttactacaaaaaaaaagattcagagtggatggagtacaactctgagtatttttctagtccggaattttttattaataatcggtgctgccgggtcatgcatgctgcaactctcaacatttcccttatttggttcagcttttagcaaaaagggctacagttcaccctgcagagtattaaggtttctggatttttttctcccaactgtggcccaaaagaattaaaatctgttaatataaatagagaacatatttatcattcctcgatagttaattatagactttggtacctttgtgcctcagggaagccacgtgatataactggttatagaatttcagggttagggtttaaagaaaggagaaagccattggaaaaatgatgggctccattaaggagactaatgaatctggatgcagaaatatgtcagaaactggcataaacatgattgtagtagaatttattttccagtaccaatagggaaattattttaagttattacatttactgtattgggaaacttgaggagaactctttagttcataaagcttcaatgtcttttttttttttttcatggaaaaactcaaacctctgttatttgggagctcagtattgtgtggacacttacgagagttttctgcttaattgaagtgtaatataggttgtagaattgttacctgcagttctatggttttgtttcacttcttttcttttttaaagccattctgttctttggatgtgcttgaaagggtgtgtgattacaccattgttaatgctgggtaaaaactatcttcttgcagccttgcctcataacagtggaatttctgatagacaaaccacaggactttgattttaagccaaatccatctccatccctttactgtcaatcttctgtcccagtagtttagcctttgtggcttaggttatgatgcgcctccttctgtgcgaccaatgagacgacttcagcatctttttaaaataatctaagcatcattgaagcagtaacacaaaaaaaaggttcagtattttctttttagtataacttacatcctttcaaataagtctttgccctcatgaagaatccctagaggaagataaggaaaataagtattttccagttttgcttgacagtttctaaacaaacaaaaataaactcaatgaaaggaaagatgtttctttttagctgagatgacagattgcttctctgtattaaatagtctagaagttaaggggatggtcacatttaccatgtattgtgttattagcagttaaattttatgaatatgtttgtaaaattgttgttttatatttcatgtcaaattgaaaagtttatttcttcactattgtacctgtggaaatacaagccattttacaggaaaaaatcttcaaaaactattaaatggatatcagcctgtttgtgagccattgtcttcagattctgtggttgtcactgagttcattaggacatttagtaggttgatacgagtagaactgatttt

SEQ ID NO: 7044 - DNA, 813 bp, Homo sapiens
agggagtgtcccatgtgcaggactgtgggcccctatgtgcctctctggcttggctgtgaggcaggattttatgtagacgcaggaccgccaactcatgctttcactccctgtggacacgtgtgctcggagaagtctgcaaaatactggtctcagatcccgttgcctcatggaactcatgcatttcacgctgcttgccctttctgtgctacacagctggttggggagcaaaactgcatcaaattaattttccaaggtccaattgactgacacccttgacagccatctacgactttattaacaggttactgtgaagattttgccactaactctagattttacctttttgtaatgctgtttatcagaggagggtgacaggggctggaaataaagagaggggacatggtgatgaaacatggcaggagtgtaacagataccagtggtgtgttgcatgctcaaaacagcagcgtcgtcattgaagtctgcttgattaaaccataatatctttgtaataattggatttaaaatgctatgcttctatttttaaccttgggtttttaaccaagttttttttttttttgtaatcttggacaagactttaaatcatattttacagatgtagaagaaatttattcaaaagtgtgggctcatgaagttcacttcagtgcagtgtggtgtaggtgttacgcgaagggcgcacagtgtctagaaatacttgatcgtggctcaaacctgaccagacagcagaggggcggctctgtacagtgtgactggtggacagatggccttaggcacaggtggttttgaaatctgggg

SEQ ID NO: 7045 - DNA, 303 bp, Homo sapiens
gtacgatattgatacatacaacatagatgaatcttgaaaacatgttaagttgaaaaagccaacatattatatgtaacatattgtatgtaagaaataggcaaatccacagagacacagagtagattcatggttgccaggagttaaggaaagtggaataaggagtgattaccagtagacatgaggcttatctgggggaagatgaaaatgttctaaacagtggtgatggttatacaactatgtgaatatgtgaatggaccaaaacccactgaattatacacttaaaagggtgagttttatagtgtg

SEQ ID NO: 7046 - DNA, 812 bp, Homo sapiens
agggagtgtcccatgtgcaggactgtgggcccctatgtgcctctctggcttggctgtgaggcaggattttatgtagacgcaggaccgccaactcatgctttcactccctgtggacacgtgtgctcggagaagtctgcaaaatactggtctcagatcccgttgcctcatggaactcatgcatttcacgctgcttgccctttctgtgctacacagctggttggggagcaaaactgcatcaaattaattttccaaggtccaattgactgacgcccttgacagccatctacgactttattaacaggttactgtgaagattttgccactaactctagattttacctttttgtaatgctgtttatcagaggagggtgacaggggctggaaataaagagaggggacatggtgatgaaacatggcaggagtgtaacagataccagtggtgtgttgcatgctcaaaacagcagcgtcgtcattgaagtctgcttgattaaaccataatatctttgtaataattggatttaaaatgctatgcttctatttttaaccttgggtttttaaccaagtttttttttttttgtaatcttggacaagactttaaatcatattttacagatgtagaagaaatttattcaaaagtgtgggctcatgaagttcacttcagtgcagtgtggtgtaggtgttacgcgaagggcgcacagtgtctagaaatacttgatcgtggctcaaacctgaccagacagcagaggggcggctctgtacagtgtgactggtggacagatggccttaggcacaggtggttttgaaatctgggg

SEQ ID NO: 7047 - DNA, 813 bp, Homo sapiens; identical to SEQ ID NO: 7044

SEQ ID NO: 7048 - DNA, 303 bp, Homo sapiens; identical to SEQ ID NO: 7045

SEQ ID NO: 7049 - DNA, 32192 bp, Homo sapiens
ttttttgcatttttagtagagatggggtttcaccgtgttagccaggatggtctcgatctcctgacctcatgatccacctgcctcggcctcccaaagtgctgggattacaggcataagaattctatttaattttaattgctttaaatataaatgcaagtagccacatgcagacagcacaacgctagaatcttgtcatatttgctcttatagaacccacttttcttccaagtggaggccatgtaagaagagtcagtatctagaacggagggtgaagggcgggatgtactccaaggaggagcaagactgcagaaagaaggttggaggcaaatggggaaagtgccacaattttggcttagggtgcttcttcctgtgtaactactctttttccgctgcatcacaggctcctcattctccacattgcagataatcacgtttaggactgctattggattggtgcatcagttgggcaagtaatctactgtttgcaaagtcagtgcagtgacccaccacaaagagccctgtcattttagtctttgaatctaatggctgtaacacactggtgctgaatctcttcctcttgtgacccaggccacccattttaaatgactggctggtggcaagtagataaggtttaggaccaggaatacagtcttctctgaatgagcatgggtgcctttatttatggagagaaactgtaactttccattcatgcctgcaaatctttatcttaggcctgctatgtgccaggcaagttgttaggcactagtatcagaaagaaaacccaagacctccacccctcagaatctgacttggtccttgttggtaatgagccttgcataagacttttaaaaaatgattgtgggcaaggcatagtggtgcacacctgtggtaccagcttctcgggaggctgagactggaggattgcttgagcccaggaggtggaggatacagtgaatgagctataattgaacttcagcctgggcaacagagtgagactccatctctatctcaaaaaaaaaaaagtttgttgacatgagatagcctcaccaaagcatttgagatttcttttgagttacaactttaatgtatttcttcaactgggcgcctattgtatgccagacacagtgctaggcactgagaattcaaaggcacttttccttgcccagaaaatccaggctcaggaggaagacagtcatgcaaactggtaattgcacaatgtattgagttctaggctattatagaaacaccaagtagggctccagactcacatccaatatgattcctgttacattgataagtgtattcaatgacacttatttgaaagtttctgtaatgaaatctgaagaagttcactcttataacaagatctttgctttgcactagactatcaacatcactgccaaagacactgtaattaactagtaacatacaagctcagtcaatatgaggtaacaagatagaagggtatgaattaagcagccccaacaatccagcacagtgattagcacatatcaggcacacagtcagtaatcaccagagttttggttttatgttgctttgttttgtttcacaagttcagtgtggcttgggttattaaagagaaggtaacattttgtattttgatacagacagtggtagccaactcttgattgcttctcccctccacaccccccacccaatcccagcatcatgctaaacactgcttttattttatttttaattgtagatatttaaggtgtacctcataatgttttgatacacatgtacatagtgaaatgatcttgtggtcaagcaaattaacatacccatttcctcacatggtcatctcctgtgtgtggtaagagcacctgattgcttctagattgattatcccaggaaatgcttcccagtctcttagtgtgtaacatctttgtgaatttgcaaggacaggcttcctatattttgctggccttccactgaggcattctaagtctagccgccctcaccgtcagcaccccatcctacacgggatgcatcagcccttcattctagcccacttctgtggaaaggataggctgttagcaatgcattgaattcttgtggtctccttgcttttgttcatctatgaaccatttctactttcccttgaatatttacatctaatttatctcaatttatgttttcaatggcagaagctgtacttgtttttctaaattacagaaataaatataatgaccataaaactttcaaaaactgaaagtatgtgaaaaatgtttctcttctattgttcctccccctagagggccactgttaaaaatttagattgtttatccttaaagatttactgtatgcataggtaatacaagttgaacatccctaatctgaaaactcaaaattcaaaatgctccaaattctgaaacttttgaagcatcgacatgatgtctgaagtagaaaattccatatctgacctcatgtgatgggtcacagtcaaaactttgtttcatgtacaaaattattaaaatatgtataaaattaccttcagactatgtgtataagatgtatttgaaacataaatgaatctggtatttgggcttgggtctcacactcaaatctcattatgtatatgcaagaattccaaaatctgaaaagagccaaaatttgaaacacttcttgtctcaaacatttcatataagggataaggatactcaacctgtactttaaatatatgtgtgtgagcatccctatatatatgtagagagaactatatatactggaaatacatgttaaataatataataaatattttatacaaatataactttaattttaaataaatatgttaatatatttttccaaaaacatgttttttaaaaaacatacatcatacatatcacactgaaatttgctttttcctgttaacaatatgccatggacatctctccatagcagtacatttaaatctaacccctttcgacaactgaataaacagtatctcattgtgtgccttatcagaatttacccaagacatcagctgttgatagtcatttttcttgtttccatgtttttgctattatacaccatgctgcaataaacagcatcctccatatagctctacatatttgtataggagcatttctttttgataaatgctgtaggatggaattatcaagtcaattgatttgggtagacctgtgaaatttttgttagggtctgtcctctcacatccttgtcagttgatataagttccatatctgtcttctccaaatctcatgttgaaatttgatccccagtgttggaggtggggcctaaaagcaaatgtttgggtcatgtggacagatccctcctgaacatcttggtgccgtcctcctccctgaggtaataaatgagttcttgctctgtcagttcccatgagagctggttgttaaaaagagcctggcacttccctcccctctctcttgcctcccgtctcaccaagtgatctgcacacgccagctcctcttcaccttcagccatgagtggaagcttcctgaggccctcatgagaagcagatgctggcaccatgtttcttgtacagcctgtagaaccatgagccaagtaaatatcttctttccttcatatattacccagcctcaggtatccctttatagcaacaccagcagtctaagacaccagctaataatatttaaaatttttttgtcaatcaggtaggagaaattgcctcatttatctataatttgtaatttttatcattaacaaagtatcattttgtaaattacctttgctcattaaagtttttttctgtttatattgcaaatattttctcccagtgaatcagtttttaacgatttgttgtatgatggtttccccctactaaattctcagatacacattgattctttctgttccactgacctttttcactgcgttctaaacatttttgcagctctacttattaaaaaatgtacacataaactatcactataggtattcctaaattgtacacaagtacctctgaaaaattatatcgttgtaactataaaacatttgaaaagtagactttttaaaaagcttaaattgaaaaaccagaatctctagtattttcttccactatctagatgtgcaatctaggtgtacacccccactttggaaagcacaagtttatattatctaatcctatggcagcattgtactgttttaatatctgtagctttatgatatgtttataatatgttatatattatgtcaggtaggacattcccttattattatttttcctttaattttgtccttggtaaacttcttcagttattcatccagatgaatgttattatcatctcatcaaagctcctgcctccacacccctacattacaaaagcttctattgacttattttattctgaacatgcctctttgttacctcccagagctacaatggcttcttttctctctgagaaagttagcactttgggggaaatttcttctactacctgaattattgggtccctccccctacccacccccccatagtttttctgtttcatttgttagttgtgaatttgtttcttctttgtctttgcatttattctttaagaacttctttaagtgtttggatgtccttgaatatcatctctttttctaagagtaaagccctacaaagctgatgagatgttttgtgtgcatgggtggggctcttgagctttctatctgcaagtggcagaaatctcttccatgctgcatagcttgtcctggcatgaacatgacttttctctctgctccttgttccttcacctccattaagtgcactcacttgactcagaggccagattcactctgagaaggaagtgtccaaggagcccctacatcgagaaagcagtacttccaccttggccagcctggcatcctatgctggtcctgtccaaccgatccccacatgatcagtatgcacacgttctttgatcagatcttgtcctatttgtctgctctctctcttgccttcttatattaggggattcctaagatggttctcttgtatttttaaaccttgagctcttagactttaaacatttcttcttcacatacttcagactttctcaacatcttttcctgccccagcatgcctgaaggacattcaaacacccctcaagccagtggcagattgggacattgattctaacaggtgcacagtggggaggggtgcaggagacgagaaagagacaagttccctttaaaaggcttcctggtttgtctgcttacacacacgtatgcacacatgttggggaggtcctttctctgttctttcttccttattttgaaatcttcttgttgggttttctatacaacatttgccgctgagtcttccacaataattttgttcaaacaacctcaattttgcaagtaaatgatggagcagaaggagttggacactgcagtaatatattgttataacatttcagactctgccctgatattttcaccagtgccctgtcacagtcttttgaaattgcatatacaggcacacctctttttattgaacttcactttattgcactttacagataattgcactttttacaaattgaaggtttgtggcaaccctgcactgagcaggtttatcggcatcatttttccaacagcgtgtactcactttatgtctctgtgtcatattttggtaattctaacaatatttcaaactttcattattattatgtttgtcatggtgatctgtgatcagtggcccttgatgttactattgtaattgtttaggagttccataaacagcacccatataagatggcaaacttaatcgataaatgctgtatgtattctgactgctcagtcaaccaactgttcccccagatctccccatcttcttgggtatctctgttccctgggacacaacagtaatgaaataaggccaatgaatgaccctacagtggtctccccagtgttcaagtgaaagaaagtgctgcacatctcttgctttaaatcaaaaactagaaatgattaagcttagtgaggaaggcatattgaaagctgagataggctgaaagctaggcctcttgtgccaaatacccaagttgtaaatgcaaaataaaaattcttgaaggaaattaaaagtgcactccagtgaacatatgaatgataagaaagtgaaacagccttattgctgatacagagaactgaatgatctgaatagaagatcaaaccagccacaatattcctttaagccaaagcctagatccagagcaaggcccccaactctcttcaattgaagttgaagctgcagaagaaaagtgtgaagctagcagaggttggttcatgaagtttaaggaaagaagcctcctccccataacataaaagtgcaaggtgaagcagcaagggctgatgaagaagctgcagcaagttatccagaagttctacgtaagaacattgacaaaggtggctacattaaacaacagattgtcttgttttgttttgttttgagatggagtctcactctttcacccaggctggagcgcagtggcgcgatctcggctcacggcaacttccggctccctggttcaagtgattctcctgcctcagcctcccgtgtagctggggttacagtcacacaccaccatgcccatctaatatttgtatttttagtagagacggggtttcaccatgttggccaggctggtcttgaactcctgacctcaagtgatccgcccatcttggcctcccaaagggctaggattacaggcaagagccaccacacccgaccggaaacaacaggtttttaatatagaccaaacagcattatattggaagaaaatgccatctaggactttcatagctacagaaaggaagtcagcacctggcttcaaagcttcaaaggacaggctgtctctattgttaggagttaatgcagctggtgactttaagttgaagtcaatgtccatttaccattcaggaaatcctaagacccttaggaattatgctaagactactctgcctgtgctctataaatgctatcaaacagcaacaaagtctgaatgacagcctatttatttatagcatggtttactgaatattttaagcccactcttgagacctactgctgagaagaaaaaagatttctcaaaatgttactgttcatggacaatgcacctggtcacccaagggctctgatggagatgtgcaaggagattattgttgttttcatgcctgctaacacaatgtccattctgcagcccatggatcaaggagtaatttcaactttcaagtcttattatttaagaaatacattttgtaaagctatacctgccttacagtcctcctgcctatctgatggatctaggcaaagtaaattgaaaaccttctggaaagagttcactattgtcaatgccatgaaaaacattcgtgattcatggaaggatgtcaatacatcaacattaacaggagtttggaagaagttgattccaatcctcatgagtgactttgagggattcagtggaggaagtaactgcagatatggtggaaatagcaagagaattagaatcataagtggaacctgaagatgtgagtgaattgctgccaactcatgataaaacttaaatagatggggagttgcttcttatggatgtgcaaagaacgtgatttcttgagatggaaactcctcctggtgaagatgctgtgaacattgttgaaatgacaagaagggatttagaatattacataaacttagttgataaagcagtgacagggttggagaggattgactccaattttgaaagaagttctaccatgggtaaaatgctatcaaacagcatcgcagccttcagagaaatttttcataaaaaaaggagtcaattgatgtggcaaacttcgttgttgtcttcttttttaaaattgccacagccacaccaaccttcagcagccaccaccctgatcagtcagcagccatcaacattgaagcaagcccctccaccagcaacaagattacaactcactaaaggctcagatgattgttagcttttttagtaataaagtatgcttaaattatgtacatattttagatataattctattgcacatttaatagactacagtgtagtgtagatataacttttatatgcactgggaaaccaagcaatttacgtgacacaatttgctttattacaatattcactttatttccattatctgaaatgaaacccacattatctttgaggtgtgcctgtattttgttcaggagggaactgaggaagacactcttatccaggatgagctgaaattgtttctcaagttgttcttgacaggggaaagagtctttggaggtcatgtttgaaatgagggtttgggactctatgaatttcaattatacatgtcctctctgctctgcctccagataataaatatacaatcatgtcatctgcaaacagagacaatttgacttcctctcttcctatttgaatatcctttatttctttctcttgcctgattgccctgtccagaacttccaatactatgttgaataggagtggtgagagagggcatccttgtcttgtgctggttttcaaagagaatgcttccggcttttgcccattcagtatgatattggctgtgggtttgtcctaaatagctcttattattttgagatacgttccatcaatacctagtttatggagagtttttagtatgaagggctgttgagttttatcgaaggccttttctgcatctattgaggtaatcatgtggttttggtcattggttctgtttacgtgacggattacgtttattgatttgcatatgttgaaccagccttccatcccagggaggaagccgacttgatcatagtggataagctttttgaggtgctgctagattcagtttgctagtattttattgaggatttttgcatcgatgttcatcagggatattggtctaaaattgtctttttttgttgcgtctctgccaggctttggtatcaggattatgctggcctcataaaatgagttagggaggagtccctctttttctattgcttggaatagtttcagaatgaatggtaccagctcctctttgtacctctggtagaatttggctgtgaatccgtctggtcttgggctttttttggttggtagactattaattactgcctcaatttcaaaacttgttcttgttctattcaggggttcgatttcttcctagtttagtcttgggagggtgtatgtgtccaggaatttatccatttcttctagattttctagtttatttgcctagaggtgtttatagtatagtactctctgttggtagtttgtatttctgtgggattagtggtaatatcccctttatcattttttattgcatctatttgattcttctttcttttcttctttattagtctggctagcggtctatttttttgatcttttcaaaaaaccggctcctggattcattgatttttttgaagggatttttgtgtctctgtctccttcagttctgctctgatcttagttatttcttgtcttctgctagcttttgaatttgtttgctcttgcttctctagttcatttaattgtgatgttagggtgttgattttagatcttccctgctttctcttatgggcatttagtgctataaatttccctctaaacactgcctccagataataaagaactacttagaataagtgacttttcataaagtgtcagtgttcagtctcttcttttttacagtaatgaactggtatttcctttacacatctttggatttattctgatttcttatgaaagagaaaacagggagcccaagtattaactgcaaggagaaccagatttcattaaacggtgacctggatgaattcctaatatcatatgctttattctttgcagagaagggcttatggtttgattttttcaaaaaatgctggctacttatccctcctttgacatcagtttggtttgccttcatatgtttggagtataacatgctttatttggcctttgggcttctcaagtttaaaaacatgcacttcattatatctgtaatggatattttgatagagtgatgaatatgctcttccattttgctgttctctaagattactgtggaaccatgattattgatggagaagaagctccagttgcctacacgttggatgataccaaacctgaaggcaactatgctgccataatggggtaaggcacaattatggtgttgtggctgctattcagtgttgacaagataatcacatactattaacaaatgtgccccaaactttgttaagtgattttttttttacccagtggtattatttttcaaattcagcggtacaaaaattattactggttcttttctaaataatgtcttccaatgaataaatatctaggtaggaagcagaataccaataacattttaaaatttttatgttagttttctattagtatttagtgttgggggtagacatatttaggtgacccatcttttgttgaaagcatgataaaaagacctgacttggggtgttttactaagagacttcttgtggaggctgtgtgggcatccatgttacttaaatgagatgctgagatttctgagtcccagtagagaagagccaagaccagcccagtcttcagctttccagggacgaccagcacgtgggaagggaagaccaggatatcctggcccagagaggtggtgacctggagtatccaaaattaagatgggcctcaggacatgtatgagtttatctcagagagagccaacagtcagaacagagagatcaaagctaattgttagttgaaagcaatcatggggctagaaatggagatggaatctagaaggttgggtgctagggagacaccatggtggagacaaaaccaaagagcaaggactggatgaaattggaagagctcagacatagccttaagtgggcatctgaggcccaagggttattcttattgaccaccagctgggtgaggggaagtgggtcagccatagtgttatccaaggcaaaaattatggccagtcatctacttttagtcgcttgattccttgaagttagaaagtgctcttcagtgtcagaaatttgatatgtaaatcataaaactttgaacgtaagaaaagctagtgtatagtttgtttcttttggttgacttaactgtgtaaactgggcacatgtgtagctacgaaaatgaggctaggatgaaaccaaccattaatttctcccctttttcttgtttatattctttagatttatcctggcccacaaagccagaaaactggcacgtcttaccaaagaggaaaggtaacaaaagaaatgctgcttctttcgtttcttccttcctttcccccccactccatccctccctcccttttctctttctttccttcttttctacctacttgcctgcctttcatttttacttaactttttaacttacggactgcctaattatatgtgtattgccagtgctacgtgtttgctatgttaattataagggtcttgttgtaaaagacatagtgctgataacttaagaaccaaagtattcaaattaatatttattgagtttattgtacataagacaccatgctaggggctacggagaatatgaaaatggatataacccaggggctgaaaatttgcttgtgaaggagataaaccagggagaaaaattactgtgttgtggggaagtctgctgtacacatactacatgaatgatgcataacaattacagattataggtacagtgggactaattcctctggaggtggcaatttcttcttgcaattagtgttcaccagtgccaattatttattcccacaccactgctaataacctatttaccaggaaagagctcctgaattatattatgatgcatgctttccgattccatcagggttctcctcaatgaccaatgttacctctgcacatagccagggccgtagcggtctgcctcggcctcttccctaaaaatgtccccactagaatataagatcatgaaggtaggatgttttgtctgattggctcactgctgggtttccagtgtctggaacaaatcttttcccactttgccttttgatcctgtttatggcttattcattttatactataataaaattttatctttttatgtaatcaaatttatccattttaaaaccatggtttctgagtatctatcatacatagaaaagactttctcattccaagataattttttagaaatcacccattcttccactcgttttatggtctgacctattatatgtaaatctttgatccttctgaaacatattttggtgtaagaaaataacgtaagcatcctactttatttctttcacgagcagctatttgtcccagtgccattttattgaaaactgtcttttccctgtgggttcaaaatgtccacctttatgaattctaaatttccttatatatttggttctacttctgtacttatttctttgctctttctatccattcctctgcttgtggcaagttacatcatttgtataaaaacaaagaaaaagacagaaagagagagaaagaagagagggagggagaagaacttaggcattttcataaacatttgtttcagaaacattttgttcataaacaaaagggctcctggatttaaaataataaaataataccatgattcaggcaacatgtcactttactttcttaaagacttaccagcaatcctgtgtgattaatatttgtgacctcaaagatttaagacatctgaaatggaacaaaatgccttgttttaaaaaattaaaatgaaatgctggagtggaatcaatggctcatggaatcttttttatgaggggataaatgcctctttcccactttttttttccctcccttctttcctttattttctcttttgtctcttttcattcacaggttgaagaaactttgtgaactctatgccaaggttctgggttccctagaagctctggaggtaaggctgcttcccaaccctatactaagggtgagaggcctttctttgtccccaagtgactagcagggataggttaatgcaagttgggtcctgaagttcatgtttttcccaatatatttgcagaggcatctacacaggactggtcagtttacaagtggttccagagagtgtgggccctggctgtgctggtggcaggtcagggaacttgcaatatgctgtggtttaggtgatgctacattgtccctgaattcagagtttcttcctgggagagggcattgggtcactctgcttccagttctgttaggggggtaaaagaggggagcttctactacccataggaagatcctagatcctggtagccaggatggggatgaaaagggctttttcccctctctggtgatcttgtaagaaggacagagtctcactcaggtacataaacctatacctaccccatcccccactgtctcacagtaaaaaaataagattacctgtccccactcctgcatgccctcttttctgccttgttttacccttgaacatgagagatgtaaagaagacaggctgtctgtctgtatgccagttgagttttctagacacctttggaagtagcctgagaaaacggtgatcttcaaatgaatcaagtagaactctaaggtggttaaaggtgggataggggcagggtagggggcatttggtgacagtcagagggcccaaagtactcataacaagtacccataatcacctccctcatcaatatttaaaatgatgaattggtgttctcatgacattcatcagactgctaagtttttaatgttttgacatagactatgtcaccttttgaaagtgattattaaatccaattatctgtgaagcatttgaagacaatggagaccaatgtacaaatgagcagttaatgcgtgagaaaagtctaatgaggaggctgagaatgtttaacttgttaagcctcttaaatccaagtctctgtagtatataccacaatctagttgagcagctacatgacttagtcctattactctaacacttactttgctcagctttggagtgacttgcttcctcctggttaagttgttgtgtctttcaaatttgtcatttttgttcactattttaaagcaaaattctctccctccctcctcgccccaccattgcagatcttctgtacttgatacaggtgaaacacatgctcttgatgtttcttggaattctttctcagcaaataaactagaacaattagagaaacaatattaatgaggaatatgttttgctttttttttttgctttcatataccaattagcaagtttaaatataggcatagcctccaggctcaaggatattgagtaaagtatcaagacaaaaaatacagtatatactcactaaaaacagaacttaacatctgttaaaaattattagtttttctgtttaaaaatgccattcagcatgatttataatcctttgggtatatacccagtaatgggattgctgggtcaaatgatatttctagttctagatccctgaggaatcgccacactgacttccacagtggttgaactagtttacagtcccaccaacagtgtaaaagacatatgcacacgtatgtttattgcggcactattcacaatagcaaagacttgaaaccaacccaaatgtccaacaatgatagactggattaagaaaatgtggcacatatacaccatggaatactatgcagccataaaaatgatgagttcatgtcctttgtagggacatggatgaagctggaaaccgtcattctcagcaaactatcgcagggacaaaaaaccaaacactgcatgttctcactcataggtgggaattgaacaatgagaacacatggacacaggaaggggaacatcacacactgggacctgttgtggggtggggggaggggggagggatagcatttggagatatacctaatgttaaatgacgagttactgggtgcagcacaccaacatggcacatgtatacatatgtaactaacctgcacgttgtgcacatgtaccctaaaacttaaagtataataaaaaaaaatgccattcagtgctagaggtctggagaataaagagtgtggagttgatttaaaaaaaaaagccattcaagatatttcaccctggtagatattcaagctttgtgaagttacattctgaggcactcccaggctaaagcagtttgttaattgaagttcctgcaacaactcgtgagatggttgtttggggaacttcagttgaaggggaaagcatttgtcctcatattttgaaaaaggctgatcatttttcatttgagaaagtctcttttcctaagaagggtgtgcatgattaattcctgatgataaaaataagttggtcctgtccttgtttgctcttggcatagagaaggccacttgttttctttttgctttggtgtctattttgtggaaggaagaaattcctgggaacaagatacattgaaagataaagtccaacttttcttctgattggctggagacagccagagaagcttgcttaggaggtggatgtagccgtcaggtgctggggcgtgtagcgtggtgataccacagaagacctggagccacttaacccatcaggcagaacctcataatcatactttgtaaataggatgccttacaaatgactgtccaaagtcagctgtgtgattgcaattcttttaaacaaaatgtttttcaaaatctccctttaaaacaaacattgttttcttaaaacttgctacgttgattttatcttttcgaagtaatgcttaatgataaagcttctgtttggttactttaaaaaagcatttgagctttacaaaatctctgccaatttttcctgttcgtgtcaaaaacatatttttcagaccaatagttgtttacaaataccaccatcaacagaagtgcttgcctgccacaaaaacatgtttgttcagcctccctcaagaaagctcacctccaccaaaacatgaacctgataatcctttttcttcaacagacatatttttctgtctttttttcctatccagtcactccagtaaacataaatccttttaaaaacttttcttgaaaccatcaggcactaaaactttttaataggtaaaaccaaggtaaaaatggaattagattatcgcaatttatgaacagtacttaagatacaaagaaaccaaatgaaaaaaacattctaagatctgaatttcttagaagcttattaccaaggacatttacctgcccaaagacatatctttaaaaacatcaggataatgcaactctatttccgaaatacattggtttgacaatacaaagcctactaaactgttcgatttattctaggctaaatagctttctctgagtctccttcaagtttttgttgctctatcttgcagccagtgcattatgaagaaaagaactggtgtgaggagcagtactctgggggctgctacacaacttatttcccccctgggatcctgactcaatatggaaggtagagtaaaagcatgctaagctgttacagaaatcccctgcacctgaatccaaaacctaaataggttcaggtagctcttctcccttgtttcttataaatacaaaaaaaaaaaaaaaaaacaacccaatttcctttgtatcttatgaatgaaatcgtgtatcttatgaatgaaatcattataattatacatacatcatggtgctgcttttccctggaagagcaattccaatcaatataaccatagaaggtttcagcataagaatagcattttaccccattcttcatgatatgattattacgcattgcatgcctgtatcaaaacacatcatgtacccatagatatatacacctactctgtacccataaaaattaaaaatcaaaaaagagtagcattttaggtagtccaagggttcacccaatgtcagaagaagtgtccttatactgagttaggactcagtaaaacttcctcaaatgccactgtacaactgccaacacggggacaaaattataaaaacaaaatgagttctagactgggcatgaagagacttgggtcccagctctgattctaccaataacaaactttgtcatgccaaacaggtcacttctcctttctgaacctcactttcttagcaagtggatgggaaagcacaaaatgatgaaaagtgagcaataatcagtatgctcaagaaagtatgagttttttttattttttgatcctaatccttagatgctgggaagtatgagttattttttaacatccttattgagacgtaattcacataccatacaattcacctattcaaaacggtgcacagttcaatggcttttagcattcacagcattatacatccaagtgtgttgttgtttagttaatttatttgatgacaataaatgaactaataatatagcagtgatttttatgactattatactattactaaaccaagcaataatttaatgccaaaagcttaatctaaacaggatgagaaatgtagactagtgagtcaaagactgttgaaagtatgcagcaaacagagggggtaagtggaaatggctaatcaatctgtccatgaaaactggtcgaataaggagtaaaacctgcttatcagaagatacgtaataactttggttagcactttctttacctgcttaaagatggcaaaatattatccaagagaacattctggggccaaggggcagcacctgataagctgctgggtcattaagttaatttttagatatgctgactgtgttactctattttcacactgctgataaagacatacctgagaccgggcaatttacaaaagtaagaggtttattggacttacagttctacatggctggggaggcttcacaatcatggcaaaaggcaaggaggagcaagtcacatcttacgtcgatggcagcaggcaaagagagagcttgtgcaaagaaactcccgtttttaaaaccatcagatcttgtgagatccattcattatcaccagaacagcacaggaaagacccccgcccataattcactcatctcccactgggtccctcccacaacacatgagaattatgggagctacaatatgagatttgagtggggacacagagccaaatcgtatcactgagtgtagaatatgtcaatggtatttgtttcattctgcatttattggctaagtgccaaccatttgcgaagcactgtgctgagaacttcaataccaaggacagcctccctgctgagaaggagctgacagtgttgagggctagggtggggatggggagaggacatgatatcaaaaattgactctaaagtactgacatatgtccctggaagggaataaggataaaggagggcactactgtatcaccactcagaatgttaccactgaggtaaatgctctaatacaggggcatagagataccactggaacacacagaggcacaggctagctttacttagagaaatctgggaaggcttcataatgcacataccacctgagggttgtaggaggcagagaaaggctattggggatgcagtctatgcagatggaatggcatgaggaaaacgctaggatcccacaggtttctggaaagtctggggaagaactttgcatggatggtgtattaggccattcttgcattgcttaaaataaatacctgagtctggggaacttataaagaaaaaaggtttaattggctcatagttctgcaggctatacaagcatggtgctggcatctgctcagtttctggtgaagcctcagggagctcacaatcatggcagaaggcaaagtgagaacaggcaagtcacatggcgaaagcaggaacaagcaagtgtggtggggagaggtaccatacactcttaacgtgaccagatcttgctagaactcactatcatgaagaaggcaccaagccatgagggatccgtccccatgatccaaacacctcccaccaggccccacctcaagcattggaaattacaattctacatgagatttgggcagggacaaatatcaaaatattatatcagatgggctatgggtgatattaaggacagaatggagaatcagatcaaagggggaggaagaacagtttgccctatatgacacattcaggaatacaaaacttgatatttcaacagagaacagctatcactgcattacttttgtttttggctttgttttaaatcagaagtgtgatatgattagatttctgaccacagagtggtgggttttatgctcaatttcataaataccttttggtttggggaacaaagaggacactaacctgaactggcctgatcctgaccacgtgagagaagcaagataaatcccattgtatctggcattggtggtgatacagtaatgccttcttttatctttattccttcccagggatatatgtcaggcttcctataactaccttcaatttttagggtagaaactaaggcacagcatagcttaacataattcccagcttgaacagagactacctgcccagaagacttcccttgacccttcagggccatggtatttaagatattgcaataagttttatattcagagccctgaaagttcacagtacatgttctgaaggaaaagagaagacagaattaccagtacaacttggtaaagaactaaatatacatttcttaagaaatgtttcttctggatagggtgaaaaaaatgattgtcgtgattatgcagtaaaactcataagccacaagaaatatatgtggagttcccctttatgatgtcctatatcttttgtaaatatatactgtctgttcacgcacctgcaaaagaaggggcaggtatttttcttacctggttgttggactctttttttcccttaaaggaacataatttccaaatgacaagtggcgggaaactatctctttgtttaaaattaattcttggttttcacatattctgatttatagtatgattagttctctaagcctttgttctgtcttctaatatttcattcttagggtctagccaggcctcctagaggtctccagctggggttagttttctccattgaaaaaaaagtaaacatgtagtgaaaaacggcattgtttaatcaacacggggaaagtcaatccaccttctcttgtaggaagggttccttcctgagtacccttaggctctctatatatttcatgtgttgtcatcaatatactaatacaggtgttcctcaaaatatgatggggttatatcccaataaacccaccataaattgaaaatattataagtggaaaatgcgcttaatacacctaatgtactgaatatcatagtttagcttagctaccttaaacgtgctcagaacacttatattagccgacagttgggcataatcatctaacagaaagcgtattttataatagagggttgaatatttcatgtcaagttttaaatacggtattgaaagtgaaagacagaatggttgtatgggtacttgaagtatggtttctactgaatgtgtattgttttaacaccatcataaagttaacaattatacgttggagaccatctgtattctatataatatctctccttgtattttcttctcctttttgtgatgactacaatcagagcaggtgaaagaaaacccaccaatgcaagccagctcatttggttttctaataaaaggcccagtggtgtacagtgttgactaagatggaacatggatgttagttcttgacatcgcttatcagatataagagaaccatgagacaggatgaataatggcatgttgacggtgctttccttatggtatttttgtcagagcaacaatgaactgcccctcttacaggccaagtgctatgacatttcagtcccttgtatagcatgtgggcagtctactaactattaaatattatagggtgatgatacaccaggcaaagaatataagataaaaatagagactttgacatctgttagacatggttcaaatcctggctttgctattttctaggagtgtggctcttggcatatcactgaacatttctccaagcctcagtcttctcatatgtaaaaatgagataatgataatagtagctacatcacagagttctttaatagattgaagaaataatgcagtagagagaggaagtataactaagtggttaagactgtaggttccagagtcagattgcctgtgttcaaataccaactctgctacttactagctgtgaccgagagcaaattactttgtctttgttgctggttaggttccaggaagcagaccctgaaacaacgattagcagacaggatatatattaaggcatgcccttaggattggcagctgtggaagggagaaggaagcaggagtgggcatagggagaacttgggctgcagtgcagttccagtgaaggcctcagctgaccccagaggaagttccagaactagaatggcccttcagagtgggaggtctcaagttggagcttgggaatcaggtatttacagcccgtggtgatcagtcactggatgcaactgctattggaaggaggcatgacctagtaggtaacatagttttttttagcagaggcaatctccaaagagggctgacatcagtaggccctcttctggcagcactcccagcagctgggaataagtctttcattcttgaagggggcctgcgtggttcatcacaatgtccaccacagtctacctccatattcttatctgcaaaatggtgataataatagtaccgacctcaccagtacaggcaagtgttcaaggaataggagttatggagccatagtcagactctcagatttgttaaatgttactgattgaaagggtcttagaaatcagtggaccattccctttaagaggcaaggaagccagagcacagtgagagtaagtgatttgccaagttcactagtggaatagccagtggggaattgggggcatgtatcaccttgccacagagccagtgagccataaagggagccatgtgactgggcttacacagtccctcacttcatgttgatgaagcaaatacataatttacgtccattaatgtcagctccttcacctgcaactcttggtgcaggagtgaactttggcttttattctattttgtttgtgacaaggatcatgtaagagctggaggaaccacataaacattattccaaaattgccaatgtccttcttgattgtttagaatctgtggaagctgaccagcattggtctttatgggaaaacttttctctgactctctgagactgaccacttttgcctctttggttttgttccaagggttctacgccagccagtggacaggatttactttgcaggcaccgagactgccacacactggagcggctacatggagggggctgtagaggccggggagagagcagcccgagaggtagggtctggggtcatagattatggggaaggaggcaactcatggtcctgacatgtaggtcaaagatatctgagagcctggagaccaactctccagtaacccccatcttaagacccataaaatactattttaactattgtctcaggtgaagtgaacaccttagcccgaagtaataatgaaaatacctaacatgtcacccgaagtaaaaagagcccatggggcaaacgatcaacctgactatacttgaaaggtaacctaggtctgatattctagaaccaaacatgcttctattaggactcaaaattcaattcatttcacaggaaagattttctgacagttcctctgatgtcatccctatttgaggtgtgttcataactattaaaatttatggtaagcctaatgattggaacctcttataccacaggagaaagaccttttggcgcctcttaaaggttgtatggagtgttctggcctttaccttggtgtttttgatggatatctcaagagacagttacttagtcctttagggagcagattagaagaaagatggtgtcacttttgctatttgccagtgtgttctttcatttcagatcctgcatgccatggggaagattccagaggatgaaatctggcagtcagaaccagagtctgtggtaggctatgttttatttcatgaaattagatatcttttctctaaacccattattttcaagaagagcacacttgtatatattcacataccttttcctaagtgattcaactaagtgatttaaacatgaatgtttaaataagtatcatgggttagggtagaggtgagagatttagatgaactttgataaatttgtagctgtcacattcattacagattattaggaaaaaatattttttgatgaggagggagacatttctcggagacttctaaaaataataactcaataaatgcctgtcaaataaatatctagcctggtgattctccacatgaggtaggaaaagaaaggaaagtgtgttagcatctcctgtccagggacaaacaaatggaatgaaatggagaatatttagattaaaattttatttttaatatactcatcatttttgtaataaaatcctaggaagttttcctggctggaaggagggatgcatagaggttagagtgcaaacgcactttagaggacaaagtcacaaaggtcagaattattgctctatccttttaagtgtgaagtcaaagagaataggcctgccactccacagtcattctcttagtgcttctgccagggatgggattgtgggctgtagggaccattgattcatttactaacaagtatttatggcacacgtgttctgtatcagccattgtggcaaaggcacagcagcatttttgtggagctcaacatctggtggagaatgcagatgataaccaaaaagtacagaacagtgaagaagacatgctgagaaaaaatgcaaaaggagaatgtcatcctaggctggggtctcaggaaagaaagcctccctgaggaagtgaagggtccagtgaggaagacagggtaaacagtataagcagagggaacatcgtgtttactggtctagacgttggcaagaatgggtcatgttcagagagctggagaaagtacagactttctggaataaagtgcacaagccctgtactaatacccaatgttttctgaacctaggatgtccctgcacagcccatcaccaccacctttttggagagacatttgccctccgtgccaggcctgctcaggctgattggattgaccaccatcttttcagcaacggctcttggcttcctggcccacaaaagggggctacttgtgagagtctaaagagagagggtgtctgtaatcacactctcttcttactgtatttgggatatgagtttggggaaagagttgcagtaaagttccatgaagacaaatagtgtggagtgaggcggggagcatgaagataaatccaactctgactgtaaaatacatggtatctctttctccgttgtggcccctgcttagtgtcccttacctggcttagcgttctgtttcaccagtttccaagtttattgccctcaaaatctttagaatagttaaattggcttgtttaaggttcttgctgccccacaacacaccttgcccatgcacaaggaatgaattttttcctaccattatggctttgtgcttgttcttcctcttacctgtaatagcctcaccttccctagttctttgcattcgtccttagaatactgtattgttacagctgaaagacagtaaagaccatttagtcctcaccttctgttttagagttgagcaaactgaagcccacagaggtggaacttaattacctaagagccacaataagccactggtatctgggggactagaacacaaatccaacgcttttcccacctctttggatgttttccccaattatcctccttcactccctgtcatagttaccgatggtgtcccgttgtgtgggtttactctgtgctaagttgtcttacacttctcaaatgctactcagtatatagccttaagtcttactgttttgtgcggtgtgtctccagctgattttaacttttttgatggtagaaattttatctcttcttccttttgtatcctccattgtatcttcatacaaaggacagtacacacttgggtaattaaaaataaaagttgattgaccatatctgctgtcctttctttttgggtaatgactttcaagctttggacacatcaaatcaagatccagtattaagtatataattgtgacttgaaagcatttagtcaaaatttccttgaagcctggatgatgcatgcatttgattgcatgatccatcatgggtggcatatgtgtgagcatgctgaaaatgatttataaagatatggtaagaatactaaaagatgcagttccttgccttcactaccccaaaaaatacctgccaaaataaatgacatattaataagcaagatgcttaaactattaagctaattataatatttcagttgacatttcatattccttcttggtgcaaagctttttactaggtacactcattaatttgaaactgcagtttcacagtccattaaattctatttggactattttttaaatggtatcatcatttcaaagcactcatacctctcgactcccaccgtcagttttcattggtatgttttttaaatccataaatggccattcttatacttttgtttaaaaaatgaagcttattcttagcataagtgaaattgaagaaatctcccaagattaattaataatagtatagagtttctgattttacagtggcattaacatgtatgagtttatggaaaatttagggactgtcttactctattttgtgttgtttgttataacaaaatatcacagacagagtaatttatagtgaacagaaatttattgactcatgattgtggaggctgggaagtccaagatcaaggaactggcatcttgtgagggcctttttgctgtgtggcagaaggcatcacatgggtgagagagtgcaagagagggctaaactcatccttttataaggaatccactcctgtgataacaaatccactgccatgataatagtattaacccatttatgaaagcagtgccttcatgacccaaacatctttcattattagatgtcaccttccaacaccactgcactggggatcaaagttccaacacatgaactttgggggatacattcaatccatagcagatactaaatgggaaacccaccaagattttctttgtaaccatttttttttattctctctaaaaatgtacatggcatggggtgccttcttgagcatcttctccaaaaaagtctccctaaaagttgatctcattgctaactctaatgcatctgctaagaaagagtcaagggctggccacagtggctcacacctgtaatcccagcactttgggaggttgaggcaggcagatcgcttgagctcaggagaccagcctaggcaacatggtgaaatcccatctctataaaaaatgcaaaaactagcgggcatggtggtgcgtgcctgtagtcccagctactggggaggctgaggcaggaaattgattgaacctgggaggcggggattgcagtgaaccgagatcacactccagcctgggtgacagagtgagactctgtctcaaaaaaaaaaaaaaaaagaaaaggaatcaccttctccaaaaatgtcctggatcactcattctccagctgagtgaggtgccccttttctttgttttcccaatgtcacatacattgacctcttgttctgtgctgaccacatgatactgcaattgtgtcgtgttaatttacatgatttgactgaggtgccaagttacattaaatatcagctaccaaggtgagtcctgagatagacaaaaatagagaacttcaaaggaaagatataaaaaacgtgtttttgttttctgttgtaacccctcaccagttttgagaatataaaaggagtagagagggttttcaaaggggcagatttgtacagatctctttagagagagagctgccattctctgggtccaacacagcacaaaagggagggatgggggggctgccttctcattccaagtctagtgagagaagcatcaagaaaacccctttgagagcttcacgtacctctgaagaatcaaagacctcgattctgctcgaggtagtatatatgtatgtatgtatatatatatatatatttatctattatactttaagttctagggtacatgtgcacaacgtgcaggtttgttacatatgtatacatgtgccatgttggtgtgctgcacccattaactcgtcatttagcattaggtatatctcccagtgctatccctctcccctccccccaccccacaacaggccccggtgtgtgatgttccccttcctgtgtccaagtgttctcattgttcaattcccacctatgagggagaacatgcggtgtttggttttttgtccttgcaatagtttgctgagatagttttgaccagagagttaggggctgccacagcaactgccagaaaacaagctaagcagggattaaaattggctacccaaaggagaggcactgcctgttttgtggcagtcaaggttagagccagagggagagtctttgaaaaaaacacccaaaagtgtcctcacaagaaagagttagttctcataacagccaggcttggatcatataaaactaccttataagaggaacagtcaagtaggagtgttcagtaaaccactttccctcattgccttccacactcaacccataaagtcccagaatccacggttggcaagctaaggaaggaaggagtacagaaggaaaggaaaagcttaccacatgtcccttgcaagatggcacagctgcccctgaagctggtcttaactggaagaggggagaagactgagctttaaatcaagttcagagacttgatcattccacagtactggacatcaaaattactgaattgagactgtggtttgtggcttaaggaagtcataggattgtctgttatttaagagcaattgatgatagagtcatagacctgccagggttttcaaatgcaagaaatggagaaacttccctcactgagcaggtttaaatgaacagtggaagacaaaaaataaagtgatttatttacatcccattcaatacactggtattattatcatctattcttgagagcagagacagttttctattcatcttttcatcctccgtacctcctgtggtgcctaagccatcataatgtctaaaaaataataaatgaatggattcttgtaatttttattttaattctgaattagcaatcctgttatacttactcagcaaacagaatgctcctatgctgttttgcagagagccaacttaaatttttggcatactcattttgaaagtgtcaattgtcttctttactagattttagttgagatagcattaactggttggatacagtttccctcttgggtcgattgatggatctaaagctatgattctcaactgtgagtgcataacaaaatgactgggggactttggaaagaccccttgtacctaaatacatgaggaattgaatatagcagggtggtaggtggtgagtgtcttcacagaccttctctgtgaaggtcataatcaagggctaagaattactggttcaaagatgcagtaaagcttggagatctggcattgagcttttctcacaagactgctgctcagcctccatcctctttcacctactcagctacattggagtgaaaaaaagatgctaataacatacttagaataaaagcaaacagtgttgctccctaaaagttaagcatctgggccgggtgcagtggctcatgcctgtaatcctagcaatttgggaggccgaggcgagcagaccacttgaggtcaggagttcaagactagcctgggcaacatgacgaaaccccgtctatgctaaaaatacaaaaactagccaggtgtggtggtgcatgtctgtagtcccagctacttgggaagttgaggcaagagaattgcttgaacctgggaggtggaggttgcagttagctgagatcgtgccactgcactccagtctgggcaatagagcaagactctgtctcaaaaaaattaaattaaattaaattaaaataaaagttaagcatcaatttaacaagttaaagagtgatacatgtttcctggatcataggaactacttgattaaagaaagactatcttgattggaaggcatggttgtcttgaactgggtaccacccacaagtatagcctcaaacaagggcttttatggagaccattcactctggaaagtgatcccaggaagcaggactgtgaaacaagggaggtgggagagccaatccgaggatgtattattgagctggtcactggtgtgggatacaggggctcagtccttctggggaccctttgaggagtcttgcacaatgtaccctagaatagttaaagtgttcgctggaatgttaactcccttgaacttccaggtttgcccatgaattggaatagccactggggaaggtgctgatgtcagtttgcacatctggttgccgcgtctatggctagagtaaaaagatgggctgagaggatacagtggtgcctaagaggtgtaacgtataggaaccaatacacaacttaaaagaattctattgaaagaagcacagtatttcatttatttatttattttttaatttttttctttgtccaagggagagacatgttgaatcttagaaaaacaacctgtttatgtgacagtctcatggatattttagttataaagagaacatctcaatttgggatcttcaaggctgcataagtgggataaatcccatctatcggtaaggtctcatgccagaaagatgtctatgaaacactgagtgcttgccatgcctgtggttccctttttaaaaggtggtcagaaatgaatctttgcaaaaacgtcacctggttttttgatcctactaactggccacaactgattggactaggattgattcctgagtcaaagcactctataggtggccagtggtccatgagttggcctggctaaaagcctttctatgacagtggtgaagacaaagttgatacaaggagagagcaggctaagtcacagggaatgggagaatgaagcccaaatctgagtggctgctgtgccatgtgacctactgaggcatctcaatactaatgaccaatgctccgggacatcatgagatttgaatgaaccacagtggagctgatctcctctacttcctcactgcccctagttttcctatggaaacagagtgtacctaacagagacatcttttctctgccaacattcacctgccctcctatctgcttcctttaaaacgttaactctgcttgtccccagttactagtcctctgtcattgcataccctttaggatcttgtctcctggccaatatgttaggatccctttactttcttcttagccttggcctcaaactaaaaaggacaggtcctattcgaaagcaatggtagttttctcacccattcctcatttcaataatggagccatcaatcttgcaaccaaatagaataatctagaatgttctggactgtaggggaatgtgtagacaacttggtgaaatgtgttggtgggttttttgttgttgtttgtttcccgttaatttgtctaagtgctcataaggaatcatctgacttgaaaatcctcctggcgagtgatcttaatgacatttcagcctgtagacactagaagccaagctctggtattagaaataactgatctaatcagatcctacagttaccctggactgctactttctgatgtaattgctcttgtcatttctgctaagaccacatgacaagttactaacaagtcatataccactccagcagactgacatctcagtccctggcctccaaccctgatcactttgaactcttcttttacctttctttacatctctaatccccaaccacttcttccttaaccattctggttcactttattctccttgaaaatccatttccttgccaggcaaaatgctgagtggcactgagttttgctcttgaatttgacatatctctcttacctccaggccatttcattgcattatattttcttcccccctagcctgctgtcaaaatgttttcaataccagaatattccctgggttatagaaaattatggagaaagtcctggagttgtgtgggagcaatgggaagaagaccaccagctgtttcagaagagagtgagggctgtcttgggccataaattcctcatccccacaactcgtccatcttctctggcctcctgttgtgctctacctgatcttttactcttctatctccagtgctgccaaatgctcaggcctttggtctactggtcaaggcttactttggataaatataattccttttggagcccaaagttcggtggggctggtggcctttgggctatgcatcctgatgttttggaagcactctaagggcaggattgtcttcaaaataacatcttctaaaagctgcctgctaaatgtgaaaacagtacataaagtatatgtccttaaataatataaaagccttcctgccaattccctgcatgccctctccatgcaagctgagccccctttcttttaggtgcccaattccagaggcattgctttaagcaaaggacaatgtaggcagttaaacctaccacagaagggagcagtataggagtagggttcacagaggaagatgtaagtattatagactattcccattggcaatggccatctctttttgagccaaaagttaggacagaatgttgggtactagacttactcactatacattcttccacctccttcaacatagaaccttgattttgttcagctatttacacactactgtacttcagaaaaggtaggctggccacatcgccagtcccaagacgtgggtactggttagcctaaggcaatcatggtggtcctattttattttgtcaatggttgacaaaaagaaaaaagaaaaaataaacatacccgggcttactggtgtatgttatgcaattctggccaatgaccataaggagaagtcttcttagggggccagctggagcttgtggaaaagagttcctcactcttaaaaacagacacatgagaaaacagacacattctatcttctttgggatgttacaagtatctggatgtgacatttataattgctgcagccatctaactaccaggccaaggatgaggtccatacacagagaaggttgaggccaaaaaagttacaaagaaatcaaacatcagccctgatatacccttctcccagcctacccaattttaggaagtctggtcatatgagaaataaattcaaccattttgaataca

SEQ ID NO: 7050 - DNA, 102 bp, Homo sapiens
aggctggagtgcagtggtgcgatcttggctcactgcaacccctgccttccgggtttaagcgattcacctgcctcagtctcccaagtagctgggattacaggt

SEQ ID NO: 7051 - DNA, 95 bp, Homo sapiens
tttattttttgagacagagttttgctcttgtcatccaggctggagtgcaatggcgcgatctcggctcactgcaacctctgcctcccaggttcaag

SEQ ID NO: 7052 - DNA, 963 bp, Homo sapiens
tggaccaggtgttcacgctggcggtgcgcgagacggaggccctgatcccgcccgaggtgcctccccgccaatgcccagcacacgaggctgtcggaaaggttcattggctaatttgccacagttggttttcaatacgtccatcccttttcctgatttccagagctcagtatttctacccagtgcctatttatttatttatttatttattgagacagagtctcactctgtcgcccaggctggagtgcagtggcgcagtgtcggctcactgcaacctctgcctcccgggttcaagcgattctcctgcctcagcctcccgagtagctgggattacaggcgcctgctaccagacgcagctgatttttgtattttaagtacagctggggtttcatcatgttggtcaggctggtctcaaactcctgacctcgtgatccgcccgcctcagcctcctaaagtgctgggattacaggcgtgagccaccttgtccggccctgaagcttatagtttttaatattctataattcctgaagttttcatagtctgcctctttgcttcttatttttcaggaaacaagttagtaactgaggggaaaagcaccacgatctcccggtgcgttgtttgcaagagtgcttcagcagtcagtgtctttcttgttgtttgccagataaagatattttgtctgcatatctgcatagcttaacagtaactcaggtgctgacgtagaagtaaagcatgtgagaatgcttttggatcatacacttttcacataataacaaatttttctcgaattggtttaacagtatcgttttatgctttttaaaatgtatctttgatatgagttgtttgtcatttgcacaagttaatgattttacctccccagctgcaacatatttttcaaatttaggaacccaacttaaccatctgaacatccttcttaaaaaaaataaagaagaaagctcacaacta

SEQ ID NO: 7053 - DNA, 963 bp, Homo sapiens
tggaccaggtgttcacgctggcggtgcgcgagacggaggccctgatcccgcccgaggtgcctccccgccaatgcccagcacacgaggctgtcggaaaggttcattggctaatttgccacagttggttttcaatatgtccatcccttttcctgatttccagagctcagtatttctacccagtgcctatttatttatttatttatttattgagacagagtctcactctgtcgcccaggctggagtgcagtggcgcagtgtcggctcactgcaacctctgcctcccgggttcaagcgattctcctgcctcagcctcccgagtagctgggattacaggcgcctgctaccagacgcagctgatttttgtattttaagtacagctggggtttcatcatgttggtcaggctggtctcaaactcctgacctcgtgatccgcccgcctcagcctcctaaagtgctgggattacaggcgtgagccaccttgtccggccctgaagcttatagtttttaatattctataattcctgaagttttcatagtctgcctctttgcttcttatttttcaggaaacaagttagtaactgaggggaaaagcaccacgatctcccggtgcgttgtttgcaagagtgcttcagcagtcagtgtctttcttgttgtttgccagataaagatattttgtctgcatatctgcatagcttaacagtaactcaggtgctgacgtagaagtaaagcatgtgagaatgcttttggatcatacacttttcacataataacaaatttttctcgaattggtttaacagtatcgttttatgctttttaaaatgtatctttgatatgagttgtttgtcatttgcacaagttaatgattttacctccccagctgcaacatatttttcaaatttaggaacccaacttaaccatctgaacatccttcttaaaaaaaataaagaagaaagctcacaacta

SEQ ID NO: 7054 - DNA, 188 bp, Homo sapiens
tttttttttgagacggaatctcgttctgtcacccaggctggagtgcagtggcaccatctcagctcactgcaagctccgccgcccaggttcacgccattctcctgcctcagcctccccagtagctgggactacaggcgcccaccaccacgcccggctaatttttttgtatttttagtagagacagggtt

SEQ ID NO: 7055 - DNA, 407 bp, Homo sapiens
agtagagacggggttttgccatgttggccaggctggtcttgaactcctcctgacctcaagtgatctacctaccttgacctcccaaagtgctgggattacaggcatgagccaccacacccggcccatagttgatttttttttttttttttttttttgagacggaatctcgttctgtcacccaggctggagtgcagtggcaccatctcagctcactgcaagctccgcctcccaggttcacgccattctcctgcctcagcctccccagtagctgggactacaggcgcccaccaccatgcccggctaatttttttgtatttttagtagagacagggtttcactgtgttagccaggatggtctcgatctcctgacctggtgttccaccctcctcagcctcccaaagtgctgg

SEQ ID NO: 7056 - DNA, 304 bp, Homo sapiens
gtctcccacagacggtaagagccggcttagagatctttgcctgcagcctccttctttgctctactgggaacatccactctgtctctgcccctcgaacatacatttctttcttgggctcttctcctttcccttttattttttttcttgagatccatcgccgtcttcagctcaccggttcttcacagcagctccggaggtgcccagtttccccgctctgtaccaggcgtgtggaggagggcactagggagggactcattctgggtaaaaggacaggggggtcgccctgtgccttccttatctctat

SEQ ID NO: 7057 - DNA, 1308 bp, Homo sapiens
ggatcagttctcttctgattgagcgcacggatggaatgattctcacaaaccctcgcagggctgctggctgacctcatctcgatactgaaccgcaagagaaacatgatctctctcctgtctcctcagtttgggaccattgccgtggcagcaagagaagcgggggacgttctcggcccctcgccctgagagtcgcgaggagaatcagtattgagcttttaagtgtcgtcttgcacaggtcgcaacctgtcttccatctgctttacgtgttgtttcttaaggctgagtgaattaacgatttctgtttatatattgtgtaaaatgcaagtcatttcaagtaacaattaagttgttttggtatactcccatgcttttcctcttggttctgctttagagagttagggtcttgcagtcatttttaaactcatttttagttctaccatcctcatcccaactatatatcgattttattgatatataggtttccttcccttagacaaaaacattttatatttggaaggaatcttggaagttcattgcaggaatgaagaaattgaagccaaggtgagctatattaagtacctgctacatgaaaggcataatgctaggtgctttgggagaccaaaagatgactcaaacatataaacatttttttttttcagtttcagttctctttttagatgtcacctcccaaagagtctttcttagaacacagtatctggagttgccctttcccaccattattcattatctcagtatcttccttgtcagcatagttactctgttaactttgccccttttgcgctagattgtaaattccaagtttgtcttgttcatagttggatccaggtttagcacagtgcctgacgaacagtaggtctttaattaacatttattgaaagattgattagatatatgcagaaataatatattacttgatcttaagttttaagtttaaccgagtcttaaattttgtgagcgcaggtacatactgtattagaaattatggctgggcgtggtggttcacacttctaatcccagcactttgggaggctgaggcaggcagatcgcctgagctcaggaattgaagaccagcctagacaacatggtgaaaccccatctctacaaaaaaatacaaaaattatctgggtgtgatgccacaaacctgtagtcccagctacttgggggggctgaggcaagagaatctcttgagcccagggggtggaggcggcagtgaaccatgttcatgccactgcactccagtctgtgtgacaaagcgagaccccgtctcagaaaaaaaagaaggaaaaa

SEQ ID NO: 7058 - DNA, 615 bp, Homo sapiens
aaagttcatacactgaccctcgcccctcgcgtcccccctcccccttacctcagatcaccacggatagtgaagtagggtgggggaagggagcaatggcaaagtggacgctcacggcaggggacagagtaaccaaaaagagtagtttctgggggagagagagaaggctggtgcagaggtaaaaaggaaagacggtgggcggatggagagatgagggcaagagagtgacagcagggagcgggcagagctggagaaggagagtgggcgagagccagaaaagaggaggcttaggagtaaaagggtagagggccaagggtaacagcccagggttggatccgggaccagggaggttatgaagtgagggctgggcatgggacagggccgcacaggtcgggtaggaggtctggccaaaaaggggttgggccaagaaggtggtcccgcccgaggatggctcagggagcggacggaaaggatccaattcctagcttcatggtgccttggcaccaccctcactcgcctgcaggatccgggctcgcactgccgccgccgccaatagcgccgccatggctctcggccgccctagctccgcaccccgcgcctctactgcccagaagcact

SEQ ID NO: 7059 - DNA, 442 bp, Homo sapiens
tttcctttcttccattctgatataattcagggtataaacacacacacacacacacacacacattctcacttctttggcatctaccacacctgccccagtgcccatttctctcccacctgaataaaaagcccccacaaagcctgaggtacatggaaaggagcagtggtctggctcccaggagtgtgagaagcagccatgttttcagaggctgtattccacttggacttggccctacgctgaaggtaggagcggatgggggaggcccccttcgcacaaagagccccatgaaagagtgcacagtccagtctataaaacagacgcagaaaatgtgtgtaggacttcttcctgaaaaagagcgtggtgcgtccagtacctccatgttcatggaacttcccagtctgcagtttacccttttgtgcaactcccttttggtaaagccctg

SEQ ID NO: 7060 - DNA, 1872 bp, Homo sapiens
gctggtgggctccaggtgcagagagcagggtgggcgtcagaccccaggtccactgtgcacgccctcttgtagagcccgttccgttgtccatgagatgaggagtgttcttatctctaaagtattatcatgaaaacctaacaatgtagaaagactaaagcacatgggtggtgcttcataaatagtatttctcccactttctgaaaactcctgctgaagtaactgcacaagaatccttgaacatttagaattctggttttagccataccataaagtcagtagtgcgtggtggaattctgctaacgaaaattgcgaaggatcaaggcagagtacagagctggtgtgtagcgggtaccttctgtctgctggcactaggtattttacacattaaatcagctcgttctcacatcagctcttttaaaaataaggaaatgaggagccacagtggcccaactgatgcagtggcagaagtagaatttgagcttgtgcagatgtgcctccgtgttttgtctcctgagcatgctgccccaagtttgacaataccaagatttgtactggaacattccctcccatccccaccccctagaagcccctcttcctcccttagatttgacacatagtttgaaaccactattaactaccttatgagagccactgtttgtgaagtgctgactatgtgccaggtcccgtgccgtgcaatttttgtgaattatctcgtgtctacagtgcctcacaatttctctgctcaatacctccatgttactgccgaggaaagggaagctcagagagagtaagtaatttgctcgagttaaagagctggccaggacagccaggggcttgcaccccggagccttcatccactacactgtcagctggtatctcaaccagccattacaggctgtaaaaaaattatataagatagtctatggtaatgcagaaaagtgaggttattttgctccctttccctttgaagaaaaaagccctggaaagacatatcacttgagtatgggaaaaaatgaagctgtggcttttctgtgagtcaattctttcctggcagcttcttggaataagaccaagtatagcagcagagttttctgttttaatttgagctgcagggtgactttttttcttctatgctttcatctctctgtggcttcttttgcctcgttaatttcatgccctgcccaggcgggctactgtgctgcccagtcacccgggtctggggcggccaccgctggccagcaggcaggccctccagaggcagaggtggccacgcttaggtcgctcccgctgtggaggcggcacacttgggtggcagcacagctgtgatgtggcggcagctggcagccccatgggaaagatgtgtgaagtgtggggtttgacgacccatgggagaacagactttcttcctcttcttgttttcccttcaaagccgtgagtcaacctcaaattctctgtcttttttctccaccccctcgtgcctctctccctcacgctctgcatctctcattgcaagcttgcatttttttgcacacaacactatcttaatatttctcttttctgcaggcaggaaatgagaagtcatttttcagggtcattcaggaagtcatccagagttataatggcccattatctactggtcagagtttacttaggctttcactacttccactgcccacttgaaacagggaaaaatattttccccccgcgctgtgagtgtgctatttagagctgaccacaagcggggggaagagaggatggctcggatgctgcatttccactgagaacacaaggctggcaaagcttgtctgctgcccagcaagcacttcaggctcacaccattttaggttcactttaagtagtttctcaattgtt

SEQ ID NO: 7061 - DNA, 808 bp, Homo sapiens
cctaagggcatacagcaaatggagaaacattctatgaatggaatcaaaaataactactaaatctaagtgagaacggcaagtgtgtggcctgtgagccacgacccactcctccaccatccaaactcactttctagagactaacctggggctctactctagggggtccagtcaagaagatggtcccctcttcccccagcccccagtgtagggtacatttcacccttcatggccagcctccagcatctctcatcacccagcaaatgagtcaggccaagaatacggacctgactgtcccactccagctcacccataggttggaggcttcatgctagagaggcaagcccggaagactagtgggggtaggtgggaagcaggcaatagaaactgcatttggagaggtccagatgtttgatttagccgacaaaagatttcaaaccagccattataactatattcaaagaactaaaggaaaccatgtctaaagaattaaaggaacatatgttaacaatgtctaaccaaacagagtgtcaataaaaagatacaaactatgaaaagaaccaaatagaaattctgttgttgaaaagaacaacaaccaaagtgaaaaattcaccagaagggctcaatagtaggtttgagacagcacaacaaagaattcgtggacttgaaattaagataatgaggctgcgcatggaagctcacacctgtaatccaagcattttgggaggccaaggctagtggatcacttcagctcaggagtttgagaccagcctgggcaacatggaaaaccccatctctacaaaaaaaaaaa

SEQ ID NO: 7062 - DNA, 450 bp, Homo sapiens
aggatcgtgctggtgtctgctggttgtcttgcagagcacaaccacacacagtgagcgtctgctcctcaacttgggtgctggtgcctgagctgcagctgcagttgcagccttctctatagatacacaaagatttaacgttccttaaacaaaaataactgaaaggacttctagagaatatccacttgtcttataaaaggactctcagcccagagagcttctgtgccttgtcgatagtggcagagctgggatcccaatgcttctgccctgctggtttgagtcacattctccatagagcagtttgcccttcccagttctgtgttagtcagccccgttctcacttgcatcctgcctcgagtcacttgagcagcctctgggttcttccacagctccttgttctctgaaatgaggcccatcctatgcctgatgccgaggctgctcttcactctccac

SEQ ID NO: 7063 - DNA, 540 bp, Homo sapiens
aggttttacagcttacagcttcagatcctgtcaacattgtctgtgattcagcttatgttgtaaatgtagcccattgcataaaagcttctacagttaaaagtacactagacccagaactgcttaatttgtttcacttattctcatatgctgcatgctacatgccaaacaggtgagacagctgttcatgtacagctacactgtcatcatttgctcatatggggctacctaaacaaaaactgacaagggacccacttaatctagtcatgcttttcaaaatttcttacagctttgggctataacccaaaaaacaggaattccttataatcctagaggacaaggcattatagaacaggcacatcaaatattacaacgcatgctgaaaaaacaaaaaaggggtataggaggccaactaccaccttaatcaaaactacatttagccttatttactttaaattttttgactgctggtatggatggtaagactccagcagaaagacattggcaaatgttagaggaaaagaggaaagtttatccaaaagt

SEQ ID NO: 7064 - DNA, 22259 bp, Homo sapiens
gctgccccaggaagaggctcagtgcagaaggaggaaggacagcacagctgacagccgtgctcaggaagtttctggatcctaggctcatctccacagaggagaacacacaggcagcagagaccatggggcccctctcagcccctccctgcacagagcacatcaaatggaaggggctcctggtcacaggtgaggagagaacttcctgggagaggacaggaggaggaagaagagtgactggatggggtctcctggagaggatggggttctaaaaaatgaaagaagccagcacttagggaggctgaggtgggtggatcacgagatcaggagttcaaggtcagtctggccaacacagtgtagccctgtctctactaaaaatacaaaaaattaaccaggtattgtcgtgtgttcctgtaattccagctactcaggaggctgtggcaggagaatcacgtgaacccaggaggcagaagttgcagcgtgccgagatagcgccactgcataccagcctgggcgacagtacgagactccgtctcaaaaaaaaaaaaaaaaaaaaaaaaaaaaaaaaaaaagagagaagaaagaaataaaaggaaagaaggctctgttggagcctggataggggaaaatataccagagagggacaggggtcaaaacaggaaaatcacattgaactggaattggtaagaggtaggaaaatcttaagtgttctgttttcctgattaatcatcaggggccacattttgaaaaatgataataataactatatcagatgacacttcaaataaaaatataagcaggacgtgaaacactgtcctcagcaaaaaacctcaacaattgggggagaaaaaaaaaaacaccaagggtgtggagggccctgagaagtctcacatctacaggagtctgcagcctgttccaggcactggggtgcaaccaagatcacaaaagtccctgtcctcactgagctcatgctgtcatggggaggaagacagacatacaaagagatctagaatgtgaggtcagctgttaacaagaaccctttagggagcagagcagggaaaggtcagaaagggaagacccagggtctctgaaggaggtgtcaggaaagaagtcttaggataccctgatgtgagcaggacctgatggggtcatgcggacccctggggaagaggattccaaacagaaaaatgccaaggtcacaagtggtgaaggaatgggggtcatgctgctgaccttgacctagtaggacagtagtacacacacacatacacacatacaaacacacatgccccttttgtgtgtgtgtgtgtgtgtgtgtgtgtgtgtgtgtgtgtgtgtgtgtgtcttcaaggctgaggattgaagagacctcctcaggacccagggccccatcttttcaccccaatacataggtctcaatattgtctgatgctctctccacctcctagcatcacttttaaacttctggaacctgcccaccactgcccaagtcacgattgaagcccagccaccaaaagtttccgaggggaaggatgttcttctacttgtccacaatttgccccagaatcttactggctacatctggtacaaagggcaaatcagggacctctaccattacattacatcatatgtagtagacggtcaaataattatatatgggcctgcatatagtggacgagaaacagcatattccaatgcatccctgctgatccagaatgtcacccgggaggacgcaggatcctacaccttacacatcataaagcgaggtgatgggactagaggagtaactggatatttcaccttcaccttataccgtaagtgattccacatgatccctgggtgttgggggacaggggtcatttctacttcacacacacaggattgtcaggcctagactgtgcctgtgtccctctctgcattatgtcccatgctggggtttgggcatttagtgcaggacacacacagaggagacacatttcaacagatcagaattcctttcccgcatccagaccctgcagacactcgctgcagaggaaggacagtctgatggggggactcagcaggaggagatcagtctcagccaagcacctcatgccctcttcataaatttgaccctgagaaagaccctggagaactgagcagggcttggcctgaggggtcccctgagatactctcagagaagctcagccctagaaacctcaacctccaaaccctgtccctaaatccttgctccagataaagcttaggagcctgtgccagggctgggttgtggcttcatgggcagggcttactgggaccaaggatttaccagctgtctgaggactgtgtctcctggagctgttcaccagctagggctcagccctcagagcctcatctgggcaatggtgtagaggacagaggtcaaaacaggagaggcagagtggagaggacagaaagacaatctttgaagaccatcagccaactgccttaggaggcttaggagagtccataggaagtctaatgtccccagaagcagaaacagaagacagaagatgtacctggtagcagcttgtccacagggatctgatgtaacggtgctttctcatggaagcaaattaataataaatgctgtttgtgtgaaacctccactgtgccaagcattagatcaagtgactgtgaatactttaacatttattcacagatagcatgaaaagccacagtccatttgccatttagcttatttgattgagagaaaactgaggcacaggaaggcacagtcactgaaccagagtcacaccaacacaaaggggagatcagggtcacatgaggtctgcctgcagccacaggcccttcctctcctccaccagaagtgagggcttactgggtcccaaggaccccatgtcatttattggctcaaatcctctcttcttaggcatccaaacctcagaggagtgagagcaaatggtcagctgattaatctgtactccagaactaaatcacctgcctcaactgtcagaatcagtgcaaaaaacatgagcaggcctccctctcagatcttaacccccatcactgaacctgaaaccctgtgtttcccaaagtgtccatgtcactgtcatgagaggatcaaggagaggaccttgttttctttccccactcacaccctgcatcagcacaggcccagtgagagacacacacactcaggagctctcacataacaaatgaaggaatggaatgaagaaatgaatgatccaaaacctctttagagactggatgttggatgcagaatcctaggaggtcctagccacacctgtcccttgtccttcagaagctgacacccatgtttcatccccccactacctcttgcccctaaagcaaccccacctcatgtaactctgaagctctttggccaccagagggttctcagggctccttggttctggactgtggaactgggggcagctggtccctggggtctctgacgtcagtgtagccctcactgctcactgccatggtgtctctgcctctctctgcttctctgtgtccctcatcttcctcccacttcattctgactggcaagccctgtcctgcacagcttcttccctcacacctaggccttccccagacactccctctaactaggctggctgttctgttcccttccttctaacactgtggcctagccaacctcccaggaaataggaaaggtgcagaaatcacctggagttgccactcctgccaggcttcatctcgagccaatgtccccaggtcactaagagaatgagcttccactgtattcccatcaagggctcttcccctttgtgaggctgacctgtggacaagaccatgggacagggataggaagtccctccaaccactcttatcattgtcagacaagttcttctggcctcctgcacacacacacaaaaaaattattgaaatggtgatttgtagtaaagaaagattttaatgactccaagtctgccaaacaggaggacagaggtttattattactcaaatcagcctccccagtggatcagggcttagagattttcaaggatagtttcaggggcacaggactgaaaaatgagtactgctgattgtttggtgatggaatcatgcgggcggagggaaatgatcagtttgtgctggaatccgcctctaggtagggaccacatgactggctgagccattaatcataggtatggatgaggtcagccagttgccagaatgcaaaagaatgagaaacatctcaaaagaccaatctcaacttctataatagtgatgttatctataggatcaattagttacaaattttgtcaactccagccaaatgacattggagcagtcagggattatagaaactgtgacaacaatttagcagaattcggttccctcctataatcttaatctcatggtctttcactagtttgacaaaggccgtccctgggcaaagtaagggtgttagttttatggaggaactattatcattcttgcttcaaaattaaaccataaactaaattcctcccaaggttagcctggcctatgcccaggaataagtgaggacagccagcctgagactagatgccagatggagtcagccatgctagtttgctgtcactgttgtaatctctgcaatgactcaccagggtgtcagaggctggacaggcctgcagtcccccaagcccatgggctcatatcacccatttcactcgtgactccatcctcaacctgctatagagctcacattctccagtcacttcctagagacttctggcttccggtcaggcatataacaagcttggaatttgtcactcggttccaacactaagtaaaaaagctaaggaatccctagcttgaggacgtgtcaatagaaatttccaaaactgaaacaggaaagttcaagaagagtggggaagaaaaagtggaacaactgattcaacttcatatttaatattttgttttgacagtagcaatttttaaattatgtagttgtgggacaaatacaaatgctgtaacgtacacgtaataggaatactggtggttttgaggaccagttggaggtgaccaggtgggtgctatctgatggttttactgcctgtgccacacacaagtgtttcctcatgatgatgccgttttcataagttggagttcttcttgtggggagacacatgagccattggcatctcacttagaatcttcctatttcacacaaacttaaactctagtggtgtttcctgagcttaagagaaaatgaagaaagcatttcacatacctgttttggggtcctccccatttttcctaactctgcacagaaattagaagcagggagttctttctatatttactaacataacacacatcacttcttttaatttggcatccttcctccctttatgtaattgatgcactgaccagttctgtccttttaacgggactctctctacttaaggagctgctaatttccaatcacctttggcatctttctttgagcataatgtgatcctgctggaattcacggcacacctaaaccttattttggtctcaggagaaatactactaccagcaattgatcttagatgtttggatcatcagtaaaaatttccacttatgaaaacattttaatatttcctccaaattttttttgttactagagtcagaacataacatgaggtctaaactcctgacaactttttatgggaaaattacagtattacgaattgagcatcccaaatccagaaatccacaatctgaaatgctcaaaactcaacccttctgaccactgatgtgatgctaaaaagaagtgctcactggcgcattgtggattttaaatttttcagatttgggatgctaaaccagtacatatacggcaaatattccaaaataaaaaaattagaaatccaaaacactttgttttaagctttctgcataaggagcactttatctgaatgaactataggcacgaggctgtacaggagatctctagaacctccttatcctgcataactggaaccgcacacccacagaacaacgccctattcccctgatcccagctcctggaaactactattctactctctgattcactctggaatccactgatatgaggtacatagggtagttaaactcagaaacagagtagaatatctaatgaaagtatctgcaagacttcttcccaaatattggtctaatatccaccaaacacatatggtccatgagggccagacttccatcatcagttcatgttcaccctttccaccagtcagtttcgcatttgcaaacatccacatgtatttctagaaaggtccacatcgtcctcacctgccctctacagggggaagggagcattgtggacccagaacagggcacatggtcttgttcagaagctatcagctcttgcctgtccccttcactctttgtaggtcattccttggactctgctctatctttagaggtcactggctcaagtcactcactatgagacacctgggaaaactgccccaccttgtggctccactgcctgatgactgaactgacctccaggcttgactctggtctcccctgtgttatttatgctgaagtacccagtcccaggccaggctttccagtacccaaagggtttaaagacaatgggaagttccatcattcatctcttggatgtccttggcaagggaagctgcagagaaaacatacctcagggggcaaagtaagactgaaactaagaagattccagcactgcatgctccaagtgaggaccacaaggtgggccaggcaggcacttcgagatggagggactcagagaggcaccaggggctgtgactgctggtcctgtgtctttccatgacccaatgctgctgctcaatacacacctgagaaagtctgtgcttctcccacataaagcaggcagcctcacaatcactgagccctcagattgccatgcatctgtcttgtaacacacacacctgccatgggcttttaaggacttgggtgggctgagaggtgggaaatgccaactctgattgaaaaatgcctttggaggaatcaaaggtgccacacagggcaatcttctctctgttttctgcacagtggagactcccaagccctccatctccagcagcaacttaaaccccagggaggccatggaaactgtgatcttaacctgtgatcctgagactccggacacaagctaccagtggtggatgaatggtcagagcctccctatgactcataggtttcagctgtccgaaaccaacaggaccctctttctatttggtgtcacaaagtatactgcaggaccctatgaatgtgaaatacggaactcagggagtgccagccgcagtgacccagtcaccctgaatctcctccgtgagtatcttctgttcctctgtgggccagactgccatcccaaatacacatggccagaggccaggcctctcagtccctctcaggtccaagtacagagacctttacccctaggcatcaaagctggccatgactttctgccccaggcaaaccagaataggcctaggcttgatccacaataggagaaaagaggctcctcctgtcataggagactcagggtccacagcttgtgatgggagaaacaggtgaatgtctcaggctccagatcagtgaacacagcggggatttggctgggagttcagtgttgcggcttggctcacagggtcactgtggcccttccacagaccaggattttcccttccctctgacaatagtgcctgtgactttatgctctttgctccagatggcctggatgcccccaccatttcttcctcacacctattaccatacaagggaagtccccaagctctcctgcctcacagacactcacccactggcagagcattcttggctgattgatgggaagttccagcaatcagcacaagtgttctttatccctcaaatcactaaaacatatagagggctctatgtctgtttcatccataactcagccactgctggaacaaatctcataatcaagaggaccatagtccctggtaagtggatccctgaaacattggcaatatgttttccagtgaagtctatctagctatcagggaagagccacctgccctctgcaaagggagagggaaaatcaaaaccccaggacagggaatatgtttctgctccaaaaccaccagcttttgcctgtcccctcactctttctagatcattctttagactatacactaacaatgaacaatctgaaaggaaattaaggaaagaaattcaattcacattaacatcaaaaggaataaaatattttggaataagtttaaccaaaaaggtcaaatgattataccttgaaaactacaaaacattgctgaaagaaattaaagacgatatcaatatatggaaagacatttcattttcatggattggaagactcaatattgttagaaagacaatactacccaaagtgagttgcagattcaatgcaacccctcccagaatcacagtaacatttttggcagaattagaaaactccgtcctaaatctgacctgacaggctcttattaatgactgccacaacagaaacactgtgaaaaagatgcaaccatgaaaaggtggaaagttctgatgacacagaaaatagcaatcagcctttctcacatcccaaagccttaaaaaataaacgagtgcagcatggccagtatggaattgaccgaaaactaatcaccaagccagaaacgtggtgagagaaaaaaaagggcaagaatatctttggcttatcacctcccacttttgcctactaatctgatgctgaaaagaaatgctcactggagcattttagattttgaatctttcagatttgggatgctaaaccagtaagtatatgacaaatatttcagaatcaaaaaatgtcagaaatccgaaacactttttgtcttaagtcttatgcataagaaatactcaatctgtgtgaactataggcatcaagctctacagcagatctctagaaactccctaccttgcataactgaaactgcacacccatgaacaacttctgattctccccactcccagctcctggcaaccagcagtctcttctcatattcactctggaatccacttacatgaggtccctagagtagtcgaacccagggaatcacagagtagattgttcaatgaaagaaaatatttgaaaaacttctctccaaatttgtctcatatccatcaaacacacatggtccatgacgaccagatttccagcagttcattcccaccctttccaccagtcagttctgcttttgcaaatgtccgcatgtatttctggaaagatccacatggtcctcacctgccctctgcagaaggagaggaaacttaaagaacccaagacagggaacatgcttctgctccaaagccaccagctcttgcctatccccttcactctttctagatcattccttgcactctgttctatctttagaggtcactggttcaagtaagtcatcatgaaacacctgcaaaaagctgccccaccttgtgcctccactgcctgatgactgaactgacctccaggcttgactctggtctcccctgtgttatttctgctgaaacatccagtcccaggccaggctgctcagtatcttcagggtttcaggacaatgggaagtcccattattactgatctctagaatgtccttggaaatggaagctgcagagaaatcacatctaggggggcaaagtaggatggaatttggaaggggcccagcagttgcacattccaggtaaggaacccaaggtgagccagccagtcaactgattagggagagactgggaggggtactggggctgtgactcccactgacatgtctgtccatgacccaacactgctgctcaattgacacttcagaaagtctgtgctttcctaagacagagcaggcggcctcacagtctttgagcccttagatcatcatgcatctgtcttgtgacacacacaccagttattggctttcaaggactcaggtgggctgagaggtgggagatggtaactctgattgaaggatgcctgtggaggaatcaaaagtgccacacaggacaatcttctctctgttatccacacagcgaagctgcccaagccctaaatcaccatcaacaacttaaaccccagggagaataaggatgtattagccttcacctgtgaacctaagagtgagagctacacctacatttggtggctaaatggtcagagcctcccggtcagtcccagggtaaagcgacccattgaaaacaggatcctcattctacccagtgtcacgagaaatgaaacaggaccctatgaatgtgaaatacgggaccgatatggtggcatccacagtgacccagtcaccctgaatgtcctctgtatcttttgttcctctgtgggccaggccaccagcttaaatccaaatgaccaggggccaggcctctcagtctctctccggtccaagtatagacaactttacttctggacatccaagctggccatgactccctgccctgggaaaacctgggtaggcacagccttaaccaagaatataaggggagtggacggtcttgtcgtgggagacttggggcccacatcttgtggtgggagaaacaggtgaatacttcagggttcggctcagtgaacatagagggggttttgctgggacttgaggatgtgtcttgtctcagagggtcactgtgtccctttaagagaccaggagcatccccttccctcagatggcatcacctgtggctttattctctttgctccagatggtccagacctccccagaattcacccttcatacaccaattaccgttcaggagataacctctacttgtcttgcttcgcgaactctaacccaccggcacagtattcttggacaattaatgggaagtttcagcaatcaggacaaaatctgtttatcccccaaattactacaaagcatagcgggctctatgtttgctctgttcgtaactcagccactggcgaggaaagctccacatcgttgacagtcaaagtctctggtaagtggatcccagcatccttggcagtagggttttaggtggagtctatctggctttcagagaagagtcaggaaaacatttttattcccagcctgtgtcccatgggcaaaagcaaatcccaaattctcctcctgaaccctcccaatttgtctctacaaactctcttctccttgtttttctgttttctcatggctgaccttgtgtctcgcctgagaaaggtagggaggggtcattatcagccctgagccctatgtggtagaagaggcttcacagagggacaagaaggagtgtcctcaagatcaagttgcttctggatgtcactaacacatccccttctgccacgtcttttttttcttgtacctattccatgagctacaaggaacatctgaggctttgaaacaagctcacacttttcccccaaatgagaggaggaagccccttgggtgagggaggagcagctcagactctgcttcctgctctgctctgggctcctctggtgactggccctgtttgactccacctggggtgggaccagcatgtgtggagaaagaccccttgtggactgtcctgaatttcgctaaatggagctgccagttgaagccaagcctcccccgggccaggctgcagggaaatgagaagagaaggagcctcagggcagactcctaagcctggtcctggctctgaagtcagcggttgtatgaagctgtgggcacagtacgtgggacacagcatggaggactgtgactgatgcagagctagagaaatagggagattcacccctggagctctgcatggcaggaaaagggcagtgccaaaaagtgtgtaattatagagagggtaagactaccagacactttatatatatctaatataaggcttaccattagctatttctaagtgtgcaatttagtgttgtgtaaccatcacactatccatttccagaactttttcctcttaccatattaaacctctgtacccaataaacagtaactctcactccttctccctcgaacccttagcacccaccattctaatttctgtctctatgtaactggctattctaactatcttttataaatggaattatataataattatccttttgtgtctggcttatttcagttagcataatatcttcaaggttcatccattttgcacgatgtattggaattttattccttgttaaggttgaataacatttcaacgtatagacacacctcatttgcctacccacttatctttcaatggactttttggttgtttccattttttcgctagtgtgagtaatgcttctctgaacatcagtgcacaaatatttgttcaaatttctttcaattctatggggagtatgtccagaagtggaattgctggatcaaacggtaatttattgtttaattttttgagaaacagcacaccaatttttacagtggctataacatttcccattcccatcagcaatgcactagagctccaatttttccatctgcttgaaaacacctgttgttttgtgttgctgtcattgttgttgtttatcaaagccatcctaaagtgtgtgaggtggtgtaacattgtggttttgatttgcacatctctaagtattcatgatgctgaggaactttgcatgggcttactggatatttgtgtaacctccttggagaaaactccattttaatcttttgttcattttttaattgggttttcggatgtttgctgttgttgacttgtagcttttcatgtattctggaaattaatttcttatcacacatataatttgcaaatatttttatcatttcatgggttgcctttttactttcttgataatgttcttcgatatgtaaaaggttttgatttttatgaagtccgatttatccgttttatttgttgcctatgcttttgttgttacaaccaggaaatcattgtgaaatccagcatcatgaagcttttcttctaagagttgtacagtttttgctcttacatttagatctttgatctattatgggttgatttttgtacatggtgttatgtaaaggttctagttttcttgcccttgaatatccagctttcccaatatcatttggtgagaacactgtcccttccccattgaatgatcttggcacactcgatgaaaatcatttggccatatatgcaagaatttctttctgggctattatacttcattaatttctatgtcctcctttatgccagtaccacactgtattgattactggggctttgtagtaaatgctgaaatcagaaagtgtgagtcctccagcttcattcttcctcctcaaagctctgtgtctatttagtcatgagatgcaatataaattttaggacagatttttgtttttctgcaaaaatgtcactgagattctgattgataggaattgtattgaatccgcagctcactttgggtagcactgtcctcctaacaatattgagtcttccaattcatgaaaacaaaatgtccttcaatttattgatgtcatctttcatttctttcagccatattttgtagatttcaggtataatcatttcacctctttggttaaacttattcctaaatattttattctttttgatgttaatataaattgaaatttttttcctaatttcccttcagactgttcatggttagtgtattgaaatacaactgacgtttgaatgctgattttctattgtgcaacgttactgaatttatttattaattctaataggtttgttccacctttaggattttctacatataagttcaagttatctataaacagaaataattttactccttccttccaatttgaatgtctttttttaaattcttgcctaatttttctgactagacctttcaacactatgttgaataaaagtgtcaaaagtgggcatccttgtcttattcctgctcatacagggaaagctttcagtctttctccgttaagtatgatgttaccattgggtttttcacatattgcctttatgttgaagtggtttccttccattcttacaatgtttttcttatgaaaaaatatggaatttcatcaaatgcttttattgattcaatcttattagtgattatagttttattcatatttttgtgtgtttctaggagtttgtctatttcatctaggttatccaatttattggcatacaattatttatagtactttcataatcattattttattagaattggtagtaatcgcttcatttttctttctttctttctttctttcttttttttttttttgttgaaaagagagagacaggctgtcactctgtaggccagcccaggatggaatacagttgtgtgattatggctcactgcagcctcaacctcctgggctcaagcaattctccttcttcagcctctcaagatgctaggactacaggtgcatgtcaacatgcccagctaattggttttttatttttttgtacacacagcgtctccccaggttacctatgctggtccaaacacctggtctcaagaaatccttctgctgtgacctcccaaagtgctaggattaaaacatgacccaccatgctcagagtccattttcatttctgattttaggaattttaaacttttctctttttttcttagtcaatctagttaatggttgtcaattttgttgattttattttgaagaatcaacttttggtttcagtaatttcctctattctgtttccgttctccattttatttatgtccactctaatccttattatttccctcattcactgtgcttgggtttagtttgttcttctttcatatcctgaagtattaaagtaggttgttgatctgagatctttcttcttttttaatgtaagagtttacagttataaatttcttgcacaagactcaacttctctgaacctctgattccttacctgaatattgcaatgacagtgctttcttcataccattcttttaaagatttaatgcagtcaatgaaacaagatgccacacacagaggaaccaatgtcagctactatattactatcatcatcatcaaccttgaggtcaaatagtcctagaatgaaatctcagatccccctgtcactagccatatgacaccaggaaagtttttacaccacgctaagcttctgtcttttcattgccaaaatggaaataatgtctacctgacagggttattgtgtggattaaatgagatacagggaagtatttagcacagggcctggcacatagcaagtgcccctcaacagtatctacctttttccatatatatatatatggaaaaagaggtaacacataaaacactaggacatggttactgactgcttgtgggagagaaagaaaaaaagctaagggcaaagaatcaagcctggtatgttagtatttaccaactgagatgcatccaagatgggattagacatacaagataatttatcagggaagacatctgtgagggaatgtggggcaggcatgaaggtagtatgggagaacccacagaccactatgcagagctgattcctatgaaaaacaaagagaaagaagttttaggtaccaatgcagttctaagagtttttgcaaggctgatgaggaatcctccaaccagtcacccattagagttaaagagagcctcggagaactaggcttgctttcacacccttgctgggagcctgtaggaaagaagctttctgtgcacaagaggtggtgaatttgaaatgcactgacctgggccttctgccaatcaggtccctgccatggagacctgacagagtctcattcatgactgccacaacagaaacaccgagaaaaagatgcaaccatgaaaaggtgaaaatgtggcaagttctaatgacatagaaaatagcaatcagcctttctcacatctgaaagccttccaaaatatctgagtgcagtagagaattgacagaggactgatcaccaaccgagacacatggtgagagggaaaaaaaactgcaagaatataatcatctcccatcaatattccaagagaaataatgtggtccttgaagaaacaattatagagtacctcatgttacatgcttgttcctgatgctcccccatgtaaaataacatcaccttcattccttctttacttttctttccatgacagcttctacaagaataggacttcttcctctccttaatccaacatagcagctgtgatgtcatttctgtatttcaggaagactggcaggtatgatggccttttctcttatcctggttcctgcagagctgactgccatgcttgggagagggaaaagacttatttgcctgtatctgggactgcatctcctccttcctccactaaactcctgcttctcagcactaattcctgcagttccctttctccctggcctttatgctccctgtaccccactgtcttttagacataattatctccagcctctgctcatttgtttctcagattcaaatgagaaacacaatttcacatggtgaaaccctcttcattatttttaacatctctcaatagtgtaattctctccattcccataaagctcaaccacttctcaaagtattgcttgacttcttgtctccagactttgaaatcttccttgcatatgattgcctcattacctttctaaaatctggttaattgatttaatcaagaatctgcaggggtctactctagcctatttgataagttcacatttcttctatttactaaggcttctcacttcctttacctctacttcctagtataaatcctccatcctaattagaactgtcttcctacacatccctgccccttcacccatatagacataaaattcttagttccaatgctatgtctaaaaacagagtgaaatcccttcaaccatctgcactgcagacttaaccacacccttcatcacaagcaacatgtgacctcgtggagaacaaagactttaggattaacatgtgaacctgagactcagaacacaacctatgtgtggttgagatcttttcctgatgatcagttcatgtgttcaaaaaacatacagaaatgaagaaggcaaggtccctaccccaggagacataaagcctaagacaggaaatgagacctgaaaataatcatgataccaaaatagaaaaaattgaatgccacaagaaatcagagaaatctgatgggaaatagagctacacattggaatcactggaaaacatttctaaaagtggatgctcaagccccacccattagttccagttcaaaggtctggagagggacccaggcactggtaatttttaagtcttccctgacactactaacacgtaacaaggatggagaactcctgttgcaataggtagaacttaaaactaaatcaatgattttcagctaaaagtactggaattacctaaggacctttttcaacatacataagactatacatttttggccctatttatgaatgggctacaccaagaactcagtaatcctcttgagaaacagaagctgaacggaaaagccaccttattttatatattaaatttatagaaagcattttcaaataagggataagtgatgctaaaccttctctaaataatatttatgggaatgttaataatatgagtattctaggctgagcgcgatggctcacgcctgcaatcccaggagtttgggaggccgaggtgggtagatcacgaggtcaggagatcgagaccatcctggttaacacggtgaaaccccatctctactaaaaatgcaaaaacaaaattagccgggtgtggtggcaggcacctgtagtcccagctactcaggaggctgaggcaggagaatggcatgaaccgcggaggcggagcttgcagtgaactcagatggcaccactgcactccagtctgggtgacagagtgagactccatctgaaaaaaaaatttttttaatgagtattctaaaaattatatgaaatttctgaaaatcaaatatgttatcatagtgtcatatgccacagaagtaactagatttctatgtgagctgtgtctttaccataataaattctcattagatttttaaccatagtcagtttaaatctctgtcattcccagacagttgctttgattcttcctcaaactacttacaatcacctacagtccaaaattgctttttcttcaaggagatttatggaaaggtctcttacaaggactcttgaatacaagctcctgataacttcaagatcataccactggactaagaactttcaaaattttaatgaacaggctgataccttcatgaaattcaagacaaagaagaaaaatactcaatgttattggactaaataatcaaaaggataatgatttcataattttctatttgaaaatgtgctgattcttggaatgtttcattctccagatttatgaacattttttcttgagcaattggtaaagtatacttttgtaaacaaaaattgaaacatttccttttgctctctatctgagtgccccagaattgggaatctattcatgagtattcatatgtttatggtaataaagctatttgcacaagttcagtaagaatctgctctctttataacaggacacatttgaaaacattgattatattatcaaggctttgactgggatgttatatttgagaatatacatagaataaacccatagggaatgcaggcaaagtctgaagtgggccttggtttggcttcctagtctcaagaggtttttggaagtttaatctgagattcttattaaaaacttctagcaaagcaaagtttaaaaatggcctctacagtccattgctactcttgccgcacttaggtaaaaaatctgggcaagttcggtgagactcaaccaaatttgcaaacaaattcatcctactggaattatctttggtaaaaatagagactcctatagagagaaaaactatgttgaaaagaaaaactgtagtacacctgttaccagattgaaccactgttcattatctttgagtatttataatccactggtagactggactggaccctgaattcttttagttcttccaattcaattttctccaatgaaatcattaagaacaagagtggctctgttcctgaagccatataaggtggaggtggacaactcaatgtaaatttcatgggaaaaccctcgtgtctgaggtgggggccactaagagctcaccacatgttcaacaccataacttagagacactcaaactgcaaaccacgacaagttgatgactttacactgtggacagcttttctcaagatgtcagaacaagactatcaatcatgatgagactcttacctctcttaatttgtccttgcttatgcctgtctcctttgcttcccagaataatgctgtacttaggatttcacaagaagtagcttctgagagtaagttaacagtgtcaggtatatcatgtcaaccatacttttttttttttttataagatggagtttcgctcttgttgcccatgctggagtgcaacggcacaatcctggctcacggcaacctctgcctcctgggttcaagtgcttctcctgcttcagcctcccaagtagctgggattacaggcatgcaccaccacgcccagctaattttgtattttcagtagagacagggtttctccatgttggtcaggctggtcttgaactccgacctcaggttatccgcacgcctcagcctcccaaagtgctgcgattacaggcgtgagccaccacacccagcccacccatttttacataccgagagatcctttaatccacccaaaggctgacgttagctgcacctgtaacacaactttttcctcaaatgtatggagatttttttaggcttccacttctatacttgcctattctcactccctgttttaatttaacatacacatgcaatgctagataatagaattgctctctatcagctgaacaggggggagcctgtgcagtttctcacccttcttgttgcacatggataaatacatcgggttttatagagactcagctgtaaaaatcatgaaatgtgctgcctggttaaaatgactagactcttctggcttcttccttgatctatcctattgcagttggtttgcatcttgcctaaggtgcatattccaaactcttgatattttcctcctgatagtcatactggtagtctccctcgtgtggtgcaatctacagatgtttttattggtgtgcagccattcttcaaatatcaaatggtttctcttgggctggaattacaaaaactcaaagaaatgtgtgatttatgggctgggcgctgtggctcacatctgtaatcccagcattttgggaggacaaggcaggcagatcacaaggtcaggagtttgagatcagcctggtcaatatggtgaaaccctgtctctactaaaaatacaaaaattagcagggcatggtggcgcgcacctgtagtcctgtagggagaccccctgaaactattgctacagaataaaagatgaaatgctcctgattattgtaaatacaaaattgcatgcaggattgtgtaaagacaatgccaggttgggctgccagaatgagcctacagcgcgtgatgtgcttctgttatatggatgggagatagaattatgagtttagaacacagattacaaatgcaacgtgattggaatacttctgatttttgtataactccgttccaatataaagagtcttttcacaattgggaatcagtaaaatgccatttacaaggaagtgaagataatttaagtttagacataaacaagctgaaagaacagatttttgaagcctctcaagcacacttatctgctttacctagtgctgaagttttagacagtatctctgaggggttatctaatctcaacccctttcaataggtaaaatctttgggaggatccactatcgttaattttgttctgtgtataatttgtgctattggtttactgttcgtgtgtaaaattggaaaaaatattcttcaatccaatcgtgatcagtgccaacctatgattgctatggttcattgaaatcagagaaaagggggagatgtagggagaccccctgaaactattgctatggaataaaagatgaaatgctcctgattattgtaaatacaaaattgcatacaggattgtgtaaagacaaatgccaggttgggctgccagaatgagccaacagcatgtgatgtgcttccgcctgcagagagcctatgaatggacatgcagtcagggaggtttcacataaccaagattcctatcccagaaaagcagatgtccatagctctgggaatggaatgcgacccttgtggacagcttacaaatgaccttaaatccctcactaacctaccaacactctcactaaacttaataataaatgctggtatatccagtgcattggtagcatcgcaggaccagaaggcagtgacccctctggacccagttttcactatcttgtgtgtgtcttttatttctcaacctgccgatctgcctgggaacaaagaaagagccctgttgcattgcaagctgctggccagatcccgcaatatagtcccagctacttgggatgctgaagcatctgtagagggagagctgccccaaatcataaatcaaaaataaaagccaattacatcaataactaaattagttgtaattttgtcttatcacacatgttcacaggaagtaatggccagtggagtctctcaggctgcatcattctcaccctgaccctcctgcctttctctttcacttacaaggacccttatgatgacactgggagccacccagataagtcagaataagctttccttctcaagatactcaacttcatcacctttgaacagtgtttttgccaagaaaagtaaatgcatgtgttccaagagttaggatgtggatttttttttttttttttgagacagtttcactcatgttgccccagctggagtgcagtggcacaatctgggctcactgcaatctccgcctcccaggttcaaatgattctcctgcctcagcctcccaagtagctggcattacagttgcccaccgccacgcccagctaatttttgcatttttagtagaaatgtggtttcaccatgttggccaggatggtctcgaactcctgaccttgtgatccacccgtatcagcctcccaaagtgctaggattacaggcatgtgcccctgcacccggcctggatgtggacatttttaagaggccattattctgcctcatatgggtcactttcataaacatcacccacaacaaaaatgttttgccttccttccacgtctcacttttctgtctgcacaaaccacagtgaagcacactagctctgctatgaagtggc

SEQ ID NO: 7065 - DNA, 8481 bp, Homo sapiens
attgaaggatgcctgtggaggaatcaaaggtgccacacaggacaatcttctctctgttatccacacagtgaagctgcccaagccctacatcaccatcaacaactcaaaacccagggagaataaggatgtcttagccttcacctgtgaacctaagagtgagaactacacctacatttggtggctaaatggtcagagcctcccggtcagtcccagggtaaagcgacccattgaaaacaggatcctcattctacccagtgtcacgagaaatgaaacaggaccctatgaatgtgaaatacgggaccgagatggtggcatgcgcagtgacccagtcaccctgaatgtcctctgtgagtatcttttgttcctctgtgggccaggacaccagcttaaatctaaatgaccacaagccagtcctctcagtctttctccggtccaagtatagacacctttatttctggacatctgagctggccatgactccctgcccttggaaaacctaggtaggcacagccttaaccaggaatataaggggagggggcgctcttgtcatgggagactttgtgtcaatagcttgtgatgggagaaacaggtgaatacctcaggctttggctcagtgaatatagtgggggttcggctgggacttgagggtgtgtcttggctcagagggtcactgtgtccctttaagagaccaggagcatccccttcccttggatgacatcacctgtggcttcattctctttgctccagatggtccagacctccccagcatttacccttcattcacctattaccgttcaggagaaaacctctacttgtcctgcttcgcggaatctaacccaccggcagagtatttttggacaattaatgggaagtttcagcaatcaggacaaaagctctctatcccccaaattactacaaagcatagagggctctatacttgctctgttcgtaactcagctactggcaaggaaagctccaaatccatgacagtcgaagtctctggtaagtggatcccagcatccttggcaatagggttttaggtggagtctacctggctttcagagaagagttaggaaaacatttttattcccagcctgtgtcccatgggcacaagcaaatcccaaattctcctcctgaacccttccaatttgtctctacaaactctcttctccttgtttttctgttttctcatggctgaccttgtgtctggcctaagaaagttagggagggggctttatcagccctgagccctatgtggtagaggaggcttcacagagggatgagaaggagagtcctcaagatcaagttgcttctcgatgtcaccaacacatccccttctgccatgtctttgtttccttgtacctattccatgagctacaaggaacatctgaggctctgaaacaagctcacacttttcccccaaatgagacgaggaagccccttgggtgagggaggagcagctcagactctgcttcctgctctgctccatgcttctctggtgactgggcctgcctcactcaacctggggtgggaccagcatgtgtggagaaagagtcctggtggcctgtcctgaatttggctaaatcgagctgccagttgaagccaagcctcccccgggccaggctgcagggaaataagaagagagggagcctcagggaagactcctgcgttgcgtcctggctctgaagtcaccggttgtatgaggttgtgggcacagcatgtgggacacagcacggaggatagtgactgatgcagagctggagaaatagagagattcacccctggggctctgcatggcaggaaaggggcagtgccaaaaagtgtgtaattatagagagggtaagactaccagacactttatatatatctaatataagacttaccattaactatttctatgtgtgcaatttagtgttgtgtaaccatcacactatccatttccagaactttttcctcttaccatattaaacctctgtacccaataaacagtaactcactccttctccccataacccttagcacacaccattctacattctgtctctatgtaactggctattctaactatcttttataaatggaattatatgataattatccttttgtgtctggtttatttcagttagcataatatctttaaggttcatccattttgcacgatgtattggaattttattccttgttaaggttgaataacattttaattgtagatacacctcatttgcctacccacttatctttcaatggacttttcagttgtttccattttttcgctagtgtgagtaatgcttctctgaacatcagtgtacaaatatttgttcaattttttttcatttctatggggagtttgtccagaagtggaattgctggatcaaatggtaagttattgtttaattttttgagaaacagccacaccactttttacagtggctataacatttcccattcccatcagcaatgcactagagctccaatttttccatctacttgaaaacacctgttgttttgtgttgctgtcatttttgttgtttatcaaagccatcctaaagtgtgtgaggtggtgtaacattgtggttttgatttgcatatctctaagtattcgtgatgctgaggaactttgcatgggcttattggatatttgtatatcttccttggagaaaactccattttaatcctttgttcattttttaattgggtttttggatgtttgctgttgttgacttgtagcttttcatgtattctggaaattaatttcttatcacacatataatttgcaaatatttttatcatttcataggttgcctttttactttcttgataatgttctttgatatataaaaggttttgatttttgtgaagtccaattaatccattttatttgttgcctatgcttttgttgttacaaccaagaaatcattgtgaaatccagtatcatgaagcttttcttctaagagttctgtagtttttactcttacatttagatctttgatctattgtgggttaatttttatgcatggtgttaggtaaaggttccactctcttgcccttggatatccagctttcccaatatcatttggtgagaacactgtccgttccccattgaatgatcttggaacactccatgaaaatcatttggccatatatgcaagcatttctttctgggctatgatatttcattaatttctatgtcctcctttatgccagtaccacactgtattgattactagggctttgtagtaaatgctgaaatcaggaagtgtgagtcctccagcttcattcttcctcttcaaagctatgtgtctatttagagtcatgagatgcaatataaattttaggacagatttgtctttttctgcaaaaatgtcactgagattctgacaggaattttattgaatctgcagctcactttgggcagcactgtcctcctaacaatattgagtcttccaattcatgaacacaaaatgtctttcaatttattgatgtcttctttcatttctttcagcaatattttgtagatttcaggtataattatttcacctctttggttaaacttattcctaaatattttattctttttgatgttaatataaattgaaattatttttcttaatttcccttcagattgttcatgtttagtgtattgaaatacaactgatgtttgaatgttgattttgtattgtgcaacattactgaatttattaattttaattggtttgttccacctttaggattttctacatataagttcaagttatctgtaaacagaaagaattttactccttccttccaatttgaatgtctttttttcaattcttgcctaatttttctgactagacctttcaatactatgttgaataaaagtgtcaaaagcaggcatccttgtcttgttcctgctcatacagggaaagctttcagtctttctccgttgagtatgatgctagcattgggtttttcacatattgcctttatgttgaggtggtttccttctattcttaggatgttttcattatgaaaaaatattgaatttcatcaaatgcttttattgattcaatcttattactgattatagttctattcatatttttgtgtgtttctaggagtttgtctatttcatctaggttatccaatttatttgcataaaattatttatagtactttcataatcattattttattagaattggtagtaatcgcttcatttttctttctttctttttctttttttttttttttgaagagagggacgggctctcactatgtagaccagtccaggatggaatacagtggtgtgattatggctcactgcagccttaacctcctgggctcaagcaattctccttcttcagcctcccaagatgctatgactacaggttcatgtcaacatgcccagttaattggttttttatatttttgtagagacagcatctccccaggttacccatgctggtccaaacacctggtctcaagaaatccttctgctgtgacctcccaaagtgctaggattaaaacatgacccaccatgctcagagtccattttcatttctgatttgagtaattttaaacttttctctttttttcttagtcaatctagttaatggttgtcaattttgttgattttattttgaagaatcaacttttggtttcattaatttcctctattctttttccattctccattttatttatgtccactctaatccttattatttccctcattcactgtgcttgggtttagtttgttcttctttcatatcctgaagtattaaagtaggttgttgacctgagatctttcttcttttttaatgtaagagtttacagttataaatttcttgcacaagactcaacttctctgaacctctgattcctcacctgaaaattgcaatgagagtgctttcttcataccattcttttaaatgtttaatgcaatcaatgaaacaagatgccacacagaggagccaatgtcagctgctatattactaccatcatcattagccttgaggtcaaatagtcctagaatcaaatttcagatccacctgtcactagccatatgacaccaggaaagtttttacaccatgataagcttctgtcttttcatcagcaaagtggaaataatttctacctgacagggttattgtgtggattaaatgagatacaggtaaagtatttagcacagggcctggcacataggaaatgcccctcaacagtacctacctttttccatatatatggaaaaagaggtaacacataaaacactaggacatggttactgactacttgtgggagagaaggaaaaaaagctaagtgcaaagaatcaagcctgatatgttagtttttaccaactgagatgcacccaagatgggattagacatacaagataatttatcagggaggacacctgtgagggaatgtggggcagacatgaaggcagtatgggagaacccacagaccactatgcagagctgattcctgtgaaaaagaaagagaaagaagttttaggtaccaatgcagttctaagagtttttgcaaggctgagggggagtcctccaaccagtcaccctttagagttaaagagagcctcagagaactaggcttgctttcacgcccttcctgggagcctgtgggaaagaagctttctgtgcaaaggaggtgatgaatgtgaaatgcacggacgtgggccttctgtcaatcagctccctgccatggagacctgacagagtctcattcatggctgccacaacagagagactgagaaaaagatgcaaccatgaaaaggtgaaaaggtggtaagttctaatgacatagaaaatagcaatcagcctttcttatgtctgaaagccttccaaaatatctgagtgcagtagagatttgacagaggactgatcaccatcctagaaacatggtgagagggaaaaaaaaaactgcaagaatataatcatctcccatcaatttcccaagaggaataatgtagtacttgaagaaacaattatagagtacctcatgctacatgcctcttcctgaggctcccccatgtaaaataacatcaccttcattccttctttacttttctttccatgacagctccttcaggaataggacgtcttcctctccttaatccaatatagcagccgtgaagtcatttctgtatttcaggaagactggcaggtatgatggccttttctcttatcctggttcctgcagggctgactgccatgcttgggagagggaaaagacttatttgcttgtatctgggactgcatctcctccttcctccactaaactcctgcttctcagaactaattcctgcagttccctttctccctggcctttatgctccctgtaccccactgtcttttagacataattatctccagcctctgctcatttgtttctcagattcaaatgagaaacacaatttcacatggtgaaaccctcttcattatttttaacatctctcaatagtgtaattctctacactcccataaagctcaaccacttctcaaagtattgcttgacttcttgtggccagactttgaaaccttccttgcatatgactgcctcattacctttctaaaatctagttaattcacttaatcaagaatctgcaggggtctactctagcctatttgataagttcacatttcttctatttagtaagccttctcacttcctttacctctacttcctagtataattccttcatcctaattagaactgtcttcctacacatccctgccccttcacccatatagacataaaattcttagttccaatgctatgtctaaaaacagagtgaaatcccctccaccatctgcactgcagacttaacgacacccttcatcacaggcaacatctgacctcatggagaacggagactttaggattaacatgtgaacctgagactcagaacacaacctatgtgtggttgagatcttttcctgatgaccagttcatgtgttcaaaaaacatacagaaatgaagaaggcaaggtccctaccccaggagacataaagcctaagacaggaaatgagacctgaaaataatcatgataccaaaatagaaaaaattgaatgccacaagaaatcagagaaatctgatgggaaatagagctacacattggaatcactggaaagcatttttaaaagtggatgctcaagccccacccattagttccagtttaaaggtctggagagggaccaaggcattggtaatttttaagtcttccctgacactactaacatgtaacaaggatggagaactcttgttgtaataggtagaacttaaaactaaatgaatgattttcagctagaagtactggaattacctaaggacctttttcaacatacataagactatacatttttggccctatttatgaatgggctacaccaagaactcagtaatcctcttgagaaacagaagctgaatggaaaagccaccttatttgatatattaaattgtgtagaaaacattttcaaataaaggataagtgaggctaaaccttctctaaataatatttatgggaatgttaataatatgagtattctacgctgggcgcgatggctcacgcctgcaatcccagcagtttgggaggccgaggtgggcacatcacgatgtcaggagatcgagaccatcctggctaacacggtgaaaccccgtctctactaaaaatgcaaaaacaaaatttgccgggcgtggtggcaggcacctgtagtcccagttactcaggaggctgaggcaggagaatggcatgaacccgggaggcagagcttgcagtgaactgagatcgcatcactgcactccagcctgggtgacagagtgagactccatttcaaaaaaaaaaatttttttaaatgagtattctaaaaattatatgaaatttctggaaatcaaatatgttaccatagtgtcatatgccacagaagtaactggatttctatgtgagctgtgtctttaccataataaattctcattagatttttaaccatagtcagtttaaatctttgtctttcccagacagttgctttgattcttcctcaaactacttacaatcacctacagtccaaaattgctttttcttcaaggagatttatggaaaagactctgacaaggactcttgaatacaagttcctgataacttcaagatcataccactggactaagaactttcaaaattttaatgaacaggctgataccttcatgaaattctagacaaagaagaaaaaaactccatgttattggactaaataatcaaaagcataatgttttcataattttctatttgaaaatgtgctgattctttgaatgttttattctccagatttatgaactttttttcttgagcaattggtaaagtatacttttgtaaacaaaaattgaaacatttgcttttgctctctatctgagtgccccagaattgggaaactattcatgagtattcatatgtttatggtaataaagttatctgcacaagttcagtaagga

SEQ ID NO: 7066 - DNA, 8246 bp, Homo sapiens
gatcctcattctacccagtgtcacgagaaatgaaacaggaccctatcaatgtgaaatacaggaccgatatggtggcatccgcagttacccagtcaccctgaatgtcctctgtgagtatcttttgttcctctgtgggccaggacaccagcttaaatcaaaacgaccagaggccaggcctctcactctctctctggtccaagtatagataccattacttctggacatccgagctggccataacttcctgccctgggaagatctgggtaggcacagccttaaccaagaatataaggggaggggacgctcttgtcatgggagacttggggcccacagcttgtgatgggagaaacaggggaatacctcaggcttcagctcagtgaacatagagggggtttggctggcacttgagggtgtgtcttggctcagagggtcactgtgtccctttaagagaccaggagcatccccttccctcggatgacatcacctgtggctttattctctttgctccagatggtccagacctccccagaatttacccttcattcacctattaccattcaggagaaaacctctacttgtcctgcttcgcggactctaacccaccagcagaatattcttggacaattaatgggaagtttcagctatcaggacaaaagctctttatcccccagattactacaaagcatagcgggctctatgcttgctctgttcgtaactcagccactggcatggaaagctccaaatccatgacagtcaaagtctctggtaagtggatcccagcatgcttggcaatagagttttaggtggagtctctctggctttcagagaagagtcaggaaaacatttttattcccagcctgtgtcccatgggcacaagcaaatcccaaattctcctcctgaaccctcccaatttgtctctacagactctcttctccttgtttttctgttttctcatggctgaccttgtgtctggcctgagaaaggtacggagcgggctttatcagccctgagccctatgtggtagaagaggattcagagagggacaagaaggagagtcctcaagatcaagttgcttcttgctgtcaccaacacatccccttctgccacgtctttgttttcttgtacctattctatgagctacaaggaacatccgaggctttgaaacaagctgacacttttcccccagatgagaggaggaagccccttgggtgagggaggagcagctcagactctgcttcctgctctgctccaggctcctctggtgactggccctgcctgactccacctgggtgggaccagcatctgtggagaaagagccctggtggcctgtcctgaatttggctaaatcgagttgccagttgaagccaagcctcccccgggccaggctgcagggaaacaaaaagagagggagcctcagggcagactcctgagctgtgtcctggctctgaagtcaccggctgtatgaggctgtgggcacagcacctgggacacagcacggaggacagtgactgatgcagagctggagaaatagggagattcacccctagggctctgcatggcaggaaaggggcagtgccaaaaagtgtgtaattatagagagggtaagactactggacactttatatatatctaatataagacttaccattaactatttctaagtgtgcaatttagtgttgtgtaaccatcacactatccatttccagaactttttcctcttaccatattaaacctctgtagccaataaacagtaactctcactccttctccccctaaaccttagcacccaccattctactttctgtctctatgtaactggctattctaactatcttttataaatggaattatataataattatccttttgtgtctggcttatttcagttagcataatatcttcaaggttcatccactttgcactatgtattggaattttattccttgttaaggttgaacaacatttcaatgtatagatacacctcatttgcctacccacttatctttcaatggacttttcagttgtttccattttttggctagtgtgagtaatgcttctctgaacatcagtttacaaatatttgttcaaatttctttcaattctatggggattatgtccagaagtggaattgctggatcaaatggtaatttattgtttaattttttgagagagagccacaccacttcttacagtggctataacatttcccattcccatcagcaatgcactagagctccaatttttccatctacttgaaaacacctgttgttttgtgttgctgtcattgttgttgtttatcaaaaccatcctaaagtgtgtgaggtggtgtaacaatgtggttttgatttgcatatctccaagtattcctgatgctgaggaactttgcatgggcttatttgatatttgtatatcttccttggagaaaactccattttaatcctttgttcattttttaattgggtttttggatgtttgctgttgttgacttgtagcttttcatgtattctggaaattaatttcttatcacacatataatttgcaaatatttttatcatttcgtgggttgctttttactttcttgatagtgttctttgatatataaaaggttttgatttttatgaagtccgatttatccattttatttgttgcctatgcttttgttgttacaaccaggaaatcattgtgaaatccagtatcatgaagcttttcttctaagagttgaatagtttttgcccttacatttagatctttgatctattgtgggttactttttgtacatggtgttaggtaaaggttccactgttcttgcccttggatatccacctttcccaatatcatttggtgagaaaacggtcccttccccattgaacgatcttggcacactcgatgaaaatcatttggccatatatgcaagcatttctttctgggttattatatttcattaatttctatgtcctcctttatgccagtaccacagtgtattgattactggggctttgtagtaaatgctgaaatcaggaagtgtgagtcctccagcttcattcttcctcttcaaagctgtgtgtctatttagagtcatgagatgcaatataaattttaggacagatttttttttactgcaaaaatgtcactgagattctgataggaattttattgaatctgcagctcacgtcaggtagcactgtcctcctaacaatattgagtcttccaattcatgaaaacaaaatgtctttcaatttattgatgtcatctttcatttctttcagccatattttgtagatttcaggtataatcattttacctctttggttaaactcattcctaaatattttattctttttgatgttaatataaattgaaattttttttcttaatttcccttcagattgttcatggttagtgtattgaaatacaactgatgtttgaatgttgattttgtattgtgcaacattactgaatttatttattaattctaataggtttgttccatctttaggattttctacatataagttcaagttatctgtaaacagaaataattttactccttccttccaattttaacgtctttttttaaattcttgcctaatttttctgactagacctttcaatactatgttgaataaaagtgtcaaaagcaggcacccttgtcttgttcctgctcatacagggaaagctttcagtctttctccgttgagtatgatgttagcattgggtttttcacatattgcctttacgttgaggtggtttccttcccttcttagaaagtttttattatgaaaaaatattgaatttcatcaaatgttttattgattcaatcttattactgattatagttccattcatatttttgtgtgtttctaggggtttgtctacttcatctaggttatccaatttattggcatacaattatttatagtactttcataatcattagtttattagaattggtagtaatcgcttcatttttcttttttctttttttttttttttttttggttgttgttgttgaagagagagagacaggctctcactctgtaggccagcccaggatggaatacagtggtgtgattatggctcactgcagcctcaacctcctgggctcaagtaattctccttcttcagcctcccaagatgctaggactacaggtgcatgtcaccatgcgcagctaattggcttttttatttttttgtagagacagggtctccccaggttacctatgctggtccaaacacctggtctcaagaaatccttctgctgtgacttcccaaagtgctaggattaaaacatgacccaccatgctcagagtccattttcatttctgattttaggaattttaaacttttctctttttttcttagtcaatctagttaatggttgtcaattttgttgattttattttgaagaatcaacttttggtttcattaatttcctctattctttttccattctccattttatttatatccactctaatccttatttttccctcattcactgtgcttgggtttagtttgttcttctttcatatcctgaagtattaaagtaggttgttgacctgagatctttcttcttttttaatgtaagagtttacagttataaatttcttgcacaagactcaatttctctgaacctctgatacctcacctgaaaactgcaataagagtgctttcttcatacctttcttttaaaggtttaatgcagtcaataaaacgagatgccacacacagtggaaccaatgtcagctgctatatgactaccatcatcattagcctagaggtcaaatagtcctagaatcaaatctcagatccacctgtcactagccatatgacaccaggaaagttttacaccactctaagcttctgtcttttcatcggcaaaatggaaataatgtctacctcacagggttattgtgtggattaaatgagatacagggaaagtatttagcacagggcctggcacataggaagtgcccctcaacagtaccttcctttttccatatatatatatatggaaaaagaggtaacacataaaacactaggacatggttactgactacttgtgggagagaaagaaaaaaagctaagtgcaaagaatcaagcctggtatgttagtttttactgactgagatgcatccaagatgggattagacatacaagataacttatcagggaagacacctgtgagggaatgtggggcaggcatgaaggtagtacgggagaacccacagaccactatgcagagctgattcctgtgaaaaagaaagagaaagaagttttaggtaccaattcaattataagagtttttgcaaggctgatggggaatcctccaaccagtcacccattagagttaaagagagcctcagagaactagacttgctttcacgcccttgctgggagcctgtaggaaagaagctttctgtgcaaaggaggtggtgaatttgaaatgcactgacctgggccttctgtcaatcaagtctctgccatggagacctggcagggtctcattcatgactgccacaacagagacactgagaaaaagatgcaaccatgaaaaggtgcaaaggtggcaagttctaatgacatagaaaatagcaatcagcctttctcacatctgaaagccttccaaatatctgagcacagtagagaattgacagaggactgatcaccaactgagaaacagggtgagagggaaaaaaaaactgcaagaatataatcatctcctatcaattttccaacagaaataacgtagtccttgaagaaacaattatagagtacctcatgttacatgcttgttcctgaggctcccccatgtaaaataacatcatcttcattccttcttttcttttttttccatgacagctccttcaggaacaggacatcttcctggccttaatccattatagcagccgtgatgtcatttctgtatttcaggaagactggcaggtatgatgacctttcctcttatcctggttcctgcagggctaactgccatgcttgggagagggaaaagacttatttgcctgtatctgggactggatctcctccttcctccactaactcctgcttctcagcactaattcctgcagttccctttctccctggcctttatgctccctgtaccccactgtcttttagacataattatctccagcctctctctctgctcatttgtttctcagattcaaatgaaaaacacaatttcacatggtgaaaccctcttcattatttttaacatctctcaatagtgtaattctctccattcccataaagctcaaccacttctcaaagtattgcttgacttcttgtctccagactttgaaatcttccttgcatatgactgcctcattacctttctaaaatctagttaattcacttaatcaagaatctccaggggtctactctagccactttgataagttcacatttcttctatttactaagccttctcacttcctttaccgctacttcctagtataattcctccatcctaattagaactgtcttcctacacacccctgtcccttcacccatatagatataaaattcttagttccaatgctatgtctgaaaacagagtgaaatcccctctaccatctgcactgcagacttaaccacacccttcatcacaagcaacatctgacctcgtggagaactaagactttaggattaacatgtgaacctgagactcagaacacaacctatgtgtggttgagatcttttcctgatgaccagttcatgtgtttaaaaaagatacagaaatgatgaaggcaaggtccctacgccaggagacataaagcctaagacaggaaatgagacctgaaaataatcatgataccaaaatagaaaaaattgaatgccacaagaaatcagagaaatctgatgggaaatagagctacacattggaatcactggaaaacatttttaaaagtggatgctcaagccccacccattagttccagtttaaaggtctggagagggacccaggcattggtaatttttaagtcttccctgacactactaacatgtaacaaggatggagaactcttgttgtaataggtagaacttaaaactaaatcaatgatgttcagctggaagtactggaattacctaaggacctttttcaacatacataagactatacttttttggccctatttatgaatgggctacaccaagaactcagtaatccagttaacaaacagaagctgaatggaaaagccactttatttgataagttaaattatatagaaagcattttcaaataagtgataagtgatgctaaacctcctctaaataatatttatgggaatgttaataatatgagtattctaggctgggtgcgatggctcacgcctgtcatcccagcactttgggaggccgaggtgggcggatcacaaggtcaggagatcgagaccatcctggctaacacggtgaaaccccatctctactaaaaatgcaaaaacaaaattagccgggcttggtggcaggcacctgtagtcccagctactcaggaggctgaggcaggagaatggcaggaacccgggaggcggagcttgcagtgaactgggatcgcaccactgcactccagcctgggtgacagagtgagactccgtctcaaaaaaaaaatttttttaatgagtattctaaaaattatatgaaatttctggaaatcaaatatgttatcatagtgtcatatgccacagaagtaactagattttgtgagctgtgtctttaccataataaattctcattagatttttaaccatagtcattttaaatctttgtcattcccagacagttgctttcattcttcctcaaagtatttaccatcagctacagtccaaaattgctttttgttcaaggagatttatgaaaagactctgacaaggactcttgaatacaagttcctgataacttcaagatcataccactggactaagaactttcaaaattttaatgaacaggctgatacttcatgaaattcaagacaaagaaaaaaacccaattttattggactaaatagtcaaaacaatgttttcataattttctatttgaaaatgtgctgattctttgaatgttttattctccagatttatgcactttttttcttcagcaattggtaaagtatacttttgtaaacaaaaattgaaacatttgcttttgctccctaagtgccccagaattgggaaactattcaggagtattcatatgtttatggtaataaagttatctgcacaagttca

SEQ ID NO: 7067 - DNA, 6331 bp, Homo sapiens
aaaaaaaactgcaagaatataatcatctcccatcaattttccaacagaaataatgtagtccttgaagaaacaattatagagtacctcatgctacatgcctgttcctcaagctcccccatgtaaaataacatcatcttcattccttcttttcttttctttccatgacagctcctccaggaataggacgtcttcctttctttactccaatagagcagcggtgatgtcatttctgtatttcaggaagactggcaggtatgatggccttttctcttatcctggttcctgcagggctgactgccatgcttgggagagggaaaagacttatttgcttgtatctgggactgcatctcctccttcctccactaaactcctgcttctcagcactaattcctacagttccctttctccctggcctttatgctccctgtaccccactgtcttttagacataattatctccagcctctgctcatttgtttctcagattcaaatgagaaacacaatttcacatgatgaaaccctcttcgttacttttaacatctctcaatactgtaattctctcaattcccataaagctcaaccacttctcaaagtattgcttgacttcttgtctccagactttgaaatcttccttgcatatgactgcctcattacctttctaaaatctagttaattcacttaatcaagaatctccagtggtctactctagccactttgataagttcacatttcttctatttactaagccttctcacttcctttacctctacttcctagtataattccttcatcctaattagaactgtcttcctacacatccctgccccttcacccatatagacataaaattcttagttccaatgctatgtctaaaaacagtgaaatcccttccaccatctgcactgcagacttaaccacacccttcatcacaagcaacatctgacctcgtggagaacaaagactttaggattaacatgtgaacctgagactcaggacacaacctatgtgtggttgagaccttttcctgatgaccagttcatgtgtttaaaaaagatacagaaatgaagaaggcaaggtccctacgccaggagacataaagcctaagacaggaaatgagacctgaaaataatcatgataccaaaatagaaaaaattgaatgccacaagaaatcagagaaatctgatgggaaatagagctacacattggaatcactggaaaacatttttaaaagtggatgctcaagccccacccattagttccagtttaaaggtctggagacggacccaggcattggtaatttttaagtcttccctgacactactaacatgtaacaaggatggagaactcttattgtaataggtagaacttaaaactaaatcaatgattttctgctggaagtactggaattacctaaggacctttttcaacatacataagactatacttttttggtcctatttatgaatgggctacaccaacaactcagtaatcctcttgagaaacagaagctgaacggaaaatccaccttattttatatattaaatttatagaaagcattttcaaataagggataattgatgctaaaccttctctaaataatatttatgggaatgttaataatatgagtattctaggctgggcgtgatgtctcacgcctgtaatcccagcaatttcagaggccgaggtgggcagatcacgaggtcaggagatcgagaccatcctggctaacacggtgaaaccccatctctactaaaaatgcaaaaacaaaattagccaggtgtggtggcaggcacctgtagccccagctactcaggaggctgaggcaggagaatggcatggacccaggaggcggagcttgcagtgaactgagatcgcaccactgcactccagcctgggtgagagagtgacactccatctcaaaaaaaatttttttaatgagtattataaaaattatatgaaatttctggaaatcaaatatgttatcatagtgtcttatgccacagaagtaactagatttctatgtgagctgtgtctttaccataataaattctcattagatttttaaccatagtcattttaaatctttgtcattcccagacagttgctttgattcttcctcaaagtatttaccatcagctacagtccaaaattgctttttcttcaaggagatttatggaaaagactctgacaaggactctggaatacaagctcctgataacttcaagatcataccactggactaagaactttcaaaattttaatgaacaggctgataccttcatgaaattcaagacaaagaagaaaaaaaactcaattttattggaataaataatcaaaaggataatgttttcataattttctatttgaaaatgtgctgagtctttgaatgttttattctccagatttatgaacttttttccttgaacaattggtaaagtatacttttgtaaacaaaaattgaaacatttgcttttgctgagtgccccagaattgggaaactattcatgagtattcatatgtttatggtaataaagttatttgcacaacttcagtaaggatctgctctctttataacaggacacatttgaaaacatcggttatattaccaaggctttgactgggatgttatatttgagaatatacatagaataaacccatagggaatgcaggcaaagtctgaagttgcccttggtttggcttcctagtctcaagaggtttttggaagtttaatctgagattcttattaaaaacttctagcaaagcgaagtttaaaaagagcctctatggtccattgctactcttgccgcacttaggtaaaaagtctgggcaagttcggtgagactcaacctattttgcaaacaaattcatcctactggaattatctttggtaaaaatagagactcctatagacagaaaaactatgttgaaaagcagaactgtagtacacctgttaccagattgaaccactgttcattatctttgagtatttataatccactggtagactggactggaccctgaattcttttagttcttccaattcaattttctccaatgaaataattaagaacaagagtggctctgttcctgaagccatataagctggagatggacaactcaatgtaaatttcatgagaaaactctcatgtctgaggtgtgggccgctaagaactcaccaaatgttcaacaccataacttagagacactcaaactgcaaaccaagacaacaagttgatgactttacactgtggacagttttctcaagatgtcagaacaagactatcaatcatgatgggaatcttacctctcttaatttgtccttgcttatgcctgtcgcctttgcttcccagaataatgctgtacttaggatttcacaagaagtagcttctgagagtaagttaacagtgtcagatatatcatgtcaaccacacttttattttataagatggagtttcgctcttgttgcccatgctggagtgcaatggcacattcttgggtcactgcaacctccacctcctgggttcaagtgattctcctgcttcagcctcctgagtagctgggattacaggcatgcatgaccacacccagctaattttgtattttcagtagagacggggtttctccatgttggtcaggctggtcttgaactcccgacctcaggggacccacatgcctcagcctcccaaaatgctgggattacaggcgtgagccaccgcacctggcccacacatttttacataccaagagatcctttagtccacccaaaggctgacattagctgcatctgtaacacaatgttttcctcaaatgtatggagttttttttaggcttccacttctatacttgcctattctcgctccctgttttaatttaacatagacatgcaatgctagataatagaattgctctctatcagctgaacagaggggagcctgtgcagtttctgacgcttcttgttgcacatggataaatacattgggtattacagactcagttgtaaaaatcattaaatgtgctgcctagttaaaatgactagactcttctggcttcttctttgatctatcctattgtagttggtttgcatcttgcctaaggtgcatattccaaactcttgatattttcctcctgatagtcatactggtagtctccctcgtgtggtgcaatctacagatgttttcactggtgtgcagccattcttcaaatatcaaatggtttctcttgtgctggaattacaaaaactcaaagaaatgtgttaattattggcgaggcacagtggctcacatctgtaatcccagaactttgggaggccaaggcaggcagatcacaaggtcaggagttcgagatcagcctggtcaatatggtgaaaccctgtctctactaaaaatacaaaaattagccgggcatggtggcgcgcacctgtagtcctgtagggagaagccctgaaactattgctacagaacaaatgatgaaatgctcctgattattgtaaatataaaagagcatgcaggattgtgtaaatacaatgccaggttgggctgccagaatgagcctacagcacatgatgtgcttctgttacatggatgggagatagaattatgagtttagaacatagattacaaatgcaacctgattggaatacttctgatttttgtataactccattccaacataatgagtctgttcacaactgggaatcagtaaaatgccatttacaaggaagtgaagataatttaagtttagacttaagcaagctaaaagaacagatttttgaagcttctcaagcacacttaactgctttacccagtgctgaagttttagacagtatctctgaggggttatctaatctcaaccccattcaataggtaaaatctttgggaggatccactatcgttaattttgttctgtgtataatttgtgctattggtttattgttcatgtgtaaaattggaaaaaaatattcttcaatccaatcgtgatcagtgccaagctatgattgctatggttcatttaaattggagaaaagggggagatgtagggagaccccctgaaactattgctatggaataaaagatgaaatgctcctgattattgtaaatacgaaattgcatgcaggattgtgtaaagacaaatgccaggttggactgccagaatgagccaacagcacgtgatgtgcttccccctgcagagagcctatgaacggacatgcagtcagggaggtttcacattaccaagattcctatcccagaaaagcagatgtccatagctctgggaatggaatgcgacccttgtggagagcctataaatggccctaaatctctcactaacctacccccactctcactaaacttaataataaatgctggtatatccagtgcattggcagcatcgcaggaccagaaggcggtgacccctctggacccagctttcactatcttgtgtgtgtcttttatttctcaacctgccgatctgcctgagaacaaagaaagagccccattgcattgcaggctgcaggccagatcccgcaatatagtcccagctacttgggatgctgaggcatctgtagagggagagctgccccaaatcataaatcacaaataaaagccaattacatctataactaaattagttataattttgtcttatcacacatgttcacaggaagcaatggccagtggagtctctcagactgcatcattctcaccctgagcctcctgccttgctctttcacttacaaggacccttatgatgaaactgggagccacccagataagccagaataagctttccttctcaagatactcaacttcatcacctttgaacagtgtttttgccaagaaaagtaaatgcatgtgttccaagagttaggatgtagatttttttttttttttttttttttgagacagagtttcactcatgttgccctggctggagtgcagtgggacaatctaggctcactgcaatctccgcctcccaggttcaaatgattctcctgcctcagcctcccaagtagctggcattacaggcatgcgcccccacgcccagctaatttttgcatttttagtagaaacggggtttcaccatgtcggccaggctggtctcgaactcctgacctcgtgatccacccgtatcagcctcccaaagtgctgggatgacaggcgtgagcccctgcatccagcccggatgtggacatgtttaagaggccattattctgcctcataagggtcactttcataaacatcacccacaacaaaaatgttttgccttccttccatgtctcacttttctgtcggcacaaaccacagtgaaacacactagctctgctatgaagtggc

SEQ ID NO: 7068 - DNA, 407 bp, Homo sapiens
gggtttggcttacatcaaagccatttgactctaggacacattcttagattcccaggagataatgattgccacggaatccacgccaactctgagtattcctactgttgggtaaaggaatgtttgcagaatgttgtgcattctgtttactcctcctaaattcttccactcctggaagttaagcttccccactaatcagcttcatctacagctggcctgcctggaccctgactggaaaatacctccccactctggatggccagggtggcacctttgtctattcccataattataatagctcacactgatgcagcactcactatgtaccaggtactatcctgagagctttccaggaaactacagtcctcaccaaaaaatcccaagtaccacaatccccatttttacagatt

SEQ ID NO: 7069 - DNA, 557 bp, Homo sapiens
gagtgcaatggcacaatcttggctcaccgcaacctccgcctcctgtgttcaagtgattctcctgcttcagcctcccgagtactgggattacaggcatgcaccaacacgcccagctaattttgtattttcagtagagacagggtgtcttcatgttggtcaggctggtctcaaactcccgacctcaggtgatccgtacgcctcagcctctcaaagtactgggattacaggcctgagccaccgcacctggcccacacatttttacataccaagagatcctttaatccacccaaaggctgacgttagctgcatctgtaacacaactttttcctcaaatatatggagttttttttaggcttccacttctatacttccctattctcactccctgttttaatttaacatagacatgcaatgctagataatagaattgctctctaccagctgaacatttgggagcctgtgcagtttctggcccttcttgttgcacatagataaatacatccggtgttatagagactcagttgtaaaaatcaataaatgtgctgcctggttaaaat

SEQ ID NO: 7070 - DNA, 524 bp, Homo sapiens
cacagcttgtgatgggagaaacaggtgaatgtctcaggctccagatcagtgaacacagcggggatttggctgggacttcagtgttgcgacttggctcacagggtcactgtggcccttccacagaccaggattttcccttccctctgacaatgtcacctgtgactttattctctttgctccagatggcctggatgcccccaccatttcttcctcatacacctattaccatacaggggaagtccccaatctctcctgcctcacagactctcacccactggcagagcattcttggctgattgatgggaagttccagcaatcagcacaagtgtgctttattccccaaatcaccaaaacatagagggatctatgtctgtttcatccataactcagccactgatggaacaaatctcataatcaagaggatcatagtccctggtaagtggatccctggagcattggcaatatgttttccagtgaagtctatctagctatcagggaagagccacctgccctctgcaaaggga

SEQ ID NO: 7071 - DNA, 521 bp, Homo sapiens
ctcctataaagagaaaaactatgttgaaaagaaaaactgtagtacacctgttaccagattgaaccactgttcattatctttgagtacttataatccactggtagactggactggaccctgaattcttttagttcttccaatttaattttctccagtgaaatcattaagaacaagagcagctctgttcctgaagccatataagatggagatggacaactcaatgtaaatttcatggagaaaccctcgtgtctgaagtgtgggccactaagagctcaccaaatgttcaacaccataacttagagacactcaaactgcaaaccacgacaagttgatgactttacactgtggacagcttttctcaagatgttagaacaagactatcagtcatgatgagactgttacctctcttaatttgtccttgcttctgcctgtctcctttgcttcccagaataatgctgtacttaggatttcacaagaagtagcttctgagagtaagttaacagtgtccgatatatcatgtc

SEQ ID NO: 7072 - DNA, 407 bp, Homo sapiens
gggtttggcttacatcaaagccatttgactctaggacacatttttagattcccaggagataatgattgtcacggaagacacacccactctgagtattcctactgttgggtaaaggaatgtttacagaatgttgtgcattctgtttactcctcctaaattcttccactcctggaagttaagcgtccccactaatcagcttcatctccagctggcctgcctggactctgaccagaaaatatctccccactctggatggccagggtggcacctttgtctattcccataattataatagctcacactgatgcagcattcactatgtaccaggcactatcctgagagctttccagttaactacggtcctcaccaaaaaatcccaagtaccacaatccccatttttacagatt

SEQ ID NO: 7073 - DNA, 1485 bp, Homo sapiens
ttttttttttttttttgaagagagagggacaggctctcactctgtaggccaccctaggatggaatacagtggtgtgtctatggctcactgcagcctcaacctcctgggctcaagcaattctccttcttcagcctcccaagatgctaggactacaggtgcatgtcaccatgcccagctaattggttttttattttttgtagagacagcatctcccagggttaactatgctggcccaaacacttggtctcaagaaatccttccgctgtgacctcccaaagtgctaggattaaaacacgacccaccatgctcagagtccattttcatttctgattttagtaattttaaacttttctctttttttcttagtcaatctagttaatggttgtcaattttgttgattttattttgaagaatcaacttttggtttcagtaatttcctctattatttttccattctccattttatttatatccactctaatccttattatttccctcattcactgtgcttgggtttagtttgttcttctttcatatcctgaagtattaaagtaggttgttgacctgagctctttcttcttttttaatgtaagagtttacagttataaatttcttgcacaagactcaacttctctgaacctctgattcctcacctgaaaactgcaatgaggctactttcttcatacaattcttttaaaggtttaatacagtcaatgaaacaagatgccacacacagaggaaccaatgtcagctaccatattactaccattatcattagccttgaggtcaaatagtcctagaatcaaatctcagatccacctgtcactagccatatgacaccaggaaagattttacaccacgctaagcttctgtcttttcattgccaaaatggaaataatgtctacctgacagggttattgtgtggcttaaatgagatacaggtaaagtattgagcacagggcctggcacataggaagtgcacctcaacagtaccttcctttttccatacatatggaaaaagaggtaacacatagaacactagaacatggctactgactacttgtgggagagaaagaaaaaaagctaagtgcaaagaatcaagcctggtatgttagtttttaccaattgagatgcatccaagatgggattagacatacaagataatttatcagggaagacacctctgagggaatgtggggcaggcatgaaggtagtatgggagaacccacagaccactatccagggctgattcctgtgaaaaggaaagagaaataagttttaggtaccaatgcaattctaagagtttttgcaaggctgatggggaatcctccaaccagtcacccattggagttaaagagatcctcagagaactaggcttgctttcacacccttcctgggagcctgtaggaaagaagctttctgtgcaaaggaggtggtgaatttgaaatgtactgatctgggccttctgtaaatcaggtgcctgcc

SEQ ID NO: 7074 - DNA, 4797 bp, Homo sapiens
gggaaatgatgagaatccgatgttccttttgcacagtaaggcagttactgtgtttgccagtgttattggacatgctgagtaagacatggggattttctcccacagccagttctttgaccttatgttgtattctcatgtaagtttttttgtttttatttttgtttttggctcagtgaagtgagattgcgtgcactggcaggcctagtaatatagacaaggtggtggtggtaggaattaggactttaaagaagtagtatgttcagttcctagaggtagtataatagggaaataagaagacagggcctcaagagcaattccttctgctttactgcactaaaaattaaaaaggagaagtaggccaggtgcagtggctcacgcgtgtaatcccagcactttgggaggccaaggcaggaggatcacttgagcccaggagttcaagaccaacctgggcaacataatgagaccccacctctacaaatgagttaaaaaattagctgggcatggtggcgcatgcctgtggtcccagctacttgggaggcttgaggtgggaggataacttgagcccgggaggttgagctacagtgatccctggtcacactactgcactccaacctggacagcagagtgagaccatgtctccaaaaaaatagataaaaaggaaaagtaaaattaattacttaaggggctaattttttgtctttgggtataggaaggcttgttacaaggaagatgctgacctcttagcagacaacagaacaaatggaaatgggaaatacccaaatagcaagggacagtttgagtagcagtaggagggagctttatgactaagtggtaactaaactctaggacaggctagcaacagaagatataggcccctatctccaaatagatttttaaaaaatttgagggagagggggcaacagaatctcagttggtaataaactctaatctaaaaaaacctacggggccgggtgtggtggctcacgcctgtaatcccagcaatttgggaggccgaggcgggtgaatcacttgaggtcaggagttcgagactagcctggccatagtgaaactccgtctctactaaaaaatacaaaaattagctgggcatggtggcgcatgcctgtgatcccagctacttgggaggctgaggcaggagaatcacttgaatccaccaggcggaggttgcagtgagccgagactgcgtcattgcactccagcctgggtgacagagtgagactccatctcaaaaaataaataaaataaaaattaaaacacctacaggtatttttagtaaaaacatttatcatctttgaaagcactcttacgagacttttattcatcagaatcagtgaaatgttctcccttttttgacagggtcaaatagaaattgacgatcaggtggaaggactccaatatctagcttctcgatatgatttcattgacttagatcgtgtgggcatccacggctggtcctatggaggatacctctccctgatggcattaatgcagaggtcagatatcttcagggtatgtgacttcctattatactcatttttgcaataagggtagatttttctgtaaatggaggatatatgaaaatgtctattttctgaaggtttacagagttggcaatttttttttttttttttttttgagacgaagtcttgctctgtaacccgggctggagtgcagtggcgcaatctcagctcactgcaatctctgcccctgggttcaagtgattctcatgtctcagcctcctgttctcatatctcagcctcctgagtagctgggattacaagtgcccaccaccacacctggctaatttttatttttattttttttaaagtagagatgggatttcaccatattggctaggctggtctcaaactcctgacctcaagagatccacctgcgttggcctcccaaagtgctaggattacaggcatgagccactgcgcctggcccagagttggcaatattgtagaatgttagggtttgtatgtttaaaagccatgtgaaatgtatatatatctcaagtttgttttttgttgttgttctgttttgttttgttttgagacggagtctcgctcttcacccaggctggagtgcagtgacgcaatcttggctcactgcagcctccacctcctgggttcaagtgatttccagctaatttttgtacttttagtagagatggagtttcaccatgttggctaggctggtcttgaactcctgacctgaagtgatccctctgccttggcctcccaaagtgctgggattacaggcatgaaccactgcgcccagccttcaagttttatgtgtgtagatatatatatatgtatgtgtgtgtgtgtgtgtgtgtatatttttcttttaaacatgtataatgtttaaatctgtcaactggataaccagttactggctgtttatagatacatgccaaagagtgtaggagatggttatgattagtaaaacacatacaacatacctgatggatcgtaattacttaattgttggactgcaagctatgagggcagggacctgtttgccctgtacaccattgtatcttcagcagtcaagcacaatgctgggcatatagtaggccctcaataaatgtgttgaatgaattaattattaaatgtataaatgcttacaattctgtaaacaaactcttggaaaaatatactagaagaaattacataaggatgataacaattgttgagaataggaattatgagtagtgtttcttttttaatatttcaataacatgatgttactttacagtgaaaagtaattttttaaaattttattttattttatttttttgagacagagtcttgctgtcacccaggctggaatgcagtgtgcgatctcggctcactgcaacctccgcctctcaggttcaagcgattctcgtgcttcagtctcccaagtaactgggattaaaggcgcccaccactattcccagctaatttttgtatttttagtagagacgagatttcaccatgtttgccaggctggtctcagactcctgaccttgggtgatccgcccgcctcagcctcccaaagtgctgggattacaggtgtgagccattgcacctgaccattaatttttatttttaagaacaaaaacaataaggtttttattcttgcacatatatctagataatctttataataaccataaataaattctgaccacttccataattttcccaggtttgtagctgtcaagaaaatagagtatttaaatataaaactacgtataggagaggcaaatttttagtatatttcatttattgttttaaattctatactgccaacagaggcttaaaaaaaaaaggtggctccttttttacataaaactgacagttctcacacgttttttcctcagtagcaggatatagttcagttgtcttttaataacgggcctggctttcatatttcagctagcccaggttaaaggtttggtatgtagaatgcccatggaacatgaaactgactcacagagtatcaaattcttgaccttagcgcttcacttcgtattctgagttgcctaagacatgtatgcgccagtagtaaggctaaagcttaaggataattttagactgtaaatttgcagttgtaagatctcactgctagccactctctttttccagaccacacttgactgtcaatgtcatcttatgcaggttgctattgctggggccccagtcactctgtggatcttctatgatacaggatacacggaacgttatatgggtcaccctgaccagaatgaacagggctattacttaggatctgtggccatgcaagcagaaaagttcccctctgagtaagtgcaagctttttttttttttttttttaaattgagacagggtctcactctgtcactacttaggctggagtgtagtggcatgatcagggctccctgcagcgtcaaactcctgggctcagaggatcctcccacctcagcccccgagtagctgggtctacaggcacgtgccaccatgcccgcctaattttttgtatttttagtagagtcagggttttatcatgttgcctagggtggtctcaaactcctgaactcaagttatctgcccacctcagactcccaaagtgctgggattacaggcgtgagccaccgggcacagcctaattcaagctttaaaatgaagattataaattttcaattgtattttaaaaaattgtctttaatcctaatgaaaaattcaaatactgaaaaaccaagacaaatgttatactagaatagcatggctgtttcttaaaactgaattacaggccaattcatataatgtttctttacaagttatatttgaagcagttgtttttgctgaaaaaagttaagtacacgactttcaaggtggaaaaaattttatgtctgcctgaatatattttacaaatagttcttctagggacatgctataattatagatgtgttctaatattttaattataaaaaattgaacacaagatctttttttaatcttttattgcgtgtggcatctggttaatatgttacaaatttaatattgaaaatactgaattcttattctaacattacagtataaggaagttaatatggttaagtatgattaaataagtgaaatggttttcccaaatactctactattttgcctaatcctctaatatttccatttctccagaccaaatcgtttactgctcttacatggtttcctggatgagaatgtccattttgcacataccagtatattactgagttttttagtgagggctggaaagccatatgatttacag

SEQ ID NO: 7075 - DNA, 524 bp, Homo sapiens
tttagcattgcttcactataatatgaatatcacgtctacatcaaattattttgatagtgaaataggtaaaatatataatatttagcataattgctaggacattatattaactgaaaacactttcctttgccattggttattttgaggacaaaaactgcttttatatctcagtcaagagctggtaaaaatatttgattgttttatgtggttacgacgactaatgttcttaaaggtttttactttaaaactaggccatataaatgtattttaaagtatccatggtctcttattgaatttaattccatatttataaaacagtatttctattttaaaatcaactacctatgactatttagccaaaccattgaatcatttgtgttaatttattttttaattctacagatggaagaattcatatagagagatacataaaatagaaggcttacttacattatatatatatatatatatatatatgaaagatatgtaagacttctatatctacaatagaatcaacattgttg

SEQ ID NO: 7076 - DNA, 531 bp, Homo sapiens
gttagttttagcatttgcttcactataatatgaatatcacgtctacatcaaattattttgatagtgaaataggtaaaatatataatatttagcataattgctaggacattatattaactgaaaacactttcctttgccattggttattttgaggacaaaaactgcttttatatctcagtcaagagctggtaaaaatatttgattgttttatgtggttacgacgactaatgttcttaaaggtttttactttaaaactaggccatataaatgtattttaaagtatccatggtctcttattgaatttaattccatatttataaaacagtatttctattttaaaatcaactacctatgactatttagccaaaccattgaatcatttgtgttaatttattttttaattctacagatggaagaattcatatagagagatacataaaatagaaggcttacttacattatatatatatatatatatatatatgaaagatatgtaagacttctatatctacaatagaatcaacattgttg

SEQ ID NO: 7077 - DNA, 313 bp, Homo sapiens
aagtcaaagtaggcaccttctttgaaggtttgcttacttggtttcctcatctacaaaactgagttaataatagttctctatgtcactattcagtaagtaaaaccaatattgtaaaaattatcttgcattttagatgctatgtcagatattttttcatgtcatgcaatgtaataattttgaggtaaatggcttagtggattgaagtgttcgctggaaactttatgccatatgttttactaatcaacacatttattcgctaaaaaactattttcaaagagaggcaaatagtttgaaataaatctgacctgcattt

SEQ ID NO: 7078 - DNA, 858 bp, Homo sapiens
catgtatactgccaaatatgaacataaagctcactatatacttataaaattcttctagaaaaaatatctatacagcaaggcttaaaaaatgagtttcatgctaagaattaagcctggtgaccaagttagtctttggtatgcatttgatacctgccatagataggaggtgtgcctccatcaagatggctcatcaggtaacaatgccacttggtagcagatgtttaaaaatagccagccttaattaactgctttcatatgctgtccactgtgctcagtgggtttcatggggtggtgttattatcactattatgtagatgagaaaatcaaggttcttagatgttctggaatttgttcattttcacatgattggaacattgtggtcttgtctttcaagtccatgtctaccatactccacagacccttttctgtccactttgtcacctataattctgaactccaatataaagacttcaccgtatttgaaagagaatagtgggaagtctgatgctcaattttgtgtacagaacagttgcctctgtgacattgtaactgctgaaataagaaaatccccttttgattcaggatattatttaattattgcaaatctcctggcatagatctgatactcaagttaaaaaattaggctcaggttcttacctatgattttgctttttatagtactttgaaacctacaaaacttacattcaacatttacacatacaaaattcatacagtctttcaaaactaagattgcgtaataatttgatggcttgaaattttaagtattacaatataaagagcagagactttatgtttaggattaatactttttaataaataacattatcctttgcatta

SEQ ID NO: 7079 - DNA, 803 bp, Homo sapiens
caaggtgatagttttaagaggtggtgcctttaggagctgattaaggcatttgggcagagccattctgaatgggattaatgaccttataaaagagatgaagatgaacttttgaccccttccaccacatgaggacatagcaagaaggcatcatcttaaagcagagagcaagccctcaccaagacactgaatctgcagatgccttgatcttagacttcccagcctcagaaactgcaaaaataaataaataaataaataaataaatgtctgttgtttataaattacctaatctaaggtattttgttttagcagctcaaaggaactaagacaaagatcatggagaccatcgggtgagtctcaagacttcccccagctctgcttggctggtctcctgctggtattttctgtctgtagagaggaacaagaacttccattttatcttgcttacctgcacttatgaaaagtcaaactgagtcatgctgagagccagggaacataggagtcagttcttctgcagcagcactcagccagttgaaggcaatgtggagtgatggaaggagagcagtgatgcagtgatgctggcaccaactcctttactatggcatccattgtaccagctgccatacaccaggcaacttctacactttatctctaatcatcctagaataagtattagtttccccatcttctagaaaggaaaactcagacccagagacactaagcaagtagctcaacatcacacacgttatctgtgattaagcctgagttagaaatggagccttggatttccacatttatgctctttt

SEQ ID NO: 7080 - DNA, 806 bp, Homo sapiens
caaggtgatagttttaagaggtggggcatttaggagctgattaaggcatttggacagagcccttctgaatgggattaatgaccttataaaagaaatgaagatgaacaaatgaccccttccaccacatgaggacatagcaagaaggcaccatcttaaagcagagagcaagccctcaccaagacactgaatctgcagatgccttgatcttagacttcccagcctctgaaactgcaaaaaaaaaaataataataataaataaataaacttctgttgtttataaattacccaatctaaggtattttgttttagcggctcaaaggaactaagacaaaggtcatggagaccatagggtgagtctcaagacttcccccagctctacttggctggtctcctgctggtattttccgtctgtagagaggaaaaagaactcccattttatcttgcttacctgcacttatgaaaagtcaaactgagtcatgttgagagccagggaacataggagtcggttcttcagcaggagcactcagctagttgaaggcaatgtggagtgatgggaagagagcagtgatgcagtgatgctgccatcaactcctttactatggaatccattgtaccagctgccatacacctggctacttctacaccttatctctaatcactccagaatacgtattagtttccccatcttctagaaaggaaaactcagacccagagacactaagcaagtagctcaagatcacacacattatctgtgattaagcctcagttagaactggagtcttggatttccacatttatgccctttt

SEQ ID NO: 7081 - DNA, 1328 bp, Homo sapiens
gttgggggtgtggagaaacaactctctttacataatgattgctactatgatttggttataagtaacccatgaagacaatcagtcttctctggcagtccctaattgtagtgaatgttggaatacagtgaccacacaaatgctccagactgattgcgaaggtgccacttctaaatcagctgggcaagtgcattgcataagctgagtatttagcttaatgattggagccagttgatgaaacacaagaatctggaagcctcctgctacttctcagaagataagacaatggcattccatcaccagtgtttactgtggtacccaaagggagctccagttactttcctctgtgcctataacccttggatcacctggttgcaccagacccatcctgactaaaatccctccaaaggaccaaagaggggatagggacaaaaataaaaaataaatctcatctgctctctttcctaaggacccagcagcctctatccatccatcgttcattcactcattccacacactttcatctagcccctgctgaatgccaagcactgggctggaactctggggactgtggaggtggaataggagaatatgggctttctgtgagcagtgtttgcctaaaatatatacatcaaggttgtaggatcatgtgcaccactgcactctagcctgggcgcagagtgagaccctgtttcaaaaaaataaaaaaattgtaggatcatggagaaagtgtcttaagtgtttggtgctgtggacaggcaacacaggcagaaactggtggctagggaatcagagaagttttcaggagggagcatttgacttgggcttggactgagcatcacagggcaatatagaaacaagtttatggataattaactgaattggtggcagttgataacttgaatcttccttcagatgattgaagttagtagcccagctatgaaagtctaggttacagatgtctcagccagagcttgcgtatgtgggatgaggctcatacatatgcagacttgggctcctgccaagatatgagagttttggtcagtctgcatctcagttctaatacctctgcctaaatacttgagtccagagtggtcatgcaaagaacagaaccctggaacaatcacaccaaggtttggttctaggcttagccattttctagccatgggaacaaaagaaaattactgaacctctctgagtcccagtttatttgtctgtaaaataaggatagtgatactggggttacagggaaattgtgagaattaaaatagttcaggagaggttaagttgtcctggggccacctttgtccttgcagtgaccacagtctgta

SEQ ID NO: 7082 - DNA, 1333 bp, Homo sapiens
gttgggggcgtggagaaacagctctttttacataatgattgctactatgatttggttataaataaccagtgaagacaatcaggcttttctggcagtccctaattgtagtgaatgttggaatacagtgaccacccaaatgctctagactgattgggaaggtgccacttctaaaccagctgggctaagtgcattgcataagctgagtatttagcttaatgattagagccagttgacgaaacacaagaatatggaagcctcctgctacttctcagaagataagacaatggcattccaccaccagtgtttactgtggtaccaaaagggagctccagttacttccctctgtgcctataacccttggatcacctggttgcaccagacccatcctgactaaaatccctccaaaggaccaaagaggagatatggacaaaaataaaaaataaatctcatctgctctctttcctaaggacccagcagcctctatccatccgtcgttcattcactcattccacacactttcatctagcccctgctgaatgccaagcactgggctggaactctggggactgtggaggtggaataggagaatatgggcttcctgtgagcagtgattgcctaaaatatatacatcaaggttgtaggatcacgtgcaccactgcactctagccggggtgacagagtgagaccctgtttcaaaaaaataaaaaaaaattataggatcatggagaaagtgtcttaagtgtttggtgctgtggacaggcaacacaggcagaaactggtggctagggaatcagagaagttttcaggagggagcatttgacttgggcttgaactgagcatcatagggcaatatagaaacaagtttatggataattcactgaattggtggcagtttataacttgaatcttccttcagatgattgaagttagtagcccagctatgaaagtctaggttacagatgtctcagccacagcttgcatatatatggatgaggttcatacatatgcagacttgggctcctgccaagatatgagagttttggtcagtctctgtctcaattctaatgtctctgcctacatacttgagtccagagttgtcatgcaaagaacagaaccctggaacaatcacacagggatttggtactaggcttagccattttctagccatgggggcaaaagaaaattactgaacctctctgagtcccagtttatttgtctataaaatagggatagtgatactggggttacaaggaaattgtgagaattaaaatagttcaggagaggttaagttgtcctggggccacctttgtcattgcagtgaccacactctgta

SEQ ID NO: 7083 - DNA, 4076 bp, Homo sapiens
gcagaaaatgcccacgatgcaataccagagtctgcatgggaccatttcaacaacccttagaagctgactcagctgtctcctggccctgacttttctaagatgagaggagctgataggaacaatttgggtgagatgtttgtcctgagtccatttggttatggtcaggtgatacggtcacagagcacaaacaaggctggcagagccccactctgtgtgaggatggggtggaggaagcatgtgttcctcctgatgttgtcacacaggcacacatgcattcattaaaaatgtttttgggccaggcgcagtggctcacgcctgtaatcccagcactttgggaggctgaggtgggtggatcacctgaggtcgggagtttgagaccagcctgaccaatatggagaaaccccgtctctactaaaaatacaaaattagctgggcgtggtggcacatgcctgtaatcccagctactcgggaggctgaggcaggcgagttgcttgaacccaggaggtggagggtgcagtgagccgagattatgccattgcactccagcctgggcaacaagagcaaaactgcatctcaaaaaatatatagtaatagtaataataaaacagttcctacctcccagggatacagtgtgtgttaactaagacatttattcacttattccataaatacttattaagtacctagtacgtgatggtatttgtggaagctgcacaatgactggccagtggtggaggctcagtaagttggagtcacttaaagctctgccttccaggtgtgcacaactaagttgatgctccacacaggtgcttctgctcttgtggtctgtgtgcattctgaaaatctaggaatgcaaacaaggtgccacagctatctattgctgtagattatccatgtcaggccgggtggggtggctcatgcttgtaatcccagcactttgggaggtcgaggcgggtggatcacctgaggccaggagttcaagaccagcctggccaacatagcgaaaccctgtctctactaaaaatacaaaaaggggccccgctcagtggcttacgcttgtaatcccagcactgtgggaggccaaggtgggcatatcacgaggtcaagagatcaagaccatcctggccaatgtggtaaaaccccgtccctactaaaaatacaaaaatttagctgggtgttgtggtgcgcacctgtaattccggctactcgggaggctgaggcaggagaatcgcttgaacccaggaggcggaggttgcagtgagccgagatcgcgccactgcactccagcctggtgacagagcccctactcacccccacaaaaaaaaaaaaacaaatgagctgggtgtgatggcacatacctgtaatcgcagctatgtgggaggctgatgcacaagaattgtttgaacccaggaggtagaagttgcagtgagccaagatcgtgccactgcactccagcctgggtgacagagtgagactctatctcaaaaaaaaaaaaaaaaaagaaagaaaaaagaaaaaaagagtaaccatctcaaaacttagtggatttaaacagcaacagcttattatttctcatgattttgtggattgactgggcagttctgccccacatgatggcagctggggtgactcatgcggcagcattcagctggacacatggctgggccattctctccatatggtgttgcatcctcctctgtctcctgaaggatagcttggacttccttatagcgtggtggctgggttccaatggggagcgttccaaggggacaatcctcatgtggaaaagcttatcaagcctagttatatcaatgcaaatcattctggatttaagttgctttgtctcttgattgctcatgaacattcctatgtgagtaaatattcttcccaatgtgatttttttcttgttgttaaagacaggctctggttttatcgcccaggctggagtgcagtgacataatcatagtataagcatagctcactgcagccttgaactccagggctcaaacaatccttctgcctcagcctcccatgtagctgggactacaggtgcgcactaccatgcctagctaatcttttttttttttttttaaagagatagagtctcgttgtattgcctaggctggtctccaactcctgggctcaagtgatcctttcacctcagcctccctagtacctgggaccacagccatgtgccaatacactaatttaaaaaaattttttttgagagatgggagtcttgctgtgttgcccaggctggtctcaaactcctggcctgaagtgatccaccttcctcagcctcccaaagtcctaggattacaggtgtgagccactgcactctgcccccaacatgattttttttttttttttgagactgagtttcactgttgttgcccaggctggagtgcaatggtgtgatcttggctcaccgaaacctctgccttctggattccagcgattctcctgcctcagcctcccaagtagctgggattacaggcatgcgccaccacacccggctaattttgtatttttaatagagatggggtttctgcatgttggtcaaggtagtctcgaactctggacctcaggtgatctgcccgccttggcctcccaaagtgctgggattacaggtgtgagccacggtgcgcagccccaacatgattttgaatggctgactgatagaccatcattgattgaaccaatctcctcttgatgagtaattaggcagttttcatttggaggcagttataaacaactctatgaaggacagctttgtgccaagaactcagtacatatcgttgtagtagaaggattacagggccaaaggacaggtgaatttttaaagctttgccaaatttcccttcagaaaaaatggtacattttgcacttttatcggctgtaaagagacctgctctttcgaagtcttctggtcaatactgggtgtggtttgtcttttcagtctttgtcaatcgaaaaatggtgttttatcattgtcttcaaaagagagaagattagaagtaagttacccagagccagatgcttaagaagagttctcgtcttttactctgaggtagcccgaataaatcagcagggtcgaggccggggcaatgcaaagtgtctctctgcacaatgtcaggctattaaatgcacagtgtccctctgcccgctgactcaggctgtaaaattggagcatggtgctgacaacagtgctcatggctgtggggatgaggtcactgtgtcctcactgtgcggtcgactgggacaagcccatggctttcctgtcccatgtctgtgggccttccggcagacacagggctcgtggcctcaccctccacgcctgtgttggctttcaccttgttccctctgacccagtctggaggacctggtgctgcatctgggccaagctggctgtaactaataagagttgtaacaagggacatctaaaacaggaccctgagattggtctttgtttttgagcagccaaagccatacctcatagtgtcagaagttttaaaactgggggatccttcttgtgtggaagcagagctcctggactcagagccgaccctgcttcttcctagctgtggagcaagtaggggagcttttccaaacctcaatttcttcatctagagaatgagggtaatggtgatttaaggactattatcttcttcctctgtgcctgatacttgtgattctcacaggaaccctcaaaggctgagagtatcccacccacttcacagatgaagcaaactgaggcccagagaagggaaattacttgcccaagatcacccagcaagtaagaaacagagctggagatgagctcaggccagcacggaaccacgcaaactccttctgtaggctttgtaaaggattgatgagaaaagcagatggttaagagctctacaacttctgtgaggtaaagaatatctgcagggctggacgtggcggctcttgcctgtaatcttagcactttgggaggccaaagtgggtggattgcttgagtctatgagttcaagaccagcctgggcaacatggtaaaactctgtctctctaaaaaaaaaaaaaaaaaaaaatta

SEQ ID NO: 7084 - DNA, 305 bp, Homo sapiens
aatacttattaagtacctagtacgtgatggtatttgtggaagctgcacaatgactggccagtggtggaggctcagtaagttggagtcacttaaagctctgccttccaggtgtgcacaactaagttgatgctccacacaggtgcttctgctcttgtggtctgtgtgcattctgaaaatctaggaatgcaaacaaggtgccacagctatctattgctgtagattatccatgtcaggccgggtggggtggctcatgcttgtaatcccagcactttgggaggtcgaggcgggtggatcacctgaggcca

SEQ ID NO: 7085 - DNA, 4079 bp, Homo sapiens
gcagaaaatgcccacgatgcaataccagagtctgcatgggaccatttcaacaacccttagaagctgactcagctgtctcctggccctgacttttctaagatgagaggagctggtaggaacaatttgggtgagatgtttgtcctgagtccatttggttatggtcaggtgatacggtcacagagcacaaacaaggctggcagagccccactctgtgtgaggatggggtggaggaagcatgtgttcctcctgatgttgtcacacaggcacacatgcattcattaaaaatgtttttgggccaggcgcagtggctcacgcctgtaatcccagcactttgggaggctgaggtgggtggatcacctgaggtcgggagtttgagaccagcctgaccaatatggagaaaccccgtctctactaaaaatacaaaattagccgggcgtggtggcacatgcctgtaatcccagctactcgggaggctgaggcaggcgagttgcttgaacccaggaggtggagggtgcagtgagccgagattatgccattgcactccagcctgggcaacaagagcaaaactgcatcttaaaaaatatatagtaatagtaataataaaacagttcctacctcccagggatacagtgtgtgttaactaagacatttattcacttattccataaatacttattaagtacctagtacgtgatggtatttgtggaagctgcacaatgactggccagtggtggaggctcagtaagttggagtcacttaaagctctgccttccaggtgtgcacaactaagttgatgctccacacaggtgcttctgctcttgtggtctgtgtgcattctgaaaatctaggaatgcaaacaaggtgccacagctatctattgctgtagattatccatgtcaggccgggtggggtggctcatgcttgtaatcccagcactttgggaggtcgaggcgggtggatcacctgaggccaggagttcaagaccagcctggccaacatagcgaaaccctgtctctactaaaaatacaaaaaggggccccgctcagtggcttacgcttgtaatcccagcactgtgggaggccaaggtgggcatatcacgaggtcaagagatcaagaccatcctggccaatgtggtaaaaccccgtccctactaaaaatacaaaaatttagctgggtgttgtggtgcgcacctgtaattccggctactcgggaggctgaggcaggagaatcgcttgaacccaggaggcggaggttgcagtgagccgagatcgcgccactgcactccagcctggtgacagagcccctactcacccccacaaaaaaaaaaaaacaaatgagctgggtgtgatggcacatacctgtaatcgcagctatgtgggaggctgatgcacaagaattgtttgaacccaggaggtagaagttgcagtgagccaagatcgtgccactgcactccagcctgggtgacagagtgagactctatctcaaaaaaaaaaaaaaaaaaaagaaagaaaaaagaaaaaaagagtaaccatctcaaaacttagtggatttaaacagcaacagcttattatttctcatgattttgtggactgactgggcagttctgccccacatgatggcagctggggtgactcatgcggcagcattcagctggacacatggctgggccattctctccatatggtgttgcatcctcctctgtctcctgaaggatagcttggacttccttatagcgtggtggctgggttccaatggggagcgttccaaggggacaatcctcatgtggaaaagcttatcaagcctagttatatcaatgcaaatcattctggatttaagttgctttgtctcttgattgctcatgaacattcctatgtgagtaaatattcttcccaatgtgatttttttcttgttgttaaagacaggctctggttttatcgcccaggctggagtgcagtgacataatcatagtataagcatagctcactgcagccttgaactccagggctcaaacaatccttctgcctcagcctcccatgtagctgggactacaggtgcgcactaccatgcctagctaatctttttttttttttttttaaagagatagagtctcgttgtattgcctaggctggtctccaactcctgggctcaagtgatcctttcacctcagcctccctagtacctgggaccacagccatgtgccaatacactaatttaaaaaaattttttttgagagatgggagtcttgctgtgttgcccaggctggtctcaaactcctggcctgaagtgatccaccttcctcagcctcccaaagtcctaggattacaggtgtgagccactgcactctgcccccaacatgattttttttttttttttgagactgagtttcactgttgttgcccaggctggagtgcaatggtgtgatcttggctcaccgaaacctctgccttctggattccagcgattctcctgcctcagcctcccaagtagctgggattacaggcatgcgccaccacacccggctaattttgtatttttaatagagatggggtttctgcatgttggtcaaggtagtctcgaactctggacctcaggtgatctgcccgccttggcctcccaaagtgctgggattacaggtgtgagccacggtgcgcagccccaacatgattttgaatggctgactgatagaccatcattgattgaaccaatctcctcttgatgagtaattaggcagttttcatttggaggcagttataaacaactctatgaaggacagctttgtgccaagaactcagtacatatcgttgtagtagaaggattacagggccaaaggacaggtgaatttttaaagctttgccaaatttcccttcagaaaaaatggtacattttgcacttttatcggctgtaaagagacctgctctttcgaagtcttctggtcaatactgggtgtggtttgtcttttcagtctttgtcaatcgaaaaatggtgttttatcattgtcttcaaaagagagaagattagaagtaagttacccagagccagatgcttaagaagagttctcgtcttttactctgaggtagcccgaataaatcagcagggtcgaggccggggcaatgcaaagtgtctctctgcacaatgtcaggctattaaatgcacagtgtccctctgcccgctgactcaggctgtaaaattggagcatggtgctgacaacagtgctcatggctgtggggatgaggtcactgtgtcctcactgtgcggtcgactgggacaagcccatggctttcctgtcccatgtctgtgggccttccggcagacacagggctcgtggcctcaccctccacgcccgtgttggctttcaccttgttccctctgacccagtctggaggacctggtgctgcatctgggccaagctggctgtaactaataagagttgtaacaagggacatctaaaacaggaccctgagattggtctttgtttttgagcagccaaagccatacctcatagtgtcagaagttttaaaactgggggatccttcttgtgtggaagcagagctcctggactcagagccgaccctgcttcttcctagctgtggagcaagtaggggagcttttccaaacctcaatttcttcatctagagaatgagggtaatggtgatttaaggactattatcttcttcctctgtgcctgatacttgtgattctcacaggaaccctcaaaggctgagagtatcccacccacttcacagatgaagcaaactgaggcccagagaagggaaattacttgcccaagatcacccagcaagtaagaaacagagctggagatgagctcaggccagcacggaaccacgcaaactccttctgtaggctttgtaaaggattgatgagaaaagcagatggttaagagctctacaacttctgtgaggtaaagaatatctgcagggctggacgtggcggctcttgcctgtaatcttagcactttgggaggccaaagtgggtggattgcttgagtctatgagttcaagaccagcctgggcaacatggtaaaactctgtctctctaaaaaaaaaaaaaaaaaaaaatta

SEQ ID NO: 7086 - DNA, 332 bp, Homo sapiens
  SITE (267): n equals a,t,g, or c
tgcaatggggtgcagaagcttatatgccatcttgaggttacagaaagaatgggggcttggggcctgagcgcagtggctcatgcctgtattcccaccactttgggaggccaaggtgggtggatcacctgaggtcaggagtttgagaccaccctgaccaacatgaaaccccgtctctactaaaaatacaaaaaattagctgggtgttgtggtgcgcacctgtaattccagctactcgggaggctgaggcaggagaatcacttgaaccanggatgctgaggttgcacgagctgagatcgcaccgctgccctccagcctgggcaacaagagcaaaa

SEQ ID NO: 7087 - DNA, 189 bp, Homo sapiens
tcacgcctgtaatcccagcactttgggaggctgaggtgggtggatcacctgaggtcgggagtttgagaccagcctgaccaatatggagaaaccccgtctctactaaaaatacaaaattagctgggcgtggtggcacatgcctgtaatcccagctactcgggaggctgaggcaggcgagttgcttgaacc

SEQ ID NO: 7088 - DNA, 355 bp, Homo sapiens
tgcaatggggtgcagaagcttatatgccatcttgaggttacagaaagaatgggggcttggggcctgagcgcagtggctcatgcctgtattcccaccactttgggaggccaaggtgggtggatcacctgaggtcaggagtttgagaccaccctgaccaacatgaaaccccgtctctactaaaaatacaaaaaattagctgggtgttgtggtgcgcacctgtaattccagctactcgggaggctgaggcaggagaatcacttgaaccagggatgctgaggttgcacgagctgagatcgcaccgctgccctccagcctgggcaacaagagcaaaaaaaaaaaaaaaaaaaaaaaaaaa

SEQ ID NO: 7089 - DNA, 87 bp, Homo sapiens
agcctcccgagtagctgggattacaggtgcctgccaccatgcctggctaatttttgtatttttagtagagatagggtttcaccatgt

SEQ ID NO: 7090 - DNA, 4654 bp, Homo sapiens
acacaccccctcagtaccccccaccccctttttaagcaatgctttgttgtgctaaaactagttggacgagttagggtgttactgttgctcccgaggccctggccaatagaaccagatccaccccgctgtgcgtaagcgcgcaattaaggatttaaccaaggctgtgctgcgcctcagccagcagtcagccggccggagacagagacttcacgactcccagtctcctcctcgccgcggccgccgcctcctccttctctcctcctcctcttcctcctcctccctcgctcccacagccatgtctgcttagaccagagcagccccacagccaactagggcagctgccgccgccacaacagcaaggacagccgctgccgccgcccgtgagcgatgacaggagtgtttgacagaagggtccccagcatccgatccggcgacttccaagctccgttccagacgtccgcagctatgcaccatccgtctcaggaatcgccaactttgcccgagtcttcagctaccgattctgactactacagccctacggggggagccccgcacggctactgctctcctacctcggcttcctatggcaaagctctcaacccctaccagtatcagtatcacggcgtgaacggctccgccgggagctacccagccaaagcttatgccgactatagctacgctagctcctaccaccagtacggcggcgcctacaaccgcgtcccaagcgccaccaaccagccaggtacatggacagggggaaggctgggcagatacagggcgactaggacgctgggggcgcgagatggggtggtagattgggggtcacagcggttcacggcagtgggggcgcacgcggcagaagggagtaggactcagaccctccaacaaagagagtttctcgggccagcattttagggatttttagtaggagagccctgtggaggttcgaactagcgtctctcccctccggcaccttccaaggcccttcagtcgctgaattcccagcttgcccggccaggaagccggctaggctggaaaggggataggggtggagagaagaaagaatcaagcagctcctggcgtttgcgtaacaaagagaaggttacttgggaattttggtaagcgtgctgggttggtgcgagtgggaatagaaggctgcctcaaaaactcagtcaggattagtttgagagccgccacaagctagcacggtgcgggtgccctgagcacgctgggtgggggtgggggggttaaggagttgtagccagccagagaagagcgcgccgagagttttgcggtttatccaggcatttccaaaaacaaaaagccatttaaaggtggaggagggttgctgaggggtcacgttgtaggatagatttttttttctgtctccataggcgcccacaatttgtctttccgtcctcctttttcgtccgctttgaaacttacttagagagtttaagagggttagtgagcttgggcggtaagagaaaggcatgaggctcggcggagaggttttattggtaaggtttgatctcttcccaccagcacattaataatcctgctaatattagcatcccctactctggcagaattgagaccacagccctcatcctccacacttctccctggaacttgacacacacacacacacacacacacacacacacacacaccctggagaggttctccgtcagttccagaggggtggtagttttgaggaaggggagttgtagccccagggcaggtttgtacaacacgcgtttggcaatccctccccctcccgcccaaacccatactcatgacagtgagaatctcatcctgacctgccgcccctttcctacgaaaacaccccaccaccggttccttctcagtgtgtgactcttgctgaactttaaaagagagccccgggttgaggtgtctacgtttctttcactctctctgtattccgtgcataagtggaagatttcttttttttttttttttttttgccaagaacatattaagtctatttgtaaaagaaaccagacacatctgtgccctcgcagatctgcagcgagattatgggggttgcataatcgaccctctgtctgcggcggccccgaccgcttgctgctgaagtgaaggagcagtttgcttgtgggtctttgaactttggagacctcggttagcgtcttccctgcccaagagtctggcttctgcgggcgcccgaacagacgccgacagaagtagggtcacggcccagggccacctccttgaagcctggggaggggctggtgttcttgaagcctggggaggggcggaaacgcggaggagcacagggtgggcgtaaaaacaagtccgggagaagaagcaacgaccgcaagagctgaatcccagatgccaaggagaaagcagtgttgtaggaagcgctttgcacaaactatctgaatgaacagagtaggaattaatcagaggctatcccgcttttccatatttggggtaggtgcatatttatcgcggtcctgaaaagcaaaggtggtggtgatatgggcaaagaatgaagactgagtggtaagaaactctaggactctatttgaggcccttccgcaaaaggggcattgtctggtgacaagctttaactgagtctgttttgattatttagagaaagaagtgaccgagcccgaggtgagaatggtgaatggcaaaccaaagaaagttcgtaaacccaggactatttattccagctttcagctggccgcattacagagaaggtttcagaagactcagtacctcgccttgccggaacgcgccgagctggccgcctcgctgggattgacacaaacacaggtaaatacggcgctgccatgcactagacctgcctgagctgcacgtctggttgggtcgcgcggttcagtctcgatgggactggagctgttttgacagtacccgtgagaaactaacagacccaaagacatcagcccctatgctttaactcggtgagtcaggccttgagacggtggggatggtattcatcagcggtctggagatacctcccactaaccgcgccccccgcccccaccccgtagcgggcctccggagctgtggggccaatttcgcgggttgaaagcaagcggagggttatttctagggcggcctaggcagcccagagcagctatctggttttcttaacaatgtagagcctcctcgggggtgagcaaggcctggtgttctcgcggtggtctcaggctaagaaaaggctgagaacgtcgcctggagcggagaaactgaagggtcgtgccctgagcctacgggagcttcaggccacggccaccgaagggtcgcgaggtggggggcgctattgtacgtgagaagtcttcctggattgtcccattccttttactcctccaacccagctggggcctacggaagcataaagaatgttcgagtcgccgccaagagctgcagtcagattctggcctctctgagctgcagagggagtgaagggagtaggacgggaggttgggagctcgctcctttttctgaccacaggcgcgcgtagcccgccccacgccccttccccgccgggctcgcgcgattgttttggagaccttcgccgcgttccgcgcgtcctgcgcaggcttacacgaggcgcgccgccgccgaggacactcgggcgcacacccgccgcgctggcgtcccccacccccagcccaaacaaaagacaagccttggggtcgtggcctcgctgggccggggcgccccgagccggccagggcgccctctggggccagagctccatggtttgcctaaggcatagcttcttggcggtaggccgcaagcggcggggagacgccaggcagggctgggccgcccagaggtccgaagatgcctccagtcgccgccccggggaaggcgcgggcgacctctgagtgtcccggtaacgtgtgcctttgttccccaactcaggtgaaaatctggtttcagaacaaaagatccaagatcaagaagatcatgaaaaacggggagatgcccccggagcacagtcccagctccagcgacccaatggcgtgtaactcgccgcagtctccagcggtgtgggagccccagggctcgtcccgctcgctcagccaccaccctcatgcccaccctccgacctccaaccagtccccagcgtccagctacctggagaactctgcatcctggtacacaagtgcagccagctcaatcaattcccacctgccgccgccgggctccttacagcacccgctggcgctggcctccgggacactctattagatgggctgctctctcttactctcttttttgggactactgtgttttgctgttctagaaaatcataaagaaaggaattcatatggggaagttcggaaaactgaaaaagattcatgtgtaaagcttttttttgcatgtaagttattgcatttcaaaagaccccccctttttttacagaggactttttttgcgcaactgtggacactttcaatggtgccttgaaatctatgacctcaacttttcaaaagacttttttcaatgttattttagccatgtaaataagtgtagatagaggaattaaactgtatattctggataaataaaattatttcgaccatgaaaagcggaatgtttctgaaaaatacttcattctgcccctctg

SEQ ID NO: 7091 - DNA, 239 bp, Homo sapiens
tccaacaaggcaaaaaagaaaacagaagtcggggctctatgcatgcagactgtatatgtatatatgttcaatgctatactttgtgtgtgtgtgtgcatatatatatataatatatatggcatgtttatagtactgccatatctcataattgtttcaggtagaaagtaatgctgaaataaaaatacatccctctcaccctgtatgtgagttagaaggcaacagaaatccctcaataaccc

SEQ ID NO: 7092 - DNA, 14769 bp, Homo sapiens
cctccccatagggttcccagcaccatgagggcctggatcttctttctcctttgcctggccgggagggccttggcagcccctgtaagtacctaaatatcatgtcttcttgttttcattcctaccgctagcaccaggggttctgagcctgccagccctggatgctgaaagggaacagggacttccccatttcaagttagtggtcttttttttttcttaagttaggaagctcgggataaaaactgggatgaggaccattgggtggaggtatcagagaagagagagttccatgtaatgttagataaacttcttagtagtcagagcctcccagcaatgaactaggattgctttagaaggaaatgacctctttgtcatatgaggaattcaagcaggcaggagacaggatgtgggggatttctggtaggggtggtattagaagagattcaagctatagagagaggaatgtgttggcttctgaaacagtgagggttgtttggttgtaagcaacagttcaatctgactaaattggggaaggaggggaagatacagaggtagattataatattaaaggccttggggaggactggaaaagggcagctctaggctttgggagttaagaactaatggacagtctctgagatattgctgtctgaatgaatcaactccagcaattttcacatcttgagagaatgtgccaagaaggtttttataaattcaaaaaatgagagccaatctggctgagcttgggtcctgagccagcttcttggccaggtgagagtggggccccttgattgacagacagttcctcgaagcattgcatgcagggacaggagtagttatccacagctcatctggaagccttcacaaggagaggaggaagaaacagggcaggcaaaaagtgcaatttctttcaacctgtgatcccctcatcctctgtttactaagaagtgggagtgatggcagaccctggcaatcttgatcaggctggtagatggaggcaaaagtttctcaaagttggcattaagttttgaagcagctccagccagctaagggcctcaaagttgtgtgttttcttgcttcctcctactccaagttgaaatggcaagaaaaattgcctaataatactactaataatatcacactgtgaggaagatgatgacatctgttaaaattcacagtgtcatcccctctggatgtcaattttcctatctgtaaagtgaaagaattggtctggatcagtgattttcagactttataagaattcaaagcagcagaaatacttttccaagctaaatcttaggtagacacctaggatataaaatatataaaatgggagctgcttgagtgttccacggtgctcacatgactggcttcttctttgttctgtccctcaccatggcagtccatgaggcacaactttggggatctccagtaagctgctctccaagctcccctagcctgtatccgaggccacaggcactttggaggtgaagctggccttattcctgacccctctgaacgctactttctctttccaacagcagcaagaagccctgcctgatgagacagaggtggtggaagaaactgtggcagaggtgactgaggtatgtgggcagtgaccgcagccccttagcccctctctacctgtatctgtgccctgagaaattagggcggatgctgtgggtctcaatgctagagtggggcattcgtctccctgtacacacatagcatagatgcaaaccctgagtatatcccacatcctgacacactcctgaatgcttcccaaaccttcaacggaaccctacgtttggggaccaggaccttaaaatttttgttttttaagctatgcaacagttgttcttccatgattacccacagtttttgcaaacgtaaaacagaggaggccgggtgcggtggctcatgcctgtaatccctgtaatcctttgggaggccgaggcaggcaattcacgaggtcaggagttcaagaccagtgtggccaacatggtgaaaccctgtctctactaaaaatacaaaaaattagctgggcgtggtggcgggtgcctgtaatcccagctactcgggaggctgaggtaggagaatcgcttgaacccgggaggtggaggttgcagttagccaagatctcgccactgtactctaccctgggcgacagcatgagactccatctcaaaaacaaacaaacaaacaagcacacacacacacacacacacacacacacacacacacacacagaggaaaggggagatgcttgggtgtggctggcaggggtggaggcttgacaccctcttgtgaacatagatctcagtcaatttagaaagtttactttgccaaggttaagaatgtgcctgtgacacagcctcaggaagttctgagacatgtgtccaaggtggtcgggagtacagtttgctttcatacattttagggagacacgagacttcaatcaacatgtctaaattgtgcattggttgagttcgctaaggcaagacaacttgagaagtgagggcttccaggttagaagtagataagagacaaatggttgcattcctttgagtccttgatcagccttcccctgaatacacaatttaatctggctcagtgaatctgcatttttacataaacaataggggagaggaagcaatcagataagcgtttgtctcaggtgagcctcagagggatgactgcatagaataggaggcaggtttgtcctatgcagttctcagcttgacttttccccttagcttagtgattttggggtccaaggtatattttcctttcacactctctttccctaacacccctggtgacctctaaggcagctcaacagaatcccaggcatactgcaaaacacagcaggcctatagattaaatctggattcccaaccctgcgtttgtgctttctgtgacctggaacccttcagctacccttatgggtctgggatgggagtggggccatttcacccattcttctccctcaattccaggtatctgtgggagctaatcctgtccaggtggaagtaggagaatttgatgatggtgcagaggaaaccgaagaggaggtggtggcggaaagtatgtcccttccctgtaacttggcacatccaagctgcccttggctgcctgggcctggggcacgaggacagcctacatgaggctccttccagcagaaatgcagggtggggtcctcagtgggctatgaaggaaacacggctttgacttaacaagtgggaaactgtggcactcagtcccctgggatctgggcaagatcggtttccaggccatccatgtgtgtggtaggaaggagagttctccagctggaaatgggcttctcccctcatagctctttgccctgagtccaaagctgagtttcccagtcccacggaggtcgctgatcacatctggtcaccgaaatctcccattgcttctgtatcagcccgtgccccacagagaagtagaactgagagaagagatcaggaacttgcacactcataagctcattctatttcacacagtccaaggaaacgaggtcctgaggaaatgcaacctgacataatccgtaccatgctatccatgcgttagtgccctgggagagaaatgacctaggggctctggctccagccctaggtgcaaagcatttgtactcaaggggttaagagcaaggactttggaagcggtccaaccaagctttgaacctaggcttctccacgccagcttgcttagcatctcggagcctcagtttctcatctctcatatggggctgatgaagatggcagacccttgtcccagggctgccgggaagttttcagacaagctgagtaggcatccgctaaaggattattaaaacacccaaaataaagcattgcgaggaaaaggccacattaagctctcatcctgaggggatagctaatggtatttgatctagctgggcacagggtttctgttgaacagagggacatctactgagtcatgttccttcccgcctccacgcccacctcatccggtgtttaccaggctctattgtccagcatggactttgaggctcttctcccttttcctttactgccacttaagtctgttttgttgggcctcagctccctggctcagtgtcaacagctgactttctaagccattctagaaagcttattctggaatccagaaatgccccactgtgattgttcaatggagacccaggaacacaatggttgcttcaatcttcaggaaagccatatggtatctagtgtttctgggtcccagactgagcctccagccccccagaagtgcctgacctctatctcaagctaaacctctaatccccaggctgaaccagctgctgccctaaatgttgactgtgaggctcagtgcaagagcaggcaggactcagggctgtccaaagcccagagtgggggccacagtcaaggactgtcagccctgagatctgtccaggtaggatgggggtggatgtgctagtccaggtgatgctaactcccttgtctttctgccctacagatccctgccagaaccaccactgcaaacacggcaaggtgtgcgagctggatgagaacaacacccccatgtgcgtgtgccaggaccccaccagctgcccagcccccattggcgagtttgagaaggtgagggctgagagacaggggcagggggaagggattgggcacttcggaatacaggatgtctgctcaggaaactgttggcttggtggttctatggggcagtgccagtctcagaagtccccttgctagacctagtcccagcaggaaagaggggatgagtcagagtgctctgcctggcactggatcttttcagcaaccagcaagactttaaacagcaccatcaggttccaagccctgtgccagactcttagagctaagagtataacagcatcagcaaagaatcaggtccaaaaatacgggttctggggccaaactgaaggttgacttcaaacctcatctccatcacttattaggtgtgagatttaagctaagttgccgaaccttttcaggtctcagttttctcacatccaaagagaggataaaaatagtccttaactcatagatctgttgtggagatgtgtcagaaatgtttggtacataacaagtatccaataaatgctacttaattttaaattatctctcaaatatgtcccttctctccaataggatccatccatccgtccaagtaaatattttttgagtgcctgctcctgcctaccatcatgctagtggcagtctagctcatggcagcaaatctagggccagcactattcctacagcctcccatctggcttctccatcttcagtttctccagagactacatagcctctgggctccacattttaatatcattgttaacattttcctcctcctcacccctccccactcccagtgcccagtcaccagtgcccatcagttctccctctgcagtgacatataagctatactaaataagtacggacaggatgttcaacacaggctcccctcctcctaacacagctacttacggccactgcatgtccagccctcaacatctctgcttggccacccctatgttcagagatcgactaggactccattggctcagcatacagttgtactcacacctaaggtttagtacagcgacatattcaggatatacagctggatcgtaagggaaaaagacactagcagagtctggaggaatctgggtggagactgactgactcccaagaggggtcatcagagtgcattcttaccccagctacaaagaggcagccacatgtgagtgatgtttctttccagggaagttcattagagactcagcacccaaagttttaattggaggctggtcacataggtaccctttgcctagcatgcaccagaatttcacacttccagaaggaaagcagatgttcagcataaaccagattgtttgtacaaacagtccaggcatagcgagccactcttatcagttagggaaagatttacaacagtgcagagaactgtttcccagctaagttcccagacaccagccacaggctgaccttacaagcaggccttttctaaggataacaattccaggcctgctatgttaactcttctttgaacactcttgtttctctcccattcctgtctttaactttctcttcaaatatcttccaggatttttttccctatatctcagaactgactcagtcatgcctctgctcagagaccatcgatggctctcagcctgggctgagcattgacctgggaacccaaaaagtggatttgtggcccagccctatcactaactcactatatgacctcaggctaatgacattccttgcttaaccctcagtgtccccatctctgaaatggacaaggatattggtatcagcgaagggctttgggaatgaaggagggggtactctgtgctttgccaacaggtgtgcagcaatgacaacaagaccttcgactcttcctgccacttctttgccacaaagtgcaccctggagggcaccaagaagggccacaagctccacctggactacatcgggccttgcaaatgtgagtgtccttgggcccttccagactcctgtcttggggagagagctctgagctggcactgatgctgtctctgccacccccatgctgggtgatcttgggcaaatctctctccctttctgagtctcggcatccccatttataaaatgaggtaattgtctatgagttggctcctctcaactctgagttcagggcactttctggggaaggactgagcgattatggaaggtcaacatcagggaagatttctggagtctctcactagcatctgagacaactgcatttcatttctctaatgaggaagaatttcttctctcaggctaagttgaatctttcttgcttcaacactgtaaagcaaaaatgatgtttgacctgggcctacaaaatattttgaaaatatctgattttgaatgctttaaaataagggcatgcctgtcggtttgctttgggccctgttacttggtactgtcatatcttcacccttttactccattacattcctatctgccctccgaagagagaggataagcaccctcttctggaaacctgggagtcagttgtctggggagggatgccagggtgtggtctgatctttggttagtgaccccagctgcaaactcagtggggccaagtgccttgttcagtatcctccctatcatgggagacccccaagaccacacctgctccccctccaaggcaacatccacactgtgggtcttgtgtattctggcacccgatggcaatgaggagagccactcacctacctcaggtgtacagggtgcagaaaagtatgtagggggtgggaaacaaagttctcctcgtgggaccccaggtatgaaattgagaaggtacagagtagaaaaggagggttgggggaagaagcatgggtaggaagtccctgggcagcaagactagagagcctgtcttaaggagtctttatgaagtggctttgctttccctgaggcatgttgcccactcacttcaactcctaaggtttttatcaccagatattctctcccagaccccagctgatgatgaaggtagcctcacagaggggactttccctggttcaatgatgagggaagaacagacccctaagcccccaggtgaccacactgccctggatgctggatgaggctctgacattgtggccttgagcaagtcccttctctccatgctgacctctaataagtccagtacaaagtgtgaacctgggtcaggcgcggtggctcacgcctgtaatcccagcactttgggaggccgagtagggaggatcacttgagctcaggagttcgagaccagtctgggcaacgtggcaaaaccttgtctctggaaaatatacaaaaattagctgggtatggtggcatgtgcctgtagtcccagctactcaggaggctgaggagggaggattggttgagtccaggaggctgaggctgcagtgagccgtgattgtgccactgcactccagcctgggcaacagagtgagaccctgtctaaaaaaaaaaaaaagaagaaaaaaagaaaaaagaaaagaaaaggaaaagaaaagtgtggacttggatgaaatcttcaggtccaacatttgggattctaagttccaaagaccaggttggaatcatttctaagaaggttctggtggttacacattcctgagtcctctactccccactccctgccaagctgggcctgtggatagatgtgatccctcagcctcccagcttcaaacacctgccagtggttgacgtgaacaacatgggctcagtctcagctaggatcacacccaaagcccagcacccagtaaggtgcaggagccatccatttccctgagcagagcagattaggctgaggaaagcagcagccatgcctttgcacaatgcatttctagggcattcttcccacacataatctcctctgctcattgtcctgtgaagaaactgtggcctggagaggttgagccactgtgccaaggccaccaatgcaggtggtatgtgggtgggtgggggcctggggtggggagcacggcccaggcagggtctgtgctgaccgcccttgtgtttggaacctagacatccccccttgcctggactctgagctgaccgaattccccctgcgcatgcgggactggctcaagaacgtcctggtcaccctgtatgagagggatgaggacaacaaccttctgactgagaagcagaagctgcgggtaagtggtctctctggccttgctggccccgtgctggtgaagatccagtcccattcctagaactgggcccccagctgcagggcggcatcctgctccggagcgtgcatttacccctgagcaccaggacacgtacttctcttcctgcctttggaggctgtggtgcacattaacatcttagaggctctgagaagtcctgcagcagagacctgctccctttgcttaacctaacgttaaacaaaagagacacaaacagccctattcctttttcctttggagtctgtggatcttaagctttaatgagcatattaactaccccaagaagctgataaaatgcagattccttggccccatctcaggccactgaaacagtgtctctagaaagcaaggcccaggaagctgcattctaaatactccccaggtgatttatgtttattttatttttttgaggcaaagtctcactctgttgccaggctggagtgcagtggtgcgatctcggttcactgcaacctccacctcctgggttcaagtgattcccctgcctcagcctcctgagtagctgggactgcaggcatgctaccacacctggctaatttttgtatttttagtagagatggagtttcactgtgttggccaggctggtctcaaaactcctggcctcaggtgatctgcctgcctcagcctcccaaagcgctgggattacaggtgtgagtgtgtgcccggccttcgccaggtgattttgatgtgggtagctatatggagaattctttgaggtcatcccaggcttctatttttgtgaatgagatgctagtacccatctatgacacctccctcccctcgctgtgagctttggtctggctagtctctgcctgctctggccttctgggaggggtgggagggcccgactggtccagacaatctccatggacctcttgtcacacacagtctctactccctcaggtgaagaagatccatgagaatgagaagcgcctggaggcaggagaccaccccgtggagctgctggcccgggacttcgagaagaactataacatgtacatcttccctgtacactggcagttcggccagctggaccagcaccccattgacgggtaagaccccagaccctagagtgaacagagctcaaggctggcaggtgcactagctatggccagaaagcctctcagcagcctatactgctccaagccctggcatccacagtttgcctggggattggagcagaaggatgaggcatctggagaaaagatgtggacctgggacaaagaaaccgataagacactctcatgctgaggtgaaagtcagtaggagctcaaaatagctccataatcctgcaagtactaggcgtggatatctggataatgaaggagtgtgaattaagaaggagtaccaggctccaaggggtggcaggggacaaggttgggtcagccacacgccccctgtccttcagcagaacatccaggggcagagcagccacctggcactgtctaagccccctcctaaggctcagccccaatagggcccaactgaccctggaagttatccaaaaaagcctgtctattttgcaagcccccagtttgagggctcttgtcccttgtccaaacgagttatgaggccctgtgcaactgcactgccgaacaggcaggcagctggccagttagcaaatgcttatggagtgtgcattttgtgccctgcactattctaggcaggggattgaacagcagtcagagctggcatggtccttgccctcatggacttatactctgttcataacctgtcactaccttctgaacttctcttgtggtgatgaagtgagagcccctgctcagcctcagatggagcaagctacacctgcaccttcccagagtggttttttcttcgtccttgggttgtggaagcagagcatcacacagaggggaaaggaagggctgccctactcacatactcagggaacttcctctctaggatgttcacccctcgctctttgtccagcctgtgtgcctggagtctgccaaccctgccagtgatcctgagggctggggtctcctgggctctgggaatctcccggccacttctctcccaggcttttgccatggctgggatccaactgagtcactcattatggcagggaggggaaaagtcaaaggggaacatctggagctcaggcaaagcaatttgatcccactgcaacagagggcctggagggaggctttcagatggggtgcaagaacagcacatctgggaaaggggtccagcttgggcaaggggacccgcttcctcctcctcccatcccagggctgtaggtgaccttgcctgcatccctgcccctccctgggcctcagttttccaccagtacaatgaaggggaggagaatgttcctatcagttcaaacattgtgtgatttctttggtgagctgggtggggctgcgaggtctagaggttaagaagacaactggagtcacattgttccctggagatcctttgtggatctttagggacaagtagttgggggctctgggaaacaaagaaaaaaattatacacatgctctggagtctaaggccagcagggagaatagggagggaggacagtgggagagacatccaaagggcctccctctcagacattacaggatacacaagcaaagctctatgaagatggttagagctcccgttgaccctcactgccaatcccagtccctttccacattcctccccagaaggcagcactgtcaccagattggtgtgtcatttttagaccctttactaggcatttatagatgtataaatgtgtgtccatagacaatatacagtgctgtgtcatgctagattttgatctacccatagcagaagtgctgaattttgattttaagtttctgtgtccccagttctcagccaattaggaaacaatcaaatacaccaaacagacctttgtttttgagaccctgaaaccttagagctggaagggccgttagtaattatggccatctcctcctctttgctggaaggagaaactgaggttccgaatggtgcactgctgttctctgagtctcagagcagtcagtggcagagctaggggtagacctgggattctggctttttgtcctgctttaaatatcctttcctccatgctctggggcaggctaactccccggttgcctcccaaggctgggtgtggagcttttccatgcctcaggccctcccctgcctccttccctgcaggtacctctcccacaccgagctggctccactgcgtgctcccctcatccccatggagcattgcaccacccgctttttcgagacctgtgacctggacaatgacaagtacatcgccctggatgagtgggccggctgcttcggcatcaagcagagtgagtgtctgaacaaagaagcaaggggcatgggcagaaacactgctcccagggtgctgggttgtcatccccccactctccgctctcttggtctgtctgttgtctgtcctctctgcctgtctctgctctctctgcctatttgactcctgtctcttgggcgtcttcctgatccttctctgtccatccaactgtccctctctctttcccttcctcaagcgttagcactcacccgtgctaaacactattttgggaactggcaggcacacagagaggaaacaggaagtgtaacttggcagcgtgtgtaagagacagggacaggccagagacagagagagcgagattcctccgtcactgacttcctgggtgaccttgcatggccacctagacccctgcccctggggatgggtgggagtccactgactccttgggaagtgcgttatcatcgacacagccttatttttaaccgtgctcttttcttgctttgcagaggatatcgacaaggatcttgtgatctaaatccactccttccacagtaccggattctctctttaaccctccccttcgtgtttcccccaatgtttaaaatgtttggatggtttgttgttctgcctggagacaaggtgctaacatagatttaagtgaatacattaacggtgctaaaaatgaaaattctaacccaagacatgacattcttagctgtaacttaactattaaggccttttccacacgcattaatagtcccatttttctcttgccatttgtagctttgcccattgtcttattggcacatgggtggacacggatctgctgggctctgccttaaacacacattgcagcttcaacttttctctttagtgttctgtttgaaactaatacttaccgagtcagactttgtgttcatttcatttcagggtcttggctgcctgtgggcttccccaggtggcctggaggtgggcaaagggaagtaacagacacacgatgttgtcaaggatggttttgggactagaggctcagtggtgggagagatccctgcagaacccaccaaccagaacgtggtttgcctgaggctgtaactgagagaaagattctggggctgtgttatgaaaatatagacattctcacataagcccagttcatcaccatttcctcctttacctttcagtgcagtttcttttcacattaggctgttggttcaaacttttgggagcacggactgtcagttctctgggaagtggtcagcgcatcctgcagggcttctcctcctctgtcttttggagaaccagggctcttctcaggggctctagggactgccaggctgtttcagccaggaaggccaaaatcaagagtgagatgtagaaagttgtaaaatagaaaaagtggagttggtgaatcggttgttctttcctcacatttggatgattgtcataaggtttttagcatgttcctccttttcttcaccctccccttttttcttctattaatcaagagaaacttcaaagttaatgggatggtcggatctcacaggctgagaactcgttcacctccaagcatttcatgaaaaagctgcttcttattaatcatacaaactctcaccatgatgtgaagagtttcacaaatccttcaaaataaaaagtaatgacttagaaactgccttcctgggtgatttgcatgtgtcttagtcttagtcaccttattatcctgacacaaaaacacatgagcatacatgtctacacatgactacacaaatgcaaacctttgcaaacacattatgcttttgcacacacacacctgtacacacacaccggcatgtttatacacagggagtgtatggttcctgtaagcactaagttagctgttttcatttaatgacctgtggtttaacccttttgatcactaccaccattatcagcaccagactgagcagctatatccttttattaatcatggtcattcattcattcattcattcacaaaatatttatgatgtatttactctgcaccaggtcccatgccaagcactggggacacagttatggcaaagtagacaaagcatttgttcatttggagcttagagtccaggaggaatacattagataatgacacaatcaaatataaattgcaagatgtcacaggtgtgatgaagggagagtaggagagaccatgagtatgtgtaacaggaggacacagcattattctagtgctgtactgttccgtacggcagccactacccacatgtaactttttaagatttaaatttaaattagttaacattcaaaacgcagctccccaatcacactagcaacatttcaagtgcttgagagccatgcatgattagtggttaccctattgaataggtcagaagtagaatcttttcatcatcacagaaagttctattggacagtgctcttctagatcatcataagactacagagcacttttcaaagctcatgcatgttcatcatgttagtgtcgtattttgagctggggttttgagactccccttagagatagagaaacagacccaagaaatgtgctcaattgcaatgggccacatacctagatctccagatgtcatttcccctctcttattttaagttatgttaagattactaaaacaataaaagctcctaaaaaatcaaactg

SEQ ID NO: 7093 - DNA, 465 bp, Homo sapiens
gtaggtgggagatgtaacatttgccctgtggactgaatgatgcagtctgtcccttggtcagcccagggcagatcatacatggaatacatgttactatcacggtagctctgccaccaacttactgacgttcagggagcttgggtgacttggtcatgtgatgaggcaccgataaagggggagaactggaacctggagcttcctccctcatatctggatgtttcactatagggagctccaaagtttaaaaaaaaaaatcagcatcaaagagccatgatgtatgaatcagctcagggccccgggcgggaggacagggtagggctgcatgccctgctggcttcagcaaaattcatcagctgagttaacagggtccctcagaatccagaacccttaagggtagagcttctatatcctccttctatctgtccttctccccacttcaaatcaatttttttaaaaaaaaaaaaa

SEQ ID NO: 7094 - DNA, 174 bp, Homo sapiens
ggaaaaaactctgtgtacctttgtcataaatagaaggaaactgtaaaaacaaacacataaaaaaaacaaaacaacttgattcagttccagctggatataacttcctgtggaagctctgagctggaggcttattctctttttgttaaaaaaggagatagatgagtataaaggagg

SEQ ID NO: 7095 - DNA, 730 bp, Homo sapiens
gagccaccgcacctggcccataactctttaagggaaatttttagtacctgaattctattttttagcacaaatcgtatctcatttttaatcagtttatctatattatgtagctacttagcattctggaaaaattagcttccctggtaatagaaggactccttcagtcacctagattggcccacatttccaaatttgcttgatgtttcaactcgagctttgcctcattcagaaaccagtagccttcctgattctggtcactcatggagtgagtcctcctctcccaggtaagtcagaagcgagtgagtcacctccagatttcaggtcccagctgccaagctgtagtctaaaacttcacggcacttcccatcccctgaagatgtcacaagtacaagctgcttccagaggcttctgtaaccctcattaatatgtaggcatccagccaggcgcagtggctcacacctgtaatctcagcacttttggaggctgaggcgggtggatcacctgagttcaggagtttgagacctacctgaccaaaatggtgaaacccagtctctactaaaaatacaaaaaattagccgagcatggtggcgggtacctgtaatcccagctactcgggaggccgaggcaggagaatcccttgaacctgggaggcggacattgcagtgagctgaggtcgcgccattgcactccagcctggacaataagagtgaaactccgtctcaaaaaaaaa

SEQ ID NO: 7096 - DNA, 137 bp, Homo sapiens
ttttttttttgagacggagtttcgctcttgttgcccaggctggagtgcaatggcacagtcttggctcactgcaacctctgcctcccgggttcaagcgattctcctgcctcagcctcccaagtagctgggattacagg

SEQ ID NO: 7097 - DNA, 329 bp, Homo sapiens
catccaagttgctatgaatgccattaattcattcctttttatggctgagtagtattccatcgtatgtctatatcacagtttctttatcctctcgttgattaatgggcatttgggctggttccacatttttgcgattgcgaattgtgctgctataaacatgggtgtgcaaggatcttttttgtataatgacttattttcctctgggtagacacccagtagcgggattgctggatcaaatggtagttctacgtttagttctttaaggaatctccacactgttttccatagtggttgtgctagtttatattcctgccagctgtgtagaagtg

SEQ ID NO: 7098 - DNA, 8772 bp, Homo sapiens
ggacttgggtttgtgcactgttctgccactaaccatggggccttggacaggctttctgtaccttgacctgtttttaaaatggagatagtaattaggaaagaacttctgatgtgaaagcttgaaaaacgcttgacacaggtgctgatacatagtcatcatgcgataaatgctattaatttaccaggttctaagcgttaacaggagcagttctccactgtatccttagtgcccagaacagattgatagctatcaggaaatcttcgtatgtatgaatctctcacaagtcttttctacaactgcagcctatgagctagagaggttgggcacagctctactaatttgatatcatggaatttttagcttttatatctaagattcagtttcatcaagtcttgcactgtacttcttccatgagggaatttggttcatgcttatctttgtgaattatttgtgaatatttattcaccatgttgattgggtttggcagaaatagaggacagttttttcacttgattttgggttttgattttactttaaaaaatattctaggggaaaatgtagccaacatatacaaagatcttcagaaactctctcgcctctttaaagaccagctggtgtatcctcttctggcttttacccgacaaggtaagagatgaaatactgtcacaatttaaatgactgtaaagaatagtaagtatacttaatattcttggtgagtatgacatctgactgccctcttttctgctcctggcgaaatgttcctcttctaagactaagcttaatattccttaagtgctatttactttatctttgtatctccatgccattttgtacatatttttattgtagtctcttttccatggactataattgttgatatgatttctttccacctaaggttgggaataccttgaaggtagggaatatatcttacttttgtattcttgtggtctagcatgaggtcaggtacataatagatgctctttctctctgtgtagatacatatatatatgtctatatagacatatatttagatatatatgtctatatagacatatatttagatatatatgtctatatagacatatataaataatacatggtctgtaattggatctaagtttttttttttaaaccatttattggaggctctttgcaggcacttagttggatatttcacatgcattcttatttactgctaatgacttcgaagtaaattatgtggtacttattttatagatgatgaaatcataattcaataaggtttataattcactcgagatccttatattagcttctcatttttttgcagttaaaaaaattaaaatctcagtgtcttacagtgaaatttacttctcactcgtgtacatgttgtgtgtgggtttgctttggctgaaggagttgtctttatccaggacatgctcctcttgtagtagaaggaaaggagtgccagtggcccaattatgtgttggttcaacgcttttgcccagaaattatatatgtcacttccactcacgttttgtcagaaaaaataagacaaaaatggccaagcctgatggtggtgggatggggaagtataattatgcgtaggaagtgattgagaaccataatacaatctaccacaattctccaactagtaggtagtttgacttatatgaatagatagtggcttttatttgctctctatatgtagagaaataagtaaaacgtttttggtgtcaagttgaatggtggcatgtctattattacagtagtcttctctgtagttggtgataagggaaagggagtaatgccaattgaaaaacatgtagatatgtctgttggattttgattatttttgctagtggagaatagtatcacaaatattttgaaggtgctaataaccaaaacataattttcattgaacttgggacatattatttttcctttcctttcttggctttgtttctgaatttatctatctctttttagcctgctagacttcagataatagtaatttgctaacacttgagtgcttatgcttggtgtgccaaacattgttctaagcacttaatatgtgttaatacatttacttctcacaactcattgaagtaggtggaatgtaatattaatccattttacagatgaaattaagatagcatttaaataacttgtccaaaggcacacagttaataactggcatggaaacagatataaaagccagtgaattattcattttctgtagttgaatgaagaaattttgttgtattgaataatgtttgagacagaagagaccattggctagtatttagcaattatcatagttatttgatttatattaaaaagcatttgtctttccactaaaacataaagggaataagggcctagagttatatgagttaatagtaattatagtcaagctggggttaaaaatttgttgtagatgatgcatacttggggataattaagagtaccatctaattttctgtcactttagaaaggaacaagtggcaactttgttgactatgtggagaaagccagatgttctttactcagtaatacctgttacttctctttttttccttttagcactgaacctaccagatgtatttgggttggtcgtcctcccattggaactgaaactacggatcttccgacttctggatgttcgttccgtcttgtctttgtctgcggtttgtcgtgacctctttactgcttcaaatgacccactcctgtggaggtttttatatctgcgtgattttcgaggtgatttccgtaatgacatattcacaagaaagggctcttattgtcttgattactcagctcaccaaaagtttttagttgtaggatttttctgttgcaaatgattacaataaatagccttaaagagactgactctaagcttcatatacctgtgcctgtgtccctaaaactctctcatttttgtgttttgcacaacacaaatcactcattagactaagaagattatttcaggatagagaaatggaagtaaaacaggcttattttctcactagagaccatagtcagtatctgacgtagaaacgagctggcatttctgaactgctttcatggttgagaccaatgtgtaagttaggagagttttgttgacctgttccaagttgctagggtagctttatttctgtatggtcacattatggtgacctggtaattattttggcagtgatgatggtagaacttgtgcatcaggatttcctgctacaaggccaaaagcctgattgtggaacttttttttctgctaccaccattttactacatattagtgttttcagaatgtttgaccctggggtgggtcatgaaatccatttaatgggtcatgttacaaaaaaacaaaacccacaatggaaaaatccatatttattttataaatagtattcctatttataaaataggagtaaacttctatttcaattatgtataggtaggtgtatactgtgttgcaatgtaaaatttttatgtggttcacataaatgtttgaatgatactgctatatgtgatgttaacacataccaccttagtaactgtaaaaatgtggtgggtagatagctcccttaaaaaaaaaaaaaaaaaaaagaatatcatgtagagtcatttggattgctaaaatttttttttcttttaaaatttcaaaatgtgagaagtgtaaatgacctggtttgttccttttcttcttctttgattcctgaggtcctctttctgctttatttatgcccctgaatttgacatttaaaatgttattttgtcacaattggcagcaagaaagcatcatctcaaaaaataattcaattttatttatttgtgtatttttgagacagggtctagttgtgttgccctggagtgcagtggcgcagtcatagctcactgccacccccaactcctgggctcaagtgatcctccctcctcagcctcataagtagctgagaactgtaggcatgcgcccccacacctggccaatttttgtttgtttgtttgtttgtttttagtggagacaaagtcttgcagtgttgctcaggctggtctccaactcaaaaaagaattgaaaatatagtaaaaaaagaaaagacagaatgactgatgtatatggaagcaccgagaaaaagcagagtatgatataaatacttataaaagcaacaaataccctttcacttgtatattcaagtttaggattaaagcacaattattctttaatttttagattgtggcccacaagctcatttgtaagctgttcagatttttctgtagataaaatgttacggagctagagcttttataaatcttacttccatgctaatgtagtaacttgtagagaagatatcatcttttattcaaactcttttgtatacttaaagttgaatgggtttctctttcctcatttcacatatttcaaataaataagtacattaaaaaatacttagttatggtcatgcttctgatagccgagtcattcaggacatcgttgggagaaagtagtgtaaccagaatatggatgaaagcctaagtcagcttgacctccagtaatgaacgtgggctgtaacacagaagctcagaggttgttgcccagtttggtgtaacgtgagatgttggattagaagcaggtgacacacctaaatgagattagggggagaagaggtagtgtaggaccagttaatgcaggaagagagtagccacatgttcctccatagtccctgaggaatcacactgcattgaattaccatgtagcacagagcagcaatgatcacccttaaccatcaataaagtgtttgaattagataagaaagtacaaatgatatagtgtgtgttatataaatggttagtttttttttttttttatgcttaacgggtaagtttcacttttcttaggagaaaaacaaaacccactgtttaatgcaggacgaatgaaatgtttttaaatccttatttttcccttttcctttgtagacaatactgtcagagttcaagacacagattggaaagaagtaggtatttttaaatattaagactaatgtccataacacagaaatgactagtgaattaatatattaagggtatattttcacttttatatgatgtagtgaaatctgttttaatttattgctaaatttcagtaaatgaaaatgttttcaacttttactttagactcaatccttattataattatatggaaaaaaatgttatcattgtgttatttttcatctttattataaaacattcttttttgcaacaaaatttaaatgagttgtctgtgctggagtagtcatcagctgttcagctagttaagatagtaccttatgaaaagaatatattgtattgtttcataaggtactattctaatgtctctataacaaaaactgcaaggtggagcagcaagtgctgatggaaaagctgctgcaagttatccagaagatgtagctaaaatcactgatgaaggtggctgcattacacaacagattttcagtgtaggtgagacagctttctattggaagaagacgccatctatttcatagctagagagaagtagtcagtgcccagcttcaaaggacaggctgactcttttgttaggggctaatgcagttggtgatttttgaagccagtgcttgttgaccattctgaaaatcctagggcccttaacaattatgctaaatcaggccgggtgtggtggctcacgcctgtaatcccagcactttgggaggccgaagtgggcggatcacctgaggtcaggagttggagaccatcttggctaacacggtgaaaccctgtctctactaaaaatacaaaaaattagccggatgtggtggtgtggacctgtaatcccagctactcaggaggctgaggcaggagaatcgcttgaacccaggaggtggaggttgcagtgagccaagatcgctccattgcactccagcccaggagacagtgtgagactctgtctcaaaaaacaaacaaaaaaacaacaaaaaaaggaattatgctaaatctgtgcctttgctctgtaaatggaacaacaaagcctggatgacagtacatcatttatggcatggtttactgaatatttcaagtccactattgaggcctactgcttataaaaaatactccttttaaaatactactgctcattgacaatgcagccagtcatcccagagctctgatggagatgttcaaggagattaacgttttcatgtcagcaaacaactgcattctgaagctcatggatcaaggaataattttgactttgaatcttattatttaagaaatacattttgtcaggccatagttgccagagatggtgattcctctgatggatctggacaaaggaaattgaaaaccttttggaaaggatttagccttctagatgccattaagcatactgaggattcatgggggagataaaaatatcaacaggagtttggaagttgattccaatcctcgtggatgactttgaggggttcaagacttcagtggaggaagtgcagatgtgatggacctagcaagagagctagaattagaagtggagcctgaagatgggactgaattgctgcagtctcacagtcaaacttgaatggatgagaacttgcttcttacggataaagagagaaagtggtttctttttttaaaaaaatgtcaatagtttttggggtacaggtggtttttggttgcatagatgagttctttagtggtgatttctgagattttagtgcacccgtcacccaagcagtgtacaactgtacccaatatgtagtcttttagccgtcacctccctcccagcctttccccctaagtccccaaagtccattatgtcattcttatgcctttgcatcctcataggttaggtctcacaagatttggttttccattctagagttacttcacttaaaataatggcctccagctgcatccaagttgctgcaaaagacattatttcattcctttttatggctgagtagtattccatggtgtatatatgccacattttctttatcagtggtttcttggaatggaatctattcctggacaacaaaggatttcgaatattacataaatttagttgacaaaacagaagcaaggtttgagaaggttgactctgattttgaaagttttactgtgggtaaaatgccatcaaacagcatcgcatgtacagagaaatctttcatgaaaggaagagtgagtcaatgtgacaaacttcactgttgtattattttaagaaattgccacagccacttcagcctttagcaaccagcaccctgatctgtcagcagcaacgaacatggaggcaagaccctctattagcaaaaagattgcaacttgctaaaggctcaggtgattgttagcatatttttaaattaaggtatgtacattgtctttttagatacaatgctattgcacacttactatagtgtaaacatagcatagcatttatatacactgggaaaccaaaaaaatttgtgtgacttggtttattgcattggtttgggactaaatccacaatatgtctgaggtgtgcctatagatctttactatgaaagcaaattagaactaaagggaaacatccagatcacttaccttatcttgttcttttatttttcttttttctacagctgtacaggaagaggcacatacaaagaaaagaatccccgaaagggcggtttgtgatgctcctgccatcgtcaactcacaccattccattctatcccaaccccttgcaccctaggccatttcctagctcccgccttcctccaggaattatcgggggtgaatatgaccaaagaccaacacttccctatgttggagacccaatcagttcactcattcctggtcctggggagacgcccagccagtttcctccactgagaccacgctttgatccagttggcccacttccaggacctaaccccatcttgccagggcgaggcggccccaatgacagatttccctttagacccagcaggggtcggccaactgatggccggctgtcattcatgtgattgatttgtaatttcatttctggagctccatttgtttttgtttctaaactacagatgtcaactccttggggtgctgatctcgagtgttattttctgattgtggtgttgagagttgcactcccagaaaccttttaagagatacatttatagccctaggggtggtatgacccaaaggttcctctgtgacaaggttggccttgggaatagttggctgccaatctccctgctcttggttctcctctagattgaagtttgttttctgatgctgttcttaccagattaaaaaaaagtgtaaattacatggtggtcttgacttttattacagaaagatatgtagtaaatattcagaacagatacacaatgttacttggacatttcagaattatcagagaacatagcataggcagataatttttgtaagggttttctgtttgtttgttttttttttttttagcagcgctctgtcttctaataaaggcctgatttatgaaatgaatgaaaacagagctagtttggttgaactggacttggggtgggtgctttggctacacacctactcaaatccacctcttctctcgacttctctctctctgcagctctttcttgggttctgtggtggaactttctgggctgtgaagcaatgctgttgaaaggccatttggtattagggactcctgtttgtggctcctgggatgaggtggttatgattttgttttccttgtgttttgaacacttagcccctaatttgtaacttaagtagaagatacctttttaaaaa

SEQ ID NO: 7099 - DNA, 370 bp, Homo sapiens
gagccactgcgcccgaccgagttgaacatttaatgtcagactaggccagagtttctcaatctttttattctcacttcccaaaggagccgttggagattttcccctcaatctctctccttcatgaaatttcataccacaaatatagtatgttttatttatgtactgtgaccctttgaaggatcacaaaccaatataatagtttttctttttaacccgtcaaggaccagtttttgcccctgttggaaatgcataaactggactgatgaattggtatagatggcttttatcatgaggatcagaaaaacttgaaattccttggctacgacactccatatttatcaccgtatagggaggaccttgttatggggag

SEQ ID NO: 7100 - DNA, 547 bp, Homo sapiens
ttttttttttttatcacagtgaagaaaatgcagtgaataatacgattttcttgaggcctgttacttttagtagcttaatgtgtagtaaagaattggagttgttgacatttctttctgtggtattttgtaatttctgagctacaggatagccttttaaaaatgtgttcactagatgccatatggctttaattgggtctaacaaggtcctcctgaagctttgttgggtccatatactagttctctgatacatttctttgtggctttgcaatgttatgttgcactatgcaggggatgtgtgtatgtgtgtagtgggcgtgggaggacatggtgacgaccagaagcaccaaatactataaaacaacaagtgttcagaatgcaggcttttttgagtggcccttgagaactccatggatggtgctggtgtcctgtggatactggtgctgctttccatcctcacctctgactaacttgcagacattacagatctcacttagtttaggatatcagcagtggcctaaacctaaatttgcagatctctcacaatagt

SEQ ID NO: 7101 - DNA, 332 bp, Homo sapiens
tcctcccctccagcttacctggccaccttctacccatacgttaggctacagcttaaacaccctatcccccagcaggccctccatgcattgccatcgtccacacagcaccatctgcttgccttttggtgaccctcatcactgctgtgctgagacacctcatttcctgccttccatggacagcaaaccccagcttgtgcctgtcaaatctcggcacgtgtacggtgcctgatgtacccctgactattgactgactgactttatttctctgagtcttttttcccatctgtcaagtggagagagtaatagtcacccgtccgcctctcagcactgtt

SEQ ID NO: 7102 - DNA, 416 bp, Homo sapiens
ctggtgacttctttcaaatggtgactgatgtgataaggtgtacaatagtaatgctggtaaatattttcatagacaaggaattactgaagtgaccattacaatcaaaatcattttaattacgtgagacttcaactaatttaaaatcctgtttccacaggagcctccttgagcttctaaaactgtctccaccttgattacctggagatagtctgggaaattttcttctatctttcagtgagcaactaggggaattcaggtagacaggcagctgggtagatgataggtaggagctgggcccctaagaaggctattctgctctccaacgaagcctggcgctctggtcttccaaaccccagccccggggagctcagaaggccccagtggcaccactccccgtgtgatgccctggacggacc

SEQ ID NO: 7103 - DNA, 228 bp, Homo sapiens
acaggcccaggcacgttccagctcacagcctgtttagcaaatcgggtatcagtttaagattatgaggtccagccccagccaacggatgcaggacacagcagtaaggacaacccaaaggcgtaagggacaaatatgtctgcttttcctttgttcaggagtgctctcaccatcgttccatctgcaattgagcaccctttctgcataaagtaaaaattgccttgctgagag

SEQ ID NO: 7104 - DNA, 2220 bp, Homo sapiens
aacattggttgtttcttggcagctgcagatttcacaagaatgagattaaatggctttttacatcctgtatttggaaagagaataggaggatttacaggaagttatgctcagttccaatccagttaaacaggtatataattctcttttgtctttcttcagacaatgaaaatccgcaatctaagacctgaaactactgccacagccatgcataaaatgaaatgctgctgctttcctctctgttaaagagaatgttcaaggccgaggacacataaaaaagagcagcattgctggctctgttatttagctgtgtgttcttgaaaaagtcacttctccagacatatctcagcatttataacctaagactgaatcactgcattttacccttaatgaggtacgcttacactaatctttttgaaacagtacttaaattgtagcaggacaagccgcagacaaaacccctcagccagcgagtttaagaaagaagggctttattcggccgggatcttcggcaagactcacgtctccaacaaccaagctccccaagtgagtaattcctgtcccttttaagggcttacaactctaaggaggtccgtgtgagagggtcgtgattgactgagcaagcgggggtacatgactggggggctgcatgcaccggtaattagaacggaacagaacaggacagggattttcacagtgcttttctatacaatgtctctaatctacagataacataaccgattaggtcaggggtcgatctttaccaggcccagagtgtggtgccgagctgtctgcttgtggatttcatttctgccttttagtttttacttcttctttggaggcagaaattgggcataagacaatatgaggggtggtctccctcccttaaaatcctaatgctctcctccaaaaatgtatatccacatatttgcatataatttcatgggattcaaaacccctgaaatttatccaggaacccccagattagtaacacctggactagatgttgtctaagtcctctgagctctgtaattggttccactgatttctaagttttggggtttttttttctttttaaagtaaaaccactttgagttatgttcatggtgcttacaccatggtttccattctagaaccaactatattctaaaattcctggttggaacaaaagttacttaagcaagtaaaagtgtgacagtctggtaacagattctaaataatcacctttttatggtgataagctaaaatttattttaaaaagtgtattaaacaagtattaatacttctcaaacagcagttgagatgtccctggggtaaggagacagggcaccagggacattccagaagtaacagaatatacaaagcatgattttgaaagttttagcggtttttaatttgtggatgagggtgtaacacttttgcattaaaataaacagatatgttgtggagtaaaatgcataaaggcacatttttaaagataaaatgtgaaacttacaatgtcctgcttactaataccttgtctcacgtccagaggacacttacttcacactcctctaatcttagtggttctctggtggaaacttacacattacaaaaaaagtaatctattctaaatcctaaaataatttgattttttgtaacacaatgaagataactagcacaaagtaaagaaagaatgactttttttttgagacagtctcactcttgcccacgctggagtgcagtggcgggatctcggctcactgcaatctccacctccctaattcaagcgattctcccgcctcaccctcccgagtagctgggactataggcgcccaccaccacacccagctaatttttgtatttttagtagagacggggtttcaccatgttggccaggatggtctcgatctcttgatctcgtcaaagtgctgggattacaggcatgcgtgagccactgcgtctggccattttattttattttttgagacagagtcctgacctcaagcaatccgcctgcctaggcctcgcaaagtgctgggattacaggagtgagccaccgtgcccagccaagaaagattttggaagagtgaatgaatacaaggatttccactagactgagaattagtttgtcaacagcatttcagtgtcttgagaagtgtttacatttggcgtggacaaagctggcagatgacgtagaaagtaaaaagttgcctcttcaaagtttcccttcttgttaaagaa

SEQ ID NO: 7105 - DNA, 684 bp, Homo sapiens
caaaagactacatataataccatttatatgacataccagaaaaactatagggacagaaagcagatcagtgatttccagggaatggtggtggcagaaggagttgactaccaagggtcacatggaattctcagggtaatagaacagttatttaatttttatggcagttacacaactctgcttttgtgaaaatgcataaaattgtatatgtggggaattttactatgtaaattatatatcaataaacgtgactcgtctaaataaaaaatttgtaccaacaaaataaaggagaaaacaatcatctcaatagattcagaaaaatgcatttgaaaaacttgttaaaaatcataacaaaaataaataaaaataaaaataatatcaacacccattcgtgataagggctcttgacaaactaggaatggaagagattttcctcaacttgataaagcataactatgaaaaatttacagatagtatcattattaatggtgagatatgcgcttttcctttaaaatgttaataacaaagcaagaatggccactttctccagttctattcaatattgttatggaggccctagcaaatataagaagacaagacaaaaagatagtagatttacaaaggaaaaagaactgtatgcacagacaaagtgattatgtatgcaaaaatcccaaaggaatttataaa

SEQ ID NO: 7106 - DNA, 684 bp, Homo sapiens; identical to SEQ ID NO: 7105

SEQ ID NO: 7107 - DNA, 684 bp, Homo sapiens; identical to SEQ ID NO: 7105

SEQ ID NO: 7108 - DNA, 801 bp, Homo sapiens
cccccccccccccaaaaaaaaaaaagagatacacaaagcttcagaataaaatttgatatggtttggctcgtgtccccacccaaatatgttgaactgtaatcccattaatccccatgtgttgagtgagggacctggtgggaggtgattggatcctgggagcggtttcccccatgctgttttcatgacagtgagtgagttatcatgggatgtgatggttttataagtgtctgacagttcctctttcataccctctctttcttgcttgccaccatgtaagacctgtcttgcttccccttcaacttccaccatgactgtaaagtttcctcaagccatgtagaactgtgagtcaattaaaccgctttcctttattaattacccagtcgctggtagtatctttacagcagtgtgaagatggactaatacaaagctttatttaaaaaaaaaaaaaccctttttttaaaaactgaaatgatgaggtctaggctggaagaaaatatttgcaaaagacatatctgtatccagaggaaaatacaatgtatatgtgtgtaaacaactcaattctaaaataggaaaaataattgaataaaaattttaccaaagaatagatatgggccaggcacggtgactaatgcctgtaatcccagcactttgggaggctgaggtgggtggatcacaaggtcaagagttcgagaccagccgggccaatatggtgaaacccccgtctctactgaaaatacaaaaattagccaggcgtggtggcaggcacgtgtagtcccagctactcgggaggctgaggcagga

SEQ ID NO: 7109 - DNA, 801 bp, Homo sapiens
cccccccccccccaatataaaaaaagagatacacaaagcttcagaataaaatttgatatggtttggctcgtgtccccacccaaatatgttgaactgtaatcccattaatccccatgtgttgagtgagggacctggtgggaggtgattggatcctgggagcggtttcccccatgctgttttcatgacagtgagtgagttatcatgggatgtgatggttttataagtgtctgacagttcctctttcataccctctctttcttgcttgccaccatgtaagacctgtcttgcttccccttcaacttccaccatgactgtaaagtttcctcaagccatgtagaactgtgagtcaattaaaccgctttcctttattaattacccagtcgctggtagtatctttacagcagtgtgaagatggactaatacaaagctttatttaaaaaaaaaaaaacacattatttaaaaactgaaatgatgaggtctaggctggaagaaaatatttgcaaaagacatatctgtatccagaggaaaatacaatgtatatgtgtgtaaacaactcaattctaaaataggaaaaataattgattaaaaattttaccaaagaatagatatgggccaggcacggtgactaatgcctgtaatcccagcactttgggaggctgaggtgggtggatcacaaggtcaagagttcgagaccagccgggccaatatggtgaaacccccgtctctactgaaaatacaaaaattagccaggcgtggtggcaggcacgtgtagtcccagctactcgggaggctgaggcagga

SEQ ID NO: 7110 - DNA, 812 bp, Homo sapiens
gcaaaactccatcccccccccccccaaaaaaaaaagagatacacaaagcttcagaataaaatttgatatggtttggctcgtgtccccacccaaatatgttgaactgtaatcccattaatccccatgtgttgagtgagggacctggtgggaggtgattggatcctgggagcggtttcccccatgctgttttcatgacagtgagtgagttatcatgggatgtgatggttttataagtgtctgacagttcctctttcataccccgtctttcttgcttgccaccaagtaagacctgtcttgcttcacccttcaacttcccccatgactgtaaagtttcctcaagccatgtagaactgtgagtcaattaaaccgctttcctttattaattacccagtcgctggtagtatctttacagcagtgtgaagatggactaatacaaagctttattttaaaaaaaaaaaacacattatttaaaaactgaaatgatgaggtctaggctggaagaaaatatttgcaaaagacatatctgtatccagaggaaaatacaatgtatatgtgtgtaaacaactcaattctaaaataggaaaaataattgaataaaaattttaccaaagaatagatatgggccaggcacggtgactaatgcctgtaatcccagcactttgggaggctgaggtgggtggatcacaaggtcaagagttcgagaccagccgggccaatatggtgaaacccccgtctctactgaaaatacaaaaattagccaggcgtggtggcaggcacgtgtagtcccagctactcgggaggctgaggcagga

SEQ ID NO: 7111 - DNA, 17601 bp, Homo sapiens
aactggaagaaagaactggaaaaacacagggagaaattgttaagtggaagtgagagctcatccaaaaaaagacaggtaataccacttttagtttattgctattcttaatctcatagttggattttcataataatgctgtatactactgttaatagatgcatttgcaaactcacatcagcttatttagacttgtacttttgtttccatttagagaaagaaaaaagaaaagaagaaatctggtagggtgagcaaaaattttccatttttctaaacgttacaattaagagccaacaaaaaaagtaagaataatttgtttaacctgtatgctaaaggtagcttaaactccagatgagtcaaggaacttagaggttctttgattgtgaagagtgattttgttctatcactgacataaaaaacggtgccaaccaccttataacgtagtacattttctgttgctatttaaagagaaagattggtgaccatggccacatatgttaacttgttgagcttttgtacagggaacaagtgtgacattttatattttcatatttatgacttatgaatatggcatctgtttctcagacactagattgatttcactaagtatttgagagactttgtaaaagaaaaacattctcgcatctcacaagctttaattgttttgtgcttggtcaagtattcatcttcttcttcatcaagctctgattcttccagcagttcttctgattctgaagatgaggtaaggtttgcttataatggttcatgaaataatatctcttaatttctttaatgtcaagtggaaacccattgtgaaatatctgttagaaatgttgacttccaggttttgattaattatccataacttagaggactaacatgagtgagtggtaactaggaacttaaatattggtatataatatattttttagattttaaaatttgttttgttgacctaaaaatatcagtagaagaaaatatttgaaaaatcaaatgctatttgactagatgctaggcattacatgtgattcaaatcacttgatctttataacaggaaagtgatgtattaagtattaagaaaaaaatatagaaactgatccttttgtgaaattttgttcactgataaaagttttatattaataaatgtgtaaattagatttttgagacagaaagcaaatgtttctaaaaatattttatgtaggataagaaacaaggaaaacggagaaagaaaaagaagaaccgttcacataaatcttctgaaagctccatgtcagaaactgaatcagacagtaaggtaaattatttaaattattaatatattggatacaaagacatttaattaagtttttctgcctaaagttgctctcaatttaaaaataagatagtctgatatttgtactttgatgttctatgccacttaattgatatacttgataatatcttgcatgtgacatttaataattcaagtgctttcatatatatatatctccatgtctccacatttccatggcaactgacattattgtccctgttttcataaagaagttagagttcagataaaaagcattggcttaaaatgatacagctggaattagaattaaaagttgagtctttatcttctaaaatctggtccaatgtcctttctactataccgtacctaaatttgttctgtactaaccaggattgtcagacacacagttggctttcaaacattactggtcagaaaaaagttaagaagttctcggaaaaaagtgttgattcctgagccctacctccagagtctgttttagtatctgattaggcttggaaacctacgtctttaacagatgccctgtgtgattctgatactggggtgtttatggaccacaatttgacaaacactgtactagagtctcaggaaaccaaagcagctgtctgcatttataacagatagctgcctgcccccgtgagagatcttctggcaaaatacctagcatctagaaagtactcagtaaatgttggttttctctttgtcttttaaagcagaagagctagtctcatgataatgatagctaacatttattgagtgcctactatctgttaggcacaattctaagcacttaatttattaactcattgaatctcaacaacttcaggaagtaatttggtaatccgctttatggataaagtggataaggaaactaggcttaggaagattaatagctagaactcaaaggattcaaaagcagaaattgttgcctcctcaaattagaatacaactccagtacatgtgaccaccataagcaaacacaggcaatgacacgaagtcctattttaaaataagctgtgtgggtattacagacagtacttatcattttaagagtaaatttggtatacagccagataaagaagcctgtttgcttacaagcaaatgtatacataacttatatttctcttaaattttcggaataatatactgggattggagtagccttttttcagtcatagagcaaatcactttttgggtgtttttgtccttgttctgtaatgctgtgtccttggcatttaaaattgatacatatatttctttgtttaggatagtttaaaaaagaaaaagaagtcaaaagatggaactgagaaagaaaaggtaactatacttttacattgccttaagatagtctgtcatataatacttaattgacttaaataacaataatgtgtatctctttttaagagatatatttattttgtttttgtaatattttgtttcaatttaaagcaatttttaatttggattcattattgaagataaaggatcaaaagagtattctaggccaagagtttgaatttatatagattaatggattatctcagattaaaaatacaaaataatgcagattagcagattaaacatttcctttgatttctttttttctttttcttttgagatggagtctcgctttgtcacccaggctggagtacagtggtgccgtttcagctcactgcaacctctatctcctgggttcaagcgattttcctgcctcagcctccctgtagctgggactacaggtgtgtgtcaccacgcccagctgatttttgtatttttagtagagacggtttcgccatgttggccaggctgctttcaaaaccctgacctcaggtgatgcgcctgcctcggcctctccgtgcccagcctatttcctttgatttcttaaaccattttgaagaaggcccttccaattaaagaacattaatttctctttcaaattgaatataccatagataaatattgaaaaatcttcttactattgtaaataaatgttttaccttcatttataacttacctatatagttaaagcagaatttatgcctaccttaatttctggtttacatttaaaattgttattctggttattaaaaataaaaacctaaagagggcagtaataaaactacagaccagtgtcactagtttttactcagaatttacatattttttttttttttttgagacggagtctcgctctgtcgcccaggccggactgcggactgcagtggcgcaatctcggctcactgcaagctccgcttcccgggttcatgccattctcctgcctcagcctcccgagtagctgggactacaggcgcccgccaccgcgcccggctaattttttgtatttttagtagagacggggtttcaccttgttagccaggatggtctcgatctcctgacctcatgatccacccgcctcggcctcccaaagtgctgggattacaggcgtgagccaccgcgcccggcccatatttttttaatgatagaaaatgaaactgaaattcagtttcagtttcatttaatataccatggtacacaatggtatataccatattttaaagctaaaattcagtattaatgtatttacagtgttgtgcaaccaccatctcactctcgtttcaaaactttcatcagcccataaaaacactccatatccattaaataatcaccaccactccctcattctctagtaacctctaatgggtattctgactatggatttgcctattctggatttatcatataaaagcagtcatacaatatgcgaccttttgtgtctttcagctggcatagtattttcaaatttcatccaagttgtagcatgtatcagtactttggttttttgtatggctaagtaatattccgtgtgtgtgtgtggcggatttcgccatccattcatttgttgatggacatttggttttgtttctaccatttggctattgtaatgatgctatggacatttataaacacaagtttttgtatggatgcatgttttcatttctcttgggtatatgcctaggagtggtttacataacaatttgcaaataaaaattaattttaaattttttttaattaattttaaaaactaaccaggcgtgatggcatatgcctgtagtcctagctacttgggagactgagcccacaaggtcatgccactacactttatcctgggagagagagtgagaccctgcatctaaatttaaaaaaaaataaaatttaatttaaaaagacacttaaaaaagaaactgtaatgaccaattccaagaattcaaggataatttaatataatttgccatattaactgatcaaggaaagaaaccatatgattatttcagtagttgtcagaaggatgtgatataattcagcattaattcctgattttcagaacgattataaaataagtggttaccctcatatttaaaaaaaaaaagtatgtgtgaaattaaatctggtaacatagaaacatgaaatattaaaactgaactgcaatttttaagtacttaaaatattagatacagagtaatatacacacatgtaatcaacaaatattaatatatttaccagttagaattaataaatgatttacattggcttcaagtcttgttttatgtattaaaaaaaaaaaagaagaaaaaagactgggcacaatggcttatgcttataatccgaacactttgggaggctgaggcaggaggatcacttaaggccaggagttcgagaccagcctgggcaacatagtgagaggccatctctacacaaagaaaacaaattagccaggtgtggtagtcctagtttctcccgagactgaagtgggaggatcacttaagcccagaaattggaggttacagtgagttatgatcatgccagtgcactccagcttggatgacagagtaagacccccatctctaaaaaaaaaaaaaaaaaaaagtccccaaactatcattttttcctttgatatagctgatcctgaaactagtgtatgtctttcctatccacatttatatacttttattatattagtatgtgttcataaataacagaatattgagtttcttttttttttaattagttatacctactggaatgggaagaatactgtgtattatcaaaatggtaacattgtgtttccttctgaaacttgtttcttttcattcagcattactgttgacatctatccttactgatactttcaagtttgtttcttttgcttatggtattctactaattaatccaccacaattatttctccgttctcctttttatgaacatctagattgttttaatttttcagtaatacaaatagtgctgctgtggatatttcttacccatttcttcttttccacagttactgttttttgtttttttgttttccgagatggagtttcgctctgttgcccaggctggagtgcagtggtgcaatcttggctcactgcaacctccacttcccgggttcaagcaattctcctgcctcagcctcctgaatagctgggattacaggcatgcgccaccacgcccagctacttttttgtattttcagtagagacagggtttcaccatgttggtcaggctgttctggaactcttgaccacgtgatccgcccacctcagcctcccaaagtgctgggattacaggtgtgagccaccgcgcccagccagtttactgttaattttctaaaggatactttggactgtaatttctaagttctaggatgtgcatacacattcaacttacgaacattttgcttgcccaagtgcttgttattttgcattcttgctagtgtataaaaatacccttgtttcacatacttgtcaacccagggagatgtcattattgcaaatttaatgtatacaaatggttgagcttcttaacctgcttattagccattcatatttcattttctttgcattgcttttcatagtctttgcccatttttctgttggaaagaaacaacattttctggtccatggcgtctctttactttgtttttgtgtctattataattatataaaggctttaattttaagtcacataatcattgtttttagcccctttattatttaaaattattctgaaagtgctgataataaaatactcaattagaaaatacagtggtagaaaatatcctctttatagtagtaaccaaaaaatctgcaagaaaattttaaagaagtaaacagtacttatttgaagaaaactatacaagtctattcagagacatatatgaagattgaataaatggagagtcataacgtgttcctgggtataacttgccgtactggatattaaaacattataagaatgttttaattaacacagtgcagtactagtacaggaatagacaaaacaatggaacagtgtagagtccaggtgaaaattcgagaatctgtggaatgtaataatatgataaagatggcatttcttggaacaaaatgactaatcatttggaaaatataaagctggccactacataaagccaaatacatcccagacagctcagagatttcaatgtatgaaaatgcaactagagaaagggtgactattacagtactggggtggggaaggcttatgcctcaaaactcaaacttttgaccatatatttcaaattctgaatggcaaaaactgattacaaaaattaaactgtgaacaaagtttaactacaatgaacagactaagaaaaacttctaagaatgtataacacaaaaaactaatgatctttaataaggaaaaaagaataccacacatacacagacaaattggcaaatatacgtttaggcaattctaaaagaaaacacaaactgtattctctgatacgattgataaagagcctgagagggaggcttcttggtaaagtgtgattcataaatggatgacagacagttttggacatggtgggagaaaaagatgatcatttgtgtgaaggctacgttggtctttgatttagtcatcgttattaaagagtttgcactcacatacacttcattctatttcaactttgtttttaatagcaaagaacccatatttctttcctccagaaggagatgggttaagtaaattctggcattttagtgaatgttaaatgcagccataaatgatgtagttggcatggaaagatactattgggtgagaagagcaggttccagacagcaggtatttatgtaatattgtaaacatacacttagaaagatgtttccaaaaatcttaatggtgtttaatttctgatagtgggatttgagtccattttcttacagttaacatttaacattttggccaaaataacaatgctgtttgcagaaacaaaaggaagtctgctataatctagcccatagagagatcatcactgttagtttattttctgcatttttgtttgtcttcaaaattagactcacgctatataaaaagttgtacattctgaattttttatgtaagattaggtggtgaacattttttccattgggtagttttgtttttgttatgaactacttcagatatacagaacagttccatgaaaaataataaaatgataaccagcatatccactatgcagctcgaataaatcttaacattttgttacacttgctttgggtgttgtcataatttttttttatttcttcaaatatatatttaagcccctaagtactactcccaatctcagtcccctctccttctccagagttactcactttttcaacattaaaaatacttagaggttaagatttttttaaacacatatttacatttaacactttgcgctaaaggaattactacatagagattcttttagatcactgcaaataatcacccatttattttcttttctgcagtactaggcctgtctaatccaatcctgggtagaaacaaaagaattagaatacaaaggaaccaaatcttacattatctgcatatttcatatgactgtataaagtctattctgtataatttaagaaaataagatggatattacatctaaatggatatgtagttatttcttttcaatatatttaatattgctttagtggaattaaagacttaaatcctggtaaatgttacactttttagacattctaaaataaaaatgggtaattataataattagaagaattaaatagaacttagaaacataaaatgtgtgtgacaaagtatgtctgagtcaagataaatgtatttatttttcataggatattaaaggactcagcaaaaagagaaagatgtattctgaagataaacctttatcatctgagtccttgtcagaatcagagtatattgaggaggtaagtatatgatcaaatccattttctctattttaaaatgcttagttattgatttaataaatatgacttagaaaaagaaatacttcatatttaatttattcacctttctagtatgaaaaaacaaaatgaaagttatttcatttcagaatgagttttgcttttttccagaagataattatctattattttttataattaactgtatttccacatacctttctaatctgagatatttttagtcttctaatatttcctttttattgtgctaccattcttgttacatgaaagaagctgtgtaacatacagcatgttgaaaccaaacattctcttacattgttaaaatagaacattgcatatactatctcagtttagttgatatttagctgtgttttgagctacttttcggggagtagaaaggtgatgaagtggagaagaaatgttggcaggaaacatatcatattacttcgttgtgagaactaaatgagatgataaattacgaaaggcattgcatcatacctgagacagagtaaatggtggctaaagtttgcataattcttggtgttacagtaaaatctaagccaagtttgccctagaatcatttatttttaaaactgtagctttctttagcgatcaacatacttaacccccaatagtgtaatctaaaagagttgaggatcttacccttgcttacaaggggtggtagcagattgcaacaagagctggttttcatgattctttaatcgtttccgtattagcctcctcctgtatcagtcctgcccagctctatctctgtctactatattcctcatctccccattccctgagtcttgcatttttgtttgtttgtgcctctctcctttctgatttcatcgttcttggtctgcaacagtggcacttggtcctttaagacctattgcccccattttatagcaatgtcttgtaattgctcctgaaatgaaagctaatgctgaggcaagaaggttgcttgagccctggagtttgaggctgcagtgcactctgatcccacctgtgaatagccactgcactctagcccaggtgacatagcaagaccccatctctaaaaaaataataatgataatgtgcaattttatgaaattgtatttcagtgtaaatgcctgaatgtgattaacaccaggccaggcgcagtggctcgtgcttataatcccagcactttgggaggctgaggcgggtggatcacctgagatcaggagttccagaccagcctggccaacatggtgaaactccatctctgctaaaaaaaaaaaaaaaaaaaaaaattagccaggcgtggtggcaggtgcctgtaatcccagctactcgggaggctgaggcaggagaatcacttgaacccgggaggcggaggttgcagtgagccaagattgtgccatcacactccagcctgggcaacaagagtgaaactccatctcaatcaatcagtcaatgctgtaacaccagaagacatagaatcttaagaaaaaacaaaatgcaggctgtagcaggtgtatattacatacgcccttcaaaaaccatacagtggcattacagtatatcttaaaatcctgcacaagaggcttggtgcagtggctcagcctcttgtggcacctgtaatctcagcaatttgggaggctatggcaggagaatcagttcagaccaggagttacgaccagcttgggcaacatagcgaaaccctatctctttaaaaaaataaaaaaattttattttttaaaatttagtttctgggccaggtgtggtggttcacgcctgtatcccagcactttgggaggccaaggcagatggatcacctgaggtcgggagttaaagaccagcctggccagcatggcaaaaccctgtctctactaaaaatacaaaaattagccagacatggtggcacagacccgcaatcccagctactcaggaggctgaggcaggagaatcgcttgaaccggaaaggcagaggctgcagtgagccgagatcacaccactgcactccatcctgggcaacagagcgagactttgtcaaaaaaaaaaaaattttagtttctgtattgtaaacagattcatcacatgaatgtttagcaggctattcaaaagtcgtggaggatgtacagggctgttcaggacatggcgtgacagcatccctcatctctgcctggctaaatatagatgtagtacatctgctgtcacccttagtcattgtaataacaagaataacaataaaaatattgtttcctaggtgctcggtaaagagagctagtgagttagtgatctctgttgtgagcttgtgatctctagtgcttaatgtgttatattttttttagtcctcatgcttccttttattgttaattgcatttttatgtatttgtcatgtatttaatgtcgtagtcacttagcagcaaaaccacgcaattcaacattaggcaaatttataaatattgttttgtatgtaatgtattagtgttgtattatgtttgtctgctacatggtagcaagtttaatatgaaatatctcacatttggacttaacatgtaatacgaaagtttatgaaagctttgacaactttcagcttatttattcttatttttttagaggcaggttcttgctctatcgcccaggctggagggcaatggtgcagtcatagatcactgcagcctggaactcctgggctcaagtgattttccacttcacccttccaagtagctaggactacagtcacatgccaccacaccccactaatttttaacaaaaatttttttgtagaggtgaagtcttaactaggttacccaggctggtcttgaactcctggcctcaagcaattctcccaccttggcctatcaaagcgctgggatcacaggcaccagccgctgcccccggcctcagtttaatttaaatccagtgtaccacactcaaaaagattgaaataaaatataaatgggatgataattcttacttagaattttaacctattggctttatactaactacactgaatatagagctaccatttgttgagcaccatagagtgagagaaatacctgctgtattttaggcacttccccttgagggtggatattatctacattttacagatgttgagagtaagataggattcagaccttggaatctatctcatttcagagctgatgttttgtttgcctgttttgagacaaggtgtcagtctgtcgcccaggctggagtgcagtggtgcaaacagggctcactgcagcctcaacctcctgggctcaagtgatcctcccatctcaaccttccagttagctgggactacaggcacatgccactgtgcccagctattttttctttttcttttttttttttcttggtagagatgggggagctctcactatgttgctcaggctggccttgaactcctgggctcaagcaagcctcctgccttggcctcccaaaatgctgagattacaggcaagagcaaccacactcggcctaaagctgatgtttttttccactgtaccacatttttttaggtgctgaaagggaatataagagaagctgtctagagattttacgtcttaattgtccttcctttatgttttttattgaaacctcattgagatataacaggagttattttaaatgtcctgtgattgtcaaaatgttttttacatttaaattttgaagatgcaagatagagaatgaaagaaaaatgccttgagtacaaattacatgtttgtcttctgttctccacaaaaatttaaactttctaggtgcgagcaaaaaagaagaaaagcagtgaagaacgagaaaaagcaacagcaagtatctcttaacgtttttacagacaatagaataggtgttttggtttaatataaaatgagtcatggtaaagcttgattggatttactgggaccaaataagtatttgttgggaaaggtgtggtgtgttcagcagcttcacttaatgggtaggagaaagtcaaaatggttcaggaaaaataaaaaataccctggtagcaagcatgtcctgtttccatttcagtattttactgttagaaatataagctcagggctgggcgctgtgtctcacgcctgtaatcccagcactttgagaggctgaggcaggtggatcatgaggtcaggagctcgagaccatcctggctaacacggtgaaaccccgtctctactaaaaatacaaaaaattagccgggcatggtggcgggcacctatagtcccagctactcgggaggctgaggcaggagaatggcgtgaacccgggaggcagagcttgcagtgagctgagatcacgccactgcactccagcctgggcgacagagtgcgactccgtctcaaaaaacatatatatatatataagctcaggtggggcacagtggctcacgcctgtaatcccagcactttgggaggccgagacgggtggattgcaaggtcaggagttcaagaccagcctgtccaacatggtgaaaccccgtctctactaaaaaaaaaaatacaaaaattagccgggcgtggtggcgggcgcctgtaatccagctattcgggaggctgaggcaggagaattgcttgaacctgggcagcagaggttgcagtgagctgagatcgccccactgcactccagcctcagcaacagagcaagactccgtcttaaaaaaaaaaaaaaaaaaagaaatataagctcaaatttctgtttgacttccttaagctacaatatgaaatacgagagaccaaagtatggtgatttctgttatctttgataatagttacttccaaatcagccaaatctggtaataacagaaaaagcctctccaagcactagctgcaatgaaaaaataataatatgacaacataaatgactcattaataaagattcttttgatagcttttaaagccaaactctgctattaatgcaaattgagaagaaaagagaaagaagaggcgaattaaggaaaatagaagtagtatccaaacaagaaacagatcaaccaagagaaaatggttaacagagattattttcaaagagtaatgccaacaatatcagcaaagtaatttaggggccctcagtataaatgtgagctatgacctttgaaggcattttcttagggaaaggtgaaagaaaaatgaaaacatcatcatttgtaggtttcagtaaccccttcccagaattttcctgactcttaaaacgaggtaccttctctgataggaaggctcccctagtaatgattcagaaataacattttatgtgctccaagcctacgatgacgaataagtttttgtttgtttgtttgtttgttctgaatgtgaaagtagtttgggtgaagatagctttggtctgtggttcggattaattaattaagacataaccaaataagtatttgcatactttcactgtttcatgctttcagctagtgtgtatgtatgaagcaactctatgcaggcacttttctaagtcttaagagtacaaaagagtatgagatagaagaatatgatacgtgagagagatactgtggggacgggctcatgaaatcctcgctgaggaagtgaaattaagctgaaatctgatttacaagaaagagccaaccatgtgaatatcaaaggaaagaatatcctaggcagagggaagagctcttagagacctatagtgagaataagcttgatatatttgagggactaagagaaggtaagtggcttaatgcctggtggggaaagaggaatgccatacaatgagggtaggaagtaagcagaggcttacttacattacacagcagagtgtgttttcatcagaatgttataagaagctgttctgagggttttaaacaaagaggtgacctaaatattttacattttgtaaatcctttggtacaggagataagtgggcacaagtgaggaatgatgtttgtacagcagtgatagtaatggagttggactggcaaggatggatttgagatacattttgaacttagatggtaagacttgcttggtactttgaatgcggacattggagttaaagagcagaatcagagatagcttagattctttgacctaagcaaaatgacagataagtagtgccagttactaagatggctgaggatttggagagaaaaatgaagcattttgttgtgctaatttcagatatgcctacgagacatcccaggtagagctgttaatgaggcacttatcgtcctgaggtcaaagagtaggactgaatataaagatttgggcatcattggttttaagtggaatgtaaagcatgtgactgggagagtatgtggtaaacaatggaaggaagccccagaaaagccagccagaggaagaagagccagcaaaggaaatgaagaggtctttgtgatagaagaaaaccagcagagaggtgtcatggaagctaagaagaaaatgatttttagaagagagtgctcagctgtccttttatgaaaaagcaacctatacccaaaacttagttttaaaagcccaaattacaagattttggactctgtaatattccctatgtacttcaaacatgtagtgagaaaagaatgttgaaaattagcttagtgccacagagtggtagaggcctttgagagaggggagagtagatagtgctgatagataggaaatggataggaagctctgctgttaccatccttataggtctcttcttttttgcttttcattttcttctcttgaatatcagtacactagcagcagtctctcatttggtaccacctttccaagtatctgtgtttctaaaagttctgcgttctataacaaaaataggagagtcagacttcagcaaaactccagctcccttcaatccactcacagtttaactacttctaccgggcattagtggcattttcttctaaaaatcagacatctgttttgcttaacaaagtagactttttaactatacattgatactttgtactaattagttgattttaatttaataatttaataattaatgacagcaacttcaagtagtgctgccagtctgagcagtacacaatgcctgtgtacctatttacttaaaactggcaaatttaatatctctgttctgtctgaaaactattttacaaaaacaattatgtttttatttggttactccattccagtaactgcaattactttacctttagaagttatatagcatgaaataatagtgattggtagcatgattcaattgaatttatttcctacaggaaattttgttagaagttatgttaatatgctaatgacttaagagtttctccctatctttttgaaaatcgacaagaactgttttagtcctcatatgatactggttgttgagactttttgaggaatgttttgagtagttttcttggttgtgtggattgtttggaattatgtggtagcttagaagcatggtaaagatgcttttaatttgcgtatttttatatagtaatgtctaacatggaattatctttacaggaaaaaacaaaaaagaaaaagaagcataagaaacacagtaagaagaagaaaaagaaggctgctagttcaagtcctgactcaccataacattaagaaaaatcaggattcccttataaagaaagtgcaatgtctgaggaaatttcaactgtgaaaactacaacatatttactaaaatgcatgaattttcttgtttttggaattattcctggactattcagtagccactcagatgccactgtgtgaaagggccataaatgttgcctgctgcttgaacatctatttttttctcttccagtgcttgataactctgggagataatacactgcagtcgtactagtggttaagatatttgggaataaaattaatacttttgactagaagcgtctaaggataaaccaacagaaattgaatctggatacatctttaagatgtaatcagaaatgaccagatgactctagttagaatttttgaaggagggattacattaatatttcaaaacccttactctgtagataagtgtattttaattttttcccctcgtatacttttatttacctggggaaggagcttttagggttggggggtggtttgctatctctttagctagcagaatagtgtgcctttgatcctcacacatcctgtattatggacacagtagccatgcttcacggggaggtcagagctggctaccagcagtcttgccctttactgagcttagtgtcatctttggatgctgtcatatgctgctttgagtgaaccagagaaacagccatttgcagcatgagaaagccccaaaagctctgggatttacctccactttagtaataatgaatattttttagcattagaatgtgttatgtcatttgaattaattttgactacactttggcttgggagaggaattattttaaatagacattggtactttttgaacttgatagctaaagattctaaaatgcatgttttatactaagttttaaccagtcaggaaaattttatgtaactagtgatagtttatttttttgtatgaattttgtttaggctgcaatgtttagcttttgttaactcctcactcttgctgtcttaagttcattactatgtttaatggcctacttgccaagatatttagcatgtaaaaagcagggttttgattaaaaaaaaaaaacggcttcatattgaagctgagacttacaataacaagttgagtggcaagcctggtatgctgtgtcttattgccagaatcttagtaaatgtaatgttttaaaagtttgttgtctttgtatattaataacaaattatgacaagttaagtttaaataagagttacattattgctctccctgtgtcatattttactaagattttgtgcctcatgtctactgctgaattgtttactaggaatgttaaaaggaattgataattcattttcattttacatttttatataatcaggtaacatgacatacaacttgatgtacaattttgcctgttacaaagggtgtgctaattatagtggtatatgcacagaacatgttggcatgacaacaggctgaataaatagctattttacttaaaaa

SEQ ID NO: 7112 - DNA, 384 bp, Homo sapiens
aaaaaaaattccagcttcccagaaggaaaacaggtatttagcttgaactacattgtttgtacaaacagttttaggaacaatgatctgctcttatcagagaatagtaagaatcctccgaattcaagttcccagatgcccacctagggccagtcttttaagtatgtctttccaagattaagcagtcaggcgagctgtattaactcttctctgcacagcatgttaggtaccttattaaatgggtcatatatggaatgtagtagttcagtcagatagatttcagggcatcctaacactgaaaactaccaggtttatgaccttaggtggatttcttaccttctccaagcttcagtttctttatctataaaatggggatccatacctttt

SEQ ID NO: 7113 - DNA, 287 bp, Homo sapiens
agcagagtccctggtcgatccccggtagattccaataacaagctgccaatcatgacaataaaaaatgtctgaaatattgccaaatgtcccctaagggtgcaaaactgcccccagttgagaatcactgatcagtagagatgaaaacagaaaaagaatctgtaggcattttgtgacctaaataagacattcttatctccgtgttgctagcttttattttgtggctgagtgaattgttttcagtgtgaagaccaatggtacactggatttctatttaaagatggtttcaa

SEQ ID NO: 7114 - DNA, 3922 bp, Homo sapiens
tttttttaatcatactttaagttctagggtacatgtgcacaacgtgcaggtttgttacatatgtatacatgtgccatgtttctgtgctgaccccattaactagttatttacattaggtatatatcctaatgctatccctccctcctctgcccaccccacaacaggccccggtgtgtgatgttccccttcctgtgtccatgtgttctcattgttcaattcccacctatgagtgagaacatgtggtgtttggttttttgtccttgcaatagtttgctcacaatgatggtttccggcttcatccatgtccctacaaaggacatgaactcatcgtttttcatggctgcatagtatttcatggtgtatatgtgccacattttcttaatccagtctatcattgttggacatttgggttggttccaagtctttgctattgtgaatagtgccacaataaacatacgtgtgcatgtgtcttcatagcagcatgatttagaatcctttgggtatatacccagtaatgcgatgtctgggtcaaatggtatttctagttctagatccctgaggaatcaccacactgtcttccacaatggttgaactagtttacagtcccaccaacagtgtaaaagtgttcctatttctccacagcctctccagcacctgttgtttcctgacatttgaatgatcgccattgtaactggtgtgagatggtatctcactgtggttttgatttgcatttctctgatggccagtgatgatgagcattttgtcatgtgtgtattggctgcataaatgtcttcttttgagaagtgcctgttcatatcctttgcccactttttgatggggttgtttgtttttttcttgtaaatttgtttgagttcattgtagattctggatattagccctttgtcagatgagtagattgcaaaaattttctcccattttgtaggttgcctgttcactctgatggtagtttcttttgctgtgcagaagctctttagtttaattagatcccatttgtcaattttggcttttgttgccattgcttttggtgttttagacatgaagtccttgcccatgcctatgtcctgaatggtattgcctacctggaggcatcatgctacctgacttcaaactatactacaaggctacagtaaccaaaacagcatggtactggtaccaaaacagagatatagaccaatggaacagaacagagccctcagaaataataccacacatctacaaccatctgatctttgacaaacctgacaaaaacaagaaatggggaaagtattccctatttaataaatggtgctgggaaaattggctagccatatgtagaaagctgaaactggtttccttccttataccttatacaaaaattaattcaagatggattaaagacttaaatgttagacctaaaaccataaaaaccctagaagaaaagctaggcaataccattcaggacataggcatgttttgtggcttttaatgaatactcttaataatttgtaaatctttctctagaatagacttctagttcccattagaactagactagtggttaacattactgttatcacagatcagagactgggatgcatgataagttttccttgtcttccttcagctctaaccacaccgactttctcatgtttgggggtgatattatttctcactgtatttgcattgcaattctgaaaaatatcttcctatcccacctctgttttgttttccatgaagtgagcaaatttaccaagtgatttggaagaaatttatataattgtatagcttgaaaagcctttttttcccctacaaatgtattatttaggacatgtaaaatttagcaaacacagatattttaagcataatttactaaatattgatgataacgcatgctcagaagtcttcatttagaggactctcaatttgtctgagtgtaaactcaattccaacaatcaaaataatttgatatctggtttttgctttagcaacttcacttggttggccaatgttttaattctccagtccttgatctctcattgtggtaaacccacaggataattttattagtgctttgattttctgtaagaggcttttttgtttttctttaattcagcatataattggtgcatgtttaaacttatttgtgtttcggttgaaaggcagttattagtagagagtatcaatagagagttattatagagagtattagttattatttgcagaaatgttaaccttactatctagagcaggatctttctgcctcagcacattgatattttggactggataattctttactttaagggatttgtcatgcgttgtagagtgtttagcagtgtccctggtcgatccccggtagattccaataacaagctgccaatcatgacaataaaaaatgtctgaaatattgccaaatgtcccctaagggtgcaaaactgcccccagttgagaatcactgatcagtagagatgaaaacagaaaaagaatctgtaggcattttgtgacctaaataagacattcttatctccgtgttgctagcttttattttgtggctgagtgaattgttttcagtgtgaagaccaatggtacactggatttctatttaaagatggtttcaaatatgtaaaataattgatagtttacaagccacccaaacatatttccccacttccttttctgagtttagttgagaaaattttatatgtagaaagctgaaactggatcctttccttacaccttatacaaaaatcaattcaagatgggttaaagacttaaacgttagacctaaaaccataaaaaccctagaagaaaacctaggcattaccattcaggacataggcatgggcaaggacttcatgtctaaaacaccaaaagcaatggcaacaaaagccaaaattgacaaatgggatctaattaaactaaagagcttctgcacagcaagagaaaataccatcagagtgaacaggcaacctacaaaacgggagaaaatttttgcaatctactcatctgacaaagggctaatatccagaatctacaatgaacacaaacaaatttacaagaaaaaaacaaacaaccccatcaacaagtgggtgaaggatatgaacagacacttctcaaaagaagacatttatgcagccaaaagacacatgaaaaaatgctcatcatcactggccatcagagaaatgcaaatcaaaaccacaatgagataccatctcacaccagttagaacggtgatcattaaaaagtcaggaaacaacaggtgctggagaggctgtggagaaataggaacacttttacactgttggtgggactgtaaactagttcaaccattgtggaagtcagtgtgttgattcctcagggatctagaacttgaaataccatttgacccagccattgcattactgggtatatacccaaaggattataaatcatgctgttataaagacacatgcacacgtatgtttattgcagcactattcacaatagcaaagacttggaaccaacccaaatgtccaacaatgatagactggattaagaaaatgtggcacatatacaccatgaaatactatgcagccataaaaaacaatgagttcatgtcctttgtagggacatggatgaagctggaaaccatcattctgagcaaactatcgcaaggacaaaaaaccaaacaccgcatgttctcactcataggtgggaattgaacaataagaacacatggacacaggaaggggaacatcacacaccggggcctgttgtggggtgggggaagcggggagggatagcattaggagatatacctaatgttaaatgactagttaatgggggcagcacaccaacatggcacatgtatacatatgtaacaaacttgcacgttgcgcacatgtactctaaaacttaaaggataataaaaaaatttcttcct

SEQ ID NO: 7115 - DNA, 213 bp, Homo sapiens
gaaagctgaaactggatcctttccttacaccttatacaaaaatcaattcaagatgggttaaagacttaaacgttagacctaaaaccataaaaaccctagaagaaaacctaggcattaccattcaggacataggcatgggcaaggacttcatgtctaaaacaccaaaagcaatggcaacaaaagccaaaattgacaaatgggatctaattaaac

SEQ ID NO: 7116 - DNA, 649 bp, Homo sapiens
tttgagttcaattactaccaagcacactttctggaattactactaaattgcaaacatattgtagcagttctaaagacgcttttttgagttaatgttcatcaatatttaaaaaatatttttctcagtattaaaacaagttaaaaataccattgataagaattcaggctctgggctgagacagctctcagtggaaatcctagctctgcctctcaaagccatgtcctaaaataagctattaaatctctccaatacttgatttcctagattatgaaataatactacacactacctcagagaatcattgacagaattaaataagtcaggtaatgcattgaacacagtgcttagtacaacaaatgttactaaatgtaaacatttctacaatgatgagtgatgattctgttatgtacagatatgtactaccatttgctagtgtatcacaacagaatagaacacatcatataatatgatgcaagttatattaataacataatgtctatgcatatattttgttatatccatagaaaattttaacaaattaatagcacagtgtgtggcctttactacactcaacaaatgttagttatattattattatcattattacttacaatggctttcttcagggggaggaactataggagatttc

SEQ ID NO: 7117 - DNA, 1109 bp, Homo sapiens
caaataatagatgtctccgggaaagtatcatatatgtttgaatataatgtgtgtgacacctaaaattatttctactgtatgaagaaaatcagtactttgggagaaacaggtaaaaatgaaaatgtaattcagcatcagtttgagtttcactgtgagcctcagtccaggttttagaaagaaaggtacgtagacacaattctggctttaaatagttcacaatgtggcaaaagaaacttcattaatttcttaagattaatgataaatacagtttctttgggcagattgactctaaatattgagttcaagggggttaattacagtataaaagggtttctagctgttgaaaaggttgggagctactgaattaggcctccagatcctgtggcctacctgttatacctcaaagcctcaattttcagccgcttccttagcctttctcaaccagggctgtgagacagttaagctctaaggaaaattgtttgagtaactaatatcagttctcccaaggactgtatttaggtattctttacctaccatggatgtgttagggccagactctcttggaaggatgcttctcttctgttctcttcccttgccctctccctctctttatgcttctgttttgtgatcccccatttacacacaggaacaacctcaaagttctgggttggaattgggaccagaaaatgactatagctttatcttctaatatttgtgttgattaatgcttgaaattatatctaataattcatagtcactaaaaagaaaatttgagtgaatatttgatagtagcttatcctcttaaagtttacagacctcaggccaggctgattctcattagggccaggcatgctggctcaggcctgtaatctcagtgctttgggaagatctcttgaggtcaggagtttcagaccagcctgggcaacatagtgagagcctgtctttaaaaatacatatattaaaaattaggtgggcatgatggcgtacatctatagccctagcttcttgggaggctgaggcaggaggatcacttgagcctgggagtttgagtttacagtgagctatgatcacgccactgcaccactccagcctgggctacagtgaggccc

SEQ ID NO: 7118 - DNA, 1109 bp, Homo sapiens; identical to SEQ ID NO: 7117

SEQ ID NO: 7119 - DNA, 1109 bp, Homo sapiens; identical to SEQ ID NO: 7117

SEQ ID NO: 7120 - DNA, 5332 bp, Homo sapiens
cactttgggaggctgaggcgggtggatcacgaggtcaggagattgagaccatcctggctaacatggtgaaaccctgtctctactaaaaaatacaaaaaaattagccgggcgtggtggcgggcgcctgtagtcccagctactcgggaggctgaggcaggagaatggtgtgaacccgggaggcggagcttgcagtgagctgagatcgtgccactgctctccagcctgggcgactgagcaagactctgtctcaaaaaaaaaaaaaaaaaaaaagaatcaggagtgttcttgggaatagatataatttcttacgcagattctccagtgtagaaaaggtatgtaccctaccccaacattatatgggccacctcccctttatctaaacaaacatacccaataatgtcacctctcagtttgatcataccctgccaaaaatctttgctttggattcacagccaattggctgctgaaatcatctactgtctttcttccaaaaccaagttgaaaaagcttaacttacatctcccttccctttacaaactgtagcctgataaaactgatgagaagcagaacaaacttattgataaagcaactacaaatattagtcttgcctgtttcttaatgttttaccacttgttaaaacatttttccatattaaacatttctgtttgtatttttatttattaggtgctaatatcaatattatccactgttgtcatcggctaatccttctcagtgattttcagactttaaaaagttatggacatttttgtgcaaatgagatctttggtagttcagtgtataaatggacagaaaatatggagcttctctgattgatatagggttccggatccgcaaccactgagatgcctccatggttctctagaactgaatttgaaaattactagctcacgttttgtgctaaaaccaataatcacataattttcctttcctcttcttccgtgtcccctacgtcctcaaattttttaaatttataaaaaacagctttctggggggctagtcataccaacctttacaaggtgctctgtgtgtttgtgtgatatttcctttttttaatgaaaatggtgggtggcagaaatgttttcctttattttgtttttaacttggtatgcaattatctaatatactggaaagtacagaaggtgctaaatacagtgagttatatttggaagttaaaaaaacacaaatcacatgttctaacatttttgaaaaagagctgaattagtgctcttccttttataccaaatgctacagtgtattttttcctttctccatggaaatggattcaattttaaatgggtgtattacctaaagtgatatttttgatttctctattatttatccagtacatttatagatttttataggtaatagttatggattatataaactacaaagttaatttttgtgataattggtggaggcaaatttgcccaacttttattttcttaaaaggtttaaatcatttgaaaataggaaataatttttaaatccaaaaaaaagaaaattatatgcataaccagtaagattatcccactgcttttgttctcagccaagatgaagcatgccttttcaaaaagaacaccccaaaataagtattttaccattatctaaaagactacttttgctgggttttattttttaatctattgaacatgagaacatggtcaaaagtcataccttccttatggttgaaattttctagaggttttataatattgagatttcattttttaatgataatttggcctgacataccttccagtatgtacatttgtatgagttttatcacagcatttaaaaatctctttatgtttggaattaataggattaaaaaaatctcagtagtttctagaaatactttatagtgacagttttgttttttagtcttccagattgttgatattaatgcaaacaatattaagcttatatcacaaaaatattttcagtaaagcgtattttttataaactgtgttaggcactgggaataatacaaaaatgataaataaagcctgtcccttgcctgatgtcacagtcgggctacagctgccagaaacaaggccagcaaaattaggatacagcttgcgaatgtagtgtgaagaaaggccttcggaataccaaagaaaattctagggtcagggaaagctttgaagagaaggtgatgtttcagctatgtttgaagaatggggagggctcatcagtgatagaacattctagataggtttggaagcatgagagcatggagcaattgggaaataacaaatatgccatgatgtggcttggacatgagaatttatgtggtgggggtcaggagcagggcatcccaagagataaggttgggaagggcctagtgctgacgagtgtgcatgttatcatggaggtggtgaagagtcattgaaggatgctaaataaaggattgatatgatcaagtttgtgctttaggacaagtgtggtgaacatgcaagtttacaagcatgaagatcaattcaggacactgttgtaataataccggtgagaaagatgaggcctgaactgacaaagtagagagaggagaggagcagaatgaagaggaggtgaccagctttcatttagtgctggctatacctgccacggcagtgttctagctttctacctttgtcctcacatagaaattaaagccattctgaggcaggaataatgatctatttattggtcaccttctgtgtgcttggtcttaatctggcgtatacataaccaatcatctttataacaatcctacaaggttggtggtattatccttgttttagaaatgagattggcacttacagaaggtcactactgtagtgatgcgaggacccacagctagacagtggcattagtggcttttgtaccgaggtcttagaactcaacctcttttctctttgtcagtaagatgtaatgggcaggccgggaaggagagaacagtgttttaaaatgatgaccaggtgtgtcagtttgggcccccggtaaagatggtcctgttaaccagagacagagtgaaagaggatggaagaggaaatactgtgctgcagataacacatttggttctggatatactccatttgcggttctttattaatgctttcatgaaatcttaaaaatttggacctgaaaagaatcccaaagataaccctggacaaagttttttagtttagctttccgaaacaactaatcttattggagaattaacattttgaaccctataaaacctatctgtttggccaggtgcggtggcatacacctgtaatcccagcacttagggaggccgaggcgggtgcatcacttgagaccaggagttcgagaccagcctggctgatatggtgaaacctcatctctactaaaaacgcaaaaattagctgggcgtggtggcgggcacctgtagtcccaattactcgggaggccgatgcaggagaattgcttgaacccgggaggcggaggttgcagtgagctgagatcgtgccactgcactccagcctgggtgacaagagtaaaaactctgcctcaaaaaaaaaaaaaaaaaatctgttcactaagtattaagtgagtaacaggtttggggattgggtaggtggggacagtcttttcgtaggtctgcctgctctactttcttctcatacttacctctcacagtcctcccttttgtgaatcacagtaatgtgaggttaatatgtctgttgtcactcccaatttccaattagaaaggttgacatggagagctgggatttccccaggctgtccatacctagaaagggaggcacaaaggggattgggttttcgagccttcaggccatttatttttactgcgtttgtctggccttcagttcaagatcttcaaagcatttttaaaaacgcctttgagggaagtcagtttagagtgagaaattaggaaagcaaaaatttgaatttacttttagttttgtgtttttaagtaaactgttaaggtctttattgtgatttagtagaaagaacttgagtttagagtcaaaagactctagttctgtctctccctctggtgctttctctaaagctatttcctaatttataaaatgtgagtcatgagaatatttatgtcaggatatcatgggaattaaacaaggcaaaggcatagtattaaactagaaaatgttattttgaatgctaatgtccaaaaaaaaaaaaagaaaatgaaaattctatatggattaacttagaggaaaaaaaaaaagtaggctttcaaattttctccaacatctgctttgtcttaactgcccggtaaagacatatcttttgggtgttttctttttttctatagacaaattaattcatccatcatttgagtgcatctgtatgccagcgcaaattagacacaagtcttgtcctcacagatcttctttctcctcttacaggggaggtaaggcacaaccataacacacaagagaaaccctgtctgaggacagataacatactgtattgggtgtgtgaaggggacgagccgccttctcactggagcagccgggaacatattagtgacaagctgactttcaggtctggattttgaaagttggacatactgtaggcatgggaagatgagggggaaagacatatcaggcctgaggaatagcatacctgtacaaaaagtgggaagaatgagctgtgtttgtagagcagggaattgtttggcctggtgggaataaattcagaaaggtaggtgatcaagaagggcgtttgagacctttgggtgatagagattcagtgtaagttttcaagcaagagtgataatgtgagtaaagctgtactccagaaagctagctgtggtttgaaaagggagctactggaggctgtaagtcaagcattcagttcctgagtggaggcagaaatagagaagaaaattcaaacagtggtagaatgaggtgaatttaaacaggaaaccaatgtggttctgattgtacttcacttaggtaactttttcattaagaaagaattctggctacctattctcatatgttaataatagaggtcttggccgggtgcagtggctaacatctgtaatcccagcactttgggaggctgaggtgggtggatcacgaggtcaggagttcgagaccagcctgaccaacatggtgaaaccccatctctactaaaaatacgaaaataagctgggcatggtggtgcgcacctgtaatcccagctactcaagaggctgaggcaggagaatcacttgaatccaggaggcggaggttgcaatgagccgagattgcaccactgcactccagcctgggcgacagagtgagactccgtctcaaaaaaaaaaacaaaa

SEQ ID NO: 7121 - DNA, 5372 bp, Homo sapiens
aatcagggccgggcacggtggctcacgcctgtaatcccagcactttgggaggctgaggcgggtggatcacgaggtcaggagattgagaccatcctggctaacatggtgaaaccctgtctctactaaaaaatacaaaaaaattagccgggcgtggtggcgggcgcctgtagtcccagctactcgggaggctgaggcaggagaatggtgtgaacccgggaggcggagcttgcagtgagctgagatcgtgccactgctctccagcctgggcgactgagcaagactctgtctcaaaaaaaaaaaaaaaaaaaaagaatcaggagtgttcttgggaatagatataatttcttacgcagattctccagtgtagaaaaggtatgtaccctaccccaacattatatgggccacctcccctttatctaaacaaacatacccaataatgtcacctctcagtttgatcataccctgccaaaaatctttgctttggattcacagccaattggctgctgaaatcatctactgtctttcttccaaaaccaagttgaaaaagcttaacttacatctcccttccctttacaaactgtagcctgataaaactgatgagaagcagaacaaacttattgataaagcaactacaaatattagtcttgcctgtttcttaatgttttaccacttgttaaaacatttttccatattaaacatttctgtttgtatttttatttattaggtgctaatatcaatattatccactgttgtcatcggctaatccttctcagtgattttcagactttaaaaagttatggacatttttgtgcaaatgagatctttggtagttcagtgtataaatggacagaaaatatggagcttctctgattgatatagggttccggatccgcaaccactgagatgcctccatggttctctagaactgaatttgaaaattactagctcacgttttgtgctaaaaccaataatcacataattttcctttcctcttcttccgtgtcccctacgtcctcaaattttttaaatttataaaaaacagctttctggggggctagtcataccaacctttacaaggtgctctgtgtgtttgtgtgatatttcctttttttaatgaaaatggtgggtggcagaaatgttttcctttattttgtttttaacttggtatgcaattatctaatatactggaaagtacagaaggtgctaaatacagtgagttatatttggaagttaaaaaaacacaaatcacatgttctaacatttttgaaaaagagctgaattagtgctcttccttttataccaaatgctacagtgtattttttcctttctccatggaaatggattcaattttaaatgggtgtattacctaaagtgatatttttgatttctctattatttatccagtacatttatagatttttataggtaatagttatggattatataaactacaaagttaatttttgtgataattggtggaggcaaatttgcccaacttttattttcttaaaaggtttaaatcatttgaaaataggaaataatttttaaatccaaaaaaaagaaaattatatgcataaccagtaagattatcccactgcttttgttctcagccaagatgaagcatgccttttcaaaaagaacaccccaaaataagtattttaccattatctaaaagactacttttgctgggttttattttttaatctattgaacatgagaacatggtcaaaagtcataccttccttatggttgaaattttctagaggttttataatattgagatttcattttttaatgataatttggcctgacataccttccagtatgtacatttgtatgagttttatcacagcatttaaaaatctctttatgtttggaattaataggattaaaaaaatctcagtagtttctagaaatactttatagtgacagttttgttttttagtcttccagattgttgatattaatgcaaacaatattaagcttatatcacaaaaatattttcagtaaagcgtattttttataaactgtgttaggcactgggaataatacaaaaatgataaataaagcctgtcccttgcctgatgtcacagtcgggctacagctgccagaaacaaggccagcaaaattaggatacagcttgcgaatgtagtgtgaagaaaggccttcggaataccaaagaaaattctagggtcagggaaagctttgaagagaaggtgatgtttcagctatgtttgaagaatggggagggctcatcagtgatagaacattctagataggtttggaagcatgagagcatggagcaattgggaaataacaaatatgccatgatgtggcttggacatgagaatttatgtggtgggggtcaggagcagggcatcccaagagataaggttgggaagggcctagtgctgacgagtgtgcatgttatcatggaggtggtgaagagtcattgaaggatgctaaataaaggattgatatgatcaagtttgtgctttaggacaagtgtggtgaacatgcaagtttacaagcatgaagatcaattcaggacactgttgtaataataccggtgagaaagatgaggcctgaactgacaaagtagagagaggagaggagcagaatgaagaggaggtgaccagctttcatttagtgctggctatacctgccacggcagtgttctagctttctacctttgtcctcacatagaaattaaagccattctgaggcaggaataatgatctatttattggtcaccttctgtgtgcttggtcttaatctggcgtatacataaccaatcatctttataacaatcctacaaggttggtggtattatccttgttttagaaatgagattggcacttacagaaggtcactactgtagtgatgcgaggacccacagctagacagtggcattagtggcttttgtaccgaggtcttagaactcaacctcttttctctttgtcagtaagatgtaatgggcaggccgggaaggagagaacagtgttttaaaatgatgaccaggtgtgtcagtttgggcccccggtaaagatggtcctgttaaccagagacagagtgaaagaggatggaagaggaaatactgtgctgcagataacacatttggttctggatatactccatttgcggttctttattaatgctttcatgaaatcttaaaaatttggacctgaaaagaatcccaaagataaccctggacaaagttttttagtttagctttccgaaacaactaatcttattggagaattaacattttgaaccctataaaacctatctgtttggccaggtgcggtggcatacacctgtaatcccagcacttagggaggccgaggcgggtgcatcacttgagaccaggagttcgagaccagcctggctgatatggtgaaacctcatctctactaaaaacgcaaaaattagctgggcgtggtggcgggcacctgtagtcccaattactcgggaggccgatgcaggagaattgcttgaacccgggaggcggaggttgcagtgagctgagatcgtgccactgcactccagcctgggtgacaagagtaaaaactctgcctcaaaaaaaaaaaaaaaaaatctgttcactaagtattaagtgagtaacaggtttggggattgggtaggtggggacagtcttttcgtaggtctgcctgctctactttcttctcatacttacctctcacagtcctcccttttgtgaatcacagtaatgtgaggttaatatgtctgttgtcactcccaatttccaattagaaaggttgacatggagagctgggatttccccaggctgtccatacctagaaagggaggcacaaaggggattgggttttcgagccttcaggccatttatttttactgcgtttgtctggccttcagttcaagatcttcaaagcatttttaaaaacgcctttgagggaagtcagtttagagtgagaaattaggaaagcaaaaatttgaatttacttttagttttgtgtttttaagtaaactgttaaggtctttattgtgatttagtagaaagaacttgagtttagagtcaaaagactctagttctgtctctccctctggtgctttctctaaagctatttcctaatttataaaatgtgagtcatgagaatatttatgtcaggatatcatgggaattaaacaaggcaaaggcatagtattaaactagaaaatgttattttgaatgctaatgtccaaaaaaaaaaaaagaaaatgaaaattctatatggattaacttagaggaaaaaaaaaaagtaggctttcaaattttctccaacatctgctttgtcttaactgcccggtaaagacatatcttttgggtgttttctttttttctatagacaaattaattcatccatcatttgagtgcatctgtatgccagcgcaaattagacacaagtcttgtcctcacagatcttctttctcctcttacaggggaggtaaggcacaaccataacacacaagagaaaccctgtctgaggacagataacatactgtattgggtgtgtgaaggggacgagccgccttctcactggagcagccgggaacatattagtgacaagctgactttcaggtctggattttgaaagttggacatactgtaggcatgggaagatgagggggaaagacatatcaggcctgaggaatagcatacctgtacaaaaagtgggaagaatgagctgtgtttgtagagcagggaattgtttggcctggtgggaataaattcagaaaggtaggtgatcaagaagggcgtttgagacctttgggtgatagagattcagtgtaagttttcaagcaagagtgataatgtgagtaaagctgtactccagaaagctagctgtggtttgaaaagggagctactggaggctgtaagtcaagcattcagttcctgagtggaggcagaaatagagaagaaaattcaaacagtggtagaatgaggtgaatttaaacaggaaaccaatgtggttctgattgtacttcacttaggtaactttttcattaagaaagaattctggctacctattctcatatgttaataatagaggtcttggccgggtgcagtggctaacatctgtaatcccagcactttgggaggctgaggtgggtggatcacgaggtcaggagttcgagaccagcctgaccaacatggtgaaaccccatctctactaaaaatacgaaaataagctgggcatggtggtgcgcacctgtaatcccagctactcaagaggctgaggcaggagaatcacttgaatccaggaggcggaggttgcaatgagccgagattgcaccactgcactccagcctgggcgacagagtgagactccgtctcaaaaaaaaaaacaaaa

SEQ ID NO: 7122 - DNA, 6352 bp, Homo sapiens
actaaatgttactgatattaggaacttatattggaaactaaatgttccttttttaaaagtagttaaaattttattattcctcttgtcattgacttttgatttttagtttttagccaaatggaaaggattgtttctctcaatgagtagtcatatggtttgatttcaaaatgcaaatttatttatttattttttgagacggagcctagctctgttgcccaggctggagtgcagtgacgcgatcttggctcactgcaacctctgcctcccgggttcgagtgattctccctccttagcctcccaggtagctgggattaccggtgctcaccaccacacccagctaatttttgtatttttaatagagatggcgtttcaccatattggccaggctggtctcaaacttctgacctcaagtgatctgcccacctcggcctcccaaagtgctgggattacaggcatgagccaccgtgcacagcctttttttaaatcttgatcttttcaaattaatgaatcttaatgtggagagactcaattacattctctattgtaaggtaataagcattaagaaacaatgttccacattatagaaagtttggcaaataggaaaatcggccatcattttacaagctacacaagcattttagtgtgggaaaaaggcttcttgttagatgattttgatactttattctcagtcacaatctcaaccactcatactaggggctgaggaaagagagataatggtggaagaaatgagtccatcacagctgcctcctggtattgtggatcagtcactggcaaggaagcttttagttctgtagtttttcatcatggaaaaaaaaccatatagaatggctaagttctaaatagtctgatttacttagaaaatgactgttttcataaattactgtagttaaatactatttcttatttttgatggccttaattagtgtggaagtagaagcatgggagagagtaagatgttaagaatcagggccgggcacggtggctcacgcctgtaatcccagcactttgggaggctgaggcgggtggatcacgaggtcaggagattgagaccatcctggctaacatggtgaaaccctgtctctactaaaaaatacaaaaaaattagccgggcgtggtggcgggcgcctgtagtcccagctactcgggaggctgaggcaggagaatggtgtgaacccgggaggcggagcttgcagtgagctgagatcgtgccactgctctccagcctgggcgactgagcaagactctgtctcaaaaaaaaaaaaaaaaaaaagaatcaggagtgttcttgggaatagatataatttcttacgcagattctccagtgtagaaaaggtatgtaccctaccccaacattatatgggccacctcccctttatctaaacaaacatacccaataatgtcacctctcagtttgatcataccctgccaaaaatctttgctttggattcacagccaattggctgctgaaatcatctactgtctttcttccaaaaccaagttgaaaaagcttaacttacatctcccttccctttacaaactgtagcctgataaaactgatgagaagcagaacaaacttattgataaagcaactacaaatattagtcttgcctgtttcttaatgttttaccacttgttaaaacatttttccatattaaacatttctgtttgtatttttatttattaggtgctaatatcaatattatccactgttgtcatcggctaatccttctcagtgattttcagactttaaaaagttatggacatttttgtgcaaatgagatctttggtagttcagtgtataaatggacagaaaatatggagcttctctgattgatatagggttccggatccgcaaccactgagatgcctccatggttctctagaactgaatttgaaaattactagctcacgttttgtgctaaaaccaataatcacataattttcctttcctcttcttccgtgtcccctacgtcctcaaattttttaaatttataaaaaacagctttctggggggctagtcataccaacctttacaaggtgctctgtgtgtttgtgtgatatttcctttttttaatgaaaatggtgggtggcagaaatgttttcctttattttgtttttaacttggtatgcaattatctaatatactggaaagtacagaaggtgctaaatacagtgagttatatttggaagttaaaaaaacacaaatcacatgttctaacatttttgaaaaagagctgaattagtgctcttccttttataccaaatgctacagtgtattttttcctttctccatggaaatggattcaattttaaatgggtgtattacctaaagtgatatttttgatttctctattatttatccagtacatttatagatttttataggtaatagttatggattatataaactacaaagttaatttttgtgataattggtggaggcaaatttgcccaacttttattttcttaaaaggtttaaatcatttgaaaataggaaataatttttaaatccaaaaaaaagaaaattatatgcataaccagtaagattatcccactgcttttgttctcagccaagatgaagcatgccttttcaaaaagaacaccccaaaataagtattttaccattatctaaaagactacttttgctgggttttattttttaatctattgaacatgagaacatggtcaaaagtcataccttccttatggttgaaattttctagaggttttataatattgagatttcattttttaatgataatttggcctgacataccttccagtatgtacatttgtatgagttttatcacagcatttaaaaatctctttatgtttggaattaataggattaaaaaaatctcagtagtttctagaaatactttatagtgacagttttgttttttagtcttccagattgttgatattaatgcaaacaatattaagcttatatcacaaaaatattttcagtaaagcgtattttttataaactgtgttaggcactgggaataatacaaaaatgataaataaagcctgtcccttgcctgatgtcacagtcgggctacagctgccagaaacaaggccagcaaaattaggatacagcttgcgaatgtagtgtgaagaaaggccttcggaataccaaagaaaattctagggtcagggaaagctttgaagagaaggtgatgtttcagctatgtttgaagaatggggagggctcatcagtgatagaacattctagataggtttggaagcatgagagcatggagcaattgggaaataacaaatatgccatgatgtggcttggacatgagaatttatgtggtgggggtcaggagcagggcatcccaagagataaggttgggaagggcctagtgctgacgagtgtgcatgttatcatggaggtggtgaagagtcattgaaggatgctaaataaaggattgatatgatcaagtttgtgctttaggacaagtgtggtgagcatgcaagtttacaagcatgaagatcaattcaggacactgttgtaataataccggtgagaaagatgaggcctgaactgacaaagtagagagaggagaggagcagaatgaagaggaggtgaccagctttcatttagtgctggctatacctgccacggcagtgttctagctttctacctttgtcctcacatagaaattaaagccattctgaggcaggaataatgatctatttattggtcaccttctgtgtgcttggtcttaatctggcgtatacataaccaatcatctttataacaaccctacaaggttggtggtattatccttgttttagaaatgagattggcacttacagaaggtcactactgtagtgatgcgaggacccacagctagacagtggcattagtggcttttgtaccgaggtcttagaactcaacctcttttctctttgtcagtaagatgtaatgggcaggccgggaaggagagaacagtgttttaaaatgatgaccaggtgtgtcagtttgggcccccggtaaagatggtcctgttaaccagagacagagtgaaagaggatggaagaggaaatactgtgctgcagataacacatttggttctggatatactccatttgcggttctttattaatgctttcatgaaatcttaaaaatttggacctgaaaagaatcccaaagataaccctggacaaagttttttagtttagctttccgaaacaactaatcttattggagaattaacattttgaaccctataaaacctatctgtttggccaggtgcggtggcatacacctgtaatcccagcacttagggaggccgaggcgggtgcatcacttgagaccaggagttcgagaccagcctggctgatatggtgaaacctcatctctactaaaaacgcaaaaattagctgggcgtggtggcgggcacctgtagtcccaattactcgggaggccgatgcaggagaattgcttgaacccgggaggcggaggttgcagtgagctgagatcgtgccactgcactccagcctgggtgacaagagtaaaaactctgcctcaaaaaaaaaaaaaaaaaatctgttcactaagtattaagtgagtaacaggtttggggattgggtaggtggggacagtcttttcgtaggtctgcctgctctactttcttctcatacttacctctcacagtcctcccttttgtgaatcacagtaatgtgaggttaatatgtctgttgtcactcccaatttccaattagaaaggttgacatggagagctgggatttccccaggctgtccatacctagaaagggaggcacaaaggggattgggttttcgagccttcaggccatttatttttactgcgtttgtctggccttcagttcaagatcttcaaagcatttttaaaaacgcctttgagggaagtcagtttagagtgagaaattaggaaagcaaaaatttgaatttacttttagttttgtgtttttaagtaaactgttaaggtctttattgtgatttagtagaaagaacttgagtttagagtcaaaagactctagttctgtctctccctctggtgctttctctaaagctatttcctaatttataaaatgtgagtcatgagaatatttatgtcaggatatcatgggaattaaacaaggcaaaggcatagtattaaactagaaaatgttattttgaatgctaatgtccaaaaaaaaaaaagaaaatgaaaattctatatggattaacttagaggaaaaaaaaaaagtaggctttcaaattttctccaacatctgctttgtcttaactgcccggtaaagacatatcttttgggtgttttctttttttctatagacaaattaattcatccatcatttgagtgcatctgtatgccagcgcaaattagacacaagtcttgtcctcacagatcttctttctcctcttacaggggaggtaaggcacaaccataacacacaagagaaaccctgtctgaggacagataacatactgtattgggtgtgtgaaggggacgagccgccttctcactggagcagccgggaacatattagtgacaagctgactttcaggtctggattttgaaagttggacatactgtaggcatgggaagatgagggggaaagacatatcaggcctgaggaatagcatacctgtacaaaaagtgggaagaatgagctgtgtttgtagagcagggaattgtttggcctggtgggaataaattcagaaaggtaggtgatcaagaagggcgtttgagacctttgggtgatagagattcagtgtaagttttcaagcaagagtgataatgtgagtaaagctgtactccagaaagctagctgtggtttgaaaagggagctactggaggctgtaagtcaagcattcagttcctgagtggaggcagaaatagagaagaaaattcaaacagtggtagaatgaggtgaatttaaacaggaaaccaatgtggttctgattgtacttcacttaggtaactttttcattaagaaagaattctggctacctattctcatatgttaataatagaggtcttggccgggtgcagtggctaacatctgtaatcccagcactttgggaggctgaggtgggtggatcacgaggtcaggagttcgagaccagcctgaccaacatggtgaaaccccatctctactaaaaatacgaaaataagctgggcatggtggtgcgcacctgtaatcccagctactcaagaggctgaggcaggagaatcacttgaatccaggaggcggaggttgcaatgagccgagattgcaccactgcactccagcctgggcgacagagtgagactccgtctcaaaaaaaaaaacaaaa

SEQ ID NO: 7123 - DNA, 462 bp, Homo sapiens
cagcctctaacagcatttatcacaccctcttatggctgctggttacttggccatctccctgctgggatggctccctgaaggcagtgattgagttaatccttgatgtatcccccatcagctaacattgttcctaggagatggtgtccaataagcattggatggtaggctgaaccagagtgataaaaatatcaaacgaaggacaaatctagagacatctggaaggggaaaactagaatttggtgatgagttatataaagagagtgtattagtctgttatcacactgctaataaagatatacctgagtctgagtaatttataaaggaaagaagtttaattgactcacagttccacatggttggggaggcctcacaatcattgtggaaggcaagggggagcaaagtcacatcttacatggcggcagccaagagagcatgtgcaggggaactcccatttataaaacc

SEQ ID NO: 7124 - DNA, 10767 bp, Homo sapiens
gccaaccgtggcgcaggcggcgcggggaggcgtcccagaggtgagcgccctgcagcggcaggggatgggccgggggccctaagtcgtaggcagcgcggggcggggacgcggctgcctgcggaggtcggactcctctccgccctcctcccgggctgtccgggtctattttccagtctatgtccaactcgcgccgcctcactaggcggcgctctctgccccgcggcacccgcgagacgtggggtccctcggcccagggacggggtgagcgtgtcatgtgggtgccctgtgcccggcaggttggagacgaagagacctcggcacagacgaagtcactcacatcctcgctttgaaacagagcgggtccttcttgtgctgtctcgctgtcactctcgcccccaccctgtggaagaggcaggtggcttgtccccagtcactttcttccttggaaaagggagacagagggccatctccagcagggccatggaaatcccagaaagtcactgagctgctcaacaaaaggccctaaacaccccaccccacagcaccaggcagtgcacactggccaagactccgtggtaaatattgctggcctttatgttgagagggggaaaaaaaagcctgcctgtgaagatcatcgcccagtggccatgctcctgtgaaaacacaattggaaagccatttcctaaggggcgagggtgggtctgggaccatgctgtggcttgggtgattggtggttgcaggagtgagggtgctgccctgggaaggcgctgaggccctgttgggtgggaatcgatggctgcggctttctcccggaggagggagagcggtgttgttacctagtgttgggaacacatccgtccagcaccgtgaactgcaaacaagcagagtaaccctagtgtccttcagatactgttgctgagcagtcacctagtcaatgagatgatctgtttggacggcaagtgcatctgtaatgccgccctcttgctcagtgcctggaagaggcattggtgactccccgctaatgctaggggtagctaccgtgcaggagcagtcaggctcttgcagggcctatgtggtttcatcaattttctcctgcatttacccagcccctccgaattctgagaagtgcgtccaagatctcttggactccttgactcagttcacccttgttcttgtgggcagaaaacaattcccagtgtgccatgcacagccagtcagaagggaagccctggagcagggccctgggagaagttctgtggggctggatgctaattattcagttactggattgtggggaaattccaggggaggtcccagaggagagaccgtgctaaagctaattactaagcagtacaaaaataatctctctctctctctttctctctctttctctctctctctctctctctctctctctatatatatatatatatatatatatatatatgtaatttttttttgagacagtctcactctgccgcccaggctggactgcagtgacacaatctcggctgactgcaaccactgcctccagggttcaagcgattctcttgcctcagcctcccaagtagctgggattacaggtacccaccactacgcctgtctaatttttgtatttttagtagaaatggggtttcaccatgttggtcgggctgatctcaaactcctgacctcaggtgatccgcctgtcttggcctcccacagtgctggcattacaggtgtgagccactgtgctgggccaaaaataatctaaatttcaacaatcagcatgaccatgcctgtgcgtatgaccctaattatcagtctgactgattcttccttccaaaatgatggcagaggatcacctctttggatatttacagctctgagcaaagcaaaaagcatgtaggtgccattgtctgaatgcaaaaccagccatgccaggttttcggtgttgtttctgaggagggagcgcctctctggaggacggtgtttccagaacagtgcctccgttgttcattcccgtgcatcaggaagtttggctctgctgagtgttgaaagcaaaactctcctgtttatttgtctgtgtatactgacagacttaaacagcagacagcactggaatgtccagttactgcatccagatgtgtttgtttcactcttaacattgtggaaaagaatgcagaaggcagatccaaagcttcaatcagatttctgaagcttaagtgattcccagccttggtcccttaatgtgagagcaacagcgtatagtgtcttccgctctctgggacaaacccaagtttgaggcatagtccctgctgtccaaaagctcctaggtctaagtaggaagacaaaaccagcacctgtgaaacaattagagcgcaattaagtgcgaaagtatgtggcagcatctgctagctcaaagaagacagctagtgcagactgactgggaaaggaagagagagcttcacagagccagctggtgttcagcttgacttaagaatgaccatcaagggcttggccaggcctaggaaaggaagcatgaggatatatgaagctcagaataatgaaaggcacttgctgcccagagccaattcaaattcctgccttccgggaattctggctgtgggtcctgccactctcttcctcacccagccatgatgcccttcttatagcattctaaccatgcctttttttttttttttttgagacagagtctcactctgtcacctaggctggagtgcatttgtgtgatcttggctcactgcaacctctgcctcctgggtttaagtaattctcctgcctcagcctcccaagtagctgagactacagtcacgtaccaccatgctcagctaatttttgtatttttagcagagatgggatttcaccatgttggccaggctagtctcgaactcctgacctcaggtgatccacctgccttggcctcccaaagtgctaggattacaggcgtgagccaccacacccagcctgaccatgcgttttttgtgtgcctcctttactttatgcctactctcctatgctcaaaatgctctgctgaccaatcccctacattttttaagaagcagctcaaatggcaccttctccagtgaagacttccctggcaggcccctacccgagtgtttgagcagagttggagggtttctcctttgttctccattggtccttgcatagacctctgttgaagctccgtattgtccataggagttaagggatctttgactcactcactgaagcagagctgtgtctcacttacatagggctcccctgagctgaatttggtgtctggcacataagaggcgtttgataaatgattcttgattgaaattcaagcccttataggtaacagtgaagtgccccaccaacttggagtagaaggcacaggttatgtgttacaaggagtctcagattggataaattagatggagccaattcctagaggccttgaggagtctgagtgtaatgcagtggtggtgctcaaaactcagagcaccccctattgccttcactatagaattctagagtcttcttgatctgcccccagcatatcctctttagcctcatcttccaccagctcccaccttgagcccacaaatctaccttctgagccactgcagccccaggtagctccccaggcctaggctctctcttctcctttgtccatgctatttggcagccttggccaggaatgcctactgctctccctagctaattcctgatcattaatactccagatctgaatcccctatgtgcagaggcccctcaggctgggttttcaaattctcctctgtgctccatagcaccctgcacatcctctaatagcatttatcacaccctcttatggctgctggttacttggccatctccctgctgggatggctccctgaaggcagtgattgagttaatccttgatgtatcccccatcagctaacattgttcctaggagatggtgtccaataagcattggatggtaggctgaaccagagtgataaaaatatcaaacgaaggacaaatctagagacatctggaaggggaaaactagaatttggtgatgagttatataaagagagtgtattagtctgttatcacactgctaataaagatatacctgagtctgagtaatttataaaggaaagaagtttaattgactcacagttccacatggttggggaggcctcacaatcattgtggaaggcaagggggagcaaagtcacatcttacatggcggcagccaagagagcatgtgcaggggaactcccatttataaaaccattaaatctcgtgagacttattccttatcacaagaacagcacgcagaagacctgcccccaggattcagttacctcccactgggttcctccctcaacacgtggggattatgggagctacaattcaagatgagatttgggtggggacacagccaaaccatatcaaagagtaagggacaaggttttttcaaacctatgaggcaggtggagatggtgtgctacaggtgtaggattccctggcctggggagaagtccacttatatgtctccgagtactacgcaaaaatttttttgtttcctggaggattttcaaaattcaaaatatcaagtcactttgagacatattgagtctgatgttaaaaaggaaatgttctagagtcaactgaaacacacactttaagtacaagtgaggtcaggcctagagaaagattttgggagcatagtggcaacagtttaacttgtgaaagcaaatgtggtcactgatggaagaagcctgaagcagagaacaaggtcttggggaaacctagaagccatgggggtgggaaaaagaaaagtatctgttggaaaatagaatgatagaaagatagggaaaaaactaaggaagccaaaggaagagatatttcaagaagaaataggtggccaaagctgcccaatgctaaacaaaacaaaacaaaacaaaacaaaacccacaaggagattcataaaagaaagaggctgggtacagtagttcatgcctgtaataccttgggaggccaaggtaggaggattgtttgaaaccaatagttcaagatcagtctgggcaacatagtgagacccctccacccccacccccacacacaaaaattatctgggcatggtggcacatgcctatagccccagctactccagaagctgaggtgggatgatcacttgaaccccggagttcaaggctgcagtgagctctgatcgcaccacttcactccagtctgggtgatacagtgagacctggtctcaaaaaaaaaaaaaaaaaaaaaaaaaaaaatttaaaaagccagacctgaggaggttaaagagaggctagttactgagttactgggcaatggaaacattgggtggggtttttagactttttgtctgaggaatttggccataaaagaaagaaggaaggaggggtctgctcaagagaagactttctgtttgttttatggtaagagagatctgcctccctttgaccacactagggaaggagctcatttatgctaaaggaatatggataaatattcatattgttcacttggttatatttcatttaaaccttcctctcctcctttcctgtcctctgcaagtgccccatagaactttccttctggggaattgccaaagtcatggtattgctaaatccagtgacagggtgttgcaacacagaaatcattggttctcacttcactggcctgtaatgagactccctcaaatgcttccaaacaactttccttcctaatagtgctagtcaggcattttctcttttactgtgcacaaattaataacacagtaaaagcagcaataatagcaaatgcatagatagcagttactctgagctacagactattgtgagtacctttgaggggtaagtggtgaaccagtattcaagcttagcatatttgtcttcagggtccatgtacttaaaccactatgctaaattcaagataagtaagtttgtattttaccatagattgatgttcatgttcctgacactactacaagattcatactcctgatgctactgacaacgtggcttctccacagtcaccaaaccaggtatctctctggacccaggttcactgtgggttggactagctttaatagtcaataaggccagggacaatggcacacgcctgtaattccagcactttgggatgctgaggcgggcacatctcttgatcccaggagttcgagaccagcctgggcaacatggcgagacccacttctacaaaaaatagaaagattagctgggcatggtagcatgtgcctgtagccccagctacttgggaagctgaggtgggaggatcacctgagccgggggagttcaaggttgtgccatgatcatgtcactgcactctagcctgggtgacagagtgagactctgtctcaaaaaaaaaaatttaaaaaacagtcaataaataatttgatagtcaacaagcaatctgccacatgcaaagtattgcaagggaccaaaaaatataagctatatgtcccatctcatttactcttcataaccatcccattttacagtcagggaaactgtctggatttgaactcagaagaccatgataaaggcaaaatcagaagtcacttttagtcctgagtttctggggtctgagattcctcctcatcttggtcagagatataactgggttcagatagcttcaagactaccttttcttttatttcccaacctgtgaaccaaaagggtagtgagtgtgaatctctagcatgcacagatgtgcaagaaatactgcctctcctctattttctagatattaatattagtttagagccttcatctcatctggccagcaaccatagaaatcaccccaggttgtgtcactgtgtcacaatttcagatctcttatgcattgccaagatcccaggggctcgggtgcaggtatctcctgctcccccatctggtccactcgggttaccactgaaggcactcttgtgcctgtcttgcctagcaagtcctcactgcttccagaccacatagctaactcactggggtcctgccagagtcctgtcttcctggtgctgacagaccccttttcccttcctgtcttcctgtttctagaagcatgtctctctgctttacccatcagcacaccccacccctcttcccccaacttggcaaagactttgtgtccccaacctaaggccctgtttggaaaatcaaagccagaagaacttgcaggctattcctggtagggttctgacatatacctgccctggaccaatgactagggagctggctacagaggtggaggtgagcctaggaaagcagaaatacaaggagagggggaaaaaaaagtcaaatctcaaaatatctagccgcagacataagctcctctgagggtaatttcttgaggggggaaaaagttgctatttaaagctaggatatatgtggttccatttttttcatcggtacattaataacatcattttccactatgtatcttcaagatccggtgtaacagccttgcaaatttgccagaatgaagaaggaatgttctgcttcagggaggattggccctggtctatgattgctgtcatgatgatactcagcaagtttccttagataacttcagagttaacaaggatgtaaaaatgcttccatttcaaactcaccgttatacatatgcagaaactgaggacaatgaaagttagagttgtctaggatacccagactgtggctgaaggaggactagaaccgatatttatcctctcccagcccagcatttttgccatggtctcatgtatctcgaaagtaaccaccactagcaagttggagccaaatcaactagctgactccctgccctgactcagaatggagcatagccaccctgggcagcctgcccaggcagattccacatgcagtaaacctccttcgggtcccaggacactgggcacagggtggggacctgtgcttccagcaggggtgcgctccccagcctcacctgtccctgcttacagtccctcaggcaacaccagtgaaatcatcttcctctcagggcatcctcatcctggcctgagtgccccccacctttccttctcaacctcttcagggcttaccttgcatcagggggtgtctccagcagctgcagggtgcattggattttatctgcctgggaagctttctcttgattcctttgctagcccagcacagactacacatccctctcagaacagttctcaagtgtttgatactctctcttcacattcccatttcgtatctaactgatcaggttaatagggttcctagttgccggtcaccacccccaccccagctgtttccaatttacatcacactccaaatgatttttgcagcgcttagcagattgtctgtgtcattactttcagggatgctatactggacttccctactctcatctgctccagccccctgaccttatagttgcccagctttcctggcaattgactttgcccatcaatacacaggatttagctgagtagcatccagggaagatgtcggagcctcagatgttaattttctaattgagaatgttggcgctgtccgaacctggagacaggtagggatgttcactttctgggcgagccaccttttcccgacgattttaaatgttgtgctagttgttcgtttttaataatcactaaaaattatttctttcaatcagatgctttaaaattgtgtgctaaagagttataatgtgcaaacaacggggaagccattctgtacctaaaccatgtgttttcaacataacttttcagagtatcagcgcctttgcttgctgctgtttttgctgttttttgatgctgggaaccaccacctaaagatagtaaagaaaacacaggaagctttccggtaactcatgctaaagaaacacaaaatcaccccagtgccttgagaaatttcctttccctctctaactttccccttcagtgttctaaagggaaggcgtttctggtaaggtgtagttgcgtaaatgatggctgcctacttcagcaagcaagaactgttggagtattaagcatgggtaactggatattctggtttgggcactggaggatccctggaagccggaagcaggctgttgctgccggggtaggggcggcgggggtgggaggtagaaacttattgctgtgattttataggcagtaaactgatgcttagagaggttcagcactcgcccaagctcacacacctactaaactgtggagctaggatttgaatccagctacaaatttagttgtcattgaaatgtctaaatgcactctactgcgcaagcgataggaacttcccagcggagctcagctcagggacgcttgcagctccccgcgccccgctcgactctccggccgcggctccgcgggctcctccccctcggtccctgccccttttgcgccctctgctggtctctagggaaagcgcatctcctgaaatcagaagtcgcacccaagctgtcctgtttccttagctcctagtaaagcgatatgacccatccatcccctcctcctcaaagcctcacatgaatcttctttgaggtactctctgatgcttcactcttcagcgctgagaaaaatggggaggaaggggaagtgaatgtattagtatagccccttctcaaaaccaatcgtgcagcatcttagccatgccttatcctggaagaacgaggcagctcacgtgggcatgggggtaatgagcagggaggcaattacagactcttaggttctcaccgctaacagtgtggtcagtggaccagcagcagcatcacgtgggagcccgttagaaatgcagactctcaggtccttcagccacagccctgatgaatcagaatcaccgtttcaaggaggtctcaggcgggccgtttcaggttccgagctcgctttgaggctctgtggatgttttgcagcatattcaattttgttttgttcaaaggtcacagtgacaactaagtttgcagcgggattcaaatccgagctccacagtgtaataaatgtgagatcttagataagtgcttaacctctctgagttaatcatctatcaaataatgaaaagcactataagccaactcttcaactttcaggacattgttcacccgaaacccgaaatccaataactgtgcactgtcttctaacacagccataatttacctagatgtactgcttagaaatgtctcactctcatggtgaccttagttctatctgtccctagagagccgcaagaccattttgtctggaggttctctgctcactggacaatagggacagtggaattgtcctcatccttgtgcttgagtctttggaaaccaaatgaccccagaaatgtcatgaaagagatttttaggtcccagaggaactgaatggcttagacacccaccttctgaacaagaggctgggccagagatttctcaaggtcccaacttcaaccttggtgttctgtccgccttgatttacaaaatggtcttgatcttttccaattaaaattctatttagtagagatacacagaaagtttgcaattcttccacaagaaaactgctgtatggcatagaaaaatatctacataatattttttgtttcttcttcttaattagctttcctattttcccttaggaaaacaaaaagtcctttctcctgattcaccaaaaaataaaatactgactaccatcactgtgatgtgattcctatagtctcaggaactgaagtctttaaacaaccagggaccctctgcccctagaataagaacatactagaagtcccttctgctaggacaacg

SEQ ID NO: 7125 - DNA, 375 bp, Homo sapiens
gactgggaggttggggctggaagcagacaagcctagagaagttgtcaggggctagacgatggggttttgacctagaatataaactttgtttgtagttcatagggaagacattgaaggtttaatatatgggaatgacgggaacctctggcagggctctgcctgtgagcatcacatagcaccccgaggatgtgtttgctactctaggtttcagtggagaaaaaagcaagtgacaacccttctgttcctgctcagcaaaagctttgatcaccagcccccttcccctgaatatactggagaaaaataacagaagtgcatttcaaggtccacatgtgagaagaccctaagctgtcctggctgttcaggtagaagttgtca

SEQ ID NO: 7126 - DNA, 340 bp, Homo sapiens
gggaataatgactgaatcctccctatctggattgctgcaagagtaaatacttcaatatatgcttagaactatgcctggcacagtacaacaggttcgtgttattattactgaacatttcccctggatgcctcatagatctttactatccagcaggcaattagatacgtgattctggggctcatcagaaggccttggctggagatactcaactaagcatcctcagcacagagatggaggaggacgcattaggctttagggaaggggatggtgctggagtagtgcatagggtgacaaatgacctgcaagacagttataagtggaaataggcaaggacattaag

SEQ ID NO: 7127 - DNA, 600 bp, Homo sapiens
gggatgatgaaagtgttctggaactagataagggtggtaggtgcacaacattgcgaatgtacctaatgccactgaatcgtatgcttttaaaaagctctatgcttctgatggatagagaatgttgttattgttatcattgcctgttttgcttatttctacagtctcctggtctcatgtagaactaggacactaagattggaagcttccaaggagcagtatagacacaacttcaccatgtcaggctgaagggcattgtgcctcttttctactccaaagaggtcaggggaccccttggtccaagggatagtttcttcctgagaaagggaaggggaagctcttgggttgaccttgggttgaacaaaagaacagggaggaaatttagagagctgaggttgagcttgtgggacacactcagatttagactcatagcagcatcaaaagggaacattaacccaggattgcagaaggtgacagaagacccagaaaaggtaaacattggtctgtttggtacaggcagaatctgccccaggaaaaagcttcgattacaaatgaggtgccaactggtagagtgtttgcagaggtccatgccagcatcaacca

SEQ ID NO: 7128 - DNA, 600 bp, Homo sapiens; identical to SEQ ID NO: 7127

SEQ ID NO: 7129 - DNA, 494 bp, Homo sapiens
actgcattgtcttttagggccaatggacttggaggcatagagattttataactactgccagaacccaaatattgccagtcggcctcttctgctgctgttgctagctgtcttcttctgggggaaatgggttgggttctaaatatgaattaacacagggctgtcttcgatgaattcagcacaaaatgttctcagcaattgaacactcggagagaagtgttaggcatttagtgcagactcatagaatagcaggacagggagggatttggatctgggcaagcaggagatggatatgaacacctgtcttttgagaccgtgccgaggtggcaatgaaggtagaggccccctgtgttgaggtctttactcaagaggctgtggtcctttgggactaacatagcatccgatagacagacaagatggacagctacagccacctatgggaagcggtttctactcttaaaccacaagcccctagacactcatcatatcataaacat

SEQ ID NO: 7130 - DNA, 494 bp, Homo sapiens
actgcattgtcttttagggccaatggacttggaggcatagagattttataactactgccagaacccaaatattgccagtcggcctcttctgctgctgttgctagctgtcttcttctgggggaaatgggttgggttctaaatatgaattaacacagggctgtcttcgatgaattcagcacaaaatgttctcagcaattgaacactcggagagaagtgttaggcatttagtgcagactcatagaatagcaggacagggagggatttggatctgggcaagcaggagatggatatgaacatctgtcttttgagaccgtgccgaggtggcaatgaaggtagaggccccctgtgttgaggtctttactcaagaggctgtggtcctttgggactaacatagcatccgatagacagacaagatggacagctacagccacctatgggaagcggtttctactcttaaaccacaagcccctagacactcatcatatcataaacat

SEQ ID NO: 7131 - DNA, 421 bp, Homo sapiens
atatatgtttgtcattgtggacggcagctggatgagtctgaaagcggttgcaaacccctttaattcactttgctttctcaactttgaatggtgtcgtgggctggggtgggtcccctgtttttgagaatcacctgaaagagtctgattttctgcatcttttcggggagtaaagctgttgctccaaagcgctgtttaaaagctgataatagtgtatctggttgagctaacagcccttcttgaggaggcagcagactggccagagggttctgcaggcattactcatcagcgacacctgagcttgcccaggtagcctgactcttgtttgtttctgctttgcctgaccctgcaaaattattgtccaaatgcaccctggcaagaattgatccacgaggggatgctgaccagaaggagctttcgtttc

SEQ ID NO: 7132 - DNA, 143 bp, Homo sapiens
agtagctggaactacaggcacgcaccaccacgcctggctaatttttgtatttttagtagagacggggtttcactatgttggccaggatggtctcgaactcctgacgtcgtgatctgcccacctcggcttcccaaagtgctggg

SEQ ID NO: 7133 - DNA, 421 bp, Homo sapiens
atatatgtttgtcattgtggacggcagctggatgagtctgaaagcggttgcaaacccctttaattcactttgctttctcaactttgaatggtgtcgtgggctggggtgggtcccctgtttttgagaatcacctgaaagagtctgattttctgcatcttttcggggagtaaagctgttgctccaaagcgctgtttaaaagctgataatagtgtatctggttgagctaacagcccttcttgaggaggcagcagactggccagagggttctgcaggcattactcatcagcgacacctgagtttgcccaggtagcctgactcttgtttgtttctgctttgcctgaccctgcaaaattattgtccaaatgcaccctggcaagcattgatccacgaggggatgctgaccagaaggagctttcgtttc

SEQ ID NO: 7134 - DNA, 316 bp, Homo sapiens
ttttttttttttaaattacagagtctcactctgtcaccaggctggagtgcagcgatgcaatcttggctcgctgcaacctctgccacccaggttcaagtgattcttctgcctcagcctccctcaggcgtgagctggcacgcccagccaaatttttcattttttgtagagacagggtctccctatgttgcccagtttagtcctgaactcctgagttcaagccatccacctgccttggcctggcaaagtcttgggtttataggcgggagccactgcatcccgctattaggaatttttaaaaagcccctcggagggtctt

SEQ ID NO: 7135 - DNA, 9183 bp, Homo sapiens
ggcctcaggagtgcaagtagctgatgaagtatgtcgcattttttatgacatgaaagttcgtaaatgctccacaccagaagaaatcaagaaaagaaagaaggctgtcattttttgtctcagtgcagacaaaaagtgcatcattgtagaagaaggcaaagagatcttggttggagatgttggtgtaaccataactgatcctttcaagcattttgtgggaatgcttcctgaaaaagattgtcgctatgctttgtatgatgcaagctttgaaacaaaagaatccagaaaagaagagttgatgttttttttgtggtaagcatgttagaaatattgagcctctgtaaaactcattttgttagcactcgggaagaccagttccagcaccaaagtaatttttattcaaactatttgcagttgttgtcatttaatttttatttacaggtttcataatgttaccagggctgatgtttatgggacccaaactaaattttgactattttctatctacttgttatgtgactctccgtttttgttttttttttcaatggggaaaggacaggaggcatcctctgaatgtactgcttttataggctaaaatttcctactacttttaactttcttacttataagccaaaaccctacttttccaacgagccatgccaggaaccagccttctatctactcttttaaattacaccccttccttgtgcctctgtggtctactacttttgaagaaattggtaccattccctccctgctataatttgctctacagttgcactgtttagtagtgtagtcactagccacatgtggctatttaaattatttaaaattaaaaattcagtttgttagctgaatgaattaccacatttcaaatgctcagtagccacatctgactagtggccaccttattgagtagcacagatacagaacatttccatcattgcagaaaactctgttgggcagtgttactcttagatagtgaaacagggctataaagttatttttatggcctttttcttgaaatgttgtttagttattctggtcttttcaggcaagtcggtatttgagatgaagctttagaaaaaagttacacctggatccctcatttattgaatattatactgcattccttgatatggccaggagtagaattctttagtttctaaggggagggagaaatggtaacactacctgatttttttcttttttttttttttagaggggcaaggattctcttgatactttggcctgagtcagggcaaggcagggagggacttagcttttagctatgtgccatcaatagcttggagtgtaaaagggatatgggagtaggagatgcagaggattgtggtttaaaaaggaagataactcgaggtcacacctcacttgtatttcagtaagcttttactgcacttgattaaaccaagttgctgtgaggaatgcaaatatgaggtcagggtgcacgtattcaggcagcttagagtccattgaagctggtacataagactgaaaattaacaaggatttgaatgaaggtgcatttactgaactttatttctactacacgccagctattgtgcgagggcctgggaaaacagctgtgaataaaacaggttaagtccttcctcttctggcattcacagctgagtggcagacaggccagctaatggtttaggcttttaaattggtcggtatttccttaatttgcaggtattttttctgctttttatgtattttgtaattatgaaaagtatgcattcttatttttttaaatgtggaaaataatagaagaaaaggaaatttagtgttagtgcagtggtttattttgcactgttacactgttacttaagaaaaggtagaaccttattaaaggcattttctataacaagctccgcccatggcccagggagcagctcttaaagtagtttaacaatttggttagaataaaagcagaacagctgatgcttttttatgtttctgacctattttcataacaaaagtacccactctgctgggcgcagtgactcatgcctgtaatctcagcactttgggaggtggaggtgggcagatcacgaggtcaagagatcgagaccatcctggccaaccaacatggtgcaaccccatctctactaaaattaactgggcatagtggcacacgcctgcagttccagctactcgggaggctgaggcaggagaatcgcttgaatctgggaggcagaggttgcagtgagctgagatcacgccactgcactccagcctgggtgacagagcgagactccgcctcaaaaaaataaaaaataaaaagtacccaccctgtagctcaaacatctgccagtcctgaggttgtgatggctctgcctccttccctggaccttaggattgggaggaataagcctctgagagacagactgccctttttcccaagaatggaatctctgctcactagggtaaggggtacactaggtgaggtccacatgccagtgctcatggctgttgaatgtcctggaaatatggcagctaaatggaattattaaatgctcagaagtatttagctataccgtaatatcttaatgacctccagtaggctcttggaaactacagctttaagcaaaacaacatacaccaggtcctcaaataacgtcatttctttcaatgtagttttgttataacattgagaaaaaaaaatactggttttggtatatgtcattttgttttaagtcacaggctccaagaactgattgacaatgttaagtgtggacttactgtactgcatcttctctgtgatattttagcagtgtggcatggaggtgggcctatgggttggcgtacagaggaaagaaggacctccgtgcaagcagtctgagtgggagggtttctgtccgttactaatcatccttattcttcagtgttgctgctgaaggtgctgtgacacatatgctgtgcttctaacacgcttcccttcaagagggagaacgtgctccaatgttataaatataaaaagatagtaataatattgacagttaagacataattattggtgagttgccatttagaaatctttagaatcatgagattatacaagtggatttaatatttttttccagagaattattgaaacgtggatgcccagatctgtaattaaacatgtattgttatgttagactaagaaaacaagtacctgtgggatcaaaacctgctattggaatagatgaagggactggggaagtctaagaaaaggacttttatttgtaatttattcttttttgtccttttttttaagtttttgatttattcttttttagaaaacaatctgaagcaaaggtgccaaaatattagcatttaattctgggtcacacgtacttacggattattctctgtacttttatgtattttaaaacttttttccaactagaaaaactgtcaaaaaccttgtgtaaatattagcctgaatccaatcccttattaataataatgaaaaatattctgaagaaaaagaattgggttatacagtgaagtactcagtgttggttctttcattatggcgactgtaatctgatttttaattggtgattgtcttttgccaccagtggttctcttcttttttcccaccctggtcaacctgagtgattctgcatatgcctatctgtagcatttcctctctgagctgctggggaggtagaaaaaatgtgcagttaagaaaaaatatctcaggagagtctgaggattctcagcaaatgtttacacaagcaaatgtttaacaagttgcaagttatactttctctaaaccacttttttcatttttggcatctttctatctagggcaccagaactagcacctctgaaaagtaaaatgatctatgcaagctccaaggatgcaattaaaaagaaatttcaaggtatgttctagatgacctctgaatatgtagaggtatggtgaacactcagaatggggcagcaccttttctgagaagcaccttatttttttgcagagcttcgggcacaagggagaagtgttacttgttttgagaaaagcagaagactgaatttgactttccatgtatcttctgctttgtgctggttgctctgggtctgcccagcctgtgtttaataactatacccttgacattgtctatatatatcgtttattcaggctggttttaaactagtttgaggtgctaccagttttctcatgtaggaggtggagactgattgtttaacattggacataatagtaaatttgctcttgcctttgaatgtagttgttataataaagttgcaaaaaggaaatgtacctaaatgagaaaggatgctcttttctccagctttactgttgaatggcatgattttaggtaattaattcatctgtgtcccaaggaaagtgcacccactcctgagctggtcagttgtatttgacttgccactgggtgattgggatcctgatgagatggcctggccagacttcagccaggagaaaatgttggtatgatggaaagaacgtgcatggggcaagtgcccaaaggcctgcactgagggcgaagcctgtctaactgctgtgtggccttggccagaactgcttaacctccatgggccttgattctctcagctgtagaaggggagacttggtctcatgtgtgagttttagtttaagagtttgccctgccaccttcctgccatggctgtttccaaacagctgagtgagccaaggtcacaagggcttggcctgatgttgattttgttttgtttgttttactgtcactggtttttatattttcatggtagaacaggtttgccctagcctgttttacttagttcggaaaaaaaaattcttgcttcctttcccgagccttgctgctgcatagtttattgctgggtcaggttcttcgtgcatttggtttgatgtttggcaacccccagaagtgtgtcactgggttgctaactgacacttttaaatcctttagcttcaacactttcccagcccaaccaaaaggttcacagtggattccttattatctttattctgcattgcctttcagtaaagggaattgctttgcacacttgatttggtgatactaaaagatagtggccggctgggtgtggtggctcatgcctgtaatcccagcactttgggaggctaagacaggtggatcacctgaggtcaggagttcgagaccagcctgaccaacatggtgaaaccctgtctctactaaaaatacaaaaaaaaaattagccgggcgtggtggcacatgcctgtaatcccagctacttgggaggctgaagcaggaagaatgcttgaacccaagaggcagaggttgcagtgagctgagatcgcaccattgcactccagccagggcaataagagcaaaactctgtctcaaaaaaaaaaaaaagatagtgaccatgctgccttttttctaatgaaagcatccactgtctttctcagatcagtcctgagtagttcaaaagctgacctgctgtgctttcagcagcttgagaaataatggtctttaaatgatgggaataaccatgcagctatttaaaagacagtggccatttacagagaagctactgtatgtaatccataattgagctcgtttttgcattgtggtagtgtaattgttctaagaaagcaatcagtaacatatttcacatagttttcattgtgatcgatttcataaatgtgtagtgtaataccattgaagagccagctgtttacttttcaatacagttgacaaaatcaactgtgcaatcaaaaatcatttgtatttttatgttttaaaaaccaagaaaattttcttactagacctgccttttagctttttagcaaagtacaacatatctttagaaaagtgtatgtcacaaattattgtagaatgtgttgaatttttcagagtgaacataatggttatttcttaatctaatgaccagcaccccagaagcctccctggtgctgttcccttcaattcatagcacttctgcctgccccttcctcctcaaagtagccagcaccctggcttctaacagcgtaagttagcgtgggctgattttgtatgctatacctatatatataatagaatatatgcattttaaatctggattctttcagtgaatgctgtttgtgaggcccatctatcttgatgcatgtagttacaattattttttctcgttactgtgtagtattccgtgtttgtatataccccagtttatccagattagaactggtcttttaaaagtttggttatcttagagaaagaggtaaactgctgccataattgtaaatagaagtgttgttttttctctctaggcataaaacatgaatgtcaagcaaatggaccagaagatctcaatcgggcttgtattgctgaaaagttaggtggatccttaattgtagcctttgaaggatgccctgtgtagattattcagtgccacaaattgaaagcttccatgtttaatgttatcctcttgctatataaataaagcaaatatatttaggccagggtctcactgagggggagctgtcttgtcatcttttagagtaaactattctataaacatatgcaaacagccctaaataaatctaaagtctaaagttttattgatgtgaaattaaattcttattggccaaatgcctgttttgatgagttgatttataaagatttttgttaagctcaggattttaaattacacagttcacaaacagtaaaggccatgtgaagagaattattacatctttattaacctcagcatttactttgtttcttttgcttaggaaattgctcataatctggttataattttggtccaaattctttattcttccttgagctaagcagaataatggaatataatatgtcttcataatataacaacactaatacactaatagtaagattaagttaggcagtcttctaccaaatgtgtaatggagattgcctcaaaattgtgtccacataatccacgctcatcttgcaaagcgctatttcaggcacatcattggaatacaggaagtagccctgcacctgccagtgagctcgccattcactgattggaagagtgacctggcatcttggaaatcattgtgtgtcttcaggagaatgtgcagtgtcttgtaacaactaattataatgcaaattagggctacattgtaatctgctttgttaatgaaaatgataaaacagaatattgacaagctaggacacctgtggtatctttaattgtatctccttcagaagtttgcttcttatggtataataaagtatggaagaatattgagtatatgtttactctgggcctgggagaacttaactttctagagcagtttgttgacttgtgtgcaatggggagaggtaccatgatgacactcacagggagccactgttcactgacacttggaagcggtcattgttaatatcacgggcgtaacactttgaacgatatagagatgcacaaacagttgaacttagaagtagcagtattggctttatgtaataaaggaagcatttttgacttacctctcgtgtaattttcatgtgtgaattgggaatacaggattttgccttccatatggggtaaggcattgaggtttgggtatttccaataattaagagttaaggttggctgagtgtggtggctcactcctgtaatcccagcattttgggaggccgaggcaagaggatagtttgaggccaggagtttgacaatcagcgtgggcaacatagtgggatctcatctactaaaaataaacaaaattagccgggtgtggtggtgcacgtcagtagtcccagctactttggatgctgaggtgggaggatcacttgagcccaggaggtgagctgagatcgtgccactgtactccagcctggatgacagagcaagaccttgtctcaaaaaaaaaaaaaaaagtcacaactccctctggtgaataagaaagttggtgtaaaagttgggaacgttttcaatgtttattacactataagtgtaataaatattatacaaaattataaattcacatttaaaatttagaaaatagagaaaagggaaattatacattgtcctaccacatgccatcacatggttagcattttgatacacagctgtgcattattacatgtcaaagactgcatatactatggtggtcccatacaattataatgtattttctactgtaattagatacacaaataccattgtgttacagttgccgacagtattcagtatagtaacgtgctgtccaggtttgtggtctaggagtaataggctctaccatacagcctaggtgtgtagtaggctatgccactaggtttaagtgcagtctagggtggggaacattttaatgttgatccacatgccaggtgtttgtgagacaagattatgctttaatcaaaatattttggaattgtctagaaaatagtgctggctgcttgtcattcatcctgaattgcttgtttctttactttgtagcaatgcttttagtgtgggttttgttttttgagacagggtctcactctttcccccaggctagagtgcagtggtgcaatcataactcactgcatccttgaactcttgggctccagcaagcctcctgccttggcctcctaaagtgctgtgattacaggtgtgagccactgtgtcctgctagtgattgtgattaacaggcctccagggaagtgccataagcccaagactgccgtactcaaaagtcagccatgtaggtaaagcaagatatttggtcaaggagttttagaaggagatttttcctgtggtgttggcttaagtgtggcactgttgtgcgtgtgtgaggtgtcttctgtgggaaggatttcaaacagtacaaagggatgtgatgtaagcatccagaactcactccagaaattgaataaaatgctagtagttagtctctaggggaacttttgagaaagtctcagtggattcctgaggcccaagaattgtgctaacaagcactcaaggcgattctggtacataattagggttcagacctcagctgattggtctactgttggtcaggaacaaaactgcaagtatactctgtttccagaaaatacgtttacctcttcacaaatgctaacacactgcaaaaatatgtttgtggaaagctgacttagtctcatctagcggttactctcttgccctgacaaagcagcaaataaagccattgctaacaattcaa

SEQ ID NO: 7136 - DNA, 484 bp, Homo sapiens
agcaaatctgacccttgtctgtatacttacatgtacccagtagtgatgaaaagagatgaagataatgttagtggctaaatgataattgttgagaaggcatatttaattgaagagaaatagattttttaactctgtgtgcataaatatactctataaacattttgtatttgcacatggtttaaactcatctaactgaattctgacttaaggaatagaaagcatggtctcttccaggtcaagccacactgtagttatttgggggataaatgcttggctaatttatattcctttataactgtctttattaaagtgaagacccttgaccctgagtcagaatcacctggatggttcctagactccactcctacaaactgaatcagaatctctgggattggagcccagaaatttgcatttttaatgatcatttccaggtgatcattaaaataaaattgtattttataaaatttatttaataaaatgtatt

SEQ ID NO: 7137 - DNA, 109 bp, Homo sapiens
gtatttttagtagagacggggtttcaccatgttagccaggatgatcatgatttcctgacctcgtgatccgcccaccttggcctcccaaagtgctgggattacaggcgtg

SEQ ID NO: 7138 - DNA, 5214 bp, Homo sapiens
agtttgaatagaaggggacatgctccttttcttcccaaacagaatcacctttggatgcaacagtggctgcacgtccatgcttgacttacagagtctttctgtcatatctctaccctaacccttcacacccaccccagtcccctgccatgtgacagaaacttaatactctttcttgattccccagttctgcttgctgagctgtgggatactgacctttttggctgtcttgggccgctacgtccctgggcttctgctgtcctacttgatgcgtaagtatgacatatacctcccctacaaagtataccctgctcatagctttccaactatggctaactctaggtgtggggagaggactgttatatttcaattctctaggatatgacctttgcatattttcatgacctgtttagtgtcatgaaaatatccttctttagcaggctctccacatacaaagttcatttcttaccaagtcagaaattgatgagggtccactaacatatattgttggtattaccaactataaaggactgcctgtccctgtttaaggagagaatttttagagccagggtattgtcagcagaacataactcttaggggtttctctgctaggttctatttatgccagagtacttttttcccacttggagcatagttttgtaaatttagttacttcctgttggcatgtactcagcttgcttggggctggaagaactaagtacttatgcctgtggcttttgtatatcaaaacctcgcatgatttgttgtgtaatttccatttatggctcagtgacacccattgccaggttctgcccttggcctgtcagcagcatactgtgctgtgcacaaccctgcagtaggctttgtgggtggctgtagaagtccctgccctcaaagactccttcatgtgtaggggagactggtgaagatgactggcagacttgggcagatctgttccacactttgtgtccaagccctaaggaccaatagcagcgctacagttgggaatgttttttgcagccccttctccattttgtcactgtttcccatgcctcctcacagttgtcactgtcatgatgtggccccttgctgtgtaccaccgactgtgggatcgagcatatgtgcggctgaagccagctctgcagcggctagacttcagtgtccgtggctacatgatgtccaagcagagagagagacaatgtaagtgtcatggtgtcattctttccacttacgcaatttggggcgaaaaggagaagcccataggtctgacatactgggtgggtcctcaaaagtggaagtcgggggtagttggtgggggtgaggattgataggtaaaaatgatattctgttctagggaaacctgtgcaggcttgccagtttttatcatttgtaatcctaggctcccgttttaaacctatctgataaaagctctttcaagttgaataaaagctagacagtgaagataaattcctagtatttgtggtttgttttttttttttttttttttttgagacagggtctcattctgtttcccaggctggagtgcagtggcatgatcatggctcactgcacccttgacctcccaggctcaagtgatccttctactcagccccgccaaacccttcagtagctgggactacaggcatgtgtcaccacatctatctgatttttaaatttttttgtagagatggggtctcatgttgcccaggctgatcctgaactcctgggctcaagcgatcctcctgccttggcgttccaaagtgttgggattacaggtgtgagccaccgtgctgagcccagagcagatcctttcaactcctaagcctggtctcttcactagtaaaagctgcctcccaaaggtgattaaaaactgctgcctcagaggttgtaagtgtactagcctgagatccatgcaacacaatgatggtagtacaaacttttccctcccttgtgtggtcttgtcaggttttgtgttttatggaggcctggccttcaaagagccctgcacttggtcaccaaggcccaagtccccttggggcagccagttgaataataccagtcctcaaaagtctgatttaacaaggtgtgcatctccttttgccctctctttgatcatgtccacttaacaccttgacattaggtctgcctttagccatccagagagttgttgacaaagcctggtatttgatcatctgaccagaatagaaatgtgtgccaggccgggcgcagtggctcacacttgtaatcccagcacttttggaggctgaggtgggcggatcaccttaggtcaggagttcgagaccagcttgaccaatatgatgaaaccccgtctctactaaaaatacaaatattagccaggtgtgatggtgagcacctgtaatctcagctactcaggaggctgagacaggagtattgcttgaatccaagaggcagaggttgcagtgagccgagatcgcgccattgcactccagcctgggcaacaagaacaaaactccatctcaaaagaaaaaagaaatatgtagggtctggtggagaggatgttggaagctgagatattttctccagtgttttcaactcaccttgcatttaggctcagcagctcagccttctgttattattatgtaggcttagagccagattcagagaggctctttgttttgtgttctgattttatgtctttaaagtccaaaggggattttacgctgggagaaggtatcaagcaagactttgtgctcttcccacagtacgccgcagagctctccacccagaacgagccatggacaaccacagtgacagcgaagaggagcttgctgccttctgtcctcaggtatcttgagtgtgggagctgcttcactgtccagttttctttagctaccttttaaccatccgacagctcacatttaggccataaccaggtttgaggccttagactccccttgttcccaagacaaggagagaagtgagactttgttcctagatctcaatttttttctttatcatatcattcctgtaatcaacctaggtctcaattagagcctgatgcccagcaccgctcttccgtatctctttttaccctaccattatggaagaacttctggagctagtatgatcatcttttaaacagcccagttcacccttgggtctgtgcagtatgtgtatcctcctaccactttgaaaaattatctctggatcaattatttgccttaaagtaagtgggtaattgactcccccaagactgcttttcttcctgtgcttaagaggttatgaatgagtgttttctttgggagagcagcctaaaaggggtcaagattttttttgttgttgttactttcacatgtattgattaaaaaaaaaataaaggggagagggagttttcaacgggaagttaccatctatccctggttacattgatttgatggccttcggataactaatgctagctgattagtaaagctgtacctggtgactacacctggttcctgatggcattatctcacatttgttggtcttttcctaagctggacgattctactgttgccagggaattggccatcacagactctgagcactcagacgctgaagtctcctgtacagacaatggcacattcaatctttcaaggggccaaacacctctaacggaaggctctgaaggtgaggggagcctttgacctcagttgataatggctctgactgttgcctcttagcttccctgaacagaggggatactggtgcttgcccctctcctgttttctgagctatggatcaggcggcagagcagcctgagtgctgtggctacagccaggatggcactgctgcccttcttgaagactttagtcccttagtagcctcaggcactagcctcacaggggacatagaagagagggggaattgtgtagagatcacagccacctataagtggaggggaaaggtataccagtcccatgggtttatttcgccctgagaaagccagggtgggaaaaatctggtcatgtggggctggggcacaggagggccaggtaggtgccatgactcagacacttctgtattccaccagacctagatggtcacagtgatccagaggaatcctttgccagagaccttccagacttcccttccattaatatggatcctgctggcctggatgatgaggacgacactagcattggcatgcccagcttgatgtaccgttctccgccaggggctgaggagccccaggccccacctgccagccgggacgaggctgcgctgccggagctcctgcttggtgctcttcctgtaggatccaacctcaccagcaaccttgccagcctggtctcccagggtatgattcagctggccttgtcaggggcctcccaaccaggcccttctggagcacctgcccagagagcaacgagaggcttcctccggtcccccagttcagacctggacactgatgctgagggggatgactttgaacttctggaccagtcggagctgagtcagctggaccctgccagttctaggagccactgaggcagagactccttttgggagtcactgtggtttaggtttttttctccccatcccacttaaggtgatggggcaagggaagaactcagctcccctcccctgaattatatttgtatgctgggtggcctggatgatgctcagaggcctccttagagaggacactcactcccctcccaccagctggatgcccatttctgagctcagtcactgaagtgagagtgtgctcccccaagggaggcttctctccatcaggatggtactttgggggaacaaaatagtcagggatattggttcccctttgaggaggtgctgctgtttgcttttaggtatgagtgctcaggggccctcactgaaagagcccatgcctgccttcctcctttcatcgcctctctagagcccccaaagtcaggcagcagctggagtagttacattgtcatcatctttttttttgagacagtttcgctctgttgcccaggctggagtgcagtggtgtgatcttggctttctgcaacgtctgccttccaggttgaagaggttctcctgcctcagcctccttagtagtgggattacaggtgcccgctactatgcccggctaatttttcttttggtatttttagtagaaatggggtttcaccatgttggccaggctggtctcaaactcctgacctcaagtgagctgactgccttggcctcccagagtgctgggat

SEQ ID NO: 7139 - DNA, 462 bp, Homo sapiens
tcagtcccagtgagaaaacttaaaggcagctaacttcatttgtctcctggcttttataccaggtcatttagtgttttctgtgacctctggctatttaaagttcccggtcagaaaacacattggttcctggcatcagcaagtcaaagccaaagattcctcttgtgtcttacagctcctgctttcatttctcagttcatccactccatttgtttgatccaaagaattttctctgctgtggtttattttggttttgctttatttattttctttctaaggggcacatccaccatttcctcccccttagcagcagtggtgtcagtcagactatgctcacttttatccctggattgcaatcacagggaattggaatggtctgagtgcaaggaagaaaacgtttctaagcacaaagggccttggagctggggacaggtttacacacgtggattgggctgcttgctcata

SEQ ID NO: 7140 - DNA, 1449 bp, Homo sapiens
ttctcctacctcagcctcctcagtagctgagattacaggcatgcaccaccatgcccggctaatttttttgtgtttttagtagagatggggtttcaccgtgctggccaggctggtctagaactcctgactgcaaatgatcagcccgcctcagccacccaaagtgttgggattacaggtgtgagccactgtgcccagcgtgatttttttttttttttaaagcaaacttgtcctttggttttgcagaacaggcctgctccctctcatctagcccatcatttcttggggcctgaaccccagtggtccaaagtattgcttgtgaaatttaaaaaatgtgaatatgatgtggggatgggcctcttctacattaccttggcccagggggatcagctggctgggaggattagtgagcacctctgtattttgaggtctgagtcttctggagctgtgtagttaatcttcggtttctgataacccctgggtccatctggccatcagcctcagcagtgagcaaagcaataccatactcatttctatgttcctgttccttcctctgctcctcctttggagaagcaataattcatgggggatgatacagtagcactttacaaatggctccatgtcattcatcccaggggccataatctcttgcaccacctattcttacttcctgttcagctcctttacagcttttattttcaactgcttcccaacttggtggggcctcctttaaggatgagccaatagtaagaatgtggctgtaatcagcagagacccctctgaggggtatctgttctgcagcccctagtgaaatcatgtgatgtgagacagaaacctaaacatggtacttgattctaaacctgtgccagtctatagcctctgcctccccaagcagagctcaagccaaacgcttctgtcctctttccttctgcattaaccctttgctgatcctcaggggccactcccccaacacccctgtacttgggtgagggatgttggacagagcctgttttcatgtactgcaggtgggggtgtgctgacatgtttgctcttggttgatggagaaggtacagaggccagggagtgaaaatggttgacagaagagggaagagttaggtgtctcatagtcactcatagtggggtggtcaggggtaatggcatctccccactttaggcttctcaaacagacttttgacacctctcaagttcagagctctgatgtggaaagacaggaggtgtggggaaggagggggatttcgtgtgtttgcatgagtgtgcgcttcaggccttgggagttggcaagagggagggaaggaaggagagcaaaatcttcggaaggtgtttcttgtacctgagggatcctgccctgaatctccatagtctccactgtgaactgaggaggggaggggtgtgctggggaataaatcttgtatgagaacaatctttaagaga

SEQ ID NO: 7141 - DNA, 771 bp, Homo sapiens
agtacaaatttttagaacatattttggggtaaccttttgagtttgcttctcttagtttcattagtatctcaagagataatatacattgccagtgtagcataatttcattatcctaagaaggaaaataatatacttcctaaacaatcagaattgaagtcatagtcataattttttttttctttaatggataaggcttcgaggaaaattatgaaatgtattgtgctttagtagtgttagctgactgcattctctctgtggtttaggcttgatcatgaatgatgttgggatcctctgagggagagaagtgacagtaaaagaagggtagtaattgagctctttgggattggaactgctcacagtcccaaaagataaagcacaagtggcatggtcttttctatctagggcttaagctacaattactttgctttcctttagagcaaggtttagtgttttgttatgtatctttttggatttttttttcttttggctattgtggttttgctttctttttgtttctaatattataggttttagttatatagttaccttctgttaagacaagaggtctttagacagtgttggagaagaaaaggcaaaaccttcatttactgaaaatgaattacataaatgtccgatcaggttacctattaaattatgaatgttagtgtttaatagtttagtatatgcaacatatatttgaaaattataactgctattaaactagtgttttggaacttttttgttgcaaattatttgcttcggaactactga

SEQ ID NO: 7142 - DNA, 771 bp, Homo sapiens; identical to SEQ ID NO: 7141

SEQ ID NO: 7143 - DNA, 771 bp, Homo sapiens
agtacaaatttttagaacatattttggggtaaccttttgagtttgcttctcttagtttcattagtatctcaagagataatatacattgccagtgtagcataatttcattatcctaagaaggaaaataatatacttcctaaacaatcagaattgaagtcatagtcataattttttttttctttaatggataaggcttcgaggaaaattatgaaatgtattgtgctttagtagtgttagctgactgcattctctctgtggtttaggcttgatcatgaatgatgttgggatcctctgagggagagaagtgacagtaaaagaagggtagtaattgagctctttgggattggaactgctcacagtcccaaaagataaagcacaagtggcatggtcttttctatctagggcttaagctacaattactttgctttcctttagagcaaggtttagtgttttgttatgtatctttttggatttttttttctttgggctatggtggtttggctttcttttggtttctaatattataggttttagttatatagttaccttctgttaagacaagaggtctttagacagtgttggagaagaaaaggcaaaaccttcatttactgaaaatgaattacataaatgtccgatcaggttacctattaaattatgaatgttagtgtttaatagtttagtatatgcaacatatatttgaaaattataactgctattaaactagtgttttggaacttttttgttgcaaattatttgcttcggaactactga

SEQ ID NO: 7144 - DNA, 577 bp, Homo sapiens
ataaaaaacacgtcttacttcactatattttaaattattaggcaaattcacttaagtatagtagcctatacttagaatcctttaagcagtactacttataattacataattttaaaaaatatgtgtttaattatttttctttagactctgagttctatgaagtgaagaactgtgtcttattctgttcactgctttatcctatttgttgactgattagctagataggtatcctcttgctgtaagtgtcccctgagggacaaaactgcccacagttgagaataaccagcttgaagaaatggttagtatgaataactgtgtgtaaagatggtctgtgtcactaaagaaacaaatgacaataacaaaattgttattgatattatttttaataccttttaaaacttttatgagattttttctaaagttctaatgttatgaaagattttgtatcttttaatgagctgttgttctctttacttgctagaatcatgtttccattttttcattggttgctggaaactcagctaaatttgtgcttggctgcagtgaccttactgaactgggctagtcatcctacatt

SEQ ID NO: 7145 - DNA, 577 bp, Homo sapiens; identical to SEQ ID NO: 7144

SEQ ID NO: 7146 - DNA, 899 bp, Homo sapiens
gagaaggtgattaagaggcttggcagttccctgttagactacactgcccagaccaacagggaaatattgtagctacatttgagcctttttgttttaaattactcaaagaatttaaacaagctattaatcagtatggaccaggttctccttttgtaatgggactattaaagaacattgctgtttccagtcagatgattcctactgactgggacgctcttactcaagcttgtctaactcctgcttagttcttacaatttaaaacttggtgggcagatgaagcttccattcaggcttctcacaacatgcaggaccaacctcaaattaatataactgcagaccaacttttgggggttggcagttgggctggtttagatgcacaaatggtcatgcaggatgatgccatagaacagcttagaggagcgtgcattagagcttggggaaaaaaaatcacttcaagtggagaacaataccctttctttagtgctataaaacagggaccagaagaatcatatgtggattttatagctcagttacaggagtctcttaaaaagatgactgcagatttggctgctcaggatatagtgttgcaattattagctttcaacaatgctaatcctgattgccaggctcctctgtgacctatcagagggaaagcacatttagttgattatatcaaggcctgtggtggtatcagaggtaatctgcatcaggccacctgctagcacgggcaatggcaggactgagagtggatacagaaagtactccatttcctggagcttgttttaactgtgggaagcatggtcatactgaaaaaaaaaaagtagaaaaaaatcagcaagtcgggccaccagataggggaaaaaagaaaactgctgagcctgaaatatgtccaaaatgta

SEQ ID NO: 7147 - DNA, 439 bp, Homo sapiens
gaaagattatagggtgggggagcagaggctgaggaagaattgggtcctagcttggcctggcgaggagcagcctggggagaaggggagaggtcagatcagtctgtagaaaagaaggattcaaaggactcagagtttggggtggagactgaaggaacagacaggagctaaagaagaaagatttgggatgagttgcattgggcacagagactagggagggaccaatgtgtattagaaggcctggatgtcaggcacctcagaccatttgcccatttttcaacaaaaattatctaggtctcggaggatggagaaatcaaaagtgccattttctggccatttagaaccattgtcgagtttgtattggggccaagcagtgttgcagaagaaaataagacatttagattttagttcaggtgatagttgaagaaattttaagttcttg

SEQ ID NO: 7148 - DNA, 880 bp, Homo sapiens
ccatggtgcgcgaaccggcgacggttcctgagcaggttgatggtctgcaacaaagcgatgatattttacgtctcctgccgccagaactggcgacactagggataacggaactggagtatgagttttaccgtcggctggtggaaaaacagttgctcacctatcgcctgcacggtgagtcgtggcgtgaaaaagtgatcgaacgtccggtggtccataaagattacgatgaacagccgcgcgggccgtttattgtctgtgtggatacttccggctcaatgggcggctttaatgaacagtgtgcgaaagcgttctgcctggccttgatgcgcattgctctcgcggaaaaccggcgctgctatattatgctattttccaccgagatcgtccgttatgagcttcagggcccacaaggcatcgaacaagcaatccgttttttaagccagcagtttcgtgccggcaccgatcttgccagttgttttcgcgccattatggaacgcttgcaaagcagggaatggtttgatgccgatgcggtggtgatttctgattttatcgctcagcggttgcctgacgacgtgacgagtaaagtgaaagagctgcagcgggtacatcagcatcgctttcatgccgtggcgatgtcggcacacggcaaacccggcatcatgcgcattttcgatcatatctggcgctttgataccgggatgcgaagccgcctgctcagacgctggcggcgataaattattacagcagagaagggacgctctcgcgaacagcagctggccatactccacactgaacctggccgatatgcggcagttgcagcagcagcatagtcaaacgagactggccgataccgccgccgatggtctgcggcatttcaccg

SEQ ID NO: 7149 - DNA, 760 bp, Homo sapiens
ctgcgcagtcggctgaaagatgcccgagtcccgccggaactcaccgaagaggtgatgtgctatcagcaaagccagctcctctccacgccacagtttattgtgcagctaccacagatcctggacttactgcatcgtctgaattctccatgggcagaacaagcccgacagttggttgatgctaacagcacgatcacttcagcgttacacacgctttttctccagcgttggcgtttaagtctgatcgtgcaagcaacgacgttaaatcaacagctattagaagaagaacgcgaacaactgttgagtgaagttcaggaacgcatgacgctgagcggacaacttgaaccgattctcgcagataacaatactgcagctggtcgtctgtgggatatgagcgccggtcagcttaaacgtggcgactatcagttgattgtgaaatacggtgaatttcttaacgaacagccggaactgaaacgcctggcagagcagctggggcgttctcgggaagccaaatcaataccgcgcaacgatgcgcagatggaaaccttccgcaccatggtgcgcgaaccggcgacggttcctgagcaggttgatggtctgcaacaaagcgatgatattttacgtctcctgccgccagaactggcgacactagggataacggaactggagtatgagttttaccgtcggctggtggaaaaacagttgctcacctatcgcctgcacggtgagtcgtggcgtgaaaaagtgatcgaacgtaccgtgg

SEQ ID NO: 7150 - DNA, 218 bp, Homo sapiens
ccatggtgcgcgaaccggcgacggttcctgagcaggttgatggtctgcaacaaagcgatgatattttacgtctcctgccgccagaactggcgacactagggataacggaactggagtatgagttttaccgtcggctggtggaaaaacagttgctcacctatcgcctgcacggtgagtcgtggcgtgaaaaagtgatcgaacgtccggtggtacataaa

SEQ ID NO: 7151 - DNA, 3937 bp, Homo sapiens
ggatcaactactgtgcactgaacaaaccgggctgtgagcatgagtgcgtcaacatggaggagagctactactgccgctgccaccgtggctacactctggaccccaatggcaaaacctgcagccgtgagtgtaccctaggggtggggtgctgatggaaggtggggtccactcatgggggcgggcgggttcactagcaaccagttatttctggagcccaccgggtttcctgatggtctgtcaggtgtatccttccttatcctcagtttcatcacccatagaatgtgactattaatgctatcagcctagccaacttgggttgcaaggattaaaagaattaataggaataggctgggcgcggtggctcacgcctgtaatcccagcacagggaggccaaggcgggcagatcacctgaggtcaggagttcaagaccagcctggccaacatggtgaaaccctatctctactaaaaatacaaaaaattagctgggtgtggtggtgggtgcctataatcccagctactcgggaggctgaagcaggagaattactcgaacctaggaggcagaggtgcagtgagctgagattgcgccattgcactccaacctgggcgacaaagcaaaacttcatctcaaaaaaaaaaaaaaagaataggagtaaaatacttagaacagcactgctaggcataagcactcaataaatgttaactaatattagtatttgctgttaagtgtatttactaggtcagacaggtctaatttcaaatccaacctctcccacctactagatgtgtgtgaacttgggcaagttatttaacttctccatgctttgatttcccatctatgacaaaaagcaaaactaatagtcgtattattcccacagggtttttatagggagaaataggagccattttgatatgttagcctggtgcctggcacagggtaaacttccaatcaaggggaactgttcctatcatggagcctgtgagagggccagtgcctggcgccagactgggacaagaggccggaggggacagaccttggaaagcaatgggctgcagaggctgatctgagagcagaatcaagaaacatgggattttctgagaaggcttgtcttaattttcttgtgtcagagccacaacaaagctccactgggtgatgtaaatgtatgggaacttgcaagctctgccagctgggcggctccatggttttttatgaggcaccatctccacgggtcctggccagcaggataggagcgcctgagtgtggtgatggaccctatgcccttggcatgcgggagagggggcccatctccatgacatggcctatgcagaaggggccctttatgtgcctttccactcagcaagccccacatctgctccctttggagaaagagatagattgtgagtgaggacagtgcagctgttgagccctgggctccacgctgccagcagggaagtttcccagatgaaataagaggtccagggcagtcctcaggaaagcgtggctcctctagtgtccagagagaacaaagtgcccggtaaaggctttctaaggactgatctcagaggccaaagggcttttgaactggaaagtggtgccaaagtcagtgcctgctgtacgttgcctctgcatgtctctgagtccttttgagaggccagcggggagcgggtctcccattcaacaggagatgccctggtgaccatggatctgtgtgtatcctgcctgtttcccggagtgtcaggtctgccagctgatggccctggcaattttcccagggcaggtggtcctgacctggctgagcccacgcagatcaccagggacatggcttgactgcccctcccagcatgcttccgggggccagaagagctctaagaacggaccacaagagatcgggaccctcccttctctctgggatctagtcaactctaagaaagtacaaaccaagctgtttctgtctcgcagtccttagagaaagccacaggcttctgctttctcagaggaatcagggagcccaggccataaagacagcaagcaattctgaggcgctcactctgtgcaggcaatgccctgagcacttcccatgcataaactccctgcatcctcacagccgccctactgggcacccacattcttgtcgctatttaaacaagggcaaactgtgacacaaagggattaagtcactgtcctggggtcctgtgattaacaaatggcaacactaggatgtgaacacaggcatgtagctcccaagatccagcaagtgttcgcaggagatgcatccaccagtggaatgttctggaaggcactggtcccagactctgcgggagtcaagaggcccacttggcagacctgcaccaggcctccagtgtctgtccagtctctggaggtgcattttctccataagggaaacctgggaagcagcctgcagggctgttagtgggagctgttcaccacagctgtgtgttcattagccttcggcacttgctgcccggaggaccagctgtgcagcattcggatgccaggataggccacacatgcagtcccaggctttggtttgttttttaatctggatgtcctgataatgggggtaaaaaaaatagaaattgatttcatggagaatgacaactctttttcattttcaattagaaatgaaactatatgactaattcttactcagcactacttgataataatagtgtgttcattaagtggttgctgtatgctagctactgttctgagcgctttacataatcaacccctcttattctcaccctattcctataagaaagcaaccatcaacatccacattcacaaatcaggaaacgatggcaaagaggccgtgggactgcccagcatccatagctaggaagtggcagaggtgtgatttgaacccaggtagtttgatgccagaacctgcattctaagcactactctattagctgtgtggctttgatcttgaccttcctgagcctcactttcctctctgtgaaatgggaattgcacctgctctcagaggtgccctgagactgtggattctgtgcgccatggccctggcagagtgctgctgtcgtcaacaccagggacagcattccccagccattggagttgtatgctttacccttcaaagaaagaaatgggaaagaaggctgggcatggtgtcaggcacctgtaaccccagctagctactctggaggctggggcaggagaatcgcttgaatccaggaggtggaggttgcagtgagccgagatctcgccactgcactccagcctgggtgaaaagggaaagaaaaccaacaagccaggctgattttctagagggatcagtgatgtggggtagaatgacaccttccctgtggcttgttatgcctccggttttgtttttgaatcttggttgctggtggggtattgcccctcggctcctctatgctttcgcgtgtgtgaaaatgcaggagtggaccactgtgcacagcaggaccatggctgtgagcagctgtgtctgaacacggaggattccttcgtctgccagtgctcagaaggcttcctcatcaacgaggacctcaagacctgctcccgtgagtccctccgcgctcctctcataggggaaggtttgcaccaggagtgaaacctatgtgactgcagagggcacaggttgtacttgggcacccctcccctgccccttgctctgctccaggagatagtgaggatgtccactgggactgcatgccttcgagggagggcggggtgagcatgacggtcacttgatccaatcactgtcgcccagaggtctcactgataaagggctgcctggcttttggttttgcaggggtggattactgcctgctgagtgaccatggttgtgaatactcctgtgtcaacatggacagatcctttgcctgtcagtgtcctgagggacacgtcgccgcagcgatgggaagacgtgtgcaa

SEQ ID NO: 7152 - DNA, 478 bp, Homo sapiens
cggaagccaggtcataaggagtccctggtcaaggggatgccaaggggttgggccagcccgtaaacagcaggaggcctgggaaagtgattggattttagatactgattcaaggggtagcacacacgtgatctggtgataaattccaagtccaggtgtgagagggaggagagtcaagctcatccacagctctggcagcggaagacggccaaagtgaagaaggtggcctcaagtttacctccaccttccaaacctcaactggtaaaacctcatgcatgcccagaatgctagcacaagagatttagggaaatgtgggtattttgctttctggccctgcagttcaggttccaccttataaaatgggagtggcgtgggtggtgggcgccaccagccatattcacgggagttagcacaagggttcacagtttgagtgaagcttcctgagactgtgccgtgctgccaacacagttctctccgattc

SEQ ID NO: 7153 - DNA, 252 bp, Homo sapiens
aacagctgacttaacagaaacaatggaaggcaagaggcagtagaataatatattcaaaagatgcaaaggaaaaaaaactgtcagccaccaattccttatccagcaattatttttcaaaaatgaagataacacaaagactttgccagataaacagaaatattaattgaagttgttgctggcagacctaccatacaaaaaaaaaaaaacaaaaacaaaaacaccaaaataaattcctaaggctaaaagcaagtt

SEQ ID NO: 7154 - DNA, 423 bp, Homo sapiens
aacagctgacttaagagaaacaatggaagcaagaggcagtagaataatatattcaaaagatgcaaaggaaaaaaaactctcagccacgaattccttatccagcaattatttttcaaaaatgaagataacacaaagacttacccagataaacagaaatattaactgaagttgttgctggcagacctactatataaaaaaatactctaaaataaattcctaaggctaaaagcaagttacagaagacagtcacttgaatccacattttttaaaaagcactggtataggtaatattgacattataaaagacagtaaaaatgcattttttctctttatcataaattgtttattaaataacgtgtgtataatggccgggcacgatggctcacacctgtaatctcagcactttgggaggccaaggcgggc

SEQ ID NO: 7155 - DNA, 509 bp, Homo sapiens
aattgatttgccaattcctgatgtttcatctgaataaaatcaggtaatatttgtctttttgtgcacttaatgctttcaaatttcacccacattataccatgtataagtacttctttctttgttatagctaaaaattgggtgtccatttatgagtcaacaagcctatggattgtttccactttttgactgtatgattattactgctgtaaatattcatgcacatgtttgttatttgagcacctatgttttgtaagattaacagctgacttaacagaaacaatggaaggcaagaggcagtagaataatatattcaaaagatgcaaaggaaaaaaaactgtcagccaccaattccttatccagcaattatttttcaaaaatgaagataacacaaagactttgccagataaacagaaatattaattgaagttgttgctggcagacctaccatacaaaaaaaaaaaaacaaaaacaaaaacaccaaaataaattcctaaggctaaaagcaagtt

SEQ ID NO: 7156 - DNA, 508 bp, Homo sapiens
aattgatttgccaattcctgatgtttcatctgaataaaatcaggtaatatttgtctttttgtgcacttaatgctttcaaatttcacccacattataccatgtataagtacttctttctttgttatagctaaaaattgggtgtccatttatgagtcaacaagcatatggattgtttccactttttgactgtatgattattactgctgtaaatattcatgcacatgtttgttatttgagcacctatgttttgtaagattaacagctgacttaacagaaacaatggaaggcaagaggcagtagaataatatattcaaaagatgcaaaggaaaaaaaactgtcagccaccaattccttatccagcaattatttttcaaaaatgaagataacacaaagactttgccagataaacagaaatattaactgaagttgttgctgccagacctatcataccaaaaaaaaaaaaaaaaccaaaaacaccaaaataaattcctaaggctaaaagcaagtt

SEQ ID NO: 7157 - DNA, 602 bp, Homo sapiens
aacagctgacttaagagaaacaatggaaggcaagaggcagtagaataatatattcaaaagatgcaaaggaaaagaaactctcagccacgaattccttatccagcaattatttttcaaaaatgaagataacacaaagacttacccagataaacagaaatattaactgaagttgttgctggcagacctaccacgttaaaaaaaaaactctaaaataaattcctaaggctaaaagcaagttacagaagacagtcgcttgaatccacatttttaaaaaagcactggtataggtaatattgacattataaaagacagtaaaaatgcattttttctctttatcataaattgtttattaaataacatgtgtataatggccgggcacgatggctcacacctgtaatctcagcactttgggaggccaaggcgggcgtattacgaggccaggagatcgagaccatcctggctaacacagtgaaaccccgtttctactaaaaatacaaaaaatgagccggacgtgatggcgggcgcctgtagtctcagctactcgggaggctgaagcagaaaaatggcatgaagccgggaaatggagcttgcagtgagcggag

SEQ ID NO: 7158 - DNA, 424 bp, Homo sapiens
aacagctgacttaagagaaacaatggaaggcaagaggcagtagaataatatattcaaaagatgcaaaggaaaaaaaactctcggccacgaattccttatccagcaattatttttcaaaaatgaagataacacaaagacttacccagataaacagaaatattaactgaagttgttgctggcagacctaccacattaaaaaaaacgctaaaataaattcctaaggctaaaagcaagtcacagaagacagtcacttgaatccacatttttaaaaaagtactggtataggtaacattgacattataaaagacagtaaaaatgcattttttctctttatcataaattgtttattaaataacatgtgtataatagccgggcacgatggctcacacctgtaatctgagcactttgggaggccaaggcgggc

SEQ ID NO: 7159 - DNA, 204 bp, Homo sapiens
aacagctgacttaagagaaacaatggaaggcaagaggcagtagaataatatattcaaaagatgcaaaggaaaaaaaacctctcagccacgaattccttatccagcaattatttttcaaaaatgaaaataacacaaagacttagccagataaacagaaacattaactgaagttgttgctggcagacctaccatataaaaaaaaaa

SEQ ID NO: 7160 - DNA, 201 bp, Homo sapiens
aacagctgacttaacagaaacaatggaaggcaagaggcagtagaataatatattcaaaagatgcaaagaaaaaaactgtcagccaccaattccttatcgagcaattatttttcaaaaatgaagataacagaaagacttacacagataaaccaaaatattaaccgaagttgttgctggcagacctaccatacaaaaaaaaaa

SEQ ID NO: 7161 - DNA, 32249 bp, Homo sapiens
tttttttttattatactttaagttttagggtacatgtgcacattgtgcaggttagttacatatgtatacatgtgccatgctggtgcgctgcacccactaactcgtcgtctagcattagttatatctcccaatgctctcaatccaccctctcccaccccacaacagtccccagagtgtgatattccccttcctgtgtccatgtgatctcattgttcaattcccacctatgagtgagaatatgcggtgtttgtttttttgttcttgtgatagtttactgagaatgatgattttcaatttcatccatgtccctacaaaggacatggactcatcattttttatggatgcacagtaatccatggtgtatatgtgccacattttcttaatccagtctatcattgttggacatttgggttggttccaagtctttgctattgtgaataatgccgcaataaacatacgtgtgcatgtgtcttcatagcagcatgatttatagtcctttgggtatatacccagtaatgggatggctgggtcaaatggtatttccagttctagatccctgaggaatcgccacactgacttccacaatgcttgaactagtttacagtcccaccaacagtgagaaaaacaagcaatggggaaaggattccctatttaataaatggtgctgggaaaactggctatccatatgtataaagctgaaactggatcccttccttacaccttatacaaaaatcaattcaagatggatgaaagacttaaacgttagacctaaaaccataaaaaccctagaagaaaacctaggcattaccattcaggacataggcatgtgcaaggacttcatgtctaagacaccaaaagcaatggcaacaaaagacaaaattgacaaatgggatctaattaaactaaagagcttctgcacagcaaaagaaactaccatcagagtgaacaggcaacctacaaaatgggagaaaattttcgcaacctactcatgtgacaaagggctaatatccagaatctacaatgaactcaaacaaatgtacaagaaaaaaacaaacaacctcatcaaaaagtgggtgaaggacatgaacagacacttctcaaaagaagacatttatgcagccaaaaaacacatgaaaaaatgctcatcatcactggccatcagagaaatgcaaatcaaaaccaatgagataccatctcacaccagttagaatggcaatcattaaaacgtcatgaaacaacaggtgctggagaggatgtggagaaataggaacacttttttttttttaattttgatagagactgggtcttgctatgttgcccaggttgcttgtgaactcctgggctcaaggaatcctctcatttcagcctcttcaacagctgatattacaagcatgaaccaccatatgggctggaagctgatgtttaaaatactgagatcatatagatgacagcacctgaaaaatagacaacaccaagctttatgttaaaaggtgtgagggtatcaatattgttgtggctattggggaggaaaccattagtaaaaccagtaagttaaagctcttgctttaaactttggctttaatttaacaaatgttctatggagtgacagtatgtatgtaaccatgctatgcccattcacagatgcagtagagggaagaatttctcaaagacaactgttctaagactgaaattaaaccgtactgggtttgaaaagagaaagtccaggaattaccaaatcttttagatatcagatacaagagaatgccaggtatgcgatgataatcagcaatggttgttcacacaatacatcaaatcagtatttgaattagcttttgaattacaaggacaaatggatcaagtctagactctttagtagataaatcttattaggctgagatgtgttttcccctgtttttccacaaggagattacaaattggcaaacctcagctgctctcattttatctcaccaggccaaaagctgaagttcatcaatcagtgtgtctaagggttcactggttattaccattttgtagtttcagctatctttccaacttcctacatcatcactttcatttgatcttgtttttttccactatcacttctttattgaccatataaagaatataagtaagttcttattttgttattgttcattttagtctaatttcatcaaaagatcacaatcttttaatttcattttaatttcaaagattaaatgaaacctacatagaaatgagtgtaagatttgcatttgcattattttggcatcaatttgctatcctccctcatgcacatagagatcatttccatgtacgtgatttcaaacatccaagtgcagtattaaaagcagttgtaaattatggttctcattttcatgatacaattacaatataaacttcctcttgctgctgtaaccaattaccataaacttcatatcttacaataaagtgaccgtttatcctacagttctgtatttcagaagccttaaattaaactcacagggctaacatcaagttttcggcaggactgcagtttttctgagggctatttggcagaatctattacttgatttttttcagcatccagaggccagccacctttattccttgaaacatgacctcattcttagatcctatgtttccttttttttgtggggggggatggagtctccttctgtcacccaggctggagtgcagtggcacgatctcagctcactgcaacctctgcctcccaggttcaagtgattcttctgcctcagcttcctgagtagcttggactacaggcacttgccaccacgcccagttaattttttgtatttttagtagggatgggctttcaccatgttagccaggatggtctcaatctcctgacctcgtgataaacccaccccagcctcccaaagtgctgggattaggcgagagccaccgcgctgggtcctcattcttgtatcttaaaaatcagtgatattgagtaatttctcatgccaccacctccaaggttgcctttcttctgtcttcttctttcacttataaggaagtttgtgatttcattgatcccacccatttaagacaatctctctatcatttttccgcaaccttaatttcactcgaaatctaatttcacactgccgtgcaacctaacatatttgtatgttagactctgggaattaggacatgaaaatttttgggaggccattctttggcctacagcagacataatctgtttacctgcagattaaagcgttctttatttttctgtctccctgtcttaatttttttaaaataataatatttgtagtaaagagaaagaaagaaaagaaaacaaagaaagaaaaagaaggaaggaaagaaggaaggaactaaagaaagaagaaagaaaaggaggaaatgagggaaggaagggagggagggaggaagggagaaaggcaggaggggagaaaaaagaaagcatgaacacaagaaagaaagaaggaaagaaagaaaaagaaagagagagagaaagaaagaagggaggaaggaaaggaggaagagagaatggtaaaagggaagaaggcacagaaacaaagaaaataaagaggcgaaggaaggaaggaaaaagaggaaagggagggaggaaggaagaaaaggagggcgggaggaagggagaaaaaaggaaagaaagcaagaaggcgagaaagaaagaaagaatatgagaaaggaaggaagaaaagggagggagaaaggaagggagggaggagggaaggaagaataataggaaagaaaggaaagaaggaaggaaggagaaaaaagaaaagaaagaaaggtaaagaaaaaagaaaagaaaaggaagaggaaaagaagaaaggaagaaagaaggcaagggaagggaagagaagagaaaggaagatggaaagaaagaaggaaaaacgcaaatattagaaattctgggtttgttagagaatatgccatactgttttttttttcacttgaaaggaaagagtatctgccattgaagattggatgtctttttggtgatattgttgttcttatcttccacatgattactgagttagtgcctagtctttccatttctaagacaaaagtgttgatgtcggcaaatatagtttcggatttttctagttcaccttttatttctttcctgttttacctcatgtatttggaggttctgttgttagctgcataccctaattagtaggatgtttacatcttcttgagaattgatgattctattatctattatctctcatctctgatactatttcttgttccgaactctgttgtgtctaatatcaatgtagtccttccacagccttattttagtgtttccatgatatggctttctccatatcttgataacctctttatatctctatatatttggagcaagatataaaatttagacttgattttttaaagatttttcaagatgtgattcttatttcttttggttctatttgacattctctgagtttcctatatttgaagtttgattttctgtcacttcttttagaatatttttggcagttattttgaaaaatatttcttttgctccattatttttccctcttttctttttgggatttcaatcataactagagtaggtaatttcatctcagtcttatgcaggtactttttctcagggtctcaggaatgtagccttctcacacttccgttcttttcctggctgtgttggtgagctcagtgatattcctccttcaccttcaagagcagttttgttttgtttttcctgttttcatactcccagcatcaggaggatcctaagtgtggcagtttttgttgccttcccctacatattaagtggaatatcttgctctatttggactcttataacaaaataacataaaccgggtgactaaaaaacaacagatatttcttttttcacacttcttgaggctgtaagatctcaggtcaagatgctcacaaattcagtgttgatgagagcccatttcatggttcataggtggtgcctgctttctatgtcctcacatagtggaaggcacacaacaactccattgagcttcttttataaaggcactaatcccattcataagggctcggcccccaagacctggtcacctcccaagtgttctgctctccctgatctgtgtcatatacagactctcttggattccttaccaattgcttgagagatcgcagtgggtttgtggggaaaaagttttcaagatgatggatctttcccaacttctgcagctgtcagcggtctcccaatctcaccagccccactttgcctttaggaatttattgattattccagctttacttgtcatagtggtgtctatttgcatctgtcctatgtaagtgcatccgtcctctttctccttgcaggtgcttgttttccctcacattttgactcagttcttggcaacctcgttgctataaaaataaagtcatgactttgaagttagtttgggtctttcattgttgtcaggttaggaaccctattccatcccagatctccaaaacccagactttttggggggttgaaattttagggtttctctttgaattgtagttttatcttctttcagttaccatttgcattttcataatgattaatgagactaagctttttgtgtgtagttgactgtacctttggattttttcccaaatacctttttatttcttcttttctttatggttttagaaaatgtagtttacataattgcagcttgatttttttactcagttaatggcatgcctaatggagagaaaaatattaaatatatttccctttttaattactgtgcttttttcttttctaaggaaatgtttcattatgttaaatttcagtgttattctacttagctattccttaaatattatagtattttggatttcacatgtaaatttgtaacatatctggagtttattatgtatagagtaaggctattttctcttttttgttttttaaggtaaaaatcacataatataaaattaacaaccaccattttaaagcatacagtgcacttgcttttagcatattcacaatgttccagggcaatttcatcatgtcccttccaaaaacccattatgcataaagttattacaccctaatctgcttccctgagccctaatgaccactaatctgatttatatcccaattgatttgccaattcctgatgtttcatgtgaataaaatcaagtaatatttgtccttttgtgcacttaacagaatgctttcaaatttcaccaatattataccatatataagtacttcattctttgttatagctgaaaattgggtgtccatttatgagtcaacaagcatatggattgtttccactttttgactgtatgaatattactgctgaaaatattcatgcacatgtttattttttgagcacctatgttttgtaagattaacagctgacttaagagaaacaatggaagcaagaggcagtagaataatatattcaaaagaggcaaaggaaaaaaaactctcagccacgaattccttatccagcaattatttttcaaaaatgaagataacacagagacttacccagataaacagaaatattaactgacgttgttgctggcagacctactatattaaaaaaatctctaaaataaattcctaaggctaaaagcaagttacagaagacagtcacttgaatccacatttttaaaaaagcactggtacaggtaatattgacattataaaagacagtaaaaatacattttttctctttatcataaattgtttattaaataacatgtgtataatggccgggcacgatggctcacacctgtaatctcagcactttgggaggccaaggcgggcgtattacgaggccaggagatcgagaccatcctggctaacacagtgaaaccccgtttgtactaaaaatacaaaaaatgagccaggcgtgatggcaggcgcctgtagtcccagctactcgggaagctgaagaagaaaaatggcatgaagccgggagatggagcttgcagtgagcggagattgtgccagtgcactccagcctgggtgacagagggagactccgtctcaatgataataataataatatgtgcagaatgtattgctgagtatttgacatgtagaaatggaatacgtctgtaacatattttccagtaacatcaaaaaggaggtagttggaagaaaaatgtattgtgataaggtaataactctagatggtaaagtaataattactaaaatgtattgttgggtttgtaactttaatagatgtaatgtgtaaagtgataatactttaaaatggaggaaacaaaagagatttatataagaatgatgtttctatgcattactaaaagtttactagtataaattggaagatggtttgaataattaattttccatatacctatatggtaaacttacaacaacaacaaaaattctcaaaaatatataataaaataattgattagtaatctaaagttccctattttagaaaatatgctttcattgcaaaataaagcaataaagaaaaatatttgagaaatatataaaacaaacggtaaaatggcagacataaatagaattataccaattataatcttaaatgtgagcagattaaaatccattccagaggcagagattgtcagactggattaaaacaagtgatcccaatatacgctgagatgcaaggatactaatggattgaaagtaaaaagatgacaaaaaatatcatgcaaagagcaatcataagaacactgaactcattatactcataacacacaatatagactattacaaatgtgaataggattttaaaaatttatattgtagtaaaaagggggtcaacgctttaggaagacatagctattacaatcatgtatgcacagataggagttaaattgtttcctctatatagatgctgaaattctaaccactgaatatgacctcattaggaaataggttctttgcagctgatcaagttaagatacaatcagatgagcctgaattcaatatgactgatgtccttgtgaaaagaagaaatttgagtagagggagacatacacacagggagagtaccatgtgattatgaggacagagattagccaaggaatgccaaagactgccactaaaccaccagaagtgagaaacaaggcacagagcaggcttcctctcatagcccttgaagggaccatccctgctgacacctcaatctcagacttttagcttccaggactataagactataagactataaatgtatgttgttcaaggcacccagtttgtgttacttggttatggcagccctagaaaactaatacatgaactaataacaaagcataataacatgaagcaaaaattgacaaaagaggagcatcagcaaaatggcaatggagacagctgcaatctttcatttccccacagaaacatcacacaactaagagaaactgtccgaagaaacttcaccaaagctctggaaaatggtcaaaagattacaacaaccaagtgaaagcagactcaagaaaatgacaactggaaaactttatgacatttttaactagcctttgccccagaaaattggcagtcctgaagggtcagaagcccacgttcccagtgaggaagcctggtccatggtccaaaggaacaagagatcttacccgcaaattattatgtgtctgttctgactattctgggggatacctaaaggactcatgaaaggcttttttttttctgtgttgctagaatacagaacagataaggaatggacattattaagaaactctgcaaggagacctaacaaaccactgatgcttagggcaaaaattaaagtttacacatatagtagatcaccttcagcacagcaagaaaagttggagaagagtatttcaaaaactaagacatacaaaatcattcacgtacatgggagagtctacaaagtcacatgtattcataggttaagccacatgctgacaaatgtcataagaagatcctacacttttaccttggccgatccctcccctcagtgcaacctctgtgcaagaatgaacttgaacttcattcagtgcaagagtgaacacacacttttctctggctttaaagaacccagcacaaagccagtctgcatggcctagagacatattttgctggacaatgattacttgcttttctttttgtttttcttttatttgcctgtttcattggttcctgacataccagaaagtcactgccaaaacattagcttaacatttgttaaggaaacaaaaagacttcggtgaccacaccttataaagcaaatagttttgtaaatcacttaggaaaatttcactaaaaaaaaaaatccttaacaatataataagtaaagaaaatttaaaaccacaaaacattactgtgtttgtaggggggggtctgatttacagagtaaccacatagtaattataattattagaatgtccagttttcaaaaaacgttacaaggcatacaaagaatggaaaagtgtggctcattcgaaggaacaaaattaattgacggaaaacatccctaaggaaacccagacatcaaacttaccagacaaagacttttaaacaactctcttcattatactcaaatgtcaaaaggaaaacataaacaaagaaataaaggaatcagaaaaaatattaaaaagtaggaatatcagcaaagagataacagaaattctggagtggaaaactacaatgataaaaatttaaaaatcaccagagggatttaagagtatatttgcacatacagaagaagccatgaacttgaagagaagaaaatggaaaacactgactctcagaaacagaaagaataaaaaataaacaatgagcagagactaatgaatctgtgggacatcatcaaatagaccaacattcatattctagaaggataaattatgttgttaaaaagtttaccattctttcttttcacttttcttccttcctccttccccctcctcctttttacttttcttcctcttcctttctcttcttctttctctccttcattatccctttcgctgtttctctttctccctttctcttttttcttttctttcaattttctcaattactaagagatgtttaagtacccttaccatgttagtagatacggttatttctccctttagttctcttttgagatttatagtcactcaaataaagagataacccaaacataagcgtcacaaacaggctttcataccattcttaatttggtcctgtaattcttcattgctgtattaaccttctgatgcttttaaggatgttttataacaaattgtgtagctttttccaatggaatgtttattctgaattatctaattcatattgtaagtatagagggagtttaatataaaattattaaactaatatttgtgaaagaatgtatttgtgcatttaacatatattttaatcctcagactgttattgggcagctgagcatacaggaataaaaataacacaatttttatgtgtacaatatttatggaatacgttactggacccaataaataatttagttaataacatgacaaagaacagaaattgtatacactatagagcatagtaatggaataatgaatgactaaagttattaatattaggtagaaaatgaagggtatctttgagagcagaactcaaggaagcaagcaattcgccttaggaggaaagagttacctgtggataaaggagaaactgaaaaattcacaagtcaagactttttgagcaaaaacaaaaatatgactattagtcaccaattcagtacagtgaaaaaaaagttgaagagatatcttggaagtaaaccatgttgtggaagagcatgtagggttttgacaatcatgggatgattctgaattaattttaaatgcgataggaatatatgagataatttcaccagagaataacatgattgtgtttgcatttcaaaggggtgtatctggtgcactgtgtagaataaataggttatgtgagcaaataaattgggaggctactctcatccagagaaaaaaggtagtgacttaggtgagaatgctgtcaggatgagtggtagtagaggtgagaagtcattaggccatggatgtatttcataggactggccaagagaactgcagctaaattggagtgtagggagtgaaatggagaactcaaagatgactctcagcaatggaaggtgacagctgtcactgaagcatgctgatgcctcttattaagagagttacttgggaatggcaagatcaaaacttctcactttcaaatttatgaaaaatattgttttcagaacgaatgactttgggatcagaaagccaccattctaattgatggttccacgactgcacgggctcacactcccaagagcaaaagtaaatcatcacaaaggtgcttcttgataattctagagaatggagaattactgtaacatctttctgattttaggagaggtagcagttccctttttagcctaaacgctatttttttttaaagctcagccaagagactccattataattttcaaatgtgtgtaacttaaattctcatatgaaataccactatgcttaaattagtcaaaacattttccccatctacaactctatcttgtcattgcaatcattttcgcaaaagtgactgcagctcacagaccctaaaacgagaaaatccagggtaggttatctgatctagttagtttcgaagacaggatctagagattatttaatatgaaacaggtcacctgaaatgaagtgtttactgaaaacagcttggatcaacccagttttctaccactgaaccatgcatttggtttaaaaaacacaacaactctggggaatatcggctgcttccaactgtgttgaaggtgttaaagaaaagggcatacaatttaaaatgatcatctgaggcctttatagtctctgctcaagagactagagtcttccattcttaacgaaacacccaaatatcttaataattgggcaaaatctaaatatcagagataattttatcttgaagattgttaaattataacggtgattcactaccttgccacgtctctgagtcaaaaattaggtctttgtttaggaatcaatcataatctgcaatttggaaataggaagattttagaagactcagacattgactttcttgtgtgcaaaaaaaaagatgtattgagataagacaagtctttccttgcaaggatacctctaatgctcatacaccacctcccctaacgttaatatagcttccaggtcactaaccagtgtcagagagcagcccatgcaactagaaattcaaaagatgtcgaacatagggtcaagcttagaataagacgtcttagctaattaagtatgcttttttcccgaaattcatattaacaaaatcttggatatgtcagagaatgcattctaagttcactcaacctaggagggagaaacataattttaaattaagagctgaagcattcttgtcctaacagaaagcaaggaaaacgaaatatcacaccacaggagggatttcacaaattagtgtcaacatcaaaaccttaaaatagacaaggagaatggagattcaaatgaactcttgtacttttgttcagagaagagatggttctgagagaatgacagtgaactcaccccagctggtttagttggtgctttcaactgctgcttctgatcaactcctttagctagaataaactgatgaggattttggcatgtggtattagcgatggttattaattttttcctcttatttgcattgttcaatatagtaaatactagctgtatatggctacttcaattcaaattaattacaatgaaatatacttaaatattgaattttttagtcactcttggttcattattgaatatcttcagctaagatttcccaacgaaagacactaagagctggcttagttaactggtcgtccacaaatattgaagctgttgttaactcctgatatattctctgcaaagagaatattcatgagcctcctcctgaaatcagcagcctagagatagttttataaatgggatacaagttggaaatctatatactctttaagtgtttgaaatattagcttcccagggaagaaaatcaaattcataagatatgttaggacaatttaactcaagatgttcaaaactgaaatgacatattctacaacatgtgataaaaccaccccctaacaacttaaagcaaaacagggatggaccttaaagacctgccttttcctcatcccccagccaatcagttttcaaatcttgcattttattttgaaaggtccttatacccctggtctcttgtttctagacttggcacatatttaagtttgttacctctctctactgacttttctctcttcaaacagtatctatgcctgccaaatgtgaacatacaaaaaacaaatcagaatgtgccattctgatttaaactgcttattaattaataccctcaagataacatctgggttcttagcttcaatgagtcaagcctacttacatctttttttgtctttggcttcacatttcctatcacatcccattccagcaatgccaagctgtgccggccttctaccccatctccattattttgcccacccgccgccgctgctttttgaccccccgccgccgcggctttttgccccccctgccgccgcggctttttcccgccccgccgccgcggctttttccccccaccgcgcctccgctttttgcccgccgcggctttttgccccccaagcgccaaggctttttgaccaccgcggctttttgaccttcgcctctgcgaattttgccgccgtggctttttgcccgccgcggctttttcccccaactggtgcagcggctgtttgccccctgccgctttttgccccccgccgctttttgccccccccgccgccgcggctttttcgctgccatggctttttcccccctgcccccgcggctttttacccgccgcggcttttcgcccccccgccaccgcggcttttcaccagccgcagctttttgtcccccgccgccgcggctttttgcccgctgcggctttttggcccccccaccgccgcggctttttgccccccgccgctttttgcaccccgccgccgccgcggctttttcccccctgcccccgcggctttttacccgccgcggctttttgccccaaccccgcctcggctttttaccccccgccgcctcggctttttgcccccaccctgcctcggctttttgacctccgcggcttttttcctcccgccgccgcgacttttcgccctccgccgccgcggctttttgcccttcgccgctgccgcggcttttttcccgaccaggctttttgccccaccgccgacacagctttttgcaccctcgccgccatggctttttgccgccgcggctttttgcccgccgtggctttctgcccccacgccgccgcggctttttgtccccgccgccgcggctttttgctgccgcgactttttgcccccgtcgccgccgctttttgccaccgcgactttttgcccccgccgccgaggatttttgtccccgccgccgcggctctgagggcgggagcagcagactcggctgccggctctactggcgtcctggcaagggcagcgaccaggggtgctcctggtccagctctcctggctcagggattccttgcctaggcgccggcgccccgggctccttgcctaggcccctgtggcctgcatagagtggcgctgcctgcggaggcgatgggagagaataaggagggcggtggcgggggtgatgcggcggccacggagggtggcgcaggggctgcggccagccgggcgctgcagcagtgcgggcagctccagaagctcatcgtcatcttcattggcagcctgtgcgggctgtgcaccaagtgcgctgtgtccaatgacctcacccagcaggagatacagaccctggaggtaaggggttcggggacccgggctgggctccaggagtggcctggacacctccttcggggccccagttcactcctggctgagttgcatccttgagcccacgtcacccccttggaggcttcccctccctcctgcactcgctgacgcggcagccagaggacccgggaccagccctcaccttgggcaggatttgtggagcaggtgcgtggtgggaactgggatggaggctccagggtcccgtgggggtgggggtgggctgcgcgaggacatccccttaccccctgaatttccatctggtccagccctctcatcttgtaggtgaggaaaccgaaggcctgagggagaaatgacttgccaggaacccctgttaaggaaaattaacaaagtgtggttattaaagaagaactgagttgggagtcagacctggaggcccccacccttaggtaagacattataccaccttgagtctggcctgttgactgagggtgagccactccatcctcatgtgattgtggggtcttaacctcaaggggtttcctgcaggaagaagcaaatgggtttgctttcctagctctgtccagtacgttagggaccctgaggactgaagggattcttggagagccatctggtgtatgtcatgggtgggtcttttttgaaggtcagtctgcccagtgggctggctcagcccgaatgaactgtcttgaatctttggagttgtctgtgtacttttaagggcttctcagctgtgccccaaaagatccccctggaaattaggtgggaaaaaccttaacttttgtggggccctgtgtttgtcttaaaagttcatgcacatagccaggtgtggtggctcccacctgttatcctttcctggatcccttgagtcaaggagtttgagaccaacccggacaatatagtgagaccccatctctacaaaaaagaaaatattagccaggggtggttgtgcgcatctgtagtcccagctactactgtggctgaggcgggaggagcacttgatcctgcactgagctgtgatctcaccagtgtactccagcctgggccacagagcaagaccgtgactcaaaaaaaaaaaaagacaagaaaaattcttcaacattttgcattctgtcccactatccattggttttcatgtcaagattatgtcagaaattctttacaattgcttccagaaggagtagccttttgatctagtgcacaggtgtccagtcttttggcttctcagggccacattggaagaagaatgctcctgggctgcacataaaatacactaatgctaacaacagctgatgaggttaaaaaaaaaaaaaaggtttgtgcataattttcatgctacccaccaccacagataggtggaaaagtccttgtagtcaaagggttggacacggctgatctagtgtcttgtcgtcagttttggctttctccctgattccagaatgcaggtagagataacatggtctcaggacagctgttgagataaaaaaattcgttgtcatttattcccaagcacagctgtttctcattgcattgaaaaagtctccattcaaactgctgtcacatataaaatctacttatgtaagtctgtatatttctgttgtcttggcctttgtaggcagtagtgtgttttaaccgagcaaactgtccttccaaataatgaagccgaagtcagcctacctactttccatttttcttccccttccatttttgtaacctcagaataattgtaagaatgaattaagatttgtgtttaaggccagacacagtgtctcaggcctgcattctcagcactttgggaggcggagacagctgtatcgcttgagctcaggagttgaagaccagcctgggcaacatactgagactcggtcttgtataatttaattaaaattgaaaaaaagaagataaaaagacctgtgtttaaaatttttaaaaaaggggggaaagtgtaatgcaaaatgtggactatgccagctatgattgggaaaactagtttttcatacagcattatctgtagacttgtattagcagcatactggtcatatgcgttttgctttcctcaaatatgatgaggtaagctaatttaaagtgtgttggggctttctgccgcgtggcttctggaggtgttgagtcccaatttagccaattaatttgggtttagttttgacatggataagggagaccagcttcattcatggtgtacacacagttttgccaataaggaaaaagaaaagccacctgaatgttcctactcattaaatgctatctggagagctcctaccccacccccaccaaggcccgggccattaaaaagactcaatgcagcctttctggatctcatactgtattctgcaagatactcctgtgaaagaaaattgtgctgcatcagccatctccctcctgaagatccctgcggatgaggatttgtgttttgaaagttctgagaattcctgcaacaacaattctcaaacttatttgtccaggggatcttttcttccactgaatgtagttggggagacacggccttaagccttgagcagagaaagagacaaaaaactgttggctcacttacaaccaagtgttgtgtttatgttttaggtttttatgaaactgaggtgctgtttgaggttctaaatgaaattgggtggttgaagagaggctggtatccgtgtagacttaaccagccatgagaagttgccttttgttgaaggaggtgttttacaaagggaaatagggtgtttcctgggcatcgcattagcaattaaatacatgtatcagtgaaatgaaatgaaatgatgagatgatgaaatgaaatgatgaaatgatgaaatgaaatgatgaaatgaagaaatgaaatgagatgaaatgatgaaatgaaatggaatgatgaaaaatgatgaaatgatgacataaaatggtgaaatgaaatgaaataatgaaatgaaataatgaactgaaatgaaatgaaatgataaaatgatgaaatgaaatgaaaagatgaaatgatgaattgaggaaatgatatgaaatgatgaaatgaaatgatgaaatgaagtgaaggaagaaatgatgaaaaaatgaaattaaatgatgaactaatgaaatgatgagatgaaaaggtgaaatgaaatgaaatgattaaatgaaatgagatgaaaagatgaaatgaaatgatgagatgaaatgaaatgatgtgatgaaatgatgagatgaagtgaaatgatgaaatgagatgaaatgaaataaagcaatgaaggatgatatgatgagatgaagtgaaatgatgaaatgtaatgaaatgatgaaatgtaatgaaatgatgaaatggaatgatgaaatgaaatgatgagatgaaattgtgaaatgaaatgaggaaatgaaatggaatgatgaaatgatgaaatgaaaagatcaaatggtgaaatgaagaaatgacatgaaatgatgaaatgaaatgaaatgatgaaatgaagtgaaatgattaaatgatgaaataatgaaatgaaatgtaatgatgaaatgatgaattgatgaaatgatcaaatgaaatgacgagatgaaaagatgaaatgaaatgaaatgatgaaatgagatgaaaagatgagatgaaatgatgaaatcatgagatgatgaaatgatgagttgaagtgaaatgatgatgagatgatgaaatgcaacaatgagaagaaatgatgaaatgaaataatgaaaggatgaaatgatgagatgaaatgatgaaaggatgaaatgaaatgatgaaatgaaatgaaatgatggaatgaaatgatgaagtgatatgaaatgatgacatgaagtcaaatgatgaaataaatgaaatgatgaaatgaaatgagatgaaatgaaatcatgagatgaaatgatgaaatgagatgtagtgaaatgacgaaatgaaatattgagatgaagtgatgaaatgaaatgaaacaatgaaatgaagtgaaatgaaatgagatgaaatgaaatgatgaaatgaaatgatgaagtgaaatgatgaaatgaaaagatcaaatggtgaaatgaagaaatgatatgaaaagatgaaatgaagtgatgaaatgaagttaaatgattaaatgatgaaataaatgaaatgatgaaatgatgaattgatgaaatgatcaaatgaaatgagatgaaaagatgaaatgaaatgatgaaatgacgagatgaaaagataaaatgagatgaaatgatgggatgaaatgaaatcgtgagatgaagaaatgatgagatgaaatgataaaatgatggaatgacgaaatgcaacaataagaagaaattatgaaatgaaataatgaaatgaaaggatgaaatgagatgaaatgatgaaaggatgaaatgaaatgaggaaatgaaatgaagtgaaatgatggaatgaaaagatgaaatgatgaaatgatatgaaatgatgacatgaagtcaaatgatgcaatgatgaaataaatgaaatgaaatggtgaaatgaaatgagatgaaatgatgagatgaaaagatgaaatgatgagaggaaatgaaatgagacgaaatgagatgaaatcatgagatgaaatgatgaaatgagataaagtgaaatgacgaaatgaaatgttgagatgaagtgatgaaatgaaatgatgaaatgaaatgaaacaatgaaatgaagtgaaatgaaatgaggtgaaatgatgaattgatgaaatgagatgaaaagatgaaatgaaataatgaaatgatgagatcaaaagatgaaatgagatgaaatgaaatgagatgaaatgaaatgatgagatgaaatgaaatgatgagatgaaatgatgaaatgatgagatgaagtgaaatgatgaaatgaaatgaaagaatgaaatgaaatgataaaatgagatgaaatgatgaaatgaaaggatgaaatgaggaaatgaaatgaaatgatgaaaagaaatgaaataatgaaatgaaatgatgtaatagatgaaccaaaaatacttattcactttttttcttggcatccttcttagagtattttagtgaggttaatttctaaaaataaattgctattcaatggctatacagttggcctttgcaccacaggggtttgaactgtgcacgtccacttagcaaaaccaacaattcttcatccttatccacaccctgcccatgaaaaggatgaggatgaagacctgtttgatcatctacttccatttaataactagtaaatctattttccttatgattttcttttttcttttctctggcatgtttgttaagaatacagtatataagacatataacatattaaatatgtgttaattgtgttatttgtaaggcttacagtaggctattagtagttaagttttgggggagtcaaagttatagtggattttctactgtgcagggggcaagcaccccaacctccgtgttgcttaagggtcaactgtacatgttatttcctttcctgtaagagaaaaatgatgagaaggtcttttctccaataagtgtcttcaaaatttagcagatgtgaaatgtgttggcgccaccattttgcgtctcactttgaaaacttattatttaaaatcgtactaaagcctaccttacttttccaaccttagaaaaaatgttccaaagaaaaggggtgaaaccatgctagtttgccctgaaatttgaaattatcttttaaaaatatattttgacattaattacttccaaactagagatcagttgcatacaaatggcaggtcaccctaatccaccctatgactgcacttagattcatgagggattgtgccatctagaaagggcagagaggaggaatagagtgctctgcgtcttgaaatataaacatgcacatagccacatgctttgattctgttgtcactgtgtacttactgctaggaagagggcatgtttgtgtatttttatgcaaattattatccaagttgttaatgatttacgctttcagaaccatataaagattcttttcctttcagatataaactatcttgcattgttcttctgatcatatgagggataaatttgcctaaatattcttcagaccataatagtatgtccatataaatgccagtagcaagagtagaatcaaccacaactgccttagtaattatttaaagcatgtctgcctataagtaattggcattttatataatcaagaatctttgatataataatctctcaactatttgaaacacggctcatatgtattaattttttaagcaaatatatatataatatcagtgtatatgaaactaaattttggactttagaacagcttcttagaatcctgacttaaatgtctacagtaatagttggcttaaaaaaatttagcacactgtcactatgatgaaaaaaattactataaaatatttaaaaattttttccaccctaacatttagaatattctcacatttgtggttaaaacctattgtgattgttcttagaagttagataaaaaatgttccagaaagattgaagagaagcactttagtcaatttttagttgttgaagcatgaagaaatggcatttcattgacattttaaaaattattcagattccctctttgaattcaagagtttcaaagatatcttattttaaaataccaaaataggaatagaatatgaagggctggttatgagtaatatgatacaattttatgagatgacgagattacaataacaatacctcctctcatagaatagccagcaagtctccactaaataacagtgccttgattttatagatgtttaatcatggatattgaattaatgtgaaccatttgtagacacaggagtttattaaagacttatataatatctttcaagtatttagaatagtgttgaaattaagcctgcatccccacgattttcagcggtgctgatgcctaataaactcaaccccttgcatgccaaaattggcttaaagcccatctgttacccaagctacacttcaagcatcaaggttcaaaaatgtgattttgaatatgcaagagtttgaggaattcactactcacactttcttgaacagtctatccaagtgcatcaagcaaaatgtgagtaaagaaattttgaccaaaggattgatagtaatgttgaatacatttaatagtagatctaagattaaaaggtgaaagtgaaggtgagaagagtgtatgaatgctttgtgttctgacaaagagaatgtagcacccaggtcctacctgcttggatgcattgccagtgcccacggtaggccattttatccaggtttttaggttttgtcttgttttgtttggttttttccttttaaggagtgttagtccaagaccaataactctgtaactggtagatttggaagactttaatagtgcttaacattttgtacatagctttataacagttttctttttctttttttctgagagattcttttcaatataccccttcatggttgaactcaaaaatcattgcttatttaaaaactacaactgctgacgttttgtaacgttcgcattccaggtaattgcttttttgtgcattttctgtatttttctccatcagtctccctagatatttgttagatttaatattttaatatttttctgaagaagtgagcttttgtatttttaaatatatacccagttgctttaattcttctttttcgtgtactatttcctcgttgttttttttttttttttttttttttgacacggagtcttgctctgttgcccaagctggagtgcagtcgcgtgatctctactcactgcaacttccaccccccacgttcaagcaattctcccacctcagcctcccgagtagctgggattacagatgcatgccaccatgccaggctaatttttgtatatttagtagagagtgggtttcaccatgttagaccaggctggtctcgaactcctgacctcaggtgatccacctgcctcggcctcccaaagtgctgggattacaggcgtgaacaatggcgcctggctatctccttcattctttatgtttattttactggttttatctctctctctctctctgtttctctccttctcacattcactttgcagttgtcaaatagcccaggtgatgttacagatttactccttataaaaggaggcattacacattacacatgcatcttagtggccttacaaaagtgtttggtttatttgtattgactattcacctttaaaatatttcaatattcattaaaatagcttccaaccaatattattacacttatgtttctaactttcatttttgtattgatatctgccttcatttctgtttgtttaggaaatatattctgtgtcacgttatttccgtgaaaattgtttgaatttgtggtatggtctagaaaatgttaatttttgtatgtattctgtatgaacatgaaaataacatgaattataatattcatgttccttatataatatttgccctttttaaaatccactagcttcttttgaaacttactctttaattttttcttttatctattgctgaaagacgtgtgtttgaaatgtctataatatttgggggcttatccatttctacttactttctgatatttttgctttatataatttgactctctctctaaatacgtgtgtgtctgtgtgtgtgagagtgtgtggtttgtgtgtctatatatatgtatgtatcaggctaatgcacatttaagtcatcacatcttcttaataacttaaaacttttatcacactggttagactaacttattttaataaatgtttctaacttacattctattttgtctacatagcaactttttaaaaaattatattcatgtagtatgtttgtatgtatatcatatatacacagtatctgtattgtttgaacttcaaagtttctgtaaatttatatattagttgtgtctcttataactatgatagagacggatgttttaaattttgccaatctttgtattttaacaaaaacattgtctacttaggtttaagttaatctttgatcatttatacttaattttgtattattaatttgttgtgtatatatatatatatataatgtctcattttctcctatcactttctgtcttcttgttttaaaattatgacttttatttttattgttttcatagatacaacagagaaatgcataatgtccagtcaatttattaaagttccaaagtcggtcgcgcgcagtggctcacgcctgtaatctcaacacttcgggaggccgagacgtgtggatcacgaggtcaggagttggagactagcctgaccaacatggtgaaaccccgtctctactaaaaatacaaaaattagccaggcatggtggcacgcggctgtaatccccgctactcaggaggctgaggcaggagaattgcttgaacctgggaggcagaggttgcagtgagcagagatgacgccaccgcactccagcctgggagaaagagtgaatgagactccttctcaaaaaaaaaaaaaaaaaaaaaaaaaaaaaaaaagttgcaaagtcatacctttctgctcttgtcagacaattaaggggtctttgaatacttcagctctaataatttccttcctaacatacatattgcagtgcttatctaattttaaatatccttttgtttcaacacctaattttctattttgatctatctgtatgtttacaatatattttgctctgtgttcattctttgatttcagaacttcaatctttctgaagcgtgttttcagtttcgtttgagtttctttagtggaattctgctggtggtgttttgttttttgtctctaaatatgttatttagccataggttgatgaatgtttttcttggttgagaatttcagaatggcattattattcttaacaaataatattgtttattttacctttcatgctttcagatttcaatatgattaaaggtaatttgatttttctagtgctaattgaaatatttttcccttcctgattgtttactatttctctaggagatatgtagatgtaggtttatctccatcgtagcttgcttagcatgcatagaagttttgaatatgtggattagtgtcttacaaaagtctagagaactttcagccaaaataccatcacatattgtcccttccctgttcccttcctctatgagaacactcactaaacacatgctacactttctcactgtatcttccatgtctcttcatgattctgtccacattgtgccttttttaaaattttctgtaatgcattctgaaatatttatgaactctcaccatggccatgtctaatctgatgagttcatttttgagtttttaatttaaaatactatatataaactacttttcaaatttactacatcaattttttagtctcctaaaaatatattcatttttttttaattttttgaaagcaaatgtgctttataatctaacagtgatatttctactaatgaacctttgtggatctgtttgtactctttttctgctttcctttcaaatggtggaatatcatttccttgcgtacttagatgcctttgaatgacaaagatttatttttctctgaaaattattattgtgcacttttgcatattagaagaaaatttgccaaagagaatttgaattttttgtgagtctactaaaggcaccaccattctgggaccacattatattaattcttggcctaaaggtgtttggacgtatgtttggacagcacatttaaacaatttttaaattaattgctgtaaatcattaatgattgagttgctttaaatctgtccaatctcaagtcatttttatttgccatttccagggaatgtgaaatgagactaatttacctctgattcttctttagactgaggatataaattttggttctagctttagggaagagctcctgtgtgatgccctatcttgggaaacactatgtatttctttactgtcctatgtgatgtatgacagtaggaatctgcagtcattcattttgctacatgtccgtagggcaaaatcagtttcagtgtttaggtgtattttgtctgctccctgcattcccatggttttgaccttatattttactttttttttgtgaacgtaccaatgcttcaatttttttccagtaatataatcaactatactataagagaaaaattttgataaaacacaaatttcatgttttcctactctaattggcttttacgtaaaaatacaggtaaaatttatttgtgcttttttgctattattttttgctattctctgtttgtctatgtcttcaccacatagacacaattagggaattttgtacactcttgtgccaactgctttgataggaacaaaatgtatttctcgaactcctaggtataaaactcaagtatccatgattgaaattcttttttgctcacttctattatgtttccagtctcaatagaaatcgatgccaatccagaaatacaagcattattctaatacttctcacacattactggtatagattaaattttctagatctccttaaatactatcatttttcactatttgtatattcactgttaagttcaacattttctgtaatattaatatattgtgaaaatttcctttcttccttatttgtcccaggttcaatgttttgcagtctctacctcaccctgtgaagcataaacattgtacatgctgtacaaataatacatcgttcatgtacttagagattgcacaattttcatttggttgacaatagctaatgttttcttcttcattttctatttcctgatttttctttatttagtatatactacattgtcatgaaaataagaacgttttacaaactaaagcaaaagcaaccctaggaataaaatgcacaaataaaatatataaacatacatttagatgtaccacgtacccttgtaatttatttagacttttaattttagtacaattttaattaaagtctgtgtattatctgtcatcgtcttagtattttttatataacaaatagtgtaaatcaaaaagtctcaatgtcattataaagtatcttggcagaggttgatctccaaggaataatttctctcctaaattatgccaatccaaatttcactctaccgtaatacttttaatcagtttcagaggaataataaatttcaaaattgttcaaggtacttcttttagttcaagtaccttttgacaggtgtaaaactgtagacagactgatacatacatattctaattgactcaaaattatatgggacctattttaaaatctagattttaaaatgtgtcaacatacacatgttctccttgtgaaataattgctttatattctctggatagaataatttaatctttaaaccttccattcactcttagaaacaaaatactacataaggatatgcttataaaaataattcccaactagcttttcagttcagaaatatatgtgaagaatcatcaaacatctaatggatttcaaggagaaatgggttagtaatttattccatatgtctcaaattttcctagactcaaggcttcctttaaaataattgtaggcgtttaagaaaccatgtaaactaaaaagaagaaattgtgacgctgccgcttagtctttttaagtctttggacatgattcaatatattttttaaattgtatcttaattagacattgtgagttcaccatcttcctgtcaatatagcatccaagctgattatcatagattacaagtccaactatcaactgtgttctgagagtctaaaaaaataaatgaacgtatttgtttgggtattcttaaagcaggagtgaggacacagcgaaagtgagacaaggaaaagagaacaaaataaaacaggaaagatagaaaagccaataccacacgtgttaagaggtaagttcctgtgttagatatctgggcttaattttatgggaagctatgtggagcatgcctcagaattacatcactgaatccagggagattcttcttagctaccctcaccttttcttcccacttcatgcccagtaacaagctcccgtgctgctagagaaagtcctcagctagaaactggtgcaaattctggagatgagaccttgtagagtgttaagaatggttttcttcccagcagctacaggtaaggaataggggctgggctattaatacatctgctacaaaccaataaagcccttatgctccttttggtgatcgacaatgtatttaaaaatattagatgatcaagaaggactgcagaaaggaggaaacagaaacaaacagcacacctcttggtttatttgtattcatttcatcagtttcaaggaaaatatgttgggagttcctcgcatagagaatgtcacaaagacatgttttcaatagtagtgctatccctagggcagagaagacccagagaaagcccaagtggctgctggaacacagtcagacaccgtgccacctgtccacactccttggctctgccatcatgctgaagatcgctttaaaggactggcttccctccccccaaaatgaatagagcacagactgagaaactgaatgtgggagacagcagtggattatgctgttctcaggggtcacctcaggtttggaagcattctttcaaattaacccatctcaggccatctgcagagaagaaaggtggtacctaacttttttcttgtcagcatttggtaggggtgttttattgaccaaatatgttcccacaacctagttttttgtgagtaactaaatatagtagagttttaaattttatcatcaaaatctatagacaatttttgatgaaaatagactccatctctatgtcctgcttttcttcttcttattaattacattgctgtataaaagaacaagacttcagaatcaagaatatcttgtctcttggcattgaatttatacaaggtgctctttctttaatgctgtctcaaaggacatatttttactcattaaaaaggaagatcggaatctagttgtatgcgctgctccaacatattaataattaaaattaggaggtaaatgtggtcaaaactatagaaagactgagatgtcatttatattgattgctgtatagcattctacaaacagaaattgttaaataagtttatataaatattttgtagcatttcaaatatttgagtgcttgacgtttctcctcttctatagttcagattatcaatttgaagacttactccgctagttaaaatgtttttagtctcgttcgagtattatataaaagcaattttcagttaaatgtgttccgcttacatacaacattacaaattattgaggatttaattacttattcatgttcctgtaatatctttagaagattttcttattattacctatcaatatatgtatgctttgtcaaagaaaaatcaaacatatatatcattgaaattgaaactttttaaaagtacttattaattctattgaaaaaccacatccataggaacaattacaatataatattgtgaacatgtaaacatataccctatgtctattttatgtataagcatgtatgattaaaaatatagtgaagaatttttaaacctagtattataaagtaaaaattagttaacttctgatgattatttgttaattaagataaaattattttgatttgggtgattttaaataaagaaaaatattaaattacatgacaaaaattctttataaaatgtttatgatttttacattggttttatcactttttccactattttattttaagatgacctgccttgtttaaaacactgtattcatcttaattaaattagattccatttgtaaaataattaacaaatgatttgctctattttacagtgcggttataaactgagtcagtatctcaagatttgatccccattatcatcatctgtggccctatttgttttataaatgtattgtctttttccatgcctgtcacatctctattgctttttcatttttctctttgtcccttatagggagcattgcctatctctagattaagcaaaggttgcatcataaaaaagcacaataacctgctcaatctttctcacacagagaaatgtttgttaagtaattaaagtgtagatgatgatacaaagaccttgattaaattagataacaaagtacccttgtgattcagaatatgaatggtatttaatttctttgaaatcattaattgctgagtgacattaattaatgccaattttccagaagatgttctagttaatgaaatgtatacaacgaaaagcacaataacctgctcaatctttctcacacagagaaatgtttgttaagtaattaaactgtagatgatgatacaaagagcttgattaaataagatgccaaagtacccttgtgattcagaatatgaatggtatttaatttctttgaaatcattaattgctgagtgacattaattaatgccaatattccagaagatgttctagtgagtgaaatgtatacaacgtgcaaaagattcagaactctgaagggcaacattattctataattaagaattaagaattaattcacatcagttattggggagaaataatttttaagaattaatgactgagaaaatgttattttttacttagaaaattattttgtgcatgagcattaccgcaagttttgcaagaaacataaatttaaagaaacaattatgtgcacaagatgaatttaataacatcttgatatattccatgattgcggttttatttggtaaatctttaaatgcacaccatttaatgataataaatgaatcttggaaatcttgtaggtaagggtaaatattaggatgcatccagttacatttacacacacatacatgcatacagactgattcacgtgtgtatatatatatatgaatttaccaattgatgttaactaatatttataagagccagttggattgatatatattgttgaacctgaaaaatatttattatatacatgtttaaaatacacacagaaataaatagcaattgcactaggtatttgaaactgtactaaaatataagctgtgaacattttgtgatcattacaaattcttacactgaataaatatgtttatttttacaatattaatatgtttgatacctgtgtacattttttacaatgtgttattttatttttgtcatagagtcatgtcatgcataataacattttagtcaaagatggattacatatacaaaagtggtcccatgagattataatatatatttttacatacttttctacgtttaagtatgtttagatacataacctcttaccactgtgctcttattgcctgcagtattcagtagagtaatgtagtacacagatttgtagcctaggagaaagaggctataccatataacctaaacgtggtaggctgtacaatctaggtgtttgtaatattctctgtgatgtttgcaaaatgatgaaattgcctatgaatacatctgttaaaacgtatccctatcattcagtgatgtgtgactgtactaaaatgctcaatgtaagtttcaatgccctccataaaattgttgtactgtgaaatacaaatctctcacccatggcctgaatatgtttgcaaactaagcagatcatgggaaggagaatgtgctggcatcgctgggatgattttctcacactacatgaataatatctacagacttcgtgaatatgagccacttgcatagagttaaagtagacgtctctttgctgggaaatttatcaaatgggagtatgaagtgtttttacaagatacttgtttgtttgtagctggtaggcctacagtggctcatggcaatggttgaggttgctaagatttggtggaagaaggcaaaatgagatggccacttatatggtatatggatcacttgtttctgttgagttacaaactcagctggctatttctccaatgttagttatttggagaaaaaaaaacgtgatggtaattttggggtaacaaatacaatatttgatgaaagcaaatttattgagggttagacaaactacaagatactttaggctgcaaagtcaacacgagacttctggcccaaattgtgaagagtttgcgtccagctgcacagttcaaaggaagaggccatgtaagaagattctcacttctgacaccaactgccagttcaggggtttcccctgaacaccctcagtttcaagagtttactagaaagactcacagaactcattgaatgccactgtactcatggtttataatagagaaagggtagaaattaggaccaatagaagagacatatcatataaggtggaatctaggagattttgaatgttaagtttccattgtcttcaggacatattacctgtcactgttgtacagcaacaaacatggagtactaccaacctggggagctcacctgatgctaacaa

SEQ ID NO: 7162 - DNA, 203 bp, Homo sapiens
aacagctgacttaagagaaacaatggaaagcaagaggcagtagaataatatattcaaaagatgcaaaggaaaaaaaactctcagccacgaattccttatccagcaattatttttcaaaaatgaagataacacaaagacttacccagataaacagaaatattagctgaagttgttgctggcagacctaccacattaaaaaaaaa

SEQ ID NO: 7163 - DNA, 423 bp, Homo sapiens; identical to SEQ ID NO: 7154

SEQ ID NO: 7164 - DNA, 423 bp, Homo sapiens; identical to SEQ ID NO: 7154

SEQ ID NO: 7165 - DNA, 352 bp, Homo sapiens
  SITE (236): n equals a,t,g, or c
  SITE (262): n equals a,t,g, or c
aaaaaagcactggtataggtaatattaacattataaaagacagtagaaatgcatcttttctctttatcataaattgtttataaaataatatgtgtataatggccgggcacgatggctcacacctgtaatctcaacactttgggaggctgaggcgggcgtattacgaggccaggagatcgagaccatcctggctaacacagtgaaaccccgtctctactaaaaatacaaaaaattanccgggcgtgatggcgggcgcctgtantcccagctactcaggaggctgaagcagaagaatggcatgaagccgggggatgcagcttgcagtgagcggagctcactggagtggcactgg

SEQ ID NO: 7166 - DNA, 1951 bp, Homo sapiens
tcagaagcccacgttcccagtgaggaagcctggtccatggtccaaaggaacaagagaagatcttaaccacaaattattatgtgtctgttctgactggtctgggggatacctaaaggactcatgaaaggcttttttttttctgtgttgctagaatacagaacatataaggaatggacattattaagaaactctgcaaggagacctaacaaaccacagatgcttagggcaaaaattaaagtttacacatatagtagatcaccttcagcacagcaagaaaagttggagaagagtatttcaaaaactaagacatacaaaatcattcacatacatgggagagtctacaaagtcacatgtattcataggttaagccacatgctgacaaatgtcataagaagacactacacttttaccttggccgatccctcccctcagtgcaagctctgtgcaagagtgaacttgaacttcactcagtgcaagagtgaacacacactttgtgccggctttaaagaacccagcacaaagccagtctgcatggcctagagacatattttgctggacaatgattacttgtttttctttttgtttttcttgtatttgcctgtttgattggttcctgacataccagaaaatcactgtgaaaacattagcttaacatttgttaaggaaacaaaaagacttcggtgaccacaccttataaaccaaacagttttgtaaatcactttggaaaatttcactaaaaaaaaaaaaatccttcacaatataataagtaaagaaaatttaaaaccacaaaacattactgtgtttgtaggggggggttctgatttacagagtaaccacatagtaattataattattagaatgtccagttttcaaaaacgttacaaggcatacaaagaatgggaaagtgtggctcattcaaaggaccaaaataaattgacagaaaatatccctaaggaaacccagacatcaaacttaccagacaaagactttaaaacaactctcttcattatactcaaatgtcaaaaggaaaacataaagaaataaaggaatcagaaaaaatattaaaaagtaggaatatcagcaaagagataacagaaattctggagtggaaaactacaatgataaaaatttaaaaatcaccagagggatttaagagtatatttgcacacacagaagaagccatgaacttgaagagaagaaaatggaaaatactgactctcagaaacagaaagaataaaaaataaccaatgagcagagactaatgaatctgtgggacatcatcaaatagaccaacattcatattctagaaggataaattatgttgttaaaaagtttaccattctttcttttcacctttcttccttcctccttccccctcctcctttttacttttcttcctcttcctttctcttcttctttctctccttcattatccctttcactgtttctctttctccctttctcctttttcttttctttcaattttctcaattactaagagatgtttaagtacccttaccatgttagtagatatggttatttctccctttagttctcttttgagatttatagtcactcaaataaagagataacccaaacataagcgtcacaaacaggctttcataccattcttaatttggtcctgtaattcttcattgctgtattaactttctgatgcttttaaggatgttttataacaaattgtgtagctttttccaatggaatgtttattctgaattatctaattcatattgtaagtatagagggagtttaatataaaattattaaactaatatttgtgaaagaatgtatttgtgcatttaacaaatatgttaatcctcagactgttattgggcagctgagcatacaggaataaaaataacacaatttttatgtgtacaatatttatggaatacgttactggacccaataaataatttagttaataaca

SEQ ID NO: 7167 - DNA, 369 bp, Homo sapiens
aaaaaagcactggtataggtaatattaacattataaaagacagtagaaatgcatcttttctctttatcataaattgtttataaaataatatgtgtataatggccgggtacgatggctcacgcctgtaatctcagcactttgggaggctgaggcgggtgtattacgaggccaggagatcgagaccatcctggctaacacagtgaaaccccgtctctactaaaaatacaaaaaattagccgggcgtgatggcgggcgcctgtagtcccagctactcaggaggctgaagcagaagaatggcatgaagccgggggatgcagcttgcagtgagcggagctcactggagtggcactggagtgccactgcactcca

SEQ ID NO: 7168 - DNA, 333 bp, Homo sapiens
aaaaaagcactggtataggtaatattaacattataaaagacagtagaaatgcatgttttctctttatcataaattgtttataaaataatatgtgtataatggccgggtacgatggctcacgcctgtaatctcagcactttgggaggctgaggcgggtgtattacgaggccaggagatcgagaccatcctggctaacacagtgaaaccccgtctctactaaaaatacaaaaaattagccgggcgtgatggcgggcgcctgtagtcccagctactcaggaggctgaagcagaagaatggcatgaagccgggggatgcagcttgcagtgagcggag

SEQ ID NO: 7169 - DNA, 1002 bp, Homo sapiens
aaaccacagatgcttagggcaaaaattagagtttacacatatagtagatcaccttcagcacaggaagaaaagttggagaagagtatttggaaaactaagacattcaaaatcattcacgtacatgggagagtctagaaagtcacatgtatgcacaggttaagccacatgctgacaaatgtcataagaagaccctacacttttaccttggccgatccctcccctcagtgcaagctctgtgcaagagtgaacttgaacttcactcagtgcaagagtgaacacacactttgtgccggctttaaagaacccagcacaaagccagtctgcatggcctagagacatattttgctggacaatgattacttgtttttctttttgtttttgttgtatttgcctgcttgcttacttcctgacatacaagaaaatcactgtcaaaacattagcttaacatttgttaaggaaacaaaaagacttccatgaccacaccttataaagcaaacagttttgtaaatcactttggaaaatttcactaaaaaaaaaaccttaacaatataataagtaaagaaaatttaaaaccccaaaacattactgtgtttgtgggggagggtctgattcacagagtaaccacatagtaattataattattataatgcccagttttcaaaaaaagttacaaggcatacaaagaatgggaaagtatggctcattcaaaggaacaaaacaaactgacagaaaatatctctatggaaacccagacttcaaacttactagacaaagactttaaaacaactctcttaattatactcaaatgtcacaaggaaaacataaacaaagaaataaaggattcagaaaaaatattaaaaagtaggaatatcaacagagatagcagaaattctggagtggaaaactacaacgataaaaatttaaaaatcaccagagggatttaagagtatatttgcacacacagaagaagtcatgagcttgaagataagaaaatggaaaata

SEQ ID NO: 7170 - DNA, 1114 bp, Homo sapiens
cacaaattcagtgttgatgagagcccatttcatggttcatagatggtgccttctttctatgtcctcacatagtggaaggcacacaagaactccattgagcttcttttataaaggcactaatcccattcataagggctcggcccccaagacctggtcacctcccaagtgttctgctctccctgatctgtatcatatacagactctcttggattccttaccaattgcttgagagatcacagtgggtttggggggaaaagttttcaagatgatggatctttcccaacttctgcagctgtcagcggtctcccaatctgaccggccccactttgtcttcaggaatttattgattattccagctttacttgtcatagtggtgtctatttgcatctgtcctatgtaagtgcatctgtcctctttctccttgcaggtgcttgttttccctcacattttgactcagttcttggcaacctggttgctataaaaataaagtcatgactttgaagttagttgggttctttcattgttgtaaggttaggagccctattccatcccagctctccaaaacccagaatttttggggggttgaaattttaggctttctctttgaattgtagttttatcttatttcagttacaatttgcattttcataatgattaatgagactaagctttttttgtgtagttgactgtacctttggatttttttcccaaatcccttttcatttcttattttctttatggttttagaaaatgtagtttacataattgcagctggattttttcctcagttaatggcatgcttagtggagagaaaaaagattaactatatttccctttttaattactgtgcttttttcttttttaaggtaatatttcattacattaaattttagtgttattctactgagctattccttaaatattatagtattttggatttcacatataaatttgtaacacatcttgagtttattatgtatagaataaggctattttctttttttgtttgttttttaaggtaaaaatcacataatataaaattaataacaaccattttaaagcatacaatgcagttgcttttagtatattcacaatgttccaggacaatttcatc

SEQ ID NO: 7171 - DNA, 960 bp, Homo sapiens
cacaaattcagtgttgatgagagcccatttcatggttcatagatggtgccttctttctatgtcctcacatagtggaaggcacacaagaactccattgagcttcttttataaaggcactaatcccattcataagggctcggccccaagacctggtcacctcccaagtgttctgctctccctgatctgtatcatatacagactctcttggattccttaccaattgcttgagagatcacagtgggtttggggggaaaagttttcaagatgatggatctttcccaacttctgcagctgtcagcggtctcccaatctgaccggccccactttgtcttcaggaatttattgattattccagctttacttgtcatagtggtgtctatttgcatctgtcctatgtaagtgcatctgtcctctttctccttgcaggtgcttgttttccctcacattttgactcagttcttggcaacctggttgctataaaaataaagtcatgactttgaagttagttgggttctttcattgttgtaaggttaggagccctattccatcccagctctccaaaacccagaatttttggggggttgaaattttaggctttctctttgaattgtagttttatcttatttcagttacaatttgcatttccataatgattaatgagactaagctttttttgtgtagttgactgtacctttggatttttttcccaaatcccttttcatttcttattttctttatggttttagaaaatgtagtttacataattgcagctggattttttcctcagttaatggcatgcttagtggagagaaaaaagattaactatatttccctttttaattactgtgcttttttcttttttaaggtaatatttcattacattaaattttagtgttattctactgagctattccttaaatattatagtattttggatttcacatataaatttgtaacaca

SEQ ID NO: 7172 - DNA, 2119 bp, Homo sapiens
ttttttttttttttcacttgaaaggaaagagtatctgccattgaagattggatgtcttgttggtgatactgttgttcttatcttccacatgattactgagtttgtgcctagtctttccattactaagacaaaagtgttgaagtctgcaaatataattttggatttttctagttcacctttgatttctttcgtgttttacctcacgtatttggaggctctgttgttagctgcataccctaattagtaggatgtttacatcttcttgagaattgattattctattatctattgtctctcatctctgatactatttcttgttccgaactctgttgtgtctaatatcaatgtagtccttccacagccttattttagtgtttccatgatatggctttctccatatcttgatgataacctatttatatctctatatatttggagcaagatataaaatttagacttgattttttaaagatttttcaaagatttttcaagatggaattcttatttctttttgttctatttgacattctctgagtttcctatatctgaagtttgattttctgtcacttcttttagaatatttttggcagttattttgaaaaatatttcttttgctccattatttttccctgttttctttttgggatttcaatcataactagagtaggtaatttcatctctgtcttatgcaggttactttttctcagggtctcaggaatgtagccttctcacacttctgttcttttcctggctgtgttggtgagctcagtgatattcctccttcaccttcaagagcagttttgtttttgtttttcctgttttcatactcccagcatcaggagtattctaagtgtggcagtttttgttgccttcccctacatattaagtggaatatcttggtctatttggactcttataacaaaataacataaactgggtgactaaaaaacaacagatatttcttttttcatacttcttgaggctgtaagatctcaggtcaagatgctcacaaattcagtgttgatgagagcccatttcatggttcatagatggtgccttctttctatgtcctcacatagtggaaggcacacaagaactccattgagcttcttttataaaggcactaatccgattcataagggctcggcccccaagacctggtcacctcccaagtgttctgctctccctgatctgtgtcatatacagactctcttggattccttaccaattgcttgagagatcacagtgggtttgtggagaaaaagttttcaagatgatggatctttcccaacttctgcagctgtcagccgtctcccaatctgaccagccccactttgtctttaggaatttattgattattccagctttacttgtcatagtggtgtctatttgcatctgtcctatgtaagtgcatctgtcctctttctccttgcaggtgcttgttttccctcacattttgactcagttcttggcaacctcgttgctataaaaataaagtcatgactttgaggttagtttggttctttcattgttgtcaggttaggaaccctattccatcccagatctccaaaacccagactttttggggggttgaaattttaggctttctctttgaattgtagttttatcttctttcagttaccatttgcattttcataatgattaatgagactaagctttttttgtgtagttgactgtacctttggatttttttcccaaatacctttttatttcttcttttctttatggttttagaaaacgtagtttacataattgcagcttgattcttttactcagttaatggcatgcttaatggagagaaaaaatattattttcctttttaattactgtgcttttttcttttttaaggaaatgtttcattatgttaaatttcagtgttattctacttagctattccttaaatattatagtatttcggatttcacatgtaaatttgtaacatatcttgagtttattatgtatagagtaaggctattttctctttttttaaggtaaaaatcacataatataaaattaataacaaccattttaaagcatacaatgcacttgcttttagtatattcacaatgttccagggcaatttcatcatgtcccttcc

SEQ ID NO: 7173 - DNA, 1103 bp, Homo sapiens
cacaaattcagtgttgatgagagcccatttcatggatcatagatggtgccttctttctatgtcctcacacagtggaagtcacacaagaactccattgagcttcttttataaaggcactaatcccattcataagggctcggcccccaagacctggtcacctcccaagtgttctgctctccctgatctgtgtcatatacagactctcttggattccttaccaattgcttgagagatcacagtgggtttgtggggaaaaagttttcaagatgatggatctttcccaacttctgcaactgtcagcggtctcccaatctcaccagccccactttgtctttaggaatttattgattattccagctttacttgtcatagtggtgtctatttgcatctgtcctatgtaagtgcatctgtcctctttctccttgcaggtgcttgttttccctcacattttgactcagttcttggcaacctggttgctctaaaaataaagtcatgactttgaagttagtttggttctttcattgttgtcaggttaggaaccctattccatcccagatctccaaaacccagactttttggggggttgaaatgttaggctttctctttgaattgtagttttatcttctttcagttaccatttgcattttcataatgattaatgagactaagctttttttgtgtagttgactgtacctttggatttttttcccaaatacctttttatttcttcttttctttatggttttagaaaatgtagtttacataattgcagcttgatttgttactcagttaatggcatgcttaatggagagaaaaaatattaaatatatttccctttttaattactgtgcttttttcttttttaaggaaatgtttcattatgttaaatttcaatgttattctacttagctattccttaaatattataatattttggatttcacatgtacatttgtaacatatcttgagtttattatgtatagagtaaggctattttctttttgaaggtaaaaatcacataatataaaattaataacaaccattttaaagcatacaatgcacttgcttttagtatattcacaatgttccagggcaatttcatc

SEQ ID NO: 7174 - DNA, 1003 bp, Homo sapiens
aaaccacagatgcttagggcaaaaattagagtttacacatatagtagatcaccttcagcacaggaagaaaagttggagaagagtatttggaaaactaagacattcaaaattattcacgtacatgggagagtctagaaagtcacatgtatgcataggttaagccacatgctgacaaatgtcataagaagaccctacacttttaccttggccgatccctcccctcagtgcaagctctgtgcaagagtgaacttgaacttcactcagtgcaagagtgaacacacactttgtgccggctttaaagaacccagcacaaagccagtctgcatggcctagaagcatattttgctggacaatgattacttgtttttctttttgtttttgttgtatttgcctctttgcttacttcctgacatacaagaaaatcactgtcaaaacattagcttaacatttgttaaggaaacaaaaagacttcggtgaccacaccttataaagcaaacagttttgtaaatcactttggaaaatttcactaaaaaaaaaatccttaacaatataataagtaaagaaaatttaaaaccccaaaacattactgtgtttgtaggggagggtctgatttacagagtaaccacatagtaattataattattataatgcccagttttcaaaaaaagttacaaggcatacaaagaacgggaaagtatggctcattcaaaggaacaaaacaaactgacagaaaatatctctaaggaaacccagacttcaaacttaccagacaaagactttaaaacaactctcttaattatactcaaatgtcacaaggaaagcataaacaaagaaataaaggattcagaaaaaatattaaaaagtaggaatatcaacagagatagcagaaattctggagtggaaaactacaatgataaaaatttaaaaatcaccagagggatttaagagtatatttgcacacacagaggaagtcatgagcttgaagataagaaaatggaaaata

SEQ ID NO: 7175 - DNA, 426 bp, Homo sapiens
cacaaattcagtgttgatgagagccaatttcctggttcatagatggtgccttctttctatgtcctcacatattggaaggcacacaagaactccattgagcttcttttataaaggcactaatcccattcataagggctcggcccccaagacctggtcacctcctaagtgttctgctctccctgatctgtgtcatatacagactctcttggattccttaccaattgcttgagagatcgcagtgggtttgtggggaaaaagttttcaagatgatggatctttcccaacttctgcagctgtcagcggtctcccaatctcaccagccccactttgctttaggaatttattgattattccagctttacttgtcatagtggtgtctatttgcatctgtcctatgtaagtgcatctgtcctctttctccttgca

SEQ ID NO: 7176 - DNA, 1386 bp, Homo sapiens
ctgaatgcctgatggattgacatatataataagctgctagtattaaaatatgtgacataaaacgcatccaatcttctcactgtttacataaattctaggtttctcctatttacctcaagcacgtatggagcgaattcttaccttttaatattgccatggcattcacattgaacataagttgaactctctcatatggtagctgggttcggattcccttgacaatttccagttctaaccctcacagttcctcagtgtggctggcccagatattgaccctacacagttgcctcctcctggtgactaccagctatggaaccgttggatacaacctacctgactcaccccacagacctcacagtgcacatggacagcccccacacgccagagtgacctgctcgattgcagcaggagtcaagaagtgtgcctgctggcactcaccccaccgactagtgccccgtggaaaacttatttggataatgttctgggcccaataaaggctggagtcccacagaccccttttctgtctcctgctccccactcatcttccccattttgttcagccctatgaggtgtgctactctattagtccattttcacaccgccggtaaagacatgcccaagactgggtaatttccagaagaaagaggtttaatagatgcacagttccacatggctgggtaggcctcacaatcatggcacaagccgaaaggcacatctcacctggcagcagacaagacaagagagcttgtgcaggaaactcccctttataaaaccatcagatcttgtgagacttattcactatcagaagaacagcatgggaaagacctgccctcgtgattcaattacctcccagctgttccctcccacaacatgtgggaattcaagatgagatttggctggggacacagctaaaccctcttctcagctaccctcttctctctggatctgtgagtaataaacctacttctgtgatttcccatgtttggttctgtggcctccatgtgtctgagctgacctacactggaacctaactctcctcctggccagggtctctgagagtggctcttgtcagaaatacacaggacacaggtcaggcaacagtcaccaggcatctcctattctcaacagatgttctgtgagagggaggcctggccgtgggatgcacacctggccactgctggggtaaggaagtgtcctgtgaaaggcacatgttaagcatccacaaccccctgaccagaaccccagaaaggcagggctgcaattgtcagtcactctccagagacaaacctcaagccctaactggaggaaaagaaaacaatgtaaaaagttcaatttaccttactatttcaatgatccagtaaagacattctatgcctgtacaccaca

SEQ ID NO: 7177 - DNA, 1109 bp, Homo sapiens
cacaaattcagtgttgatgagagcccatttcatggttcatagatggtgccttctttctatgtcctcacacagtggaaggcacacaagaactccattgagcttcttttataaaggcactaatcccattcataagggctcggcccccaagacctggtcacctcccaagtgttctgctctccctgatctgtgtcatatacagactctcttggatttctcaccaattgcttgagagatcgcagtgggtttgtggggaaaaagttttcaagatgatggatctttcccaacttctgcagctgtcagcggtctccgaatttcaccagccccactttgtctttaggaatttattgattattccagctttacttgtcataatgggtgtctatttgcatctgtcctatgtaagtgcatctgtcctctttctccttgcaggtgcttgttttccctcacattttgactcagttcttggcaacctggttgctataaaaataaagtcatgactttgaagttagtttggttctttcattgttgtcaggttaggaaacctattccatcccagatctccaaaacccagactttttggggggttgaaattttaggctttctctttgaattgtagttttatcttctttcagttacaatttgcgttttcataatgattaatgagactaagctttttttgtgtagttgactgtacctttggatttttttcccaaatcccttttcattccttattttctttatggttttagaaaatgtagtttacataattgcagcttgattttttactcaggtaatggcatgcttaatagagagaaaaaatattaactatatttccctttttaattactgtgcttttttcttctttaaggaaatatttcattatgttaaattttagtgttattctactcagctattccttaactattatagtattttggatttcacatataaatttgtaacacatcttgagtttattgtatatagagtaaggctattttctatttttttaaggtaaaaatcacataatataaaattaataacttaagaattttaaagcatacaacgcagttgcttttagtatattcacaatgttccaggacaatttcatc

SEQ ID NO: 7178 - DNA, 5079 bp, Homo sapiens
caccagggcacagggaagggagacagccacccacctctgagtgatggcactgtgccgctcttcaccagggcatggggaagggagacggccacccacctctgagtaatggcacgtcagaggagcaggtagtgagcaagctccccaagaagtcaaacagcttctccaccaggcatttcatgtccctcgcccttttggtcttgtcccatgaccgaaggactgcttgcaacaaatgcacagctaagatctgataaaagaaaacttaaaatgacaagcattaaaaatctgattaagaaactacagattgttactttctcttttctttcttttttttttttttttttttttgagacagagtctcgcactgtcacccgggctggagtgcagtggcacggtctcggctcactacaacctccacctcccaggttcaagcgattctccttgccttagcttcctgagtagctgggattacaggcacccaccaccaagcccggctcatttttcttggatttttagtagagacaggatttcactatgttggccaggctggtctcaaactcctgacctcatgatccacctgcctcggcctcccaaagtgctgggattacaggcatgagccactgtgcccagcctctctttattttctgttctcataatgcaaataatcatgtgaaaattttgagattcgttattttacagccaggtaattacactcaagttgattagtgattaggattgtcagggactttagaaaaaagcaacattacagatgcatgtgtttaattaaaaaagaattatttttagtttaattcttaagacaattatgctacaaattctgtgaagcagatgagcaagtagttgcaggatttaccacttaaaagcaggtaaactaaaggttagcaacttaccaattatcaaggaccactgccccttgcctccagaaaatctaccctgttacttctagaccctttctgcactccttactgaataaaggcccgactctaagggcagggaacttcagtacatggatgcctctctcagggaactggttttgcctggcagcacgttacctgcctctgcagcgaggcggcagggaagggtgcgtgccctttcatgaccttcatgagcagcgtgatccactgcggggagctgagggcgccgcacacctgcggcgtgagagcgatgctccgcacaaaccccagcatgcaccagctccggtgttgctccctgtacaccagcctgtttggagaagctgcgggagggaaaatagacatgcttggtaacaagtccctaaagacaaatccctaaagataaatccttatttttttatcaacttattttattttctacaataagctcctttaaaatatattgcagtttgtaaattaattcaaactaattcaaagtgagaagtgcaagaaggcttttaaggtagttcaagaaacatttccgcatttttcttttttttttttttttgttttttttttttttaagagatgggccctgccctcactacgttgcccaggctggtctaaaactccttcaagtgattctcctgccttgccctgctgaatagctgagactacaggtatttttaaaaccttctaagtatgtgtagtaaaagtagttagggaattttagctatgtattgtttctaggcaataagaaaatgatctataattcaaatagcagtaatttgcaacagtgtatctactgtatttttaattttgtgttttaaatatctccacaatcttgcttatatttaatctgcaccacttaaatactttttttgcatttttagtagagacagtttccaatccaagtttaatacatctgcattaacaaaatgagtttttcactaggtttacaccattggattctggcaccagtgggcccacctctgctccgcctggctccaggactccattactccctgaatggaggctgaggcttggaggctgggcccccctaagggaccccgcccacagccccacaggacctgctctcgcctcccacctcccacccgcccacctcccccgccctcagctatccaagcttttgaggacacctgccttctttcagcatactcacatgcgctcacacacacacactctcacaccctcacatgcatcctcacacccacacccatactaagttattcagacacactcatgggcactcacacacccaccctcacacaggtgcactcacaccactgtcgcaatcactaacacacacacaatcccagtcacacgtatgcacacacaacctaagatgcaatctgacacacactcctatgcactctcacatacacttacccctcccactgcatacaaaaactcacatatgcactcacactcaacactagtcacaaccgattcctcacccactcacacctttacccactttctcactttacactcacacctacacccactttctcactttacactcacacctacactgttacctcccactgacacaagcaaaatgctcacattcgctcacacgccttcacaataacgtcactcgtgctcacactgattcaaggcactcatacacatttacacaaatgctcacaatcgcacacttacacttgtgctgccacccatacttcctcacactcatcaagcctcactgacttacacttcatctcattggcacacccagtaatcccctcacactcacactcatgcctccctcgtgctcaccctcacacacacactggctcaatgcactgacgctttcactcccacttcacctgactgtagtcacctgcccactcacatgctgtcacggacatacacaccactcacataaatgcatgcatacatacacccacacaaccacatgctacaaacacactgtcacacttgcaacacaaacgctcagccacttgcccatcaaccgctaacacactctcaccaatatgtgcagatgctccagcacaccactaatacatgcatgttctcacacacactggagcacacccacatacccacccacactcacatgtgctcactctcagtcgcatgcacactcaccccactccctcagctcacatttctcatacttattctccacacacacaaacactttatggattaaactgtgcctgtcccccaacttcacatacattcggaactcagaatatgatcttatttaatgaggtctctgtagacgtccttaaggtaagaatttaggtgacatcatgttggattagagtcaaagaagctcaatgaaagagtcctttcagagacagaaaaggacatgcagaacacaggggcaggggccatgtgaagacgcaggcctctgagactggcacaatgcgtccccacaccagggaagcctggagctcccagaagctggataaggtaaggaaggaccttcccctagagcctgtggagggagcatggccctgcccgcacctggatttgggacttctggtctccagaactctgagagaacaaatttgttgtttgaagccagtgttatgggttgaattcagaattgcaaaattcgtatgttgaagccctaacccctaccatacctcggcaggtgaccttgtttggaaatagggccgctgcagatgtaatcagtttgatgaggttgaatgatgtccttatgaaaaggggagatttggaggtgactcacacacagggagaatgccatgtgaagatgatggcagagatcagggtgacccctctacaagccgaggaacgctaaagaggccagcaaactccagaagctggggcagagccctgaagcagcttctccctcacagccccagaaggaaccacccttgatctcagtcttccaaccaccagaatcatgagaatttctactgcgtaagcccccaagtttgtagtactttgttacagcagccacaggaaatgaatccacacacatccacacccacccacatgcacacccggacacgacaagcgtgcggcccccagcgctgactccctgggccctcaatctctcattccatgcgtgtcttgtccgtcgttccgctttccactaatatttgcagcagtccgcataaagtcttggtggcttcgctctgcatgatctcagcatgaactctggcaggcagacaaagagtctgcagtaagttaatagtgctggtaaacatcattgtagtggggtgaatgttcctttcagtttgttcagcttctaaaaaaaataatcaaaataacaaattatattggcagccccagcctcttggatggtcttaccaagcccagccatgtgaagcttcgcatgtcttttaggaacagctaagaaatgtcatgaaacctcctcccacaacctggatctccacagataggatctagctttcttggtccacccctaaattctcacctctgcttccctagaagcaataaagtgctgactaactccacattacttgaagagttcagagtcagggaccgcagaggaaaggtaaagacaggtggcaggttgggtgtgctcaggcgggggctctcactggaggaggaggcaatggaccgagaccgcagggcaattccaccaggcctcggctcactcgctcagatgcaggctcagcaccaaccacatgagactcactggtggtgcagctgccccgacctggccaccacattctcaaagaggggcaggtgcacacgtgagaggaaaatgcagaaagtcagttccagacagatcgccggatcccacagccactccatgcacctgcatcggaggtgcctgggagcttatttaaatggcaggttccgaggacagagtgccagctgcaggtgcgtcctgacatcccattctaaggcccagatggcagtggtggcagccagcacctggacagtttgtgggctgccttggactaaaggccttcctgagtcacccaccagagtcgtcctctgtgtccgaatcctctgctgagggctgtgcagcggccggcagctctgccagcttgaggtcgtattttccttctttccccatcctgtaggagttggtgctgcccgtgccccactggactcttatccacccgtcctctcccagctcaccaatcactcggcctaggcctggaggaggcccatcctg

SEQ ID NO: 7179 - DNA, 1951 bp, Homo sapiens
tcagaagcccacgttcccagtgaggaagcctggtccatggtccaaaggaacaagagaagatcttaaccacaaattattatgtgtctgttctgactggtctgggggatacctaaaggactcatgaaaggcttttttttttctgtgttgctagaatacagaacatataaggaatggacattattaagaaactctgcaaggagacctaacaaaccacagatgcttagggcaaaaattaaagtttacacatatagtagatcaccttcagcacagcaagaaaagttggagaagagtatttcaaaaactaagacatacaaaatcattcacatacatgggagagtctacaaagtcacatgtattcataggttaagccacatgctgacaaatgtcataagaagacactacacttttaccttggccgatccctcccctcagtgcaagctctgtgcaagagtgaacttgaacttcactcagtgcaagagtgaacacacactttgtgccggctttaaagaacccagcacaaagccagtctgcatggcctagagacatattttgctggacaatgattacttgtttttctttttgtttttcttgtatttgcctgtttgattggttcctgacataccagaaaatcactgtgaaaacattagcttaacatttgttaaggaaacaaaaagacttcggtgaccacaccttataaaccaaacagttttgtaaatcactttggaaaatttcactaaaaaaaaaaaaatccttcacaatataataagtaaagaaaatttaaaaccacaaaacattactgtgtttgtaggggggggttctgatttacagagtaaccacatagtaattataattattagaatgtccagttttcaaaaacgttacaaggcatacaaagaatgggaaagtgtggctcattcaaaggaccaaaataaattgacagaaaatatccctaaggaaacccagacatcaaacttaccagacaaagactttaaaacaactctcttcattatactcaaatgtcaaaaggaaaacataaagaaataaaggaatcagaaaaaatattaaaaagtaggaatatcagcaaagagataacagaaattctggagtggaaaactacaatgataaaaatttaaaaatcaccagagggatttaagagtatatttgcacacacagaagaagccatgaacttgaagagaagaaaatggaaaatactgactctcagaaacagaaagaataaaaaataaacaatgagcagagactaatgaatctgtgggacatcatcaaatagaccaacattcatattctagaaggataaattatgttgttaaaaagtttaccattctttcttttcacctttcttccttcctccttccccctcctcctttttacttttcttcctcttcctttctcttcttctttctctccttcattatccctttcactgtttctctttctccctttctcctttttcttttctttcaattttctcaattactaagagatgtttaagtacccttaccatgttagtagatatggttatttctccctttagttctcttttgagatttatagtcactcaaataaagagataacccaaacataagcgtcacaaacaggctttcataccattcttaatttggtcctgtaattcttcattgctgtattaactttctgatgcttttaaggatgttttataacaaattgtgtagctttttccaatggaatgtttattctgaattatctaattcatattgtaagtatagagggagtttaatataaaattattaaactaatatttgtgaaagaatgtatttgtgcatttaacaaatatgttaatcctcagactgttattgggcagctgagcatacaggaataaaaataacacaatttttatgtgtacaatatttatggaatacgttactggacccaataaataatttagttaataaca

SEQ ID NO: 7180 - DNA, 1110 bp, Homo sapiens
caaattcagtgttgatgagagcccatttcatggttcatagatggtgccttctttctatgtcctcacacagtggaaggcacacaagaactccattgagcttcttttataaaggcactaatccgattcataagagctcagcccccaagacctggtcacctcccaagtgttctgctctccctgatctgtatcatatacagactctcttggattccttaccaattgcttgagagatcatagtgggtttgtggagaaaaagttttcaagatgatggatctttcccaacttttgcagctgtcagcggtctcccaatctgaccagccccactttgtctttaggaatttattgattattccagctttacttgtcatagtggtgtctatttgcatctgtcctatgtaagtgcatctgtcctctttctccttgcaggtgcttgttttccctcacattttgactcagttcttggcaacctcgttgctataaaaataaagtcatgactttgaagttagtttggttctttcattgttgtcaggttaggaaccctattccatcccagatctccaaaacccagactttttggggggttgaaattttaggctttctctttgaattgtagttttatcttctttcagttaccatttgcatttccataatgattaatgagactaagctttttttgtgtagttgactgtacctttggatttttttcccaaatacctttttatttcttcttttctttatggttttagaaaatgtagtttacataattgcagcttgattttatactcagttaatggcatgcttaatggagagaaaaaatattattttcctttttaattactgtgctttttttcttttttaaggaaatgtttcattatgttaaatttcagtgttattctacttagctattccttaaatattatagtatttcggatttcacatgtaaatttgtaacatatcttgagtttattatgtatagagtaaggctattttctctttttttaaggtaaaaatcacataatagaaaattaataacaaccattttaaagcatacaatgcacttgcttttagtatattcacaatgttccagggcaatttcatcatgtcccttcc

SEQ ID NO: 7181 - DNA, 959 bp, Homo sapiens
cacaaattcagtgttgatgagagcccatttcatggttcataggtggtgcctgctttctatgtcctcacatagtggaaggcacacaacaactccattgagcttcttttataaaggcactaatcccattcataagggctcggcccccaagacctggtcacctcccaagtgttctgctctccctgatctgtgtcatatacagactctcttggattccttaccagttgcttgagagatcgcagtgggtttgtggggaaaaagttttcaagatgatggatctttcccaacttctgcagctgtcagccgtctcccaatctcaccagccccactttgtctttaggaatttattgattattccagctttacttgtcatggtggtgcctatttgcgtctgttctatgtaagtgcatccgtcctctttcgccttgcaggtgcttgttttccctcacattttgactcagttcttggcaacctcgttgctataaaaataaagtcatgactttgaagttagtttgggtctttcattgttgtcaggtttggaaccctattccatcccagatctccaaaacccagactttttggggggttgaaattttagggtttctctttgaattgtagttttatcttctttcagttaccatttgcattttcataatgattaatgagactaagcttttttgtgtagttgactgtacctttggattttttccccaaatacctttttatttcttcttttctttatggttttagaaaaggtagtttacataattgcagcttgattttttactcagttaatggcatgcttaatggagagaaaaaatattaaatatatttccctttttaattactgtgcttttttcttttttaaggaaatgtttcattatgttaaatttcagtgttattctacttagctattccttaaatattatagtatttaggatttcacatgtaaatttgtaaca

SEQ ID NO: 7182 - DNA, 1951 bp, Homo sapiens; identical to SEQ ID NO: 7179

SEQ ID NO: 7183 - DNA, 959 bp, Homo sapiens; identical to SEQ ID NO: 7181

SEQ ID NO: 7184 - DNA, 799 bp, Homo sapiens
tattgctttatttctgaggtggctcacgtttggatagaagtagcaactctccgcttacacctgcacgtttaaaacgcatatcagattgtgttatttctgtcctcagaatcttcctggccttcccgttgctttcaggataatacacatttcttagcctaacttcaagggcctacagggtcttgattctgctgagtttttcagtctttgctactttcatggaaaacacacctgcaggtacactcatattatgctcccaccatgccagtctacggtaatttaataactttagatatggcaaagttttatatggtttactcaagttttaatttttgttctagcatttagccaaaatcgattgaattcataatattgctaggcactgttttaaaaacgggataaaatgaaaacaaaacaaaacacaaaacaaaagtcttcagtcctttaaaaaaataaaacagcttcctgacacatagttcacctaccgtagagttcaccatttaaaacgtagcggtgcctcacgcctgtaatcccagcactttgggaggccgaggcgggtggatcacgaggtcaggagatcaagaccgtcctggctaacacggtgaaaccccgtctccactaaaaatacaaaaaattagccgggcgtggtggcgggagcctgtagtcccagctacttgggaggctgaggcaggaggatggtgtgaacccgggaggtggagcttgcagtgagccgagattgcgccactgcactccagcctgggcgagagagctagactccatctcaaaaaaaaaaaaaaagaaa

SEQ ID NO: 7185 - DNA, 411 bp, Homo sapiens
gtaataattgtacatatttagggactacagagtgatattttgataaatgtatacaatgtgtagtgatcaaatcaggtaattagtatgtccaccacctgaaacgttcatcttttctttgtgttgcgaccattaaaaatctcctaactttttgaaaatattatggtttcaaatcgtatttccctgatggctaatgatgttgagcatcttttcaagtgcttattgcccatttatttatcttctttggagaaatgtgtactcagatcctctgcccatttttaaattaggttcttttttgtaattgagttgcaagagttctttatatattctagatacaagtcatttatcagatatgtgatagtcttttagattatgctaccgttcttttaaatgaaaagcacatgagattaattt

SEQ ID NO: 7186 - DNA, 619 bp, Homo sapiens
cttctgttgctcacaggttagtctcccgcggtataagagtctccgtcttccccccagcaagaagcgtttgttcctgcaattcggggggccgcctttgcgcgcggggtgcgctgcttcttggagagttccctcacgggtcacatcgcggaggttcgcgccggcgccgggtcgcggcctccctgcgcagcttctttggcacctggtaaccttcagtggctccgtccgctcggagttaggaggctgtgtcgagctaaccttgaccttgtcctgcagtttttgctgaccatccccaacagcacactgtaaagagttagggtcctctcgaagagttgggactgggcacttttgttggtagtgctaaatttcaacaccctgaggagtacgctgcccaaattattgtaggaaagaattacctggtttagtggttataatactttttgtccccaccacacttgaataacagaaaaaccctcccaacaggggctgactgcaaaagtgattttctgtgtaggggacattggatgtatttatgtatatatcagtgcctatcagtctgtatgtgtgtttgggggtggatgctgtgtaatttaaaaaaatctatggagattctgataatttg

SEQ ID NO: 7187 - DNA, 922 bp, Homo sapiens
gatttgcacatgcattactgtggcacctgtattcccattgtaaggcccatccctgaatacatgacattttctttcagagaatttccttccttgtttttcacttatcaacataatggtaatcactgtgaacaaaggtgattctgagatccctgattttgtttttatacttttccacagatcgggatgcttacccttaagtagctgtgtcaaactaggcaaatgggcatatgtccaggtaactgtggtacctgaaggcaaatgacacagtaaatatgagcaaagaatatggacaggagagcaaccatataaatgaagaagtacttgctaggatccatgactactatttgagaaataaaataattactttagacccatagttatggaaataaaatctgattagtgcaattgcaaagtcatgtgtaaagcatgaaaatgaataacttttatttttttcaagtgtgttctttgcagtatgtttgtgcagaaaaataacatcccaaaaagctaaaagcaaccactgctgctgaaatttaatgcaaatgctaatgaatagctaaacatttaaaagattatttcgctgatttgattttaagactatacttgttgaggtttttgttgaatggcttccttaatatcaacaacctatttcagaaattctgaaaacagagttaataatttggctgctaattataaatacataatgagggagtttagcaattttaattttattatttacatttttctagctagctctttctagtaagggtatatgatttatatgttaagtttagtgctttagacagtgtgggatgattatgatttgctatttaaaaataagttgcaggcatgtcaacttttacttaacactttgactcaacacttgataaagcaaagtgattctctgtaaaaaaaaaaaaaaaaa

SEQ ID NO: 7188 - DNA, 100 bp, Homo sapiens
acacctgtaatcccagccctttgggaggccgaggcaggtggatcacttgaggtcaggagtttgagaccagcctggcccacatggtgaaaccccgtctcta

SEQ ID NO: 7189 - DNA, 263 bp, Homo sapiens
ggcaatgagtaatgctcagttgaacaaaaatctgaaagatagaggcataagtgataagaaattgaatggcaatgtgaaaacccttgatctgtttacaaatgatagtttcgaaaaaggaatgtgtctgtcatagggttgacttaggtcaggggttctaaactaggggccacttttcaacctccttccctcagagatatttggcaatatctagagacatttttggttgtcgtaatgggttggggagcagacttaatacattctta

SEQ ID NO: 7190 - DNA, 263 bp, Homo sapiens
ggcaatgagtaatgctcagttgaacaaaaatttgaaagatagaggcataagtgataagaaattgaatggcaatgtgaaaacccttgatctgtttacaaatgatagtttcgaaaaaggaatgtgtctgtcatagggttgacttaggtcaggggttctaaactaggggccacttttcaacctccttccctcagagatatttggcaatatctagagacatttttggttgtcgtaatgggttggggagcagacttaatacattctta

SEQ ID NO: 7191 - DNA, 263 bp, Homo sapiens; identical to SEQ ID NO: 7189

SEQ ID NO: 7192 - DNA, 186 bp, Homo sapiens
aaagtagcttctccggtggcgggcgcctgtagtcccagctacttgggaggctgaggcaggagaatggcgtgaacccgggaagcggagcttgcagtgagccgagattgcgccactgcagtccgcagtccggcctgggcgacagagcgagactccgtctcaaaaaaaaaaaaaaaaaaaaaaaagaaa

SEQ ID NO: 7193 - DNA, 180 bp, Homo sapiens
aaagtagcttctccggtggcgggcgcctgtagtcccagctacttgggaggctgaggcaggagaatggcgtgaacccgggaagcggagcttgcagtgagccgagattgcgccactgcagtccgcagtccggcctgggcgacagagcgagactccgtctcaaaaaaaaaaaaaaaaaaaaaa

SEQ ID NO: 7194 - DNA, 1083 bp, Homo sapiens
ttcaatgcatgaatatttgattttatttcaaaagacaattatttataacactgaccctctatcaaaaagaatatgcttttctgatggggaagtgacaaaaaaaaaaaactacacagaacaagagtaataaagttctcaagtaaggattgcactccaataggaattgagtgattctctcagagagcactcattacatcttagacaacgtcactcttctttcctcttggccatatgttcaggtctcatagtctttctgaacacagaatggcagtggccagcattgtccattatctatgttccgcttgtttactaattaaaaagctttggtcttcagtgttgtaaacgcaatttctgccttcgatatcaaaaggtgagtgaatgagacaagattagttgaaggaagtacttgatattttactccagatagctgaatgaaaatgggtattctcccttgtactttggagtccatcgtttcctactcccaatgctctcacagacagtaaataaaatagtttaactcgcaaatcttttacaaggatgttcaaaacaatattctagagaaaactttattgatggttgaaaacaaaataaaatacacataaggttcccttcccatctctaatatggaaaataaaacacttaatatgaatactcagttttaaactttgctctaagttttattttattttattttgagatggagtcttgctattgcccaagctggagtgcagtggcgagatcttggctcactgcaacctccgcctcccaggttcaagcgattctcctgtctcagcctcccgagtacctgggactacaggcacctgccaccatgcagggctaatttttgtatttttagtagagatggggcttcaccatattggtaaggctggtctcgaacttctgacctcaggtgatctacctccctcagcctcccaaagtgctgggattacaggcatgagccaccacccccggcaacttttttaatttatattttattttttattgaaataggtggcccaaaacttgtgaaacagaactcatgctgaaggacgacattaatcataataattaaagagacagata

SEQ ID NO: 7195 - DNA, 625 bp, Homo sapiens
attaaaaacaaatccaattctgactttcaatgttgtttcaacaccgaaaaaatatgatggcttattctttggtatgagaagtcattttgatggtatttttaccctattaaacaaaaatgggatttaaaaatctggttcgggatgttcaaagataattgctaaggcaaattttgcaatttgagaaaacctaactgtaatgatccatttattcagttatttgttaatactcaaattagtaattttcactctgaatggtaaataaaatgttaataaaaaataacaagacatataaactttccctaatgagatgcagttaataaaaacggttgtttacttcagagtatttactataaacatgtccacttatgttattttattgctatctatatactctttcagtttactgtattactgtacttttctctaaaactttaaaaatctgttatctaaaatcaattctctaatgctaattttgcaggaaaactgtatttcacattattaatctcattaatataactttcctataaataagcatgaaacatttggaggatgcatatataatgagtgcttggttactatagtagcgaatgtcaaactaattgctaaaaaaagtctaaaggttttc

SEQ ID NO: 7196 - DNA, 859 bp, Homo sapiens
ggccagaacagcccgcccttcagcagcgtccctgaaattgtgcaccactatgccagccgcaagctacccattaagggagccgaacacatgtccctgctctaccctgtggccatccggactctatatatgtgaagccagggcactgtgatagacctgtacccagccctgtgcccatcacctggctgagggctgtggctcttgccagggacgtgatctttcaaacctttcttctcctgggatccagtagaagctggagattccttaatttattctaaagggaaagggctcctggggccttggagtaaggggttgtctggagctggggaaagaggaatccctggagagaaaggatagcccctggaggaagggggttccagagctactgggatggtagggagtttcagactggcagctccggctcctttccgaccttagggcagaggtggtgacctccaccaccaccaccctctccccactgggtccgtgcgaggtagtgcagaattcggccccttggggcgccttaccacctctctgcctccgtccccgacttccaccccagaccgtcggagggctccgcccagagtctggtaagaggtttggggaagacaggcccctgggaagcagccggctttggggggtggggagagaaggggaggggctcgggcagagggaactgtgcagtccccaggccgccccggctccgggctagaggcaataaataaacccgatcctgccgggcacagccgcgcccgcgcctccggcgccgtccccgggctgacgggggagggagcggagaagcgagcgcagattctgcgtataaatcagctctggagcagacacagcccggctgtgaaaagca

SEQ ID NO: 7197 - DNA, 11092 bp, Homo sapiens
gctagctatcctagaagactatgcggacccgtttgatgttcaggagactggcgaaggctcagcaggagcttcaggagccccagagaaggtccctgaaaatgatggctacatggagccctatgaggctcaaaagatgatggccggtgagtgacaggggcaggggaggtgctccctgaggcctgggctctgcagaacaggctttgcgactcacaagtctaaggactgattctttggtccctggaaaatatggagaaagtcttttccaggtccttagggaggatggtcattgcctttcagagtcattttggagaagcagctgtgacctgtgagacctgaagtggtataggaggccacacaactgaagttcagatagaagtattcaagataggaaggaaaagagtggtgagggctgggaggatcagtgatcccaaaaagagaaccactagccttgggaggggggatgagtttgaaatgaaacatcttcatggcagttggagaaagatgactagaaatacagttacagtgggtgccatgagcctgggcaagtagtccaaagagtgaggctagagagaaaagagtaagatctggtcttgggaacagaggctgagagacagtccaggggaaagagatcaaataggggagatcagagaggacagggtgggtctgtccaagccacggccctgaggcagggtgagaggaagtttgttcaggagcaaatgatgttagtgctgggtgtgcatgggaacctagatgagagagtccgagaggggcggagcagtgcttcataggctggaatgaggtatctggacttgcttcaaaatggggagtggagccatgatgaattcttgagcaagagaggaacaggatgaaaatgtcagctttattactgataaagttgattagagaacattacttatgttcactgcaatgggcttatgtgtcatcacaatgggcttcttaatacttcaccacagaattaaacttgcccaatcaggcttgggcaactcagtaggcctagtgggggaaccctgcaaaagaagagccagagcttgtccccatccaagctcagagcctgcccttgggtacctggggctctgggtcaaagacagcacaggagcaggccactgactgcatgaaccagaatgttctttctcttcaggaaaagagagtgtgcattcactgaccaatacaataaactgctcttcctacttgggagaggtggtaagggaggcagagagtggtcaagaatatcccaggactattattccatggagctcttggaaacacaagcctgcagaatggaggttcaccctagcagtaatctatatacggaaagatgagggtgaaggtcactgggtattggcaaagaacagatgggatttgaagaatgaaggagggccaggtccaaggagaacagtgtagtagacagaaatggagaaagtgagaagctgactaccccatttaggtcagagggtgtggaacccaggaagcccccatgaatgccctgaaattatatgtgaaaatatgggagcacattttttgggggagtagctccatagcttttatcatattttcactggggtcagtgatcccaataaaagaactactagctttggagaaggtggtcagtttgaaacaatggtatgtcaaagcgaaaggtctttatggcaatggacccaaatgactggaaatacagatgcagcaagtgccatgaggctgggcatacagttcaaggaattaggatagggaaaaatgcataagacctagtcttgggaaagagaggccaagagaggatctagggagaggccaaatgggggtgatcagaaagaaagtctttgccgggtccgtggggaggatggtcactgcctttccaatagtcattttggagaagcagatgtgacttgtgtgacctgaagtggtacaggaggccacacaactgaaggtcagatattagcattcgagatagtcaggaaggacaaaataatggtgagggctgggtcagtgatcccaaaaagagaaccaattagctttagagaaggtgatgagtttgaaaccatggaatgtcaaagtgaaaggtctttatgatgatgaacgtaacttgtcgaagggaaagtttcaaggagcgggtggtccacagtgtctgggcagcaaagaataattctgtgattgtcaaatgatatcacttgcgggctgggtgtggtggctaatgcctgtaatcccagcactttggaaggccgaggcaggcagatcacctgaggtcaggagtttgagaccagcctggccaacatggtgaaaccccccatctctacaaaaatacaaaaattagccgggcatgatggcggatgtctgtaatcccagctactcaggaggctgaggtgggagaatcgcttgaaccggggaggcggaggttgtagtgagccgagatcgtgccattgcactccagcctgggtgagagagcaagattccgtctcaaaaaaaaaaaaaaaaagaaaagaaaaagaaaaaaggaatgatatcatttgggacagaaggaaacaaatggagcttggcatcagggaggaagtggacaacgggagggttgtgcctcagtttcctaaactcataaattttagctacccagccctcgctggctgttgcaggatccttttcctgtcttttactctagtgcccacctgcccttgccttcattggctcccttgcttttagagacccagaagtgttttgagggtgaggaacccaggatgtgtggttgctgagctccccccagagccagggcatctcctctgaaggaggcctggcttgttgctgagaagcattggaggaggggagccagaaagccaaggctgaaccctcacctttcccttcctgccctgctccggcagagatccggggctccaaggagacagcaactcagcccttgcctctgtatgacacaccctatgagccagaggaggatggggccaccgcggaaggtgagggggccccctggccccgggagtcccgcctgccagaggatgatgagaggccccctgaggagtatgaccagccctgggagtggaagaaggagcggatttccaaagcctttgcaggtgagtcctggtggagagggcaggtcagctggggcctctgagcagctttccaggctcaagagaatggaaggagtggaccccaggaacccagagaggcccaggatcaggactccagggaaatgtagttgagttctgtaccatagggggtggggttggcagtgtggacacagcgctgtgtgcagggtcaaggaatgggtacaggagaaggatgaaggcattcccctgcatcaccactcttggaagctaagaggcttagactaccttctctcttttggggactgggtatattaaaaataattccaaaacaaacttataaactcgtgacatatgttaaaatacttacatttaacaaaagaaggcacttacttcaaacaataaagacagctatgggtgtaacctgaattctagggctctgcctcccagtggtaggccctgcgcggaccagggggtgtctggccccaaggagatttctgaggagcagagtgaggctgtgagaaatctcttgattgccaaatgaagatcaggtttcttctgtccatcccaagtccaagtccaccatggaaaagttcatgttagtggtctgaggtgggtggagcaagagcctggagtagggagagggcttttgctcctgggtccttgattcagggagaacataaagggctcaaatgccattcgacttcactcctgcctgcatatgcccctctcccctgcttgggcaaggggctcatcctggagctggacccagccctcctctgccctccccaccctgacagccagactggaaaaccacaggattctaatattcttcctgtaaagcacacaccattgaggatgggccgtttatctccagaagtctccttggagaatcaatactgtttggattgcttaatgggaaaatctatgctcgtcattaggaaacctcgttagcagtccagcagccgccagtggcatcactcttctcaggatggggggtggggattaaatttcaataaaacatctgccctcaagtctgagtaatcctgacaacctgaggcgaggctggctctttcttgctgcctgcgagttcccaggctgtggggaaaaggagaaagggaggctaggctgtgggtgccaggaggctatgggaacccagatgtggtgttgggaggtgctggtcactcttagtccttcatttcctttgttcctggtacctttgggccctggaggcttgtgagaggtcaaatgaaggggacccacgggctgacagtgcaagcccctgcatcctgctgcttgccacccaagcctccctccctctgaccaggccaacctggtgtggtcaacgttggctctgcccagcccttgagtgcctccccaaaagctgacctgcctctgcctctgcctctgcccctcctcatttctaggctgtcctgtgtcctggctctgggttttggtgtctcaacctctacctctttctgtctctgtcactgtctgtctctcttctcacttctgctgctggctccagttgacattaaggtcatcaaagacctaccttggcctccacctgtgggacagctggacagcagcccctccctgcctgatggggacagggacatctccggtccagcctcgcccctccctgagcccagcctggaggacagcagcggtgggtcctggggggcttctggccagggtgacatgtcctcacccctccaggccctgtgggttgggttggaggagctgagaggtggggcaggatttggagaccccaggaagaatctcatttgggaagaaggaagagacaaaatgcacgttcctcccttccccacagctgtgggatggtgtcttctacagggaggcccctttctaatgtgttcctcaccatgctacaaaaatccaccattttaaattcactttggggagagctttgcttgacaagctccttcagcaatgcaaatactcctgagctgggggtgggacagacacagcaagtgtggaactccttggcgcagaggagcagatctgaccttgcatctggtgactgaaagagagtaagggcttcaaagtgctacaaggagagaaaaagagcccaaatgaggagaaagaacgcacttaattcttcctctatgttcagttctgcccagaatgggcacccaagggtgtgtgtgcagaggcatgagcatctgttcgtacatttgtgcctgaatgttgtattttaaaatatgggatgaaggagggtgtctgtccgtacgtgcacgtgcgcatgtgtgcctggggacccacgggggctcagccttcccttatgggctcagccatcaggctcccctggtctgggagggcagaggtgctgcctctgggcctctgtgggttggggaggggagccagtgggcagcaacgttgggggtcggggagggacaggctggctggtggctttgggcgggattagcctgtcaggatggcaccaaggggaaccagataattgttctcagatcgataagtcatttctacagaatggcttggcagggtgatttggagaacggtaatgaactctgaggaggagaaagaaacaatattatcagtgctgaagccaccctgagaggatggactgggggaaggcagtcagctgctttggagggagaagcgtgcatggtttctcaggttgctcctctgctctctcctcccacaatgtggggactgcaacaccctgtgtggcacagaaggctgggcccacccccaccaggggatagatccaggattacgtccccagagccagtcaggcccttcagcatgggctgccctcctagagcattcctttgatcctttctggggctggaagaagtaggggttgggcactggctattcaatagggacctctgaggacctctagggtccttagagtccatgattgatatgttccccacagcccagtttgaaggaccggagaagagctgcctgtcacctggccgggaggagaaggggcggctacctccccgactctctgcagggaaccccaagtcagccaaacccctaagcatggagcccagcagccccctgggggagtggacagatccagcactgcctctggaaaaccaggtgtgagtgtctgtgtccagctggggactccctccccactcctcccctcctggcactggcttccctacaggggacacccacaatgggtgggcctggacagcgagggacccagcagagatgccccccttcctctctctcatccttagctggtatcacggggccatcagccgaaccgacgccgagaacctgctccggctgtgcaaagaggccagctacctggtgcgcaacagtgagaccagcaagaatgacttctccctctccctcaagtgagtggggacagttgtggtttcagggacagcaagcagggtggaaggggactccagtattccccttatgcccaaccaagctggggaggtccccatcccccatgaacaatccccaggcactgggggtcctgagatgtctgagactcagcccctgctctcaaggagctcagagtccattgggagaaatagttgatccgcagcatccagctcagaagggttctgttctagttgtgtggcctggcccccttaacctctctaggcctcagtttccttactaatgaaatggatgggggataatatagggaaggattaggtgaaataatgcatgggaagtgcttagcatagtgctaagggctcaataaattatcactgtcattattaatggaagcccaagatgttctagaagcataggcaaggagataggagctttgcgtgagggagtctgtagggtgttggggggggctggttcctggaaggagggcagggcagtggacacaaagtatttctgtttactctgaggaagagtgtgtgtgtctgtgtgtgtgttcggggatggggggtgtctgagcttttgggtcctggaagacgtagaggaggcaaggccctccctccccatcaggctttcctcccaggagcagcagatcagcctcccagactccctggtagcatggccagccctgccctgggcaaccaggagttctgcctggtagaccctgcaccccgttaggaagccagtggggtggtatgttcatttgccccccaccatcactagtaggacacctgcaccactttctaccacattctctgggaccatcagagtacagatataccctcccattcagacaaatccaatctatgggaacttggggctgctaaacaagacatatttgggggataattattcaacgtccgtcaaagataatagaaaaagtggtgggtgtgttggctcacatctgtaatcccagcactttcaaaggccgtggcaggtggatcacctgaagtcaggagttcgagaccaacctgaccaacatggtgaaaccccgtctctactaaaaatacaaaaattagttgggtgtgatggtgagcactggtaatgccagctactcgggaggctgaggcaggaaaatcgcttgaacccaggaggcggaggttgcagtgagccgatattgcgccattgcactccagcccaggccaacaacagcaagactctgtctcagaaaaaaaaaaaaaaaaaaagaaaaagataatagaaaaagtgccggactatagtcaggtaacctgagttctattcttggatttgatacactagctatgtgatcctagggaaatcacttaatatctccgagcctcggtttctacctttgccaaatgagttgatagattatcgctttttttccagctgtcatactctaggagtctgaattgtaaaatcaaagaagcatttcccagaaaagtttttgtcaaaaatttgatttacataacctcagaaatgtgtattgctttaaaaattataaagttcatggagcataccaagcagcctgtataccatttctaaaccaactactcccctgcaagatagatctcttttttatagacagaaaataaattcaaagaggtttgttacttgcccaaggccacccggtaataaagtccccaaaccaggatttgaacccagctctgtctgactccacaaactatggtattccagggctccaccagtgccatattattgtttggtacaggccaaggtaaggggagatgccaggggtctggctcccaaagtggagccctgccagcctgccttagcctgggaggtaaaatggcaaggcaggcctggagacctgctcccaccctggctgacctggctccgcatctgtctgccagagcctcgtttgcatataaatggcttctctgaaatagaattatggtttctcttctctcactaatggaagagctttcactggtaattaaacaacttcctcaaaaaggcttgccagcctggtcctgcagcccagctggtcctaaccccagtaccctgagggtctggcaagggctttgctgtgtcctaatggacccttgggactttgtcccaggaggtgggaaagcacagccatcccctctgcaggaggttggttatccagatggcggctgagctctctggccacttgtccttcttagccagatctgtcttttgagaagatacaatgtgcagcttttaggagagacaattccccaggtggactaagggagaaggggtcagccccaaactgagaagaggtgaaggaaagcagggcccatgctgctgcccacagccttgagcctgacaggggacactgcctcccctctccaccacccacaggggctgtttgcctcaggcccttggctcctttccccaagggcctgtgctgtcagccctagttatctcagacctacagatggccccggccaccctgcaccctgactcccagccctggggcctcaggccttttcctagcagtctgctaggctcctgaggactccatgcctggggaggcagagggatagagtttggggcctccgtttttcctcccatctgtcacctcccttcagcctccccactctgatttctcgcttgtgggcctggtgaaatgggtccgggcagagccttgtacccagtcaggggaggcaagtgataaggactgccagcctcacttctccggggggtggacctcaggatggaggcagctccctcactggttctgctttccacactaacctctaagccccgtccttgtccccaagtaggctctggccagcagtatataacacttaggcttcagggctccccaaaacattcctcaccccttgcctgtgcttgagtttcagacctgaggcctgacagaccaagcctgtggtggtttagacaaaggttcttggaggtctcactcccatgccctctcatgggccgagggtccctggacatttaggagctagccagagctctgagcagtggggtccttgtcttgagggcggggccaggcactaatgctgatttcctggctgtggcagggagatggcagaggcaggagcatgtctcctctgagcaagggagtgaagtcattgtaggctgaagggccggataaatgagctaggggcttggtccaagacccagaaagcaagagagtgaagggatatccccaggaggaggcagctgagcactcccagattttggggggtcttccagatcagcttcccccttccccctagtcattagaagggagagccccaatgaagactagcttggttgtcacatctgtccaccctcctgccaagggcatatgtggttccacatgagtcaccaggagcccctcacgggtgtcctaccaaagagctcaagaaaggtgaggttaaactggccctggccacagaggctggagggccggggtgcctggaccccagggttggccagcaggggtcgggggaggtgctggtcgctcagtttccacctgcacacaccctgtatgctccctatacacacattcttggcacaaccagtggccttaccacaaagccaatgcccagtgctacctacttacaccaccaccacccctgctttctggactgacctccacctcccctaatcacctgtcattctcagctggcttcggaaccaccacatttgctgtagggttggggagggttactgggtggatggatgagggggctgaggagagcccccactcaccaaagtctcctctcctcttcccaggagcagccagggattcatgcacatgaagctgtcccgaaccaaggaacacaaatatgtgctgggccagaacagcccgcccttcagcagcgtccctgaaattgtgcaccactatgccagccgcaagctacccattaagggagccgaacacatgtccctgctctaccctgtggccatccggactctttagatgtgaagccagggcactgtgatagacctgtacccagccctgtgcccatcacctggctgagggctgtggctcttgccagggacgtgatctttcaaacctttcttctcctgggatccagtagaagctggagattccttaatttattctaaagggaaagggctcctggggccttggagtaaggggttgtctggagctggggaaagaggaatccctggagagaaaggatagcccctggaggaagggggttccagagctactgggatggtagggagtttcagactggcagctccggctcctttccgaccttagggcagaggtggtgacctccaccaccaccaccctctccccactgggtccgtgcgaggtagtgcagaattcggccccttggggcgccttaccacctctctgcctccgtccccgacttccaccccagaccgtcggagggctccgcccagagtctggtaagaggtttggggaagacaggcccctgggaagcagccggctttggggggtggggagagaaggggaggggctcgggcagagggaactgtgcagtccccaggccgccccggctccgggccagaggcaataaataaacccgatcctgccgggcacagccgcgcccgcgcctccggcgccgtccccgggctgacgggggagggagcggagaagcgagcgcagattctgcgtataaatcagctctggagcagacacagcccggctgtgaaaagca

SEQ ID NO: 7198 - DNA, 2387 bp, Homo sapiens
cctgctatcatctcactgcctggaagagccatgtaggcacaggtgcccaactctccctttgctcagagaagggctgggagtgactgaggtcctggtaacaagccaggcggctctggctccctatagactccagctgagtctgccccccaccccgttctcttccccagccaacctcctccagaagcttccacaccctctgtttctgcccctcctgagcaggctcaccaggcctcacactagtggctgacaggccctctgtcaggaagggcacccctgggccggggaagggattgctagctggggcactttgccttgggccagctcctttactcaggacactgggcagcttgagagatgtctgggccagcctggtgagctggctgggttagtggcttcctctccccatgccccttccggtcctagggcagaataaagaaaccctgaaggcagaaaagtgatttatttggaagggagactactggagcagggagaagagggctgaggagcattgcatacataggtattgggccagggtctgatgaaagaacgtgcttaaaaccttgggtgaaattagttgtggtgttagactggggtgccgagtgggtttctgtaaatggcttgccatgggtccagcctctacctcctgcaaggcatttgccagcccgtctgacagtggggagcccagaagaggaggaggtctgggagtagggagggttctaagatgccagcatccatgctcccactgcatccttacactcaccgccccaacacacatacagacatgcacacacatagtacttgtcaggtcagcttgtcttctgagatttgtttctgaagtctggaagcagaggtttcactttgccccaaatcagtagctcccctacttctcactctagtccctagacactgcccccccaccatttctccaggctgagacacatcctggtcctgggggtccctgagcccacacatggtgactgactatggccacctggaacaaggttgggaggtgggaaatcagagaaggctgaggcagccagaaataggaagaacagaggtgaggtgtgggctcaaacctctgctcaactgggcagtgggcagaacccccgggcaggggcctagaagttctcataatggtgggagaagtgagtccggtcctgcctgttgatgagctgacaggccttttccacattcttggtcatgccaggggggccacagctaaacaccccgatcttccggacctgttgcaggaggaataagtggaggctaactctttgctcagaggcagggataacgcagtgttcagaggaaggggtagctccctagttcaagaccagcctgggcaacatagcaacatccctgactctaatttttttatttttaattagccaggcatagtggtgcactcctgtagtcccagctacttgggaggctgaggcaggaggattgcttgtgcccaggagttggaggttacagtaaactggtattgcatcactgcattacagcctgggcaacagagcaataccctttctttaaattaaaaaaaaaaaaaaagccagcagtgctcctgatggtttgctttgtactatgcatggtgagggctggctcagtgtttataggtctagtggaattttgctaagtgctagatcaacatttctaatagaggttgggttaatcagtgttcaagttgaagaacagctcagggtctcatggagggctagaccagtatttgtgagtagtgactagcccagtgctcatggtaaaggttccctcagtgtccagggtgaggactgactcagtattggtgagggtagtggtgagggtagccccgagtttttggcgaggactagctcaatgattgagctcttccttctggacaatacatcttggcttcagagatggcaagtccctattgcctgcctcctcctttagcacctaagggtgacacccacctatcctttccattccattaccccaccaatctcccaggggatggcttctcatcagcagtcgatttcttccttgatggggaaggtttgggagctttgctcagaccccaaatgataaagaggaagagaacctggttatgggttggactgacctgggggtggacctcctgcagggagttgaagaagggctcaaaggggggacggccaaagtgggtgatggagcgcaggcctgtgaatagactccggttcagaaccttctggaagtgccgctcacagatgtactatggtagggaagggtggaacaaagttcagccaggcacagctagggtcaattcctagctcagacagtggcccgcataccctcctggtgggccctgacataccagcatagtggtcctgaggtcgaacttctcagccagctgggtgatgtagatgtgc

SEQ ID NO: 7199 - DNA, 2375 bp, Homo sapiens
cctgctatcatctcactgcctggaagagccatgtaggcacaggtgcccaactctccctttgctcagagaagggctgggagtgactgaggtcctggtaacaagccaggcggctctggctccctatagactccagctgagtctgcccccgaccccgttctcttccccagccaacctcctccagaagcttccacaccctctgtttctgcccctcctgagcaggctcaccaggcctcacactagtggctgacaggccctctgtcaggaagggcacccctgggccggggaagggattgctagctggggcactttgccttgggccagctcctttactcaggacactgggcagcttgagagatgtctgggccagcctggtgagctggctgggttagtggcttcctctccccatgccccttccggtcctagggcagaataaagaaaccctgaaggcagaaaagtgatttatttggaagggagactactggagcagggagaagagggctgaggagcattgcatacataggtattgggccagggtctgatgaaagaacgtgcttaaaaccttgggtgaaattagttgtggtgttagactggggtgccgagtgggtttctgtaaatggcttgccatgggtccagcctctacctcctgcaaggcatttgccagcccgtctgacagtggggagcccagaagaggaggaggtatgggagtagggagggttctaagatgccagcatccatgctcccactgcatccttacactcaccgccccaacacacatacagacatgcacacacatagtacttgtcaggtcagcttgtcttctgagatttgtttctgaagtctggaagcagaggtttcactttgccccaaaccagtagctcccctacttctcactctagtccctagacactgcccccccaccatttctccaggctgagacacatcctggtcctgggggtccctgagcccacacatggtgactgactatggccacctggaacaaggttgggaggtgggaaatcagagaaggctgaggcagccagaaataggaagaacagaggtgaggtgtgggctcaaacctctgctcaactgggcagtgggcagaacccccgggcaggggcctagaagttctcataatggtgggagaagtgagtccggtcctgcctgttgatgagctgacaggccttttccacattcttggtcatgccaggggggccacagctaaacaccccgatcttccggacctgttgcaggaggaataagtggaggctaactctttgctcagaggcagggataacgcagtgttcagaggaaggggtagctccctagttcaagaccagcttgggcaacatagcaacatccctgactctaatttttttatttttaattagccaggcatagtggtgcactcctgtagtcccagctacttgggaggctgaggcaggaggattgcttgcgcccaggagttggaggttacagtaaactggtattgcatcactgcattacagcctgggcaacagagcaataccctttctttaaattaaaaaaaaaaaaaaagccagcagtgctcctgatggtttgctttgtactatgcatggtgagggctggctcagtgtttataggtctagtggaattttgctaagtgctagatcaacatttctaatagaggttgggttaatcagtgttcaagttgaagaacagctcagggtctcatggagggctagaccagtatttgtgagtagtgactagcccagtgctcatggtaaaggttccctcagtgtccagggtgaggactgactcagtattggtgagggtagccccgagtttttggcgaggactagctcaatgattgagctcttccttctggacaatacatcttggcttcagagatggcaagtccctattgcctgcctcctcctttagcacctaagggtgacacccacctatcctttccattccattaccccaccaatctcccaggggatgggttctcatcagcagtcgatttcttcctcgatggggaaggtttgggagctttgctcagaccccaaatgataaagaggaagagaacctggttatgggttggactgacctgggggtggacctcctgcagggagttgaagaagggctcaaaggggggacggccaaagtgggtgatggagcgcaggcctgtgaatagactccggttcagaaccttctggaagtgccgctcacagatgtactatggtagggaagggtggaacaaagttcagccaggcacagctagggtcaattcctagctcagacagtggcccgcataccctcctggtgggccctgacataccagcatagtggtcctgaggtcgaacttctcagccagctgggtgatgtagatgtgc

SEQ ID NO: 7200 - DNA, 155 bp, Homo sapiens
gcctgtagtcccagctactcgggaggctgaggcaggagaatggtgtgaacccggtagatggaagttgcagtgagccgagatcacgccactgcactccagcctgggtgacagagtgagactctgtctcaaaaaaaaaaaaaaaaaagaaagaagga

SEQ ID NO: 7201 - DNA, 782 bp, Homo sapiens
aaggcctctgtggccgtcatcggcactagcgggttgggggtggtggtggggtgctggcagcctcaggagcgatcgctcccctggagagggtgattgagtgtggagatcaccggggccgccgcgggccgtctgcacttctgttccaggtttttctggcattttctgttccaggtttcttccacccacgagcactttattctcctccgagacccccttttcttccccttcctctctcccccaccagggggcgcgcttaaatttccagacagagaccagaaggaaggtttagaaagaaaagaacacttgcccagggcagctttgccctccaagaggctccctcctgtctctaagtcaattccacccctcctcgaagtcccggcttccacccctctcctcagagtcccggcgtttacctcgtggtgtgtttgccttgggcctttcatgccccggctgcacacatcgtctgtgaattgtggctgttcactcccgaggatgtgtcctagactccgggtcgcgtggatctaccctctagtttacttgctcgggagaagaaactgactcgttttatttagtgcctatttagcgagcccagagtaacgtacatttgtgctgttttcaattttgtgctatcgcaaatcacaaaaaaactgttatcaattcacattcatcatcagcacgagacccatttccttgtgctcctgccagctcaggatattatgtttcttttttcatttttgccagtctgttaagtaaaatgtcatatgcgtttgttttaatttgca

SEQ ID NO: 7202 - DNA, 782 bp, Homo sapiens; identical to SEQ ID NO: 7201

SEQ ID NO: 7203 - DNA, 1407 bp, Homo sapiens
gctccaggctccagcctacctggctagaaccaactttcactgttgtccccaaacctgctacatccctcgaaccccagggcccagttccttacctcaggggctttcagaccaaagacatggatatcatcctctacaccctcatgccagccataacatcctacccagcactgtgtctaggattttgcctcccaagcatttttagacccatttcagggcagctgaaggaatctctcattcctttgcttcaactcttccagggccctcaggatggagtccctggtcctcctcctaacatttaaagtctccctgacctcagggccctcaggatggagttcctggtcctctgcctagcgttttaaagcctctctgacctcggggccctcaggatggagtccctggtcctcccactagcatttaaagcctctctgacctcgggctgctgactactttgtctcacctcctctgctacagcagacagtccagtccagcatcctctgagctagtccaccttttcatagccctcagacctctgaagctcaaaatgcctttcttcttttgtcatggctcagcaaactcctactcactcttcaaggcccaactctactgccccctcccctagagcaaagcctcggccctgccatccccagggagagttaatagtttccatccacatgccctccatcccatcccttccagttttgcctggtgcctctggcacaacctgttatctccttggtcagaccctggctcagatttacctctgtcctgcccagcctccacccaggccaggaactgggaggtacaggggtcctggagaagcacccaccctcactcaggcacacaagcacacacacccactcacacatacactgggcttcccttcctcccactacctttcacctcacctccaagcatcctgcctgagttctcagtgggaggtaagtcttggagcaggggtcttcaatccccaggccatagaccatggcctgctagaaattgggttgcacagcaggaggtgagtggcttgcaagcgagtgaagcttcatctgtatttacagccgctcactattgcttgcattaccacctgagctccatctcctgtcagatcaacagtggcattagattctctaattctaggattctaggagtagggattctaggattctaggattccaggagtatgaaccctattgtgagctgtgcaagcaagtgatctaggctgtacattccttatgagaatctaacgtctgatgatctgtcactgtctcccatcacccccagatgggaccatctagttgcaggaaaacaagctcagggcttccttcaccatacattatggtgagtcatgtaattatttcattatatattacaatgtaataataataggaataaagtgcacaataagtg

SEQ ID NO: 7204 - DNA, 954 bp, Homo sapiens
gagccagccgaggccgtggccgcaggagcacaagcagtcaggctccttccgctacttgcagggcatgctagaggccggcgagggcggtaagacgcctgccacctgtccccatctgccttcccactccctgcagtgcccaggttgccccctagcgaccccacgtcccgcctcgcagtcacctgccctcttcggtctctgcggcccggtcccacgcccttgctacaaccttgctacgccctggcttcccgattccctctccaccccctgtcgctgcccctcaccccacgcccgccaaacccgttccccagtctcgggtgccgatggcccgtctggcgcccaaccaaacaccccgcagaaatggagttctgacctcctcaccccgttcatgccacctacgctccgggtttcaggggattggcccgggcctggcggcccccggaacctcaagcccacggccagcaagctgggcgctccgctgagcggcctgcaggggctgcccgagtgcacgcgctgcggccacggcatcgtgtgagtaaccgcccccgctgcccctcccggaccctagccttccagggccctggatgcgggcgcagtcgtgaacccatcagtcactcgacgctgtcctgtctcgttccccccatcaggggcaccatcgtcaaggcacgggacaagctctaccatcccgagtgcttcatgtgcagtgactgcggcctgaacctcaagcagcgtggttacttctttctggacgagcggctctactgtgagagccacgccaaggcgcgcgtgaagccgcccgagggctacgacgtggtggcggtgtaccccaatgccaaggtggaactcgtctgagctgggaccctgctcccacgcctgcttcttaaggtccctgctcggccggtgtaaatatgtttcaccctgtccctctaataaagctcctctgctccaccttgaacc

SEQ ID NO: 7205 - DNA, 9743 bp, Homo sapiens
cttgtctgctcgcaggtccatgctggcagcaaggctgcattggctgccctgtgcccaggagacctgatccaggccatcaatggtgagagcacagagctcatgacacacctggaggcacagaaccgcatcaagggctgccacgatcacctcacactgtctgtgagcaggtatgcacaggtgggctgggctgggaggatggaaggacgaggtgggcagttatgggcagctggcattttgggtgagcccagcttcacacagcctctctgcctcagctcctgggtgccccatccaggaacagtcccaaggagtagcactttcatgggggcctggcagatactgtttagagttatagcttaagaagggaagaaatccccttttaacttagactagaagtgtgttggggcacttatggcaagtgttgcaggcaactgaaataagaccttgaatagcctctggggcatttgtttcattcctttcccctcccctgagtgaccagcttgatgaccatttcaaagtagtttcttgtgcaacacctcatttaaccctcatttaccaacttaaaaaagggctactatagtccccacttcacagatgagacaagtgaggctcagaaaggttagatggtgcttaaagtcacacagagagggagtggggtagcaaaatttgattttggggctctctcctaagactacagacccttaacttggctgctgactactcctaccagcccctcagctgccctgccacagctgtcgccaccgtggcccacacctctgccctggttaaatctggatttgggaaaagttcccactaaggactgtgtaatgctttgcagccaatcaagaaggggaggacagggggttaccaagcccatctgtgctccataaatgatcctgggatagaaggtccactgggggtgggggtggggggacccagccttgctcaggtcctgggtctttactcagctctgagaagcagttggcctaagcctggctgagtgggatctccccactcccctgcccaccttgatccacagaagtcgggcataacttatcagctctgccgtgttcactgctgaggggatttccatgaccccctgtggaagtacgtgggcaaagcctccccaaaccacaacacagctaaccatgcctctgagctggcagggtgggaggtaagccactggcttggagcctttaaacatggtggagaggcctgtgaggtcagccctgtttgtgcttggccctggcacacggtgaggatgctccatctttggagttcagcaaagctggtcctcatccagcctctggagccttaggtgcccagatgacctctatgagcccggggtttcctttcccattaacggatcacattcatcaccctcctccagactgagatacaggctggatgggggaaatgtcagcattgctctgcccatgagtgacctctgaagcttccccacttggctgggatcctggcccctgactcacctccagccttgactctgtgtggctgaacaagggcagccctagtggtagtggagtagtggggaggagtgcctcagagggggcctgagtcaggagcttctcagagtgtatgatgtcagcggagggtggtggggtggaggtccccctccttctttccttccttccttccttccttccccagtcctttgttccaaaccaggcatggatggagccagaggtccactgacctgttccactctgagcatttcagccccaaaatgtcactggccatggagcagatgagagcacattctctactattacagagctgggttgagaattatgctcataattttacccataaaagagagagagggagagataactatgctgtgctccagaaagtgatttaatctcttgagcccataacttcctcaaccaaaaatatggaccatcttgcgctctggacattgagtgatgatgtaccaggcctgctcagtcagagtgaaaacctgagtcctgccctgcagccccctcacacatgcagactctgggggatcaagacatgagggccaccttgactttctgagccaacatttcttctcctggacacttgcccacctgcaagctttctgactctgctccctatcttgcctgctatgccaggacctatgcctggcccccaacgacactcctccccgcccccaccacacacacccacacagcaagggctctgcagtaaatcagcctgttgagctggctggagtgagctaccctgtgctctcactcccagggttctaccccagaccagcttccctatctgccctcttgtgtacagagagctctaatccccccaccaactcccccacagaatgaaaagtgtatcaaaggcccagcttccccactgggcttcttttgctttgagcccaaagccaggcatccaacaatccaagcaaaatcacacttcctgggcatgttctataggtccaggacctttctgacatcaactccaacactgaggccactgatagagtccctgttgtccatcacatgtggcccaaggtacctttgcacagcctaccctttgcctgtcattttgtttaaagagcccagcctgggatgggggttgacacatgattaagcccttcattctgatctgatgcattgggccacattaatggctctgggtactttgtgcccttcgaccttagacgtcaggcttgtactgctcttctgggcagaacttcagggaagttgaaggccaaatagccacacaagatgtcccagctttatcccagaggagttctgagtagatagaggccacagcttagagctgtgagttagggtacccacttgggagcctggttgagggggctagagacagggactatggggctggtgttgccctggggcagcagagctctaataccaaaggcctggagtagagaggtagcctccaagggactaaggaatgggcagaggcgaggaagtgcagagtgagtatggaccataggcatagatagattattaaaaccctcaactgaagggggcagaagaggcaggggcaagctgctaggtcagtaatgagaccttgagaagcctcaggaggcttcgtggggtgagttggagggcattattcccctttggtctaaccagcctcacctcatacccacctgccagtccagggtccatgccccttcctggcctgccttctcacagggctactgagtgacagggctgggccttaggcacgtagcctctcggcctgcctgccctgcttatggcaggtttatgatgtttttctccctcctgagtggtgtttggcttttggtttctatggcgaagcaggaatttcctaatggcctgtttcccatctgggctgggcagactcagtgatgactctgccggcagcagcagcaggaggaaagacacacccctcagagcctccattccacctaccccagagccgacggacgcctgaccccacaccccaccagaggctgtagatgcccagaggatgcgtggataggcttctagctggtcaatgtgtgaggcctggcttgcagtgctataagctgggcctctttgagctgagcttctgtaggccacgaagagggtggaagattagggaagacacagggcttctcctgcagcctctccaggaaccagactagagagggattgggcagccgatggggacagaagcatatagccctaccccaggaggatggcagctagagttgtggctcattgccacaacagtcaccattgtggtacaggggaaagcactggagtggtgttcttctacctgcagggcacagcccagagcccagcccctcttgatcctggctcccaggcatggtgggcgtggtaggagacatatctgaccatcacaatttctgccacaggcctgagggtaggagctggcccagtgcccctgatgacagcaaggctcaggcacacaggatccacatcgatcctgagatccaggtatgtacagacactgcctggcctggcctggctcagagtgagcccagggcagaggggccagcatgcaggttcacctgcactgaatgtcctcactggggctctcagatacccaagacagagactgaagcagaagttttctctggaccacatccataccccatcccatgttcctcagatgatgagcacctggtgtgggctctgtctctactccgggcaatcctggattctggaccaaggtgcctatgatgtccaggatctgggctaggccttggtttgcggctatcacacagccagctggagttcactctggtgctcagtgatgccagaccagaaagaagtcactgtgcttgcagcgggggagattggtggcagtctcaggctgtggagtgacctcaggctatgggacactcctctgagtgccctatccaagcctgaagttctctcctggccatcctgtggtgcttctagcagaacttaggctgcaggcctgtctgcccagtcacctttctgtgtgtgatagaagtcatatctctggtcctgtcctcaagaagagtgagggggtcaggctattctagggccttgttttgccatggcataaggagtagccaagtggggatgactgaggtatccagagccatctctgggccacagagtttgggcaaggagactgggatggtctgtgatggagccagaaccatgggacccagcatgtgggaccattgcctcctgggcctgcctttgtccaccctctcaacatgaaagaaaaggggccaaggcagggagaggcttcactgaaccagagggaaggatgtgccccagcttctccctcactatctaccccaatcccatcttgctctattccctaccctgcctggctggcatccctggagccagatgcttaccaccttccaggcagtgcccattctggcaggggaaaggcacttagaagttctgggctaggggaagccaggggccaaaggagcccagagtagtcacatgactcagacaaggagtcaaggagtgcttcctggaggaaggggtattgaagccaagacctgaagggctaggaatggtaaggcaggcaaaggggtatagggagaggaagtgtggcccagaggtgaggtcttgcaccacaagttcagagaaaagaaaggtccaggggaagggaggaccaagatggaaggagtgagaggacagaggtgagagatgaggtggtggagcagggccacagaaaggctcttgggcttctctatcctgacctcagctgttcttacagggattcatggccacatctgtgtctcagaaacttgctctgatggccccatggaccccagaccttaggggtaggggtacatgttgccatagacaaatgagccaggttttgccacaggccaggcagaggggagcagcagggtgtgggcctcaagctcatgcatgaggcccagcctccctcagaggtagcagtgccaggatgacgtggtggggagggggttcagtcttccaggagaggctcagggccggtgggcctgggaggctggcgactgtagagcagctccccctgcccccacacttgttctcattgactcccttgaagaccaggctgccagtggctcagactggagaaggagggagtttccacaagcaccagggcagcccctcagctgctgccccacttttgtacttaaaaggtcatgggctccatgggtggtgacaaaaacacccccaccccacccctgcagggctgagtccttgctaacacagacacagggcccattgtccccatgctgctcccaccctctgcctgagtgggggtgttggggagggggtggagctagctggagccatcgaggaggaggaaaccacagttggccctaggaccagcacaaggtgccctggcacacatccccgagtgggatgggacagggccagctggaacttcaggcccaccttccctgtggggcgataggagaacctccttctctcaggcctcttgtgggaacacaggaggcacttggcctagcccagggtggaggaaggatagtaacttattactatccttctgggttagtagggttttctggaaggagtggcaattatgctcagaaccaggtgatggggagaagcaagtcaggtggagcaggcagtccttgcacactcagcctgtcctccccagaccagcagagagctagaactgagcctctaggagatggcacctgctcatctggactcagcgcctgcctccatccaagttgagtgtcccaaagcaggtagttacccccatcctgctgaaaaatccactgaggcttcaacaaccaagtgggcagcaggctggttctcagagcagaggagcatatggtacgaggtgtaccacccacagagggggaaaatacaggactgggggcccaggaattcccctgacagccattcatccaacaagtatgtgctttatgccaggcactatgcaattgtcttatttcatctccacaaggaacctgatgtggaaagcatcacattccccagctcatagataaagaaacaggttcagagaggtgaagagacttgcccagttaggggataaccctgggactcaaactaaaactgaggtagccatgtgtgtcctagccacagagttcaggcctagagaggcagctgcatgggtgaccgtgggaggggcagtggctctgatggccctgcagtggacccctgcaccctgctgggtaggggtgagtgagggcctccttcctcccagtcccagtccctccaactcctccctcccaccaaagcctctgcccggaggctgagccccacccccactggccacagcccatctggtccccattagaggtcagccctgcctgcatgcttgcccgacagacacacgtgtgagagcgctcacgtttctcaggggcttttgttgggcctgatgtggataggggttttcctgttgctgctgcattgatgggggccacctgggcagcaagaccctcctgtttgtctgttggggtgggggaaatggaggggggcccacccaactgctggtctgcctgttccccaggttcccaccctacaaaaagcagggggtactcagggcagaaccccacaggctcaactatgcctcagagcttcctaagtccaaaccagggttcttcccactacgataggcatcctttcctgtccacactgggctctctgaccacactgtagagcagaggaggtttacacgtcactcccaggctgaggctaagacctaccccatggcctggcctcagacatcatcctaaaatcaggctgctctggctactagcccagtctcagctatggaggccactatggccattcccagggtgaccagtgctggctccaagtctctgtaaccatgcgcatgtagttagttgtatgtagggagattggtaggtgcatatgtgttgtccttatgtgtgtgtgtgtgtctttaaagcataattgtgagagtgtgcatgcccctgtttacattgctgtggggtgcttgtgtgcacttgcaagctgggaactgcacagctctggactctgcagggacaaagatccccagtccccactcagacccccacacacagagatactgccctctcctcatggctgagggggcaggttcaggacactcccacccaaaatgtttcagccatgggcaccaggctggctgtggggtagtggggcagagagccttgagccctagcctggtctctgcccctcatctgctgtgcctgcagaaggctactcattgtggcctggaaagcaggaaatgggggacaggtgtaggcccagaaggggctgacctcacaatggcactcttgagcctcagcctgcccaaagggccttggacacatgacagtcaaggaccctttctgactgtaggacaggagttacgttttttgagttcccagccatgggcctacccagtacccaccacagttcaggaaggtgagaaggcttggcaccagggccacctctgccaggaggccacatactctgctgtagccacacagaccttaggcttcttgggataggcctgccccagtactgtcccttcctgagtggtggtgggcagaaccactgcagggctcacaagcccaggctgagtctcagctgcccaggtttttgtgtctgactttccaaggacgtttctcatttctgcaggggcataaccagtccccaggcccagcccttccccagaaatcccttccctggctgagcaccacaggccagagatgccgaagcagaggaagccaactgacatccaccacctggcacagcacagcagggtgggggtggggtgaacaaggaatggctggaggccagagggtctcccagtgccttaggcctctctctaataggacggcagcccaacaaccagcaggcggccctcaggcaccgggactgggccagaagatggcagaccaagcctgggatctccatatggacaaccccctcgctttccagtccctcacaatggcagcagcgaggccaccctgccagcccagatgagcaccctgcatgtgtctccaccccccaggtagcacagagatgccttcggtgccatgcccagaacccatcttaacccttgatccctcaaatctcacccagtcccactctgacccctgacacttgatccttgggtcttagctggttgcattctgactcataagccttaccagaccccaagtccacagggtgaaggctggaactgcatcccttcctcctctatttctttctccctcccagcgctgacccagccagaggcctcccgcggagccgggactgcagagtcgacctgggctccgaggtgtacaggatgctgcgggagccagccgagcccgtggccgcggagcccaagcagtcaggctccttccgctacttgcagggcatgctagaggccggcgagggcggtaagacgcctgccacctgtccccatctgccttcccactccctgcagtgcccaggttgccccctagcgaccccacgtcccgcctcgcagtcacctgccctcttcggtctctgcggcccggtcccacgcccttgctacaaccttgctacgccctggcttcccgattccctctccaccccctgtcgctgcccctcaccccacgcccgccaaacccgttccccagtctcgggtgccgatggcccgtctggcgcccaaccaaacaccccgcagaaatggagttctgacctcctcaccccgttcatgccacctacgctccgggtttcaggggattggcccgggcctggcggcccccggaacctcaagcccacggccagcaagctgggcgctccgctgagcggcctgcaggggctgcccgagtgcacgcgctgcggccacggcatcgtgtgagtaaccgcccccgctgcccctcccggaccctagccttccagggccctggatgcgggcgcagtcgtgaacccatcagtcactcgacgctgtcctgtctcgttccccccatcaggggcaccatcgtcaaggcacgggacaagctctaccatcccgagtgcttcatgtgcagtgactgcggcctgaacctcaagcagcgtggttacttctttctggacgagcggctctactgtgagagccacgccaaggcgcgcgtgaagccgcccgagggctacgacgtggtggcggtgtaccccaatgccaaggtggaactcgtctgagctgggaccctgctcccacgcctgcttcttaaggtccctgctcggccggtgtaaatatgtttcaccctgtccctctaataaagctcctctgctccaccttgaacc

SEQ ID NO: 7206 - DNA, 1321 bp, Homo sapiens
caagccggagcgtggcgcccgtcgggaggttgcagagttcctggagctcacagctgagcccgaaggaagtcgccctcgatgggcaggaagcgggacccaggcacgcccgcgcggtcgcgtccagatctgccgtcctccgacaggcgcaggcctgctgcgccttcgccacacaccgccactctgggcctggactccgtagttacgccgggatatctctgggcatacaaccacctccccttccccacagtcttttcatctccacccgaccccttgctaggagcagcttctagttgcagctcaagacccgcgagttcaccctccgcgccaagcacccaactcccggctctgcctacagtcacccacagacctaatgatcgactaagcgccgtaatggcccgagatgacaccaggagactcccttgctgtgcgcctccggaagacgcggaacgtagcccctttctcacactcctgggacacaaaaatacccgacaactcaaagtcgccaaaccacatcttttcatgctttgaagacttctgcccaaggctgtggcaggagtatgtccaactgtgatttgggattctttttaaacatcgaatcaaagggaagaggggagggattcgcaactaaatggtagttgttttcaagcaagtctttacgtagccccaaacctactctagtattcggtgattcagccccaaaacatctctgcctgcctttatgttcggatctcactccattatttgtcagcaccaagtactaaacccacaaagcgatcgctgtacgggacaccaaacccatacctgcccgtcccctaccttccaggcaaccagtgtcaatctcctcactatacataattcccaacatccctgcccgaagtgaggagaacggtaatttaaataatacagcgggggaggagaggacacactgtttttgaaagactgtaagcattctgctgttccactctgcgtccttacacttgctgagcactgacaccaaatttaaatggcgttccttcaaaactgatgtaattgtaaagagctgtaaagggcaatgacctcaagtggatgttttttcccaggtaccctacaaggtttgcacaaagcaagaaagcatcatgtaaccgaaatgctgaaaagtatagatgctgcaaaacctcattctgagactgagaactatgaatagtcagtgtatttccttctgcggtgcagaaaaagaacaaccaaaaagaaagcaacaaggggagatgttatttattttaatgacaccaaaactaccaatcctagcaatttaataaattaaaatcatagtcctttaaatgta

SEQ ID NO: 7207 - DNA, 319 bp, Homo sapiens
caaatataggtagtggtggcagttcacatagagaaatacatgtgaagcaagctggacaacattcttattactctgctatgaaacctatcagaaacatggacaagaaaccttgaaaagcacctgtcaaatggctttgaagaagtgatgccaccatctctagccataataaagaaacagaatcacctagtattggatgtatttcaataataaatagagtggtgtcttttccataattgtgttaaagaacatttcttttccattcaatttgtttattaaactcctatgccaggcattgttgaaaatacaaaattaaataaat

SEQ ID NO: 7208 - DNA, 310 bp, Homo sapiens
tccatcatgtctaagatgatctcaattgtgagatgcatcaccattactgtgtgtgacattaaaaaaaagtgctgctgattaagctccaacctgacaatgatgaagaaacataacccaaccttagagatgttaaatttcaaaaaaaaaaatgtgtcttagatacaacgaaatatggtaaaggtttccacacagcgttctgttcttgaaataatcactcaagccctgtaaagaccaatgtggaagttgtagcgctgcccctgagcacagttctcagagtgtgagtggagggagagagtaaggtaggtgtcaa

SEQ ID NO: 7209 - DNA, 250 bp, Homo sapiens
gtggctcacatctgtaattccagcactttgggaggccaaggcgggcagatcacaaggtcaggagattgagaccttcctggctaacacagtgaaaccccgtctctactaaaaatacaaaaaaattagccgggcgtggtggcgggcgcctgtagtcccagctactcgggaggctgaggcaggagaatggtgtgaacctgggaggcggagattgcagtgagcccagatggtgccactgcactccagcctgggt

SEQ ID NO: 7210 - DNA, 23934 bp, Homo sapiens
ctccgctttcgcgggggctgctggggcgtaggtgtcggggacgcgcgcacgggcgcgcgcagctgttgacgcgcttcttagctggtgcgcgccggagcccaaattccaagtggaaactgcaggcgcacgagggaggaacgcgtggagcatgaaaaggcagggggcctcctctgagcgaaaacgagcgcggataccgtccgggaaggccggtgcggaaggtggcgggggaggggacggtcggccgaaggctccccggggcgggccggcgggagtcgtagtcagtggtgatttcttctggagtcgtttcctcagctccttccagccccttgggcggcaccttctatctttgaggcgttaaaggtgtggaaacggagggcgtgacgaggggcaggtagcgagaatggctcagctgtggagccaaggttcgagtcccggggtcccctcataacggccctgcgaccttgtgcaagttggttaacttcagcttcacgttttttccgtcgccacacgaggatgccagtaccgcccgcaccagcagccagtactccgctgggatagttaattgtcgagcgcggagcccagttcctaacctgcagttacctgtagctgccacggcggggacggggcttggtccccaaagtcacgcagctaccaagtggccgagcttgtggctgctccaagacccgagttcttcctgagtgccagggtagcatggcatggcaggtgccagagaatttggcaagtccctcttcctccgtgaagaggaaccttcctaaaagttatcaagaatcctcaaagattttttctttatgtggattacatctatctattttgactgtattagaaattaaaacaaatttttttttgggaggccgagggggacagatcatctgagctcaggagttcgagaccagcctggccagcatggtgaaaccccgtctctactaaaaatacaaaaattagctgggcatggtggcaggcgcctgtaataccagttactcgggaggctgaggcaggagaatcacttgaacccgggaggcggaggttgcagtaagccgagatcgcgccactgcactccaccctgggcgacagagcgagactccgtctcaaaaaaataaaaataaaattaaaacaaaattttaaaatattgattagaaaataaccatagtaaacccattacatattgacataatatttttttgaaaaagaaatattcctaaacaacaacaacaaaaaaagcaaaagagtggaaatatatttttgcaagtttcttcagtatatcttaatggaagacagctggattctcatgcccgctgcttcattcagtctaacatgtcaagtagcctcttgaaaacgcctcttcacggaggttgcagtaagccgagatcgcgccaatgcactccatcttgggtgacagagtgagactctgcctcaaaaaagaaaacgcctctcacttgtgagagaattaaagtgaaaaagtcaaataaagtgttagaattattaagaaaacggttgtagccctgcagactctgaaaagtctcagaggctcccaaagctctctggactactacactttgagaactgctgctgcttctcctttgatcctataactttgttgcttgggacaactgccttgctctgccttctgtcatagccttttttatacatctctccatcttctcctgcctagggtcctttcttgtgtgaggcaaatagtcccccggcagcatcagcatcggccagtgccactgatctgacagctggtctggtagctaccaggaaactcatggagttaataatgcagagctgttggttaagagcatagattgacacttaaccctttcacagtttgggactgatagtattttttttttttttttttttttgagacggagtctggctcttgtcgcccaggctggagtgcagtggcctgatctcagctcactgcaacctccacctcccaggttcaagcaattctcctgcctcagcctcctgaatagctgggattacaggcgcccgccaccacgcccggctaatttatatacttttagtagagatggggtttcgccatgttggccaggctggtctcaaaatcctgacctcagatccgcccaccttggcctcccaaagtactgggattacaggcgtgagccaccgcgccggacagggactgatagtcttaaataagtaaggcaattgcagtttgatgttagcagatgataggtttttgttttatttgtttttcaaagtaaaaattgcttttttaaattataaaagcaatattgggtagaaaaaataaagcaataaagaaaagtaaaaagaagaaaataaaaataatttcaaatcacaccccaccagaagtgaccattaccagtatgtgaggaacattctagtaagtgtcattacatgaagtgtgcattgtttcgttcatttttttaaattatgtgctcccggaaaaaaactcaaaactctgtttacatcacactttgtaatataaatacattaattttgttgtaattattcagcttttagtaaatatttgattattgtgtaccatggtagatactgtgcttggtgtgggtgatgataaagatttctcacataaagaccttacttaggaggccagacgtggtggctcatgcctataatcccagcactttgggaggccgaggctggcagatcgcttgagtgcaggagtttgagaccagcatgggcaacatggcgaaaccccatctctacaaaaaatacaaaattaaccaggtgttgtggcacatacctgtagtcccagctactgaggaggctgaggcacaagaattgcttgagcctgggaggcggaggttgcagtgagccgagatcatgccactgcactctagcctgggcgacagagcaagactctgtatcaaaaaaaaaaaaaaaaaaaaaaaaacaaacttaggaactctaagtcaagtagaagtgatcagatatttatctgcataaataataaaaggtagaaagtaattcatattttaagaaggaacaattggggtttcataactcatgaagagttaaatgagttcaaaagagggacataaaattttctactttgggagacagaaaaaatcatggaaatgttccttgaaaaattttattcagagatgaagccagaaggaactctgggttgaggagaaggcattggggagccagcggtagggactggagagatctggaagcataagaaggaatgagacagagtatcactctgtcacccaggctggagtgcagtagcacaatcttggctcactgcaacctccacctcctgggttcaagcgattctcatgcctcagcctcccaagtagctgggattacaggcgcatgccacgatgcctggctaatttttgtatttttagtagagacagggttttaccatgttggccaggctgatctccaattcctgacctcatgtgatccacccacctcggcctcccaaagtgctgggattacaggcatgagccatcacacccggccagataactaatactttttgattcttgagactatatactttacatgaattatctaatttaatcctcactactctgaggtacatactaaaatctaccttgttttatagaaaacttaagtaactaatctaggatctcacactaaatagttggtgggacatggatttgaagtctgtcctgcttttaaacctatattccttataaagaagtttaaatatattctgcaggcattgagaagcattgtaagaatctcagctggaatgtgatgatgaggtctatgttttaggaagattaatttggcattcgatagacattttcctcagtataattttttatacatctgtctgtgtacctatttcagtctataggcatcaattcaataattaatgtgatattttattgcattcatgggccctagtgtacttatctattacctgttattggacatttgcattttggcagcagaatgtaaaccctttgtggtaaattggtctggatggatagaacctttatgaactcttaccattctccatgtattttaggagcagcaaatggatttctcatggaagtttgtgttgattcagtggaatcagctgtgaatgcagaaagaggaggtaagagaaatcagatagtgaatgaccgttggctacccttttaagagtctgaaaattaatcctgtgtgcttatctcagaagcccttgtgatctctaagcatccctcataatgctttcagaaacaaccaattagaaaccctactggaaaattatgatctagtctctccctctccccaagtgggtcacattttaagtcaagtgtcgacaatagtacttactcaatgacttgattttttattgaacttagcaaaattttaatttttttaaaccattaacttaaagatgacttcagagacttcatcatgaggaattttatcttttttacttttgaacattatctatttttccctcaaagtttctgttgtactctgaacctgttttaatgggaagcacagacatttccatcatctcaggttcagaaaaattaaaaaaaaattttattatggaaaaataaacatatacaaaagtagagcaaataggataatgaagccccatgtatgcatcactcatcttcacccattttcaacacatggccagtttttcatttatttcaggggtcaataaactttttctgtgaagagctgcatagtatatatattttcagccttgctggacacatttgatctttatcacttattttatttttaaatcttttgaaaatgtaaacatcagccgggtgcagtggcttacacctgtaatcccagtaattggagaggctgaggctgccagatcacttgagctcatgagttcgacaccagcccaggcaacatggcaaaaccctgtctcaacaaaaaatagaaaaattagccaagcgtggtggtgagcacctgtagtcccagctacttgggaggctaaggtgggaggatcacttgagtccaggaggcagaggctgaagtgagccagtcacaccactgcactctagcctgggtgacacagccagatcttgtctaaaaaaaaaaaaaaagttaaaaaaatccttcttactttggcaatagaaaagaatgaagtactgatacatgctataatatagatgaatcttgaaatattattctaagtgaaagaaaccagtggaagaaaatacaacatatgattccatttatatatatccaaaataggtaagtttatgtagacagaaagtagattaatagttgcttagggctgagaggcatgagaagggtaggtgactgctaaagggtgtagggttgttttggggatgatgaaaatgttctaaaattacttgtggagatggttgcaaaactctgtgtatatactaaagagtactgaattgtacacttttaaatgggtgaattgtattagtgaattatatgtccataaagctgttgtttttcaaaaagaatacaaaaacattcttagtttgcaggccatagccaaaacaagctatgtgcccatagcccacatgccatggtttgctgacccctgatttatagtcctaccttcctctcccaacctcagattactttgaagcaaatcccagacatcatgttaattttaaatatttcagtgtgtgtctctaaaaaataaagactcttgccgggcgcggtggctcacacctgtaatcccagcactttgggaggccgaggcgggcggatcacctgaggtcgggagttcgagaccagcctcaacatggagaaaccccgtctctactaaaaaatacaaaattagctgggcgtggtagtgcatgcctgtaatcccagctactcgggaagctgaggcaggagaattgcttgaacctgggaggcggaggttgcgtgagccgagatcacgccattgcactccagcctgggcaataagagcaaaactccgtctcaaaaaaaaaaaaaataaggactctttttttgttgtttaagttctttattgttttcaaaggcctagtatgcatacatatataagaaatccataaataatgtggaattattaatgtatattgtttaagataaggtcccttttaaagaacaaaacaccacaatgtcactaacacacctttaaaaaaatcatttcttaatatcgtcaaataacccagttttcagatttctccagttgactcatacagggtgtgtgtgtgtgtgtgtgtgtgtgtgtgtgtgtgtgtacagttctttgaatcaagagccaaacatttcatttgttttatatgcctcttaagtctctttaaatctgtaagtttctcctgcttttttctttaattctttgtttactttcttaagatttatttgttaagcaactgtgatattcatcttttagagtatcccatactctcaattttgctaattatatgtgtgatatcgtttaacatagtcctctgaccactgtatttcctataaaggtagttagcccagaggcctaatcagattcagatttcagttttgacaaaatttatttatagataacattatatacttcctgttgcatcacatcaggaggacataacatgttggtttttttctgtttttgtgatattaagattgaacagggagttcaggtattgccagcctaatctatccttaaggttttctgtcagcttttcacctaataaatttagcaacccatattttagtaggggttgcaaaatggtgacatttatttttcacttatgaactagaatagttctgtaaagaactttccctcatcctctgtttggttatgctgaagtatggtttgtataagaaaggcagaataaatgcttgcttattttcccttatttattataatactttttagaataatgaatttgttctctgtcttcccttgaattgttttgtcattatgaatgtagatttagatatattttgtgtgttttaatccattgtagttattctgcttattgatgaacaaaatgttctatctttggctagtgagagcttcttcaaactggttcctgagatcttttgatgtgaccttggtagcctaataattcttttggtttcagcattttcttattcttgaaattatcttggtttagctactcaaaagtagctttgtgttttttaaagcttagaataataaagacccttttgggaaatattatgttattttcttatcaacaaagactcagtattccactatagtcagttttaagaaacatctttattctatgttactttcctgtacatagagaggcaaccctataatacaaaaatttaagagaactagcttaactttaattaatttttaaatttgagtatgagtaacacaatgtgggctgcagagtatagctgagttaaaaacagagttttactctagctttataatttgatttctctgagatgatttctaagactgttctatatttggaaaaaatatatataaacaggttgctgtttaataacagcttattttttaaaaatgtgttgagcaatgcttttatattacaggtgctgatcggattgaattatgttctggtttatcagaggggggaactacacccagcatgggtaagtgtccatttttcccaggttttctgattggagttcatagagcctggaagcaactgataatcagtttcgttggggtcctttactaatgtcatgttaactatgttatggatgttgtatcagaaatgtttatgattgtaaaaaaatcaaagatttgatcaaacatatttctttctcacatcaaaaagttgaaaggtaggtaggtaattgttaataccggttcagctgctctgtagtaacatcaaggattaggcttttataaaatctttccatgctggcatccttagtatattgaaatcccctcctggtctttgtgctattgttgtcatatattttactcatacatatatcaaaaactccatgctgtattgttagttttgtttgaagagtcaattatcttttgttaaataagagatttaaataataagaaaaaaatcatatatttacccacatgcaactaccatttctggtgttctttattcctttgtgtagatcccgtatttctgtctggtttcattttcattctgcctgaagtactttctttaactttttttgttaaaaagtatgctagtgattcattccttcagcttttatatgtctaaaatagctttttccttcatttttgaaaggtatttttgctgggtatagaattctaggttgacaggttttttttttctttgaagatgtttttccattgtcgtcttgcttgtattgtttctgacaaaaagctatcatccatatctttgtttttctctatgtaatatgtctcttttttctacctacttttaagatttttttattattggttttgaacaattttcttatggtgtacctgagtatagttttttcatgtttcttggacctgtgcatttatacttctcatcacatttggaaaattttcagcttgcagcttgttctccactccctcctttagagacttaagctattcttacattagactacttgaaattgtcccaaaagtcactgatgaacttctctatttaaaagaaaatctcctttctgtgttttcattttgcatagttgctattgttttgtccttgagcttactgaccttttcttctgcactatctaatctgctattagtctctcctggtatgttttcatctcatacattgtagtcttcatctgtagaaatttgagtctttttatgtctctgatgtctcttaacttttttgaacatgtggaataaagttatgatagctgttataatgaccttgtctgcgaattctaacatctatatcagttctgggtttgtttcatttgatttatcatctaataatatatcttattttcctgccttgtaattttttattggatgcaagacattgtgaattttactttattggttactagacatttttgaattcctacaaatgttccaaaacagtttggtccttttgggtcttgcttttaagatttgctgggcaagtctggagcagtggttaatacagagctaattattccttactactgagtcaggattcttctgtgaactctaccctgtgaccatgaattttgaaattttcctgtctggctggtggaataggcattattcacagcttggtatgaatgacaggcacattatttctaatcctttttattggttctgtcccaggccttgcgtagtttctttgcatgcatgcaccggtcagtactcagctgaatattaaaggaggttctctgcagacctccagagttatctgtcttcctttcttctttcattccttcctttcctttcttttctttccttctccttttctctctctttgctttccttccttcctttttttcttttgacagggtctcacctgttgtccaggcttgactgaagtggtgtgaccatagctccctacagcctcaaactcctgggctcaagcaattgtcctgcctcagcctctcaagtagctaggattacaggcatatgccaccatgtccagctacatttgtttgtttgtttgtttggtagagatggagtctcaccattttacccagactggtcttgaactccttgcctcaggcaatccacccatctcagcctcccaaagcactgggattacaggcatgagccaccgtaccaagcctatcttttttaaaaaaaatcctttttttaaaccattgagatagtctttgctactccagtgttatctttctgtcctccctgtactgtctcctataaactctagctacttcagtcttcctgaactctaagctttgtctccttaactcagggaattgttttggctccatgtgggtcccccatccctgtgctttggcctagaaactctcaaggcagtaaattgggtcaatcagaattgacttactaacttcattgtttaccattttcaaggatcattgcccttcactgcttaatgtccagtgtcttgcaaaccactgtttcatatattttgtctgtttttttattattattattattataggtgggagggtaaatccagtcactgttaccctgtcttggccaaaagcagaagtctgtgtatgaattgtggtctcctaagttatgctactctgaggttgataatagcattatttaatgtaaaaagtttgtatacacaacagccctttggaatcttcacatgaaaagagggcattcctggccattctaaaatccctagagcatgtctgtaaatttgagtacagtctgtttttgtaacaccaattatgattcattgcttagtattggacaactgctatcctatgcaaaattggagttcttttagcaagaaaaaagaaagaaattcatactgggtaaacaactgatggggcctgtcacagccttatactattgatggtttatgagctagccacttattatggcatatttaggtacttttatgcatagatctctgcataaaatcacaaataagtagaactttgctccctttcacgtatcttgtttaaaaaaaaaaaaaaaaggttttgctaaatgtctttgcccattaaaggaatatgaactttgaagctatttaaccatctctccagtaggttttaaatagagctgtaatgaattagaaagaagaaattggatcttggggaataatgtactggcagaacatcgagcctggtagttattgcactttcaaatgtcacctaccaataaaagggttctgagtcataaggatttttgttgagtcaactgacaagtgcttttaaattgtagcatcttctgttttctaaatcgttctatttaaccctttgctattacttaccttctaccatatatacatttttcttctcagtgtctgtcctaccttttagagccatctttgtctggtaaatgaccaataatatatcattggcttttagctcacatttgaattttaatctgctttcttttcttgtaggtgtccttcaagtagtgaagcagagtgttcagatcccagtttttgtgatgattcggccacggggaggtgattttttgtattcagatcgtgaaattgaggtgatgaaggctgacattcgtcttgccaagctttatggtgctgatggtttggtttttggggcattgactgaagatggacacattgacaaagagctgtgtatgtcccttatgggtaagaatttgtatctaagacgtaaaagcctctaatgataattgtatttatgctcacaatatagaaaaacaacatcacaaaactgactttgcggtcatagctacagacacttatactaacctaagtatttcaaatagtagttatttagatgtttggggtggggtgtatgtgtggcaaagccttcttaactctcctcaattgctatagattaggctccgctactgttcccatagaatagaaatttaagggaaatttaccatggttcctttaaccactgcaccaagaacttcaaaagtattatagttggtgaggatggaccaccaagttggaagatgcaaagaggacagaagcaaactacctatgttactaaaccaaagtacttattgaatgacctcagagggacaagtattagatgtaatgctgcccttatagttgtcagattaaatggttttcatttggtgataagccacgaccatttttttgtataaaaatcagagatttgtggaaagataagacttttgaatttgtaaggctgccattttattattatgtcagtttactgtcttgttaggcgaagaaagtattaaaaagtttcagctaacatggagaattctatatatagtaatcagtgatgacatcttcattcatgttgttatatgactttctttttatagctatttgccgccctctgccagtcactttccaccgaggtgagtcattttcattttaaaagttctattgaacagtgttagttttctaatttcaacaactgccaccacctttttatggaacacaattctgtagtgttccaaggttaccaattggttttttagatcctaggactaaaagttataaaagtagagatgtgcaatttctagaaaatttgaagccttagttatgaaaagttgttaaaagtgggtgtaggtggtggtgggatataagagagcgagggagagagcaagtattgccttcaagtgtgtgtacctatcatagcattccaagcaagaatcctgagactcattttaactgagactgtattaggtcatgtgcaaccccaaaagaataaattgttgtggctggtgaaatgaaaggtactgtctatcttaagccaggcaaaaccatccctggggctagcagtgaggtggggtttcacagatagagacttcttaaggggagagaaagttgggtatctggagaagaattgggtcttattaggaagggagaaaggagaaacagatgcaatctagtgttgactatctagtcaatgaacagatgtccacaatagtatacaaaattatttttcattatagcttgtctgcaccacagtgattttttaatgtgatactttcttgtaaagaaatatttcctgtaaaaaatcaggtagatataattttttttgtttgtttgtttgagacggagtctcgctctgtcgcctaggctggagtgcagtcgcacgatccggctcactacaacctctgcctcccgggttcaagcagttctctgcctcagcctcccgagtagctgggattacaggcgcctgccaccatgcccagctaatttttggatttttagtagaaacagggtttcaccatcttggccaggctggtctttaactcctgacctcgtgatccacccgccttggtctcccaaagtgctgggattacaggcgtgagccaccacccctggccaaaaaatcaggtagttataatttctatactcttaggctacaccttggtaaaatggaagaacaagtatctattttgccttcagagagcactgccattgcacatgaaaagaagtctacagtcaaaaaaaatttttttacttcaaatttctgttctgttctttattccaataggtttaacaaaaatattttcatattttcaaaatttgtagaatttttgggttccacatttttctcactaatgtatttaatgagatatcataatatagttttagtggtgagaaggtgctgccaccaaaatagggaaatcctctgtggtagatttagttgcctacatacactaaagggtgaaatgaaggggcctgtcccagaggaccactaccacctaatccactgcaggctagagcttcaatgtcatgtagcagtatgagaaccaaagcagaagtagattttctgttttcagtttcctgataccactttactctttgagggctctgaggaggggagaaatctcttagaaagtaggatggggctgggcacagtggcttacccctataatcctaccactttgggagaccgaggtgggtggatcacaaggttaggagattgagaccatcctggccaacatggtgaaaccccgtctgtactaaaaatacaaaaattagctgggcgtggtggcgcatgcctgtaatcccagctactcgggaggctgaggcaggagaatcacttgaatcagggagtcagaggttgcagtgagccgagaccgtgccactgcactccagcctgggcgacagagcaagactgcatctcacaaacaaaaaaaagtaggttggaagtgaaacttcatatagtctgttgaaaacaactacccttatgctatgaaccttgagtatgtggggttaatagattaatccaaaatattagtcagtaatgagaatgtgagccaaggctttttctagaactggtgagtacagtgtttcattctacctagtccaatatttctgaagccttagaacagtttcccaaatttgactcacctgcctatcacatttaaaattttaccatatatgagtgctacctgtgcacatttttatttaatcattttctttaaataaaatcttaagtatgcacccataaaaaagaacaagatcatgtcctttgcagaggcatggatggagctggagaccattatccttagcaaactaacataagaacagaaaaccaaataccacatgttctcactcataagtgggagctaaatgatgagaacacatagacacatagaggggaacaacacacactggggcctttccgagggtggagggtgggaggacagagaggatcaggaaaaataactatgagtactaggcttaataccttggtgatgaaataatctgcacaacaaactcccaagacacgggtttatctgtataacaaacctgcacttgtacccctgaacttaaaaaaaagttaaaaaaaagtaaatttattttaaatagaaacttttataattactttatattgaaaacttttcatttcttatctgcatttaagtaaatatactatttaaatgtgtaccattattaaaatgattatgcacagtggtatgtagactgtggtgtgctgatgaactggctcctagaaaaaagagccctgatttgtagcatttttaaatttctgtggtttaaatactctaccttcactgaatttttttattattattaattaaatttttatttttcttttgagacaagtcttgctctgtcgtccaggctagggcacaatggtgcaattggctcactgcagtctcgaccccttaggctcaggtgatcctcccatctcagcctctcgagtagctgggactataggtgcacaccaccatgcccagataatttttgtattgtagatatggggtcttgccacattgcccaggctggtctcaaactcctgcgctcaagtgatctccccacctcggcctcccaaaatgccaagattataggcacgagccactgcacctggccctaccttcactaatttcaggctgccagtggattaacaatctgacttgcagaattcttgagtgtttaataattggcctttgtaagccagtacaagctaggtccagcatgccactgcatgtatactacattttgggaaactctgcgttagagatacctgttcaaaattcacatcagttttatttatttcagcctttgacatggttcatgatccaatggcagctctggagaccctcttaaccttgggatttgaacgcgtgttgaccagtggatgtgacagttcagcattagaagggctacccctaataaagcgactcattgagcaggtacgtggactttatctttttttcccctaagactctgttgtggttactcctgacattctgctgtttagccagtttgtgagactatatattactgactttgtggttactctgtaggaaaagcaagcaggcaataatgtatataattcttatttctttcacacaagcctttttaataaccaaggctttcaagatcaaattacatatagatagtgcctaaagatctgatctaacttggataagcacagcaaattttaccttttctctgccatgggcattgcagttttttttactttttatttttattttttagtttagatataaggtcttgctgtgttgcccaggctggtctcgaactcttgggctcaagccatctgccttccttgccctcccagagtgctgggattacaggcatgaggcactgcgcccagccagcattgcagttttaagccacatcttttcattgtcagcccatgtatattcaggggatcccatataaaattatcatctggaggtaaattccaaaactaaaattataatcttatttcttctcatctgtcaatataagaggaaatatatttttctattttatgagttttcctggtgagctagcatcatttgtagagcactcagaaggtgactttgtaattaatagtatgtgtatttttctgatgtcagtccagaggcattataagttagtgagtacagactttgagatgagagagttgagcgtttgagactcgggtttgatacttgctatgtgatgttgagcaggttaatagtctttaagcctctctttccccctgtgtgaaactgagatgagtttaatacttattttagagtttctcagaagattgctaaagatgggatgtgttagaggcttagcacagtggttggcatatactaggtcttaataatgttaggttctgttattactgctattattaataatactaatgttcctgtgtagacatctgcttattttcacttttctatagccatgaaaataattttcagaaatttctcctaaagatctgatgtgactttgctattctgggatgtaatggtttcacagacatttattaaatatatattagatgcaggacatttgtactgtgggggtaaccaagggctaagtgtctgtgtgtagtcactatccttacaatttagtgcagaacaggcacttctaatagagcaggcaattttaatagagctctatttttaaaaggtactataggagtacattggagaggaattaaccccaaatttggggaaatgaaggttggcaataattagaggaagcttcccagaagaaaagacatccagactgcagtgttttactcatttgaaggatgtttgggagttatctgtgtaaaagttgggggcagtgggagtgagggtgaaggggatgttggtggaattgttccatacaaaacaaatagtataagcaagggctataaacaaaagcaagcataacttaaaacactgaggaatggccagaatattgaatgtggacagaatgatatccagagccttgaaaaccttattaaagtatttattttcatggtgcagcggggaggcctaaagtgttttaaaatagaagagttgatgagtcaggtttccagttttaaaaggttactcagtaaggagtagcaaataagatataaccgccatagtaatgtattgcatttcaaaatgtgtatgtgtgtgtgtatgtctgttatttgtatgttaatctattggttagtaggaagagctactcaaatattctcatacattaacttcactgaagtaactacctagtagtgtaacatactagttaaagcataggctttgtgattggacaggtctgtgtttaaaccctggctttgacccttactaatagtgaccatggatacattacctagccatcctaaacctcagctttgctcttctgcaaagttaggataataatagcacctacctcctagaatagttgtgagggatttcttcaggttatagcacttagtaattgttctatattattaaatctgacatttagtgactgctctatattattaaatcactttgatagccttagataagcatatacttctaaataatcttgtatggaaggcgaaaagaaatggtagaattcatttctttaaaaatattatttctctatgttttggaaagccttgatttggaagaaacaggcaaatatgacttttttccattctgaagtgatttcagctttttagatagtcaatgttttgttttatggatgctttgttcaggccatttgagaatatgaagcatccttgttccatttatttccctaacaatttttaaattatttgaaatagccactcccctctttcactctcttgttaactttattttttgctttatttattcacttgctttattttttctttgttatacttattgctacctggaattttattgtataaatatccctgtgcattgtctcgtctttcttgaatgtgtaagctccatgagagcaggaactttctcttactcaccatgtcagggaggaaaaacttttcttctatcctcagggtttgttattgggggcctgcaaattaaactgactaaagacagattagcaggagtaaaaagagattttatcacataagtacatatatatgtaagtacatacagaagttcacaaagaaatatgacttagaattgggggcttatataccatcttaataggtgaaggggaaggagaaaatggcacttattgggggggaaaatgactttttggaaagataattttctagagacaaatttactatgctggacatcttacttgtccaagatcccaaagaaatagagaagatctagtaaaaattaaacattaatagtaatttttaaaatttaatatattctgacttatgtttctattctcactgccttattatcccattcaagagaaagatattaaaattcacttgtttttttttttcttttttcaggcaaaaggcaggattgtggtaatgccaggtatttatttatctatcaattcactagcataacactgaactatagtggaggaagagcaaaggaggcaggaaaatgtgagagagagtattagtacattacatattagtacatgatctttaaagagaagaatatatagtttgattaaaatgtttaaaactgggagatctgtgctagaatttaaaagtttagataagaaggaaaatattgtaataggcattagctcaaagaggagcaaataaggaagcagatagagattgaggtttctccatatttgctctcccattatatagaactttatgaattcagatgttcatctctggtgaggcacatcaaatttgatgctaatcatattttgtttaggacaaatgtcctaataaacagggtttaagcaaaggtttaggcaacatccttgggtaaaatataatactgtctcagttcctgaaaatctctgattgccaaattatttcttgtaaccagaatttaatcatatgatcctgatgataaccataagatcagttaagttcataatggctaactagaaatgaacagttggagcagtttttaaagaattagataatacaacatagaagagtgagacaaatgtaaagacaatcttaatttttttaattaagtttctcaaacatataaaaaagtagaaaatagcataatgaatactcatatgctcattccctagatttaacattttgccaaatttgtctcatcttttttctatcctgaggtattttattaaagttaaattgaaagcatcatggcattttatctttatttatctctaaaaagggtgggatgttaccataatgacaattccattatcacatctatcacaataaacatttaatactcaactttctccaattgtccccacaatggtttttatagctgatatgttcaaactaggatccagtcaaggaacaagcattacatttttggttatcttttgtttgtttgtttgtttttagagatgaggtcttgctatattggccaggctggacttgaactcttagcctcaagcgatcctcctgcctcagccacccaagtagctgggactacagttgcacgctgccatgcccagttctattatcttttaaaatatctttaatatagatgtttttccttttatttttcttgctttaaaaaaaagttacattattaagtttgggctgggcccagtggctcacgcctgtaatcccagcactttgggagtctgaggcagccagatcacctgaggtcaagagttcgagaccagcctggccaacatggtgaaatcctgtctctactaaaaatacaaaaattagccggccatggtggcatgtgcctgtaatcccagctacttgggaggctgaggcatgagcatcacttgaaccaaggaggcggaggttgcagtgtgctgagattgcaccactgcactccagcctgggtgacacagcaagactccgtctcaaaataaaataaaagtttggatcacttaccctgtaaaatgtcctactttctggatttatcagattatttcctcatgatattgtttagcttgttcctcgtgcctctgtatatcctataaactaatagttaaatcatgaggtttgaatagactctgcttaaatatttttggtcagaatacttcatgggtgattctgcatacttacatcatatgacatcacatcagaaggtattcagtctctggtcatctcactactagtgatgtcaagactgaccagcgttcaaaatagtgacacctagataaagagtaacttttaaaaagaggccgtgaacctgggcaatatagtaagacaccatctttaccaaaacgtaaaaaaattagttgggcatggtggcgtgctcctgacgtcccagctactctagaggctgaggtgggaggatttcttgagcccgaggtcaaggctgcagtgagctatgatcgcaccactgcactgcagcctgggcaacagagtgagaccctgtgtcaaaagaaaaaaaaaaaaaggccatataaggggtattgtcagatatttaggaaggctttgacctataacaagcccttgaaacataagcagagagaaagtatatattatctgtcaaattgtggtcctttttggttaatcaaggaatgttaaagagactctgagtgtgatgcttttccatttagcactaaatatatatagttttgacaagtaatacttagacaattgttgacattaagagtacctttgtttaatatgcaattgttatcagctgtgtgcaaggcattacttgggatgcaaagctacacaagaaactacgttctcaagaagctgactcaggtcaaaagatgttacatacaaaaatatttgtgattaatttctttaacaaaccttatcaggtaaatgttaattgtgtgacaattatgtatattttatgctaattgtgtgatagatatgaaaacagaaataaagtaatcctacttgaggagctcacagaatagacttataaacacaaatgtattacaatttcatatgaataagtaccagcaagtaaaaactcctaggtaagtcattctgaatgcctaataagtattcatcattgagaaatataaagaggtagttgccctctaggaactttcataatgaaacctacaacatatttaggctctggtttcttcatctataaagagaagaatattaaactagttctgtgggatcctttttaaccatagagctgtgttagtctgagtctggaaagatgtattacctatgtacttaagttgctgataacttagcaacatgtgtttcagtggccagatgttttgttatttgttagaaggaatagaaggaaataatatatttgtctcttaatccttacaataagcttgtgaggtagccagtattatccctcttttattggcaaaaaagttgaggtcagtggatttaaataatttatctaagatcacatagctgtgaagagctacagtgataaagccaggatttcagtctaaatctactcagcctgtattttttctatttctttctttttttctgagacagggtctcactgtgtcgcccaggctatggtgcagtggtgcagtctcagcttactgcagcctctgcctcctaggctcaagtgatcctcttacctcagcctcttgaataggtgggtctacaggcacccaccaccacatccagctaatttttgtatgtttttgtagagacggggtttcaccatgttgcccaggctggtctcaaactcttgagctcaagtgatactcctgccttggcctcccaaagtgttggaattacaggtgggagccaccacactcagccttttttctatttcttaaggctcagtgatattactgtactactaaggaaaaaaagacaagttaatgagtctgaaagagtgtgtaaaaataggttatttcagcatctttaatggcttgagatacaaagtacatagttttaaaatattgagtacatcctatagggagataaggatataaagatgaataaactaatttcatatttatgatacactagtatcagttcagaatatgattctttatatataaatatttaaaagattgttcatcaaaacaaatgtcataaaatatttggtggtacagttttaataaagtagaatcagattcttctgtgaaatgaagtataaagctgatatcgtaactaataacctgtataataccttgcattattcctgtttccaatgaagtcagtgtagtctttacatctggggctagagacagaacagaggttctctttcagacacatctctgaggttgtgcttttgtagatttttttcctcaaacctatccttacctttctttttaatttgattttgctttaattgagggacaagcagggatagcattgttatattagccaatggacagataagattctatcatacatgttctataaacttaatggtacttccccagagtctgtagcctatatatcttttatcacttctctaatctcattctagctgggtagggagagactaatttttgaatcaatgagaaattcagtttggggattccaagtaaagtaagcagtcgttactattccttaaattttatgcaaaattctattttacttaatgtgttacttattctttgcaacaggaggtggtataacagacagaaatctacaaaggatccttgagggttcaggtgctacagaattccactgttctgctcggtctactagagactcgggaatgaagtttcggtaaaaatgtattcttcgattcaaataagaaggatgagattaatttttactttctcccaaatagaaaaactttggatgggggcatgattaatcaatggaatattgtgactactacataagtattgtagttgtttttgtagttgaaaaacatttctaaaatggttcttgtcctgtcttaaataaacaggctctttgaacataggtgaaccttgccttgtaaaggcattgctgaacttagaccagttaatagtaaacaaattctgcagttgagcttcaaatgagtcagatatgcacatgtgcccattcgcctatgatttcctgtagcaaagttaataactatggtgtaaggatggaagagtcagtcatttttctccctcctacctttagtacttagtcttccctcacatttgttctctgttttcagttattttgaaattatattaccattaagaaattgtgagtattatatggggttttttaaatacttaagaagactcttacaatttaatagtagttgaatatttctgtttataaattgggaaaaacacaatgtaaaagaagcaagatggctggctgggtgaggtggctcacacctgtaatcccagcgctttgggaggccaaggcaggtggatcacttgaggtcaggagttcgagaccagtctggccaacatggtgacaccccatctctactaaaagtacaaaaaaattagctgggcgtggtgatacatgcctgtaatttaaaaaggaaaaaaaaaaaaaaaaggaagcaagagccttagaacttacaattccagatataaaatcaagtatactgtccagtggattcagctgctggatgtttcaagtaattaattgatgaaaattatggaatatactagtccagcatacttgacctacccttgtatcatgaaatagtctataaaatgaagcggcagtaggagggcccatttaataacataattatctgttcctttattatttctgttacagaaattcatctgttgccatgggagcctcactttcttgctcagaatattccctaaaggtaacagatgtgaccaaagtaaggactttgaatgctatcgcaaagaacatcctggtgtagccagacctctctgagagacatggatatcacaggatgaaggtagaactataatctgcaattctctatgacacagctttaaccttcttctctggccaggacagtcgcaatctttgttttaagtttcacatggccatggagaatgtgcccaagaagaaaaagaatttgaaacagagatacagtcacttcctttgcttagtcttaccagtgattgtcatcatggttaaagctggtctgtgcttcttccatagacagaagcttagtctgttttcagtggaattaattgatgaactgggaaaattttaactgcatggtatgaattcagagtgtgacttaagggtcaattcaaagcagtattttgacttttcatttgtaaaataaaaatttccactattaca

SEQ ID NO: 7211 - DNA, 31885 bp, Homo sapiens
gctcgagtaggggagcttgaagctactgacactgaagacccaaatctgaattatggacttgttgttgactgtggcagcagtggttcccggatttttgtttatttctggccaagacataatgggaacccccatgacttgctggacatcaaacagatgagagaccgcaacagccaaccagtggttaaaaaaatcaagccaggtactaatcagaatatattttgttgtcagtctcttttaaggcatgaaagaggagacaaaagaagcagaaagcaagctacccctttcttcttgagagtctgggtaatgggagggatatctctttcattgtcaccccctacctctcaaataaataaatgtttaggaccttgaggagaactttatagggtatcagtttcctgagtcttatgtgagccgctttttaaagaaagttttgtctgtttgtttgttttaacttaaggaatctctgcaatggcagacactccagaacatgccagtgattaccttcgtcctctgctgagctttgctgctgctcatgtgcctgtgaagaagcacaaggagacccctctttacatcctctgcacagcaggcatgaggcttctccctgagaggtgagatgcagggtacaggaaacacaggaaaacggtggcacaagagatgaaaggccagtttcatgcactgtcctctgtggttccctggtctatacccctaaacccaattatgacacaatcattcattcccaacttcttgtcatttgctgctttgggatcagtatctatctgggatgactatagtgattcttagtttggattgagggttgggagtagtggtgatggtaatagatttggatcatcgggcacatagagaacataattacagaataaattaggaagagggtcacctgatgacctggatacttagggactagtcagagagctctggtaggaacactaccttttctgtaactctgcctagaaccctggcaataactgggggagtccctcttcttgctgctactgcaaagctcagtctccattgccttaggcctgttttctcagccccagccagtcacatcatttccacttgacctttgcaattcagcctgacaccttgccacctgatccctcttcctgcattagaggaagaggaagagaaggctgtatttaggccagactccttgtttgtgatttctctcctttggtaccaccttgatccgtccatacttacgtaggccgggggaagaatgagctccctgactttttttttaatgatttttattttattgtggtaagcatacaacatgagagctaccctctaaccagatttttttctttttttttagagacagggtctgctctgttgcccaggctggagggcagtggtgtgatcacagctcacttcaacctctgccccccaggcccaagtgatcctcccacctcagcctcctaagtagctgggactacaggtgggcaccatcacacccagctaatttttgtggagccaggtttcaccatgttgcccaggctggtttagaactcctgggctcaagtgatccgcttgcctcagcctcccagagcgctgggatttcaagcgtcagctaccatgtctggcccaacaaatttttaagtatacaatacgttattgttgactgtgtgtacagtgttgtacagtggatcttcagtgcttattcatcttgcttaactgaaattttgtgcctatttatttcccttagcatattgtcgttagtgttcatccaccttgtcacatattgcagaatgcccttttttatttaaaaaagtctaaatagtattccactgtgtgtatgtaccatgttttctttacatattcatctgtcagtgaacatttaggttgtttccacatcttggttattgtaaataatgcttcagtgaacatgggagggctcatatctctttgagatcctgattttaaatctttggaataattagccagaagtaggattgctggatcatatgacagtttgattatttatttatttatttatttatttactgagacagggtctcgctctgttgcccaagctggagtgcaatggcatgatctcggctcactgcaacttccacctcacaggctcaggtgattctcccacctcagcctcccaagtatctgggaccacaggcatgtgccaccatgcctggctaattttttgtatttttttttgtagagatggggtcttgccatgttgctcaggctgttcttgaagtcctgggctcaagcagtctgcacgtcttggcctcccaaagtgctgaattacaggcgtgagccaccgtacccggcctatatttttaattttttgaggaacctccatactgttttgcagagctgctgcaccattttatattcccaccagcagtatgcagagtttccaatttctccacagccctgccaacacttgttgtcttttgttttttggataacagccatcctgacaagtgtgaggtgatatgtcatcggggttttgatttgcatttccctgatgactagggatgttgagcaacttttcatatgcctgttggccatttctgtgaatggagaaatgtctattcaagtctttagcccatttttacattgggttaataggatttttgctgttgagttgtaggagtttctaaaatattttaaagataaaccccttaccaaggtatagttcgcaaatattttttcccattctgtagcttgcctttttactctgttaattttttcctttactgtacagaaatttttagtttgatatagtcttacttgtttatttttggttgcctgtgccttttggtgtcatatcaatgagaccattgccaaccttaactttagaattcatcctcctggaatgttcatggtctcataggcatcaggtatttccttattagcttaaatattttcctttggtcaacagcagtttttttttttttttacaacgtttaaattttatagttggctttctttccttaaatcaacagcaaacaacaaaaacctcagccatacatgtagggctccaaggcttatgtcagacatgtagacaacataacatatagcagcaatgcttctttcagtggactttttttcacagttactggtttactgactggtttactgttgagaagcagattatttatatagccatttgtcaacatgagaggttttttagttccttattgccccatacatttcagtctttaaaaaattttttgttttgtttttacttatctttaaaaccaaactttaaatattgtaactgcagccttaactccttaagggaaatcttaaaaatgaacaaaacaatacaatacaacttacaaccctgctaccctatcaaaactgtttcgttttgttgtattccctcctttctgttcacatatatgtaatttccacaaagttgcaatcatactgtgcatgcaattaagaatttttatttgacataggtgatattcatattgttcaaaaattttagaaaccctgggaagaatatagatgacacaagagcaggtgccacatcacaaagtctataaaaggccaaggaaaggggagggaggccagagaaaaagctgacctggaggttaaaaaggcagaattgaccagctgagctgggcagaggaacccacttggtagtttggctacctttagtgtgtttggaggaaaggagattgttgcctcacctcctggcactgttcggtattacctctgtcaaagaagtttccatccaaacaaaacccactgtgtagctccaccctttttgtctaagatgttagttgtcaatgtggaaactctgaatattaatatttattgtatctaaagaatttttaaagaaatttgccttttttttttctctttcaacttgttttctggtcacctctctaaataatgcatacatctgttctaggcttataaaatcattgctgcctctaagtccaagcgagttgttggcataaatgtgactatcagtataagaacctgttttgtatgattaaaggtttgctaatttattagcatttgtaagcagattcaaaatagggttgaaccatttagactatattttgaatttattagcatttggttttatttctttgccaaaggcctggactaacagaattttttctacctcccttttattttgcagttaaaaaaaatcccttaaaaattacaccataatacaaggtggtgtttaataaaataataatttttattttaggaaatttcacttgtgtataaaagtaaagagaacagtgcagtaaatccccatttacccactacccagctttaacaattatcaacatttcgccattttaaaagcattttaaataaataaacaatattgaattttagaagatgaaagctttatcctgtcactatgtatacatgaagaatgatttgggtttttgtttttttagcataaatggaatcacattatacatactgttttgtaaaatgtattggacatctcttatcttttcatgtctatacatgtagatataagtagacttcatttcttttaacatctgtatagtattacattgcatggctgtgccataagttatttaaccaatccctatggtatggtatttccagtttttcattgttataaataattttcattgttataaataatgctgcagtatttctcttctttattttattgtttgatgatttccttggaattaatttctaaaagtataacagctggatcaaaggttaaacacattgaaacattttgaagcatggtcctggattgccctttagaaaggttgtactagtaatttatttatttatttattggagatggagtctccctctatcgcccaggctggagtgcagtggcatgatctcggctcactgcaacctccacctcccgggttcaagcgattctcctgcctcagcctcccgagtgggattacaggtgtctgtcaccatgcctggctaatttttgtatttttggtagagatggggtttcaccatattggccagactggtctcaaactcctgacctcaggttatccatgtgcctcaccctcccaaagtgctgggattataggcatgagccactgcacccagcctgtactagtaatttgcataactaacagcaacatatgttgttgcccattcttccatatcattgccaaaaccaacgaaccctctctttgaggagtttagaagcatatccaatagggacagaagaataccccttcttggtccccatttgaaattcttattgcaagaatttaatatgtataacaatgaactttttttaagaaactatacttgacattatactggaagattattacttcaaatatagatcttcactttgaagtgctaacaacattcttcatcaagtagtactgacaactgtctgagccagcagaatatttttgtattgaatattttttaatccaagataacttgtcttattttaactaacattttctctagatgcatattattacttctagctttgtttctttgctttcctttgcttgataatattgattacatgcttaaaatgttagaggaaagacaaccctatagatacaaagtttcaagtgttttccccaaattggaaatgttgttatgtcctctggattttgatcctgatctagggttttcaaatggtaagattttcacaatgaaaaaaaaatcaacccttgaaatatggaaaaggagattaaaaagttaattgtggctgggcaaggtgactcacacctgtaatcccagcactttgggaggccgaggcaggtgaatcacctgaggtcaggagttcgagaccagcctgactaacatggtgcaaccccgtctctactaaaaatacaaaattagccgggtgtggtgatccatgcctgtaatcccagctacttgggaggctgaggcaggagaatcacttgaacctgggaggcagaggttgcagtgagccgagatcatgccattgcactccagcctgggcaacaagagtgaaactccgtctcaaaaaaaagttaattgttagcttatgtaaaggattacattaaaacttgtggaaccaacagtacatcttgtgtggtaatgtgaagcattgtttctatgttgtgtaagatttgaggatgagattgtgttccttaatttaacatctttgttttacagtagtgaggaataatgtaattacatcaattttatagtttatgcaacttggctgcagtttcctgtggcttgtttgtactcagcctgtgagagtcatagaaccgtagtctcatagcctcatcttttaacactctttgaataataacatcatataaggggaaagtattactattaccatgttgccttttaggtaggaggctatacctggaggcagtttaaacttttaaaatcaaaggcggtaccaaaaagaagcagggctggacaagtagatgaggtaggtgaacagtgaggtcatgacaaggctaagtagaaggacaagttgaggcagtttatgagaagagagtttagtgactaactttgggattttttgttctttcttgcaggaagcagttggctatcttggctgacctagtgaaagatttaccactggagtttgacttcctcttttcacagtctcaagcagaagtgatctctgggaagcaggaaggtactgggccttaaggggtgcagctggttaacctctaagccaaccatggcacagcctctctaacgggtgtttagaattattctatatatcggattttaatttttctgccaataattttcttgattctgctacatagttgatttgattatttgcatattttgcattggcatctgtttagaatgctggttctggaagtcaaaaatgtatatctctttttaacttagtactaagcaatatgtttataagaatgtattagtatttaatgatttcagttggatatttggttagctaactgtacttttgaaaacatatatagttctaggagttgtattgagtttgtcaaagtcaaatgtaaggtaaattattaaagtaaggagaaactttaattccaagggatgatcagaatgagttacttttgttttgttatgccttcattgcaattactatgcagtattgataattccctggaatctcacactattgggtttgtacttttagagtgaatatgtgttctcatgcagccaaattggccagtttgatgaattatatttccatttcttataaacgagaaggagatttatatgtcttctaattgcagacatatacatgggaaaagatttaccttttaaaatttcagtattgcatttttcagttgtaaaatttctattttgatcttcttaatattctatttcttttcttttctgtttctttgctgagaccttctatctttccattcattgtaggactgcccatatttcttggttatatggttgctctaatatctttgataattccaatatatgtgtcatctcagagttggcatcttttgattgtcttttctcttgtgagttgagattttcctggttctttgtatgccaagtatttttatattccatcctggacattttgaatattacattatgagactctgggtcctgtttaaatcaaagagaactttttttttttgttttaggaggcagttgatctcaagttctgagctgctttctgtaggctgtgaatctttttttttttttttttttgagacagagttgcactcttgttaccaacactgagtgcaatggtgtgatctctgcttactgcaatctccacctcctgggttcaagcgattctcctgcctcagcctcccaagtagcttggattacaggcatgcactaccatgcctggctaattttgtatttttagtagagacagggtttcaccatgttggtcaggctggtctcaaactcctgacctcgtgatccgcctgcctcagcctcccaaagtgctaggataacaggcgcaagccactgcggccggcccgtgattctattagttcatttttcttttctttctttctttctttctttttttttttttttttttttttttgagacagagtctcgctctgtcatccagactggagtgcagtgtcgtggtctcggcccactgcaacctccgctccctggttcaagcgactctcctgcctcagcctcccgagtagctgggactataggcgtgtgccaccacgcctggctaattttttgtatttttagtagagacggagtttcactgtgttaaccaggatggtcttgatctcctgacctcgtgatccacccacctcagcctcccaaagtgctggaattacaggtgtgagccaccgtgcccagcctattcattcatttttcaaagccttggccactgctatttggatttgtcctgtgtatcagccagtggctaatctggaacctgggcagtggcctagcctgtagttcagctctcagagctgtttggatattgtttagggtcagatccatgtatttgtagcttggaggtgagcccaggggttcatacacaactttgctccctactgtctgtgatccctctgccactttctggttccttggagctccctttcatgatcctcctgtcagaataccagggctttaatttgcccactctctgccatgcacttctcatgactgcatctgcatccagggccaagcggtaggaggacagagggagcctaaataaacaataggatttgtttcacagtcttgaagctacagcttctctggtcagagaaaagaattcaaagccctcagagttttaggtacctgctcaaattctacctctgttgcctaaggttagagagaacaaaataagaaagaaaaaaaaagcaggagatttcccttattttctctgaacttttggcattcctttttctgttctttggaccagaaaatgagttgaagttcctctgttcacacctggtgtttactttcatgtttcaagctgctcttaagtctagaccaggtaatatctgagggggaaaaaatgggacactcactactggcttggtggtagtttaaaccctggtctctttcccggtgtgctcattatcatttactttcagagtttccagaaagctgctccatgcattctatctagagtttatatttgtattcagtggggagacaagattgcccagaactagaactccaaaatttacattttttcttttttttcgatatcttcgtgacattcagatgatttatacttcttagacatttgttatacaattaatttctattcattgaggaaatttagaagatgcaaataattttaaaagggaaaaaaatcacaagatgaaagatttgaaattcctacattgagagtatggaataaaatactatgattactttttccaagaaaaagaggaaagagaagccctaagggagaggtgtatacatggcatagcagtagagaattaagtgagggcttttctgtttcttacttaggggtttatgcatggattggaatcaactttgttttgggaagattcgaccacgaggatggtgagtaatattgtctttttatgacagtttacctaagggctgaagatttaagttataacctatcagtagcatgtaaatgcaaattttgagttgtttttcttttttcaaacataagatgcttcattttccagtcctaatttgctttctttgatttctttttaactttttaatatggaaagtttcaaacattcacaaaagtagaataataaaatgaacctccatggacccattacccaggctcaatatttactaatgttttgccatttctcccccatatccccccatgtattaaaggtttttttttctcattgaatgttttaaaaagcaaaccccagacatgtaatttttattttcatgtatgtcagtatgtatctacaacagataaggggtttcaaaatgaacaaaaaatatatccataatgccatttttaaatttaatagaattaacaatttctaatatcatacaatacgtatctaataccctatccaggtatagattttcctgattttctcaagaatgtttattcgtagtgggcttgttcaaatcagaatctgaacaagggtcatgcattgcatttgattaatatgtctctttagtctcttttaatctataattgttaaccttaccacctcactcccctgcctttaaaagcaagaaaaaattggatcacctggtagaaagaatttgccacatgctagatttgattgactgcatctttgtggggttaacatgttttctttaacatgtttcttatcccctcatatgtcctttaaactggaggtcagatatagatgtttgattagactcagattcaattccatctgcaagactaaatcatagaaggcgctgtgtgttttccactactcacatcaggagttttgtaatgtctggttgactcactttttgtcatgctcagactgatcaggtattgagagttcaagtattatcagcctgatctaacttagtattaaaattccttatctgcctttcatggaattgtggtaatagccaattgtgatcattgcttggacatgtttttcattagagattgcaaaatggtgatatttctaattctgtcattccttctgcatttaacagctagaatttttatgtaatgaacttttcttgatcaactctttggttaccctgacatatagttcttatgggaaagacagaataaatccttgattctttttatttatcacatttctgaataatgagttggtgtctagcaacttccaaaggtaaccagtgaaaaaaaagttttaattattattatgaactcatggattttaatatattagatgcattagagcccatcacattattagtattttaaggagcatctttaggttggctgctgtatccttttaatatgaccccaatactcttttatattccccttgctatctggtacagcaatgtattccagggtcatcttgtatactttctaccctagacctggcattggcctgtttttaaaagagccctggtttcttttagtaaaagatggtatttagagattattggtccagataccacaggtggtcattactcctgggatatcattgcttctaggcctttcagtgaacacagctaggaaatatgtattttttagaaagagaaaaataaatgagttcatagtcatatttctgactcatatgtaagattatagggtgctattaatttatttgatttttatacctatatcctttttgttctgttatgctgaatctttgttcctaaagatattgacataaacatttatttgttttattccacaatatgtttcataattttttttttttttttgagacagtcttgctctgtcacccaggctggagtgcagtggtgcaatctcggctcactacaacctccgcctgtcgggttcaagcgattctcctgcctcagccccctgagtagttgggattacaggtgtgcagcaccatgcccggctaatttttgtgttttagtagagacagggtttcaccatgttggtcaggctggtctcgaactcctgaccttgtgatctgcctgcctcagtctcccttcataatttttaaataataaaaccaacaatattgttaacaagactactgcgatgtagcttaagatatttgtttcttttgtccttaggctatatcctactagggatacgtagtcaaaatgtcatgtttaagtaattcacaagaattattctttgtgtaatatatagttgattcagttagtatacttgtttgctttcttttttttattttgagacaggttctctgtcactgaggctagagtttagtggtgcgataatagctcactgcagcctcaaactcttgggcacaaatgatcctctggcctcagcctcctgagtagctgggactacaggtgtgcaccaccatgcccagctaattaaaaaaaattttttttttttatgagagtgtctcactatgttgcctaggctggtcttgaactcctcggctcacataatcctcccaccttggcctcccagtgttttgggattacaggtgtgagccatggcacctgcctgctttcaaattttcaagggattgctgttttgggggtttgacttaattttattttttaattactagggcctttttgttctcttatttatttcagaatcagatgctgaggctacccaggaattggcagcaggacggagaaggacagtagggatactggatatgggaggagcctctctccaaattgcttatgaagttcctacctcaacctctgtccttcctgcaaagcaggtactttaccttttagggaaatttagttgctaggaatgctagtatttgagaaggaaggacactgtctttggacttagaccaacctacctggctctaaatatttgttcagatacttgctagcttgcgttatcttgagtaggttacctctctgagcctcagcttcctcctgtgtgaaaaaggaataataatagtatctacctcataaagttatgaggatgaaataataccatgtttgtaaagcatttagcaaactgtccagcataagtgttcaatacattttaacaattataactatactaggtatctcctgccattgctgaggataaacatgataatgcatttacattctggagcacagtatttgatacatatctattgttcaataaatgttattccctttccccttactgatgattccattctgggccttctaataatccttaccccactagaatgtaaagaatgtattttgagggagaagtttcatcctacacagacactttttgtacagccattatgtacacctattatgtacacccattatgtgcaaggaatagacaatattatgtacaaggaatagacatgtgagttacactgtccctaaaaacttataatttatctgtcagtggagacagcttgtgatatcagggagactgtagcagtgcttaacttgatctaaaccagggcttctcatcgttggcactcttgacattttgggtcagataattctttgtcatcaggggttatcccatgcatcatatgatatctcttgcctataccagatgtcagtaacaaccctcccccttccagttgtgacaatcaaaagtgtctccagacattaccagatgtgtggggcagggtggaaattgcccatcattgagaacatctggtttaaacagagagctgtggcaatatggggactggcagccaacttagcttgcaaagttgaatgggagccattcttgcttcatggaaggtaaagtatttacctgggccttggatgagagtaggcttttttttttttgcagagtggaggctgagggaaggccacctgcatggagggaacactatatacaaaggcacagaaaaagcagcacagaggccagaatgtccagggaatgacgaatagccttttgcagtataggattttcaggtgtgctagtagttaagactgggaagataagatggagctaaatcatgagcagtattgagtgctatcataaggggactggcttttatttccatagatagtggaaaaccaccaaaagtttttgagtaaggcagtcacatgggcctcagtttcatttataaaataattaaactgtgaaggtccttctcagctctgaattttgtgatgatgtcagttgtgtgactgtgatctgatctttttgtagtgaaaaaatttttgtgtcagtaggagaaagaatataggtcacggaaccttgagtgagaagtaataaagggctgagttagacaaagtaagtggaaatgaaagggaggggacagatttcaggggatagtttggagtgaaaacccaatgtaattgagcgattgattgtggtagtgtgagtagggtgggaggatggccagcagtgctgaggatctatcctagataaccagaagactgaggaacccagtaactgagagaagagcaacaggggtaagggcaggggtgatattaagcaaacagtattgtcctgagagatctggatgagagcgtctatctggtcttctagttcagaagttgtaaaactaatgacttcaattttggatatattgagtttaagatacccaaggaacatatatgtcagaatatccacaggactgttggaaatgtgagtttagcagtcagcagagaatttcatgctggggttggaaatgtgggggactaactaggttgtgatactttttagtctatattcgttagtatgtatttaacaggtaaaacgaaggcatggatctgatactaagaaataggtgacaagcgggactggggcttcaagtcttaaagaaatgacttttgtgtgtgtgcagatttagaaaggaacatggttatggaaagcaacactggtacggaatgcatacttgcaagcaacaaattagatttacatatagcaggccgggcacggtggctgacgcctgtaatcccagcactttgggaagccaaggcgggtggatcacctgaggtcaggagtttaggaccagtctggccaacatggtgaaaccccgtctctactaaaaatacaaaaattagctgggcagggtgggcaggcacctctaaccctgctactcaggaggctgaggcaggagaatcgcttgaacctgggaggcagaagttgcagtgagccaagatcgcaccactgcattccagcctgggtgacagagtgagaccccatctcaaaaaaaaaaaaaatagtaactacacatagcaatataatggctcttcaagatgaatcttagtgcttggtaaaaatgaaagaaactgtgagacaatggcatttaaaacattttaaataatcctgaatgcctaatatatttttttgtacaactcacaaagttatgtacattcacaaagttgtgcagccaccactattgaattccagaacatttcatcgccccaaaaagaaaccccatattcactccccactcatttcccattagcagtcactcctcattctctcctctccctacccctgacaactattcatctactttctctctccagtggatttgcctattccggacattttgtataaatgaaatcatacaatatgtggtgttttatgtctggcttcttttatttagcaaaatgttttcaaggttcagccatctcgtggtatgggtatttcattcctttttaatggctaaacagcattccattgtatgaccaaccatgctgtattttgtttatccatttatcagctgatgaacatttcagtggttttccctttttggctattatgcacagtgctgctgtgaacattcatatacacatttttctatgtacataagtttttttgtttttttttttttttgagatggggtttcactcttgtcactcaggctggagtgccatggcacgatctcggctcactgcaacctctgcctcccaggttcaagcgattctcctgcctcagcctcctgagtagctgggattacaggcacccaccaccatgcctggctaatttttgtatttttagtagagacggagtttcaccatgttggccaggctggtctcgaactcctggcctcaagtgatccaccctccttggcctcccaaagtgctgggattataggcatgagccaccatgcccaccccagtttttggatctcttggtatgtaccttggagtgaaattgcagggcacaatggtatttttcacaaattaaaaagaaatacattcaaaacaagaatcctcattttataataatacatatatacaaaaattatacataacacattagaatggttgcccatggcagagaatggaatgagattaagtatgaagataaaagagaataaataaataaagcaaaagagaggctttgccatgataatgtggaatgagctgaggaatatgattaattcagcctctgcccttgaggttcaagaaaaaaatatagcaccttttcattggcggtacaataaaattgaactttcccaatccccaaacctgtcataaggaaccttagggcttcttggataatgttagaaaaggccacagaaccgggcacagtggctcacacctgtaatcccagcactttgggaggctgagaagggctgatcatgaggtcaagagatcgagaacatcctggccaacatggtgaaacccgtctccactaaaaatacaaaaattagctgggcatggtggcacgtgcctgtagtcccaactactcaggaggctgaggcagcagaattgcttgaacccgggaggcggaggttgcagtgagccgagagcatgccactgcactccagcctggtgacacagtgagactctgtctcaaaaaaaaaaagaaaagaaaaagaaaaggccacagaatagatcttatgatgatccacagagttccttaaatttatttttattaaaggatgttttcctattaaaataacacattcccattgagggaattggaaaatacagaaaaatacatgtgagaaaatgatatctgtagtaattctacctcctatataactacagatagtgttttgggtttctaatttcatatttagttcttaatttagtgtctaatttgtaccttttagtgcagtcttgtcattttgtgtctttgtttaaaataatgctatgaggatgaaagaatgcttaagatgttttaaagagtagtcatagaaatgaagcctcgtgtattagcaatgtcatagctttctagaaggcaaccaaaactaaaattccctttttctcttggtattgtattataggaagaagctgccaagatcctgctggctgagttcaacctgggctgtgatgtgcaacacactgaacacgtgtacagggtttatgtcacaacttttctgggtttcggaggcaactttgcccggcagcgctacgaagaccttgttctgaatgaaactcttaacaaaaacaggtacatttgatatgggatctgagtttctgaaatataatgtcaggctgcagatattagggagaaatactcacatcctcctaagacagataagtccctgcttcctccttctttctgactacccctgccaatggggtagcatctcttaaagacctctattagcagtcccactctgggtgagggtgcattctgatctttgttattaggactcataaagtacagtagcttattgtgatctcttgctgtttcccatattcagacctaacatcatgggaaaagggagatgaattaaattgccagtttaaaatgtacaatatatagtgtagctgctagcagttccttctgcatggaagtgttcaagacatgtttgttgaattacagtgcagttgcatcttttgtgagagttcagttctgtagtatgtctaaaagataaaaagcaagcatagttaaaattaacttttaaaatggtctctcatcaaattcataatagtcagtttttcctttagcattggacagatcacagattcttcatttgagtaccagatgaagtagttagaccttaatgtacaaacagtggtgggatttcttgtttcttttttgttttttaagtctgtaaaattatttattttatcattaagcacactgaaggaaagcataagagaaagcagagttcttttccatcattaaatttacacaaaattttggaatgaaaccagtttaagtaattgggtgattgattgtggtggcgtaggtagggcagggaggatggccagcagtgctgagggtctagcctaggtaaccagaagggtgagaaacccagtcacggagagaaggaccacagatgaaagggcagggctgatactaagcaaacaacacacttacctacgtatacttaaccatttagctacgaacactagcttgaagaagtactggtataccccgtttgtaataatttatccacagcaatcaattatcttatatttacggcatgttgaagaaaatattgtcccataagtctattttgtttttgtaagtcttagtctctaggagttcaaggtgctttgggagaatcctggtgccctggatgattgactaatgcattaaaatcaagtggtgtgtttgtattctgaaagtactcctaaatctatacaaacattgcttgggttgaggtgctcagatgtctcctgcaggcaccatgatgtttgaagatcatttgttttgaaagtttcacaccagttttggttttccttcttcattagctgctgtgcttccttttccattttcttcttttgttctactcctttcttttctgtctgctgttttctgctgcctccaaactacttcttgccagactgcatcttcttcccatgcgttggtattttcttgccaagtagctaagtcacctacatcaggtgactgatgagtaaaaggcatatcttgtgtagctgccagtctattaacctatttcctgagatggcaaaatgatcattgtctcttctcaataacaattttctgagttttccttacagttggtgtcacatccttaaaatagtcggttccagttgttgtaaagtgttctgttgtactgcctcattccattctcaccctcggtctttacacctgtgggcgcatcctcattctaagaagtccactcttcaacatctgtctgtttaggaactgatgaataattaactgcaattggcaaagttacttggaccccaacttaatttctgtccttggacagatcttcatactcatcattttgaggaatgagaatatggttgctaggcaagtataaactcaaaataactggacctgtgttacggccatggtgggaatcaaagctttccagtcttctccccactcagaggctccaggctctgcaggtggcttcctggagctggtgctgtgcctgttctgttccagcactgctcattcagaggcaggcatgggctccatcaccattgccagccattgcacatgggccactgccgtggtctgctcttcaggaatctctccccacagtccttcccacctcaccccctaccagttgtatttttaaacattagaaccacactccgcacgataaggtccttgcacttttaggaggtacgtgggaatgaagaccagatggagaacagcagattcacatctccaatttcactacagactaggaaatacacatgttgactaaaatgtcgaacagaattgatcaccatattcctctcttttttttctaaatttaacttgctgaagttaaatgtttatgtgatgaaattgcactccatcctcgtttctagagatatcatgaaaaccagtagtaagatatttctgatgcacattgtgtttcttagactaggttgaatacaggcatgacgtgtttgtttgtttgtttgtttttgtcattgtggcagattgcttggtcagaagacaggtctgagtcccgacaatccatttctggatccctgcctgccagtgggactcacagatgtggtggagaggaacagccaagtcttacatgtccgaggaagaggagactgggtgtcttgtggggcaatgctgagccccctgctggctcgctccaacaccagccaggcctcactcaatggcatatatcaatcgcctattgacttcaacaacagcgagttctacggcttctctgagtttttttattgtacagaggatgtgttgcgcattggtggccgctaccatgggccaacatttgccaaggctgctcaggtaaattattaatgataaacatggcttatgctggcagcagccatttattgaatgcctcactctgtgccaggtgctgtgcaaagggctttgcatacagaatctcacttgttctttgcaggagccctttgaacactcattttacagatgaggaagtggacagagaacttaaggatctagctatgctgtactgccttctaattaactaaatttattttccatggatgtcataccacccaaattattacccaggcataaaatttttgtgttggctaatggtttttcttccaactttccaatagtcttgtttaatgtttatgcccaagaaatgtcacctccagtatttttcctcttgctagctattttctgttgtaatgtgcttttggagatgatatcacccagaggggcaagcccatctttcttttgggttgaggtattaagaggcagagtggtatggggtccctgggaatattagatgttgtaaaaagcaatgatggtggaagtttgtttagatttaaaatagaggagtaaaaattcactctgagcatatataggacttaagcatcatataagtttaaatcattggtacctggacagatgaaagtttagccagctttctatcattttctgctttatttagggccatctctttgaattgttgcgtgtctctatctttttcatcagagaaacgaatgggagaatctgtcctcatatttctttttttcttgagatggggtctcgctctgtagcccaggctggagtgcattggcatgatctcagctcactgcaacctctgccttccgggttcaagtgattctcctgcctcagcctcccgagtagctgggattacagatgcccaccaccatgcctggctaatttttattatttttaatagagatggggttttgccatgttggccaggctggtttggaactcctggcctcaggtgatctgcccgccttggccccccaaagtgctgagattacaggcgtgagtcaccgtacccagcctctcctcatatttccctccctccctcccttccctccttcttccctgcctacctttctctttctttcttacaattctctagggttctcttagtgtaaggcttccagcaaaataatatctgcagtatctgtactgttctgttcccaaaagacagtccttaagaaatactgtgggacacctggtttgtatttgctcctttctctccagcctccaggacgaccttcacgctccctgtttttctggagcccagagctccctaactatccatggcctgactctttctcttatctcaaaacttcttcaaattctattcccttgaacaccaaaaggctcaagttattgggcttaacatattatcttttccaggtaaaagcgatttttttcccttacctttttaactttgactcaaacgttatcttcccagagccaccttctgggaccactctatccaaaatgacaacgctccccatattacctgttgccctttcctgctttatttttccctgagcatttatgttatccaacgtaccgtgtgtgtgtgtgtgtgtgtatgtgtgtgtgtgtgtgtgtgtgtgtgtgtgtttattgtctgtctcctaccactagaatgtaagcttcctgaggacaggaatttttgtctgttttatttactgcatgattccctggcatctagaacagcacctggcacatagcagacatacaaaccaaaaggaatgattattttggtgagaattacaacaccgagggaggccaatgacaggtttctaaccatcctcttccatctgctctccctgctcatgtcagtcctatgtggagtagaatgaaactatctttgtcttttgacgttgctatttgttagtcctaacctcagcccctctgaagcctaagaggctcagaagccacatcaagctggcttggtgctagacatgggatgacgggaataaacaggggtatgacgcagtgtttagtgaatgaacacaccatttctgttttcctttgtcagctggtagcccacaagtaactttagaaatggaacagctgtgactgtggggaaggtagagagtttgcctccaaattcatgttgcactatttctctgtggttgatccaggattactgtggcatggcttggtcggtactaactcagagattcaagaatggcctcttttcatcacatgcagatgagcatcgactcaagtaagttacttccctttcctccttagatgtggacttaaaatctagatggcagattataatggagagtgagcaataatgcagattagatttcatgttgagggagcatttgattattccagacttgattttctcagggataggggccaaaatagtgagcctattatagcaaagccagaagaaatcagtggttaccaaacagagttctcaacaagtgatttgacaacaaaagtgatttttttttttttttgagacagagtctcactttgttgcccaggctggagtgcagtggcatgatcttagctcactgcaacctccgcctcctgggttccagcgattctcctgcctcagccccccaagtagctgggactataggcacgtgccaccatgcctggccaatttttgtatttttttgtagagacggggtttcgcaatgttgccaggctggtcttgaactcctgagctcaagtgatccgcctgcctcgccctcccagagtgctaggattacaggtatgagccaccgggcccggccaaaagtgattttttttttaactttgtattatagataatatcaaacatatagaaaagtagagagaatagcaacataaaccctcatgtaactatcacacagcttcaacaaataacattttgccagtatggttcattggtcctttcatttttaaatgttttagttaaaaattgtttaaaattgccgggcatggtggctcacacctgtaatcctagtgctttgggaggctgaggtgggtggatcacctgagttcaggagttcaagaccagcctggctaacatggcgaaaccctgtctccactaaaaatacaaaaattagcagggtttggtggcaggtgcctgtaatcccagctactcgggaggctgaggcagggagaattgcttgaacccaggaggtggaggttgtagtgagctgagatcgcgccactgcactccagcgtgggtgacagagtgagactctgtctcaaaaaaaaacaaaaattgttttaacataaacaaaactagaatagtgtaatcaactcctgtgtacctgtcaccctgctttcctactaacatttatcagctcctggcccatcttgtttttatctgttttcccatccacaatccccctcttacttcaactgggttgttttgaagctaatcccaaacatcctataattacatttgtagatattttaatatgctctctgaagatagggactcttaaaaaaaagaaaaagaaaaacacagccacagtatcattattgcctttgtggtaaacacaagataagtaggctgacttagaaataacccacttagaggtgaggaaggtgaagcgggaggaggtaggtcttttaataacttgtgggaatacggagtggcttattgcaaaggaaagtattagaattcttttctctttttttaaaatttaattatttttgtcacacagatatcagtgttttaaatcggcttggatgtaccaagtcttacatgaaggattccactttccctatgactacccaaacctgcggacagcccagctggtgtatgaccgagaggttcagtggacgctgggagccattctatataaaacacgattcttaccactcaggtaaagtaagactgaccaatctggtatcttgagctcagaggatatcagttgatgcctcagaatcggtttctttctttttttttttaaccagcttagaataggtcttaagtgaccttcctctctaccccctcacaaaaacaaactcctttacttccatgtgagccactgttactaccaggcatgctcgaacagaaagaaggttgagcattactggtctggagtctcagctttgctgtttcagaaatccagctttatttgtttactcacaacaaaccagtctttaggactgagctcttactaatcacttccaagatactgacaagctaaaatgtcattcttgggttaccctggaaaacacatctgactaaagaacaggggtaggatgtctagagcaatctttcataacatacagaggcactccagacattgtgtcattgacttagaaggctttttggtgggtcagaattagaataaaggacgtgagatgtttttagtggggctactttcatcaaactctggtagcctgataccttacttttatgtactgtcagatatttgggacaatttttaggtacctgtaccctggactatttcagataaactcagatgaattttgtatctttgatgtctgttcctctaaactcaataccgtcagcagccaggcaggcgacagaagtgagggaagtgggctaggtgggggttgcccacaactggagcatgtatcccagttaatgggctggttactgtcacacacaagcactgtcccagcatttgccagttctcatctgtccagaaaagtcagaaatccatattttttatgaagtctttcagtttagagattcgcattctagaagaacactgcaggtcaaaccagacaaaactagatctggatctggactgctgaagagtggcttctgttctagccaggtggaccattacacttggttttcatatcgccttatttttatctgactgtaatacagttgatcaggtaacagctttatttagatatatcctagatcctaaggaaacatagtacctttattttttattatttttttgagacagggtcttgctctgttgcccaggctgagtgtggtggcagtgccgtgttcatagctcactgcaaccttgaactcctgggctcaagtgattctcctgcctcagccttctgagtagctgggaatacaggtgctcgccaccatgcccagctaattttttgatttttcttttgcagagatggggtcttgttatgttgaccaggctggttttgaactcctggcttcaagcaattctcctggcctggcctcccaaagtgctttgattacaagcatgtgccactgcacttggctgcatagcaactttaaaaaaaggatttagacacacacactctgatttctttattggattcaggggataccctattctcattagtactgtatttataagccatattttaagacttatgttacaggtgatcaatctagcctttctgttcattttttgggattcaatttcaaaggccttcccatcttggcttagattctggagggtgtaagcctggaggtcccttctgggggccgtgggaaggaagacacagaagggctcctggggcgggggatgttcttcagctttgcctgctctgtggagctggtgtcataaaatgtttatgtggatggaataaatgtgataacactactgggcctttcaaatcagtaaatgtctccctttgaaacttaacagttttttccacctacaaattcttaattcttccctagggatcttcggcaggaaggtgtccgacaagcccatggtagctggttccgtctctcctttgtatacaaccactatctcttctttgcctgtatcctggtggtgctactggccatcttcctataccttctgcggctacgccgaattcaccaccgacaaacacgagcctcagctccattggacttgctgtggcttgaagaggtggtgcccatgatgggagtacaggtggggccgtgaggctggaccaggactagagaagcttgagcacccccgagttgctgctcattgaattcctccactttcttatatagcctcagatgctgtgatgtctgaccttgtggatatttgcccttggaatttctactttactttctaccgtaattccttctccgtacccaggtcttctctgagagaagctataatttaatctgtgaggaactaaatgacaggagattggtgctaatacgggggaccaagctttgtccaagtgaagcaggcttcgactccttctgagaggtctggtgtgttcctagaatctcaccttttcttcccttgctaaagcatgaagtttggcatttggcacactggaagcctggttgaaatgaaatttgtagcatctgatacaaagccagagacattctagcaagtgcagcagccccttctttctctgtaacagagatatcatttatgtggagatccacaacctttaacagggatccaagatctttgcagttcaatcgaccacataggaatttccaggcaccaaaatgatataacttccttgcttccttgacaaagaagccatcatgggtgtgatccaagatccctgtcgtagtgttgatgatgttagtacatgattttaaaggttagaaccccttctaaatgaatggtctgtggaagattttagtatcttatctgatgcctggtatgatgaggatagaaaatttttccatttttatgtgcctcacaggctgtttgggcattaattttgctttttgagccttaagtgtgttagtaggatggagaaactgtgatggggactgggaacctggatttgtctgattttaggtcactgttccctgggcctgtttttgtgagcccttacacaggaagatataaagagagttctttcatttcactgctaaaatcagtatgtagtatggggaatgtatttgggttgtttttaaagaaaaggggaacagaatcaggagagtgggcaaaggcaataaaatcaaagttcttattaattatttctgagaaatagaagtttctcaatttatgactcttggaatgtctgaaagggagcaaatttggaatagatcaatctgttaataagccatctggcaactttcagaacctctattaagagactgctgagtcacaaacagcacttccattaatgaagcgagaggaaaagccataataattacatcttcacccactacccttccagagctttgcttctcctccacatttagccattaaattgcatgaggatttctcttcatcagggtccgcatggaatctttcttatattttaccctttcctacatgtagccttgaatgtcctttccacgaatatgctcccacggctgggagcattttcttttcttttcgtcacctttgatttttgggattagattaataggggaaaaagtccctggctttaaagaaaacaaaagtagaattcttcaaaaataaatttcatactgggaacagaaaggaactaaatgcttcataaaacagggaaaaagaaattaagatcatcctagaaataaactaagataaaaataagtatactgacccttggttggtagataaaaagatgaccagtcttgtattgttttaaaattagataaacatggattaagcatgcaaagactctgttcctttttttttttcttggagacagggcctcacgctgtcacccaggctggagtgcagttgtgcaacatcatggctcaccgcagcctcaacctcctgggctcaaacagtcctcccaactcagactccagagtagctgggactacaggtgtgcgccaccacactcagctaattttttattttatttttttagagatggagtctgtgttgtccaggctggtctcaaactcttgggctcaagcaatcctcccacctcagcctcccaaagtgctgggattacaagcatgagctactgcacctgccctctgtttcctttggaaatctcttacctttcattagggtttctttcatagcaatttcctttggtttttaagacttctacattgctttttcttttattatctgtgctccgtgaaccttatgaatgctgcttaaaaataatgtcaaaatatgttttagctgcctactcaggtaacgttttcttttgctctcatcttggtttccatatactatttttggttttttgtgagatctaatcaatgatctagtcagaagctacttcactggctaacagtgatcatgttcatgtgctaaaaatgaacttgaaacacggaagtagtggttggtccagtttgaaagctcttattagtattcttcatcctggctgtaataatagccattatttgttatgcctttgttatgtagcagacactcttaaggattttatgtgtattattcaaattgctattactgttctttttatagttgagaatctcaggatacctacatttatcactttttcaatatatatgtatttcttattcttattttgtcttggagtgtttaatgtgttatttcctgttcattactttaatattatggtatctaggcttgtctttattaccatgagcaaggtctccaggagttccacagtactgaaggaaaattttgtcatatccctcagaagaactgaatatttattattggtatgggctcctttgtttattctcttctcccaattaatagattttaaatgaaatcttattagctagaaacaaaagccacttactccttgctgagagccaattacttaaatatatttcttccttataataaaataatttgcttctaggagcagaaatctatcttgccataccctttggtttttaaagatttctcttctatttgcatttctgcactttggtggttctcccatgaagataattatggtgtcataaaattcacattccactggttcctttgaatcttaccaaccactcttgttaacagagacaatgaacctgaactgttttaggactcttgttattactgagacaggtcacaaacatcaaaataggagtccgtggcttgtagtgatgctttttagtcttgtgatagcacaatccatcactttccccaaaattcttgtcatagaacataatgaaaaatatgtaaaatacccatttatgtggcatttcattcacttaagttgcagttaactctaagccaaattataccattttttctctctgtactttagctccttgaatttccttaatctgggaaacttttgttcccacaccaaggaacaaattcagggggtacaagtgcaggtttgttacatgagtatattgagtgatgctgaggtttggggtacagatcccatcaccaggtggtgagcatagtacctaacagatagttctttaatccatgccctcctctctccctccctgctctagtagtccacagtgtctattctggtctgggaaattttcatcactttccaccaatcttctatttattctccaaatgtcttccaaagtatcctgccccaccccctcctcatcctaagagattcctttaacttcaagatcatatccagtgattgctgaaaaatgtctgccatgcacttgctaagctagtgtttttaggcattaacatttattatcacatccatatttatatttttgaaataatttatacttctcactgatatcatctaaacagatgcttctcacagttttatgttttgttttttgtcagggatgaaagacaagtgagtggtatcacttaagggaaagaacagtaggcttaacgaatagcagacctggattctagttctggctttgtcatttactagctctggtaccccaggccagtcacttaccatctctggttcggttctcatctatcaaacaaagaggctagacaagattagaaactaaaggcagaagacaaggtagaaaaatcatatgattttgggaagagcattttgtcctttggtttagaagaccaggctgcccaaaagagcctcctattttatccataacccctgatgataaggttggtgggaacagagtttctaatagtaatcataataaatttcagaagagttttaaagcttctggtcaacccccttgatttatatgggtgataaaactgaggcctagagcagttgtaatatgtgcaaagtcatagtgactggcctcctagcccaactactttgtcagctacaatgaaatgctcattaacagaatctttctgcaagtataaacagaatctattttttataaaacagctggccacaactaaccatgccccatctttacaactgcttctgacattcatttatgactgctttgctcacatttaggaataaactttgaaaaaaatactttgtcagaaatagtgccaagttttcactacatctattcttgttcctgtatttcttttcgtacttttaaattttatacatctttttaaaacaattttatacaatttcctttactacaacatccaagcaattcattagatgactacagcctagatgaaggtataaatgcctattacatctacctcattaaagaacttcgttgtaattcttgggcagtttccagactctgttacagaaacagagggctgtttctttttgttgtctttaaacttttcaaattaattcaaaactagtatctaattgtcctttttgctgtggtatgtggtgtaatgttgattgggaataagaattatggtagaaatagcagatgtttcaaattctcccatattagtctcttagggacgctagctccagattccagcccctggggcaataacttgtgaggattttcctggtgttacaaaaaatattgctgttaaaaaactaagactcaaaaccaaaagttgtgattaataataacaggattattagtcaataatattttgattaatactatagaatagcaacagtgaatatacctcaaattgaaaacttttaggttgtgttcttggctcattctctcataacctggatctaagttggaaagctgtggcaccctgtttgggtgtcccatctaccctgttttctgtttctgcagatggcttgttcaagcttcattttaagcctgctctgtctacttatcttccttatatcctaatagacttctcttgtgttattacacatttctcttttgctctaatatttcattattttccagtttgtcagtaccgttatcagagggacgaggaaggaataacacaccagttgaccattttgtttctctgaaaatctgagcaatacggagatccttttattagtaaaactgaatcattactcatactacaagggctttcacttttaaaatgtaatccatcattgcttgccatttttatgaaaaccaaagttgaaaagtcttctgaatcacaggctatgtatagccacacatgcatgacttcaggctagcataaagacatgtctgctcctgagcctcttcttttaaagggcaaccacttgtataccctctggtggccactcctccttctccactccaaggcagccctggtactttcctaagtggcccctcctacagagcacttgccggcatttggcctgctgctggtgaagacgccccttactagcttcataaatgtttttctgcaagcagggatcccagacacatactttggtttctagtgtttcagttactatgttgtatttgaaattctcattccacaattaccctttagttgaagtcctgaagtacatgccatgtactccccctttatttctaccttgatcaatggcctctgcggagtgtagtgaaagacatctttttattatgatctacactttaaaaaaccaaaggctgcctgtattacattgctttggggagttgttaagactctgttttttctactgcttcacattaaacaataattttgttgaattttgaattcttaaaattctcactgacaaacattttaggtcagtgttgaggaaaatgtgtgatgcatgttagagaggtgatgcattctcccttatgcagggacatgggtatatgtgttacatatgctgatatataacccaccattcatcccaggaccacaagggtagctgtagataaactggttatcctaaaatcatgattatcagtgttgatctctgcaaccaacattgctttagggagttgctagtcattacccctgctacaatagatagtatttgtcagtctaagttacagacaaaaaattctaggttgactgattaagaaagccatgtgttttaatttccttcatgttttaaaaacaatggacgtaagtgcagagagacctttgaaaatattaagggaaatctatttaatcctataggtatgtgatgacttgtttttttggaaaaaggtatttggaacatcaatctgtaattatccattttccattcatgcattcactaattcaatatttgatatgtgtctgggagtgctgggaataacataaatacaaaaaaaaccctaagataatcattcaccagaagctcatagatataatacag

SEQ ID NO: 7212 - DNA, 445 bp, Homo sapiens
attttacacaaacaacacactgataatagaactgttgttcctatcttaggagagtaactgaagcataaagagcttccccttggccaggaagcctctgaataacatgcacagattgtgtactaatgaatgtttatatgaagagtcttgcctttatttattatttatttatttttgagacagagtctcactctgtcatccaggttggagtgcagtggcacaatcttggctcactgcaacctccacctcccgggttcaagtgattctcctgcctcaacctcctgagtagctgggattacaggtgtgtgccaccatgccctactaattttttatatttttagtagagatggggtttcgccatgttggccaggctgatctggaactcctggcctcatgatctacctggctcagcctcccaaagcgctgggattacaggcttgaaccacca

SEQ ID NO: 7213 - DNA, 577 bp, Homo sapiens
catcaagcaaagaacttgtaatacgctgaatgctgcatagaaggttttgaaactacttacctgctgtggaacacctgtataactttaaaatgcatcaatcaatctcgagagtatgatcatgcttcctgcttttaaggatctgaagttaactgcaactccaagtatacaagacttctttgggacccatggaagcatctctacatgctcatgtttgccagattcagtggcctcctgaaacctggccctagctaataagttaaaaagctctaagtaatcccgagctgcatttgaatctccaagatcacttgttcatgggttggtaatactttaaagagccatttgtttaactgctaatctggatcttatattctgagccccagcttttttctaaagcaaagaaaatacaaaataaaagtaagaccaaatgcctttgtaccatggagagagaaatgactcattggaatgcttctgtttttcatcacatcaaagatgcatcaacataaatcaaccattatatcatgcaccatgataaaaaagggggataaaagtccccaaaccactgccaattaaaccaaca

SEQ ID NO: 7214 - DNA, 521 bp, Homo sapiens
cttctgtattttctgagagtgtgtgtggcactggtaaaatattttctgtatatgtttgacataattcaccaggaaaattatttgtacctacaagttccctcctggaaagatgttgatacatcacttattatcctttcattgtctgccagatctgtggcattgcttttttctgtggtattagtaatttaaattttcccttatttcttgatcaattttggcagagatttatcaattttattaatctcttttaaaaatctgtattgagctttgttaattttctctattacatactttttatttctactcttacgagtgctatttctttatttctcctttggattgagcccatttttctatttgtctaattttaggatttaaaattcaatcattatttttagatatttttatttttaaatatacacatgaaagttgcaatattaccttgggcactgttttgactgcattccacaagtttttatttgtcatgttttaatcaccattcagttcaaaatactttctaa

SEQ ID NO: 7215 - DNA, 4251 bp, Homo sapiens
ggggaagcaaggcatgtcgtacttggtggcaggagagagtgcagaggaaactgccacttataaaccgtcagatctcatgagaattccctcactatcatgagaacagcatgggggagaccacccctacaatccagtcacctcccaccaagtccctccctccacacatgggaattacaattcagattacaattcaaaatgagatttgggtggggacatagagccaaaccatatcagttagtcagtgaagactgaggtatctgtagaagtgagggaggagcacagtggtctggatgaaccagtggggtgatagtcaggggactggcattcagtgaggctgggggagaagcttcctaaaagcattgcccttgaaaagcagggcatacctatctgatactgaggatgtagaatgcagtttggagatgcttcctagctacctaatcttccaaggcaaaccatgcactcttcatcctgatatttgtgatgcctccctgggctacatgacagagggtgcactgcaaaggatgtgaaggaaagtcaccacagggcaaaggtggaaacccaggggcctttccccagtgagactttctggctgttcctttggaacttccacctgctagttgcagatgtttgccactggatggggccccatgctacgtgggaactgttcaggactgtgggtacttagttccagcagagctggctccaccagggcaccaggactgcaggcttctcaactcctggcctggagaggcagcttcagcaaccagtgcctgggaatccactagccctttctctgtgagtcacgtgagggcagaatctgctcaaagtcagagggctggagcaacctggattgtgccagagtgagggcccagctcactggaggtcagagtaagagagtcaaggatgggaagaaacagggttttgctcagtcttgcagatactgaggcactcaggaggctcaggatggcagcaacagggcatgtgctaaacttaccctagcctcttccttttaggcagccaccacagaggacatctgtttgcctctgtaccctaccccatctccatgctggtagatatagtctggggatacctttaaaacaaacaaacaaacaaacaaaacaggatctgtctatcacctgtccaaatcctgaagcaaaatgagccttctttatggccaccttggaaaggcctgagtccccagcatcacctgggatacaaagtgttctgaggtgggggcagagtgccctcctgcccagatgccacactccacaatatctcttcctggcagacaggtttctcttaacttcctttggcaaatttggtttcacttccttttgcaactttagaacctttctcaggtcagtcataaggtagtggagaagccaggatttgaacccattctgtctgattccagagctcatgcattaaccacctgactgtggtgcctccccatcatatgtgcatcaagtatgatcatttttgtagttctcagagtacttagcaccatgcacatctgtaataagtacagccactgcctactgggaggtctaaaggttcaactcataagggacccacaggccacactgggctccagtctccttaaaagatgtgggacggagatcaacaattgtcagcagaaccccatcaggcatttgtcttctcactgagccttgcagcaaaccacacagctgtctataacctatctgttcccagattcaagaacacaagctgctcatcagttgggtgcaggatccactctagtacaaaagctgtgtgtctcaaggcataattccttatgattacttcatagctctgcttttgtcttgagacaaaagaaatttccttcaattcctacttttgctgagatattgttttttgaaaagcaattaaatcttgtcaatcacttttcccacctctttgagatacttacatggcttttcttctttattctcttagtgtggtaaattacattgatttattttaaatatgaaaccagccttgaattccaggaacaaactccatttggacatgctagaacaaccttttatatttgtttagatttgatttcctgaagtggtgttaaaaggttttcatatctatgtctgtgagggatattaatctgtacatttttttattactattttctggtgttatggtaatgctagtctcatagaatgaattaggaaaagttgcctccttctgtattttctgagagtttgtgtggcactggtaaaatattttctgtatatgtttgacataattcaccaggaaaattatttgtacctacaagttccctcctggaaagatgttgataatcacttattatcctttcattgtctgccagatctgtggcattgcttttttctctggtattagtaatttaaattttcccttatttcttgatcaattttggcagagatttatcaattttattaatctcttttaaaaatctgtattgagctttgttaattttctctattacatactttttatttctactcttacgattgctatttctttatttctcctttggatttagcccatttttctatttgtctaattttaggatttaaaattcaatcattatttttagatatttttatttttaaatataaacatgaaagttgcaatattaccttgggcactgttttgactgcattccacaagtttttatttgtcatgttttaatcaccattcagttcaaaatactttctaatgctccttgttatttcttctttgacccattggttatataaaagtacgttttgctttatttctaaatatgtgaagactttctagatatctcagttatttattactaatttaattttattgtagccagagaaaatacactgtatgtgttcaatctttggaaatttcttgagacttattttttgacccagtatgtttgccctcatgaacattccatattcactagaaaaagaatgtgtgttcaaataatgttggatatagtgttatgcaaatgccactaaatcaagataaatcttttgcactcttgttttttgcctgcttgttctaacaataagtgagaaagaagtgttaatatctccaattgtgattgtaatttgactgttatcctttggtttggtcagtttttgcctgttgaaattctgctattaaaacataaacatttaagatatttatatcttcccaagagagatgctaaagaaaagtgtaaaaaaccaaagccattcttatgtacatcagaatatatggacaaaaactttcacagcaacatcattatcgcaagtaactgaaagcaatacaaaggcacatcaacaaaagattggacagataaattgttccttcaatggcaatgaaaatggatgttacagagatacatggatacatggaacaccctgagtgaatcttacatttattttgcagaagatatcaaaccaaacagagcacatattattccattcatgtaaaggtcagtaacagccacatataagctatattttggagattcatacacaatagaaaaaactatttaaaaagtcagataatactgattttaaaaatcgggatgttgaattcatctgggtgttgagggaggagcacattgtgacccagacagagcactcaggactctgagcacactaatactctgtattgccttcagtggtagttacatcagtatcaacttaagaaaaatttattaaaatctacataaataataaataattttctatatgtatgttatatttcccaatgctatgaaatgaattgtgtctccccaaaatgtatgtgttgaagtcctagcccccagcacctcagaatgtgaccgcatttggagatggaaccctttttttttatttttgagacacagttgcccagactagagtgtagtggcgtgatctcggctcactgacctctgcctcctggctcaaacaattctcatgcctcagcctcctgaggagctgggattacaggtgtgtgccaccgcatatggctaatttttgtatttttagtagaaatagtagacgccatgcataaataccaattctctccaaattgatctatttctcaatctacacatattctactggtgatctcatccaaggttgtggctgcaagtacaccactacaagccaaaaaattatgtgtatatctccatctcaggcttgtcttccaaactccatggtcatatatctaatattgtatttcttcttgtcttctctttgtatttgtgtagaacaaaagaaaaaaaattttaaagtaaaagaa

SEQ ID NO: 7216 - DNA, 97 bp, Homo sapiens
atttattactaatttaattttattgtagccagagaaaatacactgtatgtgttcaatctttggaaatttcttgagacttattttttgacccagtatg

SEQ ID NO: 7217 - DNA, 2630 bp, Homo sapiens
ctttgtctagcaaacatgtctgcagagtacaccagtaaagtgcaaatatttgaacatgggggattagagccactcatcagactactgagtagccctgacccggatgtaaagaagaactctatggaatgcatttacaacttggtgcaggtaagattaatttctaaaaagcgttctgatgaaagctcattttagaatttattttcccattaaaaatagaaaaaagcttttaaaaatgcaccagttttgcatcatcagatcttcttgttactggtatttatcattcagagaaaaaaataatggaagcttaatgtagataatctttcaattttcacattttgtaagtcattgtctcctgtgaaaaagtattttggaaatgtatttgtttttaaagaatagaatggcattcaaataaaatgtacttcttttgaaacaggaaatctaatatgtggaaactgcgcagctactattgactgaaccctggtggtctaagcacattggatgtaatatataccctattcaatgtactgagattttggtttaggcttatttgttgctaaaaatctagtgatttttcatttttgagtatgcaggacagaattcattgtccacaatagcaagatgctacctcactgtgctgttttcctttgtcacggaaagaaactgccaaccttcccctcccctgcagtcctgtcctttgcaccccaacccccagaatacacacacatacacacacacacacaccctcacgcccacagcaggtcagcttcctgacactttgaacagccttctctgctgcttagattccttaacaattagcatgcacatttgatgagctttagatcacctgaaattggaaagacacaaattttaaatggccattaatagagtagggaatgaggagataccaaaacgagagtgaagaagaggattaatgcagaggcaatgtattcaggcaaagagggacaaataggctcatgtcaaaatgcagcaaaagcaaaattcctggcccagtatgccattgctactcgacaggactggtttcaccctcacccctccctccctaaaaaagagaccctgagaaagaagctcagcccctcttttcccttctccggtcactttggctttacctcatttgattaaatattcctgtgtgtttgtgttttaaatcccaagactccttagagcagtatttctctattgtcttaagaagaaatcaaaatgattacctcacaattcttaacagcagtactggctaaaaactgtgtattagtttcctagggctgttgtaacaaagtactacaaactaggtggcttaaaactacagacagtcacagttctggaggccagaagtccaaaatcaaggtgtcagtaggaccgcgtccccactgagaccagataggacccttcctctcctcttcccagcttcatgtagtggccatccattggtggcatcccttggcttgtggctgcatcccagcaagctctccctctgttgtctctctctcctaaggacactaattgcacaaggacaccactaagggcccaccttactccaggatgacctcatcttaactaattgcatctgcaatgaccctgttttcagtaaggtcacattatgaggtactggggttaggacttcagcatatattttgggggaacacaattcaacccatgacaaaaagcaatctacaattgtgtctaaaggaagctgaatattagcaatcaattgaaggatggacaggggaaagctaagctataattggagccttttccacctttagtactattttatatttaccatgttttgatcaaaggtgtcatgtcttaaaagagtttgggagcttttcatggcttcttggcttgttttcttaaactcccccaaccacccacttcttcactcacacagaatcatagacatagaggcacaacaattgtctagattacaatgaccccttgattgtgtaaatgtcttaaataaaggtcacgtatctgaataaacccgctgtaaatttgcatgcagagggcctgtcaacagtactgcatgctaataggtatttcataaacaatccatttgaatgagagaataaggaatcaatgccatttcattgcattaattactatttgaagcagtatatccaagtgtgagaagaatttcattatgcatagattttattatactgctgtttaatcaggatttgctgtataataaacaatagataaaagtcatagatcatgtatattttctgttgtagacaatgtctacatattacagttaaaataaattttgatgttgtcaattgaaagatttcttattttttgagttattttggaagggaatctggaataaaagatgggcaaattataacttatgttcttgtgttagaaaacagaatttctccattcttgaggatgtattttgcttaaaaaaattattgatcatctgtattttgtggcaggattttcagtgtcgagctaaacttcaagaactaaatgcaatacctcctatcttagatctcttgaagtcagaatatccagtgattcagttgttggctctcaaaaccttaggtgttattgcaaatgataaggagtctcgaacaatgctaagagacaatcaaggattggaccatctt

SEQ ID NO: 7218 - DNA, 317 bp, Homo sapiens
gaatattgttaatcaatatccacaccttcaaaatgctcatacttagctgagaggcacaaacttcagccagctgcaactccagcctctgcagctaataatgccaggccaggatgtagctcctcattattgagtaaattaggattaaatgataaattactgactccaacgttattgctcaggattctcaattacaaacaatggaatctactggactatattaaacaaaaaatgaatttagtaaatgacatcagatagcaaacagcatctcaaaggggaccaaagagccacattctaaagctacagattaggaacaatgc

SEQ ID NO: 7219 - DNA, 317 bp, Homo sapiens
gaatattgttaatcaatatccacaccttcaaaatgctcatacttagctgagaggcacaaacttcagccagctgcaactccagcctctgcagctaataatgccaggccaggatgtagctgctcattattgagtaaattaggattaaatgataaattactgactccaacgttattgcttaggattctcaattacaaacaatggaatctactggactatattaaacaaaaaatgaatttagtaaatgacatcagatagcaaacagcatctcaaaggggaccaaagagccacattctaaagctacagattaggaacaatgc

SEQ ID NO: 7220 - DNA, 317 bp, Homo sapiens; identical to SEQ ID NO: 7218

SEQ ID NO: 7221 - DNA, 7625 bp, Homo sapiens
tctcaccagagtttgcctacgtcccagctgacccagctcagcttgctgctcagatgttaggtaaagtttcatctattcattctgatcaatctgatgtgttaatggtggatgtggcaaccagtatgcctgttgttatcaaggaggtgccaagctcagaggctgctgaagatgtcatggtggctgctcctcttgtgtgttctggaaaggtgctagaagtgcaggttgtgaaccaaacatctgtccatgtagatttgggttctcaacctaaagaaaatgaggctgaaccatcaacggcttcctcagtccccttgcaggatgaacaagaacctcctgcttatgatcaagctcctgaggtcactttgcaggctgatattgaggttatgtcaactgttcatatatcatctgtctataacgatgtgcctgtgactgaaggagttgtttatatcgagcaactgccagaacaaatagttatcccttttactgatcaagttgcttgtcttaaagaaaatgagcagtcaaaagaaaatgagcagtcaccacgagttagtcccaaatctgtagtagaaaagaccacctctggcatgtctaaaaaatctgtagagtctgtaaaacttgcacagttggaggagaatgcaaaatattcctcagtatatatggaggcagaagcaacagctctgctctctgacacatctttgaaaggtcagcctgaggtacctgcacaactcctggatgcagaaggtgctatcaaaataggctctgaaaaatctctgcaccttgaagtggagatcacttcaatagtctctgacaatactgggcaggaggagtctggggaaaactctgtaccccaggagatggaaggcaaacctgtgctctctggggaagctgcagaagcagtgcactcaggtacatctgtaaagtcatctagtggccccttccctcctgctccagaaggccttactgcaccagaaattgaaccagaaggggaatcaacagctgaataaggtttgatgaagccaggtaagaaaatcaggtatttccattacaaattgcatttcaggtgacatctgtatttcaggtagccatctctgtcggctccctgcagattggtcagtctttattttcaatagactttttttaaatgccaaagccatttaaagactttgttgtatttgagattctactactatgagaggagtgattttaaagtgatgtccccaaagcctggcctcagagtttggtcatctagcacttttgcgttattcttttggacatattatgtagtcaacaacagtatagcctgttgtcaggtacaaaatatattcatgtgatctgaatatgctgattgcaaaactgtaattagagggtgttggtttgaaattttcctcttgtgaatctaaaaattaaactacagcaatgcatttacataggctatggcattttaaaaagtgaaaaaatggtggtgtgtttgactgctttcacactgagtcaggagagctctgtaaccaggtttggggtgctgggccatgcgtttgtgttctgcctgggagcttcctgcagctgaaggagcagtttcatagctagatggagaggggaaaggtcaggggagccgggaggtatcagcagcagaaaggacggcccggcacttgcggcacttgaacagcaatagatgcagttcacgtaattggcttcctttgatcagctccctcttcctggcaagtgccaaaatcaagctgctttcttggctgttgaactatcaccatgttttcctatgacatagacatgatgtgaccttcatctccatctaattatggcatttggtctgctcaccttcctgccttatggataattgcaggggcccttctctttttagggacagaagggacgtgcatgagccaaccccccattccttttgcaaaaactctttcaatcctgactcttaactgagccagagtgattcaaaaagtgttagcaaagcaggtgtttagaaaagatcacattttgtctggcagtgtgacagggattctgcacagctggaaaggcagagggcagcgctgggagtggagcgtgtgggactggcactatatttgtggcttaagcagcatatccagaccaagtcactgttttcaaatgcttaactatttctaaaggaaaacagagttgtccacaacactaagaggatactaaccacaaattcagattatcaaaacctctctccctgtgagacagctgaagacctggcttgtacatatttttcaacaagcttaaaaaaaaagattacttgaaagtatctgaagctgttggaaaaatggccacttaatcatgtgcgtagtattatttcttttgttgttgttgttgagacaaaatcttgctctgtcgctcaggctggagtgcagtggcgtgatcttggctcaccacaacctccgcctcctgggttcaagtgattctcctgcctcagccttccgactaattgggattacaggcatgcgccaccatgcccggctaattttgtatttttagtagagatggagtttctccatgttggccaggctggtttcgaactcccgacctcaggtgatcaacccacctcagcctcccaaagtgctgggattacaggcgtgagccactgcgcccggcccgtagtgttattttcttttcaggggaagaaaaaaggctgcaccggggatagatggcccagcgttcaaaaggtaaactcggcacatttgggcaaagtgaaactcctctattgggaaccttttgtccgagggcccatcttctgggacttggttctcccaagacagtactgtcttcaagaggcaggtcacacttgcattatagatggcactcctaaacctctttttctcaacccaaagaatccctgtgggaccagccagccttttactgccacctaggatctatgatttcaagtcttgcctaaaaggggtgctctctggggttctcaatcctagattatgtgacgttttatgtgtggtaacaaattaatgggagataatggtgcctctgaagggccagagagattttgattatgtgaagatgacacctagtgctaacttctttaggaaataaacactatgcagatgcactaacgcttcctttaatggcttaacacactcttcaattgacttttgggtaaagctaaaggttgtgttgaccagtttcgtctgcgaggagcctatagaagccacgtctaaagttgaagtagctggaaactgcaacttagaataagattgcttcttcagccacaactgtagtgtcctgccacttgccaccacaacactgttctcctttttcaactgtagagaatctctttcacctgtcaaacacgattatgcagccctctctatagcatgctctacggtacatatcactacagctgttttatatgtaaaagagacttacaaagacattactatgcatagtgcctgatacagagaccaaaactttaattcctgcaaaatttttttttatagcaatggcaacaagtgaacgaggacaaccaccaccatgttctaacatgtggaccctttattgtctaactgataagaatcaacaaggtcacccatcaccgccacctgcacctgggccttttccccaagcaaccctctatttacctaatcctaaggatccacagtttcagcagcatccaccaaaagtcacttttccaacttatgtgatgggcgacaccaagaagaccagtgccccaccttttatcttagtaggctcaaatgttcaggaagcacagggatggaaacctcttcctggacatgctgtcgtttcacagtcagatgtcttgagatatgttgcaatgcaagtgcccattgctgttcctgcagatgagaaataccagaaacataccctaagtccccagaatgctaatcctccaagtggacaagatgtccccaggccaaaaagccctgttttcctttctgttgctttcccagtagaagatgtagctaaaaaaagttcaggatctggtgacaaatgtgctccctttggaagttacggtattgctggggaggtaaccgtgactactgctcacaaacgtcgcaaagcagaaactgaaaactggtaggtacactttcctaccataatatttaggccttaacacacgcgcgttttaagcattttgatttcttgacctggagatttagatatttaaaaacaatttgagataataagttggggtatactctaacttcctggggttactgtctccaacttcctaaacaccagttactaataaatgcacagcaggtgcactgtaccacaatgactcatgccaaggatttgatgcccgatacatgaaactaatgaactcagtcacctttgaatacctagtccattgtctaacaaacacagtggtagatgcgaaaaggggatggatttttaaaacaggacaatttagttggcatgtttagggagtagggaggagctgggaacaactgaagagcaaggtaagagagaaagtcttgattatgtaacagaacacttaatccacgtggtaagaggcagtagatggagaggtgagaggcagagtaaagagctaaacaacagctgagattaactgtggatgagacagtttgatcactcacaaatcattttttaatttttcattcatacttaatgccaaaccttatgctagccctcctcccctatgtgtggacagtagcgtgagcaaaaacatgggacctacatcttagttggggagacagacaaaaaagtgtattacaacatgtaaagtattatggagaaaacagggtgctgacacaggcctacctttaattgtcactattaggtagggtgttcaggctcagatgtaaactgacacctgagtatgagaagaagccagctttgcagggtgcgcccaggctgtgtcctagggcagaaaagaacacgggggttccagagacagcgaagtaggccacagtgagactggctggggggaaatggggagattatataaaatgaagaaagattttgattgaaaagttcaatgggaagccagcacaagtgttttaagcagaagaatgactgattgctgtttttattagatcactcaggctgctatgtggaaaacagattagcagtaagggggaggtcaacagaggaagtagggagatgagttgaaagtacagaagtgttatacaccaattagttacttaaaataattagtgggaattttaagttgagcatctgagagatcgacaaaagctagatttcattcataagcaggctcaaggaccagttactatatttaaggaaagacaaaattatcttatcttagggctacatgtacttcttcaacctctttatggacttctggtggaattgccaaaatggctgttttcagcatgaaattgctgggatatttcagtgcaaaagcccataggtaactagttaagcttagtaacagagcaggagggtagaccttgcatttctaatcttctgctcatttcacatgttcggtttcatgtttaactttaaacaattcaatgtttgcattattcctaacagatccagaaatgacgctgtctgggtcaacatttcagggaggagtctgccaccagtgtaatgtatcaataaacttcatgcaagcatacaattttgtattgcttttttttgtaatttaggaggactacaaccaaccaaccaaacacaaaaggcctatcaatcatctatcttttcagacttataaagcaatagcattttccaactcctatgtgtatacttttttaaactattcccactctaacagatctagtaacaaattttctaaccaggtagttccacttgattctgcatttgagattcacaccgaatgaatacggtagcacctctctatgctgtatctatctagcattcagttaatctctggatagataaatgcctacttaccactatgcatgccaggtaactggttatcatctccttgaccctgggagctatggtaccacaaggacttctttcgtaggacacgtctaacaatttaggatagtattaagtggcaacattagtatatttgaaattttaaaagaaaccacacttttggggaacattctaaagcctttatttagcatcaggtagattatttcattataacacttgttaacttcaagacagcaattaaaatcacggactggcagctacctaggcccctgggagcagtatctcagtctggggtttgggtggataaatactataagatttaagatgaatgtgccccaattaaaggggcaaaactactgtacagtaggtctccacacatattttaagtacacaggtactttgcaaacttgaaatgcacaaggcctccttttatatagtttgatacttacatgagtgcaacttactttccctagtggcatttgccactggaagtggaagcatttaacaaggtttgtcattatgtaatggtgattaaaatctatatttctagggcatttttgtgaattgctagattttatacatattttcagttcaaatgtaaacttaaccattttaatgatactgactgcagaaaactgtaaaagtaaattcagagcactaagtaaatgaaatacttttccagtttaattctttagaattttcaaatcagaaatatctattctgaatattcaggcattttttttcttcttggaagatggaaggggtaacattgggaggattagtatgaataaaagccatcttatcaatgaagtctttataaaatgacataacctctatatctgagaataaacattgtataggaggagagttctaaatatgtcaaaggttacatctaaaacattcaagcatgacagcataaaaatattcaaaataacttgatttgggattactatatagttccataaagctaaagttacatttaggtataaaccttcagtaaatatggcaacagcaaccataaaaagcatattccccagcagtgttctcttacctctatataaaatagtattccaaataagtacattttatagcaaaattatgcatttttcctaagactttcatcaccaatatcgccttataccctgcttttgttgggtgaaatgcagttatctcatgagtgttttttcatttttttttttaaaagataagtagaaaccaagggaaaaaaatttaaaaacataggtttaagacttatttgtagattagccaaacaccctgacttgtatgcattttaataaatgtcaggcaaattgaagtaatttctgtcccagtagctgccagagtaaatccagtcctgtgctccattgtagggattaggaccttgatggaaccacctgttaaaagaaaaaggacaagacttacaggggaaactatggaaaatcacaggctgtttcttcactagtttgcagtattattctattgcagcaactcattctgtgagtgagggatagttctaaagagatgctgaagtgatgctgtatttctgcttaggtagggaacaggtctgtggaataatattccaaaaggggtaatgataccatgcaaaaggcatatggatttcccaccaggatctagcaagctacttgacagaagcagggtcttctaataggttggctcgaaacaatgtatttgtctaacgggtttaccctctagcctgggtc

SEQ ID NO: 7222 - DNA, 4067 bp, Homo sapiens
tctcaccagagtttgcctacgtcccagctgacccagctcagcttgctgctcagatgttaggtaaagtttcatctattcattctgatcaatctgatgtgttaatggtggatgtggcaaccagtatgcctgttgttatcaaggaggtgccaagctcagaggctgctgaagatgtcatggtggctgctcctcttgtgtgttctggaaaggtgctagaagtgcaggttgtgaaccaaacatctgtccatgtagatttgggttctcaacctaaagaaaatgaggctgaaccatcaacggcttcctcagtccccttgcaggatgaacaagaacctcctgcttatgatcaagctcctgaggtcactttgcaggctgatattgaggttatgtcaactgttcatatatcatctgtctataacgatgtgcctgtgactgaaggagttgtttatatcgagcaactgccagaacaaatagttatcccttttactgatcaagttgcttgtcttaaagaaaatgagcagtcaaaagaaaatgagcagtcaccacgagttagtcccaaatctgtagtagaaaagaccacctctggcatgtctaaaaaatctgtagagtctgtaaaacttgcacagttggaggagaatgcaaaatattcctcagtatatatggaggcagaagcaacagctctgctctctgacacatctttgaaaggtcagcctgaggtacctgcacaactcctggatgcagaaggtgctatcaaaataggctctgaaaaatctctgcaccttgaagtggagatcacttcaatagtctctgacaatactgggcaggaggagtctggggaaaactctgtaccccaggagatggaaggcaaacctgtgctctctggggaagctgcagaagcagtgcactcaggtacatctgtaaagtcatctagtggccccttccctcctgctccagaaggccttactgcaccagaaattgaaccagaaggggaatcaacagctgaataaggtttgatgaagccaggtaagaaaatcaggtatttccattacaaattgcatttcaggtgacatctgtatttcaggtagccatctctgtcggctccctgcagattggtcagtctttattttcaatagactttttttaaatgccaaagccatttaaagactttgttgtatttgagattctactactatgagaggagtgattttaaagtgatgtccccaaagcctggcctcagagtttggtcatctagcacttttgcgttattcttttggacatattatgtagtcaacaacagtatagcctgttgtcaggtacaaaatatattcatgtgatctgaatatgctgattgcaaaactgtaattagagggtgttggtttgaaattttcctcttgtgaatctaaaaattaaactacagcaatgcatttacataggctatggcattttaaaaagtgaaaaaatggtggtgtgtttgactgctttcacactgagtcaggagagctctgtaaccaggtttggggtgctgggccatgcgtttgtgttctgcctgggagcttcctgcagctgaaggagcagtttcatagctagatggagaggggaaaggtcaggggagccgggaggtatcagcagcagaaaggacggcccggcacttgcggcacttgaacagcaatagatgcagttcacgtaattggcttcctttgatcagctccctcttcctggcaagtgccaaaatcaagctgctttcttggctgttgaactatcaccatgttttcctatgacatagacatgatgtgaccttcatctccatctaattatggcatttggtctgctcaccttcctgccttatggataattgcaggggcccttctctttttagggacagaagggacgtgcatgagccaaccccccattccttttgcaaaaactctttcaatcctgactcttaactgagccagagtgattcaaaaagtgttagcaaagcaggtgtttagaaaagatcacattttgtctggcagtgtgacagggattctgcacagctggaaaggcagagggcagcgctgggagtggagcgtgtgggactggcactatatttgtggcttaagcagcatatccagaccaagtcactgttttcaaatgcttaactatttctaaaggaaaacagagttgtccacaacactaagaggatactaaccacaaattcagattatcaaaacctctctccctgtgagacagctgaagacctggcttgtacatatttttcaacaagcttaaaaaaaaagattacttgaaagtatctgaagctgttggaaaaatggccacttaatcatgtgcgtagtattatttctttttttttttttttgagacggagttttgctcttgttgcccaggctggagtgcagtggcgtgatcttggctcaccacaacctccgcctcctgggttcaagtgattctcctgcctcagccttccgagtagctgggattacaggcatgcgccaccatgcccggctaattttgtatttttagtagagatggagtttctccatgttggtcaggctggtctcgaactcccgacctcaggtgatccaccctcctcggcctcccaaagtgctgggattacaggcgtgagccactgcgcccggcccgtagtgttattttcttttcaggggaagaaaaaaggctgcaccggggatagatggcccagcgttcaaaaggtaaactcggcacatttgggcaaagtgaaactcctctattgggaaccttttgtccgagggcccatcttctgggacttggttctcccaagacagtactgtcttcaagaggcaggtcacacttgcattatagatggcactcctaaacctctttttctcaacccaaagaatccctgtgggaccagccagccttttactgccacctaggatctatgatttcaagtcttgcctaaaaggggtgctctctggggttctcaatcctagattatgtgacgttttatgtgtggtaacaaattaatgggagataatggtgcctctgaagggccagagagattttgattatgtgaagatgacacctagtgctaacttctttaggaaataaacactatgcagatgcactaacgcttcctttaatggcttaacacactcttcaattgacttttgggtaaagctaaaggttgtgttgaccagtttcgtctgcgaggagcctatagaagccacgtctaaagttgaagtagctggaaactgcaacttagaataagattgcttcttcagccacaactgtagtgtccctgccacttgccaccacaacactgttctcctttttcaactgtagagaatctctttcacctgtcaaacacgattatgcagccctctctatagcatgctctacggtacatatcactacagctgttttatatgtaaaagagacttacaaagacattactatgcatagtgcctgatacagagaccaaaactttaattcctgcaaaatttttttttatagcaatggcaacaagtgaacgaggacaaccaccaccatgttctaacatgtggaccctttattgtctaactgataagaatcaacaaggtcacccatcaccgccacctgcacctgggccttttccccaagcaaccctctatttacctaatcctaaggatccacagtttcagcagcatccaccaaaagtcacttttccaacttatgtgatgggcgacaccaagaagaccagtgccccaccttttatcttagtaggctcaaatgttcaggaagcacagggatggaaacctcttcctggacatgctgtcgtttcacagtcagatgtcttgagatatgttgcaatgcaagtgcccattgctgttcctgcagatgagaaataccagaaacataccctaagtccccagaatgctaatcctccaagtggacaagatgtccccaggccaaaaagccctgttttcctttctgttgctttcccagtagaagatgtagctaaaaaaagttcaggatctggtgacaaatgtgctccctttggaagttacggtattgctggggaggtaaccgtgactactgctcacaaacgtcgc

SEQ ID NO: 7223 - DNA, 1021 bp, Homo sapiens
tctcaccagagtttgcctacgtcccagctgacccagctcagcttgctgctcagatgttaggtaaagtttcatctattcattctgatcaatctgatgtgttaatggtggatgtggcaaccagtatgcctgttgttatcaaggaggtgccaagctcagaggctgctgaagatgtcatggtggctgctcctcttgtgtgttctggaaaggtgctagaagtgcaggttgtgaaccaaacatctgtccatgtagatttgggttctcaacctaaagaaaatgaggctgaaccatcaacggcttcctcagtccccttgcaggatgaacaagaacctcctgcttatgatcaagctcctgaggtcactttgcaggctgatattgaggttatgtcaactgttcatatatcatctgtctataacgatgtgcctgtgactgaaggagttgtttatatcgagcaactgccagaacaaatagttatcccttttactgatcaagttgcttgtcttaaagaaaatgagcagtcaaaagaaaatgagcagtcaccacgagttagtcccaaatctgtagtagaaaagaccacctctggcatgtctaaaaaatctgtagagtctgtaaaacttgcacagttggaggagaatgcaaaatattcctcagtatatatggaggcagaagcaacagctctgctctctgacacatctttgaaaggtcagcctgaggtacctgcacaactcctggatgcagaaggtgctatcaaaataggctctgaaaaatctctgcaccttgaagtggagatcacttcaatagtctctgacaatactgggcaggaggagtctggggaaaactctgtaccccaggagatggaaggcaaacctgtgctctctggggaagctgcagaagcagtgcactcaggtacatctgtaaagtcatctagtggccccttccctcctgctccagaaggccttactgcaccagaaattgaaccagaaggggaatcaacagctgaataaggtttgatgaagccaggtaa

SEQ ID NO: 7224 - DNA, 7633 bp, Homo sapiens
tctcaccagagtttgcctacgtcccagctgacccagctcagcttgctgctcagatgttaggtaaagtttcatctattcattctgatcaatctgatgtgttaatggtggatgtggcaaccagtatgcctgttgttatcaaggaggtgccaagctcagaggctgctgaagatgtcatggtggctgctcctcttgtgtgttctggaaaggtgctagaagtgcaggttgtgaaccaaacatctgtccatgtagatttgggttctcaacctaaagaaaatgaggctgaaccatcaacggcttcctcagtccccttgcaggatgaacaagaacctcctgcttatgatcaagctcctgaggtcactttgcaggctgatattgaggttatgtcaactgttcatatatcatctgtctataacgatgtgcctgtgactgaaggagttgtttatatcgagcaactgccagaacaaatagttatcccttttactgatcaagttgcttgtcttaaagaaaatgagcagtcaaaagaaaatgagcagtcaccacgagttagtcccaaatctgtagtagaaaagaccacctctggcatgtctaaaaaatctgtagagtctgtaaaacttgcacagttggaggagaatgcaaaatattcctcagtatatatggaggcagaagcaacagctctgctctctgacacatctttgaaaggtcagcctgaggtacctgcacaactcctggatgcagaaggtgctatcaaaataggctctgaaaaatctctgcaccttgaagtggagatcacttcaatagtctctgacaatactgggcaggaggagtctggggaaaactctgtaccccaggagatggaaggcaaacctgtgctctctggggaagctgcagaagcagtgcactcaggtacatctgtaaagtcatctagtggccccttccctcctgctccagaaggccttactgcaccagaaattgaaccagaaggggaatcaacagctgaataaggtttgatgaagccaggtaagaaaatcaggtatttccattacaaattgcatttcaggtgacatctgtatttcaggtagccatctctgtcggctccctgcagattggtcagtctttattttcaatagactttttttaaatgccaaagccatttaaagactttgttgtatttgagattctactactatgagaggagtgattttaaagtgatgtccccaaagcctggcctcagagtttggtcatctagcacttttgcgttattcttttggacatattatgtagtcaacaacagtatagcctgttgtcaggtacaaaatatattcatgtgatctgaatatgctgattgcaaaactgtaattagagggtgttggtttgaaattttcctcttgtgaatctaaaaattaaactacagcaatgcatttacataggctatggcattttaaaaagtgaaaaaatggtggtgtgtttgactgctttcacactgagtcaggagagctctgtaaccaggtttggggtgctgggccatgcgtttgtgttctgcctgggagcttcctgcagctgaaggagcagtttcatagctagatggagaggggaaaggtcaggggagccgggaggtatcagcagcagaaaggacggcccggcacttgcggcacttgaacagcaatagatgcagttcacgtaattggcttcctttgatcagctccctcttcctggcaagtgccaaaatcaagctgctttcttggctgttgaactatcaccatgttttcctatgacatagacatgatgtgaccttcatctccatctaattatggcatttggtctgctcaccttcctgccttatggataattgcaggggcccttctctttttagggacagaagggacgtgcatgagccaaccccccattccttttgcaaaaactctttcaatcctgactcttaactgagccagagtgattcaaaaagtgttagcaaagcaggtgtttagaaaagatcacattttgtctggcagtgtgacagggattctgcacagctggaaaggcagagggcagcgctgggagtggagcgtgtgggactggcactatatttgtggcttaagcagcatatccagaccaagtcactgttttcaaatgcttaactatttctaaaggaaaacagagttgtccacaacactaagaggatactaaccacaaattcagattatcaaaacctctctccctgtgagacagctgaagacctggcttgtacatatttttcaacaagcttaaaaaaaaagattacttgaaagtatctgaagctgttggaaaaatggccacttaatcatgtgcgtagtattatttcttttttttttttttggagaaacggaattttggcccttgttggcccggcgttggtagtgcagtggcgtgatcttggctcaccacaacctccgcctcctgggttcaagtgattctcctgcctcagccttccgagtagctgggattacaggcatgcgccaccatgcccggctaattttgtatttttagtagagatggagtttctccatgttggtcaggctggtctcgaactcccgacctcaggtgatccaccctcctcggcctcccaaagtgctgggattacaggcgtgagccactgcgcccggcccgtagtgttattttcttttcaggggaagaaaaaaggctgcaccggggatagatggcccagcgttcaaaaggtaaactcggcacatttgggcaaagtgaaactcctctattgggaaccttttgtccgagggcccatcttctgggacttggttctcccaagacagtactgtcttcaagaggcaggtcacacttgcattatagatggcactcctaaacctctttttctcaacccaaagaatccctgtgggaccagccagccttttactgccacctaggatctatgatttcaagtcttgcctaaaaggggtgctctctggggttctcaatcctagattatgtgacgttttatgtgtggtaacaaattaatgggagataatggtgcctctgaagggccagagagattttgattatgtgaagatgacacctagtgctaacttctttaggaaataaacactatgcagatgcactaacgcttcctttaatggcttaacacactcttcaattgacttttgggtaaagctaaaggttgtgttgaccagtttcgtctgcgaggagcctatagaagccacgtctaaagttgaagtagctggaaactgcaacttagaataagattgcttcttcagccacaactgtagtgtccctgccacttgccaccacaacactgttctcctttttcaactgtagagaatctctttcacctgtcaaacacgattatgcagccctctctatagcatgctctacggtacatatcactacagctgttttatatgtaaaagagacttacaaagacattactatgcatagtgcctgatacagagaccaaaactttaattcctgcaaaatttttttttatagcaatggcaacaagtgaacgaggacaaccaccaccatgttctaacatgtggaccctttattgtctaactgataagaatcaacaaggtcacccatcaccgccacctgcacctgggccttttccccaagcaaccctctatttacctaatcctaaggatccacagtttcagcagcatccaccaaaagtcacttttccaacttatgtgatgggcgacaccaagaagaccagtgccccaccttttatcttagtaggctcaaatgttcaggaagcacagggatggaaacctcttcctggacatgctgtcgtttcacagtcagatgtcttgagatatgttgcaatgcaagtgcccattgctgttcctgcagatgagaaataccagaaacataccctaagtccccagaatgctaatcctccaagtggacaagatgtccccaggccaaaaagccctgttttcctttctgttgctttcccagtagaagatgtagctaaaaaaagttcaggatctggtgacaaatgtgctccctttggaagttacggtattgctggggaggtaaccgtgactactgctcacaaacgtcgcaaagcagaaactgaaaactggtaggtacactttcctaccataatatttaggccttaacacacgcgcgttttaagcattttgatttcttgacctggagatttagatatttaaaaacaatttgagataataagttggggtatactctaacttcctggggttactgtctccaacttcctaaacaccagttactaataaatgcacagcaggtgcactgtaccacaatgactcatgccaaggatttgatgcccgatacatgaaactaatgaactcagtcacctttgaatacctagtccattgtctaacaaacacagtggtagatgcgaaaaggggatggatttttaaaacaggacaatttagttggcatgtttagggagtagggaggagctgggaacaactgaagagcaaggtaagagagaaagtcttgattatgtaacagaacacttaatccacgtggtaagaggcagtagatggagaggtgagaggcagagtaaagagctaaacaacagctgagattaactgtggatgagacagtttgatcactcacaaatcattttttaatttttcattcatacttaatgccaaaccttatgctagccctcctcccctatgtgtggacagtagcgtgagcaaaaacatgggacctacatcttagttggggagacagacaaaaaagtgtattacaacatgtaaagtattatggagaaaacagggtgctgacacaggcctacctttaattgtcactattaggtagggtgttcaggctcagatgtaaactgacacctgagtatgagaagaagccagctttgcagggtgcgcccaggctgtgtcctagggcagaaaagaacacgggggttccagagacagcgaagtaggccacagtgagactggctggggggaaatggggagattatataaaatgaagaaagattttgattgaaaagttcaatgggaagccagcacaagtgttttaagcagaagaatgactgattgctgtttttattagatcactcaggctgctatgtggaaaacagattagcagtaagggggaggtcaacagaggaagtagggagatgagttgaaagtacagaagtgttatacaccaattagttacttaaaataattagtgggaattttaagttgagcatctgagagatcgacaaaagctagatttcattcataagcaggctcaaggaccagttactatatttaaggaaagacaaaattatcttatcttagggctacatgtacttcttcaacctctttatggacttctggtggaattgccaaaatggctgttttcagcatgaaattgctgggatatttcagtgcaaaagcccataggtaactagttaagcttagtaacagagcaggagggtagaccttgcatttctaatcttctgctcatttcacatgttcggtttcatgtttaactttaaacaattcaatgtttgcattattcctaacagatccagaaatgacgctgtctgggtcaacatttcagggaggagtctgccaccagtgtaatgtatcaataaacttcatgcaagcatacaattttgtattgcttttttttgtaatttaggaggactacaaccaaccaaccaaacacaaaaggcctatcaatcatctatcttttcagacttataaagcaatagcattttccaactcctatgtgtatacttttttaaactattcccactctaacagatctagtaacaaattttctaaccaggtagttccacttgattctgcatttgagattcacaccgaatgaatacggtagcacctctctatgctgtatctatctagcattcagttaatctctggatagataaatgcctacttaccactatgcatgccaggtaactggttatcatctccttgaccctgggagctatggtaccacaaggacttctttcgtaggacacgtctaacaatttaggatagtattaagtggcaacattagtatatttgaaattttaaaagaaaccacacttttggggaacattctaaagcctttatttagcatcaggtagattatttcattataacacttgttaacttcaagacagcaattaaaatcacggactggcagctacctaggcccctgggagcagtatctcagtctggggtttgggtggataaatactataagatttaagatgaatgtgccccaattaaaggggcaaaactactgtacagtaggtctccacacatattttaagtacacaggtactttgcaaacttgaaatgcacaaggcctccttttatatagtttgatacttacatgagtgcaacttactttccctagtggcatttgccactggaagtggaagcatttaacaaggtttgtcattatgtaatggtgattaaaatctatatttctagggcatttttgtgaattgctagattttatacatattttcagttcaaatgtaaacttaaccattttaatgatactgactgcagaaaactgtaaaagtaaattcagagcactaagtaaatgaaatacttttccagtttaattctttagaattttcaaatcagaaatatctattctgaatattcaggcattttttttcttcttggaagatggaaggggtaacattgggaggattagtatgaataaaagccatcttatcaatgaagtctttataaaatgacataacctctatatctgagaataaacattgtataggaggagagttctaaatatgtcaaaggttacatctaaaacattcaagcatgacagcataaaaatattcaaaataacttgatttgggattactatatagttccataaagctaaagttacatttaggtataaaccttcagtaaatatggcaacagcaaccataaaaagcatattccccagcagtgttctcttacctctatataaaatagtattccaaataagtacattttatagcaaaattatgcatttttcctaagactttcatcaccaatatcgccttataccctgcttttgttgggtgaaatgcagttatctcatgagtgttttttcatttttttttttaaaagataagtagaaaccaagggaaaaaaatttaaaaacataggtttaagacttatttgtagattagccaaacaccctgacttgtatgcattttaataaatgtcaggcaaattgaagtaatttctgtcccagtagctgccagagtaaatccagtcctgtgctccattgtagggattaggaccttgatggaaccacctgttaaaagaaaaaggacaagacttacaggggaaactatggaaaatcacaggctgtttcttcactagtttgcagtattattctattgcagcaactcattctgtgagtgagggatagttctaaagagatgctgaagtgatgctgtatttctgcttaggtagggaacaggtctgtggaataatattccaaaaggggtaatgataccatgcaaaaggcatatggatttcccaccaggatctagcaagctacttgacagaagcagggtcttctaataggttggctcgaaacaatgtatttgtctaacgggtttacccctctagcctgggtc

SEQ ID NO: 7225 - DNA, 4067 bp, Homo sapiens
tctcaccagagtttgcctacgtcccagctgacccagctcagcttgctgctcagatgttaggtaaagtttcatctattcattctgatcaatctgatgtgttaatggtggatgtggcaaccagtatgcctgttgttatcaaggaggtgccaagctcagaggctgctgaagatgtcatggtggctgctcctcttgtgtgttctggaaaggtgctagaagtgcaggttgtgaaccaaacatctgtccatgtagatttgggttctcaacctaaagaaaatgaggctgaaccatcaacggcttcctcagtccccttgcaggatgaacaagaacctcctgcttatgatcaagctcctgaggtcactttgcaggctgatattgaggttatgtcaactgttcatatatcatctgtctataacgatgtgcctgtgactgaaggagttgtttatatcgagcaactgccagaacaaatagttatcccttttactgatcaagttgcttgtcttaaagaaaatgagcagtcaaaagaaaatgagcagtcaccacgagttagtcccaaatctgtagtagaaaagaccacctctggcatgtctaaaaaatctgtagagtctgtaaaacttgcacagttggaggagaatgcaaaatattcctcagtatatatggaggcagaagcaacagctctgctctctgacacatctttgaaaggtcagcctgaggtacctgcacaactcctggatgcagaaggtgctatcaaaataggctctgaaaaatctctgcaccttgaagtggagatcacttcaatagtctctgacaatactgggcaggaggagtctggggaaaactctgtaccccaggagatggaaggcaaacctgtgctctctggggaagctgcagaagcagtgcactcaggtacatctgtaaagtcatctagtggccccttccctcctgctccagaaggccttactgcaccagaaattgaaccagaaggggaatcaacagctgaataaggtttgatgaagccaggtaagaaaatcaggtatttccattacaaattgcatttcaggtgacatctgtatttcaggtagccatctctgtcggctccctgcagattggtcagtctttattttcaatagactttttttaaatgccaaagccatttaaagactttgttgtatttgagattctactactatgagaggagtgattttaaagtgatgtccccaaagcctggcctcagagtttggtcatctagcacttttgcgttattcttttggacatattatgtagtcaacaacagtatagcctgttgtcaggtacaaaatatattcatgtgatctgaatatgctgattgcaaaactgtaattagagggtgttggtttgaaattttcctcttgtgaatctaaaaattaaactacagcaatgcatttacataggctatggcattttaaaaagtgaaaaaatggtggtgtgtttgactgctttcacactgagtcaggagagctctgtaaccaggtttggggtgctgggccatgcgtttgtgttctgcctgggagcttcctgcagctgaaggagcagtttcatagctagatggagaggggaaaggtcaggggagccgggaggtatcagcagcagaaaggacggcccggcacttgcggcacttgaacagcaatagatgcagttcacgtaattggcttcctttgatcagctccctcttcctggcaagtgccaaaatcaagctgctttcttggctgttgaactatcaccatgttttcctatgacatagacatgatgtgaccttcatctccatctaattatggcatttggtctgctcaccttcctgccttatggataattgcaggggcccttctctttttagggacagaagggacgtgcatgagccaaccccccattccttttgcaaaaactctttcaatcctgactcttaactgagccagagtgattcaaaaagtgttagcaaagcaggtgtttagaaaagatcacattttgtctggcagtgtgacagggattctgcacagctggaaaggcagagggcagcgctgggagtggagcgtgtgggactggcactatatttgtggcttaagcagcatatccagaccaagtcactgttttcaaatgcttaactatttctaaaggaaaacagagttgtccacaacactaagaggatactaaccacaaattcagattatcaaaacctctctccctgtgagacagctgaagacctggcttgtacatatttttcaacaagcttaaaaaaaaagattacttgaaagtatctgaagctgttggaaaaatggccacttaatcatgtgcgtagtattatttctttttttttttttttgagacggagttttgctcttgttgcccaggctggagtgcagtggcgtgatcttggctcaccacaacctccgcctcctgggttcaagtgattctcctgcctcagccttccgagtagctgggattacaggcatgcgccaccatgcccggctaattttgtatttttagtagagatggagtttctccatgttggtcaggctggtctcgaactcccgacctcaggtgatccaccctcctcggcctcccaaagtgctgggattacaggcgtgagccactgcgcccggcccgtagtgttattttcttttcaggggaagaaaaaaggctgcaccggggatagatggcccagcgttcaaaaggtaaactcggcacatttgggcaaagtgaaactcctctattgggaaccttttgtccgagggcccatcttctgggacttggttctcccaagacagtactgtcttcaagaggcaggtcacacttgcattatagatggcactcctaaacctctttttctcaacccaaagaatccctgtgggaccagccagccttttactgccacctaggatctatgatttcaagtcttgcctaaaaggggtgctctctggggttctcaatcctagattatgtgacgttttatgtgtggtaacaaattaatgggagataatggtgcctctgaagggccagagagattttgattatgtgaagatgacacctagtgctaacttctttaggaaataaacactatgcagatgcactaacgcttcctttaatggcttaacacactcttcaattgacttttgggtaaagctaaaggttgtgttgaccagtttcgtctgcgaggagcctataaaacccacgtctaaagttgaagtagctggaaactgcaacttagaataagattgcttcttcagccacaactgtagtgtccctgccacttgccaccacaacactgttctcctttttcaactgtagagaatctctttcacctgtcaaacacgattatgcagccctctctatagcatgctctacggtacatatcactacagctgttttatatgtaaaagagacttacaaagacattactatgcatagtgcctgatacagagaccaaaactttaattcctgcaaaatttttttttatagcaatggcaacaagtgaacgaggacaaccaccaccatgttctaacatgtggaccctttattgtctaactgataagaatcaacaaggtcacccatcaccgccacctgcacctgggccttttccccaagcaaccctctatttacctaatcctaaggatccacagtttcagcagcatccaccaaaagtcacttttccaacttatgtgatgggcgacaccaagaagaccagtgccccaccttttatcttagtaggctcaaatgttcaggaagcacagggatggaaacctcttcctggacatgctgtcgtttcacagtcagatgtcttgagatatgttgcaatgcaagtgcccattgctgttcctgcagatgagaaataccagaaacataccctaagtccccagaatgctaatcctccaagtggacaagatgtccccaggccaaaaagccctgttttcctttctgttgctttcccagtagaagatgtagctaaaaaaagttcaggatctggtgacaaatgtgctccctttggaagttacggtattgctggggaggtaaccgtgactactgctcacaaacgtcgc

SEQ ID NO: 7226 - DNA, 340 bp, Homo sapiens
agcaggtgctaccatttttaggttagaatatgtgactttcttaaagtaaaaaaaatcctatagtcctctagcttatcaattcattaagttaaactttatataccaattttcttaaatggaggaatgcctttattaatatgcagcatctatgtcattactaaattactataccaacaaagatgaaataatttattgcccaagttggtctcccccccacccaacctttttccccagttttgtgtggaagtttgatcaggagctttttccatggaggttttcagcttccttagttctaggcacaaagttatgatctttccctgatgctgaccaccttaggatg

SEQ ID NO: 7227 - DNA, 340 bp, Homo sapiens; identical to SEQ ID NO: 7226

SEQ ID NO: 7228 - DNA, 340 bp, Homo sapiens; identical to SEQ ID NO: 7226

SEQ ID NO: 7229 - DNA, 340 bp, Homo sapiens; identical to SEQ ID NO: 7226

SEQ ID NO: 7230 - DNA, 490 bp, Homo sapiens
cccctatgtgtggacagtagcgtgagcaaaaacatgggacctacatcttagttggggagacagacaaaaaagtgtattacaacatgtaaagtattatggagaaaacagggtgctgacacaggcctacctttaattgtcactattaggtagggtgttcaggctcagatgtaaactgacacctgagtatgagaagaagccagctttgcagggtgcgcccaggctgtgtcctagggcagaaaagaacacgggggttccagagacagcgaagtaggccacagtgagactggctggggggaaatggggagattatataaaatgaagaaagattttgattgaaaagttcaatgggaagccagcacaagtgttttaagcagaagaatgactgattgctgtttttattagatcactcaggctgctatgtggaaaacagattagcagtaagggggaggtcaacagagaaagtagggagatgagttgaaagtacagaagt

SEQ ID NO: 7231 - DNA, 584 bp, Homo sapiens
tcggctcccccagcgccgctggtaaaagaagtcaccaagaggttttccaccccggatgctgcccccgtgtcaacagaaccagcctggctggctttggccaaaaggaaagcaaaggcttggagcgactgtccacagattattaagtaaagagtgactctcacccatccctactgccagttattggctcctctcttgccctttttatttatttattttttatatggggtaaagaaatcaagctagggaaaagaagcatgttttataggctccaaaataatgtttagaaactgaactggtggtgttcattgtaaagagtggatttgcacaaccctaggtcctggtgcctcgagctcctcctagttctcaagagaaaattccgtccacaggaccacatgaagcaaaatctctaagctaagaactcgtgagagcctgccatgcccatttcatggccttgcacacacacccacccacacaccattcagaacatgtacttttgccaacctttggtaatggttttttgattctatgcactaattttctttgtccaaaacatttactctaccatatgtctgggaatgtttatc

SEQ ID NO: 7232 - DNA, 3538 bp, Homo sapiens
gtgaaaggatcatatctagctaaaagcaagaacacccattctcctgaatgcagtgagtaattgggaatcacaaggaacattctggcacccaactgtgcccatcttagttttcatgagttttccccactctgaagctgtaacccagaaggcacatccattcacatttttaccgcactgtggattcatagtgtggggccctgttattccaataccctccttaaggacatgtgaagcatttggcccagttggctcccagggaacattttaatttaatgtagtgaagaaagacaattctagatcagagctacaagttcactttctgtctctgagaatctccatctagggcagtagttcttatgatgtgtaggctccctcctagggcctactcaatcagagcctgtggggactgggccaggaatatgtattctggcaaaaactcttcaggtcagttctgatagatcccaaaggttaagaactgtgagaaacactgatcctaatgcaatctaatttttcagacttcgaaggggaggctcattcactcaaaaagcaacagtgagacaggaaaaataataaaacaaccccccaagccagccatttattacaagaagcaacaggttattgacattacatgtttgaaaattccctttggtctttagggaaaataaacaggaagccaagatttggagcctttgtaataaggacttcctgcagaaagtcttttctttactataattgagtaattcatatttagagtcacatgtccagtagcatttctaattttgagcattcaccttgctacctttaaaaaacatctgagttttaagtggcctttttatcatcatacacatgtgcatacaaagaagggacttggcagtttaaaagccacatatattcacttttattgccctaaatttacatgaaacagacatactggcaaactcacatattgctggtgctaaccttatatttcatagtgttggcatattccccttttcttagattcttactccgaaatataggtacacatcctttgctctgtgcagagggaattacatcctttttcctctcctacaaaaacatgctttattaagtatccatcattactttcctttatgctcgctcaatatgcaatgtgctgttattctaccatgtaccttaaataaaggatgatggcaaagttatttaccatgtagaaaccattttctttctagaaacaatagctcagcctcactgtagcagctggcatgtgtggtcaagtggatagttgtactcttgcaagttggatttaatatcatatatactggaccttcagactgttaaaaatcaatgtaacctttttttattgctatggcaagcaattagtatttcactgcacgtcttccatactaatgttcatttctaaatcttatatgtaggcatttgttagttccaatgatttcctcactaatataacactttttaatgggaatctttccacctacagccctggaatgataatgctacagtaattcttctgaattgactttttctttcatcctgtcagctttggacaatatcccaattatggcagggaacaggtggggaactaagatcagttacaaaaagttgtagatgtgtcaactttgtattggctgggatatcactgtgcccaaacaaaacaggcgaaatacctcagttaaaatttttccatcaaagtctttaaaagaagagtatactgaagaaagggcagtcacaatacttacttctaacagcttctaaagggtacatgtttaacatttcatttcaaaatcaccccaaatttgcactaaataccaatgaagtgttattttgctttagtagtcttctgagcaacaaactatggggaattctgtaaaaacatataaaaagttcaagactttttttttaaatgaatgatcactatgttaaatgcaaacttttttttttttttatttaaacaaacatacacttctcctggcaaggttatagatgattaacctctgttcatagacttatatataaaactagagggttttttgtttacttttttaatttttcaagtgcaattgtttcttacacagacattattactattaaattatcatttagccagttatctgcaaatatatagtatgtattgtctcttcttgtgacgtttagtttaattgcttattttaaagcagaaacattagttacaagtgtcttacaatatttttaccaacagtaaagtagagacttaatgaaaataccttagtgtgattttaatataatttgcatattttagttgtataaagttttaatgtaaaatgtccattattgaagggaaaagatctttcaataaaaaatacccacgagatcttcggcactgatggaatttgatttcgatgaccaactgcaaaacaatctcattatatttacataacttttgttgaacaagaacaactttaaactgttttattacatttttttcctaggtatttttagagaaaaataatgaacgggggcaaataaaatgtttgtctcaatcctaaattggaattgaatggtctgggtctcagacaaaaggattgtacagccacctcacagcatgggctactcaccagcagcagcagcagaagcagcagctgagagcacgtgagaattgcagcttatggccacacatcagacatactgacttaaagggccagaccctggtgaaatgaaaagtgagttaggcatgtgagcacttgccttggcttccagaaaactaagtaatcaagagaaatactattttgatgcagtattttaaaaaaatcaaaattaatgcaaaaaaaaaaacccattgcaagatgagcaaaagatcaaattttttttagtatgtataacttgatttaattttatttatttttaaaatattttgcatatttttcttaaacctacggcacttagtattccaaggaggtctcccatctaagtactaaccaggcttgaccctacttagctttttttttttttaatttaattttattattattatactttaagttttagggtacatgtgcacagtgtgcaggttagttacatatgtatacatgtgccatgctggtgtgctgcacccattaactcgtcatttagcattaggtatatctcctaatgctatccctcccccctccccccaccccacaacagtccccagagtgtgatgttccccttcctgtgtccttgtgttctcattgttcaattctcacctatgagtgagaacatgcagtgtttggttttttgtccttccgacagtttactgagaatgatgatttccaatttcatccgtgtccctacaaaggacatgaactcatcattttgtatggctgcatagtattccatggtgtatattgccacattttcttaatctagtctatcattgttggacatttgggttgcttccaagtctttactatcgcgaatagtgccgcaatcgacacacgtgtgcatctgtctttatagcagcatgattcataggccctcgggtacataccagtaacggtctggctgggtccaacggtat

SEQ ID NO: 7233 - DNA, 260 bp, Homo sapiens
ttgtaccactgccctgcccagggatctcccatctttgacccactgcactgccagactaccagcagacataccttgcaagctcctctgagctggaatcaatcctactgaaactattcaaaaaattgaggaggaagtgttcctgtttaactcattctacaaagccaccatcaccctgataccaaaatctggaaaagacacaagaaaagaaaactgcaagtcagtattcctgacgaacatcaacataaaaatcctcaagaaaa

SEQ ID NO: 7234 - DNA, 229 bp, Homo sapiens
cacattggtaaattatataagctttaaaattttatgtagacaaaagtggtttctctttccaccataatatcttgatggttaaatatgtcggtgaagtaattgttttataaactattgtttaaaccttgaaacttcatagcaagcgtttttctaggcagaaaacattgtgcttgaaaactttggagatttaaaaacaagcaggccaatttcactgcgatctataatttcc

SEQ ID NO: 7235 - DNA, 229 bp, Homo sapiens; identical to SEQ ID NO: 7234

SEQ ID NO: 7236 - DNA, 142 bp, Homo sapiens
aagcatattttataaagtctctccaaacctgcttgttattgatgttgttaatacaatatttagattccattttgaacattccagctggcaaagattactgaatgtcagtctctcccaagaatgagttggtttttttttttct

SEQ ID NO: 7237 - DNA, 455 bp, Homo sapiens
tttgttgaaatgattaaggttgcctgtcagttcagtgaaccatttgttatcttcaattaaactgaaagtctccatacatcagccctttgtaaatactgagtggttaatgctgcctcttaggtttccaaatgtcttaagaatgtgttgtaataaaaaaaaattagcatcattttaatattaatactccgacatagattttatcttgagagtgtttctgaaccaaagactctgttagccccatattcaggggcacagggaatctcagatatgtttgtatttgttttcccgaaagagttaagacaatattttctttttttagttaaggttagttacccacatgtcctgattttgactagtttaactcttgaattcttcctctttagcatattttccctgttctagttgatcctttcccctctccaatgtctaataaaaagcttgttttcttggaacaa

SEQ ID NO: 7238 - DNA, 142 bp, Homo sapiens; identical to SEQ ID NO: 7236

SEQ ID NO: 7239 - DNA, 455 bp, Homo sapiens; identical to SEQ ID NO: 7237

SEQ ID NO: 7240 - DNA, 14925 bp, Homo sapiens
tgtaaagctccgctgagagggagagtgctgaagaaggggacagcctctgtacctgcggcgcggcccgaggggcggacgcgagcggagtgacgcgctggaggctgtttatagcgctgtcaggacagcgcggggagtggaggcagaggcctgaggtgaggggcctcgggcctgctgcgcctgcagggagttgaacaaaacgcggggaaatacgggctgggggtgggtgagaggaggagcgatgggctttccacttccacagctttaaaatttaaaagctcgacccgggaggctgttggcgtctggttgccataacaaccggcagcctcgtggcaggccggctgggggcggggctctgagaaccggggcggggctgtggcggggctaacaggctgcagctgagaaacccaccccgagacggagccggaaggccgttattcagaggcggctccgagcctccccttcgccttctggatgctctgagctcctcaacttggcgttcagggccctgcattgtctggtccgttttcaccggagagtccagcaactgacactttcttcccttaaacctgttgggcggttcattcctttgagctactgtacatgctcttccttctgccggtaatgccgttccctcccctattgtcttgtccgcctgaagggtttatcagagtctctggaggccctcttcatcccgacgattctgttgccctaagaaatactgtgccctgaattgcggaacagagctctagttacaaaaaacacccgctggctgtgtgcaccagatgcgtccccaacccgctgctcccagttcagagtgcaccaagcacctgccctattcccagaagtacagaggaagcaagcagcccccaattcacatctcctgccgctgccctgattggggatgaacgggcactgactgcagggccaaagccacagcggcctctcgagctgcagagttctcctgacactggctctagaggaccctcaccccccagctctcaagctcaagctccccagccccctgaataacaggaccatctcctttaagactctaagatataaatgcaggggctggtcagagtagtgactccaaaaaaaaaaaaaaatcacttagtgactccaaactgtcagccaggcgcgatggcacatgcctgtaatcccagcactttgggaggctgaggcaagaggatcacttgaggccaggagtttgagaccagcctgggcaacagggagactccatctctacaaaaaataaaaatgttagccagatgtggtggtacacacctgtagtcccagttattcaggaggctgaggtgggaggatcacttgagctcaggaggccgaggcttcagtgagctatcattgtaccactgcactctagcctgggcgacaaagccagaccctgtctccaaaacaaaaaagcaaggtgtcttctgttccttggtaaagggcagtaaagggtagtaggacttgaaattccccctgattcagagtccactgttgctatttactaaacaccctgagcctatgaaatgaagagaatagttatgctatatggggtatatataaaatatacctatatatcattatatatcgtacatatggcattctatataacatgtacatatatctacataggtatatttatatcaatacatatatttgtatattattatgtatatatcactatatacattatatacctgcaggctccacatgtgtgcatgagtgggaacacacacacacacgtacacacacagtgcctggcactaacaggagcttgcataactagaaggaaactgaggcaggtggtgaggcctgccagcctgtttggtctcctacagctggtagagcagcccctgctctcctgaccttcagtggcccggaccctcttccatcaccctgtgtaccccacagagctccccggattatggtgcactgagaaggcatctggaagcctgggccctcatggcatccaacgataaaggcatggcaccctcgctgggctctccctgggcctcccagatggggccctgggatgccatcctcaaggctgtcaaagaccagctcccgtctctggactcagactcccctttggtaagcaagaactctctccctggatgccttgtccttcctaccagagcaggcatgacgctggccaggacagctttggagcacttctctgaagacttttcctgctgacctgtgcagtttgttgtcattttactttaaatcgcatggccagactcaaagttgtgttttctgggtgcctatttccttctttactctttcttctgccttgattgtcatctctgagcatgggtattggtgctcagcatcttgggagaccctttcagtggagtttttggtgctgacttggaacccaggtcaatttgatgcagaagctctgtcctttccattctgctattctccactctctcgtgccaggacagggccagaacacccactgagaatgcacaattccagtgcattgtgataagccttcgagggattctgcatttgtggtttggggtccctgaaatggctctcaaagacgctcagaccaatagccctaggtgcaggcataagaccctgctaaagatgctcctggcgggggctgctcagtgcacaggttggcactgggcgttaagagacagtatgagggttttaaaaggaacgggcagggtttgggtcctacctgggcaccagcaacagagcttcagggacctcagacgtcatccagtgcatgacgaggctaaggagaacctaaggggaccccacgcctcagtgctcagggtgttttcacaccttcagtctcatttgagagtatgagccccaaccccttcaagaagacaaactaagctgtgtaagtgatggctcagggtcacaggggatggggagggctggaccctgctctttcagctaccacctcactgccctgttcatgtcacgaggcattaatgaagcacctgctgtatgcgaggtacttgcagaaccaggagccccagtctcacctccacgaggttgtgctgccaagcccatttctaaacggtggcaagaagccgcgcacagcaaggctgactgggagagaaccggatctcccccaggctcctgagcagcagggctggacgggctggatgggctgggcgggctgggctggaagtgagagtggagagtggagagcgggggtggctaggccctcagggctctgcctgctgccttgtcctccaaaagccctctcatttgtccacagtcggactatggggaagaggagctgttcatcttccagcgaaaccaaacctccctgattccagacctgtcggaggagctggctgaagatcctgccgatggcgacaagtccagggcctgggtcgctgcagctgaagagtcccttcccgaggtctgtgggacacagaagagtatacgcctgtgtgtgtgcgatgttagtctaaactgactggtctaaaccactgttctagcatttccacgatatgctagaacatggtccttttttttttcccccatgtacaacccaaggtattcagatgcccaacatctaacctccacgcacctccctctcctggggagcccggcaccttagggctggcatgcacgcttgattttccatccgattttgacccttctcttcttcttgatcgctcctatcctgttctctaccatggcatcctgaatagcttctggccattgtcacaactgcttgtcctaattgtctctcccttaacccagctggcttcatggctacctggctcatcccagcacctggcgagtacacaggaactctggtttactaaactgctaaactacactgctacaggctacagtggggagtgggagggaggaagatggcccatcagtgcctgagcaagcacacaagctggacctcgtgggagggacaacccaggagacaatgagcaaatgtggactaagcgtgccaacgcaggcctgtgttgccagtgctggaggctgagacagaggttcccatgaggccaggagtttgagaccagcctgggcaatacagcaagaccccatttctggctgagcacagtggctcacgcctgtaatcccagcattttaggaggccagtatgggtggatcacttgaagtcaggagtttgagaccagcctggccaacatggtgaaaccctatctctactaaaaataaaaaaattagctgggcatggtggcaggtgcctgtaatcgcagctactccagaggctgagacaggagaatcgcttggacccgggggagcagagatggcagtgagccaagatcacaccactgcacactccagcctgggcaacagagtgagactccatctaaaaaaaaaataataataaagaaaagaaaacagtgtagaggcactaacccacttccaaaatggagacggggcctagctccagcgtaacttctctcaggtgttctgctgagaacaattaacctactgaatgggagggcatgggcaccgaaccagatcatctcccagaaccaggacatgcacccacccatcaccttgaaggaaatctcccatcagcccagccattcctagacctaggtttgaaataaccccacacaagagagatccccagggcagctaagaactctggtgggttcaggtggaacaatttgcatgtgattttattttgctgcttcatttttacaatcaattacttcagaaactcttctggatgattttttcttgtttttttttttttttttttttgtaatgtgggatctctactaaaaaattagctgggtgtgatggtgtgcctgtggtcccagctactcaggatgctgaggtggaaggatgacttgtactctagcttggggtatgaatttctgagccccaacattatcatgattgataatttaaatattgtttcattgctgtaacagtgcattccactctagccttgtatttaaatagcaggatgcctcagtggtgctgtctttagccagcccatattcaacagtagctttccaacttttttttttttttttttgggacaggatcttgctgtgtcacccaggctggaatacaatggtgccctcactgctcactgcagcctccacctcccgggctgaagcgatcctcccacttcagcctcccaagtagctgggattacacgcacgccactgtgctggctcatttttgtatttttagtagaatgaagtgtgcagttaaaaatggttaaaagaggtcaggcacagtggcttgtgcctgtaatcccaccactttgggaggctgaggcaggaaagatagcttgaggccaggaacttgagacaagcctggaagaccaactatgttgtagagactctgtcactacaaaataatattaaaaaaaattaactgggcctagtagtatgtgcctgtcatcctagctacttgggaggctgaagtgggaggatcgcctgggccagggaagtcgaggctgcagtgagctatgatcgcaccactgcactgcagcctgggcaacaaagcgagacttcacctcaaaaaaaaaaaaaaagtacatatttttctatgaaaaacattccctgaagcatgtttttgaggatgctaactgaacatacctgttttcttgacagccagttctggtgcctgcagaattggccacagaacctgggtgcagacagaacacaaggacaaaggatgcatcctctcaggaaggaagagaccctggcaggccttttgaaagctctggtgaggtcagcgctcttcttgggatggccgaggagccccccaggtggctggaaggcgaccttggaagcctgtctttcaacaccaaaggatcccagggtcctccctgggacccacaggccgaagccactctctcctgccatgaaggagacccaaaggcagagcccctcagcactgcctcacaagaatctgtgaaccgccgggccctccgacaggagagaaggaagatgatagagacggacatcctccagaaagtcacccgggatgcctgcggcccgaccagcagtgacaaaggtggggtgaaggaggcgccctgccacgctgcggagtcagctcccagatccaaaatgcccctcgtggagcctccggagggaccaccagtgctctcgctccaggtaggcgcctccccgtgcctggctgtttctcaggcctgttacctgtggcatggctgctgttcccatgcactggagctagaagcagcttgagggctggcccactaggaccttaggcccattatccaccattctgtgtacctgtctcagtagaggggtggagggtcccagcagagcacatcctgggggagggttaacaagaacaaagaacaagcagggcctgccttccttaaagagagaaaaggaggccaggcacagcggctcgcacctgtaatcccagcactttgggaggccgaggcgggagccccggagttcaagaccatcctggtcaacacagtgagaccctcatctctaaaaaaaaaagaaatcatcctggctaacacggtgaaaccccatctctactaaaaatacaaaaaaaaaaaaaataattagctgggtgtggtggcgggcgcctgtagtcccagctactcaggaggctgaggcaggagaatggcgtgaacctgggaggcggagcttgcagtgagccgatatcgcaccactacactccagcctgggtgacagagcgagactccatctcaaaaaaaaaaaaaaagaaagaaagaaagaaacaaagaaagaaagaatgtataaatttaaaaagagagagaaaaaaggaattccactcccgaggatgttcataaatacatatagccatatctaaaatatagaacctggttctgtcaaagcctgatctcaaaatatgaaagccctcattctcataaactagtgagcacctgttaaaaagttgtatttagtgcattaatgagggaaccagcaggatgacagtgccggtttaatgagatcataagaaactgggattttggccaggtgtgatggctcacgcttgtaatcccagcactttgggaagccaaggcaggaggaaaatctgaggtcaggagttcgagagcagcctggccaacatggtgaaaccgtgactctattaacaatacaaaaattagccaagtgtggtggtgcgcgcctgtagtcccactatttgggaggctgaggcaggagaatcgcttgaacccaggagatggggatcacgcccctgcactccagtttgggtgacagagcgagactccatctcaaaaaaaaagaaattgggattttgtaaaacactggggaaaaagagaggaatgcagagatacgcttgtcacattcatgtcctagaggagttatcttgtctactggacagaaaagtaaccatcacaccgtctcggttttacacattttggataatttttcttaacaggttagagaaaactggcaccaggtatacacagaagtcatctttactactgtttaaatcaaccgttctttctgctcacctaaaaacttatttttctccacttagagggctgcaaagagttgaaaggtcatatgataaacatgaattcttgattaatttcctccctcctcctcagactcactctgcccctaagcactcactgccaagccttccagttttagctcctgcctggaacagcttgattcttaaaagaacaaaattttttaacctccaaacattgtgaacctgtatgaacctaaatagtgtttctgaaaacaacacagggtttggctgggctcggtggcttatgcctgtaatcacaacattttgggagacccaggcagatggattgcttgaggtcaggcattcaagaccagcctcgccaacatggtgaaaccccatctctactaaaaacacaaaaattaggctgggcgtggtggctcacacctgtagtctcagcactttgggaggtgaaggcggaggtggaggcaggtggatcacctgaggtcaggtgtttgttcgagaccagcctggccaacatggtgaaaccccatctctactaaaaatacaaaaaaaaaaaaaaaaaaaatgaagggtgtggtggcgcatgcctgtaattccagctacttgggaggctgaggcaggagaatcacttgaacctgggaggtggaggttgcagtgagctgagctcgcaccactacactccagcctgagcgacagagtgagactcggtctcaaaaacaaaacaaaatgaaacaacaatacagggtttccttcgggtcagacaacgtctttgtgccaaaaacaaaagtgaagtactgatccccaagaaagcataggaaggaggtggcaaagtgcaggcccaccttaacggaggcgttcaatctgtaatggaaaggcggggtcagcctatttgcaaactctgtcatgcactgaattcctgatttctacccccaacatcctgtgaccatctccatgggtcacagcagctgtgaagcaggtacttgtgcctctgggacccctcagcatcctcataatcactggttttaatgatttcagcaacttgaagcgtgggatttggatgacatccttcagagtctggcgggacaagaagacaaccagggaaatcgtgcacctggaactgtgtggtgggcagctgaccaccgccaagttcaaggtctgaccttgaacactggagcccacgtgaatccccacaagcagcaccttcctgggcccctcagacacagagggctgcaggctggtcacagacagtcctgcagcccacacaagtcttccctgctggccccgccctaaacactcatgctgccagtccccaaaagacttcattcattcaacatatatgtgaccgcctgctacgtgccaggcgtgggccaggtcctagggacaaaggagaggcctccgcaccccaccccatgacccatacctcctcttccccacctccctgggccagcctgccttccttctccctcctcctccttcctgggggaaggaagccccaccttctgtgcgcagtcagctcctaagcacgctcccgcttcccctggcctccccatttaaaaagggaggcaaaggatgtcaccactgtcactacactcatggctttgctctgggaagtcctgcaaataaaatgaaagttctccaacccctccctatccactcgggccacaaaggcgaggggaggcaggtctgaggcagaggagccagggcaggtgcggcgcttccgcctctggtcccaaagcaaagactcccctgtgactgacagcccgtgttatgttaaatacattttgttggtttgtaattcaaatcccataaagcaggaggtagagagccaaccattctggaggacatgtgtgtgcatgtgtatgtgtgtgtgtaactggcactccctttgtggaggggagtagggcagaatgtattcttttttttttttttttttttttttgagacagagtttcactcttgttgcccaaactggagtgcaatggcacgatctcggttcactgcaacctccacctcccgggttcaagcgattctcctgcctcagcctcctgagttgctgggattacaggcacgtgccaccacgcctggctaattttttttgtatttttagtagaaacgggatttcaccatgttagccaggctggtctcgaactcctgacctcaggatccgcctgcctcagcctcccaaagtgctgggattacaggcgtgagccaccgcgcttggccgaatgtattctctgttttaaaggcacataaccctttaatcaagctattgcaattagaaaatctgtcttacactctgactctagtaggtaaagatgtgtgttcagagctgtttgctgcagtgttgtttaaaaatctgaaaagctggaaacaacccatattcaggaggagtccagctagatcgttttagcacagaatacactgcggctcgatgaggggatctccgtaggttaacgtggaagcatgtaatatacaaagtgaaaaaagtgaagttgaaaaaaaacctatagaggatgaccctattttttttttaagtcaacacacagaactgttcattatgatcacctgtgacaagtgggaccggggtgtgaggaagtgggataaacttaaaaatacgtcactcctacttcaccaagcccttgtgccacaggccctgctcataaagattctgcccccctcagccctgctgagctagaggtggagtcctcagagggctgagtagggagagggctgggcgggggcagtggaggagcctgaggtccattcacatgtggagaccccaggggtcctgaggctccagctgctgtaagtcacaagtgggccaagtccccactaatcagcctctcctttggccatcctcagaccgcatggtgccgagcgcccacaacaggctcatggaacagctggccctcctgtgcaccacgcagtccaaggcctctgcttgtgcccggaaggtgcctgccgacactccccaggacaccaaagaggcagattcaggaagcaggtgggacttgtagccaggcccggctcctgtggtcctttagaatggccccatggttttgtagcactgactgggcctaccaagggcggggcactccatgtgcattttctcagtcactctcaagcatctgatcaggcagtcgctccagtcatccccattttagagatggggaaaccaaggctcagagaggttgactctctctggccataaatggcagggctgggactcaagccctcaagtacctgctctttccccaaacccaacgggaaccctcctttcaatgggaggccatgaggcctccctgagagtaggaaggttatcatgtgaccctgcccctctggccacagctgattggtccagctctgggcatgtgaccccagctgcgggatttttcaatctctgtgtctctgtgtaggggtggaagggcaacagccacctgtcctgccacagggagaaaggcaagctgcagtgaagctgggagaggcagaggtggaggcagggccccagggtcccgtaaggcccctctatatgcctgccctccccacactttggttgctccgcacttgaggaatctgagaaccagtgaatcccttttcacctgaccagcagtgggtttctgtgtctggaaaccaaaagtacctaacagaagtggctacacctggctgggcgcggtggctcatgcctataatcccggcactttggaaggccgaggcaggcagatcacctgatgtcaggagttcgagaccagcctggccaacatggtgaaaccccatctctactaaaaacacaaaaaaattttccaggcatgttggtgcatgcctgtaatcccagctacttgggaggctgaggcaggagaaatctcttgaacccaggaggcggaggttgcagtgaccaagatcatgccactgcagtccagcctgggcgacagagcaagactctgtctcaaaaaaaaaaaaaaaaagaaaaagaaaaagaaatggagagaactgcagtgttaaccatggcagccattagccgtgtgtggctactaaacacctaacgtggtgaatgtgactgaggaactgaatgttttatgcattggatttaaactggcttaaatgtaaacttagccacttgtgccaagtggctacacttaccacagatagagagcatgtccatcatgagggacgttctgttggccagtggtggcctaaatctcgcatgctgttctgaagagtaaaagagcaaatgtgtttaatgtgcccgtctgtagagagtgggcactcactgggtggcagccacgagcactgtgactggacaaacccagcgcaggtcacagagttatcacagagaactgactccacaacacctgcttttctcatttcagatgtgcctcaaggaagcagggctcccaggctgggccaggcccgcagctggcccagggcatgaggcttaacgcagagtcccccaccatctttattgacctgcggcagatggagctaccagaccacctgtccccagaaaggtccggagggcagtgactaccccataccagcctctactttgcagagttgcctgttgaccgcacagagcctctggtggatcctgatggggaggaacagggacttcaaaaggcttggatcaattctcaattgaaaagtgctggcctacagtccccctgggtccctgcagggagggaagaggggcatgaggcacacctcctcgggctgggctctatgcaatagagcccaacacgtctaggctggagggcatcacccacacctgtcctcacctcctggcaggacgtccaccggcctccagtgtggctgctgacctcttgcattgggtcaccagcaaagcccgagtgcttcaagccccaacaagagttggaacaccaggtggagtgggcacatccagaaacccatttctctccctgcagctccagccacagctcctctgacagtgaggaggaggaggaggaagagatggcagctctgggagacgcagagggggcatctccttcctccctggggctacggtaaccacccaggggcctctcgccacctgcagatgtcccacctctgctttctgcagcaagccctccacctggcacatttaccgcctgtggtgaggtcttgctgcacccaccgcacagggtgagggggacggcacagctttcatcatcctgcccacgtccactgggtcccagcagtggcagcagtgatgggctgcctgaattgcattcttgctctgaaatgggagctgggctcatctgcttttctcctgtttcagtaaggagggctgggaggggcggcccccacggggttgagtgaatttggtctcattgtgtcacaggacctgtaccgggaaaagccagcttctccagcagctcagggcctttcagaaggggacagcccagcccgagctgcctgccagcaaggggcccgcgggtgggagggctcaggcccctgaagacacagctggatcacgaactgggaggaagcaacacatgaagctctgtgccaaggggcagagcgcccaggctcgactcccaagaggcaggcccagagccctgggggatgttcctgagccaggggcagccagggaggccctgatgcctcctctggagcaactatagctgcctcaggtagtgggatcccaggagtgggcaggggcgggctgacttgccatggaccctgggccccggtgtccccttgttgttcctgcatttccactagcaggggcattccagaggcagggaccctcagactttggactgttgcccaccctgttagagctcagtcacaggtgcatgaacttagaggaaggatgcagatacaaatctgtatgtaacctgtgacaacagctttgggataaaggggcctggtcctctgagggagatgggcagggacagcaggaggacggggtgctgctctctgcgggactctgaggctcttcatctttctccagttctgcatttttttaaacaggcatctattatttccatcaataaggtctttttaaaaaccaagtaaaacgtatttagaggattttagggttgaaagagacctaagccttattttctggcttcctgcatacttgctattttgggcacctaaattaacacacgacacacacatgcctacccacacagatctaatacacgtggttttttctcttttcgagacgcagcagctgggactacaggtgcacaccaccatgtccagctaattttttttttttttttttttgtagagatggggtctcacggtgttgcccaggttggtctggaactcctctcaatcctcctgcctaggccttccacagtgctgggattatagcactgtgagctgccagcctggcttttaatgaactttttgaaagaggagtaacgagaatttgctttctctttctcttctttacctaagatagaaaggcacacatagattctcaaggcctttgacctttatgaatctagacagaatactggaaacccctggaaatgctgtcctgtgtagaatggagcagcggcctcacttgttgatcaccagcaaaaactggggacatctgcttgccccctgccaagacccggcccctccacaggacaagcctggtcttcctgggtcctgttcctttgccagcaccgtcttgcagccccgtcttcacgggatgcttttgtaactgctgtgatcagccctgacctgggcacctgtttgtctccccaaccttgtctccaggatgtgtcctgctgtctgccccgtgggaagagcagagaaatcatcaccaccttgggccccacggtgccacgggctcaggcagcacagtagggcgccgggcctttgggacagtgtcccagcttcccctggggttcacccctggctgccaggccactgaggatgggcaggggtctcttctcatcaagccttgtaccaggcaaaagacaggccctgcttggccgtggtcactggccgccaagatcagggctacagatgtctgctctctggaccccacgtgatctggccactggggacccccacccgaccccactcccaatgatgaggggcattttcattgcaagtcaaaggcaagacaggcttccataaagtcccaggaggtccctcctgtagggcacaaggccaggctgcctcccagcccccaggccctctcccacctacagagaccctcccctgccccctccactccggggcctgtgccgccagaaccgggctctgcccccatacgctgccctcgcagcctggcggcctccgctgtggctgcctagctgtcaagagcaaaggctttttttttcttcaaccccattttcttccatttctcccacctttttaatgccagtaacctcactgagaatgttttacagtgatggaaaataaactctgttccaagttcaactctgaattactgtgtctgtcaaggcaaggggagtgaggtaggaagtcagacctgcgtccaaagctggctctgcc

SEQ ID NO: 7241 - DNA, 265 bp, Homo sapiens
gtggagtctcgttctatcaccaggctggagtacaacggtgcgacctcggctcactgcaacctccgcctccctggttcaagtgattctcttgcctcagcttcccgagtagctgggactacaggcacgtgccacgccaccatgcctagctaatttttgtgtttttagtagagatggggtttcaccatgttggccaggatggtctcgatctcctgaccttgtgatccacctgcctcggcctcccaaagtgctgggattacaagcgtga

SEQ ID NO: 7242 - DNA, 19802 bp, Homo sapiens
ctccagcgaggtctacctgctcagtgccttggctgctctgcagaaggttgtggagactctcccgcacttcatcagcccctatctggaaggcattctctcccaggtgagccacgatagccacgacatgctacgcagggtggctggggaaggtaaaagatcacaaatgtagtgattttgttttttctttaagggttagtttccgtttgacagaaaggagtcttatttctgaagagatgtgcttgcttttattaaatgtgtactttttctcttccatcatccttgccacttaatcttgaaattgatatgggggtcactttttagcgagatgcttctcttctttaattgtgcggaatgtattctggcttttttttcttctgtgagatctttggagttgggctggtagagccgccttttattacttgtggaaattgatgggccctgtttctactgtgagaggtataatcctaaggcatcttgcaaagcagaatttttgtattgcacgtcagcggtttcctgtcaacacgctaggggccagtggtatttatgattgaagatgctcaagaatgttgagacctggctgttccattgtgttgatcatttgccatttacaaggttaggagccttcattaccatggggcaaatgattaaaccgcttcacttacaccacagccagggtttaaaagtagccttctcagagaaaggggcctgtgctctgaggagctttctcagttttttagcaacttgactcttgccgtggtcccttgcattcctgtcctctaagaaaatcatctgtctgggtgctgtgtgtgcgtctgcgtctaccatcggccttcgtccctgatcgcaagttgggcaagaggtgtctgcccagttttatccactgacgtttagggctgactttaaaaggaattctgtgtgtagttaaaaagtgctaagcattttccaaacactagtacctcatcatgaagcctctctgtaagtgtgtgtttgtcagcgaagatctgcagtggccctgatcactttttttatattcctgtaggtgattcatctggagaaaatcactagtgaaatgggttctgcgtcacaggctaatatccgtctcacatctcttaaaaagacactggctaccacacttgcaccccgagtcctgttgcccgccatcaaaaaaacttacaagcagattgagaagaactggaaggttagatcttattgggtattaagactttggagaagggagaggtggtactgcaatgtgtaaactttgacttaaagaagaagatttagtttttaaaaatacacaccgctgaactctaggaatcatttgaaaatggcacatctctttcctgtgttattggtagaatcacatgggtccgtttatgagcatcttgcaagagcatattggggtgatgaagaaggaagagctcacctcccatcagtctcagctaaccgcctttttcctggaagccctggacttccgagcccagcactctgaggtaagctcaggttcactcctccaaatcctaaagctgttatccacctattgaagagtccgagaacaatctagccgtgtaacagtggtacttgccaaaataatttacagtcaggtatcagcactctaataaatgggctcttctgttttcagaacgatctggaggaagttggaaaaacggaaaattgtatcattgactgtctagtagccatggttgtcaaactttccgaggtcacattcaggcccctgttcttcaaggtgacgctttcttcctcttcctctcttttgtgctcagatttaagtgacaagatgtcgaagaaactaatactgtcttatcctttcagctgtttgattgggctaaaacagaagatgccccaaaggacaggttgttgacattttacaacttggcagattgcattgctgaaaagctgaaagggctttttactctgtttgccggccacttagtgaagccttttgctgacaccttgaaccaggtgaacatctccaaaacaggtgggtggtcgcttcagttcagctgtcacccttgccctgtgtgccttatacaaggtaccagtaagacacaacctagtgcttggaagcaagattttagaggttcttaagtcctaagctaaggagggtgaattttttacttcattgttgtcagacagtgaagtgttgttttagcatcatgagcgaatgttataagtcacctcacttgggagaaagaataaagtaaatggccgttactgtcagttactggaagtaactttaaaacgcaaaaattaagattagtttattctctaatgctaatacgtgacccacttgacagttgagggaatttaacttgccagagtgagtgttagaatcttaactctaaaagaaggaatcattcttcgagagaccatccattgtgttctgccttcgtcctgattatgatttctagatcattttagactcttctgatttagttattttaatagtgatttcaatgtaaacattggagattaaatggttaagttcagtgttttttcatttttactcttcccacgtctacagatgaagcattttttgactctgaaaatgaccctgaaaagtgctgcttgctgttgcagtttattttgaactgtttatacaaaatcttcctttttgatacccagcattttataagtaaagagagagcagaagccttgatgatgcctctggtggatcaggtaaccaaacagaatcatctttcgttgctgaggaagccatcactgttcgagcttggcaggttttagatctgctcaaatgacagcttgctaggatttttctttgtaaggttgttttttctggtctttttaatgaaatgttttatttgaaaattgttttttcaaagatataacttcattgtggaatttgagttttgttttgttgttttgagacagggtcttgctctgtcacccaggctggagtgcagtggtgcaatctcggctcgctgcaacctccacctcccggtttcaagcaattcttgtgcctcagcctcccgaatagctgggatcacaggcgcccgcctccacacctggctaatttttgtatttttagtagggatgaggttttgccatgttggccaggctggtctcgaactcctgacctcaagtgatccacccaccttggcctcccaaactgctgggattacaggcgtgagccaccatgcctggccctgagttattttttattttttattttttaaactgctcaaaagacagacatgatataagctgtcatggttaatgtattcatttgttttaactgggcctcactgagaacgcgtcagagcatggctgtcctctggagcaaagagctcctctgagatgttctgctggagagaaaggggcgatgataaagggtatgagattccatttgagttctagaaggcaatacatttgccctagagagtattagaataatgcctggtttttgaacctgctaatatcatgaaagatagtaaaatatttgtatgttggatattttttcaaacagaagaaagaaatgagacttgttgttcaaagtctttgtcttactcttcctagctggaaaacaggcttgggggagaagagaaattccaggaacgggtgacaaagcacctgataccatgcatcgcacagttttcggtggccatggcggatgactctctttggaaaccactgaactaccagattctgctaaagacgagagactcctcgcctaaggttaggaactgcgtgacaagtactgaaactgcatcttttcactgcatagcctaaacagcctgcaggtggtcacagatgtaggccccctagtaaactggcagggaagaacattgctatttgtcatccagtactagaggtccggtcttttgtattaggcagaaatttgtgcctaagaaaattttgttttttacttacaggctatttgtaaagaatagcaatgccctatccccaccccaatggtgcgttgggcagaagtactaaaatactttctaaatacttttaaataacaaagatttgaagtaattccttcttttttaagtgccattgaaatgtcattgtgctccagagagaaatgcattgaatttatccacactatagtcttttgagttagagcaatacattctgttgtttatagatactaggcttatgatcttgttgagtaagtggtggcagtggaaataaaacatgggtaggttgagtggaagtcaaaatttgacacccaagtgttacgaatttcaaactgttttagcaatgagtcaccatttctcaaactaatgattgtattagaactttactggctataacagaccaaagcagaattttattaataggatttattagttcaaattctttattaggatatgctaacaatgagactattatgatgaacccccacattttaaaccataggtttttatacaagtagcagtatcaaatttattgtaatattttactttgcacaaatcaaggaaatcctgattgaatctaggtagttacaaatggttttttaataattcactttgtactgtccagatattctttaattaaaatatccaaaattagaagaccagtagggcttttgtttcaaaagctaacaatacccaactactgcttgctttccttattatagacaaggcatgtgaggaacacctagacgtttttaaagccccaaaactaggatattgtgacacagaatgttttttattcagtgctgagatgggagtttatcccaagcgactgtcctggcccctcatacaattatagtggtgaccagtcaggggctgtgggtgaggagacctgccagaggtggctggaggcactttattgccagcctggcgggctggcgagcgccaatgaagtaaaatctggtgacacacttgagtttgcatgcggcattttattttattggttttttttaaaggaagagattataaaaagacatttcacattaaagatttgcagtcctgggacacagtttggaaaacactatttataaggttgcacatattacaaacagctcccaaatggtgaaactggtattctaagatgaaagcttaatgaacataatgaagtgaataaacgcatgtgaactaatgtttaaaaagttagagcttgtctcaagtcagtacagctcttaagataataaatacagtaacactactttttatttctttgctcttttatccctttcaggttcgatttgctgctttgattactgtgttagcactggctgaaaaactaaaggagaattatattgtcttgctaccagaatccattcctttcttagcagagttgatggaaggtaattcccaaactattcccaaccattaaacaattaaggaataattcagtaaaattctgtgaaaatgtgcccaatgataatgcagatttggatataacgtgactagcagttgatccagtcctcatacaggcagctccagtctcaaatacaggcaggctcgagctcctgttttgagttgggtggagggagcaagttgcgaagtgaccacctcctgatcatttgagagtccgtttacagtgtaatcttcacgatcttttcttttgtggtggtttgtgatcatacaagcagattacagtagtgtttttaattaacctcatacatttatatgattgaagttttggtccccagattgtatggaaatgcctagtggcattaaggatgcagtaggatgtccacttttagtagcaaccgatgttcattcactactccatgttaggtgctttacttggattatctcacttaaaaaccacaacattttatctctgttttacaaaggaagaaactagaggcttaaaagatttcagttatttgacaaagatcacaagctagtgagtgtgacatggggagctgtgacagttctggaacatagagtcttaggcccaggaaataacagtaaatgttattattaagggaggggtggtggagcaagtagatcagtcctttactgattcattgcttatctaagctacaaaagtacattctcctttgtttcttagctcttggaggggggaggtgtgagctactaaaggggtggcatccctaggaagtttgagttttggggattcttattcagcttccagtgcaagcctgtgggcaaggaatgaaggcggaaggagcggtgtggagggaggcggtccgtggcgcctcctgctttgttaatgtgcttcatttcactcttttgattgaatgattgccggaaagtgcaaggcattaagaattaaactaatgagaaccgaggcaggcggactgactcagattttaattttgattttttttttttttttttagatgaatgtgaagaagtagaacatcagtgccaaaagactattcagcaactggaaactgtcctgggagagccactccagagctatttctaagactttctgtggtgtttcatactctactcagagttcacactcatatttcatatttttatttttgggtgttgggtgccatgttacttttggtgccttaatacacctacttggattacttacaaatgttttatcacttctttacaaaatccccacctggcttgtgctgccacataagcctctcctgcctatcgtatagagctgcagaaagagtaaatgatacacggtatttttatacagactgctgtgtttgtttaaacatttattattctcttcctgattgatggtaataatattagacttgttaattttagcacccaaagctgacgcctcatttgcactgtaagccttaactcttctgtacagcagtatcttacatacatggtatccatgttgcagatttcactcaaagttgctctatttcaagaaaatgaagttatttagcaatcaacagaagtacttttgactgtaaagcctacttttcattttgggtaggcgaacttcagccttcgtttctttgttgtgcccataaagagaagtggttctggaatgctttttttaacccaggagtgtgactgtcacctttatcctttgttcttttgggaaacgggagagatgaaggcaacacgctgcttctaaaacagctcacacctggctgctcacacagagggcccagaaacactgggtggcacgaggaagctcctccaggattcagaatgaacccagttccattggtggttaactaagaactacttgtctaagaaagtaagtatcagtagatttttttcaatgctttgaagtgccctaatctctagtactgggtcatggtgaagttggaaagtgagggttcaaataaaattagatctgccccctttttaaaggcatctaagaacatcccgtagaatgttcgcattgagtttaaaagcctttgaagctaatatagaagtttaatgcagaaatgtggcaagcaaaaggccaacttgcattttagagacagagcttgctagtatagaagtgcatatttctaagaaatgtctcagtaaaattcattaataaatactaatagctttttaaatttttttcctccacgtaaaatgaaaatgaacttaagacttacaaggaatgatgtgagtgggctatttttttcctaaatgcctcacagtctccaacagctcagttaagcactctgatggtctttatggagaaaaataactctgggggattctcgagtcttcttgccttctacagctttccctgtggcaccctccacccccaaccagtgtctttgagcttggtgagactctgcatacattaatatgaaaagctggaaaagaattaagggctagcgatttctacactgagtacttttaaaaaaataagattgacaatggtattcttttcaatatatggatagaaataatatctaaaatctgttctgaaaatattcctaaatcctggcagagttctgccccagtctaatgtgataaaatgatcctcactgactgagcttttttccctccccactcccaaacctttgaaatttcctgtaacaagatctgacctgtaaagatcccatatacatggaacttctgccaactcccctcaaataatagaaaaatcacagaaatggaaccatttaacttgctgatacaggtttgattttaatcacgtaaagtggaagagtgctttgatctcagttgctaatgatgatggactaatctttagaagaacggaggccttgattggtgatttcatgggaacaaaacagatttctgcattacctctgcctgctttgtgggtcccttagttggcgtacactttctgatagtgcctgccttatgaatgcctgaagtctaatcctgaccttactttgttgcccataaatatctttcaaattgaatgcatcttgcctcttcctgaaactttctgtaggcgtctgtgtagactctgatttgccctaagttcaaatacacagaaatcagctgccttgggcttggcatcaagttaatttcagcaccatgtatttgttttgctttggttttttgccttaatttctgtgctcagatgtcatgccaattacttggtaaagcttgcagctaatagagccacatgtttattacgataaagaaaatgatgtcagtcaacatcagtcctcagtgatgggatacggtagagcactggttatgacagtgatcactggggaaggagttgtgtcttctgtaagttagtgtcttcgggtgatttaatatctgcataactaatcccagaggaccccttaggagttgatgtaatgcctgtagaaaaagcagtgcgcagcagtagcgcacagaagagtcgaagctcaagagaacagggaacatactggtttgtttcaccaagtatatatcctagctcttcacagttttaccaaaaaaaatctgtgctcaatacatgttagctactgtattatagtaggtactccataaatacttgttgaatggcattcttgaagagtcagccaaagtaggagagagggcagagtggctttaactggctataagtgttgctgcccccagtttccccattcagtgctagacaccaccatacttcatggcaaggactgagaacacccagcaggacctaatggtgcacaagctcattttaacaatataaacaatagaatgacagtgagatgcgtttcagcaaggccagtatcacagaagccattctgtattttggtttttgtagcagctgtgtaggtaggctaccagctccttacttccagtaagtggatgtctccattaatttccagcgtgtcaatactgctgagctctttaaatctgtgtttgtactccaggctgtgtacgccatttactgcaaccttgaattctctaacatcacaataaattatcatctgaaaggaaaggatacatgccattagtggttccccttagtttaaaattttgtgtttgttacatgctaacggtgtcagagtaaaccatttgattatacatagaaaagttccagcctgctgctgctgacttccttctgacttccaagaccctaatctaactaaagtgtccctggtggtggcactgtctgcctcatcccacccagggaagtgactcggacatgtttggagcctcacaccatccccagggcctgcggccctcctttcctcaacacagcccctctccctcggccgcatcctgccccttgctcctggaaagccagagtgctgcccctcctcgccgatgctggggactctcctaaagcaggaaaactcactcctaatatggttgctttagttcaccgagatgctgtttccagctgtagcctggaaccaagggacttggatcctgactgacttttctgcctcaaactctaggaccatgaacaaaccagacaattaatatgaaatttcagcagcttaaggcacttgctagggtttttacagctgcttggtgatcctgatcctgataagctcagcacatcttggcctcagtgtgtttgtccaaagccgtcaaagctgggtatcccgtaagttggaagtggtgcacatactacaaattcagatccatcggcagtgttcgcccttcacagtcatctatgcccaaaactcaaacaatgaaaaaccaaaaaacctactagccttttacatcacctttacacctacacttcatacttctggtgccacgctgccagtgccaggctgggtttccacccactctgagaaggccactgggaggccctgcactgagctctccctgtgctcctcgcccccatgaaggcttcagaagaaagaggggcagctcagccttgctgctaacccggccccaccccgagaggccagaatgaagcacaaaacctgaatctgcaaagcagcaagttgagggtttccattcttttgataggagcagtggaaaggactgtcaaggaaaatcaggaaggggaggaaatttcagcccaagtcctgcactctgataacagctggccaagatgaagcttctgtggctacagaggattggggaaataggtgtaacctgagattctatccccacaagaatggtgggaatcccagttccaaccaggtagaagggaccccagatatatttaacaaaatctcaagaaaacacaaaacacacagcctgatgctatagctcagaaggaaaaccaagttggcagcagagggagtcaattagttacctgtactgtatcagagcaagtgcaaagccagtgaattacaagcaagtggcaaagaaatgacatgcttccgggtgagcagactactgcaaatgaaaagaaggcacatcctttgcctagaagaaaacagaacaacagaatccctcacaaccatctgatgctgccgaacagctggaacacggatttcatccagaggaagagcccacagatgaaattacaacactgaatgagattgtttttaaaaaactgtagatacaactaaagtgtatttgaaagagcaagaagatttaaaatgaaagtaatggcataatggaaagacctgagataatctcaatgcaagcatatttaaaaggcaagagatggaagcccccggaaaggacctatcagtatagaaaatcgtcagcagtgatcaacacaaggataattactgctcctgaattagaaaattaaatggaaaagacgattgttcaaaagcatataacattcatctattcattccttcagccagccatccctttcactgtctctgcaaaaaaatgcctggaatgtggttcacctaatcctaatggtatggtttgaattatgaagttggaggtattttcatcttagtatttttcagcattatttgaatgtatcattattatccttttttatattaatatagcagatccaaacttggggcccagataggtcaaaaacaagttacatcattggtttcctgtcacccaccacaaggctcaacttccttctagagcactcacctctgtttccctccagtgaaccccaagtcaccctttgcgccttgactcttgccaagctaacaaccctgtgctgcccttcccacctctaaggacttgttcaaatcatgccctaaatctagaaaagccaaccttcagccttccacatccttcccagctttctgaattccaaaccaatatccacaacttcagggaaccttccatgattagcccacatctgtctacactccacataccagggcactgcattagactggaacttagggataaatatgaatgtcacattgctatctattccgcctgatattcatgcttttagtaacgagttttgatgagtcctcaagaacccacatggtccagacaatgtgtcagtttaaaatgctgtagaatgataacctaaaccaatgaccctaagtgactgtgtgaggcagtggcacctgagctggtgattgaggctggccaaacacccggcatccgcatcacaaggagactattctctgctcagcatcccagaaacatatttcgggaaaggtatgtgttacaatattcacctatctggggactcaggactgcatgccttttagttccaagggactgatgtatttttccttgaatacatacaaacaagactaactccttaggagaaaggactgccacctgaaaccgtctaccctgatgggagatgatggccagtgcaagcaagcagttttagggtctccacgtcctcaagtctgcttatatgattaaatgtgtgactccagtcctgagacaagcttcctggttaaattcctatcaatatggggctacacaggaattttaatatgatgacaaatgtcaattccaatgtgcataatttgacactctactggctttgccatttatactgattgcccacgttataaaaaggggcaaattacaatctccaagtaaacaaaaaacatacacaacttccacatactgagttaggacttgatttaaatggaccacttatcccacccctgctcccaggattcttattgctgtcccattttcaaaaactgtaacctcacctcaaagtacatcccaggactaaatgggaaagaggtaatatttctctcttcttctccccaggactcctgaagaaaagaatttcttacaaatgctttaatattcaggcgtgggttcaagtgtagagcaatatcctttgattttcctgctagtaggtcaacattaaagcttttgagaaagaaagaaaaaaaaaaaccttaattaaccaagtaggacagagtagtggcaatttcagcaatgttagtgaccagacttgaactatgattctaactctatgaaacacacgtatccacatggacatgggaatgcaggtgaagttgaaattttaaacccagtcagcattccactaattcgttacttgcaaaataaaaatacgaaaaaaaaaaccctttaaaatcagcgttgaggctgagatgtggttggacagaaatggaaggtttaacgctaaactgaatgactacttcaggctgcaggagcctgggatcctctcaagcaggtattctcttttcatcatctacccgtgttccttccttcttgaaagtatgccactttctaggaaatagctctaatttcaagctttcagaaggctggacgtctgtggaaaaagttgttaaagcagaaattttctaaatcacatgacaagaggggccctaaaaaatgttgcctgggctgggcgtggtgactcacacctgtaatcccagcactgggagggcgaagtgggcggatcacttgaggtcaggagttccagaccagcctggccaacatggtgaacccctgtctctactaaaaatacaaaaattcaaaaagtagctgggcgtggtggtgcgcctgtaatcccagctactccagaggctgaggtaggagaatggcttgaacacccaggaagcggaggttgtggtgtgctgggattgtgacactgcactccagcctgggtgacacagtgaggctccatctcaaaaaaaaaaaagaaaagatgttgcctgatcttacggggctgctctggagttctacaaggcaaggataggcctcgtggacaaaaatgctactctcttgtctggccagaaaaagccgaggtcagaacacggccttagtcggctctgctgcccactggctgttcacaatctaaccacctcctgcttgaatcatctcactttggaaatgaagattctgacgctagcccttcttccagctcacaggaccgttcacgggtggaaggcggtaacaggcacggaagtatctgcactgtgactggtaccgaaggatactgaccttttggcatttgcattcacttctcctttaacgacgacagttcgtccagggcccatgggggtgttcaaccttgcagcgaatggcagcctctgaaaagaagccacagtcaggaccaagaggcctgcagaaagcgatctccagggaaaactcgtgtccaaagaacactacggaatgtttcagagccatgaccctgtaaatcccaggaggggagagacagtctgccttggtcccagctgggtcccctgcagcagcactgtccctggctcgaagcaaacacacatgattacattttagacgatgaaatgagtgacagggtgggacccgatgccctctgtatgagtgaaacacgccaggaaggccccctgtgcctggggtctgaggcagtactgtgttctgcctgaaggggaagcagccaagcagggaggtgctgaggaaatacacaggaatggctcagaggcaggcctggttgactctcgaatccgtccagggacggcacacaaatgcagagggggctgctttgggcctctattgtggatacaggttactcgtaacagctcattacaacttaatttttatatagagttaagaaaatttggtgctcttcaaacctttgacacatagttcataggtggtattttggtgcaagtcaaagtgtgattgacagtcgaatctttgctcttggtgtagacagttctgggtgcgattttagaaatgtctcctcctctattactaggctgtagggaaacagttctacagtaaggaatggaatgaatgaagctgccctccacggtttaaactgttcattttctatgcaactttataaaatattccacatgaaataacccaggcaaaaatactcacaagctggggcgtgccagactttggaacctattggaaaagaaacaaaacacaacaatgttagaaggggaagaattatagtttataatctgaagtcttggttgtgctgagctgagcctggccggagcctgggatgttcctgctccactctggtgtgacctccaggcagctggtgctttatgacggaatggtatggtgttgtgaagggctacacgggttgagaagagagtctgatatccctgttcatctgagtcctttatcctccaccataaattaataatttttcatagaactatatgaaatttttttaagagacagggtcttactctgtcatccacactgggatgcagtggctcaatcatggctcactgcagcctcaacctcctgggctcaagtcatccgcctacttcagccacccaaagctgggatcacagccatgcgccaccatgcccagataattttttaattttttgtagagatggggttctccctatgtggcccaggctgatctcaaactcctaggctcaagcaatccccccacctcagccaaagcgctgggactacaggcctgagccaccaccttcacccagcactacatgaacttcaaacgtgtcttagttgtcctttccagggtgcccccagaatgctaagattctgttctgtctgtgaggtgtgaacgtgccagtcggtaagacctcactttctccattaataacagcgcatttttaaattgcagttattctcccaggggttgaagatacacatggaagttcatttgccagtgcactggctgatgttcaatatttggaaataccccagaacagtactattcagcagttaagagtgagagagtgctttttacataagaacagtgagtggcagttacagaaactgacaggtgaatcatcagcaaaaacttactgcgtgcctggcaccacaagtatgtatctcaattttcaagtgattacttgcgttctaaaagcataattttcaaaaacccagccttcttgccatttcattaacatggcagctaaaacaacatttttaaaccagtggctcattaaaagatttaatatttacattttctctacttatctctgtcagttccagactagatgcttgggtactttgtaagtcctgagaaaagataataaagattaatttgtaacatccagtagaaaatattttctaaatattttatattgacatataaaaaaattataaatggtactaaaaatatgcttgaaaactatgatccaaaaatacacttgacactgtggtcctttccgccccccatcagattggcaaacattacagagaataagatgtaatgtcagcaagaaggtgggagcatggctgttgagagtgcaaactgtttttacccttgtgaagggcgagttagtatctatcaaaattttcaatgcaaagacagtcatgtgttgcttaacgaagggggtatgttctgagaaatgtgtccttacatgacttttgtcatcgtgcaaacatcacagaatattacttaacaaccttagatggtactgccaactacacacctaggctgtagggtgtggcctatagctcctggccagtgaatctgtacagcaggcactgtaccaaatactgtaggcaaccagagcaggatggtaagtatttgtgcatataaacttacctaaacatagaaaaggtatggtaaaaatacagtatatgacaatcttatgggaccacggttgtatatgtggttcatctttgactgaactgtccttatgcaacacatgactgtgctctttgactcaggcactcccagcctaggaacctgtcttacagaaatactccattttatgcccatgcaaaggaaatagctgctacccagctaaaaactgtgtgtgttttattaaaaccacactaggtttgagatcctacagacaatgaagccctggctgataaacagccttctgctagtgtgaacagttcacttccaaaaaattaatactacagtcagggagatacgtcctttttatgtcaatagaagtgttatttgaagattttttctaccatctcatcagaaaccatcctcataaaagaccccaagctgtggaaggtcactcaccgagctgaagctaaaaccaattgagtgaatattcactttgccataaatgcccagagtgtctattttctctgggccgatcctgtggccatagagcagagtatgttttccatttacagccacctagagagatacagaagacagagccccccccgccaccaaaaaaaaacagttaataaattaacttattatccaaatttaaatgtttccttgcgtccagttttatacctgttcccacaggtctccacacacatgaccaaatggtaaccgaaagcacccaaaacactagcagtgcttccaaacttcttttgagttcctgatttgattaagcaccaggaactgtctctccccagacaaacaggcagtcataagtatatgtgcgtgtgcttgtgtgcgcctctgcatacatgtgagacatctgggttcgaaggtcgcctggaagcccaggcacaggtgccctggagattgtgaacccaggttaaagatctgcctgcgagctccccacaacactgtccctggagaccacccatgtggcagacactcaaaatctgttgtatttgctaaataaattaatatggacaagttacccaacatatttgaattcggttttcttattctgaagtaggaacagtctctacctcaacagactacagtaagatgacgagaaagtagcttctgcaggtcctcggcacgctacgaggctcctcctccctccctctcaaatgccaggtaccacgttaggttataggcagaaaacgcgagcagcatacaatatagtctctgactcagggagcttaaaatcccattgtggaggcaaaataaacacgtaaagccaaagcacaactgttaaaaactgtgaaaaagaatgatacagacacgggctcaaaaggccagagaagggagaggtgaatggagtttgggagattcagaaagactttcgggcaggagcagtatcccgaagatcagaaaggatctgcgccagaggcattcgagtcttctctcgcgttggtacatacctctactgtgggcaagctccacaggccagagggccagcaggtgtaagcttctgggaccaaattcaaccgtacacatacacgctaggtacaagacactccatgaagccagagatggaactgacatcaaggatttctaggatctcctctgggtctaaaatctcatgatcctacggaactgtcttgtggcaagacttgaatttacaaaacccttctgatttcttcgctgggattgcccttgttagctcttcgggtggtggcggttatattataacttaccctcccatcatgaacataatactgtgtcaattcggaactcagccctgctaggagaaataggatctaataaaaagatctggtcacagtggaccatatttctgcatggcaacaactggctggagagtagtggtgccatacctcacatttaggtgccttcctggtccttttatggagaaaaactacaaagccaaacaaactatatctcaggtgtaggaaatataaggctgggctcacaaatgtgaaaagcacccctgtgcactcctgctcactaatgaggactcaacctgtccctctccaaaacctacctggaatttgtccttcagcaccataatcacgatctcaaaagacttttctcttttgaaaggcgtgtcataggtgatctcttcccgtccccatttttcatttatcaaagtattgcaaacaatgcagccggcccttttgaaacgaggattgaaatgaaaggccacatcggctcgaggtttcatgctgctgccattctgcagatccacctggaatctatatgagggaagacacaggggccccatgagtgctcagaaaggaaagccaccagtaaaggaccagcaggcactacactccaggcccagtgacaagggactgaccaatccctcctcattcattcactatgaggcctaaagagctgactgtctaatcttttctgtcttcctcagtaaaatagcccctgagtttgaactgggtctgaatctgcccagaataaaaacctacctttcccagcctccctcgcagctaggcctgcctgtgcagctaaagctctgctggtaagatggaagtgaagtgctcagggaaggctactggaaactgccttagaagtcagcaagcacttgccttttgtccagctctgtttccccgcaaacaccacatgcacccatccagctacccaaagcacagaagtgagggctggaaatctggctgccaaggaaaacgggaaaggggaccttacctcaccctcaagataacagagtggtgagctcgaaggagtctacttctctaacgacttgaaggagttaactgaaaaggcctgggctgtctccttgagacttaattttcacatcttaaaccactgctcttcaggtgttaggtacacagagctgagcccaacactaatgataccacagcttgtatccaaagcaggtattcagtaaaaccatctgaactagatctgtaatgctgtgggaatgtcagactaaaactagactgtccctgtcatctgaccacaattcctttctttaatgacatacctaattctttttctttttcttttttttttttgtcacccaggctatagtgcagtggctcgatcacagctcactgcaacctcaaactcctgggctcaaggaatcctcctacctcagccccctgagtagctacaactacaggcgcacaccaccaagccagttaatttttaaattttttttttttttacagatggggggtctcactatgttgcccaggctggtctcaaactcctggcctcaaacaatcctcctgccttggcctcccaaagtgctggaaaagtatgtttaagtcaccacatccagctgatagttctaattttttatactgaaatcagacttacagcaatgaaataaatcccaataacctttatttagtcattcattccaatctcctcagcaccttggccagggctgctgatgaaagctaattgggcctcaaagtatcaaatggtctctcccgccttactctgttatcattccacaatcacaaaaagacagcctattcatgctccttcctttagcacagtgattttacctgtctgcgtcactaggaacatgcccacgtatcacaatcaaagttccaggatccagctgatcaggaatggtgccaacaaacgggattacc

SEQ ID NO: 7243 - DNA, 21403 bp, Homo sapiens
gtggtcctgagattttaaaaggccttgaagagaggtatgtttccttttctttttctactttttatttggaaatgacttcaaacttatagaaaacctggaaaaacagtacagaaaattcatatactctttacaaccaggttcaccatttgataatactttctgccacatttgccttagcgttctccctatgtagggttttttctctgagccatttgaaagtaaatcatatacattatgtctctaagaataagagatgttcttataaaaccacagtacattgatcaaattcagaaaatttaacattgatccaatccagtgatgtaatctacagttcatactccagtctccctaattatcccaacactctcctttacaccgcatgtgtttctgcatcatgatccatgtcaagtctgtgtattgtattgagttgcagtatctgtttagtgtcttaatctggccctgatttctatgggctcatgaattctttattctgtggattctaatccatatgctgccattatatatttgggtgcaggaattttcctttctctcccatgtcctcggggtttgcctcctggccttgctgtgtacctccttttcagatgcatggcattcccagggccactgtcctgccccttccactggaaagtgcctgccctgcagccaggaatgtgagctgctgagttccagtcctgtgggctgacttgtagcgctatgcgtaggactttcgtttttggagctgattttgtctgcgcccccttctcccctcctctgctgtgcggtgtcaacttctgtctccactcttccctctagctcccccctcaggctggcagcagtggggggatctccagtggcagctgtgttggaatttggtgtgtgcttttctaattacaagttatttgaagtttgtagtcttttttttttgtctcctaataatgtgaaagaagtgggttatatgttcatttctattaatatttctctttatataaatggtgtatggtgtgtgtgcatgtgtatgtgtgcgtgtgtgtgcctgtgtgtgtgtgcgcgcacacacctgccattaacctagggccataactccctgaacaccccacttggacagcccagtgagatccactgagcatgagctagatatgagtgagttccttaaacgctttcagcatctgttgcttattcagcacctcacagagtctgagcgaggtcgatgcttctgcacagaagcgcctagttacttcttgatgatctctgtctatggcaataatccctcatttcctttctttccgagtagtttttgaaataatttagtacagaattatttaactcgtctttctacttgaaacatttagcataaggtagacatgaacaagttctctgagtgccttcagctgccgtttgctgagcgagcctctgtgtttcaggttgctggagaccgttctcggctatatcagtgcagttgcacagtccatggaaaggaacgcagacaaactcaccgtgaagttctggcgcgcgctccttagtaaagcttacgacctgttagataaggtaggtgttcatttctccctggaattactgttttgttgctgttttttaaattattgtgaaattatgtaaagtttttaagaataaacttagcaattccttttatgaatataatgaagctcagatttttcttagaaaacaatctcttgatgactagaaatagatttgtctggaaaaaattgtttccttaccagttatgagaacatgtacctcgtatattttaataattaagtcatataatatatactgttctactttattcaagtggaataaaataaaagtatgaagtatattacatacatatcactggcctcgaagttaggattgctgattcaaatctagctcagtcatttagctgcatgcctttggcacttcctcctgacatcaggcttttgttttgttcgataatgtgtggttggtaatgcctacctgaaaggttattttaagaattaaataagaaaatgtgtgtggaagtgcctggtgcctggaggtgtgcagtggacagcagtctgtcttaattgaagttggttttttttttaatttgtttttcttttcatgttaaatataaaatttctctttaggtcaatgccttgctgcccacagagacattcattcctgtgatcagagggctggtgggcaatcccctgccatctgttcgccgcaaagcgctggaccttttgaataacaagctgcagcaaaatatatcctggaagaagacaatagtgagtgaagacccaggacacacccatttactgtactttgctttatcaaagagctgcatttaactcccttcaatttctctagtggtacaatttcaaattgaagtatattattatctgaatataataccatgacatgttttaaaatgtgacgttaattctaacgggaatatatgtgtgttgtaagagctcttagaatggaatttcagcctagtggaattcttgcttactacagagcttacgtggccttagccttagcatagttctaagtcccttttactccagatcagtgggtgctttgtataagtgaaacactggctagaacatgcacatcgcttagcatgactgtgtgactcaggacccccgagtctgatttccatttagacaatctcaagctgtgacaatgggaaaatggacaaacattttttgcagctttaatgatttggggattctggctgtccccttcaggttacccgtttcctaaaactggttccagaccttttggccattgtgcagcgtaagaaaaaggaaggggaagaagaacaagcaatcaacagacagacagcgttgtataccttaaagcttttatgcaagaattttggtgcagaaaatccagatccttttgtcccagtgctgaacactgctgtgaaactgattgctccagagagaaaggaggagaagaatgtcctgggaagcgcgctgctgtgcatagcagaggtgacctccaccctggaggcgctggccatcccccagcttcccaggtatgcggccggagacttggaacaggagctgttaccgcctggcacacattgaaaaataacactttggtgactttttttttttttcctctgagtagacgttgcataaaattggaatttgttaaagaattgatcttgcagggtgtggtggctcacggctgtgatcccaccactttgggaggccaaggcagggagatcgtttgagcccaggagtttgaggctgcagtgagctatgactgcaccactgcactgtagcctgggcaacagagtgagaccctgtctcttaaagaaataataataaaaataattaatcttcaaacagaaagatgcagccttcccgtttatcttcagatgcactactttgcagtgttaatcgtcctccattcttccttccttttgtctagtatagtcaaaaagcagtgggtgaaggttcttggcagaggggcccacccagttaggcaaggccaaagctgccttctgctgccaaatttggaagttagaagctcctggctgtggtagttccttactgtacagccagtatgttccttaacctgttagagctttgctgtctataaaacagagacagtatctacctcataggatttctgtagggcagtgcttgcaaggagttttgcatagtgcctgacacatagtaagtgttcagttaatgaaagacattgttattttttaaattactgttgtgtccgtactgttagcactgggagatttcttgtgcttagccacataaaatgtatagacactgctttttaggctatgaagcagatagcgatgtaataggcacagtttgctggtttttttcataatgccctctactccattccctagcctctgtttctgcttcaagttcttctaaagctcttactttgtttctagcctgatgccatcgttgctgacaacaatgaagaacaccagcgagctggtctccagcgaggtctacctgctcagtgccttggctgctctgcagaaggttgtggagactctcccgcacttcatcagcccctatctggaaggcattctctcccaggtgagccacgatagccacgacatgctacgcagggtggctggggaaggtaaaagatcacaaatgtagtgattttgttttttctttaagggttagtttccgtttgacagaaaggagtcttatttctgaagagatgtgcttgcttttattaaatgtgtactttttctcttccatcatccttgccacttaatcttgaaattgatatgggggtcactttttagcgagatgcttctcttctttaattgtgcggaatgtattctggcttttttttcttctgtgagatctttggagttgggctggtagagccgccttttattacttgtggaaattgatgggccctgtttctactgtgagaggtataatcctaaggcatcttgcaaagcagaatttttgtattgcacgtcagcggtttcctgtcaacacgctaggggccagtggtatttatgattgaagatgctcaagaatgttgagacctggctgttccattgtgttgatcatttgccatttacaaggttaggagccttcattaccatggggcaaatgattaaaccgcttcacttacaccacagccagggtttaaaagtagccttctcagagaaaggggcctgtgctctgaggagctttctcagttttttagcaacttgactcttgccgtggtcccttgcattcctgtcctctaagaaaatcatctgtctgggtgctgtgtgtgcgtctgcgtctaccatcggccttcgtccctgatcgcaagttgggcaagaggtgtctgcccagttttatccactgacgtttagggctgactttaaaaggaattctgtgtgtagttaaaaagtgctaagcattttccaaacactagtacctcatcatgaagcctctctgtaagtgtgtgtttgtcagcgaagatctgcagtggccctgatcactttttttatattcctgtaggtgattcatctggagaaaatcactagtgaaatgggttctgcgtcacaggctaatatccgtctcacatctcttaaaaagacactggctaccacacttgcaccccgagtcctgttgcccgccatcaaaaaaacttacaagcagattgagaagaactggaaggttagatcttattgggtattaagactttggagaagggagaggtggtactgcaatgtgtaaactttgacttaaagaagaagatttagtttttaaaaatacacaccgctgaactctaggaatcatttgaaaatggcacatctctttcctgtgttattggtagaatcacatgggtccgtttatgagcatcttgcaagagcatattggggtgatgaagaaggaagagctcacctcccatcagtctcagctaaccgcctttttcctggaagccctggacttccgagcccagcactctgaggtaagctcaggttcactcctccaaatcctaaagctgttatccacctattgaagagtccgagaacaatctagccgtgtaacagtggtacttgccaaaataatttacagtcaggtatcagcactctaataaatgggctcttctgttttcagaacgatctggaggaagttggaaaaacggaaaattgtatcattgactgtctagtagccatggttgtcaaactttccgaggtcacattcaggcccctgttcttcaaggtgacgctttcttcctcttcctctcttttgtgctcagatttaagtgacaagatgtcgaagaaactaatactgtcttatcctttcagctgtttgattgggctaaaacagaagatgccccaaaggacaggttgttgacattttacaacttggcagattgcattgctgaaaagctgaaagggctttttactctgtttgccggccacttagtgaagccttttgctgacaccttgaaccaggtgaacatctccaaaacaggtgggtggtcgcttcagttcagctgtcacccttgccctgtgtgccttatacaaggtaccagtaagacacaacctagtgcttggaagcaagattttagaggttcttaagtcctaagctaaggagggtgaattttttacttcattgttgtcagacagtgaagtgttgttttagcatcatgagcgaatgttataagtcacctcacttgggagaaagaataaagtaaatggccgttactgtcagttactggaagtaactttaaaacgcaaaaattaagattagtttattctctaatgctaatacgtgacccacttgacagttgagggaatttaacttgccagagtgagtgttagaatcttaactctaaaagaaggaatcattcttcgagagaccatccattgtgttctgccttcgtcctgattatgatttctagatcattttagactcttctgatttagttattttaatagtgatttcaatgtaaacattggagattaaatggttaagttcagtgttttttcatttttactcttcccacgtctacagatgaagcattttttgactctgaaaatgaccctgaaaagtgctgcttgctgttgcagtttattttgaactgtttatacaaaatcttcctttttgatacccagcattttataagtaaagagagagcagaagccttgatgatgcctctggtggatcaggtaaccaaacagaatcatctttcgttgctgaggaagccatcactgttcgagcttggcaggttttagatctgctcaaatgacagcttgctaggatttttctttgtaaggttgttttttctggtctttttaatgaaatgttttatttgaaaattgttttttcaaagatataacttcattgtggaatttgagttttgttttgttgttttgagacagggtcttgctctgtcacccaggctggagtgcagtggtgcaatctcggctcgctgcaacctccacctcccggtttcaagcaattcttgtgcctcagcctcccgaatagctgggatcacaggcgcccgcctccacacctggctaatttttgtatttttagtagggatgaggttttgccatgttggccaggctggtctcgaactcctgacctcaagtgatccacccaccttggcctcccaaactgctgggattacaggcgtgagccaccatgcctggccctgagttattttttattttttattttttaaactgctcaaaagacagacatgatataagctgtcatggttaatgtattcatttgttttaactgggcctcactgagaacgcgtcagagcatggctgtcctctggagcaaagagctcctctgagatgttctgctggagagaaaggggcgatgataaagggtatgagattccatttgagttctagaaggcaatacatttgccctagagagtattagaataatgcctggtttttgaacctgctaatatcatgaaagatagtaaaatatttgtatgttggatattttttcaaacagaagaaagaaatgagacttgttgttcaaagtctttgtcttactcttcctagctggaaaacaggcttgggggagaagagaaattccaggaacgggtgacaaagcacctgataccatgcatcgcacagttttcggtggccatggcggatgactctctttggaaaccactgaactaccagattctgctaaagacgagagactcctcgcctaaggttaggaactgcgtgacaagtactgaaactgcatcttttcactgcatagcctaaacagcctgcaggtggtcacagatgtaggccccctagtaaactggcagggaagaacattgctatttgtcatccagtactagaggtccggtcttttgtattaggcagaaatttgtgcctaagaaaattttgttttttacttacaggctatttgtaaagaatagcaatgccctatccccaccccaatggtgcgttgggcagaagtactaaaatactttctaaatacttttaaataacaaagatttgaagtaattccttcttttttaagtgccattgaaatgtcattgtgctccagagagaaatgcattgaatttatccacactatagtcttttgagttagagcaatacattctgttgtttatagatactaggcttatgatcttgttgagtaagtggtggcagtggaaataaaacatgggtaggttgagtggaagtcaaaatttgacacccaagtgttacgaatttcaaactgttttagcaatgagtcaccatttctcaaactaatgattgtattagaactttactggctataacagaccaaagcagaattttattaataggatttattagttcaaattctttattaggatatgctaacaatgagactattatgatgaacccccacattttaaaccataggtttttatacaagtagcagtatcaaatttattgtaatattttactttgcacaaatcaaggaaatcctgattgaatctaggtagttacaaatggttttttaataattcactttgtactgtccagatattctttaattaaaatatccaaaattagaagaccagtagggcttttgtttcaaaagctaacaatacccaactactgcttgctttccttattatagacaaggcatgtgaggaacacctagacgtttttaaagccccaaaactaggatattgtgacacagaatgttttttattcagtgctgagatgggagtttatcccaagcgactgtcctggcccctcatacaattatagtggtgaccagtcaggggctgtgggtgaggagacctgccagaggtggctggaggcactttattgccagcctggcgggctggcgagcgccaatgaagtaaaatctggtgacacacttgagtttgcatgcggcattttattttattggttttttttaaaggaagagattataaaaagacatttcacattaaagatttgcagtcctgggacacagtttggaaaacactatttataaggttgcacatattacaaacagctcccaaatggtgaaactggtattctaagatgaaagcttaatgaacataatgaagtgaataaacgcatgtgaactaatgtttaaaaagttagagcttgtctcaagtcagtacagctcttaagataataaatacagtaacactactttttatttctttgctcttttatccctttcaggttcgatttgctgctttgattactgtgttagcactggctgaaaaactaaaggagaattatattgtcttgctaccagaatccattcctttcttagcagagttgatggaaggtaattcccaaactattcccaaccattaaacaattaaggaataattcagtaaaattctgtgaaaatgtgcccaatgataatgcagatttggatataacgtgactagcagttgatccagtcctcatacaggcagctccagtctcaaatacaggcaggctcgagctcctgttttgagttgggtggagggagcaagttgcgaagtgaccacctcctgatcatttgagagtccgtttacagtgtaatcttcacgatcttttcttttgtggtggtttgtgatcatacaagcagattacagtagtgtttttaattaacctcatacatttatatgattgaagttttggtccccagattgtatggaaatgcctagtggcattaaggatgcagtaggatgtccacttttagtagcaaccgatgttcattcactactccatgttaggtgctttacttggattatctcacttaaaaaccacaacattttatctctgttttacaaaggaagaaactagaggcttaaaagatttcagttatttgacaaagatcacaagctagtgagtgtgacatggggagctgtgacagttctggaacatagagtcttaggcccaggaaataacagtaaatgttattattaagggaggggtggtggagcaagtagatcagtcctttactgattcattgcttatctaagctacaaaagtacattctcctttgtttcttagctcttggaggggggaggtgtgagctactaaaggggtggcatccctaggaagtttgagttttggggattcttattcagcttccagtgcaagcctgtgggcaaggaatgaaggcggaaggagcggtgtggagggaggcggtccgtggcgcctcctgctttgttaatgtgcttcatttcactcttttgattgaatgattgccggaaagtgcaaggcattaagaattaaactaatgagaaccgaggcaggcggactgactcagattttaattttgattttttttttttttttttagatgaatgtgaagaagtagaacatcagtgccaaaagactattcagcaactggaaactgtcctgggagagccactccagagctatttctaagactttctgtggtgtttcatactctactcagagttcacactcatatttcatatttttatttttgggtgttgggtgccatgttacttttggtgccttaatacacctacttggattacttacaaatgttttatcacttctttacaaaatccccacctggcttgtgctgccacataagcctctcctgcctatcgtatagagctgcagaaagagtaaatgatacacggtatttttatacagactgctgtgtttgtttaaacatttattattctcttcctgattgatggtaataatattagacttgttaattttagcacccaaagctgacgcctcatttgcactgtaagccttaactcttctgtacagcagtatcttacatacatggtatccatgttgcagatttcactcaaagttgctctatttcaagaaaatgaagttatttagcaatcaacagaagtacttttgactgtaaagcctacttttcattttgggtaggcgaacttcagccttcgtttctttgttgtgcccataaagagaagtggttctggaatgctttttttaacccaggagtgtgactgtcacctttatcctttgttcttttgggaaacgggagagatgaaggcaacacgctgcttctaaaacagctcacacctggctgctcacacagagggcccagaaacactgggtggcacgaggaagctcctccaggattcagaatgaacccagttccattggtggttaactaagaactacttgtctaagaaagtaagtatcagtagatttttttcaatgctttgaagtgccctaatctctagtactgggtcatggtgaagttggaaagtgagggttcaaataaaattagatctgccccctttttaaaggcatctaagaacatcccgtagaatgttcgcattgagtttaaaagcctttgaagctaatatagaagtttaatgcagaaatgtggcaagcaaaaggccaacttgcattttagagacagagcttgctagtatagaagtgcatatttctaagaaatgtctcagtaaaattcattaataaatactaatagctttttaaatttttttcctccacgtaaaatgaaaatgaacttaagacttacaaggaatgatgtgagtgggctatttttttcctaaatgcctcacagtctccaacagctcagttaagcactctgatggtctttatggagaaaaataactctgggggattctcgagtcttcttgccttctacagctttccctgtggcaccctccacccccaaccagtgtctttgagcttggtgagactctgcatacattaatatgaaaagctggaaaagaattaagggctagcgatttctacactgagtacttttaaaaaaataagattgacaatggtattcttttcaatatatggatagaaataatatctaaaatctgttctgaaaatattcctaaatcctggcagagttctgccccagtctaatgtgataaaatgatcctcactgactgagcttttttccctccccactcccaaacctttgaaatttcctgtaacaagatctgacctgtaaagatcccatatacatggaacttctgccaactcccctcaaataatagaaaaatcacagaaatggaaccatttaacttgctgatacaggtttgattttaatcacgtaaagtggaagagtgctttgatctcagttgctaatgatgatggactaatctttagaagaacggaggccttgattggtgatttcatgggaacaaaacagatttctgcattacctctgcctgctttgtgggtcccttagttggcgtacactttctgatagtgcctgccttatgaatgcctgaagtctaatcctgaccttactttgttgcccataaatatctttcaaattgaatgcatcttgcctcttcctgaaactttctgtaggcgtctgtgtagactctgatttgccctaagttcaaatacacagaaatcagctgccttgggcttggcatcaagttaatttcagcaccatgtatttgttttgctttggttttttgccttaatttctgtgctcagatgtcatgccaattacttggtaaagcttgcagctaatagagccacatgtttattacgataaagaaaatgatgtcagtcaacatcagtcctcagtgatgggatacggtagagcactggttatgacagtgatcactggggaaggagttgtgtcttctgtaagttagtgtcttcgggtgatttaatatctgcataactaatcccagaggaccccttaggagttgatgtaatgcctgtagaaaaagcagtgcgcagcagtagcgcacagaagagtcgaagctcaagagaacagggaacatactggtttgtttcaccaagtatatatcctagctcttcacagttttaccaaaaaaaatctgtgctcaatacatgttagctactgtattatagtaggtactccataaatacttgttgaatggcattcttgaagagtcagccaaagtaggagagagggcagagtggctttaactggctataagtgttgctgcccccagtttccccattcagtgctagacaccaccatacttcatggcaaggactgagaacacccagcaggacctaatggtgcacaagctcattttaacaatataaacaatagaatgacagtgagatgcgtttcagcaaggccagtatcacagaagccattctgtattttggtttttgtagcagctgtgtaggtaggctaccagctccttacttccagtaagtggatgtctccattaatttccagcgtgtcaatactgctgagctctttaaatctgtgtttgtactccaggctgtgtacgccatttactgcaaccttgaattctctaacatcacaataaattatcatctgaaaggaaaggatacatgccattagtggttccccttagtttaaaattttgtgtttgttacatgctaacggtgtcagagtaaaccatttgattatacatagaaaagttccagcctgctgctgctgacttccttctgacttccaagaccctaatctaactaaagtgtccctggtggtggcactgtctgcctcatcccacccagggaagtgactcggacatgtttggagcctcacaccatccccagggcctgcggccctcctttcctcaacacagcccctctccctcggccgcatcctgccccttgctcctggaaagccagagtgctgcccctcctcgccgatgctggggactctcctaaagcaggaaaactcactcctaatatggttgctttagttcaccgagatgctgtttccagctgtagcctggaaccaagggacttggatcctgactgacttttctgcctcaaactctaggaccatgaacaaaccagacaattaatatgaaatttcagcagcttaaggcacttgctagggtttttacagctgcttggtgatcctgatcctgataagctcagcacatcttggcctcagtgtgtttgtccaaagccgtcaaagctgggtatcccgtaagttggaagtggtgcacatactacaaattcagatccatcggcagtgttcgcccttcacagtcatctatgcccaaaactcaaacaatgaaaaaccaaaaaacctactagccttttacatcacctttacacctacacttcatacttctggtgccacgctgccagtgccaggctgggtttccacccactctgagaaggccactgggaggccctgcactgagctctccctgtgctcctcgcccccatgaaggcttcagaagaaagaggggcagctcagccttgctgctaacccggccccaccccgagaggccagaatgaagcacaaaacctgaatctgcaaagcagcaagttgagggtttccattcttttgataggagcagtggaaaggactgtcaaggaaaatcaggaaggggaggaaatttcagcccaagtcctgcactctgataacagctggccaagatgaagcttctgtggctacagaggattggggaaataggtgtaacctgagattctatccccacaagaatggtgggaatcccagttccaaccaggtagaagggaccccagatatatttaacaaaatctcaagaaaacacaaaacacacagcctgatgctatagctcagaaggaaaaccaagttggcagcagagggagtcaattagttacctgtactgtatcagagcaagtgcaaagccagtgaattacaagcaagtggcaaagaaatgacatgcttccgggtgagcagactactgcaaatgaaaagaaggcacatcctttgcctagaagaaaacagaacaacagaatccctcacaaccatctgatgctgccgaacagctggaacacggatttcatccagaggaagagcccacagatgaaattacaacactgaatgagattgtttttaaaaaactgtagatacaactaaagtgtatttgaaagagcaagaagatttaaaatgaaagtaatggcataatggaaagacctgagataatctcaatgcaagcatatttaaaaggcaagagatggaagcccccggaaaggacctatcagtatagaaaatcgtcagcagtgatcaacacaaggataattactgctcctgaattagaaaattaaatggaaaagacgattgttcaaaagcatataacattcatctattcattccttcagccagccatccctttcactgtctctgcaaaaaaatgcctggaatgtggttcacctaatcctaatggtatggtttgaattatgaagttggaggtattttcatcttagtatttttcagcattatttgaatgtatcattattatccttttttatattaatatagcagatccaaacttggggcccagataggtcaaaaacaagttacatcattggtttcctgtcacccaccacaaggctcaacttccttctagagcactcacctctgtttccctccagtgaaccccaagtcaccctttgcgccttgactcttgccaagctaacaaccctgtgctgcccttcccacctctaaggacttgttcaaatcatgccctaaatctagaaaagccaaccttcagccttccacatccttcccagctttctgaattccaaaccaatatccacaacttcagggaaccttccatgattagcccacatctgtctacactccacataccagggcactgcattagactggaacttagggataaatatgaatgtcacattgctatctattccgcctgatattcatgcttttagtaacgagttttgatgagtcctcaagaacccacatggtccagacaatgtgtcagtttaaaatgctgtagaatgataacctaaaccaatgaccctaagtgactgtgtgaggcagtggcacctgagctggtgattgaggctggccaaacacccggcatccgcatcacaaggagactattctctgctcagcatcccagaaacatatttcgggaaaggtatgtgttacaatattcacctatctggggactcaggactgcatgccttttagttccaagggactgatgtatttttccttgaatacatacaaacaagactaactccttaggagaaaggactgccacctgaaaccgtctaccctgatgggagatgatggccagtgcaagcaagcagttttagggtctccacgtcctcaagtctgcttatatgattaaatgtgtgactccagtcctgagacaagcttcctggttaaattcctatcaatatggggctacacaggaattttaatatgatgacaaatgtcaattccaatgtgcataatttgacactctactggctttgccatttatactgattgcccacgttataaaaaggggcaaattacaatctccaagtaaacaaaaaacatacacaacttccacatactgagttaggacttgatttaaatggaccacttatcccacccctgctcccaggattcttattgctgtcccattttcaaaaactgtaacctcacctcaaagtacatcccaggactaaatgggaaagaggtaatatttctctcttcttctccccaggactcctgaagaaaagaatttcttacaaatgctttaatattcaggcgtgggttcaagtgtagagcaatatcctttgattttcctgctagtaggtcaacattaaagcttttgagaaagaaagaaaaaaaaaaaccttaattaaccaagtaggacagagtagtggcaatttcagcaatgttagtgaccagacttgaactatgattctaactctatgaaacacacgtatccacatggacatgggaatgcaggtgaagttgaaattttaaacccagtcagcattccactaattcgttacttgcaaaataaaaatacgaaaaaaaaaaccctttaaaatcagcgttgaggctgagatgtggttggacagaaatggaaggtttaacgctaaactgaatgactacttcaggctgcaggagcctgggatcctctcaagcaggtattctcttttcatcatctacccgtgttccttccttcttgaaagtatgccactttctaggaaatagctctaatttcaagctttcagaaggctggacgtctgtggaaaaagttgttaaagcagaaattttctaaatcacatgacaagaggggccctaaaaaatgttgcctgggctgggcgtggtgactcacacctgtaatcccagcactgggagggcgaagtgggcggatcacttgaggtcaggagttccagaccagcctggccaacatggtgaacccctgtctctactaaaaatacaaaaattcaaaaagtagctgggcgtggtggtgcgcctgtaatcccagctactccagaggctgaggtaggagaatggcttgaacacccaggaagcggaggttgtggtgtgctgggattgtgacactgcactccagcctgggtgacacagtgaggctccatctcaaaaaaaaaaaagaaaagatgttgcctgatcttacggggctgctctggagttctacaaggcaaggataggcctcgtggacaaaaatgctactctcttgtctggccagaaaaagccgaggtcagaacacggccttagtcggctctgctgcccactggctgttcacaatctaaccacctcctgcttgaatcatctcactttggaaatgaagattctgacgctagcccttcttccagctcacaggaccgttcacgggtggaaggcggtaacaggcacggaagtatctgcactgtgactggtaccgaaggatactgaccttttggcatttgcattcacttctcctttaacgacgacagttcgtccagggcccatgggggtgttcaaccttgcagcgaatggcagcctctgaaaagaagccacagtcaggaccaagaggcctgcagaaagcgatctccagggaaaactcgtgtccaaagaacactacggaatgtttcagagccatgaccctgtaaatcccaggaggggagagacagtctgccttggtcccagctgggtcccctgcagcagcactgtccctggctcgaagcaaacacacatgattacattttagacgatgaaatgagtgacagggtgggacccgatgccctctgtatgagtgaaacacgccaggaaggccccctgtgcctggggtctgaggcagtactgtgttctgcctgaaggggaagcagccaagcagggaggtgctgaggaaatacacaggaatggctcagaggcaggcctggttgactctcgaatccgtccagggacggcacacaaatgcagagggggctgctttgggcctctattgtggatacaggttactcgtaacagctcattacaacttaatttttatatagagttaagaaaatttggtgctcttcaaacctttgacacatagttcataggtggtattttggtgcaagtcaaagtgtgattgacagtcgaatctttgctcttggtgtagacagttctgggtgcgattttagaaatgtctcctcctctattactaggctgtagggaaacagttctacagtaaggaatggaatgaatgaagctgccctccacggtttaaactgttcattttctatgcaactttataaaatattccacatgaaataacccaggcaaaaatactcacaagctggggcgtgccagactttggaacctattggaaaagaaacaaaacacaacaatgttagaaggggaagaattatagtttataatctgaagtcttggttgtgctgagctgagcctggccggagcctgggatgttcctgctccactctggtgtgacctccaggcagctggtgctttatgacggaatggtatggtgttgtgaagggctacacgggttgagaagagagtctgatatccctgttcatctgagtcctttatcctccaccataaattaataatttttcatagaactatatgaaatttttttaagagacagggtcttactctgtcatccacactgggatgcagtggctcaatcatggctcactgcagcctcaacctcctgggctcaagtcatccgcctacttcagccacccaaagctgggatcacagccatgcgccaccatgcccagataattttttaattttttgtagagatggggttctccctatgtggcccaggctgatctcaaactcctaggctcaagcaatccccccacctcagccaaagcgctgggactacaggcctgagccaccaccttcacccagcactacatgaacttcaaacgtgtcttagttgtcctttccagggtgcccccagaatgctaagattctgttctgtctgtgaggtgtgaacgtgccagtcggtaagacctcactttctccattaataacagcgcatttttaaattgcagttattctcccaggggttgaagatacacatggaagttcatttgccagtgcactggctgatgttcaatatttggaaataccccagaacagtactattcagcagttaagagtgagagagtgctttttacataagaacagtgagtggcagttacagaaactgacaggtgaatcatcagcaaaaacttactgcgtgcctggcaccacaagtatgtatctcaattttcaagtgattacttgcgttctaaaagcataattttcaaaaacccagccttcttgccatttcattaacatggcagctaaaacaacatttttaaaccagtggctcattaaaagatttaatatttacattttctctacttatctctgtcagttccagactagatgcttgggtactttgtaagtcctgagaaaagataataaagattaatttgtaacatccagtagaaaatattttctaaatattttatattgacatataaaaaaattataaatggtactaaaaatatgcttgaaaactatgatccaaaaatacacttgacactgtggtcctttccgccccccatcagattggcaaacattacagagaataagatgtaatgtcagcaagaaggtgggagcatggctgttgagagtgcaaactgtttttacccttgtgaagggcgagttagtatctatcaaaattttcaatgcaaagacagtcatgtgttgcttaacgaagggggtatgttctgagaaatgtgtccttacatgacttttgtcatcgtgcaaacatcacagaatattacttaacaaccttagatggtactgccaactacacacctaggctgtagggtgtggcctatagctcctggccagtgaatctgtacagcaggcactgtaccaaatactgtaggcaaccagagcaggatggtaagtatttgtgcatataaacttacctaaacatagaaaaggtatggtaaaaatacagtatatgacaatcttatgggaccacggttgtatatgtggttcatctttgactgaactgtccttatgcaacacatgactgtgctctttgactcaggcactcccagcctaggaacctgtcttacagaaatactccattttatgcccatgcaaaggaaatagctgctacccagctaaaaactgtgtgtgttttattaaaaccacactaggtttgagatcctacagacaatgaagccctggctgataaacagccttctgctagtgtgaacagttcacttccaaaaaattaatactacagtcagggagatacgtcctttttatgtcaatagaagtgttatttgaagattttttctaccatctcatcagaaaccatcctcataaaagaccccaagctgtggaaggtcactcaccgagctgaagctaaaaccaattgagtgaatattcactttgccataaatgcccagagtgtctattttctctgggccgatcctgtggccatagagcagagtatgttttccatttacagccacctagagagatacagaagacagagccccccccgccaccaaaaaaaaacagttaataaattaacttattatccaaatttaaatgtttccttgcgtccagttttatacctgttcccacaggtctccacacacatgaccaaatggtaaccgaaagcacccaaaacactagcagtgcttccaaacttcttttgagttcctgatttgattaagcaccaggaactgtctctccccagacaaacaggcagtcataagtatatgtgcgtgtgcttgtgtgcgcctctgcatacatgtgagacatctgggttcgaaggtcgcctggaagcccaggcacaggtgccctggagattgtgaacccaggttaaagatctgcctgcgagctccccacaacactgtccctggagaccacccatgtggcagacactcaaaatctgttgtatttgctaaataaattaatatggacaagttacccaacatatttgaattcggttttcttattctgaagtaggaacagtctctacctcaacagactacagtaagatgacgagaaagtagcttctgcaggtcctcggcacgctacgaggctcctcctccctccctctcaaatgccaggtaccacgttaggttataggcagaaaacgcgagcagcatacaatatagtctctgactcagggagcttaaaatcccattgtggaggcaaaataaacacgtaaa

SEQ ID NO: 7244 - DNA, 576 bp, Homo sapiens
gtttttacccttgtgaagggcgagttagtatctatcaaaattttcaatgcaaagacagtcatgtgttgcttaacgaagggggtatgttctgagaaatgtgtccttacatgacttttgtcatcgtgcaaacatcacagaatattacttaacaaccttagatggtactgccaactacacacctaggctgtagggtgtggcctatagctcctggccagtgaatctgtacagcaggcactgtaccaaatactgtaggcaaccagagcaggatggtaagtatttgtgcatataaacttacctaaacatagaaaaggtatggtaaaaatacagtatatgacaatcttatgggaccacggttgtatatgtggttcatctttgactgaactgtccttatgcaacacatgactgtgctctttgactcaggcactcccagcctaggaacctgtcttacagaaatactccattttatgcccatgcaaaggaaatagctgctacccagctaaaaactgtgtgtgttttattaaaaccacactaggtttgagatcctacagacaatgaagccctggctgataaacagcc

SEQ ID NO: 7245 - DNA, 11204 bp, Homo sapiens
aggagttgtgtcttctgtaagttagtgtcttcgggtgatttaatatctgcataactaatcccagaggaccccttaggagttgatgtaatgcctgtagaaaaagcagtgcgcagcagtagcgcacagaagagtcgaagctcaagagaacagggaacatactggtttgtttcaccaagtatatatcctagctcttcacagttttaccaaaaaaaatctgtgctcaatacatgttagctactgtattatagtaggtactccataaatacttgttgaatggcattcttgaagagtcagccaaagtaggagagagggcagagtggctttaactggctataagtgttgctgcccccagtttccccattcagtgctagacaccaccatacttcatggcaaggactgagaacacccagcaggacctaatggtgcacaagctcattttaacaatataaacaatagaatgacagtgagatgcgtttcagcaaggccagtatcacagaagccattctgtattttggtttttgtagcagctgtgtaggtaggctaccagctccttacttccagtaagtggatgtctccattaatttccagcgtgtcaatactgctgagctctttaaatctgtgtttgtactccaggctgtgtacgccatttactgcaaccttgaattctctaacatcacaataaattatcatctgaaaggaaaggatacatgccattagtggttccccttagtttaaaattttgtgtttgttacatgctaacggtgtcagagtaaaccatttgattatacatagaaaagttccagcctgctgctgctgacttccttctgacttccaagaccctaatctaactaaagtgtccctggtggtggcactgtctgcctcatcccacccagggaagtgactcggacatgtttggagcctcacaccatccccagggcctgcggccctcctttcctcaacacagcccctctccctcggccgcatcctgccccttgctcctggaaagccagagtgctgcccctcctcgccgatgctggggactctcctaaagcaggaaaactcactcctaatatggttgctttagttcaccgagatgctgtttccagctgtagcctggaaccaagggacttggatcctgactgacttttctgcctcaaactctaggaccatgaacaaaccagacaattaatatgaaatttcagcagcttaaggcacttgctagggtttttacagctgcttggtgatcctgatcctgataagctcagcacatcttggcctcagtgtgtttgtccaaagccgtcaaagctgggtatcccgtaagttggaagtggtgcacatactacaaattcagatccatcggcagtgttcgcccttcacagtcatctatgcccaaaactcaaacaatgaaaaaccaaaaaacctactagccttttacatcacctttacacctacacttcatacttctggtgccacgctgccagtgccaggctgggtttccacccactctgagaaggccactgggaggccctgcactgagctctccctgtgctcctcgcccccatgaaggcttcagaagaaagaggggcagctcagccttgctgctaacccggccccaccccgagaggccagaatgaagcacaaaacctgaatctgcaaagcagcaagttgagggtttccattcttttgataggagcagtggaaaggactgtcaaggaaaatcaggaaggggaggaaatttcagcccaagtcctgcactctgataacagctggccaagatgaagcttctgtggctacagaggattggggaaataggtgtaacctgagattctatccccacaagaatggtgggaatcccagttccaaccaggtagaagggaccccagatatatttaacaaaatctcaagaaaacacaaaacacacagcctgatgctatagctcagaaggaaaaccaagttggcagcagagggagtcaattagttacctgtactgtatcagagcaagtgcaaagccagtgaattacaagcaagtggcaaagaaatgacatgcttccgggtgagcagactactgcaaatgaaaagaaggcacatcctttgcctagaagaaaacagaacaacagaatccctcacaaccatctgatgctgccgaacagctggaacacggatttcatccagaggaagagcccacagatgaaattacaacactgaatgagattgtttttaaaaaactgtagatacaactaaagtgtatttgaaagagcaagaagatttaaaatgaaagtaatggcataatggaaagacctgagataatctcaatgcaagcatatttaaaaggcagagatggaagcccccggaaaggacctatcagtatagaaaatcgtcagcagtgatcaacacaaggataattactgctcctgaattagaaaattaaatggaaagacgattgttcaaaagcatataacattcatctattcattccttcagccagccatccctttcactgtctctgcaaaaaaatgcctggaatgtggttcacctaatcctaatggtatggtttgaattatgaagttggaggtattttcatcttagtatttttcagcattatttgaatgtatcattattatccttttttatattaatatagcagatccaaacttggggcccagataggtcaaaaacaagttacatcattggtttcctgtcacccaccacaaggctcaacttccttctagagcactcacctctgtttccctccagtgaaccccaagtcaccctttgcgccttgactcttgccaagctaacaaccctgtgctgcccttcccacctctaaggacttgttcaaatcatgccctaaatctagaaaagccaaccttcagccttccacatccttcccagctttctgaattccaaaccaatatccacaacttcagggaaccttccatgattagcccacatctgtctacactccacataccagggcactgcattagactggaacttagggataaatatgaatgtcacattgctatctattccgcctgatattcatgcttttagtaacgagttttgatgagtcctcaagaacccacatggtccagacaatgtgtcagtttaaaatgctgtagaatgataacctaaaccaatgaccctaagtgactgtgtgaggcagtggcacctgagctggtgattgaggctggccaaacacccggcatccgcatcacaaggagactattctctgctcagcatcccagaaacatatttcgggaaaggtatgtgttacaatattcacctatctggggactcaggactgcatgccttttagttccaagggactgatgtatttttccttgaatacatacaaacaagactaactccttaggagaaaggactgccacctgaaaccgtctaccctgatgggagatgatggccagtgcaagcaagcagttttagggtctccacgtcctcaagtctgcttatatgattaaatgtgtgactccagtcctgagacaagcttcctggttaaattcctatcaatatggggctacacaggaattttaatatgatgacaaatgtcaattccaatgtgcataatttgacactctactggctttgccatttatactgattgcccacgttataaaaaggggcaaattacaatctccaagtaaacaaaaaacatacacaacttccacatactgagttaggacttgatttaaatggaccacttatcccacccctgctcccaggattcttattgctgtcccattttcaaaaactgtaacctcacctcaaagtacatcccaggactaaatgggaaagaggtaatatttctctcttcttctccccaggactcctgaagaaaagaatttcttacaaatgctttaatattcaggcgtgggttcaagtgtagagcaatatcctttgattttcctgctagtaggtcaacattaaagcttttgagaaagaaagaaaaaaaaaaaccttaattaaccaagtaggacagagtagtggcaatttcagcaatgttagtgaccagacttgaactatgattctaactctatgaaacacacgtatccacatggacatgggaatgcaggtgaagttgaaattttaaacccagtcagcattccactaattcgttacttgcaaaataaaaatacgaaaaaaaaaaccctttaaaatcagcgttgaggctgagatgtggttggacagaaatggaaggtttaacgctaaactgaatgactacttcaggctgcaggagcctgggatcctctcaagcaggtattctcttttcatcatctacccgtgttccttccttcttgaaagtatgccactttctaggaaatagctctaatttcaagctttcagaaggctggacgtctgtggaaaaagttgttaaagcagaaattttctaaatcacatgacaagaggggccctaaaaaatgttgcctgggctgggcgtggtgactcacacctgtaatcccagcactgggagggcgaagtgggcggatcacttgaggtcaggagttccagaccagcctggccaacatggtgaacccctgtctctactaaaaatacaaaaattcaaaaagtagctgggcgtggtggtgcgcctgtaatcccagctactccagaggctgaggtaggagaatggcttgaacacccaggaagcggaggttgtggtgtgctgggattgtgacactgcactccagcctgggtgacacagtgaggctccatctcaaaaaaaaaaaagaaaagatgttgcctgatcttacggggctgctctggagttctacaaggcaaggataggcctcgtggacaaaaatgctactctcttgtctggccagaaaaagccgaggtcagaacacggccttagtcggctctgctgcccactggctgttcacaatctaaccacctcctgcttgaatcatctcactttggaaatgaagattctgacgctagcccttcttccagctcacaggaccgttcacgggtggaaggcggtaacaggcacggaagtatctgcactgtgactggtaccgaaggatactgaccttttggcatttgcattcacttctcctttaacgacgacagttcgtccagggcccatgggggtgttcaaccttgcagcgaatggcagcctctgaaaagaagccacagtcaggaccaagaggcctgcagaaagcgatctccagggaaaactcgtgtccaaagaacactacggaatgtttcagagccatgaccctgtaaatcccaggaggggagagacagtctgccttggtcccagctgggtcccctgcagcagcactgtccctggctcgaagcaaacacacatgattacattttagacgatgaaatgagtgacagggtgggacccgatgccctctgtatgagtgaaacacgccaggaaggccccctgtgcctggggtctgaggcagtactgtgttctgcctgaaggggaagcagccaagcagggaggtgctgaggaaatacacaggaatggctcagaggcaggcctggttgactctcgaatccgtccagggacggcacacaaatgcagagggggctgctttgggcctctattgtggatacaggttactcgtaacagctcattacaacttaatttttatatagagttaagaaaatttggtgctcttcaaacctttgacacatagttcataggtggtattttggtgcaagtcaaagtgtgattgacagtcgaatctttgctcttggtgtagacagttctgggtgcgattttagaaatgtctcctcctctattactaggctgtagggaaacagttctacagtaaggaatggaatgaatgaagctgccctccacggtttaaactgttcattttctatgcaactttataaaatattccacatgaaataacccaggcaaaaatactcacaagctggggcgtgccagactttggaacctattggaaaagaaacaaaacacaacaatgttagaaggggaagaattatagtttataatctgaagtcttggttgtgctgagctgagcctggccggagcctgggatgttcctgctccactctggtgtgacctccaggcagctggtgctttatgacggaatggtatggtgttgtgaagggctacacgggttgagaagagagtctgatatccctgttcatctgagtcctttatcctccaccataaattaataatttttcatagaactatatgaaatttttttaagagacagggtcttactctgtcatccacactgggatgcagtggctcaatcatggctcactgcagcctcaacctcctgggctcaagtcatccgcctacttcagccacccaaagctgggatcacagccatgcgccaccatgcccagataattttttaattttttgtagagatggggttctccctatgtggcccaggctgatctcaaactcctaggctcaagcaatccccccacctcagccaaagcgctgggactacaggcctgagccaccaccttcacccagcactacatgaacttcaaacgtgtcttagttgtcctttccagggtgcccccagaatgctaagattctgttctgtctgtgaggtgtgaacgtgccagtcggtaagacctcactttctccattaataacagcgcatttttaaattgcagttattctcccaggggttgaagatacacatggaagttcatttgccagtgcactggctgatgttcaatatttggaaataccccagaacagtactattcagcagttaagagtgagagagtgctttttacataagaacagtgagtggcagttacagaaactgacaggtgaatcatcagcaaaaacttactgcgtgcctggcaccacaagtatgtatctcaattttcaagtgattacttgcgttctaaaagcataattttcaaaaacccagccttcttgccatttcattaacatggcagctaaaacaacatttttaaaccagtggctcattaaaagatttaatatttacattttctctacttatctctgtcagttccagactagatgcttgggtactttgtaagtcctgagaaaagataataaagattaatttgtaacatccagtagaaaatattttctaaatattttatattgacatataaaaaaattataaatggtactaaaaatatgcttgaaaactatgatccaaaaatacacttgacactgtggtcctttccgccccccatcagattggcaaacattacagagaataagatgtaatgtcagcaagaaggtgggagcatggctgttgagagtgcaaactgtttttacccttgtgaagggcgagttagtatctatcaaaattttcaatgcaaagacagtcatgtgttgcttaacgaagggggtatgttctgagaaatgtgtccttacatgacttttgtcatcgtgcaaacatcacagaatattacttaacaaccttagatggtactgccaactacacacctaggctgtagggtgtggcctatagctcctggccagtgaatctgtacagcaggcactgtaccaaatactgtaggcaaccagagcaggatggtaagtatttgtgcatataaacttacctaaacatagaaaaggtatggtaaaaatacagtatatgacaatcttatgggaccacggttgtatatgtggttcatctttgactgaactgtccttatgcaacacatgactgtgctctttgactcaggcactcccagcctaggaacctgtcttacagaaatactccattttatgcccatgcaaaggaaatagctgctacccagctaaaaactgtgtgtgttttattaaaaccacactaggtttgagatcctacagacaatgaagccctggctgataaacagccttctgctagtgtgaacagttcacttccaaaaaattaatactacagtcagggagatacgtcctttttatgtcaatagaagtgttatttgaagattttttctaccatctcatcagaaaccatcctcataaaagaccccaagctgtggaaggtcactcaccgagctgaagctaaaaccaattgagtgaatattcactttgccataaatgcccagagtgtctattttctctgggccgatcctgtggccatagagcagagtatgttttccatttacagccacctagagagatacagaagacagagccccccccgccaccaaaaaaaaacagttaataaattaacttattatccaaatttaaatgtttccttgcgtccagttttatacctgttcccacaggtctccacacacatgaccaaatggtaaccgaaagcacccaaaacactagcagtgcttccaaacttcttttgagttcctgatttgattaagcaccaggaactgtctctccccagacaaacaggcagtcataagtatatgtgcgtgtgcttgtgtgcgcctctgcatacatgtgagacatctgggttcgaaggtcgcctggaagcccaggcacaggtgccctggagattgtgaacccaggttaaagatctgcctgcgagctccccacaacactgtccctggagaccacccatgtggcagacactcaaaatctgttgtatttgctaaataaattaatatggacaagttacccaacatatttgaattcggttttcttattctgaagtaggaacagtctctacctcaacagactacagtaagatgacgagaaagtagcttctgcaggtcctcggcacgctacgaggctcctcctccctccctctcaaatgccaggtaccacgttaggttataggcagaaaacgcgagcagcatacaatatagtctctgactcagggagcttaaaatcccattgtggaggcaaaataaacacgtaaagccaaagcacaactgttaaaaactgtgaaaaagaatgatacagacacgggctcaaaaggccagagaagggagaggtgaatggagtttgggagattcagaaagactttcgggcaggagcagtatcccgaagatcagaaaggatctgcgccagaggcattcgagtcttctctcgcgttggtacatacctctactgtgggcaagctccacaggccagagggccagcaggtgtaagcttctgggaccaaattcaaccgtacacatacacgctaggtacaagacactccatgaagccagagatggaactgacatcaaggatttctaggatctcctctgggtctaaaatctcatgatcctacggaactgtcttgtggcaagacttgaatttacaaaacccttctgatttcttcgctgggattgcccttgttagctcttcgggtggtggcggttatattataacttaccctcccatcatgaacataatactgtgtcaattcggaactcagccctgctaggagaaataggatctaataaaaagatctggtcacagtggaccatatttctgcatggcaacaactggctggagagtagtggtgccatacctcacatttaggtgccttcctggtccttttatggagaaaaactacaaagccaaacaaactatatctcaggtgtaggaaatataaggctgggctcacaaatgtgaaaagcacccctgtgcactcctgctcactaatgaggactcaacctgtccctctccaaaacctacctggaatttgtccttcagcaccataatcacgatctcaaaagacttttctcttttgaaaggcgtgtcataggtgatctcttcccgtccccatttttcatttatcaaagtattgcaaacaatgcagccggcccttttgaaacgaggattgaaatgaaaggccacatcggctcgaggtttcatgctgctgccattctgcagatccacctggaatctatatgagggaagacacaggggccccatgagtgctcagaaaggaaagccaccagtaaaggaccagcaggcactacactccaggcccagtgacaagggactgaccaatccctcctcattcattcactatgaggcctaaagagctgactgtctaatcttttctgtcttcctcagtaaaatagcccctgagtttgaactgggtctgaatctgcccagaataaaaacctacctttcccagcctccctcgcagctaggcctgcctgtgcagctaaagctctgctggtaagatggaagtgaagtgctcagggaaggctactggaaactgccttagaagtcagcaagcacttgccttttgtccagctctgtttccccgcaaacaccacatgcacccatccagctacccaaagcacagaagtgagggctggaaatctggctgccaaggaaaacgggaaaggggaccttacctcaccctcaagataacagagtggtgagctcgaaggagtctacttctctaacgacttgaaggagttaactgaaaaggcctgggctgtctccttgagacttaattttcacatcttaaaccactgctcttcaggtgttaggtacacagagctgagcccaacactaatgataccacagcttgtatccaaagcaggtattcagtaaaaccatctgaactagatctgtaatgctgtgggaatgtcagactaaaactagactgtccctgtcatctgaccacaattcctttctttaatgacatacctaattctttttctttttcttttttttttttgtcacccaggctatagtgcagtggctcgatcacagctcactgcaacctcaaactcctgggctcaaggaatcctcctacctcagccccctgagtagctacaactacaggcgcacaccaccaagccagttaatttttaaattttttttttttttacagatggggggtctcactatgttgcccaggctggtctcaaactcctggcctcaaacaatcctcctgccttggcctcccaaagtgctggaaaagtatgtttaagtcaccacatccagctgatagttctaattttttatactgaaatcagacttacagcaatgaaataaatcccaataacctttatttagtcattcattccaatctcctcagcaccttggccagggctgctgatgaaagctaattgggcctcaaagtatcaaatggtctctcccgccttactctgttatcattccacaatcacaaaaagacagcctattcatgctccttcctttagcacagtgattttacctgtctgcgtcactaggaacatgcccacgtatcacaatcaaagttccaggatccagctgatcaggaatggtgccaacaaacgggattacc

SEQ ID NO: 7246 - DNA, 23763 bp, Homo sapiens
gtggtcctgagattttaaaaggccttgaagagaggtatgtttccttttctttttctactttttatttggaaatgacttcaaacttatagaaaacctggaaaaacagtacagaaaattcatatactctttacaaccaggttcaccatttgataatactttctgccacatttgccttagcgttctccctatgtagggttttttctctgagccatttgaaagtaaatcatatacattatgtctctaagaataagagatgttcttataaaaccacagtacattgatcaaattcagaaaatttaacattgatccaatccagtgatgtaatctacagttcatactccagtctccctaattatcccaacactctcctttacaccgcatgtgtttctgcatcatgatccatgtcaagtctgtgtattgtattgagttgcagtatctgtttagtgtcttaatctggccctgatttctatgggctcatgaattctttattctgtggattctaatccatatgctgccattatatatttgggtgcaggaattttcctttctctcccatgtcctcggggtttgcctcctggccttgctgtgtacctccttttcagatgcatggcattcccagggccactgtcctgccccttccactggaaagtgcctgccctgcagccaggaatgtgagctgctgagttccagtcctgtgggctgacttgtagcgctatgcgtaggactttcgtttttggagctgattttgtctgcgcccccttctcccctcctctgctgtgcggtgtcaacttctgtctccactcttccctctagctcccccctcaggctggcagcagtggggggatctccagtggcagctgtgttggaatttggtgtgtgcttttctaattacaagttatttgaagtttgtagtcttttttttttgtctcctaataatgtgaaagaagtgggttatatgttcatttctattaatatttctctttatataaatggtgtatggtgtgtgtgcatgtgtatgtgtgcgtgtgtgtgcctgtgtgtgtgtgcgcgcacacacctgccattaacctagggccataactccctgaacaccccacttggacagcccagtgagatccactgagcatgagctagatatgagtgagttccttaaacgctttcagcatctgttgcttattcagcacctcacagagtctgagcgaggtcgatgcttctgcacagaagcgcctagttacttcttgatgatctctgtctatggcaataatccctcatttcctttctttccgagtagtttttgaaataatttagtacagaattatttaactcgtctttctacttgaaacatttagcataaggtagacatgaacaagttctctgagtgccttcagctgccgtttgctgagcgagcctctgtgtttcaggttgctggagaccgttctcggctatatcagtgcagttgcacagtccatggaaaggaacgcagacaaactcaccgtgaagttctggcgcgcgctccttagtaaagcttacgacctgttagataaggtaggtgttcatttctccctggaattactgttttgttgctgttttttaaattattgtgaaattatgtaaagtttttaagaataaacttagcaattccttttatgaatataatgaagctcagatttttcttagaaaacaatctcttgatgactagaaatagatttgtctggaaaaaattgtttccttaccagttatgagaacatgtacctcgtatattttaataattaagtcatataatatatactgttctactttattcaagtggaataaaataaaagtatgaagtatattacatacatatcactggcctcgaagttaggattgctgattcaaatctagctcagtcatttagctgcatgcctttggcacttcctcctgacatcaggcttttgttttgttcgataatgtgtggttggtaatgcctacctgaaaggttattttaagaattaaataagaaaatgtgtgtggaagtgcctggtgcctggaggtgtgcagtggacagcagtctgtcttaattgaagttggttttttttttaatttgtttttcttttcatgttaaatataaaatttctctttaggtcaatgccttgctgcccacagagacattcattcctgtgatcagagggctggtgggcaatcccctgccatctgttcgccgcaaagcgctggaccttttgaataacaagctgcagcaaaatatatcctggaagaagacaatagtgagtgaagacccaggacacacccatttactgtactttgctttatcaaagagctgcatttaactcccttcaatttctctagtggtacaatttcaaattgaagtatattattatctgaatataataccatgacatgttttaaaatgtgacgttaattctaacgggaatatatgtgtgttgtaagagctcttagaatggaatttcagcctagtggaattcttgcttactacagagcttacgtggccttagccttagcatagttctaagtcccttttactccagatcagtgggtgctttgtataagtgaaacactggctagaacatgcacatcgcttagcatgactgtgtgactcaggacccccgagtctgatttccatttagacaatctcaagctgtgacaatgggaaaatggacaaacattttttgcagctttaatgatttggggattctggctgtccccttcaggttacccgtttcctaaaactggttccagaccttttggccattgtgcagcgtaagaaaaaggaaggggaagaagaacaagcaatcaacagacagacagcgttgtataccttaaagcttttatgcaagaattttggtgcagaaaatccagatccttttgtcccagtgctgaacactgctgtgaaactgattgctccagagagaaaggaggagaagaatgtcctgggaagcgcgctgctgtgcatagcagaggtgacctccaccctggaggcgctggccatcccccagcttcccaggtatgcggccggagacttggaacaggagctgttaccgcctggcacacattgaaaaataacactttggtgactttttttttttttcctctgagtagacgttgcataaaattggaatttgttaaagaattgatcttgcagggtgtggtggctcacggctgtgatcccaccactttgggaggccaaggcagggagatcgtttgagcccaggagtttgaggctgcagtgagctatgactgcaccactgcactgtagcctgggcaacagagtgagaccctgtctcttaaagaaataataataaaaataattaatcttcaaacagaaagatgcagccttcccgtttatcttcagatgcactactttgcagtgttaatcgtcctccattcttccttccttttgtctagtatagtcaaaaagcagtgggtgaaggttcttggcagaggggcccacccagttaggcaaggccaaagctgccttctgctgccaaatttggaagttagaagctcctggctgtggtagttccttactgtacagccagtatgttccttaacctgttagagctttgctgtctataaaacagagacagtatctacctcataggatttctgtagggcagtgcttgcaaggagttttgcatagtgcctgacacatagtaagtgttcagttaatgaaagacattgttattttttaaattactgttgtgtccgtactgttagcactgggagatttcttgtgcttagccacataaaatgtatagacactgctttttaggctatgaagcagatagcgatgtaataggcacagtttgctggtttttttcataatgccctctactccattccctagcctctgtttctgcttcaagttcttctaaagctcttactttgtttctagcctgatgccatcgttgctgacaacaatgaagaacaccagcgagctggtctccagcgaggtctacctgctcagtgccttggctgctctgcagaaggttgtggagactctcccgcacttcatcagcccctatctggaaggcattctctcccaggtgagccacgatagccacgacatgctacgcagggtggctggggaaggtaaaagatcacaaatgtagtgattttgttttttctttaagggttagtttccgtttgacagaaaggagtcttatttctgaagagatgtgcttgcttttattaaatgtgtactttttctcttccatcatccttgccacttaatcttgaaattgatatgggggtcactttttagcgagatgcttctcttctttaattgtgcggaatgtattctggcttttttttcttctgtgagatctttggagttgggctggtagagccgccttttattacttgtggaaattgatgggccctgtttctactgtgagaggtataatcctaaggcatcttgcaaagcagaatttttgtattgcacgtcagcggtttcctgtcaacacgctaggggccagtggtatttatgattgaagatgctcaagaatgttgagacctggctgttccattgtgttgatcatttgccatttacaaggttaggagccttcattaccatggggcaaatgattaaaccgcttcacttacaccacagccagggtttaaaagtagccttctcagagaaaggggcctgtgctctgaggagctttctcagttttttagcaacttgactcttgccgtggtcccttgcattcctgtcctctaagaaaatcatctgtctgggtgctgtgtgtgcgtctgcgtctaccatcggccttcgtccctgatcgcaagttgggcaagaggtgtctgcccagttttatccactgacgtttagggctgactttaaaaggaattctgtgtgtagttaaaaagtgctaagcattttccaaacactagtacctcatcatgaagcctctctgtaagtgtgtgtttgtcagcgaagatctgcagtggccctgatcactttttttatattcctgtaggtgattcatctggagaaaatcactagtgaaatgggttctgcgtcacaggctaatatccgtctcacatctcttaaaaagacactggctaccacacttgcaccccgagtcctgttgcccgccatcaaaaaaacttacaagcagattgagaagaactggaaggttagatcttattgggtattaagactttggagaagggagaggtggtactgcaatgtgtaaactttgacttaaagaagaagatttagtttttaaaaatacacaccgctgaactctaggaatcatttgaaaatggcacatctctttcctgtgttattggtagaatcacatgggtccgtttatgagcatcttgcaagagcatattggggtgatgaagaaggaagagctcacctcccatcagtctcagctaaccgcctttttcctggaagccctggacttccgagcccagcactctgaggtaagctcaggttcactcctccaaatcctaaagctgttatccacctattgaagagtccgagaacaatctagccgtgtaacagtggtacttgccaaaataatttacagtcaggtatcagcactctaataaatgggctcttctgttttcagaacgatctggaggaagttggaaaaacggaaaattgtatcattgactgtctagtagccatggttgtcaaactttccgaggtcacattcaggcccctgttcttcaaggtgacgctttcttcctcttcctctcttttgtgctcagatttaagtgacaagatgtcgaagaaactaatactgtcttatcctttcagctgtttgattgggctaaaacagaagatgccccaaaggacaggttgttgacattttacaacttggcagattgcattgctgaaaagctgaaagggctttttactctgtttgccggccacttagtgaagccttttgctgacaccttgaaccaggtgaacatctccaaaacaggtgggtggtcgcttcagttcagctgtcacccttgccctgtgtgccttatacaaggtaccagtaagacacaacctagtgcttggaagcaagattttagaggttcttaagtcctaagctaaggagggtgaattttttacttcattgttgtcagacagtgaagtgttgttttagcatcatgagcgaatgttataagtcacctcacttgggagaaagaataaagtaaatggccgttactgtcagttactggaagtaactttaaaacgcaaaaattaagattagtttattctctaatgctaatacgtgacccacttgacagttgagggaatttaacttgccagagtgagtgttagaatcttaactctaaaagaaggaatcattcttcgagagaccatccattgtgttctgccttcgtcctgattatgatttctagatcattttagactcttctgatttagttattttaatagtgatttcaatgtaaacattggagattaaatggttaagttcagtgttttttcatttttactcttcccacgtctacagatgaagcattttttgactctgaaaatgaccctgaaaagtgctgcttgctgttgcagtttattttgaactgtttatacaaaatcttcctttttgatacccagcattttataagtaaagagagagcagaagccttgatgatgcctctggtggatcaggtaaccaaacagaatcatctttcgttgctgaggaagccatcactgttcgagcttggcaggttttagatctgctcaaatgacagcttgctaggatttttctttgtaaggttgttttttctggtctttttaatgaaatgttttatttgaaaattgttttttcaaagatataacttcattgtggaatttgagttttgttttgttgttttgagacagggtcttgctctgtcacccaggctggagtgcagtggtgcaatctcggctcgctgcaacctccacctcccggtttcaagcaattcttgtgcctcagcctcccgaatagctgggatcacaggcgcccgcctccacacctggctaatttttgtatttttagtagggatgaggttttgccatgttggccaggctggtctcgaactcctgacctcaagtgatccacccaccttggcctcccaaactgctgggattacaggcgtgagccaccatgcctggccctgagttattttttattttttattttttaaactgctcaaaagacagacatgatataagctgtcatggttaatgtattcatttgttttaactgggcctcactgagaacgcgtcagagcatggctgtcctctggagcaaagagctcctctgagatgttctgctggagagaaaggggcgatgataaagggtatgagattccatttgagttctagaaggcaatacatttgccctagagagtattagaataatgcctggtttttgaacctgctaatatcatgaaagatagtaaaatatttgtatgttggatattttttcaaacagaagaaagaaatgagacttgttgttcaaagtctttgtcttactcttcctagctggaaaacaggcttgggggagaagagaaattccaggaacgggtgacaaagcacctgataccatgcatcgcacagttttcggtggccatggcggatgactctctttggaaaccactgaactaccagattctgctaaagacgagagactcctcgcctaaggttaggaactgcgtgacaagtactgaaactgcatcttttcactgcatagcctaaacagcctgcaggtggtcacagatgtaggccccctagtaaactggcagggaagaacattgctatttgtcatccagtactagaggtccggtcttttgtattaggcagaaatttgtgcctaagaaaattttgttttttacttacaggctatttgtaaagaatagcaatgccctatccccaccccaatggtgcgttgggcagaagtactaaaatactttctaaatacttttaaataacaaagatttgaagtaattccttcttttttaagtgccattgaaatgtcattgtgctccagagagaaatgcattgaatttatccacactatagtcttttgagttagagcaatacattctgttgtttatagatactaggcttatgatcttgttgagtaagtggtggcagtggaaataaaacatgggtaggttgagtggaagtcaaaatttgacacccaagtgttacgaatttcaaactgttttagcaatgagtcaccatttctcaaactaatgattgtattagaactttactggctataacagaccaaagcagaattttattaataggatttattagttcaaattctttattaggatatgctaacaatgagactattatgatgaacccccacattttaaaccataggtttttatacaagtagcagtatcaaatttattgtaatattttactttgcacaaatcaaggaaatcctgattgaatctaggtagttacaaatggttttttaataattcactttgtactgtccagatattctttaattaaaatatccaaaattagaagaccagtagggcttttgtttcaaaagctaacaatacccaactactgcttgctttccttattatagacaaggcatgtgaggaacacctagacgtttttaaagccccaaaactaggatattgtgacacagaatgttttttattcagtgctgagatgggagtttatcccaagcgactgtcctggcccctcatacaattatagtggtgaccagtcaggggctgtgggtgaggagacctgccagaggtggctggaggcactttattgccagcctggcgggctggcgagcgccaatgaagtaaaatctggtgacacacttgagtttgcatgcggcattttattttattggttttttttaaaggaagagattataaaaagacatttcacattaaagatttgcagtcctgggacacagtttggaaaacactatttataaggttgcacatattacaaacagctcccaaatggtgaaactggtattctaagatgaaagcttaatgaacataatgaagtgaataaacgcatgtgaactaatgtttaaaaagttagagcttgtctcaagtcagtacagctcttaagataataaatacagtaacactactttttatttctttgctcttttatccctttcaggttcgatttgctgctttgattactgtgttagcactggctgaaaaactaaaggagaattatattgtcttgctaccagaatccattcctttcttagcagagttgatggaaggtaattcccaaactattcccaaccattaaacaattaaggaataattcagtaaaattctgtgaaaatgtgcccaatgataatgcagatttggatataacgtgactagcagttgatccagtcctcatacaggcagctccagtctcaaatacaggcaggctcgagctcctgttttgagttgggtggagggagcaagttgcgaagtgaccacctcctgatcatttgagagtccgtttacagtgtaatcttcacgatcttttcttttgtggtggtttgtgatcatacaagcagattacagtagtgtttttaattaacctcatacatttatatgattgaagttttggtccccagattgtatggaaatgcctagtggcattaaggatgcagtaggatgtccacttttagtagcaaccgatgttcattcactactccatgttaggtgctttacttggattatctcacttaaaaaccacaacattttatctctgttttacaaaggaagaaactagaggcttaaaagatttcagttatttgacaaagatcacaagctagtgagtgtgacatggggagctgtgacagttctggaacatagagtcttaggcccaggaaataacagtaaatgttattattaagggaggggtggtggagcaagtagatcagtcctttactgattcattgcttatctaagctacaaaagtacattctcctttgtttcttagctcttggaggggggaggtgtgagctactaaaggggtggcatccctaggaagtttgagttttggggattcttattcagcttccagtgcaagcctgtgggcaaggaatgaaggcggaaggagcggtgtggagggaggcggtccgtggcgcctcctgctttgttaatgtgcttcatttcactcttttgattgaatgattgccggaaagtgcaaggcattaagaattaaactaatgagaaccgaggcaggcggactgactcagattttaattttgattttttttttttttttttagatgaatgtgaagaagtagaacatcagtgccaaaagactattcagcaactggaaactgtcctgggagagccactccagagctatttctaagactttctgtggtgtttcatactctactcagagttcacactcatatttcatatttttatttttgggtgttgggtgccatgttacttttggtgccttaatacacctacttggattacttacaaatgttttatcacttctttacaaaatccccacctggcttgtgctgccacataagcctctcctgcctatcgtatagagctgcagaaagagtaaatgatacacggtatttttatacagactgctgtgtttgtttaaacatttattattctcttcctgattgatggtaataatattagacttgttaattttagcacccaaagctgacgcctcatttgcactgtaagccttaactcttctgtacagcagtatcttacatacatggtatccatgttgcagatttcactcaaagttgctctatttcaagaaaatgaagttatttagcaatcaacagaagtacttttgactgtaaagcctacttttcattttgggtaggcgaacttcagccttcgtttctttgttgtgcccataaagagaagtggttctggaatgctttttttaacccaggagtgtgactgtcacctttatcctttgttcttttgggaaacgggagagatgaaggcaacacgctgcttctaaaacagctcacacctggctgctcacacagagggcccagaaacactgggtggcacgaggaagctcctccaggattcagaatgaacccagttccattggtggttaactaagaactacttgtctaagaaagtaagtatcagtagatttttttcaatgctttgaagtgccctaatctctagtactgggtcatggtgaagttggaaagtgagggttcaaataaaattagatctgccccctttttaaaggcatctaagaacatcccgtagaatgttcgcattgagtttaaaagcctttgaagctaatatagaagtttaatgcagaaatgtggcaagcaaaaggccaacttgcattttagagacagagcttgctagtatagaagtgcatatttctaagaaatgtctcagtaaaattcattaataaatactaatagctttttaaatttttttcctccacgtaaaatgaaaatgaacttaagacttacaaggaatgatgtgagtgggctatttttttcctaaatgcctcacagtctccaacagctcagttaagcactctgatggtctttatggagaaaaataactctgggggattctcgagtcttcttgccttctacagctttccctgtggcaccctccacccccaaccagtgtctttgagcttggtgagactctgcatacattaatatgaaaagctggaaaagaattaagggctagcgatttctacactgagtacttttaaaaaaataagattgacaatggtattcttttcaatatatggatagaaataatatctaaaatctgttctgaaaatattcctaaatcctggcagagttctgccccagtctaatgtgataaaatgatcctcactgactgagcttttttccctccccactcccaaacctttgaaatttcctgtaacaagatctgacctgtaaagatcccatatacatggaacttctgccaactcccctcaaataatagaaaaatcacagaaatggaaccatttaacttgctgatacaggtttgattttaatcacgtaaagtggaagagtgctttgatctcagttgctaatgatgatggactaatctttagaagaacggaggccttgattggtgatttcatgggaacaaaacagatttctgcattacctctgcctgctttgtgggtcccttagttggcgtacactttctgatagtgcctgccttatgaatgcctgaagtctaatcctgaccttactttgttgcccataaatatctttcaaattgaatgcatcttgcctcttcctgaaactttctgtaggcgtctgtgtagactctgatttgccctaagttcaaatacacagaaatcagctgccttgggcttggcatcaagttaatttcagcaccatgtatttgttttgctttggttttttgccttaatttctgtgctcagatgtcatgccaattacttggtaaagcttgcagctaatagagccacatgtttattacgataaagaaaatgatgtcagtcaacatcagtcctcagtgatgggatacggtagagcactggttatgacagtgatcactggggaaggagttgtgtcttctgtaagttagtgtcttcgggtgatttaatatctgcataactaatcccagaggaccccttaggagttgatgtaatgcctgtagaaaaagcagtgcgcagcagtagcgcacagaagagtcgaagctcaagagaacagggaacatactggtttgtttcaccaagtatatatcctagctcttcacagttttaccaaaaaaaatctgtgctcaatacatgttagctactgtattatagtaggtactccataaatacttgttgaatggcattcttgaagagtcagccaaagtaggagagagggcagagtggctttaactggctataagtgttgctgcccccagtttccccattcagtgctagacaccaccatacttcatggcaaggactgagaacacccagcaggacctaatggtgcacaagctcattttaacaatataaacaatagaatgacagtgagatgcgtttcagcaaggccagtatcacagaagccattctgtattttggtttttgtagcagctgtgtaggtaggctaccagctccttacttccagtaagtggatgtctccattaatttccagcgtgtcaatactgctgagctctttaaatctgtgtttgtactccaggctgtgtacgccatttactgcaaccttgaattctctaacatcacaataaattatcatctgaaaggaaaggatacatgccattagtggttccccttagtttaaaattttgtgtttgttacatgctaacggtgtcagagtaaaccatttgattatacatagaaaagttccagcctgctgctgctgacttccttctgacttccaagaccctaatctaactaaagtgtccctggtggtggcactgtctgcctcatcccacccagggaagtgactcggacatgtttggagcctcacaccatccccagggcctgcggccctcctttcctcaacacagcccctctccctcggccgcatcctgccccttgctcctggaaagccagagtgctgcccctcctcgccgatgctggggactctcctaaagcaggaaaactcactcctaatatggttgctttagttcaccgagatgctgtttccagctgtagcctggaaccaagggacttggatcctgactgacttttctgcctcaaactctaggaccatgaacaaaccagacaattaatatgaaatttcagcagcttaaggcacttgctagggtttttacagctgcttggtgatcctgatcctgataagctcagcacatcttggcctcagtgtgtttgtccaaagccgtcaaagctgggtatcccgtaagttggaagtggtgcacatactacaaattcagatccatcggcagtgttcgcccttcacagtcatctatgcccaaaactcaaacaatgaaaaaccaaaaaacctactagccttttacatcacctttacacctacacttcatacttctggtgccacgctgccagtgccaggctgggtttccacccactctgagaaggccactgggaggccctgcactgagctctccctgtgctcctcgcccccatgaaggcttcagaagaaagaggggcagctcagccttgctgctaacccggccccaccccgagaggccagaatgaagcacaaaacctgaatctgcaaagcagcaagttgagggtttccattcttttgataggagcagtggaaaggactgtcaaggaaaatcaggaaggggaggaaatttcagcccaagtcctgcactctgataacagctggccaagatgaagcttctgtggctacagaggattggggaaataggtgtaacctgagattctatccccacaagaatggtgggaatcccagttccaaccaggtagaagggaccccagatatatttaacaaaatctcaagaaaacacaaaacacacagcctgatgctatagctcagaaggaaaaccaagttggcagcagagggagtcaattagttacctgtactgtatcagagcaagtgcaaagccagtgaattacaagcaagtggcaaagaaatgacatgcttccgggtgagcagactactgcaaatgaaaagaaggcacatcctttgcctagaagaaaacagaacaacagaatccctcacaaccatctgatgctgccgaacagctggaacacggatttcatccagaggaagagcccacagatgaaattacaacactgaatgagattgtttttaaaaaactgtagatacaactaaagtgtatttgaaagagcaagaagatttaaaatgaaagtaatggcataatggaaagacctgagataatctcaatgcaagcatatttaaaaggcaagagatggaagcccccggaaaggacctatcagtatagaaaatcgtcagcagtgatcaacacaaggataattactgctcctgaattagaaaattaaatggaaaagacgattgttcaaaagcatataacattcatctattcattccttcagccagccatccctttcactgtctctgcaaaaaaatgcctggaatgtggttcacctaatcctaatggtatggtttgaattatgaagttggaggtattttcatcttagtatttttcagcattatttgaatgtatcattattatccttttttatattaatatagcagatccaaacttggggcccagataggtcaaaaacaagttacatcattggtttcctgtcacccaccacaaggctcaacttccttctagagcactcacctctgtttccctccagtgaaccccaagtcaccctttgcgccttgactcttgccaagctaacaaccctgtgctgcccttcccacctctaaggacttgttcaaatcatgccctaaatctagaaaagccaaccttcagccttccacatccttcccagctttctgaattccaaaccaatatccacaacttcagggaaccttccatgattagcccacatctgtctacactccacataccagggcactgcattagactggaacttagggataaatatgaatgtcacattgctatctattccgcctgatattcatgcttttagtaacgagttttgatgagtcctcaagaacccacatggtccagacaatgtgtcagtttaaaatgctgtagaatgataacctaaaccaatgaccctaagtgactgtgtgaggcagtggcacctgagctggtgattgaggctggccaaacacccggcatccgcatcacaaggagactattctctgctcagcatcccagaaacatatttcgggaaaggtatgtgttacaatattcacctatctggggactcaggactgcatgccttttagttccaagggactgatgtatttttccttgaatacatacaaacaagactaactccttaggagaaaggactgccacctgaaaccgtctaccctgatgggagatgatggccagtgcaagcaagcagttttagggtctccacgtcctcaagtctgcttatatgattaaatgtgtgactccagtcctgagacaagcttcctggttaaattcctatcaatatggggctacacaggaattttaatatgatgacaaatgtcaattccaatgtgcataatttgacactctactggctttgccatttatactgattgcccacgttataaaaaggggcaaattacaatctccaagtaaacaaaaaacatacacaacttccacatactgagttaggacttgatttaaatggaccacttatcccacccctgctcccaggattcttattgctgtcccattttcaaaaactgtaacctcacctcaaagtacatcccaggactaaatgggaaagaggtaatatttctctcttcttctccccaggactcctgaagaaaagaatttcttacaaatgctttaatattcaggcgtgggttcaagtgtagagcaatatcctttgattttcctgctagtaggtcaacattaaagcttttgagaaagaaagaaaaaaaaaaaccttaattaaccaagtaggacagagtagtggcaatttcagcaatgttagtgaccagacttgaactatgattctaactctatgaaacacacgtatccacatggacatgggaatgcaggtgaagttgaaattttaaacccagtcagcattccactaattcgttacttgcaaaataaaaatacgaaaaaaaaaaccctttaaaatcagcgttgaggctgagatgtggttggacagaaatggaaggtttaacgctaaactgaatgactacttcaggctgcaggagcctgggatcctctcaagcaggtattctcttttcatcatctacccgtgttccttccttcttgaaagtatgccactttctaggaaatagctctaatttcaagctttcagaaggctggacgtctgtggaaaaagttgttaaagcagaaattttctaaatcacatgacaagaggggccctaaaaaatgttgcctgggctgggcgtggtgactcacacctgtaatcccagcactgggagggcgaagtgggcggatcacttgaggtcaggagttccagaccagcctggccaacatggtgaacccctgtctctactaaaaatacaaaaattcaaaaagtagctgggcgtggtggtgcgcctgtaatcccagctactccagaggctgaggtaggagaatggcttgaacacccaggaagcggaggttgtggtgtgctgggattgtgacactgcactccagcctgggtgacacagtgaggctccatctcaaaaaaaaaaaagaaaagatgttgcctgatcttacggggctgctctggagttctacaaggcaaggataggcctcgtggacaaaaatgctactctcttgtctggccagaaaaagccgaggtcagaacacggccttagtcggctctgctgcccactggctgttcacaatctaaccacctcctgcttgaatcatctcactttggaaatgaagattctgacgctagcccttcttccagctcacaggaccgttcacgggtggaaggcggtaacaggcacggaagtatctgcactgtgactggtaccgaaggatactgaccttttggcatttgcattcacttctcctttaacgacgacagttcgtccagggcccatgggggtgttcaaccttgcagcgaatggcagcctctgaaaagaagccacagtcaggaccaagaggcctgcagaaagcgatctccagggaaaactcgtgtccaaagaacactacggaatgtttcagagccatgaccctgtaaatcccaggaggggagagacagtctgccttggtcccagctgggtcccctgcagcagcactgtccctggctcgaagcaaacacacatgattacattttagacgatgaaatgagtgacagggtgggacccgatgccctctgtatgagtgaaacacgccaggaaggccccctgtgcctggggtctgaggcagtactgtgttctgcctgaaggggaagcagccaagcagggaggtgctgaggaaatacacaggaatggctcagaggcaggcctggttgactctcgaatccgtccagggacggcacacaaatgcagagggggctgctttgggcctctattgtggatacaggttactcgtaacagctcattacaacttaatttttatatagagttaagaaaatttggtgctcttcaaacctttgacacatagttcataggtggtattttggtgcaagtcaaagtgtgattgacagtcgaatctttgctcttggtgtagacagttctgggtgcgattttagaaatgtctcctcctctattactaggctgtagggaaacagttctacagtaaggaatggaatgaatgaagctgccctccacggtttaaactgttcattttctatgcaactttataaaatattccacatgaaataacccaggcaaaaatactcacaagctggggcgtgccagactttggaacctattggaaaagaaacaaaacacaacaatgttagaaggggaagaattatagtttataatctgaagtcttggttgtgctgagctgagcctggccggagcctgggatgttcctgctccactctggtgtgacctccaggcagctggtgctttatgacggaatggtatggtgttgtgaagggctacacgggttgagaagagagtctgatatccctgttcatctgagtcctttatcctccaccataaattaataatttttcatagaactatatgaaatttttttaagagacagggtcttactctgtcatccacactgggatgcagtggctcaatcatggctcactgcagcctcaacctcctgggctcaagtcatccgcctacttcagccacccaaagctgggatcacagccatgcgccaccatgcccagataattttttaattttttgtagagatggggttctccctatgtggcccaggctgatctcaaactcctaggctcaagcaatccccccacctcagccaaagcgctgggactacaggcctgagccaccaccttcacccagcactacatgaacttcaaacgtgtcttagttgtcctttccagggtgcccccagaatgctaagattctgttctgtctgtgaggtgtgaacgtgccagtcggtaagacctcactttctccattaataacagcgcatttttaaattgcagttattctcccaggggttgaagatacacatggaagttcatttgccagtgcactggctgatgttcaatatttggaaataccccagaacagtactattcagcagttaagagtgagagagtgctttttacataagaacagtgagtggcagttacagaaactgacaggtgaatcatcagcaaaaacttactgcgtgcctggcaccacaagtatgtatctcaattttcaagtgattacttgcgttctaaaagcataattttcaaaaacccagccttcttgccatttcattaacatggcagctaaaacaacatttttaaaccagtggctcattaaaagatttaatatttacattttctctacttatctctgtcagttccagactagatgcttgggtactttgtaagtcctgagaaaagataataaagattaatttgtaacatccagtagaaaatattttctaaatattttatattgacatataaaaaaattataaatggtactaaaaatatgcttgaaaactatgatccaaaaatacacttgacactgtggtcctttccgccccccatcagattggcaaacattacagagaataagatgtaatgtcagcaagaaggtgggagcatggctgttgagagtgcaaactgtttttacccttgtgaagggcgagttagtatctatcaaaattttcaatgcaaagacagtcatgtgttgcttaacgaagggggtatgttctgagaaatgtgtccttacatgacttttgtcatcgtgcaaacatcacagaatattacttaacaaccttagatggtactgccaactacacacctaggctgtagggtgtggcctatagctcctggccagtgaatctgtacagcaggcactgtaccaaatactgtaggcaaccagagcaggatggtaagtatttgtgcatataaacttacctaaacatagaaaaggtatggtaaaaatacagtatatgacaatcttatgggaccacggttgtatatgtggttcatctttgactgaactgtccttatgcaacacatgactgtgctctttgactcaggcactcccagcctaggaacctgtcttacagaaatactccattttatgcccatgcaaaggaaatagctgctacccagctaaaaactgtgtgtgttttattaaaaccacactaggtttgagatcctacagacaatgaagccctggctgataaacagccttctgctagtgtgaacagttcacttccaaaaaattaatactacagtcagggagatacgtcctttttatgtcaatagaagtgttatttgaagattttttctaccatctcatcagaaaccatcctcataaaagaccccaagctgtggaaggtcactcaccgagctgaagctaaaaccaattgagtgaatattcactttgccataaatgcccagagtgtctattttctctgggccgatcctgtggccatagagcagagtatgttttccatttacagccacctagagagatacagaagacagagccccccccgccaccaaaaaaaaacagttaataaattaacttattatccaaatttaaatgtttccttgcgtccagttttatacctgttcccacaggtctccacacacatgaccaaatggtaaccgaaagcacccaaaacactagcagtgcttccaaacttcttttgagttcctgatttgattaagcaccaggaactgtctctccccagacaaacaggcagtcataagtatatgtgcgtgtgcttgtgtgcgcctctgcatacatgtgagacatctgggttcgaaggtcgcctggaagcccaggcacaggtgccctggagattgtgaacccaggttaaagatctgcctgcgagctccccacaacactgtccctggagaccacccatgtggcagacactcaaaatctgttgtatttgctaaataaattaatatggacaagttacccaacatatttgaattcggttttcttattctgaagtaggaacagtctctacctcaacagactacagtaagatgacgagaaagtagcttctgcaggtcctcggcacgctacgaggctcctcctccctccctctcaaatgccaggtaccacgttaggttataggcagaaaacgcgagcagcatacaatatagtctctgactcagggagcttaaaatcccattgtggaggcaaaataaacacgtaaagccaaagcacaactgttaaaaactgtgaaaaagaatgatacagacacgggctcaaaaggccagagaagggagaggtgaatggagtttgggagattcagaaagactttcgggcaggagcagtatcccgaagatcagaaaggatctgcgccagaggcattcgagtcttctctcgcgttggtacatacctctactgtgggcaagctccacaggccagagggccagcaggtgtaagcttctgggaccaaattcaaccgtacacatacacgctaggtacaagacactccatgaagccagagatggaactgacatcaaggatttctaggatctcctctgggtctaaaatctcatgatcctacggaactgtcttgtggcaagacttgaatttacaaaacccttctgatttcttcgctgggattgcccttgttagctcttcgggtggtggcggttatattataacttaccctcccatcatgaacataatactgtgtcaattcggaactcagccctgctaggagaaataggatctaataaaaagatctggtcacagtggaccatatttctgcatggcaacaactggctggagagtagtggtgccatacctcacatttaggtgccttcctggtccttttatggagaaaaactacaaagccaaacaaactatatctcaggtgtaggaaatataaggctgggctcacaaatgtgaaaagcacccctgtgcactcctgctcactaatgaggactcaacctgtccctctccaaaacctacctggaatttgtccttcagcaccataatcacgatctcaaaagacttttctcttttgaaaggcgtgtcataggtgatctcttcccgtccccatttttcatttatcaaagtattgcaaacaatgcagccggcccttttgaaacgaggattgaaatgaaaggccacatcggctcgaggtttcatgctgctgccattctgcagatccacctggaatctatatgagggaagacacaggggccccatgagtgctcagaaaggaaagccaccagtaaaggaccagcaggcactacactccaggcccagtgacaagggactgaccaatccctcctcattcattcactatgaggcctaaagagctgactgtctaatcttttctgtcttcctcagtaaaatagcccctgagtttgaactgggtctgaatctgcccagaataaaaacctacctttcccagcctccctcgcagctaggcctgcctgtgcagctaaagctctgctggtaagatggaagtgaagtgctcagggaaggctactggaaactgccttagaagtcagcaagcacttgccttttgtccagctctgtttccccgcaaacaccacatgcacccatccagctacccaaagcacagaagtgagggctggaaatctggctgccaaggaaaacgggaaaggggaccttacctcaccctcaagataacagagtggtgagctcgaaggagtctacttctctaacgacttgaaggagttaactgaaaaggcctgggctgtctccttgagacttaattttcacatcttaaaccactgctcttcaggtgttaggtacacagagctgagcccaacactaatgataccacagcttgtatccaaagcaggtattcagtaaaaccatctgaactagatctgtaatgctgtgggaatgtcagactaaaactagactgtccctgtcatctgaccacaattcctttctttaatgacatacctaattctttttctttttcttttttttttttgtcacccaggctatagtgcagtggctcgatcacagctcactgcaacctcaaactcctgggctcaaggaatcctcctacctcagccccctgagtagctacaactacaggcgcacaccaccaagccagttaatttttaaattttttttttttttacagatggggggtctcactatgttgcccaggctggtctcaaactcctggcctcaaacaatcctcctgccttggcctcccaaagtgctggaaaagtatgtttaagtcaccacatccagctgatagttctaattttttatactgaaatcagacttacagcaatgaaataaatcccaataacctttatttagtcattcattccaatctcctcagcaccttggccagggctgctgatgaaagctaattgggcctcaaagtatcaaatggtctctcccgccttactctgttatcattccacaatcacaaaaagacagcctattcatgctccttcctttagcacagtgattttacctgtctgcgtcactaggaacatgcccacgtatcacaatcaaagttccaggatccagctgatcaggaatggtgccaacaaacgggattacc

SEQ ID NO: 7247 - DNA, 311 bp, Homo sapiens
cgagctgaagctaaaaccaattgagtgaatattcactttgccataaatgcccagagtgtctattttctctgggccgatcctgtggccatagagcagagtatgttttccatttacagccacctagagagatacagaagacagagccccccccgccaccaaaaaaaaacagttaataaattaacttattatccaaatttaaatgtttccttgcgtccagttttatacctgttcccacaggtctccacacacatgaccaaatggtaaccgaaagcacccaaaacactagcagtgcttccaaacttcttttgagt

SEQ ID NO: 7248 - DNA, 287 bp, Homo sapiens
caaacagctagaaaaaggaactgcggccgggcgcggtggctcacgcctgtaatcccagcactttgggaggccgaggcgggaggatcacgaggtcagcagatcgagaccatcctggctaacacggtgaaaccccgtctctactaaaaatacaaaaattagccgggtgtggtggtgggcgcctgtagtcccagctactcgggaggctgaggcaggagaatggcacgaacctgggaggcggagcttgcagtgagccgagatcgcgccactatgctccagcctgggcgaca

SEQ ID NO: 7249 - DNA, 302 bp, Homo sapiens
ggaattactttggcctaataaaggtgacaatctgaagcttgtggtttatatcatacctaatgatgaaatattaatggtgtgcctgctacagtcagggacaagaatctcctctgtcattgtttctattcaggaaaagaaatgaagtgtaagaatcaggaaagaagagaatcagcaattagaactaataatgagttcagtaagcttgcttaagagagatcagtgtagacactatctagagatcagtgtaggttgtgatctgtatcaagcaggctggctgaactaattagtctcaccactgttat

SEQ ID NO: 7250 - DNA, 6053 bp, Homo sapiens
gcattttccaagtcatctttcctattcaaacagctagaaaaaggaactgcggccgggcgcggtggctcacgcctgtaatcccagcactttgggaggccgaggcgggaggatcacgaggtcagcagatcgagaccatcctggctaacacggtgaaaccccgtctctactaaaaatacaaaaattagccgggtgtggtggtgggcgcctgtagtcccagctactcgggaggctgaggcaggagaatggcacgaacctgggaggcggagcttgcagtgagccgagatcgcgccactatgctccagcctgggcgacagagcaaggctccgtctcaaaaaaaaaaaaaggaactgcatacctcatggccaggatatctgcaatagctgcaaaccactatgagttctttggaaagagacacaaggtaaatactattcatagtattttgtatttggctgagagtttgtgaagcaaaacttctgcttaatatgataattctaacagaaaaaaaaaaaaagacttgttgcaatgccatgtctactcattccttttcctactgttccactgctgatcccaacagaaggttcgaggccacactaggcccaaagccaatgctgacggagacaatgacaagcactcactgcctctgaaggaaactccacgttaagccacgcccccacacctgggattccagggcctgctcttctctgctggactcccagactgcaacccagactgcactgttagaaaccagagaactgcatgatcatgaggatgagtgggtgcctgtgggtcttcaagacatggcatccacctgccgtggaccagtccagtctgcaggcgtggactctgacagctggctccacccagtattcaggtctcaacctgcaccctcactgcccagaacccagccctttttttctgggacctgccacactgccagatcttgtcattccccttccccagagatgactacactgtcttcccagtccactggctggggacctgtgctatgtggctgcctctcctgcatcacaaccatctgcctccatctagagcatctgaccaggatgtacagcccacacaccgttaagcctcacactaagctcactcaaattacgatgtgcatggtaaaacctacccaaggtacttctgattgtcaagaaataagaaataaaataagacgggccacagaaaagtggttataaattggtggctcctaaaccgaaatcgccttgaggcacagcctcctctgtggagccttcttcaagctccctgggctgctgagtcagcccctctcagagggttcatgatagcactttggattctgtttgtttgcatgtagctttgcctagactgtgagctgcatggggcagaactggctcatcacctttacctccccaggacacaggtcaagagacgatcggtaactgcatggtgaatgaatgaactctcacctgtctggaaagtgggctctggcaggcctcacacatacagaggagaggcaacaaagcagctgctgaaccgcaagctgagcccacaagctctctgttgccttaggcaataagatgagaaattacggaagccaattatctatttgttgtcatggcaattgctaggagcagggtgggaggcacatgacaccagaaaacaaaaaatacaacagacagtgtagactggggctacagctgcacatcagagtatctgattttgtgtgtagagaatggggaaggacctacatccctacattgatcttttgggtcacagctggttccaagaatatatagcagcaggtttcatagcgttaatctcttaataaaatgagaagtttttataacatcaaatttcatcttaaaattatctttatgcagaatatttaataacacaagttagtaatataagtgagaaagtaatctatagagccatatatagtatgatctcaactaaataaatataaacattaaaaagaaaaccttgctaatacacactgtatcctgtatcaaaatatgccatataccccataaatagatatacctactacatactcaaaaaaattaaaaattaaaaaaagaaaaagagaaacactaaagaaatcagacaaaaatgataacaatagttttcatgggggatgatgggattttaatttttttcttgatatattttcatactttgcagatgtctataataagcatcgatatttctatagccagaaaaatatttttaattatatgtttcattttagtgttggaaagagctttttgagacaaaacaatctattcccatcacttttttttttttttttttttttttgagacagagtctcactctgtcccccaggctagagtgcagtggcgtgatctcagctcactgcaacctctgcctcccgggttcaagcgattctcctgcctcagccatccaagtagctgggactacaggcatgtgccaccatgcccagctaattttttgtacttttagagagatggggttttgccatgttggccgggctggtctggaactcctgggctcaaagtgatcctcccaaagtactggggttgctttgggaggtaatgagctttgggagaagctaccgcacccggcccccatcacttctaataccttgttcacaactgtttataggttgttccagtttgagaaacaactatgctaagaacggtggccacttgctgctttagttttctgggttcatcatgccttctacttcagaaaagatcctgcattacttcagtaatacttttttttttttttaactatgagacacagtgccctgccgctgactcatttaacccacgactatgtggcttctgtgaaaacggaggacatacattgttttctaggctactccaagctactttggtgattcacagatcattattaatttacatttaaaaaattaaaatacagatctgatcacactggagacaataccacaagcttacgccacagtcaggtttgctgttatttcccaaaacacccttgctgattcatattgctttgcctttttgatgattaaatgcaaggctctctattaggcagactgcagcttgaaagaagcctaagagtcagacacccaggaaacataacagacacccaggaaacatggagtgaaaatgtgatactctatttggctgctgaaaattggtatccctttccatatctgaaaatcccctagcttatgaacattagacctcatctagactgcaacaaggtaagagcaggtgacaaaactgcccattagaacttccagctcagcttttaagtaagaaccagtgacaagaagaagccacaatgacgcagtattcactctggcaagggggcagccgctatatctgggtttggagaaagctacatctggggtcaaaggcagctacatccggggtcaggggcagctatatcgagggtcagagggagctgcatccagggtcagagggagctacatctggggtcagagacagcagtggcattggtagagtagcagagacacagtaccatctgtgtccagtggtgacaacagatgcctcttcatgggaaccgtcctacagtatgcttgtgtatctgtggctacctattctccaagcctggttcttcatcctgctagagattctgagaactctgcactatcatttagcaaattccttttctgcttaaagagttggcttctgttgcttgtaactacaaaccctgaccaattcaacatctttaaaaaaaaaaaaaatgggggtcaggcgcagtggctaacacctgtaatcccagcattttgggaggcgaaggtgggcagatcacttgaggttgggagttgaagaccagcctgaccaacgtggagaaaccccatctctactaaaaatacaaaattagccgggcatggtggcacatgactgtaatcccagctactcaggaggctgaggcaggagaatcacttgaacccaggaggcggaggttgcaatgagccgagatcgggccattgcactccagcctgggcaacaagcaaaattcagtctcaaagaaaaaaaaaagggtgggggagcagtaaagaagagtcaaagaaatgcttcaggaaaatgggataaggaattctaactgaggtagccaaagacagtttatgaagaagatatgatttcagttgccacttcaggtagaaatggcagtttacaaaagcagagaggcaggaaaagacaagacccatcttctctcagcacgcagtcagggagtagttaaagaaaggtacagccagggtcagattttagagtgacatacgaaagaagtgtttaggaacaacagtccagtgggggtgaaataagccagaggtcaggaggtcatctgggtgactgactgctgccataagcctggcgtgaaacgataaggacacattccaggtcagtggcaatggccctggaagagcagagaagtccaagagatgtttcaaaggaaactgtctacataaggccactaaatacatgacaaagctggggagaaaacaggttttttgttttttgttttttgtttttcttgagatggagtttcacttttgttgcccaggctggagtgcaatggcgtgatctcggcttactgcaatctccgcctcccgggttcaagcgattctcctgcctcagcctcctgaatagctgggattacaggtgcctgccaccacgcctggctaatttttttgtatttttcgtagagatggggttttaccaagttggccaggctggtctcgaactcctgacctcaggtgatccacccacctcggcctcccaaagtactgggattacaggtgtgagccaccgcgcctggcctgggagacaggtttcaggaggaagatgacgagtttagtttgtaatacttggtgtgaagcgttggcagagcatctgagagcaaatctgctaagacttggagactcagaaccacacgctaggtgaatggccagagcacacatttaaaagtcagggtaaagatcatttgtaaagatatcaaagtagataaagaaatcgaaaagcaggacaggtcaggcagcaaaggctcggtggtttctaaaattaggaggtatgcagaaaagaattaacattggcaggcctgactgctgtcctggaaaggcctccttacgaggcaggcccctggctggtgtctgggaacttgggatttgggaagggcacccaccaacctaactggtaacggggatttcctgtacctgaactgttcatgcaaataatatggttatgctaaacacctgctttccttctgggggaccagaattttttgatatgtgtgagggtgcttatgtgaccagcctccagtaaaaaccctaggcactgaggctctgatgagcttccctggcagtccacatttcacaagtgttgtcacaactccttgctggaggatgtaagcacatcctatgtgactccactgggaggcgaccttggaacttgcactggatttcccctggaattcaccccaggtgcctttccgtttgcaattttgctctatatcctttcaccgcaataaatcataggcacaagtacaactctatgctggtgagtcatcaaaactgggtgtgaccttggggacctcaacatggggtgagaagagaaaggagagagaagaatcagtcaggccagggcaataatatcaagggagtcaatggatttataaatttcagtaagaggaaaactgtcaatatctttaacattgaagaagctaagaaggatccaagcaaataaagataataaaatggggccgggcgcggtggctcacacctgtaatcccagcactttgggaggctgagatgggtggatcacaaggtcaggagatcgagaccatcctggctaacatggtgaaaccccgtctctactaaaaatacaaaaaaattagccaggcgtgggtggcgggcgcctgtagtcccagctactccggaggctgaggcaggagaatggtgtgaacccgggaggcggagcttgcagtaagccaagatcatgccactgcactccagcctgggcgacagagcaagactctgtctcaaaaataaatgaataaataaataaaataaa

SEQ ID NO: 7251 - DNA, 1122 bp, Homo sapiens
ccacaacaatgttagaattgtaagaattatagtttataaggtgtttgtattggttgtgctgagctgagcctggccggagcctgggatgttcctgctccactctggtgtgacctccaggcagctggtgctttatgacggaatggtatggtgttgtgaagggctacacgggttgagaagagagtctgatatccctgttcatctgagtcctttatcctccaccataaattaataatttttcatagaactatatgaaatttttttaagagacagggtcttactctgtcatccacactgggatgcagtggctcaatcatggctcactgcagcctcaacctcctgggctcaagtcatccgcctacttcagccacccaaagctgggatcacagccatgcgccaccatgcccagataattttttaattttttgtagagatggggttctccctatgtggcccaggctgatctcaaactcctaggctcaagcaatccccccacctcagccaaagcgctgggactacaggcctgagccaccaccttcacccagcactacatgaacttcaaacgtgtcttagttgtcctttccagggtgcccccagaatgctaagattctgttctgtctgtgaggtgtgaacgtgccagtcggtaagacctcactttctccattaataacagcgcatttttaaattgcagttattctcccaggggttgaagatacacatggaagttcatttgccagtgcactggctgatgttcaatatttggaaataccccagaacagtactattcagcagttaagagtgagagagtgctttttacataagaacagtgagtggcagttacagaaactgacaggtgaatcatcagcaaaaacttactgcgtgcctggcaccacgggtatgtttctcaattttcaagtgattacttgcgtgcttaaagcataattttcaaaaacccagccttcttgccatttcattaacatggcagctaaaacaacatttttaaaccagtggctcattaaaagatttaatatttacattttctctacttatctctgtcagttccagactagatgcttgggtactttgtaagtcctgagaaaagataataaagattaatttgtaaca

SEQ ID NO: 7252 - DNA, 6044 bp, Homo sapiens
gcattttccaagtcatctttcctattcaaacagctagaaaaaggaactgcggccgggcgcggtggctcacgcctgtaatcccagcactttgggaggccgaggcgggaggatcacgaggtcagcagatcgagaccatcctggctaacacggtgaaaccccgtctctactaaaaatacaaaaattagccgggtgtggtggtgggcgcctgtagtcccagctactcgggaggctgaggcaggagaatggcacgaacctgggaggcggagcttgcagtgagccgagatcgcgccactatgctccagcctgggcgacagagcaaggctccgtctcaaaaaaaaaaaaaggaactgcatacctcatggccaggatatctgcaatagctgcaaaccactatgagttctttggaaagagacacaaggtaaatactattcatagtattttgtatttggctgagagtttgtgaagcaaaacttctgcttaatatgataattctaacagaaaaaaaaaaaaagacttgttgcaatgccatgtctactcattccttttcctactgttccactgctgatcccaacagaaggttcgaggccacactaggcccaaagccaatgctgacggagacaatgacaagcactcactgcctctgaaggaaactccacgttaagccacgcccccacacctgggattccagggcctgctcttctctgctggactcccagactgcaacccagactgcactgttagaaaccagagaactgcatgatcatgaggatgagtgggtgcctgtgggtcttcaagacatggcatccacctgccgtggaccagtccagtctgcaggcgtggactctgacagctggctccacccagtattcaggtctcaacctgcaccctcactgcccagaacccagccctttttttctgggacctgccacactgccagatcttgtcattccccttccccagagatgactacactgtcttcccagtccactggctggggacctgtgctatgtggctgcctctcctgcatcacaaccatctgcctccatctagagcatctgaccaggatgtacagcccacacaccgttaagcctcacactaagctcactcaaattacgatgtgcatggtaaaacctacccaaggtacttctgattgtcaagaaataagaaataaaataagacgggccacagaaaagtggttataaattggtggctcctaaaccgaaatcgccttgaggcacagcctcctctgtggagccttcttcaagctccctgggctgctgagtcagcccctctcagagggttcatgatagcactttggattctgtttgtttgcatgtagctttgcctagactgtgagctgcatggggcagaactggctcgtcacctttacctccccaggacacaggtcaagagacgatcggtaactgcatggtgaatgaatgaactctcacctgtctggaaagtgggctctggcaggcctcacacatacagaggagaggcaacaaagcagctgctgaaccgcaagctgagcccacaagctctctgttgccttaggcaataagatgagaaattacggaagccaattatctatttgttgtcatggcaattgctaggagcagggtgggaggcacatgacaccagaaaacaaaaaatacaacagacagtgtagactggggctacagctgcacatcagagtatctgattttgtgtgtagagaatggggaaggacctacatccctacattgatcttttgggtcacagctggttccaagaatatatagcagcaggtttcatagcgttaatctcttaataaaatgagaagtttttataacatcaaatttcatcttaaaattatctttatgcagaatatttaataacacaagttagtaatataagtgagaaagtaatctatagagccatatatagtatgatctcaactaaataaatataaacattaaaaagaaaaccttgctaatacacactgtatcctgtatcaaaatatgccatataccccataaatagatatacctactacatactcaaaaaaattaaaaattaaaaaaagaaaaagagaaacactaaagaaatcagacaaaaatgataacaatagttttcatgggggatgatgggattttaatttttttcttcatatattttcatactttgcagatgtctataataagcatcgatatttctatagccagaaaaatatttttaattatatgtttcattttagtgttggaaagagctttttgagacaaaacaatctattcccatcacttttttttttttttttttttttttgagacagagtctcactctgtcccccaggctagagtgcagtggcgtgatctcagctcactgcaacctctgcctcccgggttcaagcgattctcctgcctcagccatccaagtagctgggactacaggcatgtgccaccatgcccagctaattttttgtagttttagagagatggggttttgccatgttggccgggctggtctggaactcctgggctcaaagtgatcctcccaaagtactggggttgctttgggaggtaatgagctttgggagaagctaccgcacccggcccccatcacttctaataccttgttcacaactgtttataggttgttccagtttgagaaacaactatgctaagaacggtggccacttgctgctttagttttctgggttcatcatgccttctacttcagaaaagatcctgcattacttcagtaatacttttttttttttttaactatgagacacagtgccctgccgctgactcatttaacccacgactatgtggcttctgtgaaaacggaggacatacattgttttctaggctactccaagctactttggtgattcacagatcattattaatttacatttaaaaaattaaaatacagatctgatcacactggagacaataccacaagcttacgccacagtcaggtttgctgttatttgccaaaacacccttgctgattaatattgctttgcctttttgatgattaaatgcaaggctctctattaggcagactgcagcttgaaagaagcctaagagtcagacacccaggaaacataacagacacccaggaaacatagagtgaaaatgtgatactctatgtggctgttgaaaattggtatccctttccatatctgaaaatcccctagcttatgaacattagacctcatctagactgcaacaaggtaagagcaggtgacaaaactgcccattagaacttccagctcagcttttaagtaagaaccagtgacaagaagaagccacaatgacgcagtattcactctggcaagggggcagccgctatatctgggtttggagaaagctacatctggggtcaaaggcagctacatccggggtcaggggcagctatatcgagggtcagagggagctgcatccagggtcagagggagctacatctggggtcagagacagcagtggcattggtagagtagcagagacacagtaccatctgtgtccagtggtgacaacagatgcctcttcatgggaaccgtcctacagtatgcttgtgtatctgtggctacctattctccaagcctggttcttcatcctgctagagattctgagaactctgcactatcatttagcaaattccttttctgcttaaagagttggcttctgttgcttgtaactacaaaccctgaccaattcaacatctttaaaaaaaaaaaatgggggtcgggcgcagtggctaacacctgtaatcccagcattttgggaggcgaaggtgggcagatcacttgaggttgggagttgaagaccagcctgaccaacgtggagaaaccccgtctctactaaaaatacaaaattagccgggcatggtggcacatgactgtaatcccagctactcaggaggctgaggcaggagaatcacttgaacccaggaggcggaggttgcaatgagccgagatcgggcaattgcactccagcctgggcaacaagcaaaattcagtctcaaagaaaaaaaaaaaagggtgggggagcagtaaagaagagtcaaagaaatgcttcaggaaaatgggataaggaattctaactgaggtagccaaagacagtttatgaagaagatatgatttcagttgccacttcaggtagaaatggcagtttacaaaagcagagaggcaggaaaagacaagacccatcttctctcagcacgcagtcagggagtagttaaagaaaggtacagccagggtcagattttagagtgacatacgaaagaagtgtttaggaacaacagtccagtgggggtgaaataagccagaggtcaggaggtcatctgggtgactgactgctgccataagcctggcgtgaaacgataaggacacattccaggtcggtggcaatggccctggaagagcagagaagtccaagagatgtttcaaaggaaactgtctacataaggccactaaatacatgacaaagctggggagaaaacaggttttttgttttttgtttttcttgagatggagtttcacttttgttgcccaggctggagtgcaatggcgtgatctcggcttactgcaatctccgcctcccgggttcaagcgattctcctgcctcagcctcctgaatagctgggattacaggtgcctgccaccacgcctggctaatttttttgtatttttcgtagagatggggttttaccaagttggccaggctggtctcgaactcctgacctcaggtgatccacccacctcggcctcccaaagtactgggattacaggtgtgagccaccgcgcctggcctgggagacaggtttcaggaggaagatgacgagtttagtttgtaatacttggtgtgaagcgttggcagagcatctgagagcaaatctgctaagacttggagactcagaaccacacgctaggtgaatggccagagcacacatttaaaagtcagggtaaagatcatttgtaaagatatcaaagtagataaagaaatcgaaaagcaggacaggtcaggcagcaaaggctcggtggtttctaaaattaggaggtatgcagaaaagaattaacattggcaggcctgactgctgtcctggaaaggcctccttacgaggcaggcccctggctggtgtctgggaacttgggatttgagaagggcacccaccaacctaactggtaacggggatttcctgtacctgaactgttcatgcaaataatatggttatgctaaacacctgctttccttctgggggaccagaattttttgatatgtgtgagggtgcttatgtgaccagcctccagtaaaaaccctaggcactgaggctctgatgagcttccctggcagtccacatttcacaagtgttgtcacaactccttgctggaggatgtaagcacatcctatgtgactccactgggaggcgaccttggaacttgcactggatttcccctggaattcaccccaggtgcctttccgtttgcaattttgctctatatcctttcaccgcaataaatcataggcacaagtacaactctatgctggtgagtcatcaaaactgggtgtgaccttggggacctcaacatggggtgagaagagaaaggagagagaagaatcagtcaggccagggcaataatatcaagggagtcaatggatttataaatttcagtaagaggaaaactcaatatctttaacattgaagaagctaagaaggatccaagcaaataaaggtaataaaatggggccgggcgcggtggctcacgcctgtaatcccagcactttgggaggctgagatgggtggatcacgaggtcaggagatcgagaccatcctggctaacatggtgaaaccccgtctctactaaaaatacaaaaaaattagccaggcgtgggtggcgggcgcctgtagtcccagctactccggaggctgaggcaggagaatggtgtgaacccgggaggcggagcttgcagtaagccaagatcatgccactgcactccagcctgggcgacagagcaagactctgtctcaaaaataaatgaataaataaataaaataaa

SEQ ID NO: 7253 - DNA, 302 bp, Homo sapiens; identical to SEQ ID NO: 7249

SEQ ID NO: 7254 - DNA, 470 bp, Homo sapiens
cccctgcgggccccggacgtggagacgctcgagtcaggctgacgcgcgcgccgggaacgaactcttgcgtgtgacttgggatgaccggatgggatgagtgatgccagtggcagtgggagagaggatgaggagaaacggaatgaggaagtgcgctcctgtgttcgcgcccgtgcctcctctcacacaggctccacagtgcttcacccagccctgcgcacgcatctgttttctacctcttaggactcacttctgcaataggtgtcttggggacacaaaggaatccccaaacccaggtgcctccacgtgtaaactccaaataaagctgctgaaacatcaacactccatacgggaaacaagggaaggccgcccccaaatttaattgttacagaatttttaaaatgtcgattacaaacacaccatcattctgaaaaaaagagaaagaagaaaggggaagaaagaaaaaagaaaaa

SEQ ID NO: 7255 - DNA, 470 bp, Homo sapiens; identical to SEQ ID NO: 7254

SEQ ID NO: 7256 - DNA, 500 bp, Homo sapiens
catgtaatcagatttatcattcttacatggcttggggagacagtcacaccaagattactaatctataattcccttataactttttctaattttcttataggcttaactttacatttagagctctaatccatctgaaatttattttccatatgctgtaaattatttaacttcaattcttcccaattttgtagcccattgacctaataatattaattttaagccatcctttctacactgatttgaaattgcacctttgtcactctctgaatgaccacaaaaatgtgagtctgtttcagggctatctgcaatacctctgttagataactattaaagtttctcttcctttgtctttttcagatgttaatggctagttactcttcagatgaacttaaaaatggacttgtccaagattgaccttgtgttggtaattattgaagctatgtaatacattaaagtattcctctaattttttaatatatttgaaaaagtccatgctaaaa

SEQ ID NO: 7257 - DNA, 500 bp, Homo sapiens; identical to SEQ ID NO: 7256

SEQ ID NO: 7258 - DNA, 3178 bp, Homo sapiens
gttggccactacctcgggatggatgtccatgacactccagacatgccccgttccctccctctgcagcctgggatggtaatcacaattgagcccggtaaggagaggtgttacaatagtagtatgaggtaaatgtttgtttgtttgtttgtttttgagatggagttttgctctttcgcccaggctggagtgaagtggtgtgatcttcactcactgcaacctccgccccccaggttcagcaattctcctgcctcaacctcctgagtatctgggattacaggtgtcggccaccacgcctggctaatttttatatttttagtagagacggggtttcgccatgttggccaggctggtctcgaactcctgacctcaggtgatccacctatctcagtctcccaaagtgctaggattatacgtgagctaccgcgcccagccacattgtttatttttacctcaaccaatgtaattaagttagaagagacaggaaaaaaagtccagtgtggaaggtaattttattttcgatttatcttttgtattcttatttaatatcacacaatttgttcagtttgactcctccaataaacaacagatggggaatacttcctataagtagatattaagaaatgaatcttttttaatcctgcctttcccagggccagtttgtactggtctcccatttagtagtggggggctgctcaagcttccaaagcccccggtgcttgtgtgcagagagacaggcagacacactatgctctcagtttcaacacctctgcaagctgcattgagctacccagcaccatcccactccttagtatccatcgccttcctcataagcttcagagaaagctaacaatcggatacgttacctaacttgaatggtcctgggtgttgggcaggattctgaagagaagcagtgaccacaatggtgtgtgaagattgatgttgtcagagttgatggttaaatactgatgctggttttgttttgaaaacagatctaaattttagatttcaagtattttaatctctgtataaattatggctgtgaaatgtcttttatgccaccctttgaacctagtcatacattgctatctgtggccatagatatatcatttagttcaatctgtttggtacatgggcgcttccttagactgcgctacattttcctttgctgatctttctttttcaatcgcagagcagtatctgtgaggatagtggaggaagtttacaacttgtttaatataaaaagccctggtatgtgtctaacttcatgattagaaagggtacctggggttcctacatttttccaaatgtacattaaagtctttcagtttctcttgtattttatattacacacatcagatatatttaaatcttataatgactgtctctgcagcttccagttgtcaaggctaataatctctaaatgtttctttgaatacagtttaaatatattttgtctttatttttgcaaggtgctctttttccaagggactcttaggcaggggaagaatgcacttacataatctgcttgtcccccacatatattgacgtacttttaaattaagtaactttattggcctgcttgagccactagaatatgacagaatcatgatcagcattgccgtagttgtatttagcttgtagtccaatataaagataaccacaataataattttagtaatgataccaacatgtgttgaccattatatgccagccactttgacatgtattatctcatttaatcctcacagctttactaggtaggtaccataaagatccagtattacagaggaaggaattttaacccagaggttaacttacttgccccaaaccacccagttactatcattcctgaacagcatgttcttctttctacttcacaggcatttatattccagaggatgacaaagatgccccagagaagtttcggggtcttggtgtacgaattgaggatgatgtagtggtgactcaggactcacctctcatcctttctgcagactgtcccaaagagatgaatgacattgaacagatatgcagccaggcttcttgaccttcactgcggcccacatgcacctcaggttcaaaatgggtgtcttctggcagccctgcacgtgtgctttctgagtgtctctgtgtgtgcattaatatatgcattccatttgggagcatagcagctgtgtgaatgtatgtaattgtgtgtggggggttttttgttttaagtagttagaagtctgggaaaatgaatttttgaatagtatgttactgcagctttggtaacattaattctatagaattaatgatcagagcaagtttaatttttaaacataaaggtcttggttacacatgtccatgcattccagttaacacatttaaacatatagaaaattcacttcttctttcaagtccttccctttctatacttttgctgagatcaacccaatatcataagaagtttgtgtgatgcctgtatttttagctaattaccaaggtctctgcctatgcaaaaattcatctttcggtgattgtgggcggccaatacataccttctgtaactcctccctacctattctagatcctgcatatctactggagccatatgagccctcaggggcactggtgtcctgcagtcttactagtcagccacagtccaggttccagcaacactagctacctaccaaacaaaacacttctgagcttttcttgccatttggttgcctgggacctggaaagtgtttagattcttgataaagatggaaatggaagagaaagaaaattatatatgtatatactaaagatccagacatcagggctgggcacagcggttccgcctgtaatcccagcactttgggaggtccaggcaggtggatctcttgagaccaggaggtcaagaccagcctggccaacgtggtgaaacactgtctctactaaaaatacaaaaatgagctgggtgtgatgatacatgcctgtaatcctggctacttgggaggctgaggcatgagaattgcttgaacctgggaggtggaggttgcagtgagctgagctcatgcgactgcactccagcctgggtgactgagcaagactctgcctcaaaaaaacaaataaataaataaaatcctgacatcctgccatcttttctcttcaatttaaagttgatttcttaatgatgacttcaaaaattaat

SEQ ID NO: 7259 - DNA, 105 bp, Homo sapiens
atcccagcactttgggaggccgaggtgggcggatcacgaggtcaggagattgagacctcctggctaacacggtgaaaccccgtctttactaaaaatacaaaaaaa

SEQ ID NO: 7260 - DNA, 5736 bp, Homo sapiens
tggggaggtgggggcagatcacatcaacatcctggcattgggctgggtcggcgtggagccccagaaatgttcccaagcccattcttaccaagaaccaatgagtaaaatcaggggcctcccacctgaggtcagggaaccaggccctggagtggaacttggggtggaaaatggccttctttgtcaactgattcattctccagaattcaatttgttctccaactcggtggtgtttgaaagcaactttatccaggtaccctcgtggagctcagggccagctgtctttctgtttccaaaacctgttcctaggggttggttaggagatgctgtggccttttaaagccctgggggaggggggggcggggggacaaagaagccaccaaagctagagaaaaccagaaggtctgggtcccaagttcacctccatttgtgcctaccgtatgatagagctacctgcaggtcatctgttctagggaaattgatttatgctttacaaatgagagatcagagctcagtctccaggcagggttcacaggccctttctgggccacttgtccaaagtggatggttacagggaatgaaggttgctgttagaaactctgctctgaaatccatcctcctcagtctgggatggtttagaaacagccttgtttgaaagcaaagacactgggtaaataggtgttgcccagatcctaccattccctaaaaggatggtggtgacatgaccaatggaagtgagcctgggatggggccactgggagtggaaggtggtcgttttcgtaagtatcaagtcttaacgcgggtgctgcctgcctccctctagcggtctagcctgaacccatgctcctgcgcaggagagcataaccagttaatcagccagtaagcacacactaaacatctactgagtgcagggcaggaggtgcagagaaaaatcagagtgtccctggccaggaagcctatgagtttggtttacctgttatttggtaactgtctaagcaagctctatgtcagagagcttgggccagctgatgcaccaggcatgactgcagagagcaggtgctgggggcattcattcaaggcattctctctggactttggcagttgaagaaggctttccagaagggtcttaagccattctttgagagactgctgagattttggtaagtggaagagcagcggggaggatatcccagacagaggggcttcaaagtacctaaggaaaggcagggaggctggaatgcaaggtctgcaagacacagacccattcaaatggaatgggaaagtagccaggggttataggagagaaggtgggaacagtttgaggtgggtcttgggcttaatttggagactcttcacagagcagcgagctgctccctaatggagtccccggattttggagagctgtgtttatggctcctgccgctccacggtccctttactgtgccccaggagatgtgtagttgggtgatcagctggcaaacctgaggcgagctcattcctaacatacccttggtggagacagagcaataacatgggaagtccagtctcaggatccaatttctagtcatttctatttgggtgtaatgattcagctgcaaatttcttctcttaatgtgtgctttttttttgagatggagtctcactccgttgccctggcatggtctaggctcactgcaacctctgcctcctgggttcaagcaattctcctatctcagcctcccgagtagctaggaccacaggcgtgcaccacctcgcccagctaatttttttgtgttttagtagagatggggtttcaccatgttggccaagatggtcttgatctcttgacctcatgatctgcccgccttggcctcccaaagtgctgttttctttggcctaatattaaaactgtttagattctctgaatggacactaagtgacctgggtagcagcaaacttagaatgtgctagggagaggctgacccgcacagaaaagttcaaagtttgattttttaaaaaaaaatttttgatagagacagggtctcactatgttgcccaggctggtcttgaactcctggcttcaagtgatactccggctttggactcccaaagtgctgggattataggcatgaatgaccgcacacagtccaaagtttacttgaagtgatgcaacccacatattagttatagttatagttgttatagtacagttacactgcttcctctctcccccttcctgcacatcaccatcactatcatcatctcaaagcagcattacccacaaacatttattgagcacttactctcaatgtgtacaaccctttgtgttttgcagaggatatgaatttcattcctcaacaagggctccaagaagtgtcacttttttttttcaaaatcaaaattcacttttctgggaacaccatctggtcaggctggtgggaaattacatttcagtcatccctggggctttccctcatccccagttccaccaaggactgggcaatggtgtcgatagttttacaaagtctagaacattggctgggcatagtggctcatgcctgtgatcccagcactttgggaggctgagaagggaagatcacttgagcccaggagtttgacaccagtctgggcaacatagtgagaccccatctctattttctaaaaaaagtgtagagcattgggagaaggccctctggccttgggaacataggcgtccctcctcatatgttccttatccaggtccctgtggctcctaagtggccacagctctggtgcttttctgccagccgtgcacagtgaggtggggggtgtcttagctgagacacagtgcccagtggtgggcatccagtctttctgtcctgtgatggccgccttctgcttcaagagaataggtcctcattccactcaagacccagcaacaagatagcccctccatcatcctgggagaagtgctccaaacctccctcaactcaagctgtctgggtcttccccattcaacagctttttcctcactttcctctccttctgggactttcttcacacaatctcccttttgggccactagaaaccagtgctggcttctcctgcccaaagatgggggaatgaaaacttcagtgccactcagctttttcttgctagtgcatctttttagttagataaaacagttatctttttagttagataaaacagaggacccagagaagaatgacacagggttcctgcagccaatgaccttaaagtgtatttggggaggccaatgaaaaggatcaatagcaggtcagggcccagcccagtgtgtgcacacctgcccccaagatgatgtgccactttccagcatctgtattccaccccttgttttctgctcctttctgacccatgtacctgaggctgatttccaggtcactaagcccgggaactggagagatgtctgtgaagggtctgccaccgtgatcctcggggtcacctcctcggtgccctccctgccactccccaatgtcctcctgatggccaatgttacctggccccagggtccatttaccacctggagcacacctggtgacgccccagtcatcaacctcagcaggtaaaggcttgagggagggcgggaagggatggaatgattgactgggatatgcattgctttgtagctggattttagatcaaaagaaaagatagcgttctttagtgcataaaccctgtagaactcattcattcatttgtttagcaacgatttatttagtatcttttttttttttttttttgagacagagtctcgctctgttgcccaggctggagtgcagtggcgggatctcggctcactgcaagccccgcctcccgggttcacgccattcaccgagtagctgggactacaggcgcctgccaccatgcccagctaatttttttttttggatttttagtagagatggggtttcactgtgttagccaggatggtctcgatctcctgatctcgtgatccacctgcctcggcctcccaaagtgctgggattacaggcgtgagccaccgcgcctgaccttatttatttagtatctatatttaccaagcactgtgcttcgtgctgggatagggcagtacccagtccttgtctcgagcctggtttttgagaatcttggcttccttttctgtaaatgtgtgtgtgtgtgtaagtgtgtgtgtatatatgtgtgtgtgtgtatatatagacacgtttccatgtcttttaaaatctttttgtaaatatcatttcgataatttctttagtaatatgagtgaattaaaattcacttgacaagtccctaatattagacatttagaaatgtttctttgtcaatatagatagagggggtttccaaggaaaaggtggggatacaaaagtcaaacacgactatgaaatgctgagattgaaaaaaaaatactagatatacaggagacagctatccttttccttgccctttcgacacagtaagtcaggatatagggagaaagagtcctagaaactgagtcaggaaaccttagttccaggtcacacttaataagatctaaacttgggcaaatcacttagcctctctaagcctcagcctcgaaatctgtaaagcggaattaatcatacttatcttggcagggcacagtggctcacatctgtaatcctagctctttgggaggctgaggtgggaggatcgcttgaagccaggagttcaagaccaacctgggcaacatagggagatcctgttactaccaaaaaataccaaaaaaattaggtgggtgtactggcatacacctgtattcctactaaagtcctggaaattggagaagagtcagtcttagtaatcacccccactttcattacatgagctttctcccttcagcatcccccaagcagagaggtaggaggccagtgtcgctgagccacctctaggtgggcacccacatggtcgattgaaaccacgggctcagccgggcgtggtggctcacgcctgtaatcccagcactttgggaggccgaggcgggcggatcacgaggtcaggagatcgagaccatcctgcccaacatggtgaaaccccgtctctactaaaaatataaaaaattagccgggcgtggtggcgggcgcctgtagtcccagctactcaggaggctgaggtgggagaatggcgtgaaccccgggggcagagcctgcagtgagccgagatcgcgccactgcactctagcctcggcggcagcgagactccgtctcaaaaaaaaaaaaaaaagaaaccacgggctctcccatggaaatgtcctgattatgtccaggcttctccccctgaagtacgtggagctacgaatctacgaccggctccagcgcatcctgagggttaggacagtgaccgaaaagatctactatctgaagctccacgaaaaacacccagagattgtgtttcaattctgggtccgcttggtgaaaattctgcagaaaggcctgtccatcaccaccaaagacccgagaatcaaattcactcactgcctggtgcccaagatgcccaccaactccacagaaacaacagtaagtgggcctccttccgggacctgtcgagaaataagtatatataagtatatatgtaagtgtctgtgtatatatatagacttgtttccatgtcttttaaaagctctttgtaaatatcattttgataatttctattcagtagtatgaatgaattaaaatttatttgaccagtccctaatattaagacatttagaaatgtttcttttttttttttttttttttt

SEQ ID NO: 7261 - DNA, 130 bp, Homo sapiens
agcctccagagtagctgggattacaggtgtgtgccaccatgcctggctaatttttgtatttttagtagagatggggtttcaccatgttggccaagctggtcttgaactcctgtcctcaagtgatccaccc

SEQ ID NO: 7262 - DNA, 416 bp, Homo sapiens
ggcaccctgtcacaatcactgggacttggggatacaaggatggaaggggaaaagagaacattctttcttctgtcaacatacctgggtatttgctaggatgaaaaaggaaccagggacacctgctcctctctttctagatgagtaaccattcattcatcttcagtctatatccttttcgaatgcatcctgaacccttgggactcctttgaaaacatgcttttttccttttatcccctctgtcttctctttacagataggtaatcatgtcttcatactatgggacggtcccctcagatgcatcctccaagcttggaagaattaattttccaaaccttagactgggtggcttaggattggactcaagacaaaagaacccagaagcctgacatgctggcaaaagggtaaaaggtgttttt

SEQ ID NO: 7263 - DNA, 416 bp, Homo sapiens; identical to SEQ ID NO: 7262

SEQ ID NO: 7264 - DNA, 2737 bp, Homo sapiens
tactctgatcactactctgttaaacagtcaaggagggtaagtattatcttcagatttccagagctctgtctctgtacagccctctcctcctcaatattctgccctatgaattctagccacattggccttcccagactcacagttctgtcttctcaactcaggaagacctctgagctccatctgcattctttcttcctgtgctgtggcctggaaagttttctaaggtgtttgggaggtcaattgtggggctagcctcatttgtttctcatctcttgaggatcactgccctttgatgcttgattccagtgattgattccctttgttgcttgagggccatagtttcatatattttgtccagtatttttgttgttttaggtcagaaagtaattttggtctctgttactccatcttggccagaagtgtaagacctaagcatttacacatcaaaatactgcacacataattttagtttaagctacctttaaaaaaatctgcttcattttccattaagcattctatttagggtattacattggtttttttgaaattctgttattggcagtttctattgcctatcaatcccatttaaagatagtgcatagggtattctaaaatagctgttaagcaaagagaaaattgggcctgatagggtgagaatcacagctctaatacctagagtgaccttataatgtattgtccaaaggagatatttttgacagtgaaagagggtgttgttagtaattatatcaggaccatggcctaaaccaggactatcccaggcagcctgggacatatttgtaccccatctctatttaatgcctttatacaattctttacttaattctaccagcctttattgagcctgctttctttgtctagctgagtgccacgtgctgacgtcactaagatcaatacagcaaactctgaaagatggacagagagacaggagatggtcctttataatgcagtgtgatctgtgctgcaatagaggtgagcacaagggccttacgaaggctcagtgaagagcatgcttgactgcaggggagggtgcttaggttagaaaagatgagtcgaagtatgttcatagggagcatgggatgagaggtggtgggaaaggtattccagacagtgtgtgtcaaggccaagagccaggggaacacaggtagggcttttttttttcttctaagatggaagagtgttctgatcagctggaaaacaacacacatgggaagctgtacagaaatgagtggggaaaggtaatacttaacagcaacaacagttaatatttagtgcccacttacgacatgctggacacagttccgggtactctgaacatattcgctcatttaatctttacaacaaccctatgaggtaggtactatgattatccccattttcaggtgaggaatctgaggcacagagagagtaagtatgttgcccagggccacgcaccaagtatgtggtaggtcctggagttgaatgcagagcccctccactctaaactcctgaaagccagatgctacaaggcgttgttattccaagtggaggaatgctaagggcatcatcctgcaggtgaccaggaaaccctgaagcattcgaagcaggggaatggcttaaaacaaggtggtataagaaagtgctcccagagcagcatgaaagtctggtgtagtggaggtctccgctagccacaagaggtggtaagaggctgagctgaagcagctgcagcagggatgcagaggatacattccccaaaccataatgggcagagtcctttggcttcagtgaccacagccaagggtgcagaggagaagcccaagaagatgccaggtgtctggcttatgcccctgtgtgaacgtgaagcctctcattgacatgcaggttacaggaggaaaagcaggtttatttgggaaggaggcttctagaccatgacttgcattttagccatgtagtttttgaagtgcttgtacaagttctaggtggaaatgtccaggaggcagtggggaactcaaagtagatctcaggagagaggcttaggccagagggcttggggaatcatcagcatgggggtgggaggagagctggtatttggatgagattgcagtggagcatgaacagagtgggaaaaggtggtgatgaacccagggactccagtatgcggtagctggctgtgagattaggaagcaatgaaggaggccgagaaggatgtcggggagaagcatcaataaggaataaatgagttgcacgtgctccagagaggccaaataaagactggatttgctctcgcgggtcatacacgaaagaatcttggaaccaaaaggaaaacggtggtggtttcaagggtatattcagtttctaggtctgctgtcacaaaataccagaaactgggtgtcttgttaaaacaacagacattttttctctcacagttttggaagctagaagttcaaaacgaggtgttggcagcaccatgctctctctgaagatgctaggaagaatctgctccatgcctttccattcgctcctggggtttcctgcaagccctgacattccttggcttgtagatacaccaccccagtttccgcccccatcatcacatggcctcctctctgtgggtgcctctgcgttccctctattcttcttctaaggacaccgacaccagtcatagtggattaagggtccactcctaactaattacatctgcaaccaccctatttccaaataaagtcacattctaagattc

SEQ ID NO: 7265 - DNA, 6756 bp, Homo sapiens
ggtagattgcaaatgacctgctttctttcggatcccgggctgctttcggacacctgtcgaatagtaaatcccaagtaaggtacctgcggtcgtcggcagatctgaattttcttcttggacacctaatacccacagccctccaggtcggtcctaaggatcttagaatccgcgatgggggtcctaagccacgggaggaagagggactggctctcagtccccgcctcgcggggtgtgcctcccccgtgtgatggggatcctcagaggtgggcggggaagaagggctggctcttagacaccgcctcgcggggggtgcctcccccgcctgcgatgggggtcctaagagccaggggggaaagagcggctggctctcagtccccgcctcgcggggggtgcctccccacctgctatgggggtcctaagaaaaatggagggaagaggggctggctgtcagtccccgccacgcggggggtgcctctccccctgcgatgggggtcccaagagccagggggggaagagcggctggctctcagtccccgcctcgcggggggtgcctccgccccctgcgatgggggtcccaagagccagggagggaaggggtcccaagagccaggggaggaaaagcagctggctctcagtccccgcctcgcggggggtgcctccaccctgcgatgggggtcccaagagccagggggggaagagcggctggctctaattccgcgcctcgcgaggggtgcatccccccactgcgatgggcgtcctaagagccagggagggaagaagggctgactctgagtccttgcctcgcggggggtgcctcaccccctgcgatggggatcctaagagccacgggggaagaggagctggctctcagtccccgcctcgcgaggggtgcctcctccccctgcgatgggggtcctaagagccaggagcggaagaggggctggctctctgtatccacctcgcggggggtgcctccccgccctgtgatgggtgttctaagagccagaaggcttaggggggctgtctctcagtccccgcctcgcggggagtgcctccccttcctgcgacgggggtcctaagagccagggggggaacaggggctggctcagtccccgccttgcggggggtggctcgctcccctgcgatgggcatcctaagaaccaggggaggaagagggggagaggatgataataatttcagcatcgcaggctgtgttcacccagccctgttaaatcgttatttatatcctgaaagggagaggatgatattactccccgtaatagacagatatgactccccatcgtagagcacgaggtgtacacccgccctgtgattttcttcctcatattcagagaccgagaggttgatgtcactcccaatatcggaggaagtatacacccccgtgtgagatggtccttaataatattccacggcggagggggtgatatgactacatacatggcagaaagtggaaacctcccagggatattgttcccacgatcctggagggaagaagatgatgttactttcaatatgacagaaggtggatgaagtggtggactgcccctccacacctgtgagtatttctagttgggtgggtgggaggagagactgagaaaagaaataagacacagagacaaagtgtaaagatacaacagtgggtccaggggaccggcgctcagcccaccaaggacctgcaccggcaccagcctctgagttccttcagtttttattgattatgattttcattattttagcagaaaggaatgtagtaggagagcagggtgatgataaggagagagtctgcagaagacatgtgagcaaaagaatctatgtcataattaggttcaagggaaggtactatgactggacgtgcacgtaagccagatttgtttctctccacccaaacatctcagtggagtaaagaataacaaggcagtgttactgcaaacatgtctcgcctcccgccacagggcagcttttcccctgtctcagagttgaacgaatgtacaatcgggttttacaccgagacattcagttcccaggggcaagcaggagatagtggccttcctccacctcagctgcaagaggctttcctcttttactaatccacctcagcacagaccctttacgggtgtcgggctgggggacagtcaggtctttctcatcccatgaggctatatttcagactatcacatggggagaaagcttggacgataccctgctttcaagggcagaggtccctgcggctttccacagtgcattgtgcccctggtttattgagactagagaatggcgatgacttttaccaagtatactgctggtaaacattttgttaacaaggcacgtcctgcacagccctacatcccttaaactttgattttatacaacacatgtttttgtgagctccaggttgggtaaaagtggctggggccaagcggctagggcaaagctacaaattaacaacatctcagcaaagcaattgtttaaaggacaggtctttttccaaatggagtctcttatgtctttcctttctacaaagacacagtgacagtctgatctctctttcttttccctacaggtggacacgcccccactgatattccttctaattgcagcgtgggagaggaggatatgacacgcgatatcgcagggagtagaaacaccccctgtgatactgttcttaatattcagggaggaagaggatgatattactcccaatacagacgggtgtacaccctctgtacaccgagggtgtacacctgtctgtgaaagagttcttaatctccagagggggagatgatattactcacaatatggtaaagaggctgtgagtccacggaggatcctcagagccagcgggggaagaggggctggctctcagtccccgcctcgcgggggtgactccccccagtgcgatgggggtcctaagagccagtgggggaagaggggctggctctgagaccccgcctcgcggggggtgcctccccgccctgtgatgggggtcccaagagccagaaggcttagaggggctggctctcagtccccgcctcgcggggggtgcctcctccccctgcgatgggggtcgtaagagccactgggggaataggggcttgctctcagtcaccgcctcgcggggggtgcctcctttcctttctacatagacacagtgacagtctgatctctctttcttttccctacagatggacacgcccccactgatattgtttttaatgcagcgtgggaggggaggatatgacacgcgatatcgcaggtagtagaaacacccctttgatagtgttcttaatattcagggaggaagaagatgatgttactccatacgaccggatgtacaccctctgtacaccgagggtgtacacccgtctgtgaaggagttcgtaatctccagaggtggagatgatattactcacaatatggtaaacaggctgcgagtccatcgcggatcctcagagccaggtggggaagaggggctggctgtcagtcccctcctcgcggggggtgcctcccccactgctatggggatcccaagagccagtgggggaagaggtgctggctctcagtctccgcctcgcgaggtgcctccccaccctgcgatcggggtccgaagagccaggggggaagaggggctggctctcttcgtggatgattctttttccattctcaggcagttttcttttttctttctttcttttttttttttttgagactgagtcttgctctgttgcccatgctttgctcgatctcgggtgactgcaaccactgcctcccaggttcaagagattctcctgcctcagcctcctgagtagctgggactagaggcgtgtgtcaccacacccagctaatttttgtatttttagtagagatggggtttcaccatgtttgccaggatggtctttatctcctgcccttgtgatccacccacctcagcctcccaaagtgctgggattgcaggtgcgagccaccgggtccagcctctcaggcgattttcatacctgcatactctgatcactactctgttaaacagtcaaggagggtaagtattatcttcagatttccagagctctgtctctgtacagccctctcctcctcaatattctgccctatgaattctagccacattggccttcccaggctcacagttctgtcttctcaactcaggaagatctctgagttccatctgcattctttcttcctgtgctgtggcctggaaagttttctaaggtgttagggaggtcaattgtggggctagcctcatttgtttctcatctcttgaggatcactgccctttgatgcttgattccagtgattgattccctttgttgcttgagggccatagtttcatatattttgtccagtagttttgttgttttaggtcagaaagtaattttggtctctgttactctatcttggccagaagtgtaagacctaagcatttacacatcaaaatactgcacacataattttagtttaagctactttttaaaaaatctccttcattttccatttagcattctatttagggtattacattggtttttttgaaattctgttattggcagtttctattgcctatcaatcccatttaaagatagtgcatagggtattctaaaatagctgttaagcaaagagaaaattgggcctgatagggtgagaatcacagctctaatacctagagtgaccttataatgtattgtccaaaggagatatttttgacagtgaaagagggtgttgttagtaattatatcaggaccatggcctaaaccaggactatcccaggaagcctgggacatatttgtaccccatctctatttaatgcctttatacaattctttacttaattctaccagcctttattgagcctgctttctttgtctagctgagtgccacgtgctgacgtcactaagatcaatacagcaaactctgaaagatggacagagagacaggagatggtcctttataatgcagtgtgatctgtgctgcaatagaggtgagcacaagggccttacgaaggttcagtgaagagcatgcttgactgcaggggagggtacttaggttagaaaagatgagtcgaagtatgttcatagggagcatgagatgagaggtggtgggaaaggtattccagacagtgtgtgtcaaggccaagagccaggggaacacaggtagggctttttttttttcttctaagatggaagagtgttctgattggctggaaaacaatgcacatgggaagctgtacagaaatgagtggggaaaggtaatacttaacagcaacagcagttaatatttagtgcccacttacgacatgctggacacagttccgggtactctgaacatattcgctcatttaatctttacaacaaccctatgaggtaggtactattattatccccattttcaggtgaggaatctgaggcacagagagagtaagtatgttgcccagggccacgcaccaagtatgtggtaggtcctggagttgaatgcagagcccctccactctaaactcctgaaagccagatgctacaaggcattgttattccaagtggaggaatgctaaggacatcatcctgcaggtgaccaggaaaccctgaagcattcgaagcaggggaatggcttaaaacaaggtggtataggaaagtgctcccagagcagcatgaaagtctggtgtagtggaggtctccgctagccacaagaggtggtaagaggctgagctgaagcagctgcagcagggatgcagaggatacattccccaaacccttatgggcagagtcctttggcttcagtgaccacggccaagggtgcagaggagaagcccaagaagatgccaggtgtctggcttatgcccctgtgtgaacgtgaagcctctcattgacatgcaggttacaggaggaaaagcaggtttatttgggaaggaggcttctagaccatgacttccattttagccatgtagtttttgaagtgcttgtacaagttctaggtggaaatgtccaggaggcagtggggaactcaaagtagatctcaggagagaggcttagccagagggcttggggaatcatcagcatgggggtgggaggagagctggtatttggatgagattgcagtggagcatgaacagagtgggaaaaggtggtgatgaacccagggactccagtatgcggtagctggctgtgagattaggaagcaatgaaggaggccgagaaggatgtgggggagaagcatcaataaggaataaatgagttgcacgtgctccagagaggccagctaaagactggatttggctctcgcaggtcatacacgaaagaatcttggaaccaaaaggaaaactgtggtggtttgaagggtatattcagtttctaggtctgctgtcacaaaataccagaaactgggtgtcttgttaaaacaacagaaattttttctctcacagttttggaagctagaagttcaaaacgaggtgttggcagcaccatgctctctctgaagatgctaggaagaatctgctccatgcctttccattcgctcctggggtttcctgcaagccctgacattccttggcttgtagatgcatcaccccagtttccgcccccatcatcacatggcctcctctctgtgtgtgcctctgcgttccctctattcttcttctaaggacaccgacaccagtcatagtggattaagggtccactcctaaccaattacatctgcaacaaccctatttccaaataaagtcacattctaagattc

SEQ ID NO: 7266 - DNA, 2739 bp, Homo sapiens
tactctgatcactactctgttaaacagtcaaggagggtaagtattatcttcagatttccagagctctgtctctgtacagccctctcctcctcaatattctgccctatgaattctagccacattggccttcccagactcacagttctgtcttctcaactcaggaagatctctgagctccatctgcattctttcttcctgtgctgtggcctggaaagttttctaaggtgtttgggaggtcaattgtggggctagcctcatttgtttctcatctcttgaggatcactgccctttgatgcttgattccagtgattgattccctttgttgcttgagggccatagtttcatatattttgtccagtatttttgttgttttaggtcagaaagtaattttggtctctgttactccatcttggccagaagtgtaagacctaagcatttacacatcaaaatactgcacacataattttagtttaagctacctttaaaaaaatctgcttcattttccattaagcattctatttagggtattacattggtttttttgaaattctgttattggcagtttctattgcctatcaatcccatttaaagatagtgcatagggtattctaaaatagctgttaagcaaagagaaaattgggcctgatagggtgagaatcacagctctaatacctagagtgaccttataatgtattgtccaaaggagatatttttgacagtgaaagagggtgttgttagtaattatatcaggaccatggcctaaaccaggactatcccaggcagcctgggacatatttgtaccccatctctatttaatgcctttatacaattctttacttaattctaccagcctttattgagcctgctttctttgtctagctgagtgccacgtgctgacgtcactaagatcaatacagcaaactctgaaagatggacagagagacaggagatggtcctttataatgcagtgtgatctgtgctgcaatagaggtgagcacaggggccttacgaaggctcagtgaagagcatgcttgactgcaggggagggtgcttaggttagaaaagatgagtcgaagtatgttcatagggagcatgggatgagaggtggtgggaaaggtattccagacagtgtgtgtcaaggccaagagccaggggaacacaggtagggctttttttttttcttctaagatggaagagtgttctgatcagctggaaaacaacgcacatgggaagctgtacagaaatgagtggggaaaggtaatacttaacagcaacaacagttaatatttagtgcccacttacgacatgctggacacagttccgggtgctctgaacatattcgctcatttaatctttacaacaaccctatgaggtaggtactatgattatccccattttcaggtgaggaatctgaggcacagagagagtaagtatgttgcccagggccacgcaccaagtatgtggtaggtcctggagttgaatgcagagcccctccactctaaactcctgaaagccagatgctacaaggcgttgttattccaagtggaggaatgctaagggcatcatcctgcaggtgaccaggaaaccctgaagcattcgaagcaggggaatggcttaaaacaaggtggtataagaaagtgctcccagagcagcatgaaagtctggtgtagtggaggtctccgctagccacaagaggtggtaagaggctgagctgaagcagctgcagcagggatgcagaggatacattccccaaaccataatgggcagagtcctttggcttcagtgaccacagccaagggtgcagaggagaagcccaagaagatgccaggtgtctggcttatgcccctgtgtgaacgtgaagcctctcattgacatgcaggttacaggaggaaaagcaggtttatttgggaaggaggcttctagaccatgacttccattttagccatgtagtttttgaagtgcttgtacaagttctaggtggaaatgtccaggaggcagtggggaactcaaagtagatctcaggagagaggcttaggccagagggcttggggaatcatcagcatgggggtgggaggagagctggtatttggatgagattgcagtggagcatgaacagagtgggaaaaggtggtgatgaacccagggactccagtatgcggtagctggctgtgagattaggaagcaatgaaggaggccgagaaggatgtcggggagaagcatcaataaggaataaatgagttgcacgtgctccagagaggccaaataaagactggatttggctctcgcgggtcatacacgaaagaatcttggaaccaaaaggaaaacggtggtggtttcaagggtatattctgtttctaggtctgctgtcacaaaataccagaaactgggtgtcttgttaaaacaacagacattttttctctcacagttttggaagctagaagttcaaaacgaggtgttggcagcaccatgctctctctgaagatgctaggaagaatctgctccatgcctttccattcgctcctggggtttcctgcaagccctgacattccttggcttgtagatacaccaccccagtttccgcccccatcatcacatggcctcctctctgtgggtgcctctgcgttccctctattcttcttctaaggacaccgacaccagtcatagtggattaagggtccactcctaactaattacatctgcaaccaccctatttccaaataaagtcacattctaagattc

SEQ ID NO: 7267 - DNA, 103 bp, Homo sapiens
ttttgtatttttagtagagatggggtttcaccatgtttgccaggatggtctctatctcctgaccttgtgatccacccacctcagcctcccaaagtgctgggat

SEQ ID NO: 7268 - DNA, 1286 bp, Homo sapiens
cgggatcacaccccagactgccaactgggtgaatgaaccattctgagccttagtttgctcttctataaaccggggagagcaatgatccctacctcatgggttttttattgggattgcataaaataggccctgaaaagtgctggacgtgcccggcaaacatgagtgctgtgcatgcggtctgggctggctgcccacctgcccaaagctcattcctctcactgaccaggtcatgactgcaacgtttgctccaggaatccatctgagaactctgtccatgttctcaaatgcctggatggcgaggtggctgagggcagtatcgtgcggtccccagcagccaggactcagcccagctgacctgtccccagccagcagaagaggatccgcagatgcccgcaggaaggggacgcattgccaggtccaccagctctcccacagacagctccaggcctcactgctgagtctgtgtcctatatacaatgtcatctgagggtggcaccgaacacctggctggcttgctggccacccaccaccctttcagccaccctggctgccctctggtttctatcgcgtctgttaaaaggcagacccctctggatgctttcctccactctttcaaagtgcccccaccctcacccttcaaacatcaagttgatggttgtaccatgagccacaggaacaataaacagcccggaagccactccactcaaggtctcgaggccctcccgacagccggccgcctgccctgccacggaggctgggcagcacagctgggggcttgagagctggttcaaatcctgtgtctgccccctgcgagctatgtttgctcaggcaagtagcttgccctctctggatctagtttccctgtcctcaaaagcatgggcagacatgggcaaagtgctggcttgcaattctcaataaattacagattatcagatcgctatttaactcaggcaacaaaaggaaaatacttgattgtgtggagagcaataactcttaaaaatggggtggccgccccataataagaaaagctagaaaaaaataaaccacagacgcagtgatttggcagggtgatatacggaggaaattctgccatcaggaaacagtattgtccgtaggttttcttcctactttcttcctttaattactaaataaaatcttcaatcactgaaaaatcactgtaatataaacaaacatgctgttcccagtggcattaggctattcttacatttaaagtatctatacattcataattaaaatattaacgttttgcaaatataaaaaacttg

SEQ ID NO: 7269 - DNA, 1286 bp, Homo sapiens
cgggatcacaccccagactgccaactgggtgaatgaaccattctgagccttagtttgctcttctataaaccggggagagcaatggtccctacctcatgggttttttattgggattgcataaaataggccctgaaaagtgctggacgtgcccggcaaacatgagtgctgtgcatgcggtctgggctggctgcccacctgcccaaagctcattcctctcactgaccaggtcatgactgcaacgtttgctccaggaatccatctgagaactctgtccatgttctcaaatgcctggatggcgaggtggctgagggcagtatcgtgcggtccccagcagccaggactcagcccagctgacctgtccccagccagcagaagaggatccgcagatgcccgcaggaaggggacgcattgccaggtccaccagctctcccacagacagctccaggcctcactgctgagtctgtgtcctatatacaatgtcatctgagggtggcaccgaacacctggctggcttgctggccacccaccaccctttcagccaccctggctgccctctggtttctatcgcgtctgttaaaaggcagacccctctggatgctttcctccactctttcaaagtgcccccaccctcacccttcaaacatcaagttgatggttgtaccatgagccacaggaacaataaacagcccggaagccactccactcaaggtctcgaggccctcccgacagccggccgcctgccctgccacggaggctgggcagcacagctgggggcttgagagctggttcaaatcctgtgtctgccccctgcgagctatgtttgctcaggcaagtagcttgccctctctggatctagtttccctgtcctcaaaagcatgggcagacatgggcaaagtgctggcttgcaattctcaataaattacagattatcagatcgctatttaactcaggcaacaaaaggaaaatacttgattgtgtggagagcaataactcttaaaaatggggtggccgccccataataagaaaagctagaaaaaaataaaccacagacgcagtgatttggcagggtgatatacggaggaaattctgccatcaggaaacagtattgtccataggttttcttcctactttcttcctttaattactaaataaaatcttcaatcactgaaaaatcactgtaatataaacaaacatgccgttcccagtggcattaggctattcttacatttaaagtatctatacattcataattaaaatattaacgttttgcaaatataaaaaacttg

SEQ ID NO: 7270 - DNA, 1286 bp, Homo sapiens; identical to SEQ ID NO: 7268

SEQ ID NO: 7271 - DNA, 700 bp, Homo sapiens
cttactttctcccatagtgattttcgagtgttcagtctctcacatccttgccaacatttgtttctttttgatatagcgatcctagtgggtgtgagcacaaaaggaactttaaattttatcaaatgcttaaatatctattgacatgtaattcaccacattaacaaaatagctttaattataaaccaaccttgcattcctgcggtaaacctaaattggtcattttatgttgttagattatatcatcctgatgttttgtataggaattttgtactatatctttgttcttgggtgagattgacctgtagttttacttacccagactgtctttgttggattttggtattggggttatgctacccttaaaaaaggatttgtaatgtatctggtcttttctttttctttggaaagtttgtttactaatggagtgatttcttcctaaatatttggtagaacttggtaatgaagccttctggacctgaaatttactttgtgggaggatttttcagtattgatttttgtttttatgggttttgttttttttgtttgttttaatgcatagtgtcactgtcactcaggctggagtggcagtgatgtgatcataactcactgtaaccttaaactcctaagctcaagtgatctcttgcctcaccttcctgagcagctaagactgcaggcatgcaccaccatacctgcctacttt

SEQ ID NO: 7272 - DNA, 707 bp, Homo sapiens
caccatcttactttctccatagtattttcgagtgttcagtctctcacatccttgccaacatttgttatctttttgatatagcgatcctagtgggtgtgagcacaaaggaactttaaattttatcaaatgcttaaatatctattgacatgtaattcaccacattaacaaaatagctttaattataaaccaaccttgcattcctgcggtaaacctaaattggtcattttatgttgttagatatatatcctgatgttttgtataggaattttgactatatctttgttcttgggtgagattgacctgtagttttacttacccagactgtctttgttggattttggtattggggttatgctacccttaaaaaagatttgtaatgtatctggtcttttctttttctttggaaagtttgtttactaatggagtgatttcttcctaaatatttggtagaacttggtaatgaagccttctggacctgaaatttactttgtgggaggatttttcagtattgatttttgtttttatgggttttgttttttttgtttgttttaatgcatagtgtcactgtcactcaggctggagtggcagtgatgtgatcataactcactgtaaccttaaactcctaagctcaagtgatctcctgcctcaccttcctgagcagctaagactgcaggcatgcaccaccatacctgcctactttctttttt

SEQ ID NO: 7273 - DNA, 712 bp, Homo sapiens
caccatcttactttctccatagtgattttcgagtgttcagtctctcacatccttgccaacatttgttatctttttgatatagcgatcctagtgggtgtgagcacaaaggaactttaaattttatcaaatgcttaaatatctattgacatgtaattcaccacattaacaaaatagctttaattataaaccaaccttgcattcctgcggtaaacctaaattggtcattttatgttgttagattatatcatcctgatgttttgtataggaattttgtactatatctttgttcttgggtgagattgacctgtagttttacttacccagactgtctttgttggattttggtattggggttatgctacccttaaaaaaggatttgtaatgtatctggtcttttctttttctttggaaagtttgtttactaatggagtgatttcttcctaaatatttggtagaacttggtaatgaagccttctggacctgaaatttactttgtgggaggatttttcagtattgatttttgtttttatgggttttgttttttttgtttgttttaatgcatagtgtcactgtcactcaggctggagtggcagtgatgtgatcataactcactgtaaccttaaactcctaagctcaagtgatctcctgcctcaccttcctgagcagctaagactgcaggcatgcaccaccatacctgcctacttttcttttt

SEQ ID NO: 7274 - DNA, 263 bp, Homo sapiens
caagctcctgacctcaagtgatccacatgccttggttgaccaaattgctgggattacaggcatgagccaatatgaccagctcaaacatcttctttttaaatgtcagaagcatgtatagtgattatttcttattttttcccccttgatccatctcaccagatgtttgttgattttataagaattttcaaacaccagcttctggctttgttgaacttggatttctgtttcataatttcttttcctgtctttgacttactttgttg

SEQ ID NO: 7275 - DNA, 1166 bp, Homo sapiens
caagctcctgacctcaagtgatccacatgccttggttgaccaaattgctgggattacaggcatgagccaatatgaccagctcaaacatcttctttttaaatgtcagaagcatgtatagtgattatttcttattttttcccccttgatccatctcaccagatgtttgttgattttataagaattttcaaactaccagcttctggctttgttgaacttggatttctgtttcactaattttctttctcctgtctttgtacttactttgttgctctttttctaagttttaaagatggatgccaatctcaggcttcttttcgtgtgtgtatgtgcgtatgtccataaattctcttctaattacagtgtaagccgcatcccacaagttttgatagtcacagaactgtatcgtcacactattttttaatttcagtaagttcttcactgatccctgtgtaatttagaaatgtttcataatttccctacattggaggggaagatagttttgtttttattattaatttctagctgtattgagctcttgtcagagaatatggtttattttagtcgtttgaaatttaagatctgcttaatggcaaaatgtatggtcagtttttgtaaatgttgccagtaagcttgcgaatcatatgtactctagttttgaaatccattgctcagtggatgttcattaggccaatttgtataatcatgttgtacaaatctattctattcttaactgttttttgttttaaaggtgtggggtcttactatgttgcccgggctggactcaaattcctcagcctcccaagtatctagaactacaggcacgtgcagcttggtttaaaaaaaaaaaaaaaaatcagtgagaagaggatttgttgatctccccgttaggattatgggtttgtctgttcctccttctcagcttatgctgtatatattttggggctgtgttattaggtgcatccaagtgtatagttgttatagttaccatgtgagctcaaccttggatctttacatagagattctctgtatttagtaatgttttgttcttaaaatctgcttccatctaacattaatataaatgtaccagctttattttatatgtatgtttcttggactttgtctttatgtattacaagaaattgtgataaagacctcatttaactgga

SEQ ID NO: 7276 - DNA, 8942 bp, Homo sapiens
cagggggcagcatggtcgtgcagtaaagggctataactttatttgtatttcctcttacacaaaaccatcaaaacaagaacagaaaaaggctgaaaatccgttcaaaccccatgttctcagggatattccagggagttcttgaggctgagtgcgtagcttcaaatccagcactaattcctcaccccctggcctgaggtcttcatagattggtggcttgagccctgcaattaattataatcccttgcccaccttgatgtaaggcaggaaagcagattgaaatgctcctctctgatgggcaaggggaatcacagcccatagatgtactgcaccttctgtactacaggagcagaacctgaagctgcttccaaggctctggacacttggcacgcagggctagaggccaatggtatatgagcggcctgtggggttatgaatagcagaacagactggtgctgtcacagcccactcataccacaccttcttggaattgctgcatcgccagaaacgcacacagatggtttggccttcacgtaccgttatgggctgctgtaagaagaaagacaggaaggttcagggtgaagctatgaattatacatggcaatgtattaaggtaggtgtggagataaaatgataaacatgacaagactgtcccaaccctcatgaaagttatttgaagcctatcagaacacaaataatcaaaggtgtggtgagagctgtgaacatgtacagagtcagaaaaacacctatgaaagggaacactaacctagtctaggagatcagagaaagtttatctcacaataaaaatgtttaaagaagacctagaagataggttaactgtgtgaagagacaagcaaagaactctacaggcaagagaaaggcatgaaagcctgaggtaggaaagaagatagacaattagaacaaaaagaaggtccataaggctgaagcagtgtaagcaaggggacagtagctgcaaaggcaagcaaacactcgatcacatcaagtcttacaagcaatgtcccagattttgacttttatcctaaagacaatgggaaggcattgaagagttttaagcaaaaaagagagataagatcaggccaggcgcggtggctcacgcctgtaatcccagcactttgggaggctgaggtgggcggatcatgaggtcaggagatcgagaccatcctggctaacacggtaaaaccccgtctctactaaaaatacaagaattagccgggtgtggtggctggcacctgtaatctcagcctcagggaggctgaggcaggagaatggcatgaacccgggaggcggagcttgcagtgagccgaaattgtgccactgcactccagcctgggcgacagagtgagactccgtctctttaaaaaaaaaaaaaaaaaaaagacagcaagagagataagatcaaatttgagtttttaaaagatgactcttgctcaaagtagagaacagacagaagagtagccagagtagatgcgggaaagccaggcagaaggccactccaaatactcccaacacctaccactgggatccaagagcatatgaaatcaggagaacatgagtcatagtcaactatcttcctgggagaaggaaagaagcacaacaccaaaggcaaaggttactgcttaactagagagtcttaaaagcagttcctaccttaatagggaagaggatgggaaaccatgagaacatcccaggagagtgagtctctggacggatacctgtgtggacaaaataatgaaaaaacagaggtctccatggctgtgacttttgcctatgctgaagagggtctcttctctaatcacacaaagatctccattcattgagcactgggccccccataaatctaaatgacacatgtacatataagctgcccaggaagcacaccctcatactctgccatctactgccatagacactcactcagagtgatgtcctgataaagcacagtctcaaagtagccggcaaagccatgtagtactgtgttcacctccacaggaaattccaaggtgcaatagcggttgttgtcaatcataggatctgtcaggaaataattatgtgggtgacaaggggccagaagctctagacaacttgataaagcatgagcaagacccaggaaaggaagagtagataaggcagactagggacagtaagggaagaaagcaggaggaaggaagaagcccgtacccctctagtcagaggacagccataaaagaacctacctctgttgggatggctgaaggtgaaacagggctggggtgcagagagctggtggaagttgtgcagccgtaccacataaggcatctcaaactgggcctgtcagagacagaaagagagagagagtgttggggaagacacacaagagagaactacttccccaaggattaaaaaaagttttactttagtgcttccccaatccctaacttctccttcacctcttcatccccagcagaagaaaatagctgatgcaaatacagaaaaagaagaggactaaagagtaccacttctttccagagagagtggttctttacctcagggtcacggtccttctccctacaggctcggacctcattgtacagcttggaggaagagatgggagccagaaaggaagtgtactccccggggatgctcacaccatcatctgcacagcaggagagtcaaattagttccagagggagggaaatggtatgtctgtactaactgaaggatcagaaggatcaaacctcccatgtcaaaaccaaccaacgttggcatgggcatggaagaaagagacaaatgcatgttgtcacattactaagccagcctgcttccaactactgtcatggaggattccactactaggttaatttacagagtcacacagattaaaactgaaagaacccaagatagtctaatctggtggttcttaacttttgtggggtcacaaagtcccacaaaagttcctgatgaaagctaagctcagggtacatatgtcatatttatttatttatttatttatttatttatttatttgagatggagtctcgctctgttgcccaggctggagtgcagtggcacaatctcagctcactgcaaccttctcctcccaggttcaagtgattctcgcgcctcagcctcccgagtagctgggattacaggcgtgcaccgccacgcctggctaatttttgtatttttagtagtgatggggtttcgccatgttgcccaggctggtctcaaactcctgacctcccgccttggcctcccaaagtgctgcaattacaggcatgagccaccgcgcccagcccactcccttcattttacaaatatgaacactaaggtttggagagatgacttcatttgctaggggcacagaggcagtgaagcagtggctctcaaactcatatgatgtgacccaggtccaacccactttcccctaaaccctgtaccctcctcccaggttgctgtctcacccatcatcaccctccacctacaccccaacctgggggcaccttttaggaagtgctgggctccatccaggcactcaggcgacaattcattgtcagcaaatgagcccagaagctcactgacaatgatgtctgctttctctggagccacccattccctcatgtctgatgagactacggtcacttggcttccccattcttcaaactgccagttctctagcctgaaacagagacaataaggtaaggagagatgttaaggaaatttggcaatgaggactaacttcccagcaagcaggttgctactcacgtcaccacggcatttgggtttttctccacagcatacagctttatccgccggtcggcctgcttggctgcccgcagggaagcgttcaccaggggtccccgtcctgctcccagcaccatcagtaccctaagaaagaaagggaagagtcaagcagacttggcatatacagatataggtatgcaagtccctgagattgaggggaaagcactcactggacattggtatccttctcctcttctggtactcggtctagcagacatttatagatggcctggagggaggagagaatatcccatggttgtaatcccatcctccccaggtcatgctggccctgtgctttcctcaccctgggcaccacacagtacctgctggtactgagagtatttgatggggtccttttcaaacacttcatatgtctgagattccagattgtccatcagtggctgatgaatgaggaaaaggacaaagttagccagtttctggcaaaggacaatgcactaaaatatcaaaaactttccactgctttctgagttttagtaagatttggaggcatatattctcaagaaacattttccatcccaccttcctcctctaagtgcactccagacccacctgaagcggggactgcagatagtcttcatagcccttggcaaagagttcataggcattaggtggaggacggttctggcttaagtattccaggtattggaggtaggagcagaactccttctctgagtggtggttggtgcctgtgatgatgaactgcacctccaactgtgagaaaagtcagaccatcagacacagccctcaaaccaagattctggaatattatggtatatggccaaagagccctagtgtaaaataaggcccagatcaacagttctctttttttttttttttaaaaaaaaagatggagtctcgctctattgcccaggctggagtgcaatggcgtgatcttggctcacttgcaacctccacctcccaggttcaagcaattctcctgcctcagcctcccaagtagctgggactacaggtgcgtgccaccatgcttggctaatttttgtatttttagtagagacggggtttcaccatgttggacaggctggtctcaaactcctgacctcagatgatccatccgcctcagcctcccaaagtcctgggattacaggcgcgagccactgcacctggcccagaccaacagttctctagcgtctgtcccaataccaacaaaggcagcatgaggcttcagtaaacttataaaaagcccccttggccgggcgtggtggcccacgcctgtaatcccaatactttggaaggccgaggcgggtggatcatttgaggtcaggcgttcaagaccagcctggccaacatgataaaacctgtctctactgaaaatacaaaaattagccgggcagtagtggtgcattcctataatcccagctactcaggaggctaaagcagaagaatcgcttaagcctgggaggcagaggttctggtgagctgagatggtatggctgcactccagtctgggtaacagagtgagaccctgtctcaaaaaaaaaaagaaaaaagaaaaagccctcttatgccatgaaagtatcaacacccaaacagcctcatggatccttgctgtaacttcctaaatgaaaccttctgcaaagttctcatgaggtttggtttgttttgaaaggtttctagggctactactggcatttacctttttgttctcaagattcccaacttcactgaaattgctccccagaaaccaaagaaaaagagtcagcctcacaggaaaaaacgatcatacacaggtaaataaggcaagatgtatagctggactacctttagaaccctcctaccactcaccttgaggagccggaagatgagcctctggtgcatcttagaaagaacaggaaatcccttcttattggtcaggaaaatgctagtggggagaatggctgctttgatgggctccccaagccagcgatcaatgacatgattagatgggaggtcagccccaatttcaagagctacatgaggcaaaagaaaaactgtcaaccactgccaggcaagaaacccttccttgctcctttgcgcaaaatctgtttacttctttaagagaaagccagtctgagacagaggggaagtagcaaaattgtatactatatatgaaattcctgattcttattcacaggaggtaagagaagccacacccatcccaggattctcatggactcacccactgcaatcctcttactatagtcacacaaagtccggaagttgtgccacctgttcagtcaaatacagaaaagtacagtaaactagatatggccgaccaatcaccacagctcaaggagacctccctacaggttgcaccctgtacttcccctcaccctatcccttgcaccctggtacagcagcaaagggagacataccacatccacgttttctcctccccactgtactcctctgtgtgtgtagttggtgcattctcaattatatcatctctcaggtcctctggtgccaccaagggtacccgcatccagaactgcacatgaacagtcacccttttagaactctcttttgaactcattgggtccagaaagtttccctcaataaaaaaaacttcatccagacctcgttaatccctttatatgcttttcccaatttgtaattttgtaagtgaacatgtaccttatatatagatccttatgtaaatatctgccttgtcttacgtaagtttccaaaataattacatttacatgttttgaaactctcttcataccacttttagatggagaggtgcgcaatactgacctttttttttttttttttttgagacaaggtctggctctgtcacccaggctggagtgcagtggtgcaatctcagctaactgcaacctccgcctcacaggttcaagtcatcctcccacctcagcttcccaagtagctgggactacaggcgtgtgacaccccacctagctaatttgtgtttttttgtttttgttttggttttggttttttatacagacaggatttcaccacgctgcccaagctggtctcgaactcctgagctcagtgatctgcccacctcagcctcccaaagtgctgggattacaggcatcacccactgtgcccgccaatactgatacttcaattctgccaaacacacccttcactgaatggctaggcacaagaaggtacttagcacaatctgactactatgatatgcagcaggaaaggagcccctcagctataccatggaagagtgatggccagtgtggatgtggttggtcaaaactctggccaggttggtgttatcttcctgattaaggggcagcaggaaagctggaagacccaaatatgcaccaaaattcagctcctgtaacatggcctggaacggagatgaagaggaaaagtttgagctaacaagcaaacagcttttttttttttttttttgagacaaagtctcactctgtcacccaggctggagtgcagtggcacagtctccactcactgcagccttgaccttcccaagctcaactgatcctccctcctcagcctcctgagtagctgggaccacaggcatgcaccaccatgcctggctaatttttgtatattttatagagatggggtttcactacgctgcccaggctggtctcgaaatcccgagctccagtgatcctacagcctcagcctcccaaagtgctaggattataggtgtgcaccacagcacccagcctaatagctttaatttcattctatcagttaatttaccaagttattggggatgggaggggaccactctccccacccagcttggttagaaaaatccagcagagaagtcaaacagtcttaccgcctcggagttcctgcgaatcttctccacttttgagtctggacgaatccatggagaaagctttcccacaattagcgtattccagtctgcactcccccacccaagaaagacaaatactgaataaggttcagcactttacttgttcaatttttagttttgggaatcaagagtagaaatgagagacaaaggttttttctacatagacatgggatagcctgatgcagaatagagaagcaaggagaaaacaagttatctatatcccagggactaacaaatatatccaagtcagaaaaggaggagaatgagggccccgataaagcagaagttgttattgcctctaataattaaggggcatatgggatggtccctaccccttcctgacagcagtaggtctgatcgtgtctggggaccgggccgattcttagcaggttcctgaatgaactccctcttgaaacgcggatggaagacaggcatgcagaggaaatcaaacctacaaccgcgacagacccagaatcatgtaaagacagcagcagtgccagagagccaagcaactggatttaggctatcttgattttgcacagccctttcagctgccatcagttcagcctactaggctgctgagttcagaccaccttgggggatatcaactctgctgtactgtgcctcaatttctccctaaaacacagccatgggacatatgagtaaggagaaaatgatggatatccacaagtagaatttttttctcctcaggtgtcagtatgtttccaagaccatcacatccagatttgccccagttctgcccatgcctcccccgtcaaaattagcctcttctctcccttgccccctaacacctcctcccactcccagacaataatcgcgacctccagggccctttagagtttacccaacaactctcccaactttgggactcagtgaccacaggcctcccacaagttattttcctcacgttactgggtccgaggctcctcccctccaaagagtaatagtctctcccctcctcatcctagccgaccccctcacccctgcttctccgggatgactagtctgcccttctccgtccccgagttcggaccccgcattccgctcgtggaggtccggccctcacccctgcttggccacagcccctagtgtgtcagctatttcggggacgcaattcaggtccctcccgctggacacgcggctcccaccagcacccccgaccgccatcgccgccatctttctcctcgcgctgtccacgccgggattccttgatactagtagccaatcacaaagtcaaactagtgccccagaaggcgggacgagtcgc

SEQ ID NO: 7277 - DNA, 2073 bp, Homo sapiens
cggggtttctccacattggtcaggctggtctcgaactcctgacctcaggtgatccgcctgcctggtcctcccaaagggctgggattacagacatgagccaccgagcccggcctaaaaagaaaagttttttatactcaagctgtttcagtcatttttgctgccaagtctacacaaattttctgttatgaactattttttacaatctgctttttcccctccaaatgaaatgcttgatttcaagaactgctcattgttgagtgctaatgcggggtaagaacaacttaacacacacactaaaacttacacttaagtttacaagcctctacaaataaacctctacgtaaaaagttttcactcagaaacaaatatatccgtttaagcaaagccatatacaacacaatattttgaaacttgcaatctcactgggtttagtgtctttctagatgtgctaaaagcaataaggtagcaaacactatgcattttcaggctggtagttttttcttttttcttcttttttgttttttttttgtatttttagtagagacggggtttcgccgtgttagccaggatggtcgcgatctcctgacctcgtgatccgcccgcctcggccacccaaagtgctgggattacaggcgtgagccactgcacccggcccaggttggtagttttcaaacgctctcttcatgtcccaacttatgggtcaaggtccactcaatctcatccacatagagtatgttttcttccatcctgctccaaaaacagtattagagacccacaatcacgtcagttcctagacctcgtcatagcacaagccaacagatagaccccactgctaaaggagcagagagaaccactgtcagaccaattcgggaagaattcacgaaaagctggagccccaggggtgatggtagcgccatccccagggtctgatcacttagctgggcacaaacacctacaaactgaaggcagcttaacaaaagaggaacaatgagaacgataaaagctacttgaaggaccaccctccccatgttgtgtagctttaaaaaatggtcctataggccgggcgcggtggctcacgcctgtaatcccagcactttgggaggccgaggcgggtggatcacctgaggtcaggagttcgaggtcagcctggctaacatggcaaaaccccatctctattaaaaatacaaaaattagccgggcgttgtggcaggcgcctgtaatcccagctactcgggaggctgaggcaggggaatcgctagaacccgggagacaggatgcagtgagccgagatcgcgccactccactccagcctgggtgacaaagcgacactccgccttaaaaaaataaaaaaaaagaggtcctataggcaaccaactggcacaatctctgcgggagccagtgtcccagggctcaatcttcatatgtggcatcataatacgcctactggaatgagtgcttgaaaaagttaaatgggaaaagcccataaaggtcaacatagtgaacatgaatcttcgacagactagagattgaggaagaaagctcaattcccttctctctctctgaatggtggtgcgagtggctgaaactgatgatgcgtgtcctctcaggccgcggagggtcgatgctccctctccagtgtgggcgaccctaagtgtcacggctgcagagacccggaaagaaaaatcacaggattctagaaaccgcatctttatcggtgcaagatacagccacgagggtgcccaactctaaaatcgtggcagtgggctacatttaagtagctaacacttccaggtcaaaacaaacaaaggtttttttaatgttaaaagttcgcctgaatctcttcgtgacgccattttctgcccgtgacgtcaggggggaggcgccgtgcagcaacgtcacgcattggtgacgtctggtggggaccgggttttggggtttctcaccagttccgggtccccgcagggggtcccggttctctccgttcctttgagtatgttgtggggagtggagctcggatagttcctagagtctaggcaagaaaagcagcactgcaggtacagagcctcctcttcc

SEQ ID NO: 7278 - DNA, 14252 bp, Homo sapiens
taacgtctaacgctaacggcggtcgtgccccgccgctgctgtcacccccggccgctgctgccctccccgccgaggttctactgctctccttcttaagaagggtgggaggcactcggtctctccccacacctctcgcctgaggccaggcgccaggtgtcgcctgaagccagacagccggtttgggagcgagcctgaggtagccaccccgaggggaagtggagggagggcagggctctgagcgccccgagggctgcgctggtctgagggaggagccctgccggacgcccccctggattctgagcctctccttgttcacagggcaaggggagggcaaggggaaggcaaggggatcttcaagagaatgtgactgtgggggattatggctttctggccaatttgtgtgcgtattttgtacccagaatactattatacggtttcttacccggaggacagtggttgggaggctcaagagtttggaatcagagccctccaccgaggagccacacctctgctttttcatcagcgacagggatataaaaatacctctgggtgaattgtcatgtggaccaatgggcatacctagcacttcatagactcctatcacacattattttatacctagcacttcatagactcctgtcaggcattattttatacctggcacttcatagactcctatcacatattattttatacctagcacttcatagactcctatcacgcattattttatacctagcacttcatagactcctatcacgtgttcattttatagctagcacttcatagactgctatcacgcattcatttttactagtacctattgaacactaagttccaggcactgggctaggcactgggatggtgtggtgagcaaaaactgaccagtcctgccgtggagtttgctgggggagacacatgttactcaaagaatcacactaaggataggtaagtgatgctctggaagggtatgtacaatggaactgacagggtaatcagggaaggttaagcagacctccaaaggaagaatcaacctgttaagaggaggagaatgcattccaaacaagagtaaccacatcccaaacccaccacctccaattccgaacccaaacagggatgtgcagttgtctgtgcttggttccaagccgctcatagaaaccctctgagattctgccctggagcctttcattcatgtaatggagactttcatttatgaaatggaagccctgtttagcccataccaataaaaacaagtgagaaatccctgaaacaagactatacagtctattttaagacctacattcttcagcacttggcatgtatacgttgggctgccatttcacattgggaggcatgttctgtttgcttttttgtgttttttaaaaattcctttcttcccccctctccgagaaacacccaagaatgatcaataaatactaaaaaaatgttaaaaaatccttttttcctctgtacagatttagtggttattactgttaaaacttttctaatactttgcaaagtctaaaattaatcattattttatcatccttttcctccaaataaaagaacataaataaagtaaaaggtcatgaagtcccaccaatctaagaccactttagtttcttgtcttgggatttccgagccatgctggtgttggtataaatggaaaacttagaactagtctgtggctaccaactcctgggggactgtttctctcctgactagaagcagcaatggagacaggtttctttgttgcttaccccagcctgtaggcagatattttcagccacaccttttcacgctgagggtgtagtccctgggcgggtctcaagtttaggtcagaaggggagtcctttagtccagacatttgccttttgtgagcctaatccttggtctctatccaccctgcctagcaatttatctcaaagcttcaagttcctgccatctacatgtgcccaggtgagccctagtttcttcatttgcccagcactgcgggttcccctttcctcacctcattggccactggaagatttctctcacttcactgcaagcccagcaaggcaatgtgaaaggcttgtactgagatttgtctggcctctaggtgttttgaagagggacagctttttagcatatctagtctgtccctttctctactaaaagcagaaaaaaatcttttgatctgttgtttatttgtggatggaattgtatatattttatggatgttcatgttttgtttcaatttgtcctggaactttttgagagaaaatgtacgagttttccgcctgacaattagagttgaaaaaacatgcagctataaacagagacgctcatcaaatggctgtttaatgactatttttatatggaaataacctaatgttaattcatagagggttcagagtaaattttgctacaattcttacctagctaataagagctggatgacatgcaaagatgttcatgatatacttttgagtaaataagctgttttgcataatcttatttttttgttttacaaacatatatatttatactgaaaaattctggaaggagacatccaatattttagggtgataccattagggatttttttgttgacttccactttttaaataaaaaaggactgtgtaatttttacgtaaaggatataactatttacaacaaaaagtaggggttagcagacggctttctaaccttgccgttgtgtaacaatagaatgcatttgtcttgcggagtccccaaaattgagtgtcaaacagaggctgggtgacctcctgtccaggattgctctcatcttatgagtccaagttttcatcttatgtattttttctcctgagaataggtcaaccaatcaatggctcagacagataagccaacatgcatcccgccggagctgccgaaaatgctgaaggagtttgccaaagccgccattcgggcgcagccgcaggacctcatccagtggggggccgagtacgtgctcctttctcgccttcatctcttggaggacgggcggggagagagggtcctgtaaaaccgcggaggttgtcatggctgcagccagggggtcgggactaactggcatcgtctttgttttagctcttgcattgctttgatgctttaaaatccacacataaatactacatctagccgggcaaggatgggatgcctcccctaagcgagccagattgagcagtaggacgccaggtcaataggccgtgtcctggggcaagcagcaagttagatgaccgcgtcacaccagcgtatgcacacccacctcctccctgcacgccttttcccactctcggtggaaagaagggctgggaatctccgcagcttaatctgcctttcttcattctcctgtctcaccactagatggcagcagtgcagccgggggagggaagcgacagccctgggtggatggggtgggaccagtcctgctagttcactcctttaaggagacacttcctcccctgctgttaaaactcatacttggacccaaccaaagaggctttgtatctttgaggaaattattgttattttctttggtgtttctctgaactgatttgttctgccaacataatgatgtcctcacagtacacactgcattctggggaaaggccaggcagagtgatggggtcctcaggcatggctgaaaacagtgtgcctcaaacacgggtgccttctttcaggagagacctccagaggctgctcagtagatggagcttacacaacaatcgctgcgggcctggattgaagtagctttgcacagaaagcctctcagctatgaaattgctccttggacaaacttgcctgcttgaaactggggaaccaggacttgagacaggagttggaagataactagacctcacggaccattttcaggctatttttactgtttgatgattccctgcttaggagggtttcagtgggaaagtgagagtgagagaggccgttgagagaaagccagtgagttggggaagggaagatgtcctcaggctgaggttgtgagtgggtgtcctgggcagatggtggggagagtgtggacacctttgagaagacacaaaatggcacctaagaggggcctttcggagtctctgggccagtgttgtgctcctggtctggattaggatgcagcttttacaattggaaggaaaataggccagtggtgctcataaaaagaaacataaatgggggttgctttgcctagtaataagccctgtttagttttccattctaaattttatatattgcctctaagattgaactttagcttcagaagactaatttattttggcatagtcagatagacagactttatcttatacgttagtttcaaacccatttgattgttcttgtgctgccgttttatagtaagcaaaatgacattgcttagtattgtccctgacatttatggaagaggcattccactattgtagactgcttgctctcgtattgtatcacgtgctataatttttttagacatccatgaaaacttagtttgtagtttaaccacaatgaaaaaggagggcatgacctaagagccccctccattctatccagacatgaaaagcactgctcagatggttgtatgtgacttacttaaaacctgtagcattttagagaataaaactctgcaaagtgtttccaagacaaaatacgtttttaatccattgcaagtaagaatttccctacatatgtgttgtcaatgaagaaacctcttaccaggtattggcaggacatatacttatttgtcctctggtaggcatgtgttacaactcaaatttgcaatatatgtgtataaccatggacctgatcacttgcaaatgaagctcaataacccaaagaatgaaatccatgattacagctttgcttccatgttgtctaaccaattccacaagaagtccagagatgttgctgctgagtgttactctacccgggcagcacttctgtggaatgaggtgctgtgtgtctctgtccctcccatttataccacccaagtctggaagtctggtttataaagcctgagtccacaccctgctcctgttgtcacagtgcacccacaccccgcccaccccaacactgatctgtgtgcagagatttctcaagcacattgttaaaggtgcccttcctgctgatgacctccaagtggtgaccggcagttactcctttagtccatgtagctttcactctgccttgctatgtggcttagagacaggcaatcgttagcccatcattgtatggcttgaccctaaagtgggcttttacaaaattccctctatattattttcatactacctggatctggaggaagtaatggagggaaaaaagcagggcggaacagaaatttgtggttcatggatcgtcaataaccaggcttttgatggagacagaccctgccatgctgctttggtgacccacatgtcagcggctcatgtccattccctgctgcaggcagcctcttttcatcttatgccagtcctgaaacagaactcagtacttgttccacaatgcccccaaacaaagtccactccacaaaacattgaggagcaggcagatttcactgaaaattttgagggaagatggagaaacagttttattttacaggcaccatatagcttaaggttgtctcaaaccttctttggcttctcttctctcctgagccttgcacagtgccctgccaaccctctctcccttccctcttgaagccccaagcctcactacatacggccagaaatccttcctgattcaccccaggatgcttccatctcttccctttcctcctttttcatttcttcagagatgggggtcttactctgtcacccagtctggagtgtagtggcacaattatagttcgctgcctcctcaaactcctgggctcagtggtcctccaggctcaggctctgcagttgccagattacaggccgtagccaccattcctgtgctgccttcccctttcttacgtacattactttttagttctcttccaacttctcttcccaagattatatatacacatgtaacatatatctgtgtgtataaaacattcagagatgactggaaaaaaaccctgaacccaatatgctccagggaattgcatacccaaacttttcttggttcttcctcatccttagagaagaacaaagctttgtattctctaagcattctctgtgccctaagtggagagtaacacattcagacttttcccatatgtaagtgaactaaacacaatgacacatagaagccactttacaaaggttcctttctctacctccttccctcagaagaagggggaaggattgctagaacagccagaggccactggtgtataggatcctcctactctctgactttttttcttgtagttattttgaggccctgtcccgtggagagacgcctccggtgagagagcggtctgagcgagtcgctttgtgtaactgggcagagctaacacctgagctgttaaagatcctgcattctcaggtaagggccctgctgcagcattgaggagaatgtagggacagtgttgaggctgggtgggtacagacgaaagccctctgttctcctgccagtcagctgaccacttagcaccaccctaaaatacactaaaccgtggactgaaagtaaatcttcccttggggaaatgggaataattttgaaataggctgcaggctgagtcattggtggggtcatcccagatttccttgaagctggcagaatgtacaggggctcaatgcaatgctaatcttgtctctccagaaaagtgcaggtcctcagtcactcgacagtgtctccttactgatcaagaccataatatgatgccaatcacagtttggggaagggcatattttagctccccagttatcccaggtccagacattgcttttagcttttagggagaggctgtgagcctcttcatagccacatcatcctgggagctgcctggtgaatgaatgcatgaggagggtccggcttgagaaagtttgtggtttggccaattcccaggaaatatggttgagcaccaccaaaccctgctttatgatccaggacagagcggtttggggtgatttaggactggcttggctaaccaccttggtcccagaggcttagcatttcactagaatcagacagtcaggaaaggtgttggagcacttcatcgggcatctgtgctcttgttgcattggtggccaacaaccagtcatcttctctccttttgtccaccaagcaccttgtgcagtgaacatgacagagctctaaaatacctgggatcaagtaacattaggcagccagatcaaatccccgtgggtcagccacataccccatatcattcctgggaaagcatgagggatgcacttgaggtctagagctaagaactcagtgcaatcgggaagaaacagacctatgtcttgttctaattttaccgttaattagtggtctcaggtaagccctctaccccttggttttgttttcaggctcttctatctgtcatataaggaataaaacaatttaggaatacaatagcagataaaagcatcaccagaaattaaaatgtaatataaatgtatatcttttgcataattctgacacctaaagtttgacaattaataaattatatttcagcatgctcttcactaggatttgcaaaggtaactgccacacagagccatctttaccttcctaacaccccctcccgccccttgccatgtgctgggagatgtggacctggcctggggacagggtgtttctcagggccttgtctcaacttctcccacaacctctgtgttgtgtctgtcccctgccctgcaggttgctggcagactgatcatccgtgcagaggagctggcccagatgtggaaagtggtgaatctcccaacagatctgtttaatagtgtgatgaatgtgggtcgcttcacggaggagatcgagtggctgaagtttttagcccttgcttgcagcgctctgggagttgtaagttagcttgactgttttttgttcctgaaggggaaatctccctctgggcctggaagggcagtgcatctatacacgcggtcaactctgcagggctgatgataaacatgcctcttctcctattgtccttctcctctctaaagcaaggtcatttctgtgctcgtcaggcagtggcaggggttgggaggaggagagagggaaacactgtggtcaggctctggggagagttgactacagtgtagctcttggattatttatgaatattgccctcagatttattttcactctgctccttccattcatattcccagagacaaccaagagccgactgtagaaaaagacttccagacacctagaatatatatcaatagacactgtttaaaaggggtacaatcttatagaaaactatgtaataaacagaattggatgcagaactcagacataagaaagcaaaaacaaagagagatgaggctatttctgaatttagtcatgacatctccatggatacaggatgttcatacagatttatgccttttccaaatttgacttgtttgatattggaaaaacaattttactgttttgaagccaaagatgttgaaatcagtttatatgtatagatatttaaagcttgggtatcttatatgtggacttacattgttaaacattgttaaaataaaatgaatcaaaaacatggtttttaaaaagaatccctgagatacataaaagtttgaaaattattgagaaaataattgcctctgccaaaaacaaatggtatgaaaaggtagtctgaatcattcagcatatctaaacataatcttgttcttctcaaatatgcttggaatgcatatttgacacgtttgtttctgagaaaatttagcagaaatattgtagtccaacttttcctatagcttcccctacaatgtttatcattgctttaaagagaagtgaacaagaggacatttgtggctttttttcttcattgtcctttatagcatttattactgaataaatcactatcctctgaggaggaaaggaaagtaagcagcagaggcctatgagttgtcaatcaggacgggaaaatcacaaacgggaagataaaaaaatgaacacattttattaaattttcataggtttacagatttttttcacaccacatttggagacgttttgggggaaaatgtacctttaaaattttatctgcagttaattctgatcttgtctaccccacccacaaagggtcaaataagaaaataaataaattcaatccaatcctgaaattttagtctgatgcagtaactgaaacagcctaaaggtacatttcccagtatctcaggtttttcctcaccacgctctcttctccaagatggcagttgaatgtagatggaaagaggaccacagagcagtcgtttctcacatccctcagtcttctctggcatctctggtctccatggtaatgcctatctgtctggtcgctagctgcttgcagcttaagtttttggtctcgtctctcccagattggtgaaagtctgaggatgcctcccgagctggctcatttcagttctcaatggtgtcaagggcctctttgagtccgccagggtgtgctatctgctccctggctctggtggtctacttcacagcccctcaccagtgtgtgatgtgtctgagcccttcccttatccccatacctgatagctaacaaagagtgactttggaaagtcaaattccaaccctccctctgcttagcccaccgtgtagatgctaagtttcttctgatgtacctgcctcccaaactagagaggggaaatcatgaggtgaattggatctttctacttcccttctaaaacaaggaggtgggattcaatgttccatgagattcatctacctctgacatcctgtgattctatccccacttctctgcttcctctgagacaccctcaggcctacctctgaataacagtgagctcctccaattctaagaggccttgacatatctgactttgctcctcatcatcccatgtgcaaagaacccctagaggtaaagtcagcctggaggttaagtctgtaaataaggggtgccctatgaatccagtaatcaatacccttatattcatttctatcatgctggactgtttctgggatcttaaatgtggggttggtcagtggtacagtgtgaatgtttgtgtcctcccaaaattcatatattgaaatctcaacttccaagatgatggccttaaaagtagggcctctgggagttgattatgtcatgagggtggagccctcatgaatgggattactgcccttataaaagttgcccctccaccaagtgaggacacatagaaggcatcattcatgaggaacaggccctcaccagatagcaaatctgctggcaccttggtcttggacttcccagactccaaaactgtgagcaataaatttctgttgttataaattacccagtctaaggtattttattatagctgagactaagtcaggggtcaccatctggtggagaccttgcatcctagttaattcatatatccttagaggcaagcccagagtttctctttcctttgcgaattcaacggcaagacaggatctctgtgtcatctacaaaagccagtttgttccttgtagaagagtctagtaacaggaatttttactccggtaggtaataggtacatttactccatcttgagctctctgcgtcgaatacacattattcagaatgcgatggcacacagacctgtattcctccccccttcagcactccttcctctggactggcctatgccacctcctgttccactgaactgattattaaaaaaggaagagatcacgtatgtagaaaataatcatgttcactggaaagaatgacttttttttagcaaattattcacatttcaaggctttcacctctgactttgaaaatgaagctcgcaagatgtttaaagactacctctgtgaagtggatccccaaaaaaatattgtgcaagagaatgaagatctgtttcctttagatttatgtcagtttaccaaatagctctagtacagttatttatccactcatccatttattaaatctttaaaaatatttaaaaatcttacgaggcaatagaatttgaagggttattgtttgaataatcaataaaagatgatgtttagagttgaaagcccctatgttagtttgttagggctgccatgacttggtggcttgaacaacagaaatttgttgtctctcagttctggaggacagaagttctgggaacaagctgtcagcaggactgctttcttctgagacgtttctccttggcttaaaaatggccagcttctcgaactgtgtccctctgtgcctacatgtctggtggctctctctatgtcctaactcctcttcttaaaaagacaccctactgacttcattttaacttatctttttaaaggtcgtatgttcaaatacaattgcattctccagttctggggttaaggctttgacatatgaattttagggggaacaattcagcccataccaccaccccatggagagggcaacagaacaaagcattaggggtgcagagggttgtttttgtttgcttgtttgtttgttttttacagaaacgggtgagctgtgggtggaaattataaagttcagagtgtgcttgcaaatctaccccaaagcattctcccactcacaagcatgacttaccatcctcccagatagccgcatatatacttgttagccccatgcctgccctcccacctgctctgaattaagtggaagtgcctagaagatgcagtgtttcacaatgatttccatgataggacccccagggacagaggagaggaaaggaaggtggcctgcctcaaactcatttttttttgacatcgtgtggtttattgaagattctgtttcataaaataacaatgcttactaaatgtaaagaaacaaattttaaatattaactcaattaaaattaataattattataaattatgtttaaattacttgccatcaagtaaaactatcactcaaggaagagtttattcacatcctcagtacctcctgacatagacttatgctcctgggtaacacataccacagttagagaagcctcatctaggcaatcattctgttctgggagaggatgagaggagaacagcagacatcaactgctaaggcaggacaagtctcctctactaatcatgtgggaagatacagcagctgctttttcactcaccctaagtcaccactcaggactgatctttcactgatccctggaagagtgtgtcaggatgatccgtacatcaccagtttcagtaaaccaccaagatctgtatgctgagcttcatttcacaactcttttgcttgtaacatttattcaaagggtgggttatttaaagacatgagatgagttctgagcatgctcctttaatgttcaagtttcattgtaaggagggtttgcttctgtagtaacccttctgttaaaattcctggcactcattctcaaccaatatttccccagcaataaaagggttagtattacgtaaaatgaaataaagcactaggtgattctatttagatggacccagatgctttggaggaaggtttatcttgatgttcaagaccttttttccagtatcttcctgggactctattttcctggggaaattatccttctcttaccttcttctcctctactgtgtcttgctggagtatataggctagaccatttatctcagccctttagagataagattggagggtaataagaaataattctaattatatagaatgcaaatcaacttccctcctttagtgagggtattcagactaaagtaacaaatatcttaaagtatttaggaatttataaatttaattccttgagtagtcttctaacaaagaaagaaaaataaagatacccaatactcaatattttttagaatgaattagtgacatttgaatgtaaaaatttcaagctttctagaatcttaaattgttcccacttcattttataagagcaatatttttgttttctttcttgtatctaaatggatctcaggaatattgcctggaagagtaactttctcctcattttatgtaacttttatagactattaccaaaactctcaagatagtgtgtgaggtcttatcatgtgaccacaatggtgggttgccccgaatcccattcagcaccttccagtttctctacacgtatattgccgaagtggatggggagatctgtgcatcacatgtcagcaggatgctaaactacattgaacaggaagtgtaagttaacttttaccaattggaggtgaaagaataccaggaaaacaaatctatggggccaagacagagtgagattattgtattatactgctctgggaacagaaaagtgaggacatgaaatatcgatctgaaagaaaaggagaaagggaaggagaagaggaaggaaaagaatgatataggacaataattctttgagtgctactgaggctagcagtagcggcagcggcacctgagaacatgttagaaatgcagaatctcaggctacaccctagacccatggaatcataaactgttaggggtggagcccaggaatctgcgtatttataagcccctccagtaactctgactcatgcttagctatgaccagtggaacagaagtggaggaggaggatgagaggaggagcagcaagtcaagagttaagaggaaaagagggctggtcatggcggctcacacctgtaatcctagggtgggtgaatggcttgagctcaggagttcaagaccagcctgggcaatatggtgaaaccccatctttactaaaaatacaaaaattagctgggcgtggtggtgtgtgtctgtatcagttaattgggagaatggcttgagcccaggaggcagaggttgcagtgagccgagattgcatcacttactccagcctggacgacagagccagaccctgtctcagaaaaacaaagttaagagaaaaaggagcaacagcagaattaatgtgaaatgagagttgtttgcatattgtctttcttaagattaactgtcaatgaactaactgcagatatacctttatccaaacagaattggtcctgatggtttaatcacggtgaatgactttacccaaaaccccagggtttggctggagtaacagcacaattttggcaattttaaaggaagatacagaggtgattgtacttcagaatgataaacccatataccacctaaaatcaattttcttgtacaactggtacacactaataaacaaacatgtgagatcagaaa

SEQ ID NO: 7279 - DNA, 2270 bp, Homo sapiens
tttctttattttttaaattatactttaagttctagggtacatgtgtacaacgtgcaggtttgttacatatgtatacatgtgagtggcccctcatttctatctgctctggaacctaaggctgtttgagaagtctgaagcactacaggtgaaacctgacactgtaattaatcaggattagagaacgagtgaaatcctttaacctgcctcagattcttggtgtctcagtttctctttcactgtggccaaagaactgaaatatggtcttgtctgcaaatagggaataaagggggacagaagagacagctccaatttgaaagaccttaaaataacaaattaggttcataaatgtaacaaaagcaagagtcccttgtacatttgggaaaacaggttgaaatcagaaacttagtcttggtagccttgaacataatccctcaagagtgaggctaatgaaattccaacgacccaagtgtatactagacacagacatgaagttattggtgctgtagctatccgtgcttactgagactaagcacaattggcaataccattgttcactgccaattgctcatcttttgagccaccacttggtgtgcaccaccttcctcctctcctgccctggctcactggggcaatgcttgctctaagctattgatattgctatgccacagctgctcactagggacacagtatctacagcacatctgccaaatcaacctgcttctgcagtcaccccaaggatggaaaacagctttgtgctttgccctctacctgggctatgctgtattaacaatattataaatactgtattaatgataatacccaacatttattaagcacttaccatgtgtaagccactgtgtacacggctttatacattctcaaatttttccttacaatatgaccttatgaggtcagtgtcattatctctaacaaacaatcttagataaattaagttgttcaatgtcactggtgagaaagaatttgaatccagatctgactccaaacctatgatgccttgtatatatcctcagtgcctgtctaggtatgggattcctcccacccccagcctgaaataatccctgagacagagatttacatgcaaatagtttctttaggaggcgatcccaggaacagggaatagggataggaaaagtaagatattatagtgatgggaagaaagctaataaatggtgtgttatccagccagttacccctgtactccaatactgctggggaactctgggagacagcatagaacacatctcagagttatcccaatcgaagggtgaggaagctcttcatccatcactggataatccccacctgtcgttgactgagggcttcttccaggtgaattaatgttctgcctttccagcttgcctcagcttgcttcttttgctccaggaaaaaggctctcggccaggaagtcatagatgatcacaataagaagccacctgcatctgctacactgccttacagatattttaatacaacaaagttttaacattttttaatcactattaatgtttctttctttgggtcacgcagaagtcttcagggtctgcagggcaataagtgaccatcattgtgctgtattaaaattcacaactgactcacaaacatgacacattgtccccaaccatttcttccttgtgatgggatcattccaaagggggtcccttgattcttgctgccaacagatccttgtcagacccatcccactggctttcctatcataatcagcaatatctatacagtcctagcatgaccccagttaaactgtcaaacgaaggcccttgcaacgtatggtttgtatttctcctttaaaaaaaatttcaggaagcaataaaatcaggattttataaagcaaaaacagtgggctctttctttcctaaattaagctattttgattaaagtgaagactgcagatatataagcttcagtgggaaatgcaaagattatggcccaattccattttctctatgctccatgcccttcctctccttgatgctattccatcagggacctaccatccctagttaaccaactacttccaggatcaccagggccctgcaacagaaggagctggacaccccaatgtggaaggctggttttgaattaggttagaataggaatcttaacctgaaatccttggagaggctcctgagtgcctctgataacattatatatgtaaccatgtctccaaaatgtgctcattagcatttttctgaagaaaaaattataaggctttgagcaatttctcaaagttg

SEQ ID NO: 7280 - DNA, 514 bp, Homo sapiens
taaaaatataaaaattagcctggtgtggtggcacacacctgtagtctcagctacttgggaggctgaggtgggaggattgcttagacctaggagattgaggctgcagtgagtcatgattaccccattgcattccaacctgggcaacagagtgagactctgtctcaaaacaaagcaaagcaaaacaaaacaaaacaaaaacaacagtcttgaaatcagaagacctggagacaagttgggccctgggccctactgccagctgtttgatcacaggcaaaattactcgaagccttgagcctgttttctaaaacgaaggtaatatctaccttcagagtttactgtgaaactttgatgtcatcatgtttgtaaaagtgccctggcacagtgaccacattctaccctataaatattttctatctttccctgttgtccccaggcatctcaggctctgttcctatccactccatgcccctttcttagcattataaggtcaagagtgaggaatctgggaccacgc

SEQ ID NO: 7281 - DNA, 13555 bp, Homo sapiens
aagagtttaacacgcatgagttgctgtcatctggtgacatcgtttgagtctctctagtcattgaacagaacaagaaaaatcgaattaaatttataatctgaactgaagttatatgtgacccatcacatctctcaagttttaaaatgggtttttttgttgttgttgatggggggggagagggtccagcagcttttaaatgttttcacatcgtgtgttccaaaaataactggttagcctaagtcacttccaccctccaatgttgtgaatgcagtctctagcattcgctatttaatgtcttcttcctgcactatttgagaaatcgcgaggtcgacttaataccgcagtcgccacttcgcggaccggagggcggagtctgcttagttctgaggactgcgtgggtccgcgcagagagctcctgctaggcctgcgcgtcccgttctaaattcttaccctttagtccttgtcaccacccccgccgtgggaacggcctgacagtcactcgtcaaaggaagtggctgccggcagctcttgacccggaatcggatcctagtcccaccccctccgctccaggcttccttctgcaacaggcgtgggtcacgctctcgctcggtctttctgccgccatcttggttccgcgttccctgcacagtaagtactttctgtgccgctactgtctatccgcagccatccgcctttctttcgggctaagccgccccggggactgagagttaaggagagttggaggctttactgggccacagggttcctactcgcccctgggcctccggacaaaatggggtctgcggttggtgtcctggcaaaagcagggtagaagggctgcggggcgggcccagaatccgagcctgcagagatgggagcagttgcagtgttgagggcggaagaggagtgcgtcttgttttgggaactgcttcacaggatccagaaaagggtaaggggtcacagccttagaacctgtaacaccgttctccctgtgacaagcaagtgttggacttaaaacaccgtctttcccctcctggtaccccaaagtcggcaaacgtagtccaggaggccccagcccagccagtgtgagtattaggagtggagggggttcacagtagcgtctgaagtctcccatgatcgagagccagcccgggatcctctccctcgggttgagaatgcagtgggaattgctggccttgatagaggcgtgagggtcacatcatatttacctcttattcccaggtgctttggggaaggttgtcaccaaacaccctcacgatttttttctaacagccctcctcggagtttttaagaatacttatctccgggttgggcaagtgaatgtatcccaatcaatttaggcctcctttttattcccttccttcagaaatgcccggcgaagccacagaaaccgtccctgctacagagcaggagttgccgcagccccaggctgagacaggtaggtttccctaccctccttgccattaattaaaattaaccctaaagccatttggtgggcaaaatgaccaaggggaaatacactttttaggaggatggggttgcagctttaccaaggaggatagaccgtaaaattactatcctggagatacttctttagggatttggagtaaaaataatatttttaagattcgtggacgttaaaagtaccctagcttgctttctatgttatgcctgtcgcctcaaaagaagctctcctgtggaacccccacctcacataggaaaactcagcagggaatgggctcagtgattcttacctattggaactagatgacacaggccaaggagcccggagcatttgtgaaactccagccagcaagttgcatcaaggttttagttagcagagcttggcattgtgcctttatcacatgtctggatgagatgtgtgctggtggtaaatgtgtcctactgggccccagagtcgtcctaggtcggataacttgtttatgggttggtggtgctgagatacttctagtgtgctggaatagttcctgcatcattgtgtgaaacccaggattgaaataaatccttttatcctcagcgtcgaaattaacgactgtgaaggctaattttaaattctggttaaaacatatctctgtagaaaacttaggaggaggtaatgaaaagttcttaaaatgatagcctttctgagtcagttgtgcagcgttaaatgaaggaaatcttcaggctgtaattttcattctcacctttttggttttttttaaatttcatttgttatttaagggcaattcctgtccctttttggagttacagtagagttgcttatagttgaaagcataaagtttcttcccacctgtttgattttaacagctgaagggattaatacagctgctaggaaggacaatagggggctctaagctggagtataaacaatatgaaattcttgaagtacaaggggcttaaggaagggaaaaaataaagtactgttctctaaagattctgtaatttcagtacaaaacgagattttagagattgtgtcattgaacaacttaattttacaaatacgaagatttgaaattcagatgaatttagaataatctgattcaagcttcaaaactaatgcatttacttctgaaacagtccttaatgctattaaacgtattcctgaatagtctgagttgcatagtaggcttatattaaggaagtaccaatgataaatacacaaggttttatctgtaatgatagtctattagaatgaagaaggaagctcaaggaattgttgatggtgtcaaagcaagtatttgagtgcttattccatttgaggtccagtcagaagaaaacatattccatgtttttaattctgattcattatgtttggtagcgttttcctgtaatcgttagactttggcctacccactctccaggaaaaactagttgagccaccttgtcttttccatggtaggatgccataagaacttcagaattactggttgagtgaattttgaatttgaattttggtaccacgggcttcccccccgccccccttaacattcccttctaagcattgagcatttgttgatccaattctgtgttacctcctgaatgccagagatactgtcttactgtcatgccaaacattggtgtattttgacataatgaaacacttaaattccaagttaaggagtggggatccagtgtattctcgccactccaattgtcttctttggtttgttttgttttgagacggagtctcaccctgtcacccaggctggagtgcatgcagtagcgcgatcttggctcactgcaacctccacctcctgggttcaagccattctcctgcctctgcctcctgagtagctggtattacaggtgtacaccaccacgcccagctaatttttgtatttttagtagagacggggtttcaccatgttggtcaggtcggtctggaactcctgacctcgtgatccgccctcccaggcatcccgaagtgctgggattacaggcatgagccactgttacaggctctccaattctcttcttccaaaatagcaccacaatctggtttaacaagttaggttacagtttcataatacagtccctacccttgtgagtaagctctctgcctggaggtctaattcatgtctaattcatcttggattgatgtctgaagaattaacatcacctaggaaggtttatagagactattacagtccttttgtggttggttttcttgtttgggttttgtgagtaagtaaactggtaaggtataaagaagctaagtgactttaatacttgatattaaattctgaagtgtttcaactttaggaagaactgaattgtgctgtgcacctccttcccaaaactattctaacagagtcagatgtttcctagcctagtggaagcctgaaagtataaaagcctgtgttttcttattcagttcagattccccatcatcgtcactgctcactaacttctttgttccagttttcagtatcttttctgttcatgatatttgggtggacagagtagcacagctgttcttctcgtgggaattctgttggctgtgagaaagacttgggaatacagtccatttcaagaagtaaggggagggcacaactgggaaaggatagaaagcatgttgttctcaacctaccaagagtctgtgctccccatttagagataggctgctcttagactgttctcctcaccctaaaatagttggtttactttggtagaacttggggaagtgtgagaaattaggaggggaatgtcttctcacttgaccactgaaaaatgtttggggaaggttgttgttgcctgtcacctttatctaatcctgcgtggtgacttagactgtcagattttaaactccagtgtttcctaggaggcatgttgtaccaagttgggctgcataactcaccttttttctcctccccctccccctttctttatctccttttgcctttctccagctgtgctacctatgtcttcagccttgagtgtcactgctgccttagggcagcctggacctaccctcccccctccttgctctcctgccccacaacagtgccctctctcagctgctaaccaggcttccccattcccttccccctctactattgcctcgacccctttagaagttccttttccccagtcatcctctggaacagccctacctttgggaactgcccctgaagccccaaccttcctaccaaacctaatagggcctcccatctccccagctgccttagctctagcctctcccatgatagctccaactctgaaagggaccccttcctcttcagctcccttagctctggttgccctggctccccactcagttcagaagagttctgcttttccacctaaccttcttacttcacctccttcagtggctgtagctgagtcagggtcagtgataactctgtcagctcccattgctccctcagaaccaaagactaatcttaataaagttccctctgaggtagtccctaatccaaaaggcacccccagccctccatgtatagtcagtactgttccttaccactgtgtgactcccatggcctctattcaatctggagtggcctcccttcctcagacaacacccacaactaccctagccatcgcttcccctcaagtcaaagataccaccatttcctcagttctgatttctccacaaaacccaggaagcctcagcctgaaggggcctgttagtccacctgctgccttatctctttcaactcagtctcttcctgtggtgacctcttctcaaaagactgcgggtcccaacacccccccagattttcccatttctctgggctctcatcttgcacctttacatcagagttcttttggttctgtccaacttttaggtcaaacaggtcctagtgctttgtcagaccctacagtgaagaccatttctgtagatcattcttccacaggggcctcttatccttctcagagatctgtaattcctccccttccttccagaaatgaggtagttcctgctactgtggctgcctttccagtggtggctccatctgttgacaaaggtccctctaccatctctagcataacctgcagcccttctggctccttaaatgtagctacctctttttcattatctcctacaacctctctcattctcaaaagctctcctaatgccacttatcattatcctttagtggcccaaatgcccgtttcttctgttggaaccaccccacttgtggtgactaacccctgtacaattgctgcagcacctactactacctttgaggtagctacttgtgtttctcctccaatgtcatcaggtcccataagtaacatagaaccaacttcccctgctgccttggttatggcacctgtggctcccaaagagccttctactcaagtagcaaccactctgaggataccagtctctcctcctctgccagaccctgaagacctcaaaaatctccccagttcagtattggttaaatttccaacacaaaaagacctccaaactgtacctgcctctcttgaaggagcccctttctctccagcccaagcaggactcaccaccaagaaagaccctactgtattaccgttagtccaggcagcccctaaaaattccccttctttccaaagtacatcctcttctccagagatacctctttctcctgaagccaccctagcaaagaaaagccttggggagcctctccctataggtaagccagccagcagtatgacctcccctctgggtgttaactcctcggcctctgtaatcaagacagattcttatgcaggcccagactctgctggtccgcttctcaaaagttctctcattaccccaacagtggctgcatttcctttggaaagtgctgaccctgccggggtggctcccacaactgccaaaggtacctcaacttatacaactacagccagcccttttctagaaggaactgtctctttagctcctaaaaaccacccagttaaggaaggtactcttactactttacccttggttcctacagcttcagaaaattgccctgtggctccatccccccagaatacctgtgctcctctggctaccttagtgctggcccctgaaatcccaaagtctgtgccctcaccctctcttcccccagctgggactcctccaggtacaaaaaaggttgatggtatttctcatacttcagcattggcacctgttgcttcctctcccaaagagtgcccaactgaggactctggtgcttctgctactgcatcttccaaaggaactctgacttacctagctgattccccatctcctttaggggttagtgtgtctcctcagactaaaagacctccaaccaagaagggttctgctggccctgatactcctattggaaatctctcatcccctgtttctccagttgaagcttcatttcttccagagaatagtctttctttccaaggctctaaagactcaccagccacgacgcattctcccactcctccatcccccaaaggggcccctactccctcagctgtgactcctctgtctcccaaaggagtaacactaccccccaaagagacccccactccttcagtggtgaatctgcccttccccaaagagggtccagctactccagcacccaaacaggctcctgctctatccatgacttcttcctcccccaaaaaggcccgagcaactccagcccctaaaggaatcccagcttccccatcccccaaaggggcccccacacccccagctgcaactcctccctcccctaaaggaggcccagctaccccatccccgaaatgggcccccacacccccagctgcaactcctccctccccaaaaggaggtccagctactccatcccccaaaggggcccccacacctccagctgcaactcctccctcccccaaaggaggtccagctactccatcccccaaaggggcccccacacccccagctgcaactcctccctcccccaaaggaagtccagcagctaccccattccccaaaggggcatccacacccccagctgcaactcctccctcccccaaaggaagtccagcagctaccccactccccaaaggggcccccacaaccccagctgcaactcttccctccccaaaaggaggtccagctaccccatccctcaagggggcccccactcccccagctgcgactcctccctccccaaaaggaggcccagctaccccatcccccaaaggggcccccatgcccccagctgcaactcctccctccccaaaaggaggtctagctaccccaccccacaaaggggcacccacaaccccagctgcaactcctccctccccaaaaggaggtctagctaccccacccccaaaaggggcccccacaaccccagctgcaactcctccttccccaaaaggaggtctagctaccccacccccaaaaggggcccccacaaccccagctgcaactcctccttccccaaaaggaggtctagctaccccatcccccaaaggggcccccacaaccccagctgcaactcctccctccccaaaaggaggtctggctaccccatcccccaaaggggcccccacaaccccagctgcaactcctccctccccaaaaggaggcccagctaccccaccccccaaaggggcccccactcccccagctgcaactcctccctccctaaaaggaggtctagctaccccaccccacaaaggggcccccaatcccgcagttgtaactccctccctctccaaaaggaggcccagctacctcaccccccaaaggggcccccactcctccagctgcaactcctccctccccaaaaggaagcccaggtaccccaccccccaaaggggcccccactcccccagctgtaactcctccctcccctaaagggacccctactctcccagctacaactccctcctctaaaggaggcccaactactccatcctccaaagagggccccactcccccagctgcaaccccctcccacaaaggaggtcccgctatgactcctccctcccccaaaagaggaccagctatcccatctcccaaaggggaccccacttccccagcagtgattcctctctcccccaaaaaggctccagcaactccagtcaccagagaaggcgcagccaccccatccaaaggagatctcactcccccagcagtgactcctgtctccctcaaaaaggccccagcaacttcagcccccaaaggaggcccagctaccccatcctccaaaggggatcccaccctcccagcagtgactcctccttcccccaaggagcccccagcccccaaacaagttgccacttcttcctctcccaaaaaggccccagcaactccagcccccatgggggcccccactctgccagctgtgattccttcttcccccaaagaggtcccagctaccccatcctccagaagggaccccattgccccaacagcgactcttctctctaaaaagaccccagcaactctagcccccaaagaggccctcattcccccagctatgactgttccctcccctaaaaagaccccagcaattccaacccccaaagaagccccagctaccccatcctccaaagaggcctccagtcccccagcagtgactccttccacttacaaaggggccccatcccccaaagagctcctcattccaccagctgtgacttctccttcccccaaagaggcacctactcctccagctgtgactcctccatcccccgaaaagggcccagcaactccagcccccaaagggactcccacttccccacctgtgactccttcctccctcaaagactcccctacttccccagcttctgtcacatgtaaaatgggggccactgttcctcaagcatctaaagggcttccagcaaagaaaggccccacagctctgaaagaagtacttgttgccccagctccagaaagcacgccaatcatcacagctcccactcggaaaggtccacagaccaaaaagagttctgctacttcacctcctatatgcccagatccctcagctaagaatggttctaaaggacccctttccacagtggctccagcccctctactccctgttcagaaagactcttcaaagacagcaaaaggcaaagatgcttctcattccccaaagggccccttggctcctcctgagtctaaggcgtccacccctctaacagcagctgcctttgagaaggtccttcttaaacttgaatcagcatctgtctatgcagcaccctccccaccagtctctctgcctcttgctccctccccagttcccactctgcctcctaaacagcaatttctgccgtcctctcctgggctggtgttggaatcaccctctaaaccccttgcccctgctgatgaggatgagctgctgcctctgattcccccggaaccaatctctgggggagtgcctttccagtcggtcctcgtcaacatgcccacccctaaatctgctggaatccctgtcccaaccccctctgccaagcaacctgttacgaagaacaacaagggtatttgccttggtttgccgtgtgcatggtgtgtctgtcgtccacacccctcttgggcgctacccaccaatactaaccctgtgatgcgccgctttctccagtgaatctgcttgggtttggatgtagaacatagaatgataattttaaatgcaaaagttctaggaatatgaaaccaaatcttggttttcattacttcagatagatacatagtacattgtgtatcatttttgtgtaatgtggcccggactaccctgagcctgccatgccatctattttacctaattgatctgacattgaaaaccaagacctgccagaccttttcatttgctctaatccctaccacatcactaactaaccttgtccctgggcctgagatttggtaaaattattggagaattgaactatttgtatttatttttccattattagacttagtaatgaccagttgcccagggactcccttttcataaaaatgtagaaatctgtttttcttagcctgaaaatggtgcaggtgtatgctttttttctctcagtagtctttactgatgcttggcctttgaattgaaagaaatttatgtgaattatgtttggaaaaactagagatataggtcatcatcattgagaatcttctaattatattgattagatcacattgctggggtgaatggtttgaaaatgaggctgaatatgtgtacgtgtctgcttttgacttcctccaacccagtttaaaagttgaggggaaaaccacccaacctgttgtgcctccacggtgtgattttggttttttcacttaagtgtatctgggggcaccttctgacagaactttacagggataattggactattgggtaaaattttagagtcatatgggtcattatttgcctgtgccaagaaacaaagaccttgagggaaagaaagcagttacagtatattaaactgctcagctatttctagtgattagtcctcatttctggggttagggctgggtctttactagatgtgtacccgctagttagtgactaagttaggggctatcaagctgacttcacacaagccagttggtttacatttaacattcttaggtctagcatgaggcattcacctctagtccagggcaggctgtggtgaagtaccttctcttataatttctactataaagcagtaaaagttgtttctcatcttagggtctggaacagaatctgacagtgatgaatcagtaccagagcttgaagaacaggattccacccaggcaaccacacaacaagcccaggtgggtattctcttactaactggtattgggtcaaagaagcagggttgatcagggcaacttttgtatttggaactgtgaaccttcataaaggaaaacccacaaggagattgtgctatccagatcttagattctggttaactaatagctgttttatcttcttagctggcggcagcagctgaaattgatgaagaaccagtcagtaaagcaaaacagagtcggagtgaaaagaaggcacggaaggtaagatttgaaaaggatttcaggatcttatgaagcacctttatacagagtggaactgtttatttccataggtttttggggaacaggtggtattttggttatacaagtaagttctctagtggtgatttttgagattttggtgcacctgtcacccaagcagtatacactgaacccaattcttagtagtggtagaatcccgttgaaagtaacagaagtagctaggttggtggctcacacctgttatcccagcacactggaaggccaaggcagatggatcacttgaggtcaggagttcaagaccagcctggccaacatggcgaaaccccatctctactaaaaataccaaaaatatatagcagggcatggtggtaacgctcctgtaatcccagctactaaggtggctgaggcacggcaattgcttgaacctgggagacggacattacattgagccgagattgcaccactgcactccagcctgggcgacagagcaagacctgcctccaaaaaataaaaaataaagtaacagaagttactacggcagaaaacccattctctattcttgtatgaacttttctcagcctggggaaaggctttgctttggatgttgtattatgttccttgcttctttaggctgcttctaaagaggttgaaaacctgatactattttctcttctttaggctatgtccaaactgggtcttcggcaggttacaggagttactagagtcactatccggaaatctaagaatatcctctttgtcatcacaaaaccagatgtctacaagagccctgcttcagatacttacatagtttttggggaagccaaggtgagtaaacttttcttgggcattgttccagaccagggtttctcaacctcagcactgctgacattttgcgtcagatagttctctgttatggaagggctatccattacatccagttttgattacccaaaaactccattgccatatatctcctgggagacctaactaccccctagttgagaaccactgctctaaacctaaacaactactctttctactgtgagggcaagcagtttaaagctgtacaataagttacctgaatgggtttacagagagttgtgaaactatatgatttatttttcaaagactgctaatctactcacatggatctgtattttctaccctgtagatcgaagatttatcccagcaagcacaactagcagctgctgagaaattcaaagttcaaggtgaagctgtctcaaacattcaagaaaacacacagactccaactgtacaagaggagagtgaagaggaagaggtatactaggaaatctttcataatttaactctcgccgtatagcattgtgttcgtgttggtgagctatattaaaaactagattcaggagactccaaagaactgctgaaattgttcttgcctttaatttactgctttttccctctcatctctcaggtcgatgaaacaggtgtagaagttaaggacattgaattggtcatgtcacaagcaaatgtgtcgagagcaaaggcagtccgagccctgaagaacaacagtaatgatattgtaaatgcgattatggtaagtgttcaagcctttgttccttgactccctctgccctgaccaattatgagtgactttattttgtcttgctaaatatcagccaattaaggaacctcattccagagcctcttctgagttgccgtataggttttagtggcctaaattctcctgatttgcctgtaagagttttagtgacctgaattctcctgatttgcctataagaaccgctaattatcttttctctgttacaggaattaacaatgtaaccatatggaagcaactttttttggtgtctcaaaggagtaactgcagcttggtttgaaatttgtactgtttctatcataaataaagttatggcttcttgttggatgaattcagtcggtgactggtctcttccccgccacccccccacaccaaaaaaaaaaaaaacttaaaaaggttctagtaatttattaattactcctaaggcctccctcatttgataaggtttagtgccacagatttcccacttagaa

SEQ ID NO: 7282 - DNA, 310 bp, Homo sapiens
cccaaaaacaaaacaaacaggctgggcatggtggctcacgcctgtaatcccagtagtttgggaggccgaggcaggcggattacctgaggtcaggagttcaagaccagcctggccaacatggtgaaacccgtctctactaaaaataaaaaattagccgggggtggtggcacacacctgtaatcccagctactcgggaggctgaggcgggacaactgcttgagccctggaggcggagattgcagtgagccgagatcgtgccactgcactctagcctggccgacagagcgactcaaaaaaaaaaaaaaaaaaa

SEQ ID NO: 7283 - DNA, 227 bp, Homo sapiens
gcactttgggaggccaaggagggggcagatcacgaggtcaggagattgagaccatcctggctaacacgttgaaaccccgtctccactaaaaatacaaaaaattagccgggcgtggtggcgggcacctgtagtcccagctgcttgggaggctgaggcaggagaatggtgtgaacctgggaggcagagcttgcagtgagcccagatcacgccactgcactccagcctgg

SEQ ID NO: 7284 - DNA, 370 bp, Homo sapiens
agaaagaaatgggaagaaaaaggaagagaaccatagctacgttgtgagggcattgcttcaactctggtaacttcatgtgaaatgactacaaaatgaattaatatgcagtaagagagccagtgccccaccagggcacctttccacttgctggcacacagatttaccacaattaggatactgcttgtcctgtcatgccgggagagtctaaattactctgactttcaagaaaccaaaaatatgcatttttgatgttaggaagatttactgtgcattgggctgtgtcatttgatgaggaaaaaaccaaatgatctctttatgaaaatgaaggtaaaatatatgtaaatgccattttaatctaactttttatatg

SEQ ID NO: 7285 - DNA, 370 bp, Homo sapiens; identical to SEQ ID NO: 7284

SEQ ID NO: 7286 - DNA, 373 bp, Homo sapiens
cctcggctggagagacagtgcagctagtcccagcagccactgtgcttgggcctggccagcccctcctcaggggtcacggcactgctcacctggtgactaggtcttctcagccagatcagttcatgtgctctggtgtttttgagcttctggctagtcctcagtttctcagacctggttaatcacagtgtggagtcatttttcataactgtgcacctcacttgtttgatgcatggcaagggaataattaaattaataaacctacagatattcccccttacagttttcaaatacagtaagtgaatttctactataaaataggtccaaagaggttttattgtttcttatttgaaataattaaagaacatttatgttt

SEQ ID NO: 7287 - DNA, 373 bp, Homo sapiens; identical to SEQ ID NO: 7286

SEQ ID NO: 7288 - DNA, 445 bp, Homo sapiens
gtcaaagaacactttttcaaaggatgtgacatttcaaatgagaccaaaggatgacagattgggtcctgtgtgctacttaagtattttctgttttatcctaagagtacttgagaaaccatggagggtttaaaaaagaatggcacgattagatttgcatattgaaaagtcctctggctgcagtgtagagaatcgtagtgttactgaaagtgctggtcaagcatcatcgggaatgaacttgatgagaaaggaacttattacagaatattaatttacctatttttttccttcacagggaaatcttgctacaatgtcaactaaactaaaccctttactcagttgctggcacaatcagcattgaattagggaatgtgtgagctgacagagaaaaactagttaggaagctgtagtaaataaaacaaggaaagtccacccaaatttctagact

SEQ ID NO: 7289 - DNA, 445 bp, Homo sapiens; identical to SEQ ID NO: 7288

SEQ ID NO: 7290 - DNA, 1099 bp, Homo sapiens
cttcgcctccgcccccacatacacaccccttcttcccactccgctctcacgactaagctctcacgattaaggcacgcctgcctcgattgtccagcctctgccagaagaaagcttagcagccagcgcctcagtagagacctaagggcgctgaatgagtgggaaagggaaatgccgaccaattgcgctgcggcgggctgtgccactacctacaacaagcacattaacatcagcttccacaggtaacctgggcagggagtgggggtgacggaaactggagttcctattgtggctatcgcttgtgtggaaggaacaggaggattctgctaattctaataactttcccagctggtagcagggaagcatcgtatgtcctttgtgtttctcaaatctgcccaattgttctctgctttcggggaagctttactcattttctaaaagaaatccaagtactgtttggtcattaccccttagtaaaaaaaagtaacaggaggatatcgtaattttctactgttttattcctctgttagaccgggccttgacatgaatgacgccgtaagggagaaagagatcttcccaatcagcaatcaccgtaaaagcctgctgtgttcccgttaaaattaggaaattctcactagatgaattgacatgggaggcatttagatttctaatagtcacatagtaattctgcggaggaattgagtcatctttgatagccatggaattaagcgatgttaattaaagtgcaaaagataacctttctgttcttactagaatagagtaataaaaagaacctaggttttcttttgtttgctggaagaaaaatcaaaattctttagttctgtcaaaccagaactcttgaaagcactttgaacaatgcctggaaaataacaggtactctgtaaatgtttaccttctctgcaagtgcctgccacgtgcccgaagaaaagacacattaaaaagttaagtgacaccagtcctgattttatatattttatatacctaacaacgtatatgttagtatgtagaaattatatccttgacctttttccctacctattacgaactgtacttttattaaaagctgccacttaaaaaaaat

SEQ ID NO: 7291 - DNA, 1099 bp, Homo sapiens; identical to SEQ ID NO: 7290

SEQ ID NO: 7292 - DNA, 6241 bp, Homo sapiens
caggtcagaaagggttctttgtttgaaatcatctcctttccagcaaagactgctttaactagcataatatatgcttcatatgcagcactaatttatttggtaagttaagaaaattattagaatctagaaataaatctacttattttgtgtaatgttaataatactgtgcaatagtatactgtacaatatttaatgttaccattcacagtctcgttacacaaaacaattttatattaaaaatttccttttctgatgagccaggtcaatccaccaaaacccagtttgcttaaataactaaaattttattttcataaagtttattaccacttgaatatttttggtcaagaatttttagttttactgttatttagctacagttgtttttttcagccattgtaccatggttggctaaagttcagtattctaacatttggggtttctcactttggggaacgcaggtattagtgtattttggattacaagtgctgtgcatgagaaaaatataaaagattttttaattataagggttttattttctattaatagccacttaaaaaaactgtaacacacaaaaaggaaagtgtacagcttaatgaattatcacaaaatctattaagctctatactacccaggtcaagaaacaaaacattaccataattccagaagcctctttcttgcccctcacaatcactaccctttcctatacaggatatcactattttgacttgtaatactactgatagtttgactgcttgaattctatataaataaagtcatatagtatgtattcttttgtgtttgtcttttgcccaacactgttttaagatcattcactgcctgtagcagtagtttgttcattttcactgctgtgtagtattcaactgattgactgtatcaacatttatttatccattctactgctgatggacatttggattatttcattttggctactatgaataaggttgctataaatattcctgtacatatcttttggtgaaactgctaggccataaggtatgcatgtgctgatacctagtagatattgccaaagagttttctaaaatggttttttaacaattaacacaaatctcagttttaagtccaagttgctccacatcattactgacagtattgtcaatcttttccattttagccatttttgtgggcatgtagtataatcacattgtggttttaatttgcatcacattgtggttttaatttgcatctccttggctattaatgagattgagtacctctgcatatattagttggacatttggatatcctctttgttaatttctgttaaaatctcttcttgcttttctattgagagatgtctttcttaaaacaatttttgatttttactttaaaaaacatattctaggagcctgtccttttttgattatatatggacaaatttcttctcttactccgtgacttgccttttcattcttttaataatgtcttttaaggaagaaattcttagccaggcatggtggtgtgtgcctataatccctgctactcaggaggctgacgggggaggctgaagcaggaggataccttgagcccaggagtttgagaccagcttgggcaaaatagtgagatccagtcttaaaataaataaaagcatatcataattttaatgtcatccaatttattaatcttttcctttatcttacgtgctttctgtgtcaaagagaatcttgacttacacctaaggtcatgaaaatattctcctgttgtattctagaagctttgttagtttacctttcacgtttagatttataatccatctggaactaatatgaggtaagagtcaaatttttccccatgagtatccaattaatctattttttctttaaaaaaagccctttttctattgtcctagaatactcttttttgcataaatcaagtgtcctttatgtgtaggtctgtttatggattctctgttctattcagttggtctatttgtctattcttgtaccaattgagcactgtattaattacaggagctttatatcttaataactgggagaataagtcctctttccggttcatgaatataatatatccttctacttattttgatattctttaatttcttttaatcatttttatgtttttttgttagcattcttacacatttgttaatatatcaaaacatacaagaagtcccaattaagagccaagcaggtgtgtgcatgtgtgtgtgtatgtgtgtgtatgtaagttgactagatagttctaaaatatatagggaagtgcatagggtcaagaatagctaaatatccttgaaaaaaggtagaacttacttttaaacatattaattcagttttttaaaaactaaatttatcaactattttgccactgttttaaattttcaagaagtgctcaatattttaaatgtgaatcttatacaaaattggcattcaactaagctaggatgtaaatacattgcacaaaatgaacaggatgacatgtctatggggaaataaaaactagactaacacaaaaattagatttcaatttctcaaaggctgttgaaatcatctcacacaatttatcacgccatgaactttataagcaggtaatagaaacaaatttttggtgatctgataattggtcatatatgtatctaaggcctgggagaggtcaggttacaattttggttttgaaagcaatatatatgttagatgttaatgtcctacgagtggaaccatatcaagagaaaagacaggtaagtcaacagaaatatgaagaacagcaatatttaagtgagctaaaaaagaatccatttgggagacaagaagcaacaatcagaaaggcagaaagaaaatcaggagaaatagtgccaaggaaatagactcaggatgttgtgagtagttaagtgtcaaatacaagcagaaaaagtcaagtaaaatgaagatttgaagtgtccattagatatagtagtaaagatgtcaaggttaaccatctcaaaaatgatttcagcggcataactggataaggaagacagaaataagcaggtttcagagtgaacagaaggtaataacgtggaaacagactctggtttgactaagaagacagagtgtgtagcagtcaatagagaagcagattcccagagatttttaatttttaaatattaggatggaagatactcaagtatgttataaattgcaggggaagatccagtcaagagtaaagaggctgaagagacaaggaataattgatagagaagatggtaggatgtaggttaaaaacaaagatagaaggatactgaccttgatcaagaccgttcattcctgagactgggaaaaaggtggttagaatgtgcacaaatataattttttgttggtgagggaggagagaatgtttcaaataggatagaactttccaaccttttttgcaacatgaattcacagagaatgatcatattttggataaatggatgaggctgtttacagctaaaggtcatgactttaaaggtttctagtgctgggtctggatacataaaagtgcaagtaacaaaggatatctgaatgacagtatcttaatcgataaagatacttaaatatcttaattataagttgggagttaggcaattcccaggtttgtacaattaggtccaacatgttatcaaagcccaggtctgaatgtccgtgcttcccccaaattcttatgttaaaatctaatcccaaggtggtggtattagcaagtggggcctttgggaagtgattaggtaatgagagcagagtcctcatgaatgggattagtgcccttagaaatgaggcctgagacagctgccttgtttcttccaccatatgaggacatagatagaaggtaccatctatgaaacagaaaaccagccctcaccagaccctgaatctgccagtgccttgatctcggatttcccactctccagaactgtgagaaataaatttctattgtttgtaagctactcagttcatggtattttgttacagcagccctaaaagcctaagacaacagggtctttccctctttttcttctaaaaactttttagtccttaggtttgttgcctcatgatcaagcatcacaatactatcagtgttcaaagaaggaagagggagataggtagagggaaaagacagtctatataggaggaaaaacttttccaaaaatcctttctgagttccatcccagcagacatatcattttatttcattagttacagggtagctaatgaactaactgcagggaagtgagggaaagtgtcttgtgttcctcaattctatagcaagaggcaggcaagaaggaggcaggaggcaggagggcaagaggaagttgaggctgttcaagcctgaggacctcaatccttttgctgttacctctttcggaaaaccttctaagtgtttataatcttttatattaccttgaggcatttcttcggtgaaataaactggtttaagtcttctcatatttcatgaattttccgttctcaccgcgtgccttgaatactcagcatcatcatcatcttcatcattagtaaacttacagagtaagtttaattaatgcagtccttagtggttctgaatttctgaagttatttttctctgttttatttttgacactcctctccttaaagtactgagtggcatatttggaggggacagtggatcacatatttgctcagaaaccactgatagtagcttactaaattcttactgatatgttgatgtcctttcattgcacatgtaagtataagcaaagtctagggggaagaaaattaaaacaaaaaaactactttgagaaaaaccatgtttgaggacaaattccatctctcagaaaatgtttcatttaattacatcaagagaataaagatgtaaaacagctaatgaattggggggaaaagatgtaaaacatatatttattgaagcatactaggttttaaattgctctctagattgtaatgtattatttagaacaatctcccaatgcttattatattatgtacctgaaggtcctgaaaagaagtgttttttattagattatgtagattaaatgactttatgtggaacactatattgtatgtttttaatctgtggttagtagcttaaaaagaaacttcactttacaaactctttttattgtataggcagtctgtgttaatgctgtgctgaagaaggtaaagaacatcttccaggaagaagaatccataaggcaaaacagagaggagagtgaaaattgtagaaaagccttttctgagcctgtgctttcggagcctatgtttgctgaaggtgaaatcaaagcaaaaccttataggtcattgccggagaagccagacatttcagattaccccaagcttcttgctaataagcagagtaataacatccaagttttacattctgtgtttgaccaatcagctgaaatgaatgagcaaatctgaatacaggtatcactgaacagaacttaagagttatctatttaatggcacatttcatctgacaaaactcagagtctagtttacatattctgaattgctctgctttcttaaaaaaaagagaagggggctactattaaaatgtcattttctagtatttacatgatagagtaaataaaatgaatattgatgtggaatatatgtactgactacatacttttaatgaacaagaaaatccatcctctggtaggttagactttacactgtggtttataatataagcatatttataatacattaatgtttttattaaagacttgttttgagtgtctaattctttacttgggaggaaaaaaagccccatcaagatggtgcatatcaaaataaaagaatatttattttttatatgcagactggagagtttgagtctgcctattattattttgtaaatcacttgcaaagttatgaaggatttgcaattcacagatgtcataaatttataaaacaaaatattacttaccaatgtgatgagaagatttctgtatatgaagacagtacatgatatgatttttatttctagatttagagatacaaatttagaatgaaaaatcaagtgcacactactcattattgccagtggctcctatgagaaaatatttctgtaattattcctgcaaaccagggctagtttttgcctgaagaaagtactttgatttcttctgtacactttatattctggacatgtgttaagacctgactgggcattgaaggattatcacatgatagaatagactgggatgtaccttcctgagagatag

SEQ ID NO: 7293 - DNA, 615 bp, Homo sapiens
aacgtttttaaaaatctttatttgaaaatttcatataggcattcaaagaacattggctcactgaataggagactttacatctctcatggctgggcagcagctgtgtctggcttccttacttcaagatctgccttgatcacagatcacttaacagtggttaagtttcttattttcaagttcagcaggtaaacctatctcatttttggaggcattttttaagtataaaaagtctgttatttaggaaggttgcacagttcagaggtgaacatttcaatgtatttaaactttcctaaaaatgtaaaaataacaatcaaataggagaggtagcaaatccacagaggtataaataaaacaagaatggaagaatgctgataactgttaaagctgagtgatggaagttcattatatagtctgtttactttgtatatactaaaacttttccagaattaagtctgctacatcaaacagggattttttcctattttaaaaattaaattttttaaattaaaaaattttttcttactaatccttaatttttacctattatttgtttactccaaatttatttttatccttcttaaacagaacatcccaaacctataaccttcaggtttc

SEQ ID NO: 7294 - DNA, 3099 bp, Homo sapiens
ctttaggacccgaggcaggctctgggcccgccgggtccgttaatctcaccgcgccgcaaggggccacgttttaccacttgatttagcaaccctaagcggtttggaatctgctttgctctcacaggacctcagcccgtcgtgatcagattctcccactttcttttttctttcctggaatggagtgggcagtctttttccatctctaccgaagttgatgttcatttttaatcttttcgcccctcacgcttttgtaataatggtactaagactgagtgttatttagattttattgttgttgtttgtgtttaacgcgaactatttaggcagcccagggataatgctggccatatagagatgcgcctgattaggtctcaggagtcaattcggactgggcaggtaacgaaagggcgagaagcagccttttcactgtatgaagaatgcaacgtcacattcgctttcaaaaacaaaccgtgttaaaattgtatttatttttcagttaaattgttcatcatacattttttccagttaaaaccattctcaaggttttgcaatggcgtttctttttttttttttttgagacagtctcactctgtcgcccaggttggagtgcagtggcgccgatttcggctcactgcaagctccgcctcccgggttcacgccattctcctacctcagcctccttagtagctgggactacagacgcccgccaccacgcccggctaatttttttgtatttttagtagagacagggtttcaccgtgttagccaagatggtctcgatctcctgacctcgtgatccgcccgcctcggtctcccaaagtgcagggattacaggcgccagtcaccgcgcccggcgcaatggtgttttaagttgtttttaagttatttttatattaagttcgtagaaattctcactcccactgattttatttattttttaatttttaaaatttcttgacagggtctcactccgtcccccaggctggagtgcagcggcacggtctcggctcactgtagcctcgacctccctggctcaggtggtcctcccacctcagccccaaatagctggggctacaggtgcgttccatcacacccagctaattttttgtatttttcgtagagacagggtttcaccatgttgcccaggctggtctcgaactccagggctcaagtgattctccctcggccttgcaaagtgctgagattacaggcatgagccacggcgcccagcctcccactgagaattaatgctgcttttttttcccgtcaagcatgcagtcccaagtcgccctgtagttttcctgctttcgatagaagcctgattatagagaaatattttaaaacaaaagagcaaatgctatgataaatggcaactgaaagtgtttcaattagagaccataaggtctggtgggggaactccgcttggatagaacagacctggctgaaaccatcagggctgctcagcgctagtcagttgctcttcaactggaattgggctcagtgttgtcaagtattttggtccctaaaaggacattgtgggctatttcaattttaaaattgattcaaatttaaaattgattcaaagtgctagccaaacaaaacaagtaataggccaggtgcaatcccaggctgatagtttatctttgatctaaattatgaaactgtttagaacagggagtttgtttattactgttcatgtccaaagcaggtcccctcacatatttagtaatcaataaatgtgttgaataaaagaaagaaatggacactgtccttaaaaagttcttaggaataaggtggtagttagtgattgcctaaaacacctctagaaaggaaaagatgataatatttattgaacacctcccatgaataaaagtacattatctcatttaatgcttctgcagtcctacttagggattccctgccttctgcttatgttatttattattttttgtggagagggggtaactcatcttggcctaccaaagtgctgtggttacagacctgagacaccaagtcaggacccctccccctacttgagagagaggtgtgaagacccttgtcaaaggccatatggccaatgaatgaaaagctaatggcctctgatgcaactagcagtgtctagtgatttgctatttgagcaaacacattcattgctggtgggtattttatctgcctgcatgggaactgaagcacattgaaaaatgaaacatgtcttccagaagtttgggccttctaagacacttctgtgactactttggtcataatttgataatgctttttggagatggtggcatcttctccctgatgactaacgaaggggaaaaggaaaggatgcaaatatttatttggaacaatatgccaggcttttaatatccattaactaatttttataatgaccctgtgaaataagcttatcctcattttacagtggaggcaacaggctcagactggttaagtcccaggtcactcagctattaaatagccaattaggagacctgaagtcctgctctcaaactcttgccattctactttatgctgagctattttcatacttgcttgttatccaatctttaattattttgtggccatcatttacctatataggttcaatagaaatattttatactgtgagttcaaattaacatctggactgtatggctaatgtataatactccctaattatgtagctgttgattttccagagcactagaatgctgcagggttggcctttggcctaaaccatttctagctatggacttgccagatgagagccagtgggacgaaaccacctgtggcttggctgtttgtcagcacccacaatgctgggcaactatccgccgcattgagaggggccatcctcgaatcctcggctcatcctgcaaaactcccctggatgctgaaggtgaattagccagcttctgtcctctccctcacgaggtccttaacgtatttatgtatgtggctccctttctccaggcagcaggttaacatgttttcttctggtctgccttcttagataaactcccagtgctcaccgtggtagacatcttagattccggctttgcagctcatcatttaccagaatgtacctttactaag

SEQ ID NO: 7295 - DNA, 985 bp, Homo sapiens
atggggtaacgaaccgctggactcctctcttcctggctgagagcacatcactggcattcagcgtcttccgctttcctttcattgcaaagttgttagcactgagagaagagaaaggctgtcagactccctcttgtttgtaaggcgtgagtgggaaaaggagcacccagaggtggaacgggaaagcctgcctcttacatgtatggattttggtgtgacagggataagtccttcccttctctgcacaaaaaagctaaagcaaagtgattttgttgtgttattttgcttcagaacttgtaaaaactggcagaggactgtgaacatgtccccaccgagggagaacacaatcgttggggtttgtaggctcccagccagcaactcccagccaggtatccccgcgcctcccttatgcctctgtcccgctcaccaggatgtggcgtacagcacgaagacgctggcggcgcgggagatggcgctccgggcctccttggagatgttgacaccgtccgggagctgcgaggagaccgggggtgagcaaagctgccgttccagcacctgcttccctcctgcccgttcgtccgccccccccgagctgctcaccgcctccttgatgatcctggtgatcacggcattgggcaggtttaggtcctcgggcctctccgccattgccgccgctggggcttaaactccccttcgcctccgcttcagggagctactgcgtccggacttcccgcgtcgctacggtctgaccctgcgaggtttccgttccgccccacgtggcctacagtgtcccacagtgctctgagcgccatagcctccctcctccccccacagccccgcctccgcctcaaataccggcgcatccggattttgaagccgcagtggttttggcccgccaaggcttccatccaaccctaccgcaccccgcacgcccctccccaggtccatttctctgcttctcgccatcgccgcgtcgggaaccttctca

SEQ ID NO: 7296 - DNA, 960 bp, Homo sapiens
atggcaaataatggaacataaactttaaacagttagctttgaccagaggtcagcaaatatcctccatgggctaaatccagatgtccacctgttttcataaataacgttttattggagcatagctgtacccatttgtttacatattggctatggctgctgtctagttcaacgtgagagttgaatagttgcatcagagagtatatggtccacaagcctaacttattcactctctggccctttgcagaaaaagtgtgctgccttagtctatagaaaatggacttttcccaccattcactgactcattaggagataggcatcttctaaagattttttttatattgtgtaatgattgatatatagataaaattatatattacttgtaaggtatgatgaataacaacacttaaaaactcatcacacctaaagacatggaaagctgccaattacctatatgtatgttcttcctattttcttacctctttccccatgtcattttttattgttccttgccattttttaatcacacatgtatgttctccaaacatactgtttcattttttgaagctttctacatatagtgtctgaatgtgaagtcttactcaacttgcttttttgagtttatgtttaaaattcattcttgcgcttatatgcatggatggtttacttgctctatagtattctgtgtgagtataccacaatttaagtgttcattttcctatcagttgacatttgtttttagtttttgttggtagaaacagtacactcaaaacatccttgactgtcccctggtacacatatgcaagagactttatgcgtaagagtggagttgttggcttgtcaagttttgcaaaataatgccaggtattttccaaaatgatgatattctcttgagtattacttccctttgcaatgtttttattgttaatgtagcatatataaaaaagtatctcataattttaa

SEQ ID NO: 7297 - DNA, 960 bp, Homo sapiens; identical to SEQ ID NO: 7296

SEQ ID NO: 7298 - DNA, 1831 bp, Homo sapiens
aatctttcttttaaagatacggatataatgcaggagaagctacccaccatgcggtggattctgcggtcaatgttggcgtaactgcctacaatattaacaacattggtatcaaagcaatggtgaagaaaactgcaacacaaacaggacacactctccttgaggactatcagatagttgataattctcagagggaaaatcaagaaggagcagcaaatgtcaacgtgagaggggagaaggatgagcagacgaaggaagtaaaggaggcaaagaagaaagataaatgatgaagtgctgggaatcacttataccaaagccttatgaaatggatgaaattttgttaaataggcaaatgtggaattcctcacagattaaccagtattttttaaatgtattcattcctacaaattaactttcataaattttatggcatgtcttctatttaaaaggaaaagaataagtattcttgcatctggccttagaaatgtgaagttatattctcaagtttatttttttccaagtgtagctaaaatatttttgcaggtaaaataaagctgatagtacatgtgttgttcaaaccttgttaaacctaatattgaactatttttatatctgctgtctttcagaaggcaaataggaaactatatatttgcttaaaaattggcatttagtaaccttaattctttttatagaaggaatgacttaaagtattgtcccctctttttgcactaattgtggatttttttagatgcttctcaaaattttcagtgtgtaagctaaacaaaaactaaaactaagaattctcaaaaaaacttgttcaaaacagggaaagactgatgaaaagtaaaatggactacttttgtaacttacctgtttgttaggaaatggaatggtctctttgatttaaaataaataaaaatagattattacgtcttttgtattgagactgtattgttatgagcctaggaaatttgggaacatgattgtattgtattaaaattcgaagtgattattatcagcttaattggattaaaaaagtacttcaagaaattattttatcatatctgcttctgtttttccaaaaggttaaaacttgtaaaaaaaatatatataaacaattgagtttactaatggtaaacatttttattctgggattcggtcattggaatttatattaaaagacaagttattaaaaaggaaaggttctattcataatcagggtaaagaatatgaaaaccttagacgtaatccatggtggataggcattatggtttccactttggcagaaggcagactattcacagccctatttacttacataggctaaaaaactatgtaactaaatacctaatggtatttaatttttgtttattgaatttaagagattggtattagttttcatagctgtagtccattctaataatttctgatcttctagtggctacttaattagacattatttgaagctgtctgaagaatgcactttatgaattaaaaaactgaattgcctgacctcgttatcacatgagcttatattttgggaacacatagaactgatggaggcttttcctaaggccaaggataatgtactagttgttaaaatggaaataaaagtgaagtggtaaatagcttacagacagtctatgctttgtttaagaaatggaatggcacttcatatattctcatttgtgggagctaaaaattacaataatcaaacttaaggagatagagagtagaatgatggttaccagaggctgggaggcattgaagggatggggagggaagtgaggttgattaatgggtacgaaaatatagttagaacgaatttgttgta

SEQ ID NO: 7299 - DNA, 430 bp, Homo sapiens
cctcccctcctcccccaccccgtagataatcagttatttaacccccatttattgaatagttcttttcttcagtaatttcccacaggtctttctctatatatagagtatgagtgtttctgggctcagacgtttgttccatctgtcatttcttttgttcctgtgccagtcccacactgtcatcattgtaaattagtaagccctactgattgttagggcaagaggctcaattccctcaaccaaattctttaggagtattttggctgattaaacaagttccataaggagtttaaaatcttcccacaaagaaacatcagccccagatggacttacaggtgagttctaacataccctaagaaaataatgttaccttgggtgcagaggtgcacacctgtaatcccaacactttgggaggctgaggttgggtggatct

SEQ ID NO: 7300 - DNA, 32184 bp, Homo sapiens
ggtaacctgccacctttaagtggaaatcaggtaacaaagtttcattcactttttttttctcatttctgttttccccagtctatgattcaattcattttttattggctggatataatctggatttatattataatgaattttagaatgagactcttgtttcaaccataaggatgtatgataggaaactattataagaaaccagaacaagaaaattatttaatagatgtattctgatttattctcttatgtttttaaattaagatattttggaccaagagttttcatttatttatccattcatcaaatacatgttaagtgctttctttatgacagacctaatagtaggcttaaaggatagtataatagtgaacaaaacagagataagcgaggcacttgtcctcttaaaatatattcaggtaggagatacgaatcataagtaaacaatagctaagcaagataattaaatatgtctccaattttgcagaaatggagcaagagccacaaaatggagaacctgctgaaattaagatcatcagagaagcatataagaaggcctttttatttgttaacaaaggtctgaatacagatgaattaggtcagaaggaagaagcaaagaactactataagcaaggaataggacacctgctcagagggatcagcatttcatcaaaagagtctgaacacacaggtcctgggtgggaatctgctagacagatgcaacagaaaatgaaagaaactctacagaatgtacgcaccaggctggaaattctagagaagggtcttgccacttctctgcagaatgatcttcaggaggtgcccaagttatatccagaatttccacctaaagacatgtgtgaaaaattaccagagcctcagtcttttagttcagctcctcagcatgctgaagtaaatggaaacacctcaactccaagtgcaggggcagttgctgcacctgcttctctgtctttaccatcacaaagttgtccagcagaagctcctcctgcttatactcctcaagctgctgaaggtcactacactgtatcctatggaacagattctggggagttttcatcagttggagaggagttttataggaatcattctcagccaccgcctcttgagaccttagggctggatgcagatgaattgattttgataccaaatggagtacagattttttttgtaaatcctgcaggggaggttagtgcaccttcgtatcctgggtaccttcgaattgtgaggtttttggataattctctcgatacggttctaaaccgtcctcccgggtttcttcaggtaagcgaaagaaaaatgaaagcataatttgaaatacgtgtagactacatcatttttatttgttaatgtttatgtgtccagtataagtgcaaaaagataacgacaaattctactttgtttttaaatatattccatgaaattatgagccttgaacatgtttgtgtttgtctttttctttttttaaaaaagatatattaatagttttattttggtattaagtttgtgatgataaaacttgagaagagtggtcatccttacatttttaattctttatctgaagaagaaatctaataagtttaatttcgaaagggatttatgtaattcctgtggatgtatagctgtaaatattcacaaatgttgtcaagactcagctgagggtctgaactgggagagaccgagcccatggtccagaacagttgttctcaacccagggtagttttgcctccccagagaacatttgacaatgtctggaggcatttttggttgtcatactggaagttgattgctactggcatagtggatagaggccacggatgctgccacacattttcacaggacagccctcatgaacaaaaaaaaattatcctgcccaaaatctcaactatgccaaggttgagagaccttggtttagaagtcgagactgtggtgataatttaagatgtaattccaacagtccaagcagagaaatttaccagaatgcacttggtctaagagtaaagagtgctacataaagattgatgtcagggcattgctgtggatttagtgaggtactctgaagagagtggtccagtgacagtctcgttttaaaagattggatgtaggtataggaagatgagttcttgaaatgaggactcagtatacgttgaatataacaaaggagtttgcattgaagaaagatcactatttaagcaaaacagatgttttgtccacagtccaaataatgtggtttagtaatagcacagcttatctctattcattttctcttttggtattctctcctgttgattcttatgtagtttttatatgaagtcaacttgaaagttgtttaaagacaattcgaggcttgctagggatgtgtgagggagatactttgagggcattattgaaaggaaatatttgatactggacagaaagaatattgtgaatcctgtagattattttaaggaaggagccttaaggttacaaagagtaggcttattgattggggtttgtagtggcgggtgataaaagctataacagtttctactaatagtgttgcactgtaatgatggaataaaaaatctttgggtccttagcaactggagatggggtagtgaatggcagaaatactgtaccgtggttacattcactcatccattgaaatgacttgtactttaatacaaatttgtccttagtgcatttaattttgtttttaatctttctcatgtgtattttttgtcctaaacgaaaagtaaaattgcacccaaaatttaatttgagtctctttaagaggttctcatttgcttgtattcaggtatttgtagcagagtgtccttaaaaggagttaacatatgtgtttactgaatgtttttatccaaaaaaaaaaaaaaaatacaataataatccaactaaatactagaagttagatatttcctgtgctaaaaatcactgttaaaatcactattggtctaaataggaaattaagtttttttggttttaggtagatagaattctggaacttcaaaaaaagatttttcttttggttttagttttaataccaaatactttttaaacctgttaaatctataattacagaaattggacatgagattgccctctgaaaatgaaactgggaaaaatcagcctatggtggatgactcacttatctgtaatatcctgtcctaggaaaggtctataaagtgttggtttttttaaagacaatttggtgatattgcagttcaattaaggtgaccaggatatagataatctgaaagaaaccatggaatagtttaaaaaaaagaaaaaaaaaagaaaaacctttcctaagttttattttagaataacttttacaatttttttgtcaactctataccactgctattacttgctttatatttttactaaattgtcccacttgtcagttttatcttaataataactgaaattaagggaaatatgtatttttctcatacatattaaaataaataactactcaaatgttaaaagtttgtgggtaagactgttttgatgttgagcacagttatattttggtttctcaaagaatgtattgcattagaaataaattaggcagccaggatgtgagcttatgtctgtgtatgtactggcaagccgacctccgcagatgacattgcaggagagcttttgttattttgcttttaatttcacaatagatagataatccataaacattaacttaatctattctgttatgtcaggttctcttgggtttagtacaaaaaattattccatgttgtgagtgagtgctgaatttcttatttattcatttattttttctttgagacagagtcttgctgtgttgcccaggctggagtgcagtggcacaatcttggctcactgcaacttccacctcccaggttcaggtgattcccctgcctcagcctcccaaggagctggagctaggattacaggcatgcactaccacccccagctaatttttgtagttttagtagagatgggggtttcaccatgttgtccaggcaggtcttgaactcctgacctcaaataatccccccacctctccttggcctcccagagtgttgggattataggtgtgagccactgtgcccggcctgtgagtgctgggtttctaattaaaatacttgttcagcttctctggtccagactatatgtgttaaaatccaagctccactttttagttgttggttctgggcgacttaattgacctctctgtgcctcaattttcttgtacataaaatgacaataatagtaactgatttcataggattgttaggaggattaaatcagtaaatactattatttcagtaaatatttcaagtaaataatatctgaaaatagtttatttaccacaaaaggaatatctgatttcaataacgaaaaccttaatttactttgattattatttatttaaagctggagtcattattggttaacactaggctagttaaggccatcagctttaagattgtataattagtggagccatggcacatttagcacagtccttattgcagaaagatcagactagcaaatgattaattttcttggggatttgttgatgttgatgtttcttaaagccttttaaaatatgtttccaactttgaagtgtttattttctagtataacaattttattaaaacataaatgaaaatctagtttcatttatttatatgtatattttttttcttctaatgaatcctttcaggtttgtgactggttatatcctctagttcctgatagatctccggttctgaaatgtactgcgggagcctacatgtttcctgatacaatgctacaagcagcaggatgctttgtgggggtcgtcctgtcctctgagttaccagaggatgatagagagctctttgaggatctgttaaggcaaatgtctgaccttcggctccaggtaacttgtgtgatcatctttagggtgaaaaaaatctactttaacataagcacttcagcttttagagaaattgtaataacctctactgtaatcaaggttaggagactgacagttcaccatttgtttgtgtgttcacaactacatgcttggaatttgctgtaatagtggttaagattgtgagctctagagtcaaattgcctgtatatgaattcaaactcttccacttaatgaccgtttagctcagctgttcctgatcttctctatactttaatttacttataaaatggggataataacagtgtccacttcattgggctgtggtgaaaattaaaaattaatacattaagcacttatatcagaacgagtagttatgctctgtgaatgttagctattgttttcaccactgttttattgctcagctggaaaagtgtactaatgggtctaaatggtgacatgaagataattttagctttagtagataggttatgttggacattttaaggggtatggttggcattctgaggaagaaacaggctttggttgagataattatctttgttcttgtggtaaatgaaggccaaataaaaaaataaaaagaaaatatgatttaaaatatgatcatcctggaactttccttatttggcatgtttcctctgcccacatgcgtacctgtagaaatagagtatttctgtttaacagggaacttgaatagagtattatggagagactttctttatatattgttgtagcaagagggaaaaagtatttttgattatgaatattgacagtcatcaggggttgaatgaggtgggcattataatagtataatcttttattctctccttcaatcagcagatacttggaattcattatttaaccagttactgtgttaagtgatgggatgggcaaagtatgagaacaggagaccacgaaggtgtgggggatgtgtgtgtgtgtgtgtgtgtgtgtatgaaaatataaaatcagcccctgttcacccgagaatgacctacctggtggtcaacaaaccaatactttagcatagcagcaattatttaacaaaatacatgatcagcatacagaagtgtgtagcctcattgtacttgtgaggaggaattcacaaaggcaggaatatggtcaaatgaaggagttcatcttcacttcactgtttactgagtgaaatgatgctcttaagtattcacagacctaatgtggaactatttctcccttcacccctacgttaactggacctgtattactgggctttaggaaagaaactaagcagacttttaggttgtatgtttattttctgtcttcaatttaattttttggtatttgtatgttatttttagcttgctttactgtcccagaacttcaactgtaaacataagctagttactagctataattttgactggtttttactcttaagcattcattcagcaaagtgtatattgtgcagaaaattaaaaaataaaccttccaataatgcataatgaaatggacatgagttttgttaattgcctttaaattcactttctcttgtacatgttaactaaaatttattcattaattaaatttaaatgtagctgcatctgattcaaagataacttataccaacaactgctataagttgtcttttacacgttgtcttttgaaacttacttaggcatatgctatgaaccaaagaactcagaggtttggggtttggtgatgaaacaaaagagaatcgtagagaaaaaagcaaaagtagttgttactgatagactgccaaactgacattcaaacaagtatgtcatttgagcatggtgtaatatagctggcagaaagccatctaagaaaaattctgattagagttaagcttaaacctttattctctaggccaactggaacagagcagaagaagaaaatgaattccaaatccctggaagaactagaccctcctctgaccaactaaaagaagcctctggcactgatgtgaaacagttggaccaaggcaataaggatgtacgtcataaaggaaaacgtggaaaaagggtaaataaaagagtaataagtgtgtgtgttgtcttctaatggtacctttctccagtttcatgtatttatatgatcatattcccatatactaaagcaaagcaacttgtgcattagtcaacaaagtgatcactggcaaaaacaattagaatcagttgtagtatttcccttttaaagtgtgtgttacttaaactattttaaaagatactctgtgtttgggggatagatttttttcccaactgtttgagagattttattttttttgagacaggatcctgccttgtcacccaggctggagtgcagtggtgcaaacatggctcactgcagccttgacctcccaggctcatgtgatcctcctgcctcacgctccacgagtagccagcattacagacatgagccaccatacctggccaagatatttttatatttgcattagtgatgcacatactttcttatttgttttgtgttattctctgccttcctatattcactaagagcttgggggctagatatgctactgtctttttttttcttacactgccatttttattcagtttcctgtttttttatggatgggcaacaggacagagatttgatttaaaaaaatatactgagtggtttcttctttcatttcataggctctgagtatgtaatatattctaactggtaaatttggattagagttcaggaaatatttattgagagctagaatgttaggtctacatagtggaaaaagtttaaatttcttgtctcaatgaatttactgtctaatggaaagaacagattagcaaagagatcatttctatccaatgtggctattagatagaagatgcagcctagcctaacagataagtgtgggtggatgagtggtatgggaagcagtgaggagccccctcctacaggacattataactaaaatgagtcttgaaggataaagaagagttggccttatgaatagcaaatttaaggggattctaggcagaagtggtaatataagcaagtatatgaataaaacagcattgtcttgagtatcataggcagtttagtattgttcattgctatattccacatggtaaatgctcaataattatctttggaattgatgaatatcacgtgaatattctacatttatttgcaaagtgtcactgtggtttatgttgaacatcttagaccagctatatgaggatactggaagtccaaaatggttccaagatatatattttacttaaaaatgttgttttaaaattaatcacaagaaaccaaagttgaagggtacaaaagagtatatggtaaaaaataagtctgggccctattcctgtccacataattatgtgtccagacacataatcttcccctgtctcctcacccctgcagatggagtctcactctgtcgcccaggctggagtgcagtggtgcgatctcagctgactgcaacctccgcctcccgggttcaagcaattctcgtgtctcaacctcccgagcagctgggattacaggtgcctgccaccatgcccggctaatgtttgtatttttagtagagatggggtttcagtttcaccatgttggccaggctaatctcgaactcctgacttcaggtgatccacccaccttggcctcccaaagtgctgggattacaggcatgagccagcatgcctgccctcagacacataattattaacttctgttgtccttctagatatattttatgcgtagttaaatacacacacacagagacatatataatatttaacataaatggtggcatgtaaaacataatgttttgttccttgcttttttacttaacagtatatttggaaattcttccatatcatttagaactttgtgttttaaaatttaatttcttgttctaaaaaaatcaaatgatattaaaaagtatatgcagtgaaaagctttagattttacttatgggtgacttttatcccatgtagaagttgttttgtttaatgttgtttttatattttatgtgacattctttgtgttactggccactttgattttcaagttattttattatattaatactatgaggtctgagttagcctgcatcttatttcttagaatgagttcatttagctttaagagtttgggtgttggcccaggctctcatcacagctgttcagttagcaaagtatagatatatgttctccatttcctcttaaatggaatagcagattattctgtgtttatatattccttcttgtttcaaattagacatttgtttgatctctgtcaaaaccagtttatgaattcatctttgcttactgattgagtcatttaacaaaaatcttttaatcttactgagtaccatgtgcacactaatatctagggatgatatctgtttgaaggaaatcagtctagtccagaaaagaaaaaagtcaatttaaatgatttgttaaatgccatattggacttatattggtatttaaatcttaccagtcaagatttatatggaccagaacagttttcaacttcatggcagttctggtattgtactttataagaccatactggtaactaggttggctggagatatttttcattaattttatctagtatttgttggcttcatatttgttatataatgcttacagttttccccctcttagtactaactcttcacattttgaaacatttttactgtttaggctaaagatacttcaagtgaagaagttaacctgagtcacattgtaccatgtgagccagttccagaagaaaagccaaaagaattacctgaatggagtgaaaaagtggctcacaacattttgtcaggtattacagtaatgttaatttttttccctgtatgacattaagcctttggaaccaaataaagatattgtttattagggaatactgagaaagataatattttgtattttggttttaaatgatcaatttagaaataaatgtagaaggaactagtcttttgaaacatcagatattgtcatataagtataaattcttcctggcctattattctgttctactattgggaaaatggatagtgaaaagcttcaggaatcttcaaattcttaatagttctgaatctaaaattagttatgttcgtttcccctttgaagctccctcttaacctccccctacccctgtccctcagctgtggtctgaatgtgtcccttcaaaattcatatattgaaatcctaacccctgaggtgatggttttaggaggtggggcctttggaaggtgattaggtcatgagggaggagccctcatcaatgggattagtcccttataaaagagatcccaaagagctgccttgtccctttcactatgtgaggaagcagtaagaaggtgtcattctatgaaccaggaagtgggcccctcaccagagaccaaatgtaccagcaccttagtcttgtacttcccagcctctagaattgtgagaaataaatttttgttgttaataagctactagtttatgatattttgttatagcagcacaaatggactcagatacccacccaaaaaatgagaccatgttcatccatctttggaagcaaagcagcactgtataaactatacagcaatgcagacatgagaacatctgagggttatagccaagctctttgagaagtagtctctgctgtttaattatggttataaagggcttcagatcaattattctgaagccagaatgatcattagtgacacatctttctactttaattggttaacatttcacatagctttttagctgtagtaactctctgatttataccttttattttgttttttaaaaaatattgccagtcaccattcagtgtgtcaaattcataaccccattaaatgggtcttgactcatttaaacgactgtcaattcagatttccatgtccactaaaatccattttaaaagatgtctaaagcagaggaaatcttcaacataaaaaaccaacaagctaaaataattagcttgctaggaactaataaaatacttttcctagtgccaaagaactatgcttgagacaagaaaaaaagatagagccaaattttaaaatgtagttgcgatagttaaaattgacttgaaagagatttacaaagaaactgcaatgaaaaatcttttcacttttactaccctaccccccaactttataggctgctaagcattattattaggaggccatcattcagaaaacttgcttgttaccccaacacactaaattcaaaggtcgttttcccaagtttttggaatttatacttgtcaggcctctgagcccaagccaagccatcacatccgcggtgacttgacgtatatgcccagatggcctgaagtaactgaagaatcacaaaagaagtgaaaatgccctcctctgccttaactgatgacattccaccacaaaagaagtgaaaatggctggtccttgccttaagtgatgacattaccttgtgaaagtccttttcctggctcatcctggctcaaaaagctcccccactgagcaccttgcgacccccactcctgcctgccagagaacaaatcccctttgactgtaattttcctttatctacccaaatcctataaaacggccccacccttatctcccttcgctgactctcttttcggtctcagcccgcttgcacccaggtgaaataaacagccttgttgctcacacaaagcctgtttggtggtctcttcacatgcacgcaagtgaaaatactgttacaagtttgttccatttactactgctatgtaacaaactgccccaaacccaaaggcacaaaacaacaaacatttgtttctgtggaattcagtgggccaggtatttggaaaggtcacagcaggagtggcttatatctctttcatggtatctaagggcttcatctgggaagactcaaaggctagctagtgacttgacaataagctgaagactggaatcattactgacacctctggcatctaggctgggagaggtcaaagtctaggactgccaaatagagtgcctacacatggcctcttgtggctggacttccacctagcatggtggccttaggctagtctggcttctacctagtgacttggggcttcaaatgtgaatcatccagcaaacagacagaagctgcattaccatttctgacatactcttggaaatttccaacatcatttggaaatttgttgttaaaagcaaacaacaagccagcccagatgcaaggaatgtgacatagaccccacttccctctgggaagaatgtcaagatcttgtggaaagattaacattcagaatagcaggcactgtttgtggtcatcttcagaaattttttcatcagctgccactaaatctcaggcctcctaggtactatagatagcacaccatggtgctaccggaagcagtacagccagttaatcctgggaagaggtctctttgtagatttcaaaagaactttcagcagtgcataattttaaaacaagcaaaaactgtgttctggtaacactcagaggacttctttattacttaagacctcagtttcttcgtgccagtacctcttttcctttttattctataccttcagggctggggttctagtaatgtcctcatagttggtaactgtaaactatttaactgcctatcagcgtatatgtctctttatgagctttttaataggtagaacgagtagttcgtcaaatgtttatggtacaagtaaaacaaaggggggcagaaaattaataaagatttactccagggaaaattatctgatctatcaagagactattgttacctgactgattcagtctatgtacaaaatgagtaaccagggatataaattgagctcattcatcttagcccataattggtgcctgtccactgtcaaagaataagtaaagatcactaaaagctagtctgaggttctcctaatgtaaaaggtaaaaaaagtaaaacaaccatgctgaaagtttacctgtataggcttgagaaacctagacttaacactttaagaaggcagcggctatgcagtatcaatcgagtagagcctagtaagctaatttggaaggaggtagagggttgctgacaataaactgatggagcccacctttggagcaatctaccttcaaccattctgaaacactttagtggttgtgagatagcaaaacatcatcaagggtatttgaatgtcccctctcaactccctagtctttcccaatttaatttacagatggactctggaatgctaggcaaacagttgacatggagtgagacggaatgatcactttctgcctacctattccaacatatcatcctagggttgagagtgagcagaacggaggcaactatgatgcctccctaagatttctccaagattatgcattttttgctaccattttgtgcttctaggccctagcaaaaacttttccattttggttaattcagtctgttaaagaatagacaaacaagtcctcctattcttcagtagattatttctgggactccattggcctagtacagtcttccagctgtcagatccacaaagacctttattctggcataaattatatagaatgaacaaaacatcaaagagcaatcatatattcaatttatactttgatgggtatagggtggttaagtgctaagacaaatcatttctaggtttttagaggactacgtcaaacataagatacatgtcatatgattggaaattcagtagtagccatgtgctagccaattttctgccaattttccccctctcttagccagaaataaagactatcaaaagctgaaaataaaaagatcagtgatcagtgttttaaactcatatttctcatgataaaaattattaaaacttaccagaaaagttgggttctatataatcttagggttcagctagctttttaccaggagagaaagctgtgatttgggacttctgtgtttttgtgttttgttttgttttgttttgagacagagtctcgctctgttacccaagtcggagtgcagtgacgctatctcagctcactgcaaactctgccttcagggtttaagtgactctcctgcctcagcttcctgagtagctgggactacaggtgcacaccaccacacccagctaatttttgtatttttagtaaacacaaagtttcaccatattggccaggctggtctcgagcttctgacctcaggtgatccgcccaatttggccttccaaagtgctgagtttcatgcacgtccgtgtgaagagaccaccaaacgggctttgtgtgagcaacatggctgtttatttcacctgggtgcaggtgggctgagtccgaaaagagaatcagcaaagggagataagggtggggccattttataggatttgggtaggtaaaggaaaattacagtccaagggggtttgttctctggcgggcaggagtgggggtcgcaaggtgctcagtgggggtgctttttgagccaggatgagccaggaaaaggactttcacaaggtaatgtcatcacttaaggcaaggaccggccatttacacttcttttgtggtggaatgtcatcagttaaggtggggcagggcatattcacttcttttgtgattcttcagttacttcaggccatctgggcgtatatgtgcaagtcacaggggacgcgatggcttggcttgggctcagaggcctgacattcctgacttcttatattaataagaaaaataaaacaaaatagtgttgaagtgttggggcagcaaaaatttttggggggtgatatggagagagaatgggcgatgtttctcagggctgcttcaagcgggattaggggcggcgtgggaacctagagtgggagagattaagctgaagggaggtcttgtggtaaggggtgatattgtggggttgttagaagaaacatttgtcgtgtagaatgattggtgatggcctagatacggttttggatgaattgagaaactaaatggaataacagaaggagaaaaacaggtataaaaggtctaagaattgggacgactcaggatatctgattagagagcgcctaaggagattcagcatagtcctgccagcaaagattatttatttacttcaagagttaagagtggcagtttggggacagcaccaggagatatcagctgtgatggcttggaaaaacagtgtaaactggcagtgtaaacaagagcagggcatgtatgagtagttgagaacggtgaataggagtatgagtagacagaagatagtagggatgacaggttttctggggcacagtctaagttggtctggtgtctcgaatgagactggggcctaataaggagcgtctgtacgggagcttaaatgggctgtaccctgtagcattccgaggacaggcctgaattctgagaaaggaaagtggtaaaagtattgtccagtcctttttaagttggtggctgagcttggtgaggtgtgtttttaaaagacctttagtctattctacttttcttgaagatggaggaccgtaagggatataaaggtttcactgaatactaagagcctgaaaaactgctggctgatttgactaataaaggcttgtctgttgtcagactgtattgaggtgggaaggctaaactgaggaattatgtctgacagaagggaagaaatgactgcagtggccttctcagaccctgtaggaaaggactctacctatccagtgaaagtgtctacctagactaagaggtattttagttatctgactcggggcatgttgagtaaagctaatttgccagtcttgggtgggagcaaatcctcgagcttgatgtgtagggaagggagggggcctgaataatccctgaggagtagtagaatagcagatgtaacactgagaagttatttccttgaggatagatttccacgatggaaaggaaatgagaggttctaagaggcaggctagtggcttgtactatagcatagcctgcctttgctggtgtgtggcgattaggcctggtggaactgccatcaataaatcaagcgtgatcagggtaaggaacaggaaagaaggaaatttggggaaatggggtgaatgtcaggtggatcagagagatacagtcatgggggtcaggtgtggtatccagaataatgcgagaggccggattggagtctgggccaggaacaacggtaattgtgggagactcaacaaagagtgagtacagctgaaggcgccgggaagcagaaagtatatgcgtcaggtatgaggaagaaaatggattttggaagttatgagaactgtagagagtgagttgagcatagtttgtgattttgagggcctctaaaagtattaaagcagcagcagccgctgcacgcagacatgagggctaggctaaaacagtaaggtcaagttgtttggacagaagggctacaggatgtggtcctggctcttgtgtaagaattctgactgcgctaaccgtgcttaggaaggaaaggagttgttgttttgtagaaggtgcttgggtttgagagatcagtcagacagattggcagggagagcacgtgtgtttttatgagaattatgccgagataggtaacagatgaggaagaaatttgggcttgattgaagtaatgggggctgtctgagaagctttgtggcagtacagcctaggtaatttgctgagcttgatgggtgtcagggtcagtccaagtgaaagcgaagaaaggctgggatgaagggtgcaaagggatagtaaagaaagcatgtttgagatctagaacagaataatgggttgtagaggcaggtactgaggatatgagagtatatgggtttggcaccatggggtggaaaggcaaaacaatttggttgataagatgcagatcctgaactaacttgtaaggcttgtctggtttcaggacaggtaaaatgggggaattttaaggagagtttataggctttaaaaggccatgctgtagcaggcgagtgataacaggctttaatctttttaaagcatgctgcgggatgggatattggcgttgagtggggtaagggtgattaggttttaatgagatggtaaggggtgcatgatcggttgccaagaagggagtagaggtatcttatacttgtgggttaaggtggggggatacaagagggggacgcaaaggaggctttggattgggaagaagggtggcaatgagatacagctgtagtccaggaatagtcagggaagcagataatttagttagtgtctcagcctaataagggaactgggcaggtggggataactaaaaaggagtgcttaaaagagtattgtctaagttggcaccagagttggggagttttaagaggtttagaagcctggccgtcaatacccacaacagttatggaggcaagggaaacaggcccttgaaaagagggtaatgtggagtgggtagcctccgtattgattaagaaggggacgggcttaccttccactgttagagttacctgaagctcagcgtccgtgatggtctagggggcttccgaggcgatcgggcagtgtcagtcttcagccgctaagccgagaagatctgggaaggagtcagtcagagagccttgggccagagttccaggggctctgggagtggctgccaggtgagttgaacagtccgattttcagtggggtcccacacagatgggacggggcttaggaggaatcccgggctgcgggcattccttggcccagtggccagatttccggcacgtgtagcaagctcctgtgggaggaggttctggaggaacgcctggccactgcggttcaggcgtttggaagttcttgtgtgctggagatggggctggggtttgtctcacagtggaggcaaggaattgcaacttttttctattattgtacaccttgaaggcgaggttaattaaatcctgttgtggggtttgagggccagaatttaatttttggagttatatttaatgtcaggagcagattgggtaataaaatgtattttgagaataagacggccttttgaccttttagggtctagggctgtaaagtgtctcagggttgttgccaaacaagtcatgaactgggctggatttttatatttgatgaaaaagagcctaaacgctatctgatttgggataaagaaaaatgagcattaaccttgactatggctttagctccagccacctttttaagagtaaattgctgggcaggagggggagggctagtcacagaactaaactgtaagccagaccaggtgtgaggaggggaggtgataaaaagattatagggtggagtagcagaggctgaggaagaattgggacctagctcggcctggcagggagtagcctggggaggaagggagaggtcagatgggtctgtagaaaaggaagattagaaagactcagcgacgcttggtgttgggactgaggggacaggcgggagggaaagaaggaagatttgggacgagttgcactgggcacagactaggaagggactgatgtgtaaaagaatgcctggacgtcaggcacctcagaccatttgcctattttacaacaagaattatttagatcttgtaggatggaaaaattcaaagtgccattttctggctatttggaactactgtagagtttgtattggggtcaagtggcattgcagaagaaaataagacatttaggttttaggtaaggtgtgagttgaagaggttttaagtttttgagaacacaggccaagggagtagaaggaggaatggagggtggaaggttgcctatagtgaaggaagcaagcctagagaaaagagagagcagagaaacggagggaaggggttcggggttcttaccttccagaaaaggggttggggcgcagagataagaggtcagggcgtggaaataagggatggggtgcagaaataaggggtcagggcatggaaataaggggtggggcacggaaataaggggtcggggcacggaaataaaggattggggcgcagagttaagttagggcacagaaataagggattggggcacagagatataagaggttggggcacggaaataagggattggggcacagagatacgaggttggggtacttgcccctcctctagaaaagcaggacttgctgctaagagtgaaggagaaggggttgaggggtacttgcccctcccccagaaaagcagagaaggggtagagacaaggagaggaggggttggggtacttgccccttccccagaaaagcgggacttgccgctaagggtgaaggaccaaggcaggcatccctgcgtggtctaacacctttgaaacgtgggtgaataatcagagaggcatccctgcaatgattaaaggtcaagggaaggctgccttcccagtctgtgactggcaccggagttttgggtccacggataaaacgtgtctcctttgtctctcccagaaaatgaaaggaattgaaattaagagaagggagagattgaagtgtggcaccaagattgaaaggagaaagaggtcgagggatagtgagggaggttggagaagagagtaaaaagaggccgcttaccggatttgaaattggtgagatgtttcttgggctggtcggtcttaggacctgaggttgtaggtggatctttctcacggagcaaagaacatgacaggggattgatctcctaagggaggtcccctgatccgagtcacggcaccaaatttcatgcgcgtctgtgtgaagagaccaccaaacaggctttgtgtgagcaacaaggctgtttatttcacctgggtgcaggcaggctgagtctgaaaagagtcagcaaagggagataagggtggggccgttttataggatttgggtaggtaaaggaaaattacagtcaaagggggtttgttctctgtcaggtaggagtgggggtcgcaaggtgctcagtgggggtgctttttgagccaggatgagccaggaaaaggactttcacaaggtaatgtcatcacttaaggcaaggagtggccatttacacttcttttgtggtagaatgtcatcagttaaggtggggcagggcatattcacttttgtgattcttcagttacttcaggccatctgggcgtatatgtgcaagtcacaggggatgcgatggcttggcttgggctcagaggcctgacactgtgattacaggcgtgagccactgcacctggtcagtgacttctgtttttaataacaactgtaaatggtagctttctttagttcagtaaaagtggacagtgtcccacaagctgtagtagttaggtttgagttagggaattttaatatctgccaatgtctcatttattcagcaaacgttcatggtctgccatatggcagcattaatacagtgcataggaggcaaacatgaacagaatcaatctatatctggcattgtacatgccatttaaaatatctacatagctaccgatgaaatattgcatttccttatcttctgttgcagtgtttacagttttaacatatttatgtatactgtatacttccatggtgatatgtgattatttgcatctaatatttctctttattagtgctgtgactttttatctcatttccatttatttttctcagtcatcatttgacttcatccctgttatttcttataatttcattataggattatagtctcctttgtttcactgtcatttattttatgatttctcagtcttcatgttcagctggtttcttcttaaaacttttcaacctataagttaatctaaaaagataatttttttaaatgggcatcttcaagccttttgttgtttatggaagcctgtttgcttgggtttgaatcctgcacttccccagaagttgattgtcaggtaggacagtgggggtaggattggagctggaggtagagatgttgactaaaacaggaagagaaacataaaatttctaattatttattacatgtcacttttcattgttaacattttaaaataaactgctgtggttttcacatgattgctggatgcttattcatgggctggagtaatcatgtaaaaccatgccacagaccttgagagaacataattaagtatttcatatgttcagctttgaaagctcattgttaagtgttagccaaaaaagaaatattttaaattgaaagtctctgcagagtagggtaatacttcttccatcttaggggacactgttcttacatgttttttcttttcccatccctctcccactcctttccccacatttccactggctgaggaccttttgtcctcactagagaaggcccttccatccctctgttcctctggtgagcacttctgtcattcaagctgcgagaacataagcaaagcaaagcaaagggctagggcccactgtcatgagaaatggccaaattatctgggcctcactcttcttcttttagattttctctactcatgcatttgagtgttctcatgtttttgtcattcaggtatgtgtagcaagctaaacggtgctgagatccaagagtttgggtttaggattcaggaaggaacaggaccccctgactaaagcttttagcctaaagaaagtaagagttctgccttggtgtttgagaggcagtttctttggtttccattttgtgatgtttctgtctttctccctcaagatttcatggggaaaagagatgcctggcctaaggcaaaaagaacaagaatatctgggttctttggccaaattctatcttaatggcaccaaaactaaaaattaatacctaacagtaatatactgtggtaagtaacatatagagatactgtttgtggtcatcttcagaaattatcagctgccactaaatctcaggccttctaggtactaggtagtggcagcatagagtaacgcagaactgtgtcactaagtattcaggaagaaaactgcaggtataaagttagcttgaaagtttatgacatggcacatttagcatctgaatatcaaactccttttatttttttctggttgatgttatttattaaagtgttcaaaagcataattagccctaatattgtgcaattttaaattttcttttaaaaaggtgcttcctgggtgagttggggtttagtcaaaggtgctgagattactggtaaggcaatccagaaaggtgcttctaaactccgagagcggattcaaccagaagaaaaacccgtggaagttagtccagctgtcaccaagggactttatatagcgaagcaagctacaggaggagcagcaaaagtcagtcagttcctgggtaaagtaattctagataactttactttttaaagttatatttaaaataatgtcttaatccagggttaatctgcatgttcatttagatggtttaatctcaagaataaagaattaggacaaagcagtttctctttgttattcatagtgagacctgcggaccagcaacatcacatcgtcctatctggaatccttagaaatgcagaattttagggacagacacacctactgattcagaatctgcattttcacaagatccctaggtgattcttatttgcacattaaagtttgagaaactggttaaagggttgttctgatgtgttggagaggagaatgtgtgtatctttgaaaaagagttctgaatgtaaagtcatgtattgtttaacgcaggaggtaagttctaagaaatgtgtcattaggtgatttcatcattgtgtgaacatcatagcatgtactcacacaaacctaaacgttgccactccacacctaggctatatgatatagcctattgctcctaagtacaaacctatacaccatgtgactgtactgaatactataggaaattgtaacacaatggtaagtatttgtgcatttaaacacatctaaacatagaaaaggtgcagcaagaatgcagtatataaaagataaaaaatggcataaaaactgtagagagcacttaccagaagtgtcacttgcaggactggaagttgctctgagtgagtcactgagtgagtggtgagtgaatgtgaaggcctaggacattactatacactattgtagactttttaacactgtacacttgggccacactaaatttattttaaaaacaaagtaattgcactatgatgttatggcggctgtggtgttactaggcagtgggacttaatcagctccattataatcttatgggaccatgaaatgtctgaaatgaccaaaccatcattatgcagcatgactggatgtgaatccttgagtccttctaagggatatgacacattctttcaaggagagcagtttactgcttagcagttgagggtcaagagggagggatctgttgtttgagaaaaactgacttagtgattctggtgccaaccttcccaagcaatgtacttctaaatccttgctcttagagaatcacagcactgaaatttggtgttttgaggtgggtagataggaccttaatggattaccattaaatttagtaaaattatcttttttggtatttagtattttttgaatcagattttagattgtttacttttattcaccgagataactgagatatttatcagtagaaaaatatgaatacgctaagctggaataagctaaaagtaccaaccaatcttgcattgcaacagtcagatagaaaaggtggctggttttctcaagcagaagtgcaagagcatgtatatctgagaggcaaggttataaacatcagtaggctctgcaagcacagctttaaagcaaacaaaagctttcatttaaaaaataaccagtctatgcttcatgcctgtagtcccagctactcaggaggcagaggcaggaggatcacttgagcccaggagtacaagtcaaggccagcctgggcaacatagtgagacctcctctctaagcttcatatccttaagaagaaattgtaacattatatagtaaaacaatttagatgttcatttaagaatgttgcaagatgagtggtaaaaatcaagggaataatatatttttcctaagttttctttttttatggtcatattagttgatggagtttgcactgtagcaaattgcgttggaaaagaactagctccacatgtcaagaagcatggaagcaaacttgttccagaatctcttaaaaaagacaaagatgggaaatctcctctggatggtgctatggttgtagcagcaagtagtgttcaaggtaacaaagggcccagaattttaactatgaaggtccgtttgctttggactagatttacatcgttttaaatattatttttacaggattttcaactgtctggcaaggattggaatgtgcagctaaatgcatcgttaacaatgtttcagcagaaactgtacaaactgtcagatacaagtaagttgaattttattttaatgactaaatctctgttttgttgttgttgttgtttttctgagagggagtttctcttgttgcccaagctggagtgcaatggcgcgatcttaggtcactgcaacctccacctcccaggttcaggcatttctcctgcctcagcctcccgagtagctgggattgcaggcacacgccaccatgcccggctaattttttttttttagtagaaatggggtttcaccacattagccaggctggtctcgaactcctgacctcaggtgatctgcctgcctcagcctcccaaagtgctgggattacaggcgtaagccaccatgcctggcggactaaatctcttgtagcatttgtaaaaacccatgacggtcaagatatttttattaagtatctgataaaataatttttttcactcactgcttttcttaaatagggagaagaatagtatttctagtataataacagaattcttgtcactttgctttatgttactaatcattataaacatttgttcatcattactgtgaagaataaggttattttttttaaaagcctggaatttctgtataccttattaactgactacatgtttttgatgggtgatatctgcctgaaaaaacttgaattataattaaactcttataccccatgttaatattagcccactcggtatacagactgttaaaaattatgtcacatcttacttgactctgattaccactgtacatttgtattggaatgggtagatggtatatcttcaatttcatatattaagaaatggacaaacagaaatgaatgatttgcacaaactcacctgattagtgttatgattgctttcttatttggccttaaggtctgtctctggagagtggctataaattctaatcctgctgtgttgtggctcaagaggaaaaaatctcgtgaatgttttcagtgtgcgtttcacaggatacttctttatcctggcacacccatgaccaggtgtccctctctcagggaacttgtttatggcagatgcccttgtggctcttttctgacctgtgtccagtttattcctactaagatagctactctctaggagaccctgactaggaggagagcaaggtttgggtgtgttggtcaggtgacacacagagaaggcagcacaaccaaacacacgaaataacagaaactttttattactcacagacccttgagagaagagcggtatgcatgagggccaacaggaagtctggagatagcagagtgctcaaccagtgggtggggcgagggtgggtgaacaagggagcacgagcaagggagaggtgatttgtgtgactgccttcacgaaagtctatgggtgttcttcctttggctttccagtggggcctgtggattgactagtttaaagaaaacaagtgtgaacaggggaacatttacatggctctagttttacatgactctagtgttgaccattggattttctcgtggtcagcagctgtgggggtgtgttgggttttgagtcagtgagatgagaaacaagtatactgtattgcagacaaccgcatgggggagagagaagttttaactaggccaaaggtggtgggatacaactaggtttcaagcaacttatgtcaggcctaaaaataaatgctgaagcaacaactatataacaaatttatacaagtggtattgaaggtgagagtaaagcagggtcttctgcttttagctccttattctttctacctgactctactttctttatacaatactagaagaatcaaggtctaaaaaataaatctagtatgaaggacctgagttgctttcttagccttgaattagtttggatcttactatttatttagaaagaaaaaagaagagcaatattgatagtattcacaactcgtggttatttatgttaattatccacttattgacagcatttagttgagttcatacttttgtattaggcactgtgatcattgcttttcctacgtattaattaattttcaacactgttatctccattttgcagatgaggaaaccgaaatgtaaagttaaataccttgttaaagattactctcctagtgaatagtagagctgggatataaaccaagtgtttctgtcatcagaacctgtgctctacagtgctaatttaatttccatccttaattggttcgatctgctccgtctggggcatgaatacatttgtttgtttgttttaagataggaagtaggaattgctttatttttactttttttataatttcaactattattatagattaaagggtacatgtgcaggcttgttacatagaatttgttgtgtgatgctgaggtttggggtacaaatgatcccatcactcaggtagtaagcatagtacccaatagatggtcttttagctcacactcccctcctccctccccggcctagtaatccccagtgtctattgttgtcatctttatgtccatgagtatccagtgtttatttcccatttataagtgagaacatgtggttttctgttcctgcattaattcgcttagaataatggcctccagctgcatccatgttgctgcaaaggatatgatttcatttttttagggctgtgtagtattccatggtgtatatattagcatgttttctttgtgcagtccactgttgatgggtacctaggttgatcccatgtctttgctgttatgaatagtgcagtgaacatgtgagtgagtgcatgtgtctttttgatagaacagtttattttcttttgggtatcaaatggtaattccattttaagttttttgagatatctcccaaaagtggctgaactagtttacattctgggacatacatacctttgaatcaaatcaaagcaatgtggcatatcattttggagtgtcagttttttttttttttttgagacggagtttcactctgtcacccaggctggagtgcagtggcgcaatcttggctcactgcaacctccgcctcccaggttcacaccattctcctgcctcagcctccctagtagctgggactacaggtgtccgccaccatgaccggctaattttttgtatgttcagtacagacagggtttcactgtgttagccaggatggtcttgatcacctgatttcgtgatctgcccacctcggcctcccaaagttctgggattacaggcgtgagccaccacacctggccagagtatcagttttaccaagagttgagagataaaacatacaatagatctcaaattcttctgatagaaatatgaaactcaagtcttccaactcacttcttgtcacctgtggcctgaactctaatattcattcattgttttatgaccctgaggttactttggatcagtcataattagaaaaatagttctttatttgtagcaagaacaggagaaattcagaaatgcctttcaggccaaaagtgaattatttttagattatcatattagaaaataggaagtgctttgttgggttttatggcctactctaatgaaaaaaaaaaaaaaaaacttacctaactacaattagcttattaaaagtttgggattcacataactaggaaatactggattttaatgtagattttgtacttctggtccttaatgagaacttaatatgataaatagcatatttttaacagtgattctcagctcatttatttctattgtattattgctattctttttatcctttcttccaaagattcatggaatttaaataaaaaccaggtaagtgagaatttagttaagtagctttgtatttctaactatgaggatgattcagtcttagcagtaatttagtttctgctattagaaatttagaaggatgggagaggcagtagggaataaaagattttatctaagtaatactgtttctcacctttggagctaatctggcccaaagtagaaaatgtcttttaagagaagaaactaaaagtattgaaccagtaataacttagtgatagaactgaagaaatggaaaagcttgttgtacctttgtttaattttgttcttatttgtttacatacacttaggtttatttacactcttctgtatttaagtttactatcaaaaagtatttgatagaatgaccatttgtggagtactcaaatcgaactgatggtagtataataagggaaatttgtgttcttaattgcctgtgataagcgattgctctccaaaatagttattttaaatgtcctttaattttatgcttgggagaaaaccaaatgtattatataaacttccttatctgatttcaggtggataagccagtacaaaggattaaataactatactcttaaaatttttagctaaatgcataaaaaatattcattaagattcagtttatttttgtcagttacattaatacttttgtcttatatttggggatgtgaagacatacaggaataatgaaaaacaataagtaactttaaacctgctacacttaattgcggtatagtacctattcaataattcatcattctacatatgaagcttaagtttcacctttaagcttcttttattccactttaaagtgtttaaagaataataatatagctttgatagttagatctatttttattttccccagcaatattttctttgaatatatatttgtggaacataagcttaataatagactttttttcctgtagaaaatttactgttttatggtttttggtactatgctatagttaagtgtagctgatttattggtttgtttagtgaaatttaattaaaattcctcctaaatttgcactggatgaaggggtaacttcaatgacaggtgtcatattacccaaaaccagttttgtataactgaacacattggagaaatttcagaaaaatctggttcaattgtagttttgaatctcgttgacttatttaggcctacttcacattcattttttattatttttcaattggtagtgttagtatataaaatccgacttaatgagctctaattaaagtaaatttgtttaaaaataagagatcaaaaataaatttaacttcctcccagacatatgctttctaggagtttatagcagtatagtttgaatctgaagaaaaggactaaacagttatttatgaagaaaagaacatatgcctattaggaaaactagttctaaggcatattggaaagcaggagtgatagttgaggatatattaaaaaataaatacaactgatgaaaagctgttttatagtatatttaaaaatacatgtttagtattttagaattttaaaactgctttcacacatatacatcgtttttttgagataaagaagagaaagttgatgatatgtaaagaggtagaaacttgaccaaggtcatatggctagttactggcatagttggcattagaatctagttttctgaatattctgtttttttttcccaaattaataggaattgttactgacattggagatagcatagaaaaacagacaaaattaacaaggtgcaaaacaaattcatttttagtacgttattaaagacaatgtagtttttagaactgtgttacatacagaaatatgagtgcagctggaggtatcaaactgtatcagtggaatagggaacattccaaattctcagaagtggaagtttgtgaatatggaggatttcctatgcttgaaaacatgactgtgagttatgttgtgagttatgttgagttatggtgtcacttcattgtagctcacatggttctggaaaaataagccctcagggaaaccggctccaccaagagttacggtcactgtttttcagtgctgaaactgctgatacctttctttttgtatagacacagccattaccacctgacagtagtatttgttactggggcttggttgacaatgagaaggcaccatcagcaatggtgcatctcctgcactatcagcaaatcctgtggaatgctgaggggttgcataacagggactgtccgaagcagttgtaggaagtttttctgtctgttgactggtgagaaggcccccaattaagagtagtacagacttggaaggtttgacagactaggctctgctgtgtgctagctctaatataattattaacattaggcaaaggacagaatagaatcatcctttaggggcactataagattatttcacactggggttaaaaaagccaagcacaaacaagccggtgggatcacaaaccactgttctaggccaggctatttagtaatagaggacttgttaattcaaaaggcagatctagtgttatataagatgtccagatataggtcataaagcatctaggaaacttcactgtgtcctggagaaaatgtaaacttttgcctctttgttttgtttgttgtttaaacagtcctctatttgggggaaatctgtggacaagaaaagctttaaaagcctgttaccaaaatggggtaaagagtaaaacaaaacagtagggaaatgtgttttggtgtgcctgtataggacctcaaattgtattttatcatagaaatagtattaaatgcagatattattattatcaataataacttcttttgtatatgctttataatttcccaagcacttgctatgcatttgatgctcaaaaaactctgaggcagatagggcaggaattactgatttcattcattcagtgaatattcattgaatatcaggtactattctcaatgtttaggatatgttaaaggacaaaggtaagattctcctctccaatagggtttacattctagtgagagaagcaagacatgaacagtgataattaataagttctatagtatgtagaaagtggtaagtaatgggagaaaaaaagcagtgtaaaggggaatcgattgtcaagaggtggaggtgggcatgtggaaaaaggcaatttaaacaggttagataatgagattatagttgagccaacttgaagaaggtgaggcagagagctatgggaagtccaagcagagagcagccagtacaaaggtcctaaggcctttgagtgcttggtgggctcaaggaacagcaaggaggccagtgagtgtgcagtagagtgggatgcaggggagaatgccatagaatctctgtttaaagattaactcaaattcccataattaaaagacatagccaaagtctggttaaggtagaacttgaaactacttacgtgactctagattagttgcttctgtgaatattttccctcatatttctagaaagggaggattaaaaaaagaaataatgactgattaatgacctgtattataatttacacttttatttttacttgacagtctttattacatcattctcagctagtctgagtttattttcacacactgtttttactaaaggagaaaatactgctttgtcacagagtgtgatttcattctctactgtgttttaagttattaattaaattgaaacctaagctttaattttgctttcaggggtaacacagtaatcatttgacttatttaatactaattcagaagaccttattttatatttattgtttcattgtatgtcctctaatctttcttttaaagatacggatataatgcaggagaagctacccaccatgcggtggattctgcggtcaatgttggcgtaactgcctacaatattaacaacattggtatcaaagcaatggtgaagaaaactgcaacacaaacaggacacactctccttgaggactatcagatagttgataattctcagagggaaaatcaagaaggagcagcaaatgtcaacgtgagaggggagaaggatgagcagacgaaggaagtaaaggaggcaaagaagaaagataaatgatgaagtgctgggaatcacttataccaaagccttatgaaatggatgaaattttgttaaataggcaaatgtggaattcctcacagattaaccagtattttttaaatgtattcattcctacaaattaactttcataaattttatggcatgtcttctatttaaaaggaaaagaataagtattcttgcatctggccttagaaatgtgaagttatattctcaagtttatttttttcca

SEQ ID NO: 7301 - DNA, 430 bp, Homo sapiens; identical to SEQ ID NO: 7299

SEQ ID NO: 7302 - DNA, 1510 bp, Homo sapiens
ccggcctgggggcgggggtgcggccgcggggaaggaagtcggccgaggggttggggacaaaaggccgggcggcgggctgggggtctcagggagggggcgggcgtgtgcggccggggccgggctacgcggaggacaaacagctggcgagtgtcagggtctggccgcctccccgctgcccacacgcacctacccgcgcccgggacgcgcattttccttctctcgccacgagttcacctgggactttgcaaataactgtgcggtgggagctgcgctccagccttgtcatttgctgagggtgggtggcggtgcccaaggaagtgaacttattttgttccttcacaaagactggaccaggcggtgcctttcacgcgaagaggttacgaccacggacacaacctcctttgatgcattgtgcgaggcagcacctcgggccccggacagtagtcatttcacagaaaatgcaccgccccgagtgtcttattgctgtgatgaaatggaaatttaaataaaaggtcgaacacgtgcgttcactgggaagtattgacatgggtgttacatcaccagcagccaatcagataactccagtcgtgtttatacttctacaaccaccttgtgagtattacagtatgtcataaagttataaatattaggcagggttttccccaggagcggggaggagtctgcttctacggacgttgtgagcggctccgaagattgtgtgtttaaagtcaacaattcatttttaagacttttttcgaactgtttacattacatggactttagattgattctgacagaatgaactggaaatgaaatcccacagttatgatcgtagtagagtttttttttccaatttagggcccttatactccttttaaaaaattttaatatgctaaatttagcaaatactaaagtgttaagactcatctgacaatgtgagaatttaagcctatttcaggttaagaaaaaaaagatgttttcaagttatggaggggctttttactcttaagcgacatatgtattagaagttgaatcacgaactgataaaatgctccagataattgttgactaaaaaaaatacggcaggacaaattttttacattaatacatatgtgcagaaaatgagaaatatacatgaactctttacagttatagattaatgggaagggttatgttaaaggcttgaacctcctaaataatgtattaatgtaaataaagttatatatgttttatgaagaacaggtgttacaatttttagacctagttttatgattcttattctcttcaaaagttctttttctatttcaaaactaagagcaatatgtaaagctttgtataatatggaatatggtatgtatttcaaggttactttaaaaagcaagctttggctggtcccaaggtagtgaattgtctcaattggttattcacagttggttgcccgttgtaccactctttccccacttccacttgactagtcttttaaaaataaataaatatttaaataaacaag

SEQ ID NO: 7303 - DNA, 1510 bp, Homo sapiens
ccggcctgggggcgggggtgcggccgcggggaaggaagtcggccgaggggttggggacaaaaggccgggcggcgggctgggggtctcagggagggggcgggcgtgtgcggccggggccgggctacgcggaggacaaacagctggcgagtgtcagggtctggccgcctccccgctgcccacacgcacctacccgcgcccgggacgcgcattttccttctctcgccacgagttcacctgggactttgcaaataactgtgcggtgggagctgcgctccagccttgtcatttgctgagggtgggtggcggtgcccaaggaagtgaacttattttgttccttcacaaagactggaccaggcggtgcctttcacgcgaagaggttacgaccacggacacaacctcctttgatgcattgtgcgaggcagcacctcgggccccggacagtagtcatttcacagaaaatgcaccgccccgagtgtcttattgctgtgatgaaatggaaatttaaataaaaggtcgaacacgtgcgttcactgggaagtattgacatgggtgttacatcaccagcagccaatcagataactccagtcgtgtttatacttctacaaccaccttgtgagtattacagtatgtcataacgttataaatattaggcagggttttccccaggagcggggaggagtctgcttctacggacgttgtgagcggctccgaagattgtgtgtttaaagtcaacaattcatttttaagacttttttcgaactgtttacattacatggactttagattgattctgacagaatgaactggaaatgaaatcccacagttatgatcgtagtagagtttttttttccaatttagggcccttatactccttttaaaaatttttaatatgctaaatttagcaaatactaaagtgttaagactcatctgacaatgtgagaatttaagcctatttcaggttaagaaaaaaaagatgttttcaagttatggaggggctttttactcttaagcgacatatgtattagaagttgaatcacgaactgataaaatgctccagataattgttgactaaaaaaaatacggcaggacaaattttttacattaatacatatgtgcagaaaatgagaaatatacatgaactctttacagttatagattaatgggaagggttatgttaaaggcttgaacctcctaaataatgtattaatgtaaataaagttatatatgttttatgaagaacaggtgttacaatttttagacctagttttatgattcttattctcttcaaaagttctttttctatttcaaaactaagagcaatatgtaaagctttgtataatatggaatatggtatgtatttcaaggttactttaaaaagcaagctttggctggtcccaaggtagtgaattgtctcaattggttattcacagttggttgcccgttgtaccactctttccccacttccacttgactagtcttttaaaaataaataaatatttaaataaacaag

SEQ ID NO: 7304 - DNA, 448 bp, Homo sapiens
ggggaaaggccacgccttcccccatcagcaggggtcttttggcaccagccgccaagacataagaccagtatccttggaatagcgcagccagggaaagtccttgagccaggaggtctggaaggagcattggagcttctgcattagagacttgggccgcgcgagcgggaagtgctggacagtctctccttcgccagctcccacaccgctgccctccacttcgtccccgccatcgccgcccgaccgcctgctgctgctgcagctgccgccttccgccccgctgccgtcgcccaggctcgccccctcctcctcgtcctcggtgctgtcgctcagggacgcgccgtcctgtatcaactccttcccctccagcgcgtccagctccagatccacagtcgccggccctcgcccattgaaatgcctcaagggccacaccgaggtctcggggcggccg

SEQ ID NO: 7305 - DNA, 555 bp, Homo sapiens
cctgggcgttggcttcgtggagtttgtgctcggtagagacgtggtgcctcaggaggagggttttcttgtagttgcgggtccctcgcgaaagctcatcatgccccactgggggaaggtccacgcttcccccatctgcaggggtcttttggcaccagccgcaagacataagaccagtatccttggaatagcgcagccagggaaagtccttgagccaggaggtctggaaggagcattggagcttctgcattagagacttgggccgcgcgagcgggaagtgctggacagtctctccttcgccagctcccacaccgctgccctccacttcgtccccgccatcgccgcccgaccgcctgctgctgctgcagctgccgccttccgccccgctgccgtcgcccaggctcgccccctcctcctcgtcctcggtgctgtcgctcagggacgcgccgtcctgcatcaactccttcccctccagcgcgtccagctccagatccacagtcgccggccctcgcccattgaaatgcctcaagggccacaccgaggtctcggggcggccgc

SEQ ID NO: 7306 - DNA, 404 bp, Homo sapiens
gcttagctccccctcaataacgacacggccgtcagtatttaccacgttattgaccctctccagccggcccgcggcaagaagagttccacttccttcccggaaaacgcggccggaaggggcgggctttccgcctgcaccaggcgcttccgccaccatggcttcacgtggggttgttggcattttcttcctctctgctgtcccccttgtgtgtctggagctccggcgtgggatcccggatataggtaagtgtgattttttcccttcgacagtcacagctgggtaattttcacaggaatgttgcatagaacgaccgcctcttcggctgcgtggcttcggagcagctttgactacaactcccagactgcatcgcccctgcccccccacttccggagctgacttcactt

SEQ ID NO: 7307 - DNA, 405 bp, Homo sapiens
gcttagctccccctcaataacgacacggccgtcagtatttaccacgttattgaccctctcccagccggcccgcggcaagaagagttccacttccttcccggaaaacgcggccggaaggggcgggctttccgcctgcaccaggcgcttccgccaccatggcttcacgtggggttgttggcattttcttcctctctgctgtcccccttgtgtgtctggagctccggcgtgggatcccggatataggtaagtgtgactttttcccttcgacagtcacagctgggtaattttcacaggaatgttgcatagaacgaccgcctcttcggctgcgtggcttcggagcagctttgactacaactcccagactgcatcgcccctgcccccccacttccggagctgacttcactt

SEQ ID NO: 7308 - DNA, 317 bp, Homo sapiens
agctcaataaatttcagatgaactaaactgaatagtcaggtgggatgctagatggatgggtcaggaaaaagaattttcttttttcttgcaaagtgttgggattacaggcgtgagccaccgcgcttagccaggaaatataatttctttctttcttttttttttttttgagacggggtctcattctgtcgcccaggctggagtgcagtggtgcaaactcggctcaaagcaacctccgcatgcgggttcaagcaattctcctgcctcagcctcccgaatagctggaattacaggcgaccgccaccacacccggctaattt

SEQ ID NO: 7309 - DNA, 319 bp, Homo sapiens
agctcaataaatttcagatgaactaaactgaatagtcaggtgggatgctagatggatgggtcaggaaaaagaattttcttttttcttgcaaagtgttgggattacaggcgtgagccaccgcgcttagccaggaaatataatttctttctttcttttttttttttttttgagacggggtctcattctgtcgcccaggctggagtgcagtggtgcaaactcggctcaaagcaacctccgcatgcgggttcaagcaattctcctgcctcagcctcccgaatagctggaattacaggcgaccgccaccacacccggctaattt

SEQ ID NO: 7310 - DNA, 279 bp, Homo sapiens
agggaactcactgccctaaagcaaagaacacaagcctggctggcattgccacttgctgattatagagctttgagcaaacataagtggtaaccacatagtcattacagtgggccttggatgaaactcagtgctgtgctggcttcagggctcacccagtgcagtcccagtggtggtggccataagggtgcttatgtcactccctcccccagctccaggcagcacagcatagagatagtgactccatttgtttgggagaaagtaaaggaagagaacaagatt

SEQ ID NO: 7311 - DNA, 279 bp, Homo sapiens; identical to SEQ ID NO: 7310

SEQ ID NO: 7312 - DNA, 5778 bp, Homo sapiens
acagcttttaatagccggggatttgaagattcctatgccactgacagctcctccatgtggagtccagaggcaagttatttgtttttcattctttcattggttccctttccccttcccctctttccactctcctttctcatctctctaaaaaaaaaaaaaaattccagaaaggaagcattacttttatctgcaataaatttttgtccagatgaccaaaatcccatgcatgtcaataaaagagtcataaatttctctcaaaatggaaaaaaaaggatgaacggtaaaaaaaaaaaaaaagaaaaaaagaaaaaaaaataagaatggtggcagaatggatccaggaacagccaggcttttcttttatataaaggctttttatagacttaattttaaataatggaattttcagttctttagagggactggtttatttacttcatggtttcaattaagtggagtctatttttatttagcccaaatctcaagttacgattatttgatatgaaaattatttgaaaattgaactaaaatgaaatggccttccaagtgaaattatacaaggtgtaatgatgcagatcttgcactgtgaatatatacaaaatatattttgtgcctaggagacagcattaatcagtaatgcccctctggccattgacattggttttgtagtaaatctctgataaaagatacttcttccaaagttctttttcaagtaaagcttagtccagaataaatgtaacaatcaatccagagatatggctggaggtgatgatggtagtagctaccatttattgagcagttaatatatgccaggcactgtgataaggattttaccaaattgtttccttttactggcccttacggttatttttccattagatagatccctcctatcatgattctgtgacattggaaggcattaaggaatggtgtttaatacctaatttgaaattaattttgatgaaataagtcatatacatatataaacctttaatataatttgcagggatgggggaagaaggagagaggtgaatggattttattagcatccatttgagaaaataaacaggatgcatctcttattaggacttggagtgtcacacacgctaaatgctcaaggtaaaaaaaaaaaaaggaatcacagaaaaccctgtttccaagccttaactgctaacatgttggcgtgtgtaggtagtatctaaggaggggtatgcatacacatctgtgcccctgtgtagatgtctctgctgaggaccagaaatggtagctcacatatgtggtttgtggcttgttaaaaagcagcccttcatatggaggcacccaaagccattaactttatacattttgtttaaaaaaagaaaaaactctgcttacccgttagtttactaccaagccgtatcaaatcccacacactaactcttaaaaaatattttgaatctctctcccaaaaacaaaacagaccaaatgatttgcctgcctattgatactctgtctccttggtgattgtgccatgaggcttggaagtgacttctccaggtcacctcccatttacctgcctgctggagctttaatagaagactcggtattgagggtactaaatgttctcagactccaaaaatacccagacatctctgtgtgctccattcaacctcctatctattttgagaaaaaactgtaatttggtgctcctacagtagaacctcaaatccaactcggaggcagttcccgtaactgcctgctttgcaggcttagcttgccttttaagaaatgatttatttgcctcttagctgtattgagaactctgtcttcccctgtgtatctggcatcaggaacatattgtaggcctgtttactttaggccacacagatgacatcaacactatcttactaaaacagaaaggctttcaatttgacagaaaatctttaaacctacctgggttttgacaatttgacacaagtattctcatcttaaggaaaagcccaggatattggagctcaaggaatcatttattttgtctcagcaggaaactggtcgtgcagtgtgactacctgttaggctgatggattttcgagctctgctcttctctgctggcgaaggcctttggctttttcctgcagacccagggcttggcaggaaagacaatgggagtgtggctggtgattttgagcacacagggagacaggtgtcccacttttcatctctgctttccactgattaattggttggccttgagaagttaattaaaatctgccaaatggggataagaatgaagagatttttaccttgcaggaaggtcagatggattagtggtattaacagtacccaagtgaggagctccttcagttgcctggtgagaggtaaagtgtgttgaaataattaattgctatgaaaataccagcattcacaaatctttttctcaaatcaacccagggaggggctacaaagcccagttttcatgggccacagcttgaattggcctatccaaagcccagccattggcaggatctgtttattcagaggagttcttaggacagtcaggagctctacccaggactctcttagaaacctgcaggtggagtgagcatttatccgaagagacagcctgatacataagtggagagagctcctcattcactaaaatatttttaccttggcattgaagttgacaaaactaagagctattaactaacattaagagcaggggcctcaaaggatgtgaaaaccacagagagtgtgattccaacccccaccttccgtcttctcccccttcatcttgtgcgcttgctctctctctctctctctctagtgctctctcgctctctctctctctctctatatatatatatataaacacacacacacacacacacacacatatgtctatatgtagaaatagttatgcctaaaggtttggggaagaagaaaggagactgtatgtttcaaaataaggtttgaaattttgagtattggatacgagttaaggcaggcctgggactcaaactgccagggcatgagtcctggataatcttgtctgggaatttgatctgggcttggggggagagagcgtgttagttatttagtctttctaagcttgagtttcgtcctccataaaatgaagatattaaaatacctacctcattgcattgatgtaaatattcaaaaagataatgtttcttagttgggttcctcaaaaaagcagagcctacgtaaaggctttgttccctgctttgggagtgcaaccccagggaacaaaagtgcgagacaagggaagtaaggcagggaagaagggaggtcaagtgtgagaatacacagttgaattggccaccactcagtatggctaattgcctgatcttgtgtgatcacactccaagaagctgtatgaactgataggacaactgactacggggcaaaaagtagacttcacatatattggtgtcaagcagggttctgcagctgtctaagccttggcggtcgacagagagaccaatgataagaaatgagaattatattgtgtgggtagaaggtaagactttattgagtagttccaggctgaaactacttagagcccatataggctgtgccttaggggaagatggaacatgagttaaggccaagaagatctgaagtgtttaagagccaatttttatagtctgtaaaggatttgatatggtatttggcataagaaatagtttagtagatgttagctattattacttatggtcagaaatgcaatacagagatgatcaagagtaggctaaaatagatgggagttttaggaagagacaagggagtttgagagaagattctgacttgatttttgagttggcctaaatccttggagacttgcttctaatatatatacactagtcagttgtattcaaaagtctctatagcaaccacttttatcacttgaaactaagtacctctgaatagaaacactcacgcatgattgcatgctcacaggaaaggatataagaagcttcacttattttacaagaaatctaaattttcttgcaggctaatttgaatcttaaaagaaaaggatatttattagatgtctactgtctgtcaagtcctctactttttacaacatccctacacagaaggtaccatctccattttacagttgaggaaaatagaacatggaaaggattaaatgacttgcccagtgtcatagagctagtaagtggtaggcctgggcttcctaaggaaatacgaacccagagaaccatgaactttcacccagactatgtgggaaagtttcattgatggatgcacattttgaggcattgtattataatttgaaacgagatctctaaattagcaagttctggtgttcaattgcataaataagaactggtttgcaataagaatcagatcaaagtttagttacaggtaaggatcatgccttcagaggaaaatagaattattattgacattatttataatttgttagtggggtggttcattataataaatgcagcctagctcagttttcccagtaaggtcatcagatctgagtggctgcatgtaaattgctacccaagggtgacattccataaagagggatgtgtgtttgagaataggtagcaccagtccagtggtgggaatagatatttatgcagtctggtctaagccaggtattttcatatcaatgaaaacctcacaacaacacaccagcaagtaggcacattaatgtgcatttttaagctagactaccgagaggctggtctatttggccagggtaaaaaagctagtcagtggtagagttatgatttcaatttaggtgttctggctccaggctcagtgttgctgtttactaaagggctgtggaggtgtcctcctaaatccttgctgctcaaagtgtgagccgaggctagcagcgtcaacatcccttgtgcctgtcccagaaatggcaggatctcaagctccactccagacctactgaatcagaatcctcagatgatttaggtctacattaaagtttgagaagctcagccctaaaccttttctcccacttagattgaaaatatactgaagcatcaccttcctgggactcccatcaaaattcttgtctgtagaaagctcttgcctgtggagaacaggctcaggctcaaccatctgtatttagggacacaaggaaaagttgcctatggacaattgcctgttgacttaattttagatttagcatctcagttggtttcaatgatcctgggcaattgtgctttttgagaggcagtatatatgaaaacactttgcaaaaatataaaagctttagttatccattccaaaaacattcacgaaggcgcaccatatgctaggcactttgccgtcaaagaattcacagtttaatgcagcgatagaccagtaaacagacctatctgatatagagggaatacactggcagttagaaagcagggattctgaaggagcacaaaggggcaccaactggccaaaatgtaattgggtatcatcatttccatttctaattgtttcctctgcctgcaacaggaacaggacaggaccaatttgcaggtgccatccggggtctcagagcccatctcaaagtgtggtgacctagatgtcatctttgaatatagagccgccagccagaagctcacagtgaccattgtgagggcacagggcctcccagataaggaccgaagtggtgtcaactcctggcaagttcatgtagtgctgctgcctggtaagaaacacaggggcaggacgaacatacagagagggcccaaccccgtcttcagggagaaggtcaccttt

SEQ ID NO: 7313 - DNA, 421 bp, Homo sapiens
gaaacagaaataggcaaaatttatgagggaaatctgatttcccaattctgatgaatagatatactaagacagtagccttgtttaaccagtgcctgtagaaggcactagaataaatagcatgtccaagagtataacaactttttttgtaaatttagttactagcctaatcaaactgtaaatataactcactaattggtaccatattttcatttttcttattgttcatctttaaggtttcattttattgcttttttgtagctctaagtaactaatcaatttaatttcaaaggaaagttaaagaaagtttaagcttttactgcatggattctgcccgcctagctaggttctgaactgacactgaagtatgacaagatacagattatagtccaaaactatcctttacagttcacaatttaagaac

SEQ ID NO: 7314 - DNA, 421 bp, Homo sapiens; identical to SEQ ID NO: 7313

SEQ ID NO: 7315 - DNA, 860 bp, Homo sapiens
  SITE (638): n equals a,t,g, or c
  SITE (642): n equals a,t,g, or c
  SITE (671): n equals a,t,g, or c
  SITE (780): n equals a,t,g, or c
  SITE (822): n equals a,t,g, or c
  SITE (855): n equals a,t,g, or c
gcctcttttgaaattaattcatatttttaaaactatacataaagatactgtggaatgaccccttaacagtgtttaagaaacatatgctgcagttaattgactgtctcagttagggtgcggatgtgtgagacacaccttttttgcacttatgtacatagtccatgaaagcaatccttggagctttttttaaatgtaagaagtctgtgataatagtggaaaagttagtaagagagagttatttctaaggctttgaaaaggagggtgtttttgctctaagacttaactaaagcataatgttgctttgctgttacggaggctttctagtttgctacaggtcaccaaaagagaaggctagtaacaggtaacaggtcagcctcagctaacagcactgaacaagagtagaataacttcatcttttaacaagatcattagcaaagattgtttgctttttaaattaatcccccctataaacacacacacacgtgtgcacacacacacacacacacacacaccgggcagtttctagaacaagttttcctttttcagtggttgtaagcagtgaaatacctcatgtattacaagatagatattaccgttatgatagaataagatttcatctttcacagaaagtgatcagnctgnatatatgtgtcagttaaaatgtttatcanattaataggtatttaagtgacaaattgttaatgttgaccattgttcctcctttaagatccagtaaccaaaaccaaatcggtaaccattgaaagatgatatttaacagtntaaggatggccagcatagggccgttcattcccttcaacaaangggaaaaaaaatgctcctggcacaactttatanactgg

SEQ ID NO: 7316 - DNA, 342 bp, Homo sapiens
  SITE (206): n equals a,t,g, or c
  SITE (218): n equals a,t,g, or c
  SITE (225): n equals a,t,g, or c
  SITE (236): n equals a,t,g, or c
  SITE (246): n equals a,t,g, or c
tcagaggctttaatttgtagttaatcatgatgtggaaagtcatcttctctctactccatcaatttttttcatccgtttttgaacatgctgaagcactttgatcttgccataagtgttgtcctataccactaggtggtgttcactaatgggagggcctcagctcaccggctctccaatttgggaaaaagcaagtacctcctccctanccatcagcaganaactganatgaaattaantctttgcaancttgaatctgttttaagtagcattaccaataagcatagtggtatctgaataaggaatgacatttacattacattttattaaataagagagaaagtt

SEQ ID NO: 7317 - DNA, 518 bp, Homo sapiens
tcagaggctttaatttgtagttaatcatgatgtggaaagtcatcttctctctactccatcaatttttttcatccgtttttgaacatgctgaagcactttgatcttgccataagtgttgtcctataccactaggtggtgttcactaatgggagggcctcagctcaccggctctccaatttgggaaaaagcaagtacctcctccctaccatcagcagaaactgaatgaaattaatctttgcaacttgaatctgttttaagtagcattaccaataagcatagtggtatctgaataaggaatgacatttacattacattttattaaataagagagaaagttaatgtgctacttgaaatgttatttggttctttgtccccctcattgcagagtatagataaggatgctcttaggtaaaatgcagccacaagttttccgagttcctttagtctgtagggtaggctatgaggtacagaatgattagaaactgaaatcctcattatttttctctcaaatacatttc

SEQ ID NO: 7318 - DNA, 3019 bp, Homo sapiens
ctagaatcaggctttatagtttatagaatttgttgtgtggatagggttattccacagtatttagacttcaaaacgcaatcattgcatttttaatacattacctaactttttttataacttaattcaaaattaccccattcaagtggcatagctgtagctgcaaaaattctgttttctggaattacatgagcaaatatagctatatgaggattaatgtatgactaaagcctcttttgaaattaattcatatttttaaaactatacataaagatactgtggaatgaccccttaacagtgtttaagaaacatatgctgcagttaattgactgtctcagttagggtgcggatgtgtgagacacaccttttttgcacttatgtacatagtccatgaaagcaatccttggagctttttttaaatgtaagaagtctgtgataatagtggaaaagttagtaagagagagttatttctaaggctttgaaaaggagggtgtttttgctctaagacttaactaaagcataatgttgctttgctgttacggaggctttctagtttgctacaggtcaccaaaagagaaggctagtaacaggtaacaggtcagcctcagctaacagcactgaacaagagtagaataacttcatcttttaacaagatcattagcaaagattgtttgctttttaaattaatcccccctataaacacacacacacgtgtgcacacacacacacacacacacacaccgggcagtttctagaacaagttttcctttttcagtggttgtaagcagtgaaatacctcatgtattacaagatagatattaccgttatgatagaataagatttcatctttcacagaaagtgatcagctgatatatgtgtcagttaaaatgtttatcaattaataggtatttaagtgacaaattgttaatgttgaccattgttcctcctttaagatccagtaaccaaaaccaaatcggtaaccattgaaagatgatatttaacagttaaggatggccagcatagggccgttcattcccttcaacaaagggaaaaaaaatgctcctggcacaactttataactggcttcatttacattatacctgttcagtggaagctgttttttgacctacctttaccagattacaaagtagttaactgtgccacttcagcctcccactgttttgttttaactaaacagaagagaaccagccaaaatcttacgtaacacaggagctggaagacaatgtttcaatctgaccatctctgccaattttagctcccacgccacctatagatagccagttaactttctttttgcccccaggcaatgaggcctagaagaggtcaaggttagaaaggttaagcatttgatcactacaggtacttgtagtacctagagaaggaacccatcctggggttggtggagttggtattgctactcgttttgatagttctcatttacagagaaagaaaaataagccaaagccagaaagcaatccaagccttacagttgtccaatacctcagggccagttggctagaattttcttttccctcagcccataatcacttagagttagccatacaacaaacagcctgacaatctgaccagcatttccattgatataaaatgtaagcattccttcattctgtagttaggaactccaacttcagccttatctccaacataatttcccaatttaacctatgtactgatatggacatttctttgtgaatatgccagattcaagaatgtatttttctaaggtcaatagagatacgacattttaagtcaggaaaaatcacctataaattagtaggaataactgtagaagcatcacaaaagataccccatgaatagatggcatggtgtgcatgctgacagccacggggtcatactctggagtttcaacatagaggctgtgtttcaataaataagacaaattggggaattaagtaaaacaaatggatgtaactgaggcccccccccaaaaaaagccctctattactaacctcaagaaaatatttagtttgactaatttgtgcagtttccagctcttctacttgttcttgcctgtaagagaatcactaatactcaaaagctggattattgaagagaaattttatctttaaatagaatccatccacaattatggtatatgtaaaaaaaatgtatgactatgaaataagtcgcagctctttgcagatattgcaaaatccttgctaggcatctacatcatattagttttttaaaaaatacctctgtaacaagacctaaaagtaacctaactattaagcagtgcttttttctctgaaaacacacaacctaaagatttatctgtcataaaactgcatggttccagagctttatttctgtgtagagatgctatttgttagtgatggaaacaaattactttgttgctatgtcttttgtgtctagcagttgagagaatgatatgaccatcatatcactggattatgggaatgaatgcccttttcaaaataaacttatttattaatattttaatattattttaatattataatattaataatattttaatattattgttgctgctttaacagaaaatgagccatttgtccccatgctcccaaattacaatgatttaaattaaaaaacttttgaaggattttcctaaatatattcttttttaaaggactaactttgtgcattcatataacaacaatttggaataatgtgaaaaatggaggcacataatttgggtggaaaatggcgattaaaaatatatataagaaaattattagccatgtgtaacatatttaaataatgaccagaatatttcatgagtaccaactcttcccatagtaattttcctccaaaatgcaatagctcattccctcaactgcagacgctttgattttttttcaagttatagtgctgtagtgcttgtttatgtttaaaagtgcacattatgcagctcattttagtatgctacttctatgtttattttttgttcttctaataaaatgcataaacttct

SEQ ID NO: 7319 - DNA, 32145 bp, Homo sapiens
tttctgtaatacaaaatcaaaaccaggaaattgaccttggaacaatgggaaaaaaaagacattttattacatgtgtagattcatctaaccactgctgcagtccagatacagagctgttctgtccccacagagacctccctcgcctgctggtattgacatcttaccagtgcaagtgaagtatagaagactcacctccctttaagtctctttaccgtcccttgtatatagtataattgtcttaaatattttctccatgtgaattggggaccacatcagacaatgctgtggacaaaatgcttttaaaaagcgttttaaggctgggtgtggtggctcacgcctgtaatcccagaactttgggagaccaaggctggtggatcacttgaggtcgggagttcaagaccagcctggccaacatggcaaaaccccgtctctgctaaaaatacaaaaattagccaggcatggtggcacgtacctgtaatctcagctactcaagaggctgaggcaggagaattgcttgaacctgggaagtggaggttgcagcgagttgaggttgtgctactacactctagcctgggcaacagagcaagattctgtctcaaaaaaaagcattttaaggccaggcatggtggcttatgcctataatcccagcagtttgggagactgaggcaggcggatcccttgagcccaggagttcgaaatcagcctgcccaacatggggaaaaccccatctccactaaaaatacaattagccgggcggggtggcatgcaggcctgtaatcccagctactcaggtggctgaggcatgaaaattgcttgaacccaggaggcggaggttgcagtgggccgagattgtgccactgtactccagccttggcgacaaagtgagactctgtctcaaaaaaaaaaaaaaaagcattaaaaaaatttcccctttcagactgggcatagtggctcacgcctgtaatcccagaactttgggaggctgaggcaggtatatcacgagttcaggagattgagaccatcctggctatcacggtgaaaccccatctctactaaaaatacaaaaaactagctaggcgtggtggcatgctcctgttgtcccagctacttgggaggctgaggcaggagaattgcttgaacccaggaggtagagggtgcagtgagccgtgatcatgcctctgcacgctagcctgggcgacagaacgagactgtgtctcaacaaacaaacaatttcccctttcagatttcgtaccctcttccttgttgatttcccaatgggagcagtccccctgtgagaagcattgctactaaccagatagactgttctgagatgatagagaattttttgtgtatctttacaagccaagaagaattcacagttttttggtttataatctgaataatgaaaataagcggtgttttatgaatataaaactatattatatgtgtgtttttttttttttttttgagagagagtcttactctttcgcttaggctggagtgcagtggtgtgatctcggctcactgcaacctcccccctacccaggttcaagcgattctcctgcctcagcctcctgagtagctgggactacaggtgcctgccacaacgcctggctaatttttctatttttagtagagacggggtttcaccatattggccaggctggtttcgatctcctgaccttgtggtcctcccacgtcagtctcccaaagtgctgggattacaggcgtgagccaccgcacctggccaaatgtgtttttaaaaactatacctgtatctctgctctgtggcccatgagtcttcttttagagccactgataattttagcagtgcatggtgttcccatgatttctgatgatcctgttacccccttcttactctctcacaggcattgttaatagcaccatttatctttttctgaggatctatggtcttccccagactgtaatgttttttagtcctttatggtcatctctgctgttaggccttcactgtcatttagtgctgctgtctgagtacttttttggtaggcacatttcgtttgttatgcatcagttttgatatttgggtattttatatcccaaactaattgaacacttcttatttttaggtcctaacatttggctagagtatggccagtactcagttggtgggattggtcagaaaggtggccttgagaaagttcgctccgtgtttgaaagggctctctcgtctgttggtttacatatgaccaaaggactcgccctctgggaggcttaccgagagtttgaaagtgcgattgtggaagctgctcgggtgagtacctgtggttgtctctgaacgggttggggctgtctttgtaagtctccttggaaggattattttgaaacacatgtccatgatgaatcttgcagttcatatagttaacaaaatggtctttgccaatcccttagtggtggggtgatagataacctttttttataccccttctagcatttggtacaatatgtatggaagaggtcgtataaatttttttagcttgaactgaaaatttgttgagatattttttgaagtagaaagaaccagagttggccaagtgcggtggctcatgcttgtaattccagcagtttgggaggctgaggccagaggatcacttgagttcaggagtacaagaccagcctgggcaatgtagtgagtccccatctctacaagaactaaaacattagctgggcatgatggcgtatgcctgtggtcctagctactcaggactctgaggtgggaggattgcatgagcctggagtgtgaggctgtagtgagttgtgatcacaccaccacactccagccagggtgacagcaagaacccttctcaaaagaaaaagaaagaaccacagtttgtcatttactactaatttgcttctttagcccgtagctggcttcctttccccttttgaccgggaacaaacctttgattcacagcttgagaaagtccacagtcttttccggcgacagttggcgatcccactctatggtaagagaaactgacatgtcaacagccagccctctatggtttttaaaatgctttggggaacaacatgtagttagacctttcccaccatcctgtgaggcaggtaaagctggtgttcttactctccttggatattgtctctttggatgaggtccttggtaaaaacatcttgaatgttagtgcttaagagggttgtgagggtcagaggcaggactggaagccagactccctgactcccaggtgagagctcttttctcctttgagacctagttggaagggcagagatagggtctctgaaaggaatagtgaatgacacctgtattttttggggaaacttcattgaacaagagttccattataatcattttctcttcacaagtaacctcttccataacagcaggaattttacatgagtttagatcattcctctatgggagggatttggttcagaagtgcagttgattggaagtactcataagtgagtttcttggggtttggtaaagagtttccttatttggtaaatacattttggcaatctaagcctttgagtctttggagctatgagtgtgtgcgtgctgggaggatttttctgagtatgggaagagtttgtcatggctgttgtgtttgttccctagacacgggcatgtgttgtacatactcagaacctctgggcaactttactggagcccacatgttatttctcttcatggtttattggatttaacaagttataaagtagtcgtctaatcaaatggttgggtatcatgcagaaaacactagagctgagccggcttgcagatttcacctaccagcgtgaaacaacctagcataatgattagagtgcgaacttgagccagactgcttgggttcacagccttgctctaccattaactgtagacgagcaactgaaccctctgcttcagtttcctcaactgcaaaatgaggatcacaatagactaccttgtagagtgggatgactgaatgagttagtggatgtgaagtggtagaacataggtaacactgggtaagtgttgttaaatcgttgccactagtgtcattgactgattaattagctgggagggttgcctgggacattgttttaagacagattctacagacaggtttgggctcagcagaaatcagaatttgatcagtaagagctgccatgccacagatgtgggaggggctagtggcacctgagtctcatggcttaatctgtgtttgggttgataaagcccaatggcaagacccacggggctgaatccatctttcaatagatatggaggccacatttgcagagtatgaagaatggtcagaagacccaataccagagtcagtaattcagaactataacaaagcactacagcagctggagaaatataaaccctatgaagaagcactggtaagtgttggcttcttttatagtaaacgtctctctacaaacctttccctgatggatagttgcgagttaaacagtatctttaaaatgttttattctgaaatatatagagtgtataaatgtatacgtacagtttacatactaataataaagtgaacatccatgtacctaccacccaggttaagaaatagaacattgccagtaccttagaagtctcctatgtgcccctctccgattgcctcctcctccctctcccgagaggtaatcactttcctgacttttgtgatgataattcccttgcttttctttatagttttacaagctatgaaagtatccttaattaatatattgtttaattttgcttgcttttgaacttttatatattggaatcatgctgtatattttattttcattgaacatgcttttgggttttactcatgttgctaagtataactccggtgcatttgttttcactgctgtaaagttgtctgtgtactgcgatgtatttatccatgttgctggatagttgggtcatttccaggtttttgctaggagaaggagcagcgccactctgaacattcttgtgtgtatctccttgtacacatgaaaaagagtttctctagaatacgtacttaggaatgactttgctggatcatagggtgatgttaaagtgttttccaggttatcagtttgcactgctgtgagcagtatctgagagttctcgttgcttgtgccaatcttggatattggtcatacttaaattttacttaatttgatgaatttgaaattgtagttttaatttgtattttcttggttactaatgaagttgagcatcttttcacgtggattggccattcaaatttttgtgcgtgttaaagtgttcaggctgggcacagtggcttatgcctataatcccagcactttgggaggccaaggcgggaggattgctggagcccaggagtttgagatcagcctggcagcgtagcacaaccctgtctctaccaaaaaaaaaaaaaaaaaaaaaaaaaaaaagccgggcttggtggcatgtgtctgtagtcccagcttctccagaggcgaaggtaggaggattgtttgagcccaggaggtcaaggctgcagtgagctgtaatcatgccactgcattgtcacctaagtgacaaagcaaaaccctatttcttaaaaaaaagtctgggccgggcggggtggctcatgcctgtaatcccagcactttcggagcccaaggcaggtgaatcatgaggtcaggagtttgagaccagcctggccaacatagtgaaaccccgtctctactaaaaatacaaaaaattagctgggcatggtggcgggcgcctgtaatcccagctgtttgggaggctgaggcaggggaatcgcttgaagccgggaggtggaggttgctgtgagccgagatcgcaccactgcactccatccagcctgggcaacagtgtgagactccgtctcaaaaaaaaaagtctttgacccatttcccttttgatgtatcttttttctaattgatttgtgggagtgctttgtcttaagtcttattttaggctgtatgtgttgcagattttctccccagttgtttgtcttttcacttctttttttttgagactggagtttcgctttcacccaggctggagtgaagtggcgtgatctcggctcactgcaacttccgccccgccaggttcaagcgattctcctgcctcagcctcccaattagctgggattataggcccttgtcaccaagccccgctaatttttgtatttttagtagagacggggtttcgccatgttggccaggctggtctcatactcctgacctcaggtgattcacctgcctcagcctcccaaagggctgggattacaggcgtgagtcactgcaactgccttttcacttttttattttttaacagtgtcttttgatgaacagttcttagtgatcaattagattaaaattctttcccttttggttgtgcttttgttgtgcttatttaaaaaatattccctacttagctctaatttcttctaaaagttttatagttttctgtttcatatttaggccctcatccacctgggattgatttttgagtggtatgagactgcgtctggtttcatttttccatatggagaaccagttgttctagtactgagtttgatcattccttcttcccctcactgatgtgcagtgccacatctgtcatagattagctgtccatttatgtgtgggtctttcttctggattttctgttctgtcccactggtttatgttacactgttgtaatgatgagagttataatgttttgctcttggatagggtgagtcccatccacctttttcctcttcaagaggatcttggctttttttttttttttgccttcaatgcttccatcggatttagaatcagcttttctagttatatttttaaaatctttttttttttaattggaattgcattgaacctggagatcaatttggggaataatttacatcttccaatctatgaacatatataggtttctgctacttatatcttgtctttctgtaaagctttataataatattataaatttgtccagtgtcttcaacacttgacctttagagtcccctgcaagggagatttgctggtaacagattttctgtgttcaaaaaggtctttgcttcccttcttgaaaattattttcttaggctatagaattctagaccgacaacagcaaaagaattctagacggacaatgtgtcctctcagcaattgattgtatctttctgtcttctgatgtctgttgttgctgttgagaagtcagcggtttgtataaatcttgcttcttcagaggtagtcacttttttgtctgactgcttttaagatctcattgatttggtttgctgtcctctaatttcactgcagtaggtccatgtgtggactggcttgaagttttttgggcttcttgactctttttttctatctttctttgccaacaataggattgtgaaggtcagattcttaatatacgtcaagccagcaaaaggttaatgtttacttagcttgccaccctcatttagattttgtccttagtccttagtatttcttgtttctttgccagtttgttgatgacttttaagaagatattatatttaatttagcagttttagttgttttgaatggtacagtgtgtctgggtaactaattcttcctcgttactggaaatggaggccctgaaacatcccctttctacatatggagtctgtgtgttctcttactctcctgcactgcttcatcctttctttttcatgtgtaaatgatttgcatgtacctgtgcttcccaaaacttcgatcattcaattatgtcatggccatcagcaaaatgtgcctgaagagaaaacatgtcgaataagatttttttctaaaaagaatttgattgtatgtctttggatcattaaacattcagcacagctgccttcatcttctgcatttatctacattcttccaggaactgatatttggaataagaaacctgaaatagcatcaggcaccaaaattttccagtttggttgtattaactctactcagtagcccaagaacatgacttctggtttggaagggtggttgacagtggtcactggcaaaggtgttgctctttcactcagttcctgattgatgggctacttaattccctgtggtctaggaatggatttagaaaagagtttatggagcctttgtagcgactgccatgaactggcactttggaccagatgagaagactcttgttttgctcaagaagttgtagaggccatagtggagtggttctgagagtgaggatttggcgattcatagttactgtagccagttttgccaaaatttattttatttgcagatgtgttgtgcttcctgccagtaactaaattcaatacaattttcctgtactccagttgcaggcagaggcaccaaggctggcagaatatcaagcatatatcgattttgagatgaaaattggcgatcctgctcgcattcagttgatctttgagcgcgccctggtcgagaactgccttgtcccagacttatggatccgttacagtcagtacctagtaagatcactgttctaatttcattttatttttgccaatttagaatctacttaaaatcagtaagagtgccaggagtttgttgcatacggccctactcttgcttttcctccatctgctttttctcctctttgccaactcgtttagaaagttttagtgtttcaagttatttaaaaatggtcactaactgtaagtaaaatgagcatattgtctgtgttgaggacttataacaacttgatatttttcttttaactttttattatggcaaaaatgtaaacatataaaagtagacagatcagtaaaatgaaacttctgtacccctcacccagcttcaacaattagtaacatttatagctttagtttactttgatctgtagtctcacctacttgtcccttctgtgttactttgaagcaaatccagaaatgatatttcgttggtaaatatttcagtatgtgtatataaaatatttcagtgtgtctgtataaaaggatccaaatgaggtctatccagtagggttggctgacgtcttttaaggctgttttaacctgtaagttgctcctctccttctcctccactccccttagtgatttttttgttgttgttgaggaaaccaggtcacaagagatgtttataaggacatttctttcatcacttggtcgtgctggcaatgtcttgttgatggtgaatgcttaataaagtgtaatttcctaactctggaattctttatcataggatcgacaactgaaagtaaaggatttggttttatctgtacataaccgcgctattagaaactgcccctggacagttgccttatggagtcggtacctcttggccatggagagacatggagttgatcatcaagtaatttctggtgcggatgtttttgtgggagaacttctaagctatttgtcccaagtgaaaaacagagagcggtgacaaagtcattacatcagtgttccctggggttttctttgggttatggagtgtagtgacaaaaagggctctgagtgagagatgaactggttatatttgtggcttcttagagctttttaacatgctaatattcattgtattttctaagaagttgtagtgttttctccaaacttccttgatctggaacttttcttgcagggcgtcttgtggaagaagttttttctagaacacagtctgtagagtgctgtagcaacttctgtcttcaacattcctgtctagctcatttcattctgttgcatctattagtctttaaagtcatgtagtgttttatagtcagtagaatgtagtgactttctattagtttccatttgaattggtaacaaatcctgacttttctccaactccagtaaccttcgagaaagctttgaatgccggcttcatccaggccactgattatgtggagatttggcaggcataccttgattacctgaggagaagggttgatttcaaacaaggtatttaagcacatgtttttcactttagagctgaacatgttcttaatacaacttttggcgagatgtcccagttccccagatacattgtgattgggcaaatgatgtagactaggtattggtgactttttcccccagaaatcttagcaatttctgtctttaacaagtcatgatgtggattgtaaagcaagagagtaatcgtttatactggctcctgccagcctttttagtcttagctctcatttctcctttcaggtctttttatttatcctaaatacttcttgaaataagtctgctgtgttttagaaaaatctttgtacctctgtgggatcctttgccccttcatgtccccccgaaaacaaccagaaaacccctaacttgtacttgcacactcatgtcagctgtcacctcatacaggtagcctttagccattctcttgtttgcctgtgtcaccccagctgggggagactcccccccacagcaccctgtgtttgcctttttcaccacgctgtccatgctctattctgttcaaatttctttctccccaactatgtgatgagggcaggaattggcaattttatttctgtgtcccttgcatgatgccaggtacatagtgggtctccaggcagtttcagcataggataaaaaataaaacaaagccaggctatgtggtttcctaaagcctttttttgcactttccgttagactccagtaaagagctggaggagttgagggccgcctttactcgtgccttggagtatctgaagcaggaggtggaagagcgtaagtatgccccagcctgtggttttgcccagttgtatttccttgtctgtactatttcctggttgatgtaccttttcagccagcgactatctgtctccaagttcctttctaattttactaattctgtttttgaaggtttcaatgagagtggtgatccaagctgcgtgattatgcagaactgggctaggattgaggtaaatgtttttgacacatctagcactttcatccatcattgtttaatagcatcctattaaactttaattaaaattgagtcagaatcccagataatggcctaagctctataaggatttatgttattacctaggtaatggtctaggctccacaaggattcatgttatttacctagcttgacatatatttgtaaatatgttggtgaaaatattagctcccagctagaagttgtgcagtaaatgtttagatgctaggtattcactcgtttacttctgtctctgcctctttgcttcatttgtgagagcacagtgagcgtgtactgtttgtcagcactgtactaggtgctgtgggaataagacagataaaattcctttgctagtaaggcttctatctaatgtagaagacagatgatttgacaagtaattagaggatatgatgacttgaatgtcattactgggtcagggacaccaaggtcagtaagacacggaacctcccttgatcagcaggtaggattgtaacaattctaatcatgttttctcctcggagggagcgtcagatagaagaaactaacatttgtcaggtagtttttatatgggatgcttatcttttaaccattttaaagatgagaaaactgagaattacaggttaagtaatttgcccaagtcacagtttgtaagtattagtagcagagtgtgcatttaatactagatcagtcttttttttttttttaacattgtctctcaaacacttgtagttaagcttgataaaaataaaaaacgtgactatctagtactgtcgagtaagtaccgtgcgctccctctctcggttctcaggaaacataggtagattagcttgtggctgcagaaaggctcaagtgtttgggctgggtcgtttaccactggagggaggcctggggaatgcccagggacatctgtaacactaatagttgtggggtgctttttatgtgtgtctgttggaagtgtgttgtatgatgggtgtcgacgtcataaggttcaggtctcctaacagcctgctgatgcactttaggctcgactgtgcaataacatgcagaaagctcgggaactctgggatagcatcatgaccagaggaaatgccaagtacgccaacatgtggctagagtattacaacctggaaaggtaactgatctcggggtggggagggaggcagtgcttgtcagctgtgcacctgtcttcactcctggctgactcctaccagcttggactagctccttagaactgggctgttttctttcattctgtctctttcagtagtgggtacatttttaatgggcagggctagagaaccagacatgatattttgtgcctggaactcttatagccatgcatttcttttaatttgtttttgtcttgatttttgggcatgatattttatttgaccttttggagctatttgttttttatatttgcttttatagaaaagtagaaaatactaaaaagctaagagaaaaaaaactcaaattactgacccagtcataaccatgacccattctttgagacttttctatgtttaaatttttttgtaatgaaaatgcaattatagcatgcatgtgttacaagcctttaaaactatttgaacgaaataagataggcctaacaatatttataacatggggaaaacataaagaatgtgaccaacttttcagtctgtcttgaacgttgttcattgcataacattgctacattgctgggttttcttttttgaagattttttccctatttaaaaaacactgtgtgcccaaattagaatatttacaaaaatatgtgatagaaagcgacagtttcttttcttttttcgggggaggtggggagtctcactctgttgcccaggctgaagtgcagtggtgcagtctcagctgcaaccttgcctcctgggttcgagcaattcttctgcctcagcctcttgagtagctgggattacaggcgtgcaccaccacacctggctaatttttggatttttttttttttttagaagaggcacagtttcaccatgtaggtcatgctgacctcaagtgatcctcctacctcggcctcccaaagtgtaggaattacaggcatgagccaccatatccggctaaacgtgacagtttcttacaatcccaccccagagataaccactgttaaagcttgttgaatatccccctagatctgcagttcacaatttttttggtctcaggatccattttccactcttaaaattggaggatcccaaaaaacttttatgtatgtgagttatatctattgatatttataatttataaattgagaaatctaaaaaacattttaatttatttaaatataacaaattatctaacattaatatcttttttgagcagtgactgttttccagaccccaaaataatatagtgagaaaagtggcagtgttttctatttttgcaaatatatttatttgcacattattctgacctaggagaagacagctaaattctcatgtctgttactgattctgtctgttgtgatctgttgttttcattgaagaggttaggaaagaaaggtattttagaagcattttcagataattgtgggtattcttctttcatacatattatagcaaaacttcagtgttgcatgtggaatctgaaaccatattgacagagtctgttacagtaatacccatttgtctattttatcttttacttgatgccacaattctacgacattatttggaaaaatcccaattcactaaatcatgcagctcttccaatgttgacatatttcatcctatagtattaaaaaatcgtatttgttcatatctgtattgatcttagttgaaaagtattttaagtaggaagctgtcagacttgtggtggcagatacaagttttccaaaattctaattttcacttgaaagcttgaattctatcacatgcaacaaataatgtcagtggttttccccagagtggcagcctcactttgttaattttcaaaaatgtctgccaaatacccaggtctgagtaactgaccgtggtttgtcactcaagtttcctttcaagtaaaaatggtgtccttgaaaaaaatgacttgattagcttgcaactcaaacagtaatatgcttttttttttttttttggcaataaccattgtacttcagtatgcagaagggctttaagtgtacttagtatttcatcacacagtgcattaaaaagatttctactgccttgatttgtgctaagggccaccattacttgtgcactgtcttgaagatgtcaacacagtgaaaaagtccagtaatgtcttggtattattataaaaggagttttgactttgcagggcccctgagaggctctgggagatcctcaggggtacgtggatcttactttgagaaccagtgctctgaatttattctgagcatcataatatgtatatataattatgtatatttaaaatgttttaaaaacaaatatgaatacactgttgcataacagttatgattagcagaattgtgtagctgttgtgattagcagtgtacaaaaaggatctgtttgcgaccagccttgccaacctggtgaaaacctgtctctattagaaatacaaaaattagctgggtgtagtggtgggcacctgtaatcccagctactcaggaggctgaagcaggagaattgcctgaacctgggagacagaggttggagtgagccgagatcgtgctattgcactcccacctgggtgacaagagcgagactccctttcaaaaaaaaaaaaaagatctgactctgggtatgaaatttgacactaccctggattcataactctcctgtcagtaggacgccatagtaaaatttccctggggactgtatcaggttacagagagctgttggactcccccgccatgtgccgcacatgtgaatgctgtaaaggcagaatgctggttgcagatcacaatatcaggtacactttccagtagcccctacatggctgagggagagagtgcttcagggaaatacttcgtaggtgactgtagagactctggaaggagaaagcatcatggatagatctgaaagctaaggtcttctcagaagctagagttactgaagagtgagtttctacctgggagaagacggcctctcccttcgagtgccttccactttgtgtcctggtggcagcaactttttgttttctgccttagagctcatggtgacacccagcactgccggaaggctctgcaccgggccgtccagtgcaccagtgactacccagagcacgtctgcgaagtgttactcaccatggagaggacagaaggtgggacccccagctctcttctggcttggagcctaacccatttgctgtttggtctcaagtaggagcatctggttacagtctggggacagactgtgtttatgctgccaccttaggtggtgccctatgattagactgtcacaagtgtcctgaaaatgagtcctcctgcagctcttctcaaattctgcagctacaaggaggactctgtgatgtcactgtagcacagggttctaattctctgtgggggggactgtgcgttatacaatgtttaggggcatccctggcttctagccctgaaatgccagtagcagcttcaccaccacaaccaaacatgacaaccagaaatgtctcttaacattgccaaatgtctcttgatgggcaggatccctcctttgagagtcactgtgctctagtacaacatctatccaacaaaggagcttggagaggcaaatggctcaatgtgtcctttgcatcccttgttaaatttcagagccttcagtgttagctagaaccaatagaaaaataatgtgaacttatctgtgggtattggtctggattttgggtatggacccctcagaactggcttgcaaagaccaccaaaaaataagaaataaatgcctcaacatttgagtagctcttaaaattcttcagtcttaatataaatgtacttttgcattagaacgttcgttttcatattcttgccatttagagcccttaatagatcatattctggttttcaagtctctcctgaaaggagagggacattttaaacccacttagaaggactatttgaattctgaacttcaagcctacagggattacattttcttattgtttgatgggagagatctcttctggaggtacagagaaattaagaaaaatttatgtgattgtatccttcaaaatcctaaagagtgaaagttttgcttctctttctttcaaggttctttagaagattgggatatagctgttcagaaaactgaaacccgattagctcgtgtcaatgagcagagaatgaaggtaatgacaatgtttgaagtctttggcacctctggtagctattttggctcagtttggtatggatgtttcttgtcaagatgttttacattttcctaagtgtcttttactcagtattaattataaaatatttagatcaatgcttaaacctgtcttgtgtcatttttacattgttctaaaacatcagccccaatattaagtacttgtttcatttagtgagggaattttggctctaaaatttacgagaattgatgaaaaagaataaagaagagcctcacttagcctagtgagtggaacatgaacaccccaacttatttagggcttcagttttatggatttttttttttttgagacggagtctcgctctgttgcccaggctggagtgcagtggcatgatctcggctcactgcaagctctgcctcccgggttcacgccattcttctgcctcagcttctcgagtagctgggactacaggtgcccgctaccacacctagctaattttttgtatttttttagtagagatggggtttcaccatgttagctaggatggtctcgatctcctgacctcgtgatccacccatctcggcctcccaaagtgctgggattacaggcgtgagccaccgcgcccggccagttttatggatttttttgccttccttttggtgagtaatgattagggtgaggaaattgctaatgtaacagagacatcagatccagaattccaacgaacctgaatgagccctggtgtggaacagccgtgagcctgtccacgtttttctcctgatctctgcttttcattagtaatgaatttccactccttctcccctttcatgacaaatcagtacagtgaatgtaattgccacatccagcgatgcatcatcttcccacttttctaggctgcagagaaggaagcagcccttgtgcagcaagaagaagaaaaggctgaacaacggaaaagagctcgggctgagaagaaagcgttaaaaaagaagaaaaagatcagaggcccagagaagcgcggagcagatgaggatgatgagaaagagtggggcgatgatgaagaaggtaaggagctcttgagaaattgtgttttgaaacgtcttaaagttagagaagttgcgaatacagtatgaagaactttcttccctgaaccgttaccagcttgatacccattaccctttgatcactgttagggtgtatgtcttgcaaacaaggggccctcttctacatgactagaatgcagccatcagagccggggttagcaatgagctatgggttcccatttatcctgataatgtcctttgtagtgaaaggatccggttcaggatgcactattgtgtttagttgtcctgtctcctggatctccttgagtctggagcactcctcagctttttttttttactctgatgacctgcagtcttgtaagggggcaggccagttgctgtgttgtgcccctcagcctgggtgtgtctgatgctccctaagcattggattccactcatgcatctcgggcaggaatagtgcacaagtgctcctgtggcctgcccattgagtcccatcaggtggactgtgattcgctttgttccatcactggtgatgacccttttgagaattatttatgctgattctctacttatcccaggtttggctagcaagagttccttcacacaggcttctatgtccctttgacctgtccccttgttctttgatcatttccttaccttctagcacacaatacccaagggtcatcttatactttccataactcagccctggaatccatcatttctccaaggttcctttgagtgatgagtggtatttagaaggtgctagttgtgctcactgctgttggttattgttctgaggcctgagtggtcgagggtagggagtgtgtgtgtgtgtgcgtgtgcgtgtgcatgtgtacacatatttatgaccatatttacttgtgtaactatttgtatatactgaaagtcatgatttcacaccaatacctccagttccggtctaacaccacagggttccccttcacacttgcaatgcccttctctctctttttaaaatttatttattcatttatttttgagacagagtctcgctttgttgcccaggctggagtgcagtggggtgatcttggctcacttcaacctccgcttcccgggttcaagtgattcttgtgcctcagcctctcaagtagctgggattacaggcatgcaccatcatacctggctaattttttgtatttttagtagagatcaggtttcgccatgttggccaggctggtcttgaacttgtggcctcaagtgatctgtctgcctcggcctcccaaagtgctgggattacaggtgtgagccactgtgcccagctgtgtcacgcccttctctgaccttgagaaacttggctccctctattctcagcatcctcagttactccacccggcccctgtaggtatgtaatcaacttcctgtgcctgcctccccttctcatatgtgccatccccaccctgtttggtctcccacacccggggccaggcacggccctgcatggacacccttgcttctttcactcaggcttccagatctaggctgctgggtccctgtcactgccccatgcctgcctgtcttcttccttccattcaggctctagcatcccgcaccactgctgcagccccaaccctgcacagacctgccaggcttggccctacttttttttttttttttttttgagagggagtctcgctctgtcgcccaggctggagtgcagttgcgtgatctcggctcactgcaacctccgcctcctgggttcaagtgattctcttccttcagccttccaagtagctgggattacactttgccagccaccatgcccagctaatttttgtattttagtagagacggggtttcaccatgttagccaggctggtcttgaactcctgacctcaagtgatcctcccgccttggcctcccaaagtgctgttattacaggcatgagacactgcacctggccttggccctgcttttaatggttctgacttagtggaattttccagcagtgtttctttcacccttgtaatttcagggacgggcagctctgggtcatatttatttcagagagtcagtcaaggtaaagaattgtctctggtggctgggcgcggtagctcatgcctgtaatcccagcactctgggaggctgaggtgggcggatcacctgaggtcaggggtcaagatcaacctggccaacatggtgaaaacctgcctctactaaaaatacaaaaattagttggctgtggtggcgggtgcctgttttcccagctactcgggaggctgagacaggagaattacttgagcccgggaggcagaggttgcaatgagtagagatcatgccgttgcactccagcctgggagagagagcaagacactgtctcaaaaacaaaacaaaacaaaaaaaagaattgtctctggacttgaaaggactctgtatactttcttaatacagatgtgtgagccagagagaactgggaatggagtcatccatcgttgagttgaccttgcttgcacaccttgtttgggctttcctaaatgactgaggatggctcattgctccactggcctcccagtttggcagaataaggcaaatgtgatgtgtgaccgcagtggtgtgtgatcagggcatggcgtgtgatcaggactgtgggagatggcattgttaatactggtggaggccaaagaaggcactagtgggtcaacttcgtaccaggaagactgtgggggaagagatgcggcatccagggggaagaccgagtgactgtggcagcgagaagggaaggtctgagctacacagggaggagccaatgttagtacagcctgaaggcacagcacagcctggcattttctgtgagcagcagataattgggtttgaactcagatgcattagagaggggtggggcagtggtcgaggaggctggagtggtaggtgggccagtcagctggacccagcccagggacactcttgaatacagtagcagtgtgcagggcttacgttgcattggaaaggcagcgggtgaactgatggggaggtctgtttgccggaggctgatgtctgttgagcttcagtactggccctctggaggcagtggtgaggacagactgcagtagaagattgtggttaagctctcttaaggacacaaggccatattgaaagtgttttagaaaccacagatcctttgtagtgctttccaaaatgtgctccctggggcacgggtatcagtcactagggtgcttttccagtgcagattctcatgtcctatcccaaccctgctgatctgggctttgtaggagaggggccctggaatttgccttctgaactttgagatccactgaccttttgtataattaagagtggacaatggggatttatgttattacttccacttgattgagcccacttacccgagtgtaattggggcacagaaagtcgtgggacaggtcaggcggatcacaaaagacttctcggggtggtgcttgcccctccgagtctggtgagggagtaagtgtcacatgcagctgtcacagcactttcacttcacacctctgttcaagctccctgaagagaagtaacagttaaccatggctacttttcttttgaaaacctgtagagcagccttccaaacgcagaagggtcgagaacagcatccctgcagctggagaaacacaaaatgtagaagtagcagcagggcccgctgggaaatgtgctgccgtagatgtggagcccccttcgaagcagaaggagaaggcagcctccctgaagagggacatgcccaaggtgctgcacgacagcagcaaggacagcatcaccgtctttgtcagcaacctgccctacagcatgcaggagccggacacgaagctcaggccactcttcgaggcctgtggggaggtggtccagatccgacccatcttcagcaaccgtggggatttccgaggttactgctacgtggagtttaaagaagagaaatcagcccttcaggcactggagatggaccggaaaagtgtagaagggaggccaatgtttgtttccccctgtgtggataagagcaaaaaccccgattttaaggtaggtttatggaaaaaaagaatgcctttcatctgtggttgctttagacaggcactttcttcctgcagcagtgatatttaggatagacatggaagttttacgctctgtttggatctaaacttccttgtgagccaaggtccatcctgagccggttgactgaggtctgactcatggcatggctccttcttgctgggtgcttagcaatgacaagggactgtgctgaatgctttatgtgtgtcagctcattgactcctcatgagactctgtgaatggttacttttattcttgccgttttacagaggaagacatggaggcctggagaggttaagtgactcgctccggtggccccattaacaagtttcagagcatggcttggctctagtctgcctggctgggctgctcatggggacaaggctggtgtcagaggagtcaggtgagctgggtcatgcctcgaatcatggtttttctctgtcttccttcttcctataggtgttcaggtacagcacttccctagagaaacacaagctgttcatctcaggcctgcctttctcctgtactaaagaggaactagaagaaatctgtaaggctcatggcaccgtgaaggacctcaggctggtcaccaaccgggctggcaaaccaaaggtcagagtcagagcagattgtgccttgtcttcaaggcttgggcaaacttcgtttctgtatcggttcaaagatgatttaacctctagaatgggttcctagtttgtctgctgagaaacaaaagttaatttcacagaaagatctgcacttagctctacttatatttggagtcagattaacctgtttgtagttaattgtactaaaaagaataagacacttggaaatagaggatcatgaattcaccacactatggcccctggctgtggggcttgggggaagccctgtgaccagcagcatacgggctttggggtgggcgccctcctgcagccttctccctctgtcccaggcctctctttctctggggcctccaaccaggccccttgagtccctccattgcagtgcctcttctcctgtctttccttcttgccccctcagtctcctgctaagtccttttgtgccccattttgagtagtaagtggtttcattactgtctacccactgcccactctccctcccctttatccaggttaatggagagaaaaagaggatgaaatgagggagcgggtgaaggcacagaaacacgagggctcacctgggcacctgggctgctggccctgtgtcccatccacctcttggtttatttgctggatttatactggtccatctgtctttttccttctttctttctacttctgcagcacgtacaaggtgtgctgaacttggaagggttatctgaagttacagtgcatagcagcactcgggaaggagagtagggtggggaaataagcctgtagacagaggatgcggtggtggggaaggtaacctgttggtgggtcgtttgctgtggcctggtctgctggtctccgggaggaagcccagtgcctgccctgcaggaggaggttgcgtccctagtctgcgggatctgacttggttctggatcttgcctcttccagggcctggcctacgtggagtatgaaaatgaatcccaggcgtcgcaggctgtgatgaagatggacggcatgactatcaaagagaacatcatcaaagtggcaatcagcaaccctcctcagaggaaagttccagagaagccggagaccaggaaggcaccaggtggccccatgcttttgccgcagacatacggagcgtaagtgcttgcatggtagactagtgcaaacttcgtcctggctggcaccagttcatggatcacggggggattaacccgggatgaattagcttcctgttaggacagaaaagccaagatgtgctgttccttgtggtaatcactgtggttccactggagcaaggcgtccagagcaggatgcaagcctaggcagtgacctctgcctggtactggccaatttacacttgtcatttatttcagacagaaataaggcagtgattattttaaagtcccctttgccagttggatctgtgtgtttacaaagaaatctcatacccatgtgtgtgccagtctacggccctagctatgatccacataagctgtgctgttcgctggtttgggatgaggaggagatagcagaattgccaggtgactggtgaggtctgagaggtgatagtcacactgatcccctctgagtgtgactggtgctcagggttgatctttgccaaaactgaacaaggccaagtctgttgaagcagtttttacttcataaacagaattaaggaggcagggattatcttatcctttttttttttcaccttttaacttctggttatattaaaactgtcttggcttattttcacaaataaatgaggggccacgaattgttgcttcaaaaggtccattcagtgtttgctcttttaggagggggaagggaaggacgcagctgtctctactgcctcgtgccctgcagcgcccaagtgctgcagctcctcaggctgagaacggccctgccgcggctcctgcagttgccgccccagcagccaccgaggcacccaagatgtccaatgccgattttgccaagctgtttctgagaaagtgaacgggacgctgggagacaggaaatgccttacttcactctggcccggcggacctcccaccacccagcagtgcactggggatggacaggcctggtgtgctgcgtgctcgcaaccacagatggctcctcggctttagacagaaaggggaaggggttctaagtcaagagcctttcagtgctccctcatattgagggcagtggcagaaaagtgaccactctgcaggctgggcccaggatgtggtgtcctgagatagttttgtatcttaaagactgaggcacagaagcgaaacgagaacacactgtttttgagacacagttgtccaaatgtttctggccagctccggcccctttttgtatgacacttctcttccaccctgcacagcacatgtgcccgtcattcttttaattttaaaagatgaaatggcagatgctagtaattcacagaatggcctcttgtgggggtgggtctgagggaagtcagctataaaacatttgctggagttttgttcaatggggctgtgcatttttatattatgtgtttgtaaatgacatgtcagccattgtttcatgtttcctaaaagcagaatatttgcaacatttgttttgtataggaattatttgtgccacctgctgtggactgttttctttgcctagtgactagtgacctgtgttgtctaaacatgagtttcagccctttggttttgtttaataccatgtcaaatgcaaacttcaattctccccatttagctttattaaactgacgttctcttcaaaacttcttgctgaatggtactcagatgtgcattcacatacagatgtgttttgaagtgggtgtaccttgctttacctaatagatgtgtaaatagaacttttgtaagtcaaatcccattgtcactttgatttaaattattccagctgtgatgtgtcttcattttatagcagtttgacactggagcttttgagcttttttacctcacatcttttatcaaataatatttactgctttgaaaacagcaacagcattggccagttcagtaggggaagcttgctttattaagacactctggagaaagacgtcagggaatccttgtatatgtcgtgggaatcaactcctcatttatctgttgcgtaagtttaagtttttgtgcatcagtcgggttttctatatttttttaacttaacattttttaatataaccgattaaaaagtagacagaacagtaaaataaactcctgtgtgcctaccattcagcttccagcattcctcaactcccagcccctcttccttcatgtctgtttcccctccaccctctgttatattgaggcacgttccagatgtcattgtgctcatccagtaatgttgcggcaggtgtctcaggaggactgaaaggccttcactcctagaaacattagtggtaatcccttcatgtcatcaactgtccactcaaatttccaccttcctacaaatatcagctctcctccctgtaaattattggttggtaagcctcttaagtcttaaaaggtaggttcccctccatctcttttttatacaaaaccaactttttactaggctttacttctgaattaaattcaagcggcggctattgacagcagcaagaacctttgctgtcccacgcgttcctcctgcagtgttctctgtgatgctgcttggaaggctgatggactgttcagctggtgtgatgatttgggtagctcagagccctcatggttggggacctgacacatgaagagccctgaatatcactatgggtgagtgtggccttactttttgctgcttcacattaacggtttggctttgcctgcagccagtattctgaccttaatgtcacacttgcagatgtcagcccaggcttggtacaggggcaaaccttttcaggcttgagcagaacccagttaggttccgggtgttgactgttctagaaatggatttccaggactacatgagtgggtttgtgtgttttccccagaaaatccagaactgatgataaatagaaatgtgaaaaactacttcagttacttgactgtttgttagtaaaaaaaaatcagtaattcatccttgcccacctaggtaggcggtttatccaacttctgggtctcttgcccatggaaatcaccatcttggatctgttgctctcccagaacagtattatgaatagggctaaaggtcagaatacccccactgcccttatgacagatgggaacatctcccaaataagacagtctcaagcattcatgtaataaaataactttattagaatcaggaatttgttaaaataatatccttcacatatagctaaagtgcaaattctcttgctctgtagtagaagcaagcacatctgtcagacctccgtggtgtgcttataaaaccaagacgagaagagttttaagaagtacctctggcagcataagagtacgaaaacacattttataaaggtttgaacaattatcatttggagccatttcatatatcgtgtatgtcttttcacttatttttcttaacctttcaaaaactactctgtgctatttatacaactgaagaactgtataaactactttagagcagtggcctcattactgtcaggaacggaattaccaaatcaaagagacaacactgcgtattcgccatcactcacacactgacaaagtgcagtagtgttagacatcatgggctctgtcactgggaaagggacccagtgacttccacctctctgactctaaatagcagcagtcatattggcacctgtaccatatgattcaaagagaagattctacttccattggatgacagcttggaaacccggccatattacatagagcactacatcatttcacaagttgcgagaaaaataaggccactccgaggcaatctcttctgcctcccagggggatgggacacgggacagtgcaaagaccgtggaagatggcagtaagtagatgaaactccaggaccaaagggatgcagcctggccatggctgaaggtttttgctccattcagtagaaactggtgctctaattcattatcaaaaatgcttacttggtgtccacatggcacttgttttctcaggttaacatctgcctacagaaaactcaggcagaggggtgagggcagatgcctactagcataacacctggtttgcagcacgatacaggtggaatgacaagcccagagaatttcagacgaaaacatctggcctgagttgctacaaatgaagtgtgagagaaacgcggatacacaaagaaaaccaaactgcccgcccaccatgtttccccctccaacatacagctctttatggctaccccctattcttaattagaaaaatagtctcaatatgaaaaaaaaaaaaaaaaaaacagctgctggcactaaagtttgcaaactatggctcaaaaagtcttcctgcaggtaagtaaggaatgtcggcattcattttctcttctatgaagtttgcttggaagttagtcaccactaatctaaaccttgagaaagtgagctttcaaccatttctctcagctgcgacttgggtctgacttcccagttgcagtcacagaacctctcagcctgtttcagagaagcacttggaggagttatgtcagtggctctgggccccgtcccacacctcttggccgctcctccaccttagtgcaaattctgctccagaacctttgttctggtcacatggtggcactgttgcccctaaagcacggccaccagcaagacacagcagacaccatacaatactgactagcttgctccaaagaagaaaataaatagcttggttgaattataagttattttagagacaaggcttcataacttagtttttttttttttttaaaactaaaacatttggaggtaaagaatgtttctccttttgctttaggaagtgactaggtttctagaaatgctgtttctttttttttttcctacctcaggacagcctttgtcactgaggatttctagggttagggcttcacaggaagcgtctccttgaacccagagtggttgggttgggcttctggcagtgccaccgagtactcagttgtggcaaaaagcagggtgtccagggtggtctcagtacacttggcgatgaagcgaatgaaaggcctcacgtcgccctcgttggcagcttccaacacgtggtagtagtcggaccgctgctccttgcggatggtgatgggcgggtagcccgcctgcatgaggatgaggttcatgagcagacgggaggtcctcccgttgccatcaatgaaagggtggatgtaaacgagtttataatgggctaaggctgcaaactccactgggtgcaggttcatggcttcctcggagttgagccactgtacaaactcctgcatctgcttttccacatcctgcggatggggagggatgtggtgtccgaccaggacctgtgttgtccgaaacctgccggcttccacggggtccacgtagcccagcacccgcctgtggatctccagcacgtcgctgatggtgacggagccgatgcgcgaaaccagagtcgtgttgatgtacttcatggctgcatgcatgcctatgacctcgttctgctcctccaggctcttcccgggcacggcgtagcgggtctccaggatgtgcctgatttccgagagggtgagggtgttgccctcgatggccactgtgtggtagatgtgatggtagtaggtctcctccatgaccctgcgcagagctgagttccccttggggatggacatgaccttcttcactttgctgtcgatgatgctgaaatacctctggtcgatctcttccacaagaggcagtgtccgatcgcggttgaccagtgctttctcatggtagggtgagatggtcaatgctctggtgtacaagtagtccgcctggatgatgtccttgtcttcttccgagaagatgccaaactcggtgagcgcgtccacgaagtccgggtccatcttgagggcgtgcatgaagagcttttgggctttttcccgcttgccctggcgcttcatctccagggcctggttcagggcagctctggcttccaacttacccgctggaagagagccaaagaagcgctgtgagggagggaggctagggggcagaggacattcggggggctgtcccctgtgctggtctccgcaggaaaccatgatgaccagcctgtgtccctggccttgaggagcttgttgcagccgcatcgtgtgtactcaacatgcccggtaccactctgttgccccagccgtgtggtggtatgcagtcactatccgtgtgtccccagagccactctcttgtattctgggaggcacctccttggcttcctagcctcctgctttctggacatagaaagttctaggcatttacttcgcctgggccctctctgctgggcctttcctgtgggccacagctcccagtgtaggccgtctcctacatctccagctcatcttgtgctggtgacacaggttcctgccccgggaggcccaaaggcgttaacaactccccactcttcctagaccctgggggcgtcaaccatcccgggactgttctttaactcttttaacccagtggtttgattgtgcgccccaggggacatttggtgacgtctggagacctggttagttgtcataactgaggaggtggagggagtgctacaggcatctcatggggagaggccagggatgccaccaccatctaacaatgcactttcagtccccaccacagagaactggtggaggtggggagcctgctctagccctagccctcctgtcctggcccctcttggccacctgaggatcagccccacacattcaacttcctttagttcctcgaatgcccccaggctctcttacgacagttatgtcagttatgacaactaacctctggtctctgcctggagtccttttccttggatgcccttcaccctggatgactcctacttaacaactgggtcccagctcaggtgtcacttcctccagggagccttcctggtatgctcctacagccctttatgcttccccatcaccacacttgtgacactgtctcagtcacatcaccttgtctatactaggagctcagggctgacttgttcacaataccccgatgccccacatacaggacatgacacattctatgtctgtctatccagttaacaagcattgaggaagacggccagtctgtcttacctggagaggccttggtcttggccaccagcagcgtcgcgcccctggaggtgatgctgagctccgtggacgggctggtgcacttggtggcggcatgctgcgccctgtccggtttgctcctgagcaggtagaggcctttgagcacagccaagcactgctcctccacagcccccagcggcagcagcagggccagcagggaccccagcaccatgctcagcagcgtcacccagaggaagcggctccagaccgagacccatttcggttcagtcaccgccatcactgaagccattggtatgagcatcatctggactcaggagagggccctttgcgcatgtccacaggcggctgagagagagcaggatctgcaaggagccaagagtcgcaggagaaacagacacgttcaggacatagtgtgacttcagctgggaagatgggtttggagacttctgctcttttagctcactagagagatggggtgggggcaagtcaaggactggatctcactagaggaggggccagcctagaaggactggtgccacctcctgggcagtatgaatgtgaaaacactgctgtggtccaacaattaatgagcacttgccataatccaggccgtgtgctaagcaccaaatgcctcacatgggtcacctcctgcaatcttcaacgacttgagctgatgttttcacccttctccaggtgagggaactgaggttcagagaggtgaagtcccttgccgaaagtctcgccgggagcaagtgacagccttaggacttgaactcaggaaccccacggctctaaagtgtccccccttcccatatatccctgtggcttctgaccacaaacactggatttgtggacatatgtcaaacatttgggacataaatgactgacagacacccaggcagatcagccacagcagttctgacgcccaatctttgataagcacaattgttgggtggcctcatttattgccctcaccctgatattcagccacagctcccacagtgcccttcccctctctggccttccatttctggcctgtccagaagggaccccatcaagaagatgagcagttcgagcatctcgaaaggaactcaggctgtgggccacagtgcttggcctcagtgacaacatggcttgtatgtgcttggggctggcagtgggagtggaggtggggccaggcatgcaaacactatgctaacaataagcacttattaagcaactatggtgtcctaggtgctgagcagtgtactggccacgcattgcctcgtttcaccctcatgccaccctatgaaggaagagctaccgctagctccattttacagacaagggaaaccaagacacagagagcataagttaaattccagaaggcccacaggaggtaaacagaggcatccggaaggaaaccccagggcctctgaacccggtccccaggtctcgatttctaccttattactaagcagggcctgtgcacctgctctgggctggtcctgacccgggaatgactgatggatcacggggttctgagtctcatggggatcctggcccattgccacagaacatgtgaaatggcttggggtgcgctttaataggggtgcgcctggagtgctgcgcgggtccaggggtctgggcgggcttcccgaggggacaggctcctgggcggggcggtacaggaaagggggcagttcgccggtgccaggggtgtgtgcagggaaggagtgcgttctgggaggcgcgaatctctcccccacacttccctagaaagggagaactgaggcccggagaggggaggggaccggtctgagtcccctccaagactgcagagcctcccttcccgaaccccgcccagggctcgcggccccgtcgcacccttcccggcttcatcctctcgagcccctagggcttttccccttctcaccgcgcgcagctgtcagaaccccaaccgccttccccgcgctcccagctccgggccgccggctcccgggtcctcc

SEQ ID NO: 7320 - DNA, 254 bp, Homo sapiens
caatgtttgttccattacatatgatttagaaagctcatgaggagaggaggataatctgtcgtagttcccgtatttctgctcttcctgttctttcttcctttttgatgctttaggattccttcttctaacttttctgttcgaagaacttcctttagctattcttcaagggtaggtctgctagtgacatttttttcatttttctttgtctcagatatatggtaacttaaaataattttagtttgaaaagtttcaaa

SEQ ID NO: 7321 - DNA, 660 bp, Homo sapiens
tggggtttctcagtaggcaattatatcatctctaataatactttttgttttctcatttccaatagcaacgtccctatatctgttttagaattatattaactaatacaatggcagtaaggatctttgttttctttctgatgttatgggatcctgtttctattttggttctttgtcctgtagtgtgggtgctcattaaaggacttcctttgtgttttgtctggattattctccaggcagctggtaagctccttgtgaagacagcccatcctgttctaacatgtctgatactctgtgtctggtctctgcagctcctggcacacagcagggaacttgattagggcctgaaagaatgtgtcttatgctggattcttgggaggccctaaaagatctgcactgcttctttctggatgtggccatgtgtttagaaacatctgctctcctagaagtctggggttcctgttccagcttcgagcagacacttgggtttcccttacaggctactgtctgttgttgaccacatactcaggaataaatggaaattgcagcaattttgtcagtagggttttgacaaactgagagattccaaacagaaaataaagagattctaaacagaaatacttacttgttataaaatagcacatgcaaatttcccaccaatcc

SEQ ID NO: 7322 - DNA, 139 bp, Homo sapiens
gagtgcagtggcgtgatctctgctcactgcaacttccacctcccaggttcaagcgattctcctgtctcagcctcctgagtagctgggattacaggtgcgccaccatgcctggctaatttttatatttttagtagagacg

SEQ ID NO: 7323 - DNA, 683 bp, Homo sapiens
gccgccggcccctctcgggtgcgccagaacttccaccccgactccgaggctgccatcaaccgccagatcaacctcgagctctatgcgtcctacgtgtacttgtccatggcctattacttctcccgggatgacgtggccttgaacaacttctccaggtatttccttcaccagtcccgggaggagaccgagcacgcggagaagctgatgaggctgcagaaccagcgaggaggccggatccgcctgcaggacatcaagaagccggaacaggacgactgggaaagcgggctgcatgccatggagtgtgctctactcttggaaaagaacgtgaaccagtcgttgctggaattgcacgctctagcctcagataaaggtgacccccatttgtgcgatttcctggaaacctactacctgaatgagcaggtgaagtctatcaaagaactaggtgaccacgtgcacaacttagtgaagatgggggccccggatgctggcctggcggagtacctttttgacacacatacccttggaaatgaaaacaagcagaactaagccacgagctgccttcctcccaggctagtggatccaaagaccaaagtcagctgtctcctgctttcttgcccttaaaatcacctccatctttatattcttctgttatactattcctccaataaagtgatttgtagaaa

SEQ ID NO: 7324 - DNA, 443 bp, Homo sapiens
cagagattctggtaagagtttagaggcagaatcatttcaattttgtgatcaatttaatgactggagctaaagaaatgaggtgtgggagaaaacgtgatgggtctaaaatttgagttactagagaataggatatttgagaatagagatctcagcaggagggataattggaggtgggggaatgcataatgatttttgttgattttgttgatcattctcactttacattctattcttaagtgggcctattttgctgctcaggaatcctgttatatttctatacaaaatctcttcaatttttctagatgaatggttttcaaactgtaccttgcagcccattagtgtgtcatgaaatatttactgagtcactacacacgttttgtgaataaaatagagtagaattgaagcgacagtaggtgaagtaagggtattatttcctgaagctc

SEQ ID NO: 7325 - DNA, 275 bp, Homo sapiens
ctttcttttttcttttttttttttttttttgagacggagtcttgctctgtcgcccaggctggagtgcagtggctcgatctcggctcactgcaagctccgccccccgggttcacgccattctcctgcctcagccttccaagtagctgggactacagcagcctgccaccacgcccggctaattttttgtgtttttagtagagacggggtttcaccgtgttagccaggatagtctcgatctcctaaccttgtgatccgcccgcctcggcctcccaaag

SEQ ID NO: 7326 - DNA, 491 bp, Homo sapiens
ctcatctggtaaagacagacagaactctgaagtggaaagagcacttgtcaagatatcaggagatgacggctttgtgagttctgtcactaaccagtgtatgttcttgaccaaataattttacctctctcaaccttggttgctccatccaccaaacgatagcgatctgaattcgtcagcttcttttctattatgacacttgattacttcatcaccagaagctgagctcccagcttgagtatgcaacatgtctggacatgtttggctaattactgtggcagccagcctgctggccattgcagaatgacccagatgcttcctgagagaactcaggtttaaggaagagaaaaccaaactccaggagtctgacagcaacaaagccttagttgacagaaaggtagttattttggatgcataagtgtttattattcttatttgcctcctaactccatgtctaagttcaagaaaaagcaaattaattaataaaaaccaaa

SEQ ID NO: 7327 - DNA, 11661 bp, Homo sapiens
ctgcctttacactcctccgaagaagctcaaaatctgatgggccagtcatcaggtaacacaaagccacactgacaggagaacaggccagggcagcagagcagagccccagtgggaggaggtgtgggggccctgccgctgcagcagtttccagcttccatgggaggctgtgggccagcctcaggtgctgccaagggcgtgggtggtgccatgctgccactgtggctggatggtggggcctgaggtgctcagagcagggcaccccggccatgggaggcggccgtgggagcaggaaatagaggtctcaccatggtgtgctttggaaatgggttttgtaggactacaagcaaacccttaaggaggaagatcagtctgtgctggatttgcctgcacccctcccgacttgcattaaaatgttcattcctcagatactgtggggtagcacatagatttgtagattcagtgaccaaggccatgaaacagacacagttgtttgcctggggcttagcaggttcctaggtgcccgtgaagaagatgccacacacgcaccacaccttgtggctccatgtgcacatggccggtgccacagtggcttcctggtggccaggcaggtgtcctgtaatgaccctcccctcaccaaggccctgaggactgcagtgcacacacatgccagccacagcagggttaaattgggtgggcagcgatgggaggtgtttgtggcctctttgaatgctgcggccaggagacttccagcgtgggcttggactgcaggttggggcagcctcctttacccctggtacctggaatgtcgtcatcttcataagaaacagactcacctgggccgtgctgtcctgagatgagtgaacacgtcggccatgccgtcctgagatgaacaaacacgtcggccatgctgtcctgagatgaacaaacacgtcggccgtgccgtcctgaaatgaatgaacacatcagccatgctgtcctgaaatgaatgaacacatcggccatgctgtcctgagatgaatgaacacctgggccatgccgtcctgaaatgaatgaacacgtcggccatgccgtcctgagatgaatgaacacatcggccatgctgtcctgagatgaacaaacacccgggccatgctgtcctgagatgaacgaacacccgggccatgctgtcctgagatgaacgaacacctgggccatgctgtcccgagatgaatgaacatgtcggccgtgccgtcctgagatgaatgaacacaacggtcatgctgtcctgagatgaatgaacacctgggccatgccatcctgaaatgaatgaacacattggccatgctgtcctgaggtggatgaacacctagtccatgccatcctgagatgaatgaacacatcagccatgccgtcccgagatgaatgaacacatcggccatgctgtcctgagatgaacgaacacctgggccttgccgtcctgagatggatggacacctggtccatgccgtcatgagatgaataaacacatcagccaagctatcctgagatgaatgaacacatcagccatgctgtcctgagatgagtgaacacctggtccatgccatcctgagatgaatgaacacatcggccatgccgtcctgagatgaatgaacacatcggccatgctgtcctgagatgaacaaacacctgggccatgctgtcctgagatgaacgaacacctgggccatgccgtcctgagatgaacgaacacgtcggccatgccgtcctgagatgaacgaacacccgggccatgctgtcctgagatgaacgaacacctgggccatgctgtcccgagatgaatgaacacgtcggccgtgccgtcctgagatgaatgaacacaacagtcatgctgtcctgagatgaatgaacacctgggccatgccatcctgaaatgaatgaacacattggccatgctgtcctgaggtggatgaacacctggtccatgccatcctgagatgaatgaacacatcagccatgccgtcccgagatgaatgaacacatcggccatgctgtcctgagatgaacgaacacctgggccttgccgtcctgagatggatggacacctggtccatgccgtcatgagatgaataaacacatcagccaagctatcctgagatgaatgaacacatcagccatgctgtcctgagatgagtgaacacctgggccatgccgttctgagatgaatgaacacatcggccatgctgtcttgagatgaatgaacacatcagccatgccgttctgagatgaatgaacacatcggccacgccgtcttgagatgaatgaacacatcggccatgccatcctgagatgaatgaacacattggccatgctgtcttgagatgaatgaacacctgggccatgctgtcttgagatgaatgaacacctgggccatgctgtcctgagacgaatgaacacctgggccatgctgtcttgagatgaatgaacacatcagccatgctctcctgagagggatgaacacctgggccttgccgtcctgagatgaatgaacacattgaccatgctgtcctgagatgattgtcctggttatgcagacatttctttatattatttgcttaactttaatgccctcctaggaagatttcccatactttcctcccttcaatcaaaatatcccaagttcaacaggtctggctcactcctctctattcatctaaggtctactttgttcaggaatttctgtctaggactcaggcaggaccaaggaaatcttttcagtgacattttaaatatcactgtttatggaatgtgtatagataactgaataaccaaataagtgttgttttgaaagtatctttattaaaagaatataaagaacagaaactctaggcttatatatgcaaaggaaaaataatggagaattagagatgaattggttcattcagcaccagctgatcccctcctgtgctggacggtcccacaggaccacgtctgccctgtggggtcactccctgccagggagactggctggccacagtgagaggtggtgccagtaccataagacaagatgagaggtggcattgtggacaaactgccccacccagggcccagggagggtgtggctggcagggacggggggcagggcagaggtggtggggaggaacaggagctgtgtggctttaacatggagttggggggcacaggaggcgccgtgaggaagtaggagctcattgggagtctccaaccattggaggtgcattttggggacccctctggtctgtctggaacctaggctgaggggcacagcagaggcaggaaccagcaagagggaagcatgggggtgggaggagggctccccagtctggggtattctgaaggtacatcagctgggcctgcgatggttaggaggggtggatcctggggtctccagggcccaggctgagctgcagaatccgagttacaagaaccacgtggggcctgcaaggggaagagcagagtgtcagcgttagacttgcaggttggagccgccacttgtccaggaaatggaaatgctgagcacgaagagcagagcagcctctggcccctcctgtgccagtactcatggggcttgcagcttccaagcaagagcaaatcatggacttgaactctgagaggttgtcttttatctgatggtactaagtggagatttgtaaatataaaagcttaggcttgatgatcaattagacccatattgtcactcttcaacaaagaaaggtatctatatagaaatgtgcagcttttcattggccctagcacttcatttttggctcagtgatgccattaggtctccttgctccaaattggaagaactgcctggtgggcctgagctgtctgagccaggctatgtgcaggggcctctggacagttacatcagaatcagaatgagaggcaactttgcatgctctgccatctgctgtcccctgcaggaggccggggggtgtcacagggaggtggggcactgtcgggtagagccgtgtgggcctcagaaccagtggtgtctcctgagaactaagggaaaatgggcactcagcatcagtgtgaccagcatggcctgtgccctgggtgctgcacagagaccctgagacatgctggatggccctgcccttcagccaggggcccaccagggtggctttccaaggtgtcacaagagagtatacaaacataacaggggagtgaagtcacgctgtgcacaaaatgaaaaaaacaaaatgtcctgcttgggtttctctttccttcttttgagagaggttgggactaaggaaattgggtggcagtttgggactgaagctcacagggtcctggccctctgggctgtgctgaccctcacacttgggccagctctacagccctgtctcacttgacccaggagagtgagggacaggcactggagtgtgactgttagcagccttccaccagcctaaccatgtccccttggtatacccaggtctggacgccagcccaccggccagcactcatgagctcaccattcccaatgatgtgagtatgcccgctgtacctgcctgtccctgggtagaaacaccaggcacaagtggctgtcagctctgctgtcctttgggcagagggacccactgcttggtaatgccttcaccaccccaaccccactgtttgatctgtgtcctccctcctttcctttttaaagtgggtttaatgcccataaaaagttatgtgtttttacatccctaagatgttgaacaagcaacaggctaaaggggacttcagatattaatcagtagtcagatgagagttgggctgagaacctatgttgctgtggaggcactgccctggtgcgggccaaaccttgaagaacaaggtggcccaggaatgctctagagtggacccacctgcagtattatctccatgggccctggcccctcaggaggtttgggattctccatgagttggctccaacagacttgaagctggttggatgtcacagacttgtctagattccttctagcactcgtcagtctattcatgccttcagcatacctgagggtgtggccttacgagctcccctcaacacacacagtcctccccagagtaagcacgggtcttgaggatagagaggactattctctgaatgcttgacttatccagaaactgagagaccagggagggcatgggccacatgtccttaagggatagctgccagagcagcaagcagagtccctgtgtgggctgtggaggtggctgccccacttacagctcaagtgtccaggaggcttttctgccctagagctgtggactttgggaatcttcactgttctgcccctttacacctgctgggcaggaaatctaagccctgttccttcctttcatacaagttgaccataggaagcacagatttggcagttcagggagatcaccagtcctgtgtgtggaagatggacagtggagcaggagaaaaagaggcagaagagagcagggtcgccagaggaatggaccatgaggctgtctggctggtgccactgacccgcctgaagagccatcttcatttgagcccctcatggcaatgtgcactctaggccttcttctatcccggttgctggtcaggcacagagtccccatgtctgctaaaagaagctcaggacactcacactccaggcagcattgtggtccagccttctggcatccccaaggatttctgaggttggcccaacttgaaaggcagcagcacagagccatctccccaggtgtggggtggcacagccaactggtccctgcattcttggagggaggggatttttccccaaccctttccctcactgcagtggttccttcagcatttggcttctggcatcctcctgagtcttttcctccaggtagtaaagccaccaggcttttcctgtggggttttccttctttggtgagtcagtgctcactaacaccaggtttggtgctcttatccaaacactcatttaaaatggaaatgagctttaagagaatgagacatctttggagagttggtcaacctgtttcctggggtctcctttgtacagatggatgctggttttcccagctcttcatcactcacttcccatcctcctcctggggatcttcctagggaagagacccacttctcagaaggaaggcagcttcctcttatcccagtgcctttgggtacagccttccatgcttcttcatggaaaaggctattgacgacactgtcagggggctttcaccagcacccccagattttgtgggggatgtatctgggctgcaccaaagctgatgttcctcacatggtggctgcctgctaccttcttggagaaaaggaaaaaataaaatgggcgtgcttgttctgaacttgcctgtcatctcgtccacgtccgtctcttggtcacagttggatcatgctgcctcagcgttcctgcagaaagacactgcttggaggcagggactcctgagactcacaggctccccagcacggccactggggacacaggccagtccaggggccccagccctttggttccctttctgacgatcactgtgggcctccctcaccacctatttcagtccttgctcttggtcatgcaggcactggtgcctgtggtcacccctactctgccctaagcaacagtcacccacccaccaaggctcatgcccctttccttggttcttagctgcagaatcagccaggccttctgctggggaaaggaatctaaggtgtccgacagtggtctctaggaggagaggctgcaatgggagttgttactgcagttcccgtggaatttggcattgacatctgattaggaggggccacattatttcagaatatttctatcgttcttctttgaatttgcaatggaggcacacaagggtgaggagagaggaggagaggagtctgctaactgctggcagggtttgcaggtgcaggtggggccaggtgggaggtgcccttgggctgcagggctcagcctagaaggcatcctcccctgcactgagccagctggcctagggcagggcaggtgaaggaggtccgacctccccacattcccttctcatggcagagagtgccagtatagaagtcacagtgctgttcaccttggcatttgtggttaggcgggcatgccctggctgctcaatgatgtcccatcagcattcagaccccacagctgtgtgcagaggaggggaaaggcctgtggcaaaggcagcaccctccagagcctggggagatgggcaccctgagcagcacattgcagggagcagagggagagggcggggtgagagcaggagggggatgcgtgccagagcacagctggagcgaggcagttagaagacaggggcagatggttaagagaagagggtaggccctgtttgcaggaggggcagggagatacttcctccagcaggctccgaggagagatccaacagcacatgtgcacaaggctttccgtgctgtgcgcttcagcagacaccacgcgctccagcgcagaaagtgttagggaggaaagcggctgcgtgctggccaaggaggggtataggaagtggggcagtgcgaaagcccaggagctgctctccctcctggatgttggcatcttacagggacctgtggtcatgctgccgagtcagctatgttccccctccccatgcgggccgtgctgctgtccctggcccccatcagagatgagcccttcagatctctctgccaccagggaggaagatgcagccaggcaggtgaatgtggccatgtgccaattaggaaaccaccctcctaaccccagtggcacactcaacaccacacacaggtgtgagcagggagagggctggactgcgggtggggccttgggagatgtgggtggggtctgggagatgtgggtggggtctgagaggtgtgggggagcccagagatgcagcaggagatagaagactcccagcagccctggattctccagagtgggggtctctgtggatatctacaaagactgagggttctgtagtccagtgagacagctgtcatttccttgtaaccagcagagatggcctctaaggtgagcagagttgagacaccataggtctcctcagggacaagggctggctggcagggcacctgtgtcccaccatggagctgctgctcaccccacagactgagccccttcacgcttgcaagtggacgtccctcctgcatgccgccacatggcccagcccagcccttccatccagcgtcttactggtgtaaggacagaaacctgctcctgtcactcaatttcaccaccgttctgacaccccagcagcctcacgggaggtgggagtggactctgcctcagggccctcggggacccatgtgcccagctgccctcctggtgccctgtgccgggcaccctccagtctggggctttctctgccacaggtctggccacgtctctttcctgtccaagctccagagctctcatccgtggcctatgcgtgcatgaagggactccgttccatccaatggtgggcattgagagatgccattggctcctgtgcagtcttctctgggggcccgagttgtccccgacgcccctcatggctgccccataggccccgccctcctccctcagctgcttcaaggagcaccctcattcttgatgactgccttggccagaggccactgtgttccatctttaaacaggggtcccaacaggggaatgaaaggaggcacccgaatggcctcagagtttaatctaagttcagcaaaagctaagttttaggcagcagtgagctttgctgtggcttcaagcacacgtttcttcttgagcatttgtgatgctgcctgtctgggcagaaggggtctccctgggatgtggccaagaaggtgcagacaccgctgggccatggtggagcctccctgctcagctgctggctgccacctgtgggtcgctcctggaccccggggtgaccagtgtggagcacccaggccgagtgactgtgcctcttggctgggtgggcctcctacaggagtgggtagcagggcgggtctgagaggggccagcagaggcacaggtgctctcagcctgacctcgggcaggtggcctggatcaggcaccacctgcaggcaggtgtgggcggggcctctccggggtgttgagctcaggtcttggggcagagtccaaggctggcggcccgtcccaccggccccctcgggcgcactgcccacagtcttcaggggctggcttgggctgttctctaagaaatccccccgtccttgtttctagctaataggctgcataattggacgccaagggaccaaaatcaatgaaattcgacagatgtctggagctcagatcaaaatcgccaacgccacggaagggtcctcagagcgtcagatcaccatcacggggaccccggccaacatcagccttgcccagtatctcatcaacgccaggtgagcatctcccaagggtctctgagagacgcccggaaagggacgcgccagccggcgttacatcacctggacggtcggggggtgggaggaggcacagtctgggccacactctgcctccccttctgtcccctctgctccaggctggatggtggggacaggatgggatggtgacagcctccatgtagacacggggccacctcactctcccgacctcccacccgaagcgtctccagggacaatcccggaggctagagaggaaggcaggtgctcctgtggcctcagacaggtggccagaactatcctggaaggcctgactcttgtccgctcagaggtctccagaaagaccaatgtttggggactttgctgttttgcctcctttttcattctcatggaaacgtgtagggacgggcaggacaggactctgcaggccgcttccttccatgggtccctgtgcacatgggagggtctgaagccacctgggtccctgtgactgcaccccactcggcctcaagccagtgccccacccccgccaagcacaccataccaccagtccccccgccaggcatgccgtaccaccagccccgccaggcacactgtaccaccagccccccagccaggcacgctgtaccaccagccccgccggcctctgatgtaaggaacatccgtcctctctccccaaggatgtcctactgcaagagccctgagctgggcttgtgggatgggacgggacgggatgggactggaggggaggagaagggaggggcctctaggtggacacagccctgcgtgggccctggaacccctgtcccggtgacccttctcttacctgcacgcccagtgagtgggtgagaggctgcctggagaggacgaggacaccccccgactttacccactgatgccccgctgggcttctgcctcgatccagagccaggttgggcctctttccatccctgtgccacaggcccatgggcaggaggctgggcaaagtgcagcattggcaaacccagggcgagcctggggatggggcttgtcagggaggttcccgcctgccagaccgcattactgacagccccactgggacccgtgcttggggccagatggctcttacccacatacacttactcctgtggcaaccaaagccccttctcagatgccaggtgtgaggctgggaaggccctgagcacccccaggggccgacccagggctgtgtagggggctccacatggggaaggcctcaagcccccatgcagggctggctcacacacctgacgtggtgatgggcatggcggggaccagggcggggaagaggcctgtgtgctctgctgtggtctccagctcaggacctcctgagctgaccgggatggcctgtcccagcgagcacagaggccacacagcccggcctcacgtctgcccactgatgagggcgttggttgtgaccgtctctccctctcctgcctttgtctgttccaggctgacgtccgaggtcaccgggatgggcacgctgtaatcctacccagcacccttcccccgcgtcacccacctgccagagcctaaggcccccggctctcgcactctgtacagcccaccttccctgcctcacagataccaatagagaggttttcttaattaacaaaaggacgtatgccatggagaaacacacccgcgcacacagctgctctctacagaggctgcaggctccgccgagtcccccctcagtgttattttatttatgacttacgctcccgtctgcccatgcaccggcatgcagtggtaattattttagaaatattgttccttggtgtcagcgtagctgtctgtcttaggagctgggtcggcgttccgacagcacttcctgtccgcccttctcctctgccatccagaaccgtccagaactgttgcctgagacccctcctctctcacacagccctgccatgctgactcggtttcccctcagagccattgttgtctgggctcgagtttctgccccaggttgtgtgctggaatcggggggtggctctcctgccacccatggggagcgccaggagaggagggtcatggaggatgttggggctctgaccccaggagtggggtggagggcggagcctgctgggggccctgccttcacagagatgccgcgtgctgggaaggctcttggggtcccctgagcgtcttccagggtggctggagagcacagacgcgccagggagccccctctgtgctcctcagagttcaataaatgtcgtggcccctcctca

SEQ ID NO: 7328 - DNA, 11691 bp, Homo sapiens
ctgcctttacactcctccgaagaagctcaaaatctgatgggccagtcatcaggtaacacaaagccacactgacaggagaacaggccagggcagcagagcagagccccagtgggaggaggtgtgggggccctgccgctgcagcagtttccagcttccatgggaggctgtgggccagcctcaggtgctgccaagggcgtgggtggtgccatgctgccactgtggctggatggtggggcctgaggtgctcagagcagggcaccccggccatgggaggcggccgtgggagcaggaaatagaggtctcaccatggtgtgctttggaaatgggttttgtaggactacaagcaaacccttaaggaggaagatcagtctgtgctggatttgcctgcacccctcccgacttgcattaaaatgttcattcctcagatactgtggggtagcacatagatttgtagattcagtgaccaaggccatgaaacagacacagttgtttgcctggggcttagcaggttcctaggtgcccgtgaagaagatgccacacacgcaccacaccttgtggctccatgtgcacatggccggtgccacagtggcttcctggtggccaggcaggtgtcctgtaatgaccctcccctcaccaaggccctgaggactgcagtgcacacacatgccagccacagcagggttaaattgggtgggcagcgatgggaggtgtttgtggcctctttgaatgctgcggccaggagacttccagcgtgggcttggactgcaggttggggcagcctcctttacccctggtacctggaatgtcgtcatcttcataagaaacagactcacctgggccgtgctgtcctgagatgagtgaacacgtcggccatgccgtcctgagatgaacaaacacgtcggccatgctgtcctgagatgaacaaacacgtcggccgtgccgtcctgaaatgaatgaacacatcagccatgctgtcctgaaatgaatgaacacatcggccatgctgtcctgagatgaatgaacacctgggccatgccgtcctgaaatgaatgaacacgtcggccatgccgtcctgagatgaatgaacacatcggccatgctgtcctgagatgaacaaacacccgggccatgctgtcctgagatgaacgaacacccgggccatgctgtcctgagatgaacgaacacctgggccatgctgtcccgagatgaatgaacatgtcggccgtgccgtcctgagatgaatgaacacaacggtcatgctgtcctgagatgaatgaacacctgggccatgccatcctgaaatgaatgaacacattggccatgctgtcctgaggtggatgaacacctagtccatgccatcctgagatgaatgaacacatcagccatgccgtcccgagatgaatgaacacatcggccatgctgtcctgagatgaacgaacacctgggccttgccgtcctgagatggatggacacctggtccatgccgtcatgagatgaataaacacatcagccaagctatcctgagatgaatgaacacatcagccatgctgtcctgagatgagtgaacacctggtccatgccatcctgagatgaatgaacacatcggccatgccgtcctgagatgaatgaacacatcggccatgctgtcctgagatgaacaaacacctgggccatgctgtcctgagatgaacgaacacctgggccatgccgtcctgagatgaacgaacacgtcggccatgccgtcctgagatgaacgaacacccgggccatgctgtcctgagatgaacgaacacctgggccatgctgtcccgagatgaatgaacacgttggccgtgccgtcctgagatgaatgaacacaacagtcatgctgtcctgagatgaatgaacacctgggccatgccatcctgaaatgaatgaacacattggccatgctgtcctgaggtggatgaacacctggtccatgccatcctgagatgaatgaacacatcagccatgccgtcccgagatgaatgaacacatcggccatgctgtcctgagatgaacgaacacctgggccttgccgtcctgagatggatggacacctggtccatgccgtcatgagatgaataaacacatcagccaagctatcctgagatgaatgaacacatcagccatgctgtcctgagatgagtgaacacctgggccatgccgttctgagatgaatgaacacatcggccatgctgtcttgagatgaatgaacacatcagccatgccgttctgagatgaatgaacacatcggccacgccgtcttgagatgaatgaacacatcagccatgccatcctgagatgaatgaacacattggccatgctgtcttgagatgaatgaacacctgggccatgctgtcttgagatgaatgaacacctgggccatgctgtcctgagacgaatgaacacctgggccatgctgtcttgagatgaatgaacacatcagccatgctctcctgagagggatgaacacctgggccttgccgtcctgagatgaatgaacacattgaccatgctgtcctgagatgattgtcctggttatgcagacatttctttatattatttgcttaactttaatgccctcctaggaagatttcccatactttcctcccttcaatcaaaatatcccaagttcaacaggtctggctcactcctctctattcatctaaggtctactttgttcaggaatttctgtctaggactcaggcaggaccaaggaaatcttttcagtgacattttaaatatcactgtttatggaatgtgtatagataactgaataaccaaataagtgttgttttgaaagtatctttattaaaagaatataaagaacagaaactctaggcttatatatgcaaaggaaaaataatggagaattagagatgaattggttcattcagcaccagctgatcccctcctgtgctggacggtcccacaggaccacgtctgccctgtggggtcactccctgccagggagactggctggccacagtgagaggtggtgccagtaccataagacaagatgagaggtggcattgtggacaaattgccccacccagggcccagggagggtgtggctggcagggacggggggcagggcagaggtggtggggaggaacaggagctgtgtggctttaacatggagttggggggcacaggaggcgccgtgaggaagtaggagctcattgggagtctccaaccattggaggtgcattttggggacccctctggtctgtctggaacctaggctgaggggcacagcagaggcaggaaccagcaagagggaagcatgggggtgggaggagggctccccagtctggggtattctgaaggtacatcagctgggcctgcgatggttaggaggggtggatcctggggtctccagggcccaggctgagctgcagaatccgagttacaagaaccacgtggggcctgcaaggggaagagcagagtgtcagcgttagacttgcaggttggagccgccacttgtccaggaaatggaaatgctgagcacgaagagcagagcagcctctggcccctcctgtgccagtactcatggggcttgcagcttccaagcaagagcaaatcatggacttgaactctgagaggttgtcttttatctgatggtactaagtggagatttgtaaatataaaagcttaggcttgatgatcaattagacccatattgtcactcttcaacaaagaaaggtatctatatagaaatgtgcagcttttcattggccctagcacttcatttttggctcagtgatgccattaggtctccttgctccaaattggaagaactgcctggtgggcctgagctgtctgagccaggctatgtgcaggggcctctggacagttacatcagaatcagaatgagaggcaactttgcatgctctgccatctgctgtcccctgcaggaggccggggggtgtcacagggaggtggggcactgtcgggtagagccgtgtgggcctcagaaccagtggtgtctcctgagaactaagggaaaatgggcactcagcatcagtgtgaccagcatggcctgtgccctgggtgctgcacagagaccctgagacatgctggatggccctgcccttcagccaggggcccaccagggtggctttccaaggtgtcacaagagagtatacaaacataacaggggagtgaagtcacgctgtgcacaaaatgaaaaaaacaaaatgtcctgcttgggtttctctttccttcttttgagagaggttgggactaaggaaattgggtggcagtttgggactgaagctcacagggtcctggccctctgggctgtgctgaccctcacacttgggccagctctacagccctgtctcacttgacccaggagagtgagggacaggcactggagtgtgactgttagcagccttccaccagcctaaccatgtccccttggtatacccaggtctggacgccagcccaccggccagcactcatgagctcaccattcccaatgatgtgagtatgcccgctgtacctgcctgtccctgggtagaaacaccaggcacaagtggctgtcagctctgctgtcctttgggcagagggacccactgcttggtaatgccttcaccaccccaaccccactgtttgatctgtgtcctccctcctttcctttttaaagtgggtttaatgcccataaaaagttatgtgtttttacatccctaagatgttgaacaagcaacaggctaaaggggacttcagatattaatcagtagtcagatgagagttgggctgagaacctatgttgctgtggaggcactgccctggtgcgggccaaaccttgaagaacaaggtggcccaggaatgctctagagtggacccacctgcagtattatctccatgggccctggcccctcaggaggtttgggattctccatgagttggctccaacagacttgaagctggttggatgtcacagacttgtctagattccttctagcactcgtcagtctattcatgccttcagcatacctgagggtgtggccttacgagctcccctcaacacacacagtcctccccagagtaagcacgggtcttgaggatagagaggactattctctgaatgcttgacttatccagaaactgagagaccagggagggcatgggccacatgtccttaagggatagctgccagagcagcaagcagagtccctgtgtgggctgtggaggtggctgccccacttacagctcaagcgtccaggaggcttttctgccctagagctgtggactttgggaatcttcactgttctgcccctttacacctgctgggcaggaaatctaagccctgttccttcctttcatacaagttgaccataggaagcacagatttggcagttcagggagatcaccagtcctgtgtgtggaagatggacagtggagcaggagaaaaagaggcagaagagagcagggtcgccagaggaatggaccatgaggctgtctggctggtgccactgacccgcctgaagagccatcttcatttgagcccctcatggcaatgtgcactctaggccttcttctatcccggttgctggtcaggcacagagtccccatgtctgctaaaagaagctcaggacactcacactccaggcagcattgtggtccagccttctggcatccccaaggatttctgaggttggcccaacttgaaaggcagcagcacagagccatctccccaggtgtggggtggcacagccaactggtccctgcattcttggagggaggggatttttccccaaccctttccctcactgcagtggttccttcagcatttggcttctggcatcctcctgagtcttttcctccaggtagtaaagccaccaggcttttcctgtggggttttccttctttggtgagtcagtgctcactaacaccaggtttggtgctcttatccaaacactcatttaaaatggaaatgagctttaagagaatgagacatctttggagagttggtcaacctgtttcctggggtctcctttgtacagatggatgctggttttcccagctcttcatcactcacttcccatcctcctcctggggatcttcctagggaagagacccacttctcagaaggaaggcagcttcctcttatcccagtgcctttgggtacagccttccatgcttcttcatggaaaaggctattgacgacactgtcagggggctttcaccagcacccccagattttgtgggggatgtatctgggctgcaccaaagctgatgttcctcacatggtggctgcctgctaccttcttggagaaaaggaaaaaataaaatgggcgtgcttgttctgaacttgcctgtcatctcgtccacgtccgtctcttggtcacagttggatcatgctgcctcagcgttcctgcagaaagacactgcttggaggcagggactcctgagactcacaggctccccagcacggccactggggacacaggccagtccaggggccccagccctttggttccctttctgacgatcactatgggcctccctcaccacctatttcagtccttgctcttggtcatgcaggcactggtgcctgtggtcacccctactctgccctaagcaacagtcacccacccaccaaggctcatgcccctttccttggttcttagctgcagaatcagccaggccttctgctggggaaaggaatctaaggtgtccgacagtggtctctaggaggagaggctgcaatgggagttgttactgcagttcccgtggaatttggcattgacatctgattaggaggggccacattatttcagaatatttctatcgttcttctttgaatttgcaatggaggcacacaagggtgaggagagaggaggagaggagtctgctaactgctggcagggtttgcaggtgcaggtggggccaggtgggaggtgcccttgggctgcagggctcagcctagaaggcatcctcccctgcactgagccagctggcctagggcagggcaggtgaaggaggtccgacctccccacattcccttctcatggcagagagtgccagtatagaagtcacagtgctgttcaccttggcatttgtggttaggcgggcatgccctggctgctcaatgatgtcccatcagcattcagaccccacagctgtgtgcagaggaggggaaaggcctgtggcaaaggcagcaccctccagagcctggggagatgggcaccctgagcagcacattgcagggagcagagggagagggcggggtgagagcaggagggggatgcgtgccagagcacagctggagcgaggcagttagaagacaggggcagatggttaagagaagagggtaggccctgtttgcaggaggggcagggagatacttcctccagcaggctctgaggagagatccaacagcacatgtgcacaaggctttccgtgctgtgcgcttcagcagacaccacgcgctccagcgcagaaagtgttagggaggaaagcagctgcgtgctggccaaggaggggtataggaagtggggcagtgcgaaagcccaggagctgctctccctcctggatgttggcatcttacagggacctgtggtcatgctgccgagtcagccatgttccccctccccatgcgggccgtgctgctgtccctggcccccatcagagatgagcccttcagatctctctgccaccagggaggaagatgcagccaggcaggtgaatgtggccatgtgccaattaggaaaccaccctcctaaccccagtggcacactcaacaccacacacaggtgtgagcagggagagggctggactgcgggtggggccttgggagatgtgggtggggtctgggagatgtgggtggggtctgaggggtgtgggggagcccagagatgcagcaggagatagaagactcccagcagccctggattctccagagtgggggtctctgtggatatctacaaagactgagggttctgtagtccagtgagacagctgtcatttccttgtaaccagcagagatggcctctaaggtgagcagagttgagacaccataggtctcctcagggacaagggctggctggcagggcacctgtgtcccaccgtggagctgctgctcaccccacagactgagccccttcacgcttgcaagtggacgtccctcctgcatgccgccacatggcccagcccagcccttccatccagcgtcttactggtgtaaggacagaaacctgctcctgtcactcaatttcaccaccgttctgacaccccagcagcctcacgggaggtgggagtggactctgcctcagggccctcggggacccatgtgcccagctgccctcctggtgccctgtgccgggcaccctccagtctggggctttctctgccacaggtctggccacgtctctttcctgtccaagctccagagctctcatccgtggcctatgcgtgcatgaagggactccgttccatccaatggtgggcattgagagatgccattggctcctgtgcagtcttctctgggggcccgagttgtccccgacgcccctcatggctgccccataggccccgccctcctccctcagctgcttcaaggagcaccctcattcttgatgactgccttggccagaggccactgtgttccatctttaaacaggggtcccaacaggggaatgaaaggaggcacccgaatggcctcagagtttaatctaagttcagcaaaagctaagttttaggcagcagtgagctttgctgtggcttcaagcacacgtttcttcttgagcatttgtgatgctgcctgtctgggcagaaggggtctccctgggatgtggccaagaaggtgcagacaccgctgggccatggtggagcctccctgctcagctgctggctgccacctgtgggtcgctcctggaccccggggtgaccagtgtggagcacccaggccgagtgactgtgcctcttggctgggtgggcctcctacaggagtgggtagcagggcgggtctgagaggggccagcagaggcacaggtgctctcagcctgacctcgggcaggtggcctggatcaggcaccacctgcaggcaggtgtgggcggggcctctccggggtgttgagctcaggtcttggggcagagtccaaggctggcggcccgtcccaccggccccctcgggcgcactgcccacagtcttcaggggctggcttgggctgttctctaagaaatccccccgtccttgtttctagctaataggctgcataattggacgccaagggaccaaaatcaatgaaattcgacagatgtctggagctcagatcaaaatcgccaacgccacggaagggtcctcagagcgtcagatcaccatcacggggaccccggccaacatcagccttgcccagtatctcatcaacgccaggtgagcatctcccaagggtctctgagagacgcccggaaagggacgcgccagccggcgttacatcacctggacggtcggggggtgggaggaggcacagtctgggccacactctgcctccccttctgtcccctctgctccaggctggatggtggggacaggatgggatggtgacagcctccatgtagacacggggccacctcactctcccgacctcccacccgaagcgtctccagggacaatcccggaggctagagaggaaggcaggtgctcctgtggcctcagacaggtggccagaactatcctggaaggcctgactcttgtccgctcagaggtctccagaaagaccaatgtttggggactttgctgttttgcctcctttttcattctcatggaaacgtgtagggacgggcaggacaggactctgcaggccgcttccttccatgggtccctgtgcacatgggagggtctgaagccacctgggtccctgtgactgcaccccactcggcctcaagccagtgccccacccctgccaagcacaccataccaccagtccccccgccaggcatgccgtaccaccagccccgccaggcacactgtaccaccagccccccagccaggcacactgtaccaccagccccccagccaggcacgctgtaccaccagccccgccggcctccgatgtaaggaacatccctcctccctccccaaggatgtcctactgcaagagccctgagctgggcttgtgggatgggacgggacgggatgggactggaggggaggagaagggaggggcctctaggtggacacagccctgcgtgggccctggaacccctgtcccggtgacccttctcttacctgcacgcccagtgagtgggtgagaggctgcctggagaggacgaggacaccccccgactttacccactgatgccccgctgggcttctgcctcgatccagagccaggttgggcctctttccatccctgtggccacaggcccatgggcaggaggctgggcaaagtgcagcattggcaaacccagggcgagcctggggatggggcttgtcagggaggttcccgcctgccagaccgcattactgacagccccactgggacccgtgcttggggccagatggctcttacccacatacacttactcctgtggcaaccaaagccccttctcagatgccaggtgtgaggctgggaaggccctgagcacccccaggggccgacccagggctgtgtagggggctccacatggggaaggcatcaagcccccatgcagggctggctcacacacctgacgtggtgatgggcatggcggggaccagggcggggaagaggcctgtgtgctctgctgtggtctccagctcaggacctcctgagctgaccgggatggcctgtcccagcgagcacagaggccacacagcccggcctcacgtctgcccactgatgagggcgttggttgtgaccgtctctccctctcctgcctttgtctgttccaggctgacgtccgaggtcaccgggatgggcacgctgtaatcctacccagcacccttcccccgcgtcacccacctgccagagcctaaggcccccggctctcgcactctgtacagcccaccttccctgcctcacagataccaatagagaggttttcttaattaacaaaaggacgtatgccatggagaaacacacccgcgcacacagctgctctctacagaggctgcaggctccgccgagtcccccctcagtgttattttatttatgacttacgctcccgtctgcccatgcaccggcatgcagtggtaattattttagaaatattgttccttggtgtcagcgtagctgtctgtcttaggagctgggtcggcgttccgacagcacttcctgtccgcccttctcctctgccatccagaaccgtccagaactgttgcctgagacccctcctctctcacacagccctgccatgctgactcggtttcccctcagagccattgttgtctgggctcgagtttctgccccaggttgtgtgctggaatcggggggtggctctcctgccacccatggggagcgccaggagaggagggtcatggaggatgttggggctctgaccccaggagtggggtggagggcggagcctgctggaggccctgccttcacagagatgccgcgtgctgggaaggctcttggggtcccctgagcgtcttccagggtggctggagagcacagacgcgccagggagccccctctgtgctcctcagagttcaataaatgtcgtggcccctcctca

SEQ ID NO: 7329 - DNA, 11691 bp, Homo sapiens; identical to SEQ ID NO: 7328

SEQ ID NO: 7330 - DNA, 241 bp, Homo sapiens
ctccaccagttggccatgcagcaaaccccctttcctcccctcggacagaccaaccccgctttccccggtacgtacccagcccttttctcacctccttctcttctcacctggggactttctctttctgagctgtgttattcggtgcagtgcatagaacaggtgcagttggatttgtgagtgccggtgctgcggcgttcacatgcagcaggcttgctggggctggggccggggacagggtggg

SEQ ID NO: 7331 - DNA, 241 bp, Homo sapiens; identical to SEQ ID NO: 7330

SEQ ID NO: 7332 - DNA, 241 bp, Homo sapiens; identical to SEQ ID NO: 7330

SEQ ID NO: 7333 - DNA, 1222 bp, Homo sapiens
gccagatggaccaactagtgctggtcttcatgggttgccttctcaaagaccatgacacactgagccagaggggcatcatggatggccacaccatctacttggtcatcaagtccaagcagggctccagatctctagcccattccttccgggacctgccaacgaatgatccctgccaccgggacagaaacaccaaaggaaacagcagcagagtgcaccaaccaactggtatgaatcaagctccagtggaactggcccactttgtggggtctgatgcacccaaagtgcatacccaaaacttggaagtgagccacccagagtgcaaagcacagatgctggagaatcctagcatccagcggcttctgtccaacatggagttcatgtggcagttcatttcagaacatctagacacgcaacaattgatgcagcagaacccagaagtttcccgccttcttcttgataattctgagatcctattgcagactctggagctggccaggaaccttgctatgatccaagagataatgcagatccaacaaccttcacaaaaccttgagtatccactgaacccacagccatatctgggcttagagacaatgccaggtgggaataatgccctgggtcagaactatgctgatatcaatgatcaaatgctgaacagcatgcaagatccttttggaggaaaccctttcacagctctcctggcaggacaagtgctagaacaagtccagtcttcacccccacctccaccaccatcacaggaacaacaagaccagctcacacagcatcctgcaacccgagtcatctataatagctctggtggtttctcttcaaacacctcagccaatgacacccttaacaaggtcaaccacacttccaaagccaacactgctatgatttccaccaagggccagagccatatctgtgccactcggcagccagcttggataccagccttacctagcatagagcttacccagcagcttcaagaagaatacaaggatgccactgtttctctaagtagctccagacagacattaaagggtgatctccagctgtcagatgagcagagcagctcccagatcacaggaggcatgatgcagttgcttatgaacaacccctacctggcagctcagattatgttgttcacaagtatgccccagctgagtgaacagtggaggcagcagctgcccacattcctgcagcagacacagatttctgatct

SEQ ID NO: 7334 - DNA, 416 bp, Homo sapiens
ttattttattgtagagccctggacccctaaatatgtcctccttccccagctggcccagggtgactgcgaggatagagttgacatcacaatatcccttttctgaggattcatgcccctggtgggtggggtaggaggaggggtagccctaggagaagtcatcaccactttgtccaccatgggtgaattatgaatcagtagctatgccaggcctcagctgggccacatctggagaactggggtgagggcacaacatcacaaaatatctggccccagtctggtcactcatcccttttagggcaacaaggaaactatcctgtggcctgagagcacaatacctgagacaaaggccagcagaaacatttgtctgccctcaccctttctgccccagcttccacctgctccccatctgcccaccc

SEQ ID NO: 7335 - DNA, 442 bp, Homo sapiens
agctgagcccaagggacctgagtgctgccacaagcctggaacagtcctgcagaggctacaatccccggatgggacccttcccaccctctgcaagctcctgagatttgttttagcaaacagatggattctctccaggccatgggatttgggaaccaccatgccaatctacaggcactcattgctactgaaggggacaccaatgctgctatccgcaagctcaagagatcccagagattctaaccaccatgcctacttgtttgcttgctacctgcctgctgacccacctgaccatctcatttgccttttgcacctttcctgatgcttccagccaggagaagtcctggaataagagttatcaaccaatgtgtcttgtactgaataatagatcattggtcgtggctgaaacatctgtcaataaaatggctacactcacttgctgcga

SEQ ID NO: 7336 - DNA, 4546 bp, Homo sapiens
cagaatgaagatataccaaatgtagcagtttatcctcataatggaatgatagacttaaaatatttcccatattatgggaaaaaactgcatgtaagtattgagaagttcttatgtggtgattactcttttgggaagctggagcatgtgttgacgtaccacttgtctggggtaggtagacgccagccctgtttaatttgtgcgtcatctattcaggttttgttttattttaatggtgatggtaaatggagttcccacatttacaattcagaacacagaacccaagcagatacgttaaagttagatgattatttctaaaatatcattttctttttcattatagaggtagtagtaggtgcttatgtagagaaagtagaaaagtacttaaaaagaaaatcaaggccgggtgcggtggcttactcctgtaatcacagcactttgagaggccaaggcgggcgcattacctgaggtcaggagtttgagaccagcctggccaacttggcgaaaccccctctctactaaaaatacaaaaattagctgggcgtggtgacatgtgcctgtagtcccagctactcgggaggctgaggcaggagaatcgcttgaacccaggaggtggaggttgcagtgagccaagattgtaccaccacactccaggttgggtgacagaatgggattctgtttcccccaccaaaaaaataaatgaaaagaaaatcaaggccaggcgcagtggctcacctgtaatcccagcactttgggaggccgagtcgggcagatcacgaggtcaggagatcaagaccatcctggctaacacggtgaaaccccgtctctactaaaaattacaaaaaattagctgggcgtggtggcaggcacctgtagtcccagctgctcgagagggtgaggcaggagactggcatgaacctgggagtcggaggttacagtgagccgagattgtgccactgcactccagcctgggcaacagagcgagactctgtctcaaaaaagaaaaaaaatcaaaagctcattgcggccgggtgtggtggctcacgcctgcaatcgcagcattttgggaggccgaggcgggcagatcacctgaggtcaggagttctagaccagcctgactagcatagtgaaaccccgtctctgctgaaaatacaaaaattagccgggcatagtggtgggtgcatgtaatcccagctactcgggagactgaggcaggagaatcgcttcaacctgggaggcagagattgcagtgagccaagactgcaccattgcactccagcctgggcaacaaagcaagactctatctcaaaaaaaaaaaaaataggttagtggactaatgagttatcataggagtgggactagcggctttataagaagaggaagagagacctgagctagcaggttagcatgctcagccccctggccacgtgatgccttgcaccacctcaggactctgttgaaagtacccagcagcaaagaaggttctcaccagatgcagctccttgatcttggccttctcagcctccattaactgtaagaaataaattcctttctttataaattacccagtttcaagtattgtgttataagcaacagaaaacaaagacagtagtacagttaacaaaggaagttaacatatagtgctcttatgaatctgtagactttgttgaaaatccatcaattgttccagtaatactctttatagtgaaagacaagtgttttcctgatcccagatgtcacactgttaacacgtttagcaacctataatcaggaatatttcctcagtctgtttcatggctttgtactcttcaaaaataagtacgggccttttatggcttattttatgttcattagttggagtttggtggtttttcatgattaaatataggttgtgcattttggcatgagtgcctcaaaagaaatgttgagttctcagagtgtcaggagggacatggtatcatttcattccgttaatggtgatactgccttgattccttggttaaggtggtatgagcgaggtttctacaatatactttttttcctctgtcatcaataagtatcatgtggggagaaaattaaaaagctcgttactgcctggcacggtggctcacgcctgtaatcccagcactttgggaggctgagacaggcggatcacctgaggtggagagttcgagaccagcctgaccaacatggtgaaacgctgtctctactaaaaatacaaaaattagctgaccgtggtggcacactcctgtaatcccagctacccaggaggctgaggcaggagaatcacttgaaccaggaaggcagaggttgcagtgagccgagattgcaccattgcactccagcctggcaacagaatgcaatgtctcaaaaaaaaaaaaaaaaaggccaggtgcagtggctcacgcctgtaatcccagcactttgggaggccgaggtaggtggatcatctggggtcaggagttcgagaccagcctggccaacttcagtagcaatggcaaagccctgtctctactaaaaataaaaaaattagctgggtatggtggtgggcacccgtgactccagctacatgggaggctgaggcaggggaatcgcttgaacctgggaggtggaggttgcaatgagctgagatggtgccactgcattccaacctgggcaacatactccatttcaaaaaagaatattaaaaaataatgataagggtcgggtgtggcggctcatgcctatatattcccaagcactttgggaggccaaggtggacagatcacgaggtcaggagatcgagactatcctggccaacatggtgaaaccccgtctattaaaaatacaaaagttagctgggcgtggtagcgggtgcctgtaatcccacctacttgggaggttgaggcaggagaatcacttgaacccgggagtcagaggttgcagtgagccgggatcgtgccactgcactccagcctgggcaacagagcaagactctgcctcacaaaaaaattaataataataatgataataggccgggtgtggtggctcacacctgtaatcctagcattctgggaggacaaggcaagaggatcacttgagctcaggggcatgagctgtcacacccagtcaacatttttatcagtaattacaggtatggacttacagctccaaaaaattaaaaagaatgcagagaacagaaaataatagagctaaattttttttttaatttacaagccacgtatggtggctcacacctgtaatcccagcactttgggagggtgaggtggaagggccatttgaagcgaggagtttgagattagcctgggcagggagaccctgtctctacaaaaaaatttaaaaattagtgggctgtggcggcatgtgcctatagtcccagctacttaggaaactgaggtgggaggattggttgaggcttcaatgagccataattgcaccactgcactgcagcctgggcaacagtctcaaaaagaaaatttacagaataagccaattcctggtagagagaagtattaagtttccatagagtttgaattaatatattttccttttattgccaggttgggtatctacagccattggttgctgttcaggtcagctttgctcctaacaacactgggaaagaagtaacagttgagtgcaagattgatggatcagccaacctaaaaagtcaggatgatcgtgacaagtttttgggacgagttatgttcaaaatcacagcacgtgcatagtatgagtaggatatctccacagagtaaatgttgtgttgtctgtcttcattttgtaacagctggaccttccattctagaattatgagaccaccttggagaaaggtgtgtggtacatgacattgggttacatcataacgtgcttccagatcatagtgttcagtgtcctctgaagtaactgcctgttgcctctgctgccctttgaaccagtgtacagtcgccagatagggaccggtgaacacctgattccaaacatgtaggatgggggtcttgtcctctttttatgtggtttaattgccaagtgtctaaagcttaatatgccgtgctatgtaaatattttatggatataacaactgtcatattttgatgtcaacagagttttagggataaaatggtacccggccaacatcaagtgactttatagctgcaagaaatgtggtatgtggagaagttctgtatgtgaggaaggaaaaaaagaaaataaaagtgtgtttgaaaaatattatcttgggttctttgtaaaatttattttttacatgctgaattagcctcgatctttttgattaagagcacaaacttttttttgtaaaacatgtaaaaaaaaaaactgggattaatttttagtgttggaactgcctcttattttaggctgtagataaaatagcatttttaggttagccagtgtgactatgcacctaattttttatgagattaaattcataagacttaatttgtacaatagtttgtgaaatatcttgttactgcttttatttagcagactgtggactgtaataaagtatataaattgtgaaatataaaaa

SEQ ID NO: 7337 - DNA, 4547 bp, Homo sapiens
cagaatgaagatataccaaatgtagcagtttatcctcataatggaatgatagacttaaaatatttcccatattatgggaaaaaactgcatgtaagtattgagaagttcttatgtggtgattactcttttgggaagctggagcatgtgttgacgtaccacttgtctggggtaggtagacgccagccctgtttaatttgtgcgtcatctattcaggttttgttttattttaatggtgatggtaaatggagttcccacatttacaattcagaacacagaacccaagcagatacgttaaagttagatgattatttctaaaatatcattttctttttcattatagaggtagtagtaggtgcttatgtagagaaagtagaaaagtacttaaaaagaaaatcaaggccgggtgcggtggcttactcctgtaatcacagcactttgagaggccaaggcgggcgcattacctgaggtcaggagtttgagaccagcctggccaacttggcgaaaccccctctctactaaaaatacaaaaattagctgggcgtggtgacatgtgcctgtagtcccagctactcgggaggctgaggcaggagaatcgcttgaacccaggaggtggaggttgcagtgagccaagattgtaccaccacactccaggttgggtgacagaatgggattctgtttcccccaccaaaaaaataaatgaaaagaaaatcaaggccaggcgcagtggctcacctgtaatcccagcactttgggaggccgagtcgggcagatcacgaggtcaggagatcaagaccatcctggctaacacggtgaaaccccgtctctactaaaaattacaaaaaattagctgggcgtggtggcaggcacctgtagtcccagctgctcgagagggtgaggcaggagactggcatgaacctgggagtcggaggttacagtgagccgagattgtgccactgcactccagcctgggcaacagagcgagactctgtctcaaaaaagaaaaaaaatcaaaagctcattgcggccgggtgtggtggctcacgcctgcaatcgcagcattttgggaggccgaggcgggcagatcacctgaggtcaggagttctagaccagcctgactagcatagtgaaaccccgtctctgctgaaaatacaaaaattagccgggcatagtggtgggtgcatgtaatcccagctactcgggagactgaggcaggagaatcgcttcaacctgggaggcagagattgcagtgagccaagactgcaccattgcactccagcctgggcaacaaagcaagactctatctcaaaaaaaaaaaaaataggttagtggactaatgagttatcataggagtgggactagcggctttataagaagaggaagagagacctgagctagcaggttagcatgctcagccccctggccacgtgatgccttgcaccacctcaggactctgttgaaagtacccagcagcaaagaaggttctcaccagatgcagctccttgatcttggccttctcagcctccattaactgtaagaaataaattcctttctttataaattacccagtttcaagtattgtgttataagcaacagaaaacaaagacagtagtacagttaacaaaggaagttaacatatagtgctcttatgaatctgtagactttgttgaaaatccatcaattgttccagtaatactctttatagtgaaagacaagtgttttcctgatcccagatgtcacactgttaacacgtttagcaacctataatcaggaatatttcctcagtctgtttcatggctttgtactcttcaaaaataagtacgggccttttatggcttattttatgttcattatttggagtttggtggtttttcatgattaaatataggttgtgcattttggcatgagctgcctcaaaagaaatgttgagttctcagagtgtcaggagggacatggtatcatttcattccgttaatggtgatactgccttgattccttggttaaggtggtatgagcgaggtttctacaatatactttttttcctctgtcatcaataagtatcatgtggggagaaaattaaaaagctcgttactgcctggcacggtggctcacgcctgtaatcccagcactttgggaggctgagacaggcggatcacctgaggtggagagttcgagaccagcctgaccaacatggtgaaacgctgtctctactaaaaatacaaaaattagctgaccgtggtggcacactcctgtaatcccagctacccaggaggctgaggcaggagaatcacttgaaccaggaaggcagaggttgcagtgagccgagattgcaccattgcactccagcctggcaacagaatgcaatgtctcaaaaaaaaaaaaaaaaaggccaggtgcagtggctcacgcctgtaatcccagcactttgggaggccgaggtaggtggatcatctggggtcaggagttcgagaccagcctggccaacttcagtagcaatggcaaagccctgtctctactaaaaataaaaaaattagctgggtatggtggtgggcacccgtgactccagctacatgggaggctgaggcaggggaatcgcttgaacctgggaggtggaggttgcaatgagctgagatggtgccactgcattccaacctgggcaacatactccatttcaaaaaagaatattaaaaaataatgataagggtcgggtgtggcggctcatgcctatatattcccaagcactttgggaggccaaggtggacagatcacgaggtcaggagatcgagactatcctggccaacatggtgaaaccccgtctattaaaaatacaaaagttagctgggcgtggtagcgggtgcctgtaatcccacctacttgggaggttgaggcaggagaatcacttgaacccgggagtcagaggttgcagtgagccgggatcgtgccactgcactccagcctgggcaacagagcaagactctgcctcacaaaaaaattaataataataatgataataggccgggtgtggtggctcacacctgtaatcctagcattctgggaggacaaggcaagaggatcacttgagctcaggggcatgagctgtcacacccagtcaacatttttatcagtaattacaggtatggacttacagctccaaaaaattaaaaagaatgcagagaacagaaaataatagagctaaattttttttttaatttacaagccacgtatggtggctcacacctgtaatcccagcactttgggagggtgaggtggaagggccatttgaagcgaggagtttgagattagcctgggcagggagaccctgtctctacaaaaaaatttaaaaattagtgggctgtggcggcatgtgcctatagtcccagctacttaggaaactgaggtgggaggattggttgaggcttcaatgagccataattgcaccactgcactgcagcctgggcaacagtctcaaaaagaaaatttacagaataagccaattcctggtagagagaagtattaagtttccatagagtttgaattaatatattttccttttattgccaggttgggtatctacagccattggttgctgttcaggtcagctttgctcctaacaacactggggaaagaagtaacagttgagtgcaagattgatggatcagccaacctaaaaagtcaggatgatcgtgacaagtttttgggacgagttatgttcaaaatcacagcacgtgcatagtatgagtaggatatctccacagagtaaatgttgtgttgtctgtcttcattttgtaacagctggaccttccattctagaattatgagaccaccttggagaaaggtgtgtggtacatgacattgggttacatcataacgtgcttccagatcatagtgttcagtgtcctctgaagtaactgcctgttgcctctgctgccctttgaaccagtgtacagtcgccagatagggaccggtgaacacctgattccaaacatgtaggatgggggtcttgtcctctttttatgtggtttaattgccaagtgtctaaagcttaatatgccgtgctatgtaaatattttatggatataacaactgtcatattttgatgtcaacagagttttagggataaaatggtacccggccaacatcaagtgactttatagctgcaagaaatgtggtatgtggagaagttctgtatgtgaggaaggaaaaaaagaaaataaaagtgtgtttgaaaaatattatcttgggttctttgtaaaatttattttttacatgctgaattagcctcgatctttttgattaagagcacaaacttttttttgtaaaacatgtaaaaaaaaaactgggattaatttttagtgttggaactgcctcttattttaggctgtagataaaatagcatttttaggttagccagtgtgactatgcacctaattttttatgagattaaattcataagacttaatttgtacaatagtttgtgaaatatcttgttactgcttttatttagcagactgtggactgtaataaagtatataaattgtgaaatataaaaa

SEQ ID NO: 7338 - DNA, 1008 bp, Homo sapiens
tcatcactctgtcctttgtgctgtctggccggtgcctttcatctgtctctcaccccaccccacagccatatgctgcttcataatgaaatgaaatgagcagaatctagaactccttagagtggattcttagttttgctttatgctgtttcatgcatgctttcaaccctgtctcaaaaaaatttttttatatatatataaaattcaagtatttaataatgttttattttaactagtgttccgtaagcccagcactgattttaatcattgtggtctgtttgctacttctcagtctgtgttaaagttacactcattagaattaggcccatttagaaagtgttacatgtgaattttcataaattgcttatttatcatgaataatactagaaataactaatagcatgaattaattggattacaggtgatgcttgatttgtatgttgataaacatggaattctagtagacaagtaatacttaatgatttatatatgctcataaatttattcctgatacagtatttaaatttgtcgaggagagttttgcttgtagtaccttaaattttccttcatgcttcccctctggttgcagttctggttattaatcacatgaaactcacacctgctgtctcccaggcctgagtgctgcattctaggttggcaccttgtggtggctgttgctttccagtctggaagcacagcattttattcatttcaggaaaacatcggtcctaaacctgctggtgcattcctgctgttagtaggtagaaaggctggcatttggtatttggagggcagataagattttacaggagtacatgagttaaagaagggactctcatgaaagagagtatagagtgtatctggaagtgtaagtatcaggatagttcatgtggaaggggttagttagataatatttgcaatcaagatgagcaagcttcttctcagaaatacacttgtaatgataatatagttggagcagcattgtagtttctgcaaactgttcatgattga

SEQ ID NO: 7339 - DNA, 692 bp, Homo sapiens
tgcttcttgttttttcttaaggctgttgtttattgttacttttctccttttttaaaaaaaaaaaaaggcagccgggcgcagtggctcacgcctgtagtcccagcactttgggaggccgaggcgggcggatcacaaggtcaagagatcgagaccatcctggccaacatggtggaatcccgtctctactaaaaatataaaaattagctgggcgtagtggtgcgtgcctgtagtcccagttactcgggaggctgaggcagaagaatcgcttgaacccaagaggcggaggttgcagtgagtcgagatcacaccactgcactccagcctggtgacagagcgagactctgtctgcaaaaaaaaaaaaaaacggcaaagcagatattcttgaggttttctttgtggtggtgcaagccagaaggggtgggacccaacccagctggctcaagaatggccgtttggagtaaacgtgagggctctgggtggccttgcctggccagatgggccttggtggcctggcggcagcctctgccctttagtagtgggcactcagccccacgtcagagctctgcttgttcctctgtcactaaaatcatagtgataagagattttcactgaaggaaattattggagtaattacagcaaaccttttctgggttttgattttcttctttatgctatctcttaagagtgtaaaa

SEQ ID NO: 7340 - DNA, 692 bp, Homo sapiens; identical to SEQ ID NO: 7339

SEQ ID NO: 7341 - DNA, 1008 bp, Homo sapiens; identical to SEQ ID NO: 7338

SEQ ID NO: 7342 - DNA, 2846 bp, Homo sapiens
acctgaccctgtatttcctaggagcaaaggttcagtacttgacaattcagcacccacagtgactttatagagcagaactaccagaaataaccagcatcaactgtataaccacagtccctaccgtggtgactgcctttctgcttccaaagggatgcaggaaagaggttggttttggggtctcccaccgtggcagttgctatgaggagcaactatggtaaaggctgtgaaaggagattgtaaacagtgaagtccatgggtcggaattgtgaatgccatcactttcactattgcatggacgccctactacatgtcctgcgttgaggcctgcctccgggtgtagggctgttgttgagctttagggcattaggagagagctgcgaaaggaggcagaggatgtcctagaggactccacaggcatctcttccctgcacgttaatcattcgccagagcttggaggagggctgctcctggctgctgttcactctgtgtccaccacccagtctggccaccattgcctcttgcctggatggtggcatggccacctcactgctctcagcctccctctgggagtcctgcatccactctctacccacagcggccagacttctcacccttccactgtacatctgttaatgactccccatttttctcaggagaaagtccaaagccctggccatgggccctgaggccctgggttgtcgggcctctgccatgtctctagcttcctgtgaggccatgcaggtccccgccccctgctccagccacactggcttccctgctggtcccggaatgtgccacgcccatcccgcaataggcctttgcattgcccagcctctcccttgcccccaacacctgtacctgctccccacctgcatagcttcaggtctcagcttgagtcgcctccctgatgaccctggcccaggatcatcacacaaagtgggccccatgatgtagcccctcctccaccccaccttttttacagaacctatctcaggtgacatttcctacttatataagtgaccatttgataaacggccatcagactgtgaaggccacgaggtcagacactgggtctaccttagctcaccaccacattcccagagcaggggagagggcctggcacatggtaggtgctcaataaacatttagtaagtggagaaattcgtaatgaagaagatccaggctcttcccttgcggttcaccgactggaaggacagtaagctagcatctattacacccgaccttgcacaaggatccagcgagggggagaggtcatttttctcacattttggaggatgatgaggctcagagaggctgggagaactggcccagggtcacatagctaagaagtggcaggagcaggatctgaacccaggactggctaacccaggagcctctccctcctgcccctgccctgtcctcccatctttgtttgtccaggcctccatattacagttttatatatgaagggaggcatcccttagggtactgaggccttgacctcatgtcaccagtctttccaatattctctcctttccataagctggtcccaaaggcagagcgagatggagcccatgctgatgctgcccccggggaccacttgcttgtctggctggctctggcacatctccttgcaggaaagcacccgcctcttagagaagcccagtcaatctgacagattcagaacctgccatccacactgtggggcatggggaagctttggcatctggcaggccttaaaggagccacaggatgctgggagggtgagaattagttgactcacccactcttgttttacacatggggaaatggaggcccagagaagggagacaactcatccgagtctggggagtgagtttcaaaagcaaaatgagaagcccaggccctggactcctgggcagtgtcatttatgtttgcctcagtgtctcattggtaaatgaaaagtgtgtgtgtgtgtgtgtgtgtgtgtgtgtgtgtgtgtgtgtgtgtgtgtgtctcactaccagtctatcaaggtaactgaaatatcaccattaattctttttctcatagagaactttctgctagctctctaaaggaatgaaaataaccttgggtaggtaatgggacagggagaatcctaagtcatcagccaaattatttattcattgacatctccattcatccatttattcactcatccttttctccatctattcatttatcagcctctctaactaccaattcatccaccagtccatccatccatccacccatccatccatccatccatccatccatccatccatccatccatccccttctctctccatctgtatctccatatatccacttttctttctagccatccattcatccatctatcctttcaccaggttctcactaagcatcaattctgtgactggctctgtggggtagagatgaaaaggctcactcagttccagcccctgcagatcccccaggaccctggcagcagcagatctatgagcccacatttccccctgcttgtgaggatcacaccaagagagacattcacatcctggcctcacaaagaagagatggcaaagtggaaaaaggccggagtccccaaccctgagccctttaccctgtctcagtcttttataacgaggtgtgtgtgcttgggcaatgcctctctcttctgggactcagtgtacccatctctgctgtggggaggttggactagatgagagtttcccaaactccagttgtttctttccctccctccacacctggagatcagaacacctgtactaaaaagtactgaaaatctttattcaaatgagctcactttttttcaaccaaaataaacttattttagagtgaaa

SEQ ID NO: 7343 - DNA, 2846 bp, Homo sapiens; identical to SEQ ID NO: 7342

SEQ ID NO: 7344 - DNA, 2846 bp, Homo sapiens; identical to SEQ ID NO: 7342

SEQ ID NO: 7345 - DNA, 2058 bp, Homo sapiens
cttgggtgtcctgtatagggtgcatatatatttaggatagtagctcttctgttgaattgatccctttaccattatgtaatggccttctttgtctcttttgatcttagtttgtttaaagtctgttttatcagagactaggattgcaacccctgcctttttttgttttccatttgcttgatagatgttcctccatccctttattttgagcctatgtgtgtctctgcacatgagatgggtttcctgaatacagcacactgatgggtcttgactctttatccaatttgccagtctgtgtcttttaattggaggatttatcccatttacatttaaggttaatattgttatgtgtgaatttgatcctgtcattatgatgttagctggttattttgctcattagttgatgcagtttcttcctagcatcgatggtctttacaatttggcatgtttttgcagtggctggaaccagttgttcctttccatgtttagtccttccttcaggagctcttttagggcaggcctggtggtgacaaaatctctcagcatttgcttgtctgtaaaggattttattcctccttcacttatgaagcttagtttgactagatatgaaattctgggttgaaaattcttttctttaagaatgttgaatattggcccccactctcttctggcttgtagagtttctgccgagagatccgctgttagtctgatgggcttccctttgtgggtaacgcgacctttctctctggctgcccttaacattttttccttcatttcaacttcggtgaatctgacaattatgtgtcttggagttgctcttctcgaggagtatctttgtggcattctctgtatttcctgaatttgaatgttggcctgccttgctaggttggggaagttctcctggataatatcctgaagagtgttttccaacttggttccattctccccctcactttcaggtacaccaatcagatgtagatttggtcttttcacatagtcccatatttcttggaggctttgttcttttctttttactcttttttctctaaacttctcttcttgcttcatttcattcatttgatcttcaatcatggataccctttcttccagttgatcaaatcggctactgaagcttgtgcatttgtcacatagttctcatgccatggttttcagctccatcaggtcatttaaggacttctctacactggttattctagttagccattcgtctaatcttttctcaaggtttttagcttctttgtgatgggttcgaacttctcctttagctcagagaagtttgatcatctgaagccttcttctctcaactcgtcaaagtcattctccgtccagctatgttgcattgctggtgcggagctgcgttcctttggaggagaagaggtgctctgatttttagaagtttcagcttttctgctgttttttccccatctttgtggttttatctaccttttgtctttgatgatggtgacgtacagatggggttttggtgtgaatgtcctttctgtttgttagttttccttctaacattcaggaccctcagctgcaggtctgttggagtttgctggaggtccactccagaccctgtttgcctgggtatcaccagcagaggctgcagaacagcgaatattgctgaacagcatatgttgctgcctgacagttcctctggaagtttcatctcagaggggtacccagctgtgtgaggtgtcagtctgcccctactagcaggtgcctcccagttaggctccttgggggtcagggacccacttgaggaggcagtctgtccattctcagatctcaaactctgtgctgggagaaccactactctcttcaaagctgtcagacagggacatttaagtctgcagaggtttctgctgccttttgttcggctatgctctgcccccagaggtggagtctacagaggcaggcaggcctccttgagctgcggtgggctccacccagttcaagcttccaggccgctttgtttacctactcaagccacagcaatggcaggcccccctccccaagcctcgctgccgcctggca

SEQ ID NO: 7346 - DNA, 7687 bp, Homo sapiens
ttggactccttgggagtcgtttctcggccatttgacccgtgggacttgtgggttttgtgctgctttttctttctttcttccccttttccaacttcagcaatacacccagatgttagtcgagtcacgtcccgccgccctctgcccttgaaatgctggcaagtacgcagccccgcgatcgtcacgtgacgccggggttcagcgtatccttgctgggcaaccgtcttagagaccagcactgctggctgcaccatgaatgtgatctacccactggcagtccccaaggggcgcagactctgctgtgaggtgtgcgaagccccagccgagcgggtgtgcgcggcctgcacagtcacttattactggtaggccctgaaacgtggcacctgggcgctataactccctccctctctccctttcccgggtctggcttgggtaccttgcgttagccgttgcccctgactctgcaagggacacctcaaaacggctttaagacaggcccctaagactcccgtggcctcgtctgtctcatctcccacttattcgtcactcatgttttctgaaggcgtactctgtgttatgcactattttaggtgctaaagttactggggcagctcggtagatcagttccttcaaagatctaacattccaatgtgggagacaaatcagtaaagaaacaggccgggcgcggtggctcacgcctgtaatcccagcacttcgggaggccgaggcgggcggatcgcctgaggtcaggagttcgagaccagcctggccaacatggtgaaaccctgtctctactaaaaaatacaaaaattaggcgggagtggtgctgggcgcctgtaatcccagctactcgggaggctgaagcagaagaatcgcttgaacccgggaggcggagctcgcagtgagcggagatcgcgccactgcactccagcttgggcaacgagagtgagacgatagtgaatggggcagtatgtggaaagctttccctgtggaagaaacatttgagctgcattttgagagggcagtcagaacctgctgtgtacaggagtagtgaagaagggtagggcattcccggcatccgggactgctagggcaaatggcaaaagaacagagtttgctaagggccgagtggagaacgtagtagtggagggagcagtcagtgattttcaaactgcaggccagggccctttagcagtttatgaataagtcacaatcaccatttagagaaaacaacaacaacaaaaaagagcacagaatgagtagaaagtatcaggttaatcctacctgaattgtttcttaaaacttttgtcttagtgttttatgtggacatgtgtgtgtgtacaggaaaaatgtatttcttactataggttgagtcaaaattagccggatgtggtggcgtgcacctgtaatcctagctactcgggaggctgaagcaggagaatcgtttgaacccgggaggcggaggttgcagtgagccgagatcgctccattgcactccagcttgggcaacaagagtgaaactgtgtctcaaaaaaaaaaaaaaaagttggaacatcattgtgataggtagtagaagtttaaaccaagaagataaaggttagggctagacagtgacatgagatcaagggtttggaatttatctcctgggaaaccatgaatggttttgagctgacatgctctcatttgtgttaaggaaagaggatgggctgcagtgtggcagatacagaggaaggtagacactgacggctgcataacagatcaagaagctgttgcagtaccttctcatactggcctaggtgtccttcctcagtgctctcaaagcactgagtatgtcccctatcctaacacttaggacatggactgaaatcatttatttatttccttcattaggctgtatgccccacaagggcagggatggtatctgtgttttcattgctatctcctctttggtggcttccttgcctttagaatataattaagaatttgtaacagaaaatacaaggccctggttatttctctaccttcacttcccaccacactcaccccattttttctttgctgtagttatagagaactgaagttctaatttgctaagccctttcttccctcagtttcttttcccagtctgttctctctgctaggaacctccccttcaactacaagccttcctggctccctttcatccttcagttctcagtttaaatgtcatttcttcaaagaggtctaaacccagtctcaactccccgtcatacttttctctctcacagtaccatttttctttgctttttctgtacttttatattattgtgtttgcttgtctgatgtctatgtcttttactagacccagtggccacacataccagacactcaatgaacatctgttgaataaaactaaatggataataaacccattaacttgggcaaggaacacggggaaaagatgacgggcatcagatttggttgtaggcatagagtttaagaggcctttgggtcacccccagagagatggccagtaaaccgccgtgggtaaaacctgccactcaggcttgggaaagattcaatccttttgcttggtgtgagcactgactttttccttaaaacacccctgtcctctgtatccctccagccggaagtaattccttcttcctctgaactaactttacagtactctgtatctctcagatgactcatatttctcttcattttaattgttggtgagtgtgttatttcaattctgttatgctccattaatgctagatactatgtcaaatgtgtacagagggactgtcaagtatgctaacttttgatctatgtccgacctgtcattgtatgccccatagtctctagcaaagtgtcttgaaatagttggcacttgtgcttttatcccttgggccaaaaaataaaaatgtgaaaaaaaagacatagttggcactaatatctgataaatgcatgtataaattatcatcttctatgcccttatcttcgattttttttcttttacttgcttttaattctctttaagaccttctccttttgtttttttgcttccttttctccagatttctatgtctttgggtcttgcagatttcaagattttttgataaaacaaaactgaggttgttgttctataggttttgatggtcgaatgtaaagcatctagtacccttcctggaaccatgttggcacacagtaaatgttccttttcatcatcccaagtttaaggaacaagaaagtcagtctgaatttgtgaaagtttttttctgcaaaagaatttttttcctgattataattgcaattcatgctcactgcagaaaacctgaaaatataaaaaatcaagaagaaaaataagccatagtcccacaacccagggattaataacctgaaattttggtgaatttccttcttttctctgaatacatttattttatatattgtgtgtaatcttgtgcatattgctctatagtggattatgaccattctcagagaatagcacatttttatttactttagagacacagtagaacttttatttttttattatttttttgagacggagtcttgctctgtcacccaggctggagcgcagtggcaccatcttggctcactgcaacctctgtctcccgggttcaagcaattctcttgcctcagcctcccaagtagctgggattacagggatgcgccaccacgcctggctaatttttttgtatttttagtagagacggtgtttcaccatattggtcaggctggtctcgaattcctgaccttgtgatccgccctcctcggcctcccaaagtgctgggattacaggacagtagaacatttttaagaaaaggtaattttatggaagtacatactaaaacattggtgacaagtaaaagagacttcagtaccataggtttgcatgaatttaaatgtctttagtcagggcgtacattctgtaattcactacaaatactattgcttcctgttcttgaataccacttcaccattcgttttcttctcctggccagtgacggcatttaaatttgcgcttcatatgtcaaacaaaaggaaaaattattgcaaaaaatattgcagatcactaagaaaacaaacagtgaagtggtattcaataataggaagctataggatcagtggtgaattgtagaatgaatgccctacctaaagatattcaaattcagcttaaaaaaaaacatgataatagccaaacaaaacatgtggctcacaagctacttaattgtgagccctgattgaaagcatttatccattcctactttatccctgaccctgtgttaggtgttacaggtgggacagatcaataagcagggagcccgcaaatatataaataaagctcactttatttagaaaggcaagatatgttagtggctctcagtggaacaaaagttcaggcatctaagttaacatttccattgcttacaagccccacttgataaattccctgtggaactcagctatatcctggctaagtgcttttattgatctgtttataataattctctacctccccaaaaacattttaaatggtttctgtcatttctttggtagcagtcacaacttgtaaagaatatactttaattgcatttctattgtccaagaaggtggcaatattgtccaagaaggtgcttgaacatggctatatattgtctgtggctgcttttgtgctacaacagcagagttgagtagttgcaacagagatcctatagctctcaagcctaaaatatttatctgaccctttacagaaaagcttttctgatccctcctctagattattgttacctgttttgaaatatgtataaatggaatcaaacagttaacttacatttaagtgaaaatgtgtaataagcaatagaaatgcaaaaacccatgactatgcatctaacaacagagcctcaaaatacatgcagcaaaaacagacagaactggggagaaaaatagacaatttaataataatggttgaagacttcaatatcctaccttcagtgatgaacagaacaactagatgaaagatccagtatcccactctcagtaatgaatagaacaactagatagaagatcaaatatcccactttcagtaatgcatagaacaattagacagatcagcaaggaaatataagacttgaatcacgctataaaccaactagacctaacaggtatctgtagaacaccattcaataacatgagaatgcctattcttctctagtgcgtatagaacattattcaggatagaacatatattagaccataaaataaatctcaataaatttatagagattgatttcatacagagtatgttctccacctacatggaatgaaattagtagtcaataacaaggaaatttggtaaatttacaaatatgtagaaataacacactcttaaccaatgagtcacagaagaaattacaaaggaaattagaaaatgctttgagataaatgaaaacaaaaacaacatactaaaacttagatgctggcaaagcagtactcagaggttactgtatgaatttagtactcatatgaatttatactaatatacattacattgaaaagaagatctcaaatcagtaacctagcatttcatcttaagaaactagaaaaagaagagcaaactaaaacatatttataaactcctttatgcacagccctgtgttgggtatagacacaagctagcagaagaaaggaaaattaaagattatagcagagataaaacagagaataaagaaactacagagagaactgatgagaccaaaagttggctccttgaaaagaccaacaaaattgacaaacctttagctaggttgactggcctagaaaagaagattcagattactaaaatcagaaatgaaagtgaggacattactaccaaccttgcagaaataaaagagattataagagaacactatgagcaattgcatgccagcatccctgtgtgacttcagaatgtgaatgtgtgcctgcagaaacaacatactctccaatcccaacacagtttatacatcatcaaataaccacatgaaaggaaagagatttgagtctcagaaatggctttgagctccctgcctggtttgtatttggcttacttttctggtgtctagggataggccagtaggagggttaatggaatcttaagtcatgccaaatataaagatcataaagtctatgtttccgttgtcagtggggtggtacatcagaaggctgactgggacagcatccatgagaaaatatgtcagctcttgattccactgcgcacttccatgcccttctacaattcagaggaagaacggcagcatggcctgcagcagctgcagcagcggcaggtagggcctacggcactttccaaggttaagtcgtaggtgcggtgaagctgcccaagacaaggctcgaactgtgttgggatcactaaattgtaacctcacggagggcagagactttgttttatatctttttaagtcctcaacaccatccagtctgttgttttccacatttactaaatacttactgtattagtctgctagcactgtcacaatcaaatatcacaaactgggtggctcaaacagcatacatttatttcctcacagctctggaggctgggaagtccaagatcaaggggtcagcaggtttggtttcttctgaggcctctcttcctggctttcagatggctgccttcctacagtgtcttcacatggtcctttgtgtgcaagcatgcctggtatctctttgtgtgtccaatttcctctttttataaagacacaagtcagattaggttagggcccaccctaatggcctcattctaacttaatcaccactctacaggccctagctccaattatagtcatgtgacagactgcaggatagggcttcaacacatgaattttggcaggggacacagttcagcccataacatccacagatgccaagagtctggccacataataggagggttaagaatgatgtatggatatactactgaataaataaaggaggttaccaaaacctgccactattattatgtatagtgttgagtattattgagtattgagcatctcaatcactctaaaaaattagccccttattataagccataaatctctaaacataagatccatccattttagtgttatgacactttgatagtggccttagaacaatgcagagttaaagttttttgtgatattagctaaacaggataattctggaagggaaaatgagatgtttctctcaaaattaactcaactaggaaggcagaaagtttcagattgtcctgagacatgctagctttgctaaagtaaagttttattagaactgtaaaaacaatactcatttattcatctgataactctatattgagcattcatctatgccaagcgctgaactaagatgaaaatacacatgttcctgggccttaaggaactcatagtccagagtttgctttcttatatcacttatgtggggcttcacgtccactctaatacaggcaggctcactatgtgcctttaactgggtcattaggtgttggccttatccccagggccatctacatccacctttgcctttaactttagactgtctcagatagtctgtttctctcttccacagaagtatttgattgaattctgctacaccatagcccagaaatacctctttgaagggaaacacgaagatgctgtaccagcag

SEQ ID NO: 7347 - DNA, 3953 bp, Homo sapiens
cttcagggaggtatccttctttcctactactatatttgataaatttcaaacaaaacaaaacatcctttccattgtgtcagcttttggacacacactttattgcacttgatttttttatacatccatttcctaaacaagatatgtttattcatctttttaatcctcatggctcagcacagggcctgacatacataggcattcaaccaatatttgatctccaaagcatgaccattcatgcatccataatcctttttctatagtataaagatggctgacattcaggcccccatgtatattttaaggaatatataattcccaataagctcttctttttaaaggtgattaacagttctagtgttcaatttcaaaatcaaaatgacatcatatcaggtgtcattaaaagacaaatgccaaaccatatttgcctacacaccactgccttttccctttctttcattttatctgtccatatgaaagccatggttttttttgtagttttcaccatctctaagagccctgaacaatttttgatcctataagggctttttacttcagtttctgtcacctataaaagctgtgtgtcgagactgaagattatccactatcttctcttctatctctacgcctttttctatttcttcctctgatagcaataacttggtttccgagtctttggttacaataaacacaaaggactgtcgtgactcaaggatattagccaccaccacttgatgctgataaatttccaaagccttccgagctcgattaattacaatggcggggtcagtctccaacttaaaggaaattataaatgctttgggagcccaatctttaaccaaaggagaaagcagttttggcaccatcttcattgttatctgtattggaaaaagaaaagcttaataagcaaacaatggtcattacctaccaggtcaatctcatgggaaactaaggaattaaatttaagtgggatttctcaaccatcaaacttttcagttaaatgtttagtttaaaaagtcttaggggaacacagtggcttggcctgtaatcccagcactttggaaggccaggatgggtggatcgcttgagcccagttcaagaccagcctgggcaacatggcaaaaccatgtctctacaaaaaaatacaaaaattagccaagcatggtggcacccacctgtagtcccagctactcaggaggctgagatgggaagatcacttgagcctggaaggttgaggctgcagtgagctgtgttcatgccactgcacttcagcctgggcaacagagcgacaccttgtctcacaaaaaaaaaaaaaaaaaaaaaagccttggctctgtagagttcacagcgatgcctaaattcaaggctccatacatattctggggcaaaccatgccttctgaataagccctgccatgctctgccaaccttaccaccattaatattttctcaagcatgtccctttatttttgaaccaaaccctcaaataaacagatacaaataatctgttcatacaaatatttggcagaagcctaaataaagttgggtttttaaacctctcagcctaaaatatttcttgcattggtagaatggctattagattccatttttaaattgtcacatgtaacacaacttagcagtgaggaaactgattttattttcacttgaccaaaactcctagtacctcatccccaatcccttctcagggtaatgttcagttgctttgttactttcaagatagaactaaaaactgtgggataaactaaagatcccagagattaaaaagcgtgaaatcactaagctaatcatcagactttgccctaaaaaaaagctgttagtgtgatagggatcatataccagtttatttatactttatttttctccttagcatttatcactactaaacgagttatgtatttgacttatttattgtctcctctgcagaggaagcaacacaaaggcagggtatgtttcttttcactgctttcatctctaagtcctacagcagtgtaggacctcaataaactattctacaaagtcggcaaatgccccacagataagagtttctcctaataaaatcctacctgtatcacccaataaatgactaagaactcctgaaggttccaaaaatctaaaatcacaaccacacctaccttatccatatttcttccttaacctacaatagcccccaactaatctacccactccactttctccttctctacttcgtctttcatactgatgccagaatgttgttctcaaacaaaaactttatctcattctcctacttatgtgtcccttagctccacaagaaaaagtccaagctccttaaaaaaggaaaataaagtcttctacaaagcaagccatctcttcagtcagctctccagccttaccaaagcacttcggttcacagcccactgcccactttcaaattcctactgccatactccacctggaatgacctttcccacttcgtacaccctctgctcattttgttttgatttttggtgtttttttttttttttgcgacggagtatcgctctcgtcgcccgggctggagtgcaatggcgagatctcagctcactgcaacctccgcctcctggtttcaagcgattcttctgcctcagcctcccgagtagctgggattacaggcgcctgccaccacgcccggctaatttttgtatttttttagtagagacggggtttcaccatgttggccaggctggtctcgaactcctgacctcaggcgatctgccctccttggcctcccaaagtgctgggattacaggcgtgagccaccgcgctcggttctgctcatcttttaaaacccagttcaattcatctcctccaagaagcttcatcgactcccccaggattcactcgccccatgatctgactgcactttgtacatacctccactagagcatttatcactctgtattgtaattatgtctgtgtccagctccctcactagattgtgaggtccatgagggagggcggtgtcttattcatctctgtatcccctgtgcctagcgaatacagatgcagaaaggccatctccagatcaagaggaaattaacccaagattggttatatgggattagatctctggaagagaagcgcccatcacctgcagtgggcccccagatgactggatcttgtgttcaggcatttcagagacaggaacatagaaatctgacacagccgcagccaggtaaaacatcgcagaagggcctgcaaagagaaacacaaggtgttaacaaatcggcgaggtacgatataggatcagctccttctcaactcgggttccccagctgagatccgtgggtaagcaggaggtaaggggataagtggctggaaagaaaggctgtgcttccaggcaaaaggggtactcctagggcacgcacctagcggattgagtgcctgggccgcagcctgcaacagatgcaaatagtccgccaaagtggtgaactctactgccaggaaggtgcctgcagccgcagcctcctggtagctcctcagagcctcagcaaaacccggaagtgcattctcctcggcctccaggctcagcaagcccgaaagggctgggcccgaaggccgcagagcggacagccaagtctggggtgggaagcggtgggcataggggaaggcagagcgagcgcgatacaagaacaggaccccgtagccggcggctaggaaggcctcggccgaggttgcaccgcgccgcccgctgctgaagttgtccaggaagcgcaccggccgcgcttccagtgggaccttggtgccgcctgacgtaaccaacaccacccgccggccctgcgcgcccagcctggccgcgaagcgagccataacctcagcccagcgcgcagcaccgggaggctgggggaactcggctaccggatccatttccgccatctgcagcgcagcggccggcgcctgcgcacgtttcgcggccgc

SEQ ID NO: 7348 - DNA, 6598 bp, Homo sapiens
tctgcattattgcattaattatttggcaagtgaaaaagagctgccaaaaattaagcttggtacctaacaggagctgttgccgggtagggaaacactatgaccatggctaaattgatgtgcctcaaacaagattttatccccgagctttctcttgttactcttagcccttgctttttaaaggggtctcctcactggacaccagaagagctcccaatttgggtgattattctggttggcagctatttagggccatttgatggctgaactcctttgacttctggacccatccatcctttaatctgttccacttttcctcccgtctcatcctaaagtccccaccgaacttatgaaaggaatgggggtgggaggcatggagtatggaagagcgtgaaagtgagtcagaaataagcaaataagaaaactcttggggtgaaaaagaatacagaaaggaaagatagaagagtatataaaattggaacacagaaaaagaccaggaaatgtttatgagttttgtttcattttagatatgggaaaaaatggtgtagcagctttgcattctaatgtttttgtctttaagtgtcaccgaagagtccaacaaaagtctggagatagaacatcaagaggtaaagtcccagtctctcctctaattcacttctgctgtgagtgaggttcccacggatcctgaccctctatgacccctgctgctaacagcaggtgctctaaccactgcagactctagtaccccccagggacaatttctcatggaagacttccttgggtggaaaatcagagcctaggcacattaaaaaattctctatcttatcctcctgagaataaagaatgaggaattagggcagaagtcctcaactctgtcatttactagttttacaaacctgtggaagtctcttcaactctcagtcttgttctccataaaatgggcatgtgatgatccttcctcactcccagtgtgatggtgaaggacaaatgagacaaggtgcagaacaacacatcgtaaacggttaagttatacacagatgtgacttagtgttctgactctggggttttcagtatcttctcattaaaaggccttcagcttcttataggatgtccctgaatcctctccagttccacataacactcactatcttctgtttcttcagctaggagaacttcacaggaagaagccgagaagttgtggaagctgctgtttctcatgaaaaggtaatctcttcttctttgcagtctcccagctgctagtctggtctgtgatcatttctcagcttggcttggggtagagatgagaagagggaaaatggatgggagggagacatacacagtggaggctggttcactagttgagagagttaccagggcaggggggctgggccagacatctcaggagggaagggtcacccaattctgctttgggctagggtcacagtagttctagaattcaggcttgtactagtgtataattcataaaagactctacacagggttgcattcagccacgagacaagctatccagtcaagaggaatggattttgcgtaaagaagtcatccctgtcttattctctttattccctctcctctgagtctgactggattctgctgacattacctcctctggctctgtcattagggagacagccctcagatggcagcctatcatcttatcctcttcttaagatttctagagaacaggattgattcccaaaagatattgagtatatcagcagggataccaaatagctctcagaatgcagaggtcctacatgaacttcaagcccaaataccgggctttgggtttcttagcctcaaatgagactgatccgggttctaactggtgatgccccatcagctaaccgcctggctccgttctcctagttcagcttttcaacaaggtcaacagagaactgaccccagctcccagccttctctgagggccacgccctcccatgggtcgtctgaagccttgcccaacaagctctagatcgtcagcccagcccaccttgccaaatggctttttctttttcttttcttttttcttttttttttttgagacagagtttcactcttgttgcccaggctggagtacaacggcacaatctcggctcactgcaagctccgtctcccaggttcaagggactctcctacctctgcctcccaagtagctgggactacaggcatacgccaccatgcctggctaatttttgtatttttagtagagacggggtttcaccatgttggccaggctgatctcgaactcctgacctcaggtgatccatccacctcagcctcccaaagtgctaggattagaggcatgagccactatgtccagcctccaaatagcattttcttaggaagaaaaacagggaggtagacaacaagagagtgtaggctccaggattttcaggactgggaaaggacaatgccaaccccggcccacacttttccgagaaggcagatgtcactccatcattaatgtttgtcatgtttctcttcccagccagggctggcttcctcaggaaggaagtgtgcggcgaatcctgtgtgcagacccctgctgccaaatctgcaatgttatggctctggagattaagcaattgctggcaggtgagaacaaccagatctccctgacttcactggggccatcacagggctcctcttgcctagaggctttgtccacatctagtgtgtcttttaagcatagtcaggatctgggctccccgaaatccaaagagctttcactggcatctgtaactccaacactgtcacaattaatggatcagaaatctttaacccagtcagctgcccggtcagctggtgcagacagcgtccaagattcctgggctgatcactttcagcgaggacagagatctcaagtcccagctgtgtcccaggtcatgggatctctgtcttcaaactttgagaagcctggaattcctctgagccagcaggagaggacgaaaaacaactccaaatttgtcctggagaaccaaggtcagcagcccttgaatactagattccctttctttccctgaacccagagctcccaaacctacaacaacagcctatgaccctacattcctttccaactgctattgcaatgtccaaaaagtcctgaggaatcttcaagtacaagtgggatattgttgcacatattcccacaactgagggctcccaagatctgtggaggagttctgtacagggcagcttataccacaccacttctaattttccaaaggatggaaaacagacagacaaacagccatttctttcactctgaatgctatctctaaggcttctgctgaacagatgagcttccatccctttgactctgggtttcatgggaggctagctggttcacctaagctttcagggtttttgaaggatccactatggactcagagcagaaaaattactgtgaacaaatcccaaaccccatggttctagctctaccctctcctctctttcagcttctaagtggcctctgtccactgcctagaggatgcactgaggcctcaatgtgccacatctgtagctaccttactgtggtttctcttttctgcacattactgtctgcctttagagatccctggtctgactttagaaatctccaaaacaggggaggctttggccctttctctgcaatgatttctccttcacctctgtactaattaaaatctcccctccttccccaccttttcccccacattctccatctgaccattgacaaatccagatcaatgtcctatatctgactcaggctaagtgaaagccttggagtggcacctgctgtagaggcagctccagcttcagtggagtttgccagctgttgtccagagatctctgtagatccaggaaatcatacaatgtaagccctgagacatgttgcagcctttcccactagatccaggacactctttgattggggaagtccatttcagtcctcaagagggaggaagcattctcctagaccatgcccagaggctgctaggattccacctccaggagcaattgaaacagagggttgatttgtcattgctgggacctgatccaaaagatccagcagtctatccagttcatcctgtgacctgatgaccaataatccctgccctggagcagtacagccctgacctatgtgggtcttcccagcatgcagcaccagaagctagtgggaatagtggccttctctgatccactgtggcaggagggccagtccgcaattgtttcctcaggccaaggtaatgttgcagagccacatagattacaaatatgggaagatctgctagggcattgtccctgcccatatctgccattgttgggactacaaatcactggttctgcagtattccaaaggcctgggaagcaacttggcgcccctgtcctctgaaaagcaaacacctggacctggaagtgacacatatcagcccctacacagatcaggaaaggacactctgaatactgacaggccttgatcagcagcaacagggcttgccagatgctgttactgatgatcctgagctgcccagaccctgtcccaggaagccactgagaaacttgagacaagttttggcccttctgtcagggctgcctgctctctattatgtggctctttccagggctgtggcccaggcaatcactcacgaatccacaatcacagattgagcccatcagagcctctgactcaatctcatctgaacagcaatgtgtaagtcctgggccatgctttcaaaacaccaatgaagcttgtgtagataacgtacaagtgttctgcactaaaacacaagctgatggagatggtaccgctagagaggcagacagatcctcacagcccctaatcactcaaggcacccatcttggccaaactaaatttctacctgaaaaataaattccttgagatacatttgggaagtcccataaaaacaagggaatccagggaacaaattttcaccatcccaaagaatatctccacacagggatcctttaggagtctaaagattgctaaaccaagggaaaacattactccagaaacttcatatcccaccaggcatcccatgggccccagatccagaaggggttggactgaaagaacagcttgccgttgaactaaagacagtgcagcagagctacaagtgatctagttccatagcagtaccccatgcccactgggattctgggatctcacacccagtggagacatgacagaggcccaggtactttgtgttcagctggaggctagagtgaacaacccagcctggagggccctaagccccttagaccaggtctttgcaaaagtgaggacaagtccctaccccagcagagaaaacagttgacccagtgacatttgatgacattcaaagcagctggaaatcacagagaagggggtgtctggacagcactggagctctccccagccagagagaacaccctttctgccaaggttcaggggcgagtaggggcacttctaagcagaactccagagctcacaacttgccaaatatatctccaggatctttcttaggtaaaactttagtttagctaagatggttgccttgagcagagactagcaaggatctgtctggatctgcggagccccatttccatcctctcagtactggctattgctgtttcaccagcttctccataaccttgagttccaagagcatcctccaggattacttggggcaaaaggaccagataagaataatttgcaaagctgttagagtaagccgaataacctcatccaaacaaggatttctgagaatgccaaaccgggagtgcccagagcttaaagggccaacttactgggccattacttgctgggccaaaattttgcaagtacagtatttgaaggggtaaatttttttcagatccaaagttttcagggtcaaatagttcagggccatgttttacagggcaaaatttgcagggtcaaaatttgcagggccacactttctagggctaagagttgcagggtctggtaagggcagtccatactcacaagagcatcatccttccagaagctccagaagttggcttggataacaagatgaagctgtttctgcactggattaaccctgaaatgaaagatcgaaggcatgaggaatccattctcctttctaaggctgagacagtgacccaagacaggacaaaaaacattgagaagagtccaactgtcaccaaagatcatgtgtggggagctacaacacagaagacaacagaggaccctgaggctcagcctccttctactgaggaggaaggcctgatcttctgtgatgcccccagtgcctaaataatctgctctagcaacactcccttcagtccagccaatcctgggtcctgtgccactcctacaaatgctccaaactctgtcctcaaatgacttgtgccactcaaccaggaaatctatcccaggtctaactcacctcagcagaaggcactgttttatgcaagaatacccatcacaagaaaaaggagttcataggttcctgaacctctgcaatcccctgaaaaaggctttcattgccatttccattaacatgcaggtgaagcagggcattctccaaatatactttgtacctttaagcaaaga

SEQ ID NO: 7349 - DNA, 710 bp, Homo sapiens
cttggaattctgtacatatatagcagtccttcataaaaatactattactagaaaagcttatgtgacatcatcaaatttcccacagtgatcttttcttactggaagaaaatgtttatggtttgttctatgggggggaaatataccataagatatataattgaataattacaatgatttataataatgaaaaggattgtgtaattgtaaatgtctggtagcatagcatgcactgtgggttgtggaatagaagtgagagccacatcacagatgcttggccatgcagaccagacattgcattggcattgtctgcaggcagctccatgccttctcagatattcaagagccatttgtgattgtgcttcaaagtatgtaatacatagctctaggttcctcctccctccctccctctcttccttccttccttctttccttccttccttccttcctcctttcctttcttccacagtgcccttcttgcaaaaaaaaaaaaaaaaaaaagccatcttcaacatgtaatttttggatattcctaaaatgatacaaatatggggatgctaaaaatgttaactgccgtaaaatggaggttttaaacatttaggaatttactttttactctttatatacatacttctggattgtactttcagatagttatatcccctaggcaaacctgtttcttacttttatgacttacattctttactgctaag

SEQ ID NO: 7350 - DNA, 405 bp, Homo sapiens
gagagtttgtgaatattattggcatattctaccaaaaaaaaagtgaacaattttatgttccagaaaaatagcaaaggacaccaaacaagattgtgtgcctgctttgcctccaaggctccagctgtttgtgttctccatctcctctcgcctccaagaaggccactgaccttcaagaaggccaaggtgactgacctggcctggttatcccaacaatctcgttatccatccatcttctttaaccctcacccctcataagccttgttagcctctattaaagtaagctgggattgagtccaaaggctggaattcagtcatagccaaaatatatctagttcctataggcaacatcttgagcagaaaataagcacacaccaatctctgcctttaaaaaaagcatgccaaaaa

SEQ ID NO: 7351 - DNA, 22073 bp, Homo sapiens
agattactcttgtctctgctgctcctgggaaagtgatttgtgaaatgaaagtagaagaagagcataccaatgcaataggcactctccacggcggtttgacagccacgttagtagataacatatcaacaatggctctgctatgcacggaaaggggagcacccggagtcagtgtcgatatgaacataacgtatgtatccaaactgtattccaaatcccttctgtgtgataactgtctaaacaactgagactaaacacatttatattattagtaacgcatgagattcaattagctgcttatctccttaactgcacctatagattttgtcctaaaatattccagccttaaaatctagaactagagcagttaatttgcaagtacagtgtgtatcaatagtaaaaagggaatgatcccaaacattcaaaagagcaacattcagcttttaatgtgtatactgatgcagggggaaaaatcacaaactgatggctcataactgtttcatacagtccttaaaagtgccattcagggccagacgcagtggctcacgcctataatcccagcactttgggaggccgaggcaagaggattgcttgaagcctggagttcaagacccccatctctacaaaaaataaatattatttaattttaaaaataccacttataacactatgaggattgtattgagtacatacaattcaaagtaaagttagagttcatatacacattataatcttactctaacaaactgaacaccattgctggggtttttttttttttttggacacggagtctccccatcacccaggctggagtgcagcggcacaatctggctcacttcagcctccgcctctggggctcaagtaattctcctgcctcagcctccctagtagctgggattacaggtgtgcgccaccatgctgggctaatttttgtgtttttagtaaagacggggtttcaccatgttggccaggctggtcttgaactcctgacctccagtgtccacccacctcagcctcccaaagtgttgagttttaagaatgggcagcaatcctggatctctccctgtgactacacagacatgttctgtgagttaaactacatgatcagggaacagtgcccctcagggtcaaacttccaaaatgtaagaaactcaattccaacataaactggtactactgcagccccattcaataaagaaagagctgggcacagggatttagtttcaagacaactgctttttccacctaagcaacaaaaatgtaactaactgagaggtcaggttgagagagccattgtgagtagatatgagggtaatggaaataatgtaggctttttttttttttttttttgagacggagtctcgctttgtggcccaggctggagtgcagtggtgcagtctcggctcactgcaagctccgcctcccgggttcacaccattctcctgcctcagcctcccgagtagctgggactacaggcgcctgccaccatgcccgactaatttgtttgtatttttagtagagatggggtttcaccgtgttagccaggctggtctcgatctcctcaccttgtgatctgcccgccttggcctcccaaagtgctgggattacaggcgtgagccaccgcgcccagccaatgtaggcttttaaggaatctaaatattttatcaagtttacttaagaaacattcagtccctcttcatgggaataacttaaattgagggtacaataagcaaattacaagatgcagccaaatgctctttttgaaattaagatgtacagaaaagaaaggctctgcttatgttactggtgtgcatattcagcagtccttatttcatgtggtaagaggtgagatcagtagatgacttgattttccctaaaagtctctattaagagcagagagatcttcaaacctagcactgcatttcatgatctactaaggtacttttgcctttagaaccctaaggaattttcagtaagtcaaacatagttttggcctttcaaatatgtgttgccaaaagcattggccatcaagagctgcctacgcttcaaaaactgattcacttcaacaaaaactaggacatggtctttcaaaagttagagatatttcaaaagtaaatgaataatgtttcagtcagttaacacttcatgattcactctttgatttacttgacatggtaccaaatttactccacccctgcacatcaagtcctatattatacagactgaggatgcctgttagactgtgacttaggttaaaaacaagcgaggttccaaaacaacaaaaggggaaattttagagtattactgacaaaatgtcaatctccaaattccccggacttaatgtttactcatctgtagcacaaagggttccttatcttccctcagtttaagttaatggctgttagccaaaattcttgatttctaagacaaaatttagggaaataataaaaactggccaaactactactaaacatactatttttcatttctttacattgaggtatgtgaattaaagacaagcctgttctttccagcaataagatccaccttttttttttttttttttttttttttgtgagatggaatcttgctctgttgcccaggctggagtccagtggcgcgatctcggctcactgcaacctctgcctcctgggttcctgccattcttctgcctcagcctcaaaagtagctgagattacaggtgcccaccaccatgcctagctaacttctgtatttttagttgagacggggtttcaccacgttggccgggctggtctcgaactcctgccctcaggtgatctgcccacctcggcctcccaaagtgctgggattacaggcttgagccatcgtgcccggccagatccacctttcttatacctcctagccataaatactgaagtcttattttgaatatggcaaaaatacatatcctttttaaaggtttctttctaaaaagcagaaacataaaaataaactgtaaggaaattatttccctttaaaacattaacatttgttttaaacaatcctcatctccccaattttttttttaattagctggagccagctgagttaaagacaacttatgattacaagtgactaggatgtacatctcttaaaaatatagacagtccatcatcaagattgtaaggacatcatatcaattccttatagttgttatattgtcattttagagtcaaataaattgtaaatatggataggacaatatacagacaccaagtgatatttcatctaagaagttaaggagattaaatgaaagctggaggaaatctttcaccagccccaaataaatgtgaagtgggaaatgtaaagggaaaaaaggggaggcaagaaaacctcttctcacatatttgggaaaagaaacttgtgtgggtaaggaatgggtaaaatagaacctggttaggaccagccattcacatttgatagtacagaaagcttaccaatactaccgttaaaactatttttaggagtaaaataagttacataggaacactgttgtgagatgcacacaactttccctttgaaaaattatctgctgttaactatattcattttctttcaaggtacatgtcacctgcaaaattaggagaagatatagtgattacagcacatgttctgaagcaaggaaaaacacttgcatttacctctgtggatctgaccaacaaggccacaggaaaattaatagcacaaggaagacacacaaaacacctgggaaactgagagaacagcagaatgacctaaagaaacccaacaatgaatatcaagtatagatttgactcaaacaattgtaatttttgaaataaactagcaaaaccagaagcagctagaaatattcttggaggaaaaggacctggatatcaagtagggtaaaggtgggggtgtcttttttcactttaagcatcttgttttctaatcatgtgtgataattgggtgaaaaattcttagctcaaagtgttttaaaaacaggtaaagcaaagaaactagcaggaccactctcagttaagattaaaactaaagtccagtgttaagctaaaggagaaatagaaattaatggttctaattctgtttgggctgctaggaacaacagaaatttttcatggttctagaagctggaaagtcctgggtcaaggcccagcagatcctgttaggtgagggcccgcttcctggctcatagatggtgccttctcactgtgtggtggaaggggcaagtgagccctctgggttctcgtttttgaaatggagtctcgctctgttgcccaggctggagtacagcagcacgatctcggctcactgcaatctctgccccctgggttcaagtgattctcctgcctcagcctcccaagtagctgggactataggcatgtgccatcacacctagctaatttttgtagttttttgtagaaacagggttcaccatgttggccaggctggtctcgaactcgtgacctcaggtgatccgcctgccttggccccccaaagtgctgggattacaggtgtgagccaatgtgcccagcctgggttctcttttgtaagggcacttactccaatcttgagggttctgccctcgtgatctaataacttcccaaagacccccacctgctaatatcaccttgggggttgggattttaacatacaaatttaggggaaacacatggagaccacagcaatggccaatccttagcgaatcttaggtccttcccagatctaaaatgccaagctacacttgcatttcctttttttaagattatgaaacttcaaaatatatgaactacagcccatattgaaaaataaaatagattgagccatatgcctaaaaaagacctcaagaaaagtttgaggctaagcatgttagtgttacaggaaatggtccaatagagggggaagaaaaaaagcatgctactagccccttttcttgtaccgagaataaaaccatgcagatctcaaacctccaagtctatagtattgaaaagaccaagttcacttctcagaagtctccaagttcagttgactgtggcactctgagacagcttctgtcactcaggctggagtgatacaatcacagcttcccatagcctcaaaatcccaggctcaagacattcttccacctcagtctcctgagtagctggaactacaggcgtgtgccaccacgcctaattttatttttgtagaaacaaggtctcactgttgcccagcctcgtctcaaactcctaggctcaagcaatcctcctgccttggccccccaagtactggacttacaggtgtgaaccactgcacccagctgactcttacttgatttctgtcagggaatcttaatgaacatttcatgactaaagactaaaaaggatgcagctttaagtaaatttaagtcaagttaacagttaaagacaaatcctttccctacattagatcgcctgctgatctgtccactgtgaaagggcagaagactccacagtagcaatagcagcagtgagcatacaggagtcccagatgtttacttctagtatttcccactaaaaggaagctgggctccttggagaaacagctgactccagggcttgaggctgggacagaaaggttacagtatcttatgcatgaaaggagatgctcaaaataataaaggcatgcaaattatgatttggagggaaaaaatatgaggccatagtgtttaggtagataataaatggcagagatagaacactctcttacaacaaatgctgtaaatggacaaagcattagatttggaaaatcactattttgtaaccatcatagttaaagactggtttgggttttagtctggaaagaatcgccaagggagctcctgataaaggaacagggtatttgcacattgcttcccagagattgctagtagtaagtaccacacatagggcaaaaccaggacaccttgaccaggcgctcaaaagtaacatcaatgaagagcagatggagagtatacttgagaagggcgttaagcatgaataaacaattcaaatgcaaaatgagtaacaatttacaagaaaaattgccctgtactccaaaaaacatagaggtcatggaacacataaaggctaaggaactgttccacattaaagacaactgagaacaactaaattcaatgatcctgtactctagagggggggatctaaaacaagctaccaaggatactgggacaacaaaacgaatatggatgataaagagtatcaacattccctgagtttggtaattttactctagttatatgaaatattcttgtacttggaacatatgccgaagtactaaggaaggggtaaggaagcacaaagtgtgcaacaaactcaaatagctcacaggtataagtgtacagagaaaatgaaaaaaatgtggcaaaataataaaaatgagggtaaagattacacaacagctttcatattactctggtaacttttctaaattattccaaaataaaaacgtaaacaatggctgccaaaatgcctaacttggtgaacataagtgtaattcaatatggtaaattaattcaacatggtaaattaagagcataggccttaagagccagccagcctggttttaaatcctccactacttatgatctgagcttgagcaagttacttaacctctgcatctatttccaccaaaggttgagaggttaagacaagagcttagaagagtacctggttataataaacattcaaaatgttatttcaaatagattctaatttttaaataagaggacacatgaaagcattttgaaatttaagaatggccctttcccatgaagcaaggcataaggccaggttgctaactgttgaaagctgacagtatgttcttgattcctgttcttgttgaagttacacactcaattgccaggtatttttcttctgaatttactatttagccacagactatgaaataattctctaaggtgaccagtaacatcagtgaaatggaaagaaaaagttaacacttcaaactttgtgtattcacctgaatagtcagggaactttcacctattttatttaggttttctttttctttttttctttttttttcaaattccaaccagaagctaaatacaattggaaactggtaagcactagttttactccaaaggagtaggatcattcagatttactccaataaaagtatgcaacccttaagcaaagcttttcttcatttaaaaggagaaaaaaaaaaaaacctatacagtagtctttccttatgttcattgcacaaaatgagttctgcttttagaactttgacactcaatggttaattttacaatttaagattccaactttataaccttttttctactccaaaacacccttgtaaagtttttctttaggatggtgtaaaaaccagcatttctgcacaattcactggaatttttttctttgtaataaaaatctcttctctgtaaaaccaaaaacaaaacaaaccaaaacaaaacaaaaccaaaagaaaagtcctctacctatcatggtttctgcagctatgcatgtatttctgttttatagctgctttatagctacttcagactccagatctgctttaatgtgtataactgcatccacacgcagcagaatactcttacaatagcaacttggggaaagagatctggaaaaaaaaaatacatgagtaccaggaaacaaacatggcccagtaaaatatgaggcaaaaatgcctacaatgagatgcgtttttcatttaagatttctttcccatggttgtattttctttttttaaaccagttctggtcattagaatgtatctgacagtgctctggaacaactgtgattatagcaaagttattgtttttaaaaatgttatttatacctgttacattcacttctcaccctctaaatactgatgacagatgtcaaagaggcaaaaaccagcacaaatgggaagaccataaaaatgagtatcaccttgtgctttcagatacatttaagcatttcagtgtacaatagtcctttcatttcacatttttagtaagatactgatgcagtgcagcaaatatgcaaagcatcttctttcacacagtccgtgcacgacatctaatttttgtttaagttctgagataaaaatgatttaaaaaaatccaggatgaacaagtttcaaaatgcatagtgttctgtgcatgagtccattttctttaaactctgaaagaataaagtggtaagaaaacaagaaaaaaaactgctgctgcattctctgatcttctccattttgctggtcagtactctactctggcatataaggacggaggtgatcctctatggtgccaactgcccagtgggtgagctgttcctgtggcaggtagaggcagatgctgcataacttgaagattgtagctttgttttttggagtctggaaggggaaaacattttaatattttttaaaaataagactttagcgtaactgtcacatgaagtccatttcccacaatttattaaacatcttaacatacagagtaagggacaaattgtagtccctatccatattctagacagacaaaatcttgccatataagataaaggaaaaatttatgcagaattagaagataaaaagttagggaagtaaaccagagactacttgctagaagaaattaaagctaaaggcatttcatggggacagattttgagaagtttgaagtcatttttatatagaggaagataaagcagatgtggtaagaatagaagctagtgagaggatgaaggaataggtaaaaatttaaggctgggtgtggtggctcagacctgtaatcccagcactttgggaggctgagtcaggaggattgcttgagcccaagagttcaagaccattctgggcaacatgacgaaaacccatctctacaaaaaatataaaaattagctggatgtggtggcacacgcctgtagtccagccactcgggaagctgaggtggataacctgcgcccaggaggtcaaggctgcggtgagccatgatccatatgccagtgtactccagcgtggtgacagagttgagaccttgtctcaaaaaataaataaaagatttaagcatatcctggggtaagggactagaaaaaagccaaagtattaccagttaaatcaaaacccttatttttaaaaagtagttaccatttgaacatccaacttaattacaaagttcatcttttcttcactatctagcacctctaaaaggcaaaataaggactctgactttgaagatgtctgaagtagcctacaaatgtaaataaacctatacatatgtaatatactttacttgtattagttaattttaaatgtaacaaccttacgttaaatttaacaaccttaggattatcatttgttcaatttcacagaagcaacatgctcacagcagttacctgtccaagatcatacagccagcaagtggctgcatctaaaaactaaattgcaatacttggattgctgcttaactgggaagtggttatttgttgttggcggtgttttttttttttttgagatggggtctcgctgcattactcaggcaggagtgtgttggtgccatggctcactgcaactctaaactcctgggctcaagtgattctcccctgcctcagcctccagagtagctaggaccacaggaacacgccacaatgtccggctaatttctttgattttttgtagagatgtcgtctcactctgttgcccaggctggtcttggactcaagcaatcctcccccatcggcttcccaaaatgctaggattacaagtgtgagacactgtgcccaaatggaagtgcttatttgaaataaatgtggatcttttaaatatatgtccctcatccttttagatttaaaaagtcagccggttgcggtggctcacgcctgtaatcccagcactttggtaggccaaggcaggcagatcatgaggtcaggagattgagaccatcctggctaacatggtgaaaccctgtctctactaaaatacaaaaaaaaaaaaaaattagctgggcgtggtggcgggcacctgtagtcccagctactcgggaggctgaggcaggagaatggcgtgaacccggaaggtggagcttgcagcgaactgagattgcgccacggcactccagcctgggcgacagagactccctctcaagaaaaaaaaaaacgtccaggtcagtgcttctggaaacaaagtgtgtttcaaatcacctgagggttctgtttaaagtgcagactctgattagtagagcctgagagtctatatttttaacaagttctcaagtgatgttcatccattgcccacacatctggtagacacgctttagggcaatagttctcactactgttcactagaatcatgacttttaaaagcttcgaaggaggtgggttttttcccgtttaaaaaaaaaaaaaaggcttgccaggttgctgtaacatgcagcaaaatttgggaaccattgttctacagtgaggcctgggaaatacttttttaaaaattcattttattttttgagacagggtctcgttctgtcattcaagctggagtgcagtgacaagatctcactgtagcctcttaagctcaagcaatcctcccccttcagcctccccagtagctgggactacaggcacacgccaccatgcctggctagtttttatattttctgtagagatggggtttcgtcatgttgcccaggctggtctggaattcctgagctcaagcaatatgcccgcctcggctttccaaagtgctgggattacaggcatgagccaccatgcccagcctattttttgctttttaaataacttcaaaaataatgcagtgtttgggggacacaacaattaagtaacttgtatataaaacgtttactaaccaataagtttttgaatgagcctgtaagtggttttcaaaaaagctgcttacctgcaagtgctgtctgtcaatgaagagaaacactgactggttaggattgttgacaacgattccagtcttgtccttgcggctcagtacatgcagaaactgtttttcatagtcaccatgatgaaactcaaatttggcctaattacaaaatacaacatttatattaaactacaaacaagttatactacctatctgcatctatatgctagctgtgctgtccaataaagcagccaacagtccgttatcttttcctctttaaaaaaacaaattttggcaaacccacagccaataatatcacaggcaaaatttagattaaaagcaatttacaattccattcttcagtagcactagccacatttcaaatgctcaacggtcacatgactactggccaccattaagaacaatctcttgagatacagaacatttccttaattgtagagaattctattggacagtacactccacaacagcagttgatcaggaaatgctctgcatcaaaatgactaaatcctagtactccacgatcataaaattgtattttcaaacctactcagtccaagactcccaccatagtactttaagccccaaggacatctcttttcttttgattaggagtcacattgttaattgctgtttctaagaaaaaaaaaaaataaatctgtttattctaaccctagctgcacaactcactagttacgtgaccgtatgcaaatcccttaaacttcagcttcctcatctataaaataaggctgtaacccatttcacaggacagttaagagggttaaatgaaatgtaaagcccacaactgaaatatagttttgctcctcatagataggctatgtttttatgtgaatttttcccacagttagccttgggtcattctcaaaaatttgtgaagttatgaaagactgttatcaattaagtcagaacactcccttcaatcttttaacatgaggaagatcaactccatcctcccacaaaatatctgttgggcatggtgagacaccaaatgctacatgacatgaccaggcttgatggagaattcaagaaacctagatttaacaatatgatatttagacaatactgagttgtacaaataattgttagtccattttggttcaaacaaattttattgccgttacgtcaaaaacagtaggaaataataacattgaaaaaccaagttcctgctatgtagcattttatacctaggagcttttcttataaaccgtaacataaaatatgatacagcatcacaatataccatatgtaaaatgatactgaattgtacttccatacaattcaaatattaaattattagtatgatcataagcatatcaaaagcatgctattagctactaaacaataggaataaggttacttcagccttaaggggcttattatactgctgaagaggacaagtacagccaaatataaaacccaacttgcttcaaatcctttcccagaataagatgtggttatctgtaaaactccaattttttttttttttttgagacggaatttcgctcttgttgcccaggctggagtgcaatggcgcgatctcggctcactgcaacctccgcctcctgggttcaagcgattcttctgcctcagcctcccaagtagctggaatacaggcatgcaccaccacgcccagctaattttgtgtttttagtagagataggacttctttatgttggtcaggatggtctcaaactcccgacctcaggtgatccatctggcttagcctcccaaagtgttgggattacaggcgtgagcaaccgcgcccggcccaaattgggttcttatcatcaaaccactataggagaaaaaaaaaaaagtaacagtaagtaacacgggaacattatgattttggattgcgcctttaaagattaagaggatttccccaggacaaagtagtaatggtaagtaatctgataaacgctgactgggcatggtggctcagacctataatcccagcactttgggagtccaaagcgggaggatcactagaggccaggagtttgagaccagcccgggcaacacagtgagatcctatctctacaaaaataattagttgggcatggggtgcacacctgtggtcccagctactcatgaggttgaggtgggaggatcacttgggcctgggagttcaaggctgcagtgagccatgactatgccactgcactccagcctggatgacagagtaataccccatctcaccatctcaaaacaaaacaaaaaaaacagccatactaggaaacagaaccaacacaaaaacaaatgtgttaaaaactgaaatactattcaagtaacaaagctgcaatatggtaagcaaccagggtgggtgcaagaaccggtaaccacactgaaaaaaggtttgagtgagactgaaaaaggccttccttatagttctttagcatttcaattctatcatattgaatatccacttatctgaaaagaaatggtacacacacacacacacaaacacacacacacaacttctcataagcagcatgaaagaagtaattcccacagaagtaacgaaatattctaacagtcaggggaggagctaaccttggcagtagcattaataatgaagagaaaagaagagatacattttagtagtacctcccagcacttcacagtacactgaagaactcagtatttaaaaacaatccttattctggttccgattatatcctcactacccatatattcaggttttacagtgcttcaaaaggccaggcacggtgactcacacctgtaatctcagcactttgggaggctgaggcaagaggatcacttgaacctaggagttcaagaccagcctgggcaacaaagtgagaccccatctctacaaaaaattaattaaattttaaaaataagtaaagtgctttaagagtcaaaaaacaaaaaacaaaaaaaagaggcctgcaagttaacatttaccattccttttctcattttctttgagaaagaactgagtgagttatatttaaggcccctcatataggatattcacacattttaaattacttcagaaaagcaaattagttcttacaatattaacctacttactgcagttgaattctaaagtcattacctacatcatactgcttacactcagtccagaattttaagattctataattaatataggtaaattttcacagtacagggtagtgagttaaaagcacagtcagtccaggcttttatcctatttaactgccttgggccttatttacctaatttctgtctcagtttcttcctatctacccagttattttaaggactgagattaaatatatataaagtaagagaaagtctaaggccaagtgtggtggctcatacccgtaatcccaccactttgggaggccaagccaggcagatcacttgaggtcaaggacaccaccctggccaacatagcaaaactccgtctctacaaaaaaaatacaaaaattagctgggtgtcatagcatgcgcctataatcccagctactcaagaggctgaggcacaagaacggctcaaacctgggaggcagaggttgcagtgagccaagatcacgccaccacactccagcttgggcgacagagcaagaccctgtctcaaaaaaaggacgggcatggtggctcatacctgtaatcccagcactttgggaggccgaggcgggtgaatcacgaggtcaagagatcgagaccatcccggccaacatggtgaaaacccgtctctactaaaaatacaaaaattagctgggcgtggtggcatgtccctgtagacccagctactcgggaggctaaggcaggagaatcatttgaaccagggaggcggaggcagaggttgcaaggaggaggaggttgcagtgagccaagatcacactactgcactccaatctggcaacagagtgagactctgtctcaaaaaaaaaaaaaaaaaaaagctgaaactagtacagtcaactctcaataaacatcagccatgacttcaaagagtactatttgacacaagactaaagttaactcaactatttcaaataaggtcccagtgggaaaggcagggtattagaaatttgaaaacatactgtaataagcagacctacatttttccagtgggaaatccttaactaaaaaacaacaaaatcctaacaccacctccagagagcagctagagttatcagccctgcgctgagaactttaaacatgccttttctattcctgttttcatgccttttatattcattttctcccttcagtcagatatcatccattaaatgaccgaaatacagatgctccacgacttgtgatgttacatcctgataaacccagtgtaagttacacgtattttaaatcaaaaagtgacttttgaacttacaacaattccaatttacaatgacttcacctggatgtagtcccatcataaatcgaggagcacaatgaattcatatggctttcacatcatggtaaagttgaaaaaatcttaagtcgaaccattataagtcaggggaatctgtatacagtactttcttatgtatgtaaccaatggattatttttaaaacttagttgaattaatcttaaaacattaaaaatgataattattagagcttatgtgtagcaacattaccatggggcgggagagtatatcaatttatacagtctgtgaaaaacataagcaccacaaagatacttcagggtaataagtagaagcaaaagttttaaatgacaaataatcctcacaattagcttaaaataaagaagccttctaatatttgatttagtgtacttaaaatgagtccttaatatcatttttctgattataaaagtatacttaagaaaatcgtggcaatctatgccataaattataaaggaaacacaaatgtaaatatatatattaaaaaaggaaagttagctatacctgacctacaactaagcataattaacactttggtggacctccatcttctatgcatacaaatatactgtaaataaaactaggttcaacatgagtaaatgcccttaacactagaggggggattcacttgagcaatgtctagtataccatgacaaacagtcaaaagtcagcaagattttaaggttaagaatgactactaaatttacttctttcttctataattttatatacagatcaacttctacaaaatgatttcttcacccatttcagatcacattcctttgggaagcagcagttaaatatacggttttagaaggatgtgtggtgaaggcttcaagagttacagatctcagaagctcatctgtgggcccctctataaatcagtaaatgtccactttaaaagattttctctagtcataatttcaaagccacactgggcaggtggaaccaccacactgtcaagagattctataatccaaacgctttcttctcttgcatcacaatattctaaataggggagactcgtgaaataaaactatcagaaaccattttcccaaagaatttctcaagttagaccctattatattctagtagttttcacatattgaaatactcatcacactttagaccaaaatacctgaacaggcctaaaaggctcatcagattctttccacctagaaaacaggagacagacgattttttcaatatcattccgaggccaaagaatgaaatccatctcctgagtacagccaattacatcctataaaatgattaaaaaaaaaaaagtttacttttaaagaaacagctacatcaagccatgtcacaaattatagggttcccctataaaaacattttataagtacaaaagatctaccatatatcattttatatcttaggaagtaaacataatagtttataatctgaatagctcatgatgtaattttttatttttggagacagagtcctaacttttgtggcccacactggagtgcaatggtgcaatcttcgcttactgcaaattccgtctaccaggttcaagcgattctcgtgacttagcctcccgaatggctgggattacaagtgtgtgccaccatgccccgctaatattttttgtatttttaatagagacggggtttcaccacgtcagccaggctggtctcgaactcctgacctcaggtgatccacccacctcagcctcccgaagtgctgggattacaggctaagtcactgtgcctggctctaattttaatttttatcttacagagagtcacatacactcagtccaatgctcctaacaccaagacctagacttatcagtgcatggtgaaaactccaacaaaatctctgatatctgttgtattgtcagaccctgaacctttatttccacctttaaaaatcaatctatttaaaaagatgtcttagaactcctaatatgaatcactatcctattatagctgaaatgctatttttattttgatagaaaactacttttctccattcctgacttctgcttcattattgtagccagcatattaatttttgaaggtccataatttcttccagaccagtatctggttatctccagcattctccccaagtaactgtggggatctcttggttcaggtatgcccagattaacttttaacatgttgcagaagtttacaaagctggaagcacttccttatattcatattccccccaaaaaaggaaatacaataaacggagacataagacatttatccacaataataatacacaatattatgagcctaatacaacaaagttgtccatgttttactcaaggtcaagttttcaaaaacaaacctacttcaaaaatttttaaactttctgcataacacttaaattattaaaaacagttggctactggcagggtgcagtggctcacacctgtaatctcagcactttgggaggccaaggcaggaggatcacttgaggtcaggagttccagaccagcctagccaacatggcaaaaccccatctctactaaaaacacaaaaaattagccaggcatggtggcgcacaactgtagtcccagctactcgggaggctaaggcaggagaatcatttgaatgcgcgagggcagaggttgcagtgagccaagatcatgccactgcactctagcctcagcgaaagagcaagactttgtctcaaaaaaaaaaaaaaaaaaaaaagtccgagatcatcaacacctaacacagattaaagaaatccctttatatacttcatccacataagaatggtctggcgtaaaaaaacgtgtttttctaatcctataaacacaatgctttaaagtcatgatcccagttatcaacatggcacaaagacaaatttacctgaagagactggtcactatcataactatccactttaaggggggttcggggggcggggaaatgcaaggttaatccacagaaactttatcaagtcaagacttaaggcagaacttacccttctcatagactgatatcgaggagcatggagctgtaccacatccttctgtaaaagctctagggaactttccaaggaatagctggaatctcgcacacctttcaggatattttcttcataattatttgtcatgactggtataacctcagacacttcaaaaagtgctgactttttcttctagaagaaaagaaaatggtgtattaacccacagggagcacagccttttaacactcagttcatattacaatgtcatgtaacattaactccacaaaattcttaactgtctgcagtaacttatacactgaaaacacattttcagataggtaattccttctgttcttcccctacctccccctccaaccatacatgtacaaactgtcattagaatgtttaatgcttgagttttatagcataatggtatccatagcactattttggacaatacttcttaaaattaaaaatctcaccagttttaaaacaacgctattcagacaaatgaatagttttattccttatatgggccaatttccattactttctcaatattacattatcaaaaccatcaatatttctggtttttcttttttttttttgagatggagtctcactgtgttgcccaggctagagggcagtggcaccatcttggctcacttgcaacctctgcctcctgggttcgaggggatctcctgcctcagcctctcgagtagctgggattacaggcctgcgccaccacacctggctaatttttgtattttcagtagagacagggtttcaccatttggccaggctggccttgaactcctgacctcaagtgatccgcctgcctcagcctcccaaagtgctgggattacagccgtgagccactgcacccagccaaaaccatcaatatttgaaagactaaaaagaagcacaccaagttctcttttaatactactcaagaccaagtacgcatcactaaactactttttaaaattctgtactattaagtatatatcatgaattattcagggcaactgcatggacactgtccattcacagaataaaaccagattatcgttggtgttaaagaattaagatggtgcaatttggggcaatatatagattaaatacaaagatatggtctcactacttattatcttggatttatttaaagagcatacactgtatcatcttcaactaaaatccaatctcatcaattttgagtcagcttgtcaacaaaacaaaagtggagatgtaagtccttgataccacccaatcttgggacagtcacttcaaaaattacttaaaaatcacttcacaatgctatacttcagcagctaagaatgttcttaaatacaaataaccttttaggagttaagagttggggctgtgcgtggcagctcctgcctgtaatcccagcactttaaaatgccatgacaggaggatcactttagcccaggagttcaagactagcctgggcaatacagtgaggcctgtctcagcaacaaaaataataagagttaaacagtagggggaaacctggaaaacttccagatacttaatagataccacactaagattgtatttctgatctgaaattagctaacaatttaagcaccaaaatccaagtagcacttccttacattcataacctcatctttggtcaaataagccttgctgataatttaagaaaatgttcattttaagttgcaaaaaatactgctcttatcatcccatccttgactactcacaacttactgtttgctatttaactgcggaactaattctgattaagacctccaccgcccctaaaaatgaaacttcctctaggtcattttgagtttttaaaaactgtacttctatacaaggcaaaatgaactctaagtaaaaaagaaaatcacacttctaaacacaaattaaccatttcagtatttaattgctcctaaaaggtgtattctacttcattaaatgtaagagaaaaggttacctacattacgcagtttaagaaacaggataaactttagcatataaacagtctgattacaatttcacactttcaaccatcttatttatactctacattagataatctttaaattccatcataaggtttcccatgttaactccatataaaattttgtaatcttgcccaccccatgtcaactcagtgtatactactactaagcttcagactcaaatttatttccaaaccaaagaacgctcaagggtcttttcgcatgctgcaactgctcaattcacagaatcacccctaagggtgaaaaaacagagcatacaaagcagactttttttcaaccactctttaacctaatattcataataatttaagagtaacaaataatatacacttacaaaaattacttgtgctaattcaccattaagaactttaaattaccttctccttgaatacaaaggcaatatacatcttgaagtcaaactggtcagctagagattcttttttctttctaagctgagcacgtagtctgttcagagcttgtttcttccgggagtttgggtcccccattttgaaatacaggtggtactaaagcctttggaaattgtcactaaactatgggcactttttcttaagactcaagtacaacagaaacaagtcattttttttcctgctaatatgattgattagcgaaaatcacgactataacccaaaaactgcaccttctgtcaatattagcagactgtcatattacagggtcaagaaacaaaagctgctgtccagtcatgtttggacaataacgtttggggtcagacgggaaaaagggaggaaagaaaggaaagaaagaggagaaaataactaactttctggaaaacacatttggcttaactgccaaaataaaggctttgcggagaaatgaaaagcctataatcaggatttaggtgtgcaataaaacacagctgacaccagaccaatccctaaaatccatccggattttcccccctttttagaaaagggattaaggaacagggagggggaagtgtgatccttgctttccaaaaaaaaaaaaaaaaaaaactcaccaaaaccaaaaccaaaaccaaacaccaaaacagggtaggtgaatgaaactgaaatatccaattagattttacccagccagctccatggctgtagtacctaattcttagttatttcagatttcactattgctatgtattgtcagtgcttgttattgattacacttggtggtgagcatagagaaaagtgcaaaatcggtagagaaggaaagggagaggtacagggtttccctgcaatcaactacagtgtataccgggggcgggcagctgtggcccaaaggagccatgagaaaaaacagcggagtcattaccaacttccccatcacccacattttcaccctcaggcggctgctaacgctgctgccaaggagaatcatgacggcagaaggaaaaggggtatataatacggtattaattattccggctctgtggttagacctgattaatgcccgggttcccaacacccccagcctgcaactagtcctacattccccaagggagacttccctgtggatctgcccccgttcaaaatggtggggagtgcgatttatcttcttgtgagcattgccgaggcaaaggaggcgggttcttctcccaaatcccaggcggagcccggagaccacctagccttccacccccgcaagtcccacccccaccccttagccttcagcggcagcgactcactcgcaccacgggagacacaggatcactcaggttttcactcatttgatcgaggaaacaattcccgcccgggtggagcgggcgggagagggt

SEQ ID NO: 7352 - DNA, 2022 bp, Homo sapiens
gctgggtttagactgtcctttaaaataagagccgctagaagtgaacttctcattctgtccgtccctaattctgtccttctctaaaaggaaccttaatctcatctttaaaataaggagaattactgagtgacctgaaggacccttttcagctggaaagtctgtaagtccatatatttatttgaacagcttagtatggccagacggcatcacttttatgacagtgaaggggaagtaaaaacaaaaggtatatttagaggcctgctctgtagttgtttttccagcagattttactaacgtgtctttggaagggaaaagaaaaagctggtaactaatctcactggtattaggtacaacttaactgattcatacattttaagaaggaaaatgttgtaaatgggcatttacttatgttctgttttgaggatttttgtggttaattgccctagtagtttttgtggttgacggacaccaccacgtaaagcccattgaccatccttaaaaactaggtttttgtctcatagctttggaattgttgaatatgaaaacctaacttcaaggtgtaggcagttttcaatttaaaatgttatttctatatagatttaaaacaaaagcacacttttcttgataactaacaaaacatttaacattctgatgaaataaaagtgattttactttgtacctactcatatgaaacagtcctgcctttcttttttttgtttttgtttttgtttttgtttttgttgagatggagtcttactctgtcgcccaggctggagtgcagtggcgagatctcactgcaagctccgcctcctgggttcacgctattctcctgcctcagcctcccgagtagctgggactgcaggcgcccgctacaatgcccggctaatttttttgtattagacggggtttcaccgtgttagccaggatggtctcgatctcctgacctcgtgatccgcccgccttggcctcccaaagtgctggtactacaggcgtgagccactgcgcccggcctaaacagtcctgcctttcataactgccacgtctcatagctccctgaggaattacagatttatctgtagcatttatattccactgacattaaatgggattttaggtttgaattgaatttgtaactcttcctgtttttaatccagagagattatacacaatgtgtacaataggaacttcagaaactagaatttgctgagcatgggaaaaaattctcaatccttatccttctttgcatctgtcctaataaatacaaaaactgtggtttaacatctacagaaaaaaataaatctaaaggaaacagcacctgctaattccttgtttaatcctaactcactctttgtaaaccaaagtaaatataaggtgagaagagggcattacaaaaaggttgatgcagatgtatagatttaaggaggtgataatgttcttgtatttggattcttttataagtagttggggagtataaatcttaaataaatgaagagattgctcattgtaaaacagatgtacatcccagaaatttgtggaaagttggctataattcacttctgccaaatttcaatgtacaaagggaggctcttcctgtgaaagattgccttctggaatttgtggtatctctaccttttaacattttttttcaagttgttaaccaatatggtgtcagtctgctgatcaaggtgcagatatcactgcacttaacactttttgttagacatcgtttagcaacctttagacctgatcttttaacttttcatctttaaggaactgaccaacactggatgaatttgaccatttcttaggagactggaatgttaagtttctataaatgaatgaaccagttctctcttgtttggagcaatgctgaaattccaagaggcagctaagtgtgtgagtggatcaacagccatttccacttatccaaagaccttgattgcaagaagatacgtgcttcaacaaaaacttggcagtggaagttttggaactgtctatctggtttcagacaagaaagccaaa

SEQ ID NO: 7353 - DNA, 2961 bp, Homo sapiens
ccgcggtgtctggcgctcggtgggtgtggttgcccctagtttgaggcctgcccgattacccgcaagacttgggcagccccgggcgccgctccgaccacgacagggaaaggtaaagcgaactgtcctccttggggctagccaggctcccctgcgagggggaaggtaatggtttcaagctgcccgggctgggttccgaatctctaggacgccatggctgcgatctcctcgctttcctggacatcttacctccggatgtactccagtctcagtgcccctcaataaacgttaacctgctttgccaaaatgtaaatgtttaaaaaggtgaagaagcaaggaattgttcgttttaccttaaggttaagatttactttaaaggtagatttgtgctgtagcagaaactggtgacaaattgccttcctcttattacctgggaagataactactggttttcaacttgtgataaatactccttccgttgtcttttgcccccagccagatctgtttcaccgagaacgggtagtttgcacaaggtagtaactttctccaagttcccatctagctttcttaactaaccttttttctctcctttgggcggcagttgatctgctggacacttacttgccttaacaaggtttgttaaacacctagtatatgccaggaggtatgccagggattggggatgcagaaataaagaagatgtgttcgcagtgcccaagttcactcaaacctcgagggggagcgtgttgtcaagtgaacagatagttctagaatctagacaatgcgacacattcttgggtaggtttatggttgcgcagaggagactaatggaatggatgacctaaaagtggactgggatgggggtggcagggctgagtctgtgagggtgggcgggagggaacctagtcccagagtcttctgcagcctggaccagactacttaagcactgctgggtttagactgtcctttaaaataagagccgctagaagtgaacttctcattctgtccgtccctaattctgtccttctctaaaaggaaccttaatctcatctttaaaataaggagaattactgagtgacctgaaggacccttttcagctggaaagtctgtaagtccatatatttatttgaacagcttagtatggccagacggcatcacttttatgacagtgaaggggaagtaaaaacaaaaggtatatttagaggcctgctctgtagttgtttttccagcagattttactaacgtgtctttggaagggaaaagaaaaagctggtaactaatctcactggtattaggtacaacttaactgattcatacattttaagaaggaaaatgttgtaaatgggcatttacttatgttctgttttgaggatttttgtggttaattgccctagtagtttttgtggttgacggacaccaccacgtaaagcccattgaccatccttaaaaactaggtttttgtctcatagctttggaattgttgaatatgaaaacctaacttcaaggtgtaggcagttttcaatttaaaatgttatttctatatagatttaaaacaaaagcacacttttcttgataactaacaaaacatttaacattctgatgaaataaaagtgattttactttgtacctactcatatgaaacagtcctgcctttcttttttttgtttttgtttttgtttttgttgagatggagtcttactctgtcgcccaggctggagtgcagtggcgagatctcactgcaagctccgcctcctgggttcacgctattctcctgcctcagcctcccgagtagctgggactgcaggcgcccgctacaatgcccggctaatttttttgtattagacggggtttcaccgtgttagccaggatggtctcgatctcctgacctcgtgatccgcccgccttggcctcccaaagtgctggtactacaggcgtgagccactgcgcccggcctaaacagtcctgcctttcataactgccacgtctcatagctccctgaggaattacagatttatctgtagcatttatattccactgacattaaatgggattttaggtttgaattgaatttgtaactcttcctgtttttaatccagagagattatacacaatgtgtacaataggaacttcagaaactagaatttgctgagcatgggaaaaaattctcaatccttatccttctttgcatctgtcctaataaatacaaaaactgtggtttaacatctacagaaaaaaataaatctaaaggaaacagcacctgctaattccttgtttaatcctaactcactctttgtaaaccaaagtaaatataaggtgagaagagggcattacaaaaaggttgatgcagatgtatagatttaaggaggtgataatgttcttgtatttggattcttttataagtagttggggagtataaatcttaaataaatgaagagattgctcattgtaaaacagatgtacatcccagaaatttgtggaaagttggctataattcacttctgccaaatttcaatgtacaaagggaggctcttcctgtgaaagattgccttctggaatttgtggtatctctaccttttaacattttttttcaagttgttaaccaatatggtgtcagtctgctgatcaaggtgcagatatcactgcacttaacactttttgttagacatcgtttagcaacctttagacctgatcttttaacttttcatctttaaggaactgaccaacactggatgaatttgaccatttcttaggagactggaatgttaagtttctataaatgaatgaaccagttctctcttgtttggagcaatgctgaaattccaagaggcagctaagtgtgtgagtggatcaacagccatttccacttatccaaagaccttgattgcaagaagatacgtgcttcaacaaaaacttggcagtggaagttttggaactgtctatctggtttcagacaagaaagccaaa

SEQ ID NO: 7354 - DNA, 13021 bp, Homo sapiens
agaatgtagctggctaaattgctgcaatttaaagcatatagactatattaccattaacttgctgaaatggaacatgagaagtataaacatggtttcaaacatatttagaaatacagaagcttcttaaatcaggttgtatttattaaaaacaaaatacaaaataacttggaattcagattattgtgatgtttatcccctaacaggtcagtcctaaagaaaaagctaattgtttcaagggtggtaacggaagaattttaagtaaggattatattaaatacatctagtttgatgcaaactgagttttattcaatgttggaggcctcactatgttcctctaagttttcaaccattaacaacccaaaccggttgtttccctcataccaacacttggtgtgtgcagtggttctccctctgttcttagaacagctggtattctgtttcttctgcctttttttttttgaatttgatctaccttttggtaggaatatttcagcgggggcatatgaccttgtggcattgaatagatattcataaagttgcttagcctcaggacatatgctcaggagactttctacagaggtcgatgctagcagttgctggcatagtccgtgcaccaggcttccactgtacagtctgttcaaagcaagaaaaaagtatgttgttaaagaagtaattcagtgcaacaggataactaccattgacatagcttcaacaaatgcatctaaacaatgagagctcttattgctctataatattatcgaaattacttaagaataatctgttctttgaaggaaggaactgagctggtatgacaaagattctttgctggtgatacttaaaaacttttcatcaacaaattacgtgatgcatgcttagtggttttgcagctagccccagactgagcaggtgtctttaacaaacactttaattttaaagaaaaggaatttaaaaggaccctgataaaccaaacaggcagtttgttagaatatgagaaaatttattggcatcatttgcaaggtcattcactgagactaaaaacctacttcacaaatagaagatgggattaattggaatccacaagtttattatggacaaagctgataaactggtaccttagcaatccatgtagaaccatcatttaatcagtgtaacatctctgtgtaaaaagccttggttatgctaagattcaagaacaatcctgctgtttaaatcattattaagagaactgttttgttttgcatttcctgttttgttttaaaaggatttgtggtaactaaagaggatccagtcaagaatggccttaaattattaaacgaaagaaataaagaatccaggggtcaaaggccaattagtcttatttgtgttagctcagatataaggcccagagatatattaacaacactgtttactgccaggaggctttttaccttgaaacatgtaaagtcccaccatattttgtatgcgtccatatatcctcattcaaagtattgaaggcactggggctgcaacagcaaataaaatagacaagcccctccccccacagagtttacatctgagtggagagacaaacaaaacacaatctatctcctttttatcttcatctctccctcaagtacctcctggatggtcaattaccaagatgtccaatccattgatcctatcacttttttcactgctccacaccctactgctgctgtcacttctttttatcatacccagcttaaactccacagacaaacattataattactctgtggcacataggctcaactcccttattgtccttcttgcctggtaaagcaaacatcctaggttaagttcacttgggcatctactcatcatctcacttagaatgaaagctccattagagctgagattctgtttttgtccctacaccctagcacagggtaggcatttaatatctgaatgaatgagtaagccatatgccaagtggtaagaaatgcaattaaaaaaaaatagagtaacaggactagagtgaatgagggtagacagtgtgtctcactagggtgggttatcagaaaaaggctctacaaagtgacatttaaagactgagaggaaaggagagagttgtatcctaccaatgattgcctcccctctcccacatattaatgtattacttaaaggaactgattttttaaaattggattgaatcatggaaacattctttgagaatatggaaataatttaatatttttcccgtttccagctcttcagctgtaacagtgactcaaaatcaattacattaagattagtttttttttgttttggttttttttttttaagtaactttgttgctttaaatataagtgaaaatactgtatttacttttgtgtgcttccatctgaactaaagtttcccatggtgcttaccgagttaggtctggctctgggagaggagtggacagcagctggttgagatacatccccatctggagacaggactgccactgacagaagatgtgagctgtgtctaagtccagtcttgtgcccagccgtgtctgcgccttcactctttggaactctgcatacaacatcttagcaccatcttcctgcagctcttccttacctaaataaagaaacagcccaagggcagtatttctaaaagcactgtaacagcttttcattttctccacatatactacaaattctataaagaaagaaattaatttaaaaaaactaagatgtttttctcttctggcttcataaatgccttgctgtataaattgaaatattgatactgaactgtctttttaatgatgacctaactttattcaacccatcggaatttactttttccctgaaataagatcttttccactggtctactacctgaccataaacatgtctgcatttgaattctctaaaccctaaatctgtgtctatgaaaaatacaaatgactattaaatattattctctttactgttctctttcaccgaaactcccaagctgtggtgcatttgtgttaaagaaacaacctgtgtgttcaaaacacattttgacctctgtgttttataggaggaagctaaagtatgacttggagaatttggcaaataatcattttcttttcatagtagaggataaggggcaagaagcaacaatcctaggaaataaggaatgttgtgtgtttttagctgtaagtttctacagatttgtttgggcaggggtgcacaaaataacatctggaccaatttgaaaataataaaaaggaggcccaccttttaccaactagcgaggagcaagacactgagcctgcctgggtacagggtccacatttcctaaaagaaaagaaacagacccttgacatgccccttctcttggactcaggtaaaaacttaataggcttgtgctctgagagctttcttatactgtatttattattcaatcagaggaaatactctaaacctgtgttcataaagcagcagtgggacttaactgatttgttttgtgttaagttggctgtcatataacaacagtccctctgacagctgtcaagcttgagccttaatactttagaaacaggaatccatgctgtttcattcttttatctaacttattaaaatagtaaactagagtagcacgatctaatagaactttctgcagtgctgtccaatacagtaggctagcctatagccatatgtaactacctgacacttgaagtgtggctagtgtgactgaaaagctgaatttttaatttaaatggaatttaactttggccatgtgtggctagtagccaccatattagatagtactattccagagtataattattatgcatgtttatacagtgttagagcattcataatctttaaagaggatattccactgaagtattaaagtgtcccagtgtttcagcatttacttcacctggtattatatgcagatgaacttgcctcagtgtatttaagagatattactggccgggcgcggtggctcatgcttgtaatcccagcactttgggaggctgaggcgggtggatcacaaggtcaggagttcaagaccagcctggccaagatggtgaaaacccgtctctactaaaaatacaaaaattagctgggcgcggtgacaggcacctgtaatcccagctactcggaaggctgaggcagaagaatcactggaacccaggtggcagaggctgcagtgagccaagattgcaccactgcactccagcctaggcaacagagtgagactccatctcaaaaaaaaaaaaaaaaaaaaaaaaaagggacaaattactatttctgccatcactacttacatactaattgaaacctacagcagagaaaaaggaataaaaagatgtataagcaagaatgtagtggttgtaggtatttagataagtttcacttctgggcaagtttcttgtgatgacgttgctgctgtgctaataactggataggtaacatggaatacaaaatgcagctggcaaaatacactgtcacaattcacaagttaaaggagtaggtgccaccaaacagatggaagttggcagtaccccaacacatctcactgctgtatacttaagattcaagccctccagcactgagcctggcacatgaagtgttaaaaaatatttaccaatgaatgaatgatattttggtgcctccacatctaagttgtgatacaattaatgggagtaaataatccaagaatacttttttgtttgtgtaaactcgagtaaacagtttgcaagcaacatgccacaatatactcctgtaatttccagttacctaccagggctgttgattatggcaatcaagggccccactagcattgtgagcagtaaggattgtagatgatgtagctttgctttggtctcggtgtgctgcaaccagtagcaactgacagcaatgggcaacttcagtgaagtagggattggctccagaatggtctgtttcaccttcagggtttctaacagaagcatctgccgcctcctcaaggagagctgaaaatacacaccaagtatcctgcaagttactttgggaaatgtctgttatttcttttttccaccatagcatgaagagatttaatgctactgaaacttctgtcagctgttaaacttatcttcttgtgggaaaaaaaatcagccacactcacagcatttagaacattaataagatgctttataaatatggttggttgaatgggtgtactgcctactcctacacctttacttatgtcattccatcctctttgtatacgctggtgagcatcttcagtgcacgtcacctgggaagctcattaaaaattcaatccttaggccctactccataaattttgattgactaatctgagagagagcccaggaggaatatacattttaactagcagcccaagtattctactttgagaaacaaagctgtatactcaacaccacctgtatgtgcctgtgcaacaggcatttgccttcagcatgatgccattactaattgcctccagaagacaaacgttgcttttaggaaccctatgtggcatatactctatttgtttgggtcctgtctcatgtcccttccctgttgaatgctttattgtctttgcataaaagacacacagggattgtcccagggtggctgcttgtagattagaggtatattcaagggagataggaatattttaaggactacttgcattgtgcttggagtaacacgccatacttttacttcatggtttagcgtgtacttcaaataaaagctcagaagtaaaacagctataagagcactgaggttcttgttgaaataattttaccttaatgaattaccaagaccttgtaagaaccagaatggggaccttacaggtcatgcactcaggaatattaaaaggtcatcttctgggggactttataatcaaactttaagaaaaagaaaagttgtattcctagtgtctgcacacagccagaaaaagattttctgctttctggaaagttgagatggtaataacatttctcagcatgtaacatctagttagtagaaagagtggttgacagctgagactaaagatattaacctgaaacaaaacacatcataaatgacaaaatagttttatcattaatgcatgaaaactttaaatagtacgattatttctaaatactgcttttaataatattgtgatacaaattttaaaattagaaatatgcaaagaactttatagtataaccaattacccctactggaagtagttttaactacttaaattttaagtaaagtggaaactaaactcttaaactggtttttaaaatgcactaagtagagctaagaaaatacaccaactcttttctgatatatatttaaattactgaattatagagccaagttacaacttttcataaacaaagcagtctgggctttgacttcagagatgttccgctctgcactaaccctatggctttggtcgaaaggtttctgaccttttctacagtctgtctgacttatctgtaaaatggtcattataatgacttgtataagatgtttcatcaaacccaccagtccacagtcccttccaaaaggggaagtactcaactcacagcccttaacgttagttaggttttatcccatgtgacaactactttccctcttccccagggggagcgaaagcacaagcctgcagaagcagctgccccgagaggcagagatgcccagagagagactggtcttggctgccttactccttaagaatgatccacttttgtgtctccttatgattaacctcccattggttaacttgaatggtgctctgtccattgcaactaacataaccaaaatgaaaccctatcccatgtggttattgtgggaattaaatgagagactataaagtttttattaacaacagctggccaaagcagataatgtattacaagatctaaaaaacaaaatgaataggtactatcacaaggtttctatacttgtacttgcatttgtgtttggaatcacatgagcacctggtacatttataattttcaggggctaattagaaccattagcactgagctaaattcagaattgataagtttatgccaagagaaagctgggtgatagcagagcgcagagaatgaactaaaatttcactctattttgaatccaggtaaatgatgagaacacttaagtcatctctacttagcaaggaatataagcagcctgctatactcatggattcagttggatttccatgtggggggaaaaggtatcctgatccctatttcacaccatacgcacccacaaaaaaccaattctagatacattatagatctaaatgtgaacagcaaaaaaacattttcatgaccgtggagtaggcagtttcctaagcagttcacaaaagtggtaaccataaataataaaaatttaaattagagtatattaagaacttctgttcatcaaaacatactaaagagtgaataaacaatgggagagactattcacaatatgttatttgacaaaggacccgtatatgataaaaatgagcaaaaaactgtacagaaacttcatataatagagtatcacatggctaatgaacacatggaaatggaagattggaaagaacccaaatgctcataagctgtgtaatgaaaaaaaatgttcttaagtgtataatggtaatataccaaaatagaaaaatgttacagcaatgagaaatgaatgatcaactactcacagcaatgtgaatgaatctcatgtggaataaaagccagatgaaagaattcatttctaaagtaataattcagttaaaactattgtgttgttaaacaggagagtgattatagagagttgcagagcgagtgactggaaccagacactaggagaagcttctagggtggcgataatgattcatctggatcttctttgcatggatgtatagaccttgcaaaaatttatcatgctgtacgattatttgggcactttactgtgtttatactcaaggaagcatgaattgcaaaggaacaagatgaaactttaggggttatggatacattgattattttaattgtaggatgacttcacagatgtagacatctcaaaactcatcaaagtacacactttatgtgcactttactgtacactacttatttctcagtaaagccattacattttttttaaaaaactccccaacagcaccatttatgcttgagtagaaatgtaatttcagcaaaacattaataatgtagctagtttgaattttattggtgtgggtaaagttttaataaatcccttgtttgagactgacttacgctccactttctagttttgtacccctggaaatgtgctaaaggtagattgtcagttgtgttaccaagcattataaaaatgacttataaaattgcatctaagcttaaactatatataaatgaactataaacacctgatggggacaccatatcttggggcttccctgagtgcagtgtcttgtaagtaggatgtcccttgcagggacctagctatgtttatggaattattataagaaagactggatcctatagggaacggggcttttaagctactgaaaccttttcttctcctttatctaactgaggtataattcatatgtcataaaagtcatccttttaaagcatacaattcagtgggtttagtgtatatatatttttagagacagggttttgctcaacagggagcacaatcatagctcactacaggcttgacctcctgggctcgagcaatcctccaacctcagcctcttgagtagctgtaccaccatgcctggcaaaaaatttttttttttttttttagtagagacagtcttgttgtgttgcccaggctggtcttgaactactggcctcaagtgatcctcccactttggccttccaaagtgctgggcttacaggcatgagccatcttgccttggtttagtatatttataaacttgtgcagccatcactaattccaaaacattttcttcacccccaaccaaagaaaccctgggggtttaacagtcactcgccaatgccaagaaggctcttggactcactgcccaatgccaagaaggctcttgcactcattcactatgacattcatctcctcctgtctgagatgtgactgaagaggaggctaagaggctagttcctggtcagctgtatagcccagggaatggcactactgatattttgggctagagattctttgttatgggacactttcctgtgcactgtaagacttacaggttgtaaaatttagcagcatctttggcctctccccactagataccgatagcaaccactaccccttctactccctaggtagggacaacaaaaatgtctccaggcattgccagatgtcctctgggggacaaaatcaccaatggtgataaagctttggtgtagactgataacagtgctgggagaactctgacagaaaaggaagacctgacttaaatccactgggaagctgtggttgccgtcctacatccttaagtagactggtgccacgtgtggtctgtgagttttgtgagactgaatatttcattggatctaagaagatcccctaatgggcattgcaattgttttttttttaagttatctctatttaatgtctaaatctagttcttttatcagcatagtttcatatctatttgtaattttaaatatatatgtaatataaaaagacaacactgggatccatgagaatttttttctccttgaaaaggtggtctgggtgttactcaggtttaagcaacactaagttagactaagagtcatgttttctgtatcaaactaggcaaataaccataatgacacaaaaacctattttaaaaaaggtattcattaataaaagttaaaaaattagaccttagcatcagtactaaccttatctgaaatccgatgtagtctgagatgttgtgcctatgattagtgtctatacactttttttgcagttgtgaatttttttcctttttttttcagccacgtaacccattctattgatagctagtattaacctggtagtaataacaatatagtagtaataactgtgacgataacacagactactgaagtacagtggaaatggtagatttagagctaaaagagctaggtttgagtcctagcactgacactttctggctaagacattacctagttcactcaagttctagatttcttagctacgacatgagggcaagatagcactcaacctcatcagtttgttatagtaagtgaactaatatagaagacagcactttgtatcctgtaaagtactttacaaaaatttcattagtattacaaatacttacctcagtcaatctgcttaagtcagaatgatccttggccagttctactgcatcaatgattgaggttctgatatttttattaatcctttccacttcactgaaagctagaggctgaggaggcaatgcattccaggatgtcttgtccagatgtggtgaggcatttaaaagaagcccatagatgatttgcctgatgggctgagatattctgtgggcatttggttgctgcatgttttccacctgtgtgggaagaatggtccgtcttaggaccaaagcatcactgatgaaaggagatagctggcctttagctaaagccactaatacccattctggtaaaccaagattcaaggcatctggacagacataagtaccacactggaagaagtcctgtagcttcacctgggactgttggtattcttccatggaacagcagagaagttccttaacattttctcgatccttttttgggaggtatttcagaacattatctagtgcttcggtagggttggcaaaatgagacaaccaattcagaagtcccaggattcggtggtgtctcctccctttagaactggtagctccaagaggaagacgcgctttacttaagaatgtctccatgatgggtagattaacatggtcatttccacatagcaccgcaaagagaggtagtagagctttattcatattgctgaagtgatggcagaatgcatcaagggaaaagcatttggcagggatatagttttgtgtgcccttaatagtgttcatatttctccactgaaagctattcaatgggcaaaacccagttttcaggtcaaaaatgcaaaagtcactatctgatgataacacagggcaattccaatggttagcaagtgtcataatgtcccgatctgcttctgaaaagcactggacaaaacacacccgcagcttgatcaaaacctgtatgaatacttcccggatgagtaagggacatacgtacccactcccaccaacagaaagggaatgggccatctggatcttctctctagctctatcctttaaagttgtaagctttttatctgaaatgtcacatcctccatctaatacaacatatgggcatatattacaagcaaacagtgattcaaagaatttttgtacaacatctgcaaaagaatcatagtcccctccataccggagatccaagtttgaactgaagcaaagacggtggaaaagagcataaccatcaatgacaatttttgtgtcccgcaacttcaaatcagtgaagaactcattactatgatcttccacaaaactcattagtcctcggatacccatgatgacagtctaaagaattaatcgcctgtttaaaacaacagaaaacattttcaattgatgctagttatggggcaccaagtcattgcttccagcaccattaaatcaatagcaaatgttatgaagtgctctttagatagaacatagatatcaacatcataaattcttacctagatcctcaagcaatgttagctgtgctttttcattctcctttgctttctgatacaaggcacaaattcaatggtttcatgggttgtaatctttggatggtgacagaggctgctgctaattctaaagaaaaatcagttgaagtccattactgacacaccagtatagaagttctgtgaactttgattcttaagtggtaatagtcaacatcttacagcacagagtatttgttttgtggggtcaaagtaaaaagtcctaagctaaaaaaaagatatcatattcatctcataatcacaaagcatttgggcttcagtaaagtaaggtgtgtaggacctatgataaggatcaagtttttcttttgtattgacaatcagtcacggaacttctttcaggctttggatttgtgggcccttcttaattggcatagtttttggtataaggaaaactgcttcatgcctctaggaacccctctatccagttacacccctaaccacgagctcttttcatcatcttattttgcatatctggcccagctacgcttcctcacctggctaacttaactcgcaggatcagaattgatggtttttcttttgacacctcgggcttcaatatggcacagcacggtactgttactattacttaaaatcgtgacattttgtcagtcatggattttttttgctataattttgatttttagagattgcattaaaacttaccttgattactgaattttattggcatccatttacattttacacttatctcaccctagttccagccctgtcagtatctcagaaccttatcctgtatagtacttatttctttgcaagatagttttgtaaagcgtccataagcagagactgtgtcaaggcgtcctacgcaaattacaggaccttgcacagacagttgcatagagctgcataggggaaaggcgggcaaaaggtctgacctaagtcttcaaacacaggccttcatacaccgtgccacctcggccctcacaacccgccgcccggacctgcagcagagcccacctactctgtcctcccagaggagtagctcctccatcagaagcccgctagagcccagcgaggactggctcctgcacgtgagagtccaatctcaagagcgggaatcggaagtctcccggtgtgacgtctctgggaagtacagttccgtgatgccggtggcgccagactgagccaaggagcaggtgttctcgggcccagaggcgctaagtagctaaagagggctgggacgtacgttccgaaatggctgctgtcaggctaggaaagcttggcccgcc

SEQ ID NO: 7355 - DNA, 640 bp, Homo sapiens
catatatatacactcatgctcttatctgaagagatctttattagttataagaatattagtaaaatatacttctttgactttgaaaaataagagcatcaatctctacttaactaatatagaagttgttaatcaggtcaggcctctttggttatatgtgcatagtcaaggtgggggttaaggatgtattgtaaggacatatgtgaaatcccaatggaacttgtcgtaggcagaataattccccccgaaaacgtccatgtgcaaatctctgaaacttgtgaccatggtaggatatatggcaaaggagaattaagcttgcagatgggattaaagttgctaatctgctgactctaagatagggagattatcctggattatccaggtaggtccagtgtaaaatcactaggatctttaaaagtagaagagaagaaacacagaagagtcagagaaaagggaaacagtgtcagaaaggtgcaacattgctggctttgaagatggaggaagagtgccacagaccaaggaatggaggcaacttctggaagctggaaaggccagggaacacatctctcctatagccttcagaaggaacacagtcctggcaacaccttgattttaggccagtgaggcccatgttaggcttgta

SEQ ID NO: 7356 - DNA, 703 bp, Homo sapiens
aagaggagctatacagatggtacttagaggatgtagggccctacgtattagggcttcttagttgtagcgaagagcaattggtctggtacgtttagctttttcacatttagttttgaattctgactctagaaatgtacaaccccatcttttgaattacaggttttaagatgttatttgctcttaatacgtcttaaggtaacagccttgatcactgcttttactttcgatgaaataacttaatgagctgtgaagaaaaaattatcagattttaagggagagaattttatgaaaatgtctttgaggttcctgtcacctttatgagaatgtcttcaaagtttccatcaccacctctaccaatttttcttccaccggagccagtggacttaggttccataacaagctcctcttgttcactgaatgagctagacaatatttcccaccttttaaggaaaatatcagctgatatcaatgaaattaaaggaatgaaagcagctattttgacagtggaagcaaatctttttgatctaaatgttagagtgtccaagaatgaagcaaaaatttcatctttggaggttaaaatgaatgaatattcaacaacatatgaatgcaacagacagtttgaagatcaagaagaagatactgaatcacagtcaagaactactgatgtaaaaataatcggcttccttagaaacgttgagaaagg

SEQ ID NO: 7357 - DNA, 703 bp, Homo sapiens
aagaggagctatacagatggtacttagaggatgtagggccctacgtattagggcttcttagttgtagcgaagagcaattggtctggtacgtttagctttttcacatttagttttgaattctgactctagaaatgtacaaccccatcttttgaattacaggttttaagatgttatttgctcttaatacgtcttaaggtaacagccttgatcactgcttttactttcgatgaaataacttaatgagctgtgaagaaaaaattatcagattttaagggagagaattttatgaaaatgtctttgaggttcctgtcacctttatgagaatgtcttcaaagtttccatcaccacctctaccaatttttcttccaccggagccagtggacttaggttccataacaagctcctcttgttcactgaatgagctagacaatatttcccaccttttaaggaaaatatcagctgatatcaatgaaattaaaggaatgaaagcagctattttgacagtgcaagcaaatctttttgatctaaatgttagagtgtccaagaatgaagcaaaaatttcatctttggaggttaaaatgaatgaatattcaacaacatatgaatgcaacagacagtttgaagatcaagaagcagatactgaatcacagtcaagaactactgatgtaaaaataatcggcttccttagaaacgttgagaaagg

SEQ ID NO: 7358 - DNA, 32189 bp, Homo sapiens
ctggaatggctcaacatcccagatagcaaagaagctgtcaatgaatggtagaccacgtccaaaggatgcaggcgccaacttagaggtttccattggccaaaaatggaattatttgagattcagtaggtgtaaatatcgcggtgaattaaagcccatttaaatccacaatttcataatgacattttaaaaaaataagctctaactagtcaccttctggaaggtagtagataatcattcattgtcttgaaaactgggtaaataaaataattgaacatttatgctgtcttttctgtgagaacgataccactgggtaaccccataggacaggagttggcatctgttggaaccaaaccgtgcctattcatgtatgtattgtccgtggctactttcatactacagccttagttgaatagttgcaacagaccatatagcttgcatagcctaaaatagcctaaaagatttgccaacctctgatatagtagatgagagaaacattttcttttaaaatgatttcagctgataagagaacaagatggtaggattagagttatgcttttaagagtgaaaaccagttgttttgtgcctcttgatacaaaagaacagaacttttgtcttgccaaaaatgtaaacctaagtcatcaagctcccagtccagcagtcagtttgcaagaagttgcagaggccagaggagtatgttggttgagcttcaccatgagtgtgcagccggaaaaatagtgtttgggacactgtgggttgaatagcctgagaaattgagattaaaaggcaaatcaaaggaaaataaaaggagcaggattaaattgtagtggctagggatacccagtgtgtgtgaaattataaagaacctctaggcgttaatataaaaagcacatagtggttgcttttgaagaggaccgataaagatggagcacacagagaggcttctggggtggcagatgacgttctctcttttgacttggatggtagtcagaagggtgttttgccttacaaaaattcattaagctatatgtttgtgtggttttctatactgtgttttaaaaggggataattgaaatggtgtcaggtacctttgctgatgaggagtttggtattactagatatattcacaagtgtgaagtgatactgcaagcaactgttatctgttaatgtggttactcactgttgtacggtataatctggggcaggtttttaaaatataaacatgcactcgtattggcataagttgttaattttttttcttcttttgtttgagcagatagcattctctcatttctctggtgtctttatttttactagcgcacccacctcataatatgtgtactttttgctttttgtcttgccatcagtctgtcactagaagtttattttgccgatcttttcaaagacttaacaacattattctggctttattgatttttttttttttttggtgtttttgttttctatttcattgacttgtgctttttttttattttttttttttaagaggcgaggtctcactgtcacctaggctagagtacagtggcacaattgtagctcactgcaacctcaaatgcctgggctcaaatgatcctcccacctcagggaccataggcacacgccaccacgcccagctaatgtttaagtttttttgtaaagatggagtctcactatgttgcccaggctggtctggaactcctgagctcaagcagccctcttgcctcagcctcccaaagtgctaggtttacaggtgtgagccactgcacctggcccgacttctcttttaatttatccttccatattttaaaaattatttacctcaggctgtcttcttctcaaatgtaagcatttgagaagaatacatatgacaggttttaattcatcatgttttcattatcagagtgtctttaatttccattataattttcatcattgaaagtgtgttttctatacagtatttggaagtggtatgtgtttttgtcttttaatcctttttattatagacacctgacttaattgcattgtggttagataatgtaatttttacaatgcatagtttttgaaaattgttaacacttgcttagtgcataatcaagtttatgcatcttccacatgcattttggaagaaagtggactaattattggatggggaattttacatttattcagtagataaagctctactgttaacattattcaaatcttgaccttgctgagtttttgtgctgcttgacttaccacttgagaaagggtgttgaaattgcccaacatgatgacagatttatcttaatttctcttgtacttatatcaagtttttgctttatttttaggctgttatatactattaggtgcatacatatttaaatttgttatatcttctctgcaaattgaatcccttatcttgatttatgaccctctgcaaaaaagatgtttttatctcaaagtcagttttgcctgatattaatatagccatttaattatatttgctttatatatctggtttccctgcctttgttttcagttttctctctcatgctttaggtatatacagttgacccttgaaccagacaagtttgaactgtgtgggtccactcatacacttatatgtggatttttgaaaataaatatattggaaatattttttgagatgtggcaatttgaaaaaacttgtagataaactatatagcctagaaatagtgacaaaattaagaaaaatttaggtatgtcatgaacacataaaatatatgtagctactagactaacatttactatcttaaaacatacacatctattatgaagtttaatttatcaaaatatatgcacacaaacacagactttacatgataccgcttgtagttgagagaaatgtaagcaaacataaagatgcagtaatagctacataagatttactatagtacatactgtactactgtaataattttgtagttacctcctgttgctttatggtaagctaaggtgttttgagtgtccacttaaaatgctgtgtgatgcaaccatctctgcgacagttcagctctccagtaaattgtgaattgcagtgaaaggtgatctcgcagttcttgcatatttttcatcatgtttagtgcaatactgtaaaccttgaataacaccaggggaccccataatgtgctactggtgatgctggacatgctcccaagaagtagagaaaagtcatgacattacaagaaaccattgctcagtatgtaccaaagatacatgttacaactgtggctgcagttattcaccatttctggataaatgaatttaacataagaaccatggttaaaaaaaaaagaaaaagaaaaaaatgtatgaagctgccactgcagctacgttggcaacagtaagtagttaaatgtttgggaagtcaaaagttgtatgtgggttttcaactgttgttgggggattggttcccttagccctcatattgtttaagggtcaactatatattatatcttaaatattataaagctggattttgttttttaatctcatctgagtttgccttttattggagagtttagaccagtcacatttattacaattactggtatagttggattactttctgtcatcattgctgatttgcatttgcctgcttttctgttttttctcatgttttttaaggttcattaattactgttattgttgacaaccctaaccctggttctacaattttaaactagtttactgtttaaaccttccctttctgttctttttttttttttttgagacggagtctcactttgttgccaggctggagtgtagtagcgcgatctcggctcaccgcaacctccgactccttggttcaagtgattctcctgcctcagcctcccaagtagctgggattatagacgcccaccactacgcccagctaatttttgtatttttaatagagacgaggtttcaccatattggccaggatggtctcaatctcttgatctctgatcccctgaccttgttatctgcccgcttcagcctcccaaagtgttgggattataggtgtgagccaccatgcttggcctcatttctgttcttttagtcgttaccagtgaaattttaccacacaaatttaatttagtattctaaaagttaatatcctgaccccactctcaaacagtaaaaggacttttgaatacctatgaagagcttcagtctttatcctcctcatttacttgtttccagtgtttcaatttgatcttttttaaaatgcacaagttgggccgggtgcggtggctcatgcctgtaatcccagcactttgggaggctgaggcgggtggatcacctgaggtcaggagttcgagaccagcctgaccatatggtgaaaccctgtctctactaaaaatagaaaaattagccaggcatggtggcacacacctgtagtcccagctactcaggaggctgaggcagaagaatcgcttgaacccaggaggcagaggttgcagtgggctgagattgcgccgctgcactccagcctgagcgacaaagcgacactccttatcaaaaaaaataagtaaaataaaatacacaagttggacaacatttttgtaattttttccaggcaatgttttttgaggtttacctcctgtttatcattttacttattcttaacatctctgagtgttatttggggatcattattttccaatattttgaagtatttttgaagtatttttttggaagtttcactgaaacatgtctgttggcaatatattttccaagagtctattcacctgtgagtgttttctttctttgtgttcttgtgcagtagttttgctggatacccaaatctaggttgttagttatttgctctccacaccttatatatattattatcccactgtcttctgctttccattgttgagtggacttctatcattctaattgtctgtcgttcctttgtaggtgatctgtcctttctctctggctgctttcaagatcttctctttgtgtttgatgttctgcagtttcactacgatgtgtctaggcgtggatttccttttatttttcctgtttggtataatgtatggaagcatcccatatatttgaaataaaatgcattatgaaatacatgctcaccatagaaaatctggaaaaagaaagcatatcaatgtaatatctcctgatagatgagaaaataatcaaatagtataaaaaagattaaaaataaaaagcaacattccttacttcattcttctctatactagtcccactccgcagaatcccccacttttaaatgcttctgtttctttctccgtgttgtaataatatgctttatactgtttcttcattgaccaactagatagtacctgttgatttcttgctgtatgtcaggttctagcccatttatacttttcccttgcttccaagctcatacagcaaaatcaatttttaattcatttattggttactttagtaattttaagtagtaacttaaatatttcttgtctggttatatttcagtatattttgacttctgaaagatatgtatccttcaattcctttttttttttggaggtagagtctcacttttgtcacccaggctggagtgcagtggcgtaatcctggctcactgcaacctctgcctcctgggtttaagtgattctcctgcctcagcctccttagtagcttgggactacaggcacaccctgccacacctggaatttttaataaaatttttagtagagacagggtctcaccatcatgcccaggctggtctcaaactcctgagctcaggcagtctgcccaccttgtcctcccaaagtgctgggattacaggcataagccaccatgccaggcctctctttcaagtcttatattttctttcttgccgccacctacattctgtcctgcctccaccttctaaattgtcacctgttcttttatattgtcaaagctgatcaaatttacattttgttccctactttagttaagacttagtcgattgactctaagttgagaaacagtaagcatttacactgttaagactatttagtctgggcatggttggtggctcacacctgtaatcccagcactttaggaggctgaggtgggagatttgcttgagcctaggaatttgaggccagcgtgggcaacatagcgagaccctcatctatatatatattttaatgttttttaattagctgggtgtgatgatgtgcacctatagtcatggctactctggagaattgcttgagcccaggagttcgaggttacagtgagctgtgattgtgccagcctgggtgacagaccaagaccctgtctctaaaaataaaaaaaaaattttaaagactatataaatattacaaggccaaatttacattctgtttcttgtacagttttgtgtgggaactctctagagtttttttaatttttcccccttttttgtttcccttaggttcttcttttttcccttctttcattgcctacctgtactgtagcctaaaagtcttatcactctgtgctttgaaatctttgggtttcccactttttcttaggtaccttcctcctggagcctctctcctccttttctgacctcactgcttgctctaggcctgctcaaggccatcatcccgaggcgccctcctcccctgagtcggctctgcaattcctgaattccattttgtcttctcagtgcatttctccgttttgtaatcacgtcacaaagaaactccttaagaaagtatagaaggtaaattttctgagttcttggaaatctgaagctatccttgtacttgtttgatactttgactaggtacagaattataggttgaagtcattttcttcagaactttgaaggcatagtttcattatcttgaggcttcagtgttgatgctgagaacttggttgcccatcttattccattgtgtaatacctgggatttttttctccgggaacttttttttttctatgttcctggtgtctgaaatttcactgtggtatgtctagatgctagttaggtacattaggtacccttttaatttgaaaattcattctcttccgtgtgggaaatactcttgcattatttgttttaaaatttgctgtccttgttttcattgttctctggtggaaattctgttagttggatgataagcccttactttaatctgtcagttgtatattttttctctcttgatttttgacttgatcttgttggtctactcttgaatacttgcttgacttgatctttagtctccttactgaacattttaaaaatgtaggcaagcatattttttaatttccacaaactttttcttgttctatttttcatagtatcttactttgtggatacagaatcatctcaactgtctgaagatcctaattaaagggattttttttttcttttcaaggaattcactcttgtcttctaattaatggagtcagagtcagattttatgctttttttcttgctctttcgattatggaatttttttcaaaaacatctgcagatagtggttcctagtttaaggaaaggtagtgcagaggcttacctagaattgtgctgtgggctgagcttttctgcaggcaggtttagctttcaatgaagcagacaaggagctgcaattggccttgcagttgtagaggaatttcttgggggagcaggttggtatgcttacactcctactggttgtctattaaaaatattaaaattttgtcttttaaatgtctgtctctggcagtaccattcacaagccttcttctctgccttacatccttcttggtttttactcattgctgcaatctctcacagttggatggccctttgtttcatccaaattcaaggcttgatatatcatctctgcactgtgactctcacatttttatatctccagcctggaccttgccctgaattcctcatttctgtccaaccactttatatttcttcttggaggtgtaataaatcatttcaaacttgtccaaagctcaactatgaattttcctctcctgtctgttcttcctgtagtcttcctcattttagtttattggtgacttcacctttccagtttctgagacagaatcctgttgccattctttttttctctccttctcctttccttcctcttccctctctacctctgtctccctccttcccttgttccacctgtcagcctctacctccagatttatagaattcactaccgtttatcacttctgcctctaccacccatcaaagtcactgtctggccgggtgcggtggctcatgcctgtaatcccagcactttgggaggccgaggcgggtggatcatatgaggctaggagttcgagacctgcctggccggcatagtgaaaccccgtctctactaaaaatacaaatattagctgggcatgatggcacatgcctgtagtcccagctactcaggaggctgaggtacgagaattggttgaacctgggaggcggaggttacggtgagccgagatcatgccactgcactctagccttggtgacacagtgacactctgtctccaaaaaaaaaaaggcaaaaaaaagtcaccgtctgtgatttgccttggttacttgattattggaatagtgtgttcttacaaggtgtgcctgctttcaaacttgccttccttcagtccatcccacacagcagcagcagtgatcctttacactgtaaattagatcatgctactttgcagcttagaaccccccaggggctccctgtcacactgtaagtcacagtgttctgccttctcatcacccacctgcctccctctgctctggctccccgtgcttgctgctgctcctgcacactggcctgcttgtccttcaggacgttggaagagctgcgcgtctcagatgcttttgccctctcctgagaatgtttactttggatgttctcatatctcatccatgtgtcatctttgaggccttctctggccccatccccacactccctcttttctgaagctttatttttccccataacgtttgtcaccatcaaatacatattttatgtttttgtagtttaggtatttttatccgaacgtaggtctttatgttttaacgtgaattgttttcttttagcatgtatttttttgggggtcttgagagctacctccttccccgtctcaacagagtctgtcctttttgagcagggatttatgtgtttgttctgtatggctgttactgagtgcccagagcagtgtctggcatatagtagcaggagctcagtcagtgtttgttgtctgagtaaatgtcactcctgccttgcatctaacctgcagttttcacaggggctcatttgtggttttgcctgctgtgccttacagccagtatttgtccatatattttctattacccagagattgttgacatctcatctgctgcaccttgtaacccccatctctaaaccagtgatctccatcatatttttgacctgaaaatttttgtacagtagccatttttaagtatgtataccaatatatgtattttacttacgtacacatgctgtattgatatgaatattagaaaacataagaatagaaatctgccgggcttggtggctcacgcctgtaatcccagcaatttgagaggctgagacgggcagatcattaggtcaggagttcgagaccagcctggccaacatggtgaaccgccgtctctactaaaaatacaaaaattagccgggtgtggtgatgggtgcctgtaatcccagctacttgggaagctgaggcaggagaattgcttgaacctgggaggcggaggttgcagttagccaagattgcgccactccactgtagcctgagcgacagggtgagactccatctcggaaaataaaataaaaaaagaacagaaacccaaagatcatagggtagagatgtagatattaagttctttaattcacttttatggactcttcagaaggagagattataattgtatatgcttgatacattgtgttggactggaagcactgtgaaagattcttagtcaaggggagattttacattcaaagaaaatggaaaatccccctgctttgctcggagggaagaactgcacttaaaagtttgatgtgtattggtgtcgtcttctaggcatttcttatatctgtgaacatgtgcaccctttgtatataaagtggaattacatgtttacttacgcacacacacacatgtacatataaagcaggaattatactacccagagttctctgtgacatttttgttccacttaatgtatcatgggagagtccttgagtgtggacctaggagccagactaccgaaggtgcagaccctgcagtttactagttgatttaacctttctgtaccctagtttcctaatctataaatgaagaataacggtagcatttacttcagagttcttggtaggagtaaatgttaaaatacataagctttctctgctgatgaatatttacactggagtcttaggaagggtccttgcttattttctattctaaagttgggctggacatagtgggccatatgggtgccatcagatgggctcttgtttctctgtgacccgttctgttagacctctttcctgcttttttccttgaggttgtttatctgtcctctagtgaaccagctggtttgcaggtggtgcttttctgagagtgtcttgctgttaacagttactatggatgtcatatgccagctggttctgttaaaaaaaagtctgtgaatccaaagccttgaattttgaacattattttctgtctggaattttgaagaactgattcataaagtggagaaatgaataaagatttttattttacaaattccagcacttagcattttctttattctgttactgtgacatctatttgggaaaccaaagactaccattctttataaggattcctttttttttttttttttttttttttttgagacagattctcactctgtcacccaggctgcagtgcagtggcgcagtctcactcaccgcagcctctgccttcccaggttcaggtgattctcatgcctcagcctcccgagtagctggaattacaggcatatgccaccacgcctggctaatttttgtatttttagtggagacagggttttgccatgttggccaggctggtcttgaactcctgacctcaagtgatccacctgccttggcctcccaaagtgctggaatgacaggtgtgggcctctgtgccaggccaggattcttcttttaagagactatagtgagcagcatctaccaacttgcatccttgtatgttgcatatcttatttgtttgcttggggagtaaaccaaagtaaaaacgtcctttgtcaaattaaggaccttacaagattttctgtgttaatggattggaagtctttactattctttttttttttttttgagatggagtctccctctgtcgcctaggctggagtgcagtggcacgatctctgcttattcagtctctgcctcccgggttcaagcgattctcctgcctcagcctcctgagtagctgggataacaggcgtgcgccaccacacctggctgatttttgtatttttagcagagacgggatttcgccacattggtcaggctggtctcgaactcctgacctcataatccacccaccttggcctcccaaaatgctgggattacaggcatgagtcaccacgcccagcctagatgtctttactattcttaagatggcagtagtccccaagttgatctatggattcaactcaatccctgtttaaaccccaaattgcttttttttgtagaaatcggcaggctgatcctaaaattcatatggaaataaaaagggactgagaatagccaaaactattgaaaaagagtaacgttggcaaggttatgttgcttgatttcaaaacttactacaaagctagagtaatgaagactgtgtggtactggcataaggatgaccatacagacccgtggaccggaattgagaatccagaaataaatgcatactttcacaacccatcaatttttggcagcggtgttaagacagtttattggcaaaagaataggtttttccacaggtgatgctgggacaactgaatatccacatgaaaagaatgaagttggaaccttatcttatgtcataaacaaaaataactcaaaatggatcaaaaacctaaacttcaaaactcttagggaaaaaaatagatatgtcttggattccagaatgatttcttaaatatgacaccaaaagcacaagcaaccaaaggaaaaaagataactcggacttcatcaaaatttagtatttttgtgtttcaaaagatactatcaaaaaaaaaaaagacaacaaaatgggagagaatatttaagaaacacctgtctaataatggtctagtattaagccaaggctgagttcttatttccccatccttaagtttacacgatactatattagtgaagttgaattctgtcattaccacatgtatcttgaaagaagtttgtgtggatcacgggtccagttactttctccgccctttccctccagaggatttgtcactctcaataatgttatatactaatttcaaggggaaatacaactcaaaacaaatcagaaatctgaagcttaaaaatgttatggtttagatgatgaaaagggaaaagtacatttaattcatatcatatttagatgtaaagcacttaatgttatattgcttaacctataaagtagcgcttcagtgctctcatcatatgaagtaaataatagaaaattctttgtgtgacacatgtctgttttcagccaatcagaaaccaggattattttgtatgtaataatagggtttactggaagaggagctatacagatggtacttagaggatgtagggccctacgtattagggcttcttagttgtagcgaagagcaattggtctggtacgtttagctttttcacatttagttttgaattctgactctagaaatgtacaaccccatcttttgaattacaggttttaagatgttatttgctcttaatacgtcttaaggtaacagccttgatcactgcttttactttcgatgaaataacttaatgagctgtgaagaaaaaattatcagattttaagggagagaattttatgaaaatgtctttgaggttcctgtcacctttatgagaatgtcttcaaagtttccatcaccacctctaccaatttttcttccaccggagccagtggacttaggttccataacaagctcctcttgttcactgaatgagctagacaatatttcccaccttttaaggaaaatatcagctgatatcaatgaaattaaaggaatgaaagcagctattttgacagtggaagcaaatctttttgatctaaatgttagagtgtccaagaatgaagcaaaaatttcatctttggaggttaaaatgaatgaatattcaacaacatatgaatgcaacagacagtttgaagatcaagaagaagatactgaatcacagtcaagaactactgatgtaaaaataatcggcttccttagaaacgttgagaaaggtaaactcttaatatatgatatgttctaggtacccatcctttgatctgtatctttccacgtatgttgactgtagctctgatgtggagggagcaagttacagagaacttgaatttttcatggacctttaatgacaaatttggattctgcttgatttagcttagcaatctagaattgatcagaattccatcctctttaatggagctctctaaaacgatgttttgaaaagacagatgaacctagagcaatgaagcaaaacttgaaatgtggaagtgtggtctttcatgtgtcttgtgaaattattttaaaatgtctcattctttcatcatgtactgttgatgtgaaggagacctgttgcagtatttggatggaaagagcattcttcctgtaacttttcacctcagttttccaagcttcccacaggaatgcaacttgacctaagtgtcatcttcgttacagttcctcagaatgtgtgtttttttatggtaataattctggaaggaattgacttttttgggacgcaccagtaaaatttcatataacttatgttttaaaggaaactaactgatacaatttcaaatcgagtataggttttaaaatttaaaaacaccttttaatgaaatgtggtgcttggtgggagatggcccacttaacatctttgcactgagtaagcaaagcctgtccttgtgaagccacctgtaatggatatacccaaaatcagcatgtgggcatcttagtaagatttcagtatttgcaaccctatcagttacatccctttgtacactgtagtgcagtaccttataatgagcaagtgagtgcctgatgtctgctaagcgctgtgggggctacagaaaagtgtgacattctcccatcctcaaggagcttaacatcaaatcgaggatggaaaaaaatcagttctttgtccctattttgtgcagtcagactgctgggcatattattgttaggaatagtgaacctaataggaattaatgttaggagcctattttagaagaaataagtagttgaacatcttttcttgtggaagaggcaaagaattattatcatgctttgctaacatagggtgtggattgtagagctgagtgtcttattgttttctttgcatgcatcgaagcccagagtttgtcttttaggaactcttgtttagatgatgagagtgttttgttttgctatttcgattatcttcaaaggtcatgagtgagtcgtgatggtaagagctcaggtgatggagggaggtgcttgccatgcttattgtgcagttggctgtgatgcgagctgctgggccacaaggtgccttttcctggattttccacccgtttgccacctttactttccccgcagaattcaaattcaggaaaactgatgtcctcatagagggagaaccaggagtgttttaaattggcatttgtggtttaaccctgagtacagccttttttgtcttacaggatatgtctttggtctataaatactattaaattgaattgttgaagctttaagttacttttaagacttcaagttaagaacccagaaggattgatttttgggaaccacatgctggtattgtctgtgttgtaagcttagtgaagttttaaaatttatattctaggaactcaacagaggcaattattatcccgactgcaaatcgacccagtaatggcagaaactctgcagatgagtcaaggttggtaatgtttcaagttgtactgtaatccagccatttcagttgccatttccatttcttacaccccatttaacgtatctcggatctcttagatcctgccctaagatgttatatttagatctgtgaaaatattttagggccaggagataagatctgcatttctttcatgttatatagtgttataattttttgcctcattggaaaactttgttcctttcacaccattccaagtgtgtccctagcactgtcggctgtcactctcctgctgtcaggagtgacctgcgtttctgatttaccctcccactctacccagcttttgtcattgccatgagtggcttttgtatcctgtttttcacctggttagccttatcctcttgtacttcattttggagtcttatcaccagggccacacctggaacttgttgttctagtgttctagagccactctagtttgcctgtctcctttcctctccccacagacacacatgccaggggctactccaggactggagctgacgccttcatttttattatctctgtcctcagtgcccagcccctgccagatgcatgttcaatgtcttaaaaatgactgcaggataaacacaggcaaccatgagagacccggaatcatctcagtccttctgtttcccctaagtctgtcttttgtgggaagctctggtccctagacccctctcagtcaggactccacagtcagtcactctgttccccgaccctcccccagctttccagctcagaaagtgtgcttttcctccctaagggtcagcctccaccagaggccagatcccactgggttggtgagccactggcatgtcacccactcctccaacttcattctctgcctcctgtcttctctctgtagaggtgttcagacattctctgcccgtgattttgctctctcatctcccagcagtccgtcctgcttcctccacaggagtatttgaaaaggttgacagccgagatctgtgtgtgggatccacttcatcagctcttgtgcatgttttctcttctgcctccttcagcttttcattgtacccatggtgcacgcagtttgaaatagcaagtagttctgtgaggcttatgaatgactgcagtccttagctcctatcacattttttattctaagatccctttgtttctgcatattctattaattttctaaaaacatactgattttgtgtacacaatactctttgttatttctctgtggtctgaaaggtggttttgacatttttcccctccctgcttcgtcttgttttctctaagtggtctgttttggctgtcttttatgctggaggttcccctctgatgtctggggatcctaggtggtcttacatttaagagtggagcactcagaaggtcactggtattctgggttcatgagttggggcatggggcactttgactttctgtttgaaactagaccctgtggtggaaagtgatttgtcctgcctgtctggtttgtgggcaccctgatgtcactgccttcaagactttcctctcaggctggtcagcttctccaaaacaaagtttttcaagtaatagcctggtagtcagagttctgcgagcttaagtggggaaagaaggctgggggaggcacctcaccattaattattatgtaatgtttatttaaccctcccccaaccattgtcagtccagtacttctttcatcatggctggtgtctcttggtccagggactctgttcttatcctctgaagagtctaaagctccactttctccaagggagaatgcatgcagtgggtaaagatttatcaggaaatctaattgcctttaaaaatttttaacagtgtaccttcaggtgattttgtcgtagcatctttctggcagagaccctaatgcttcatccataggcctctccgaagattatctacaggaaagcacatcaccagtcatcccaggtgtcttcagtgtagaggtcgggattggtgtggcaagcatcaaaaccaagaaaacagtggccaggtgcagtggctcacgcccataatcccagcacttggggaagccaaggcaggcagatcacttcaggtcaggagttccagaccagcctggccaacatggcgaaacccaatctctactaaaaaatacaaaaattagccaggcgtggtggtgcacatctgtaatcccagctactaaggaggctgaggcaggagccttgcttgaacccaggaggcggaggttgcagttagcagagctcgcaccactgcactccagcctgggtgacagagcaagactgtctcaaacaaagaaaacagatacatggaattagagttgaagaagaactaactgcttcttggacacatctaatacacctcttttttgcctgccatttcttccatttcttcctaaggtccttttactgccagttcctgagcctttggagaatcttgtggtctgaattggattgcttcattattgccttagaattcagcttttacagatcccctgagtgcttaatcatctgtgttccactttgaaaatttctttttacacttattttctttgtgagtgtatgctttcaaaacaaaaacaaaacccttattgacatttctgtgggctttcaggagggaacaaaaagtaaatgcatggggtcagcctgtggtctctactcagaagatgttacttactcccccgtctgtctggtctccatgtgacctgggctgctaacgttccgcttgcagagaggtgtgcgggagggaccggtgcacgctttcctcaaccctggagcatgttacacttgggttcccatactttctccaagctttgacctttcggcttccagttcactctgtctttattcttctcattccctttcattctcatgtgtcagcgcatctcctccattcctcctcaaaaggttagctttgctctctcccaccttcagcattattttcatctcttctgtgttcacccaacctatgaactggtagaactccttcgtctcagaaagtgcagagtggtgggaaggagtgaagcagcccctgggccactgttgggacccacctttgacagttgtgagacctcggtgaatcatttaataacttggagctgcaaacagtcatctgtaacatgggaggaaaccgactttgtaggctttgagtgaggattcagtgagagacggccaccctgaatatgttaaacacttctgtcaccttcggttttgactcagcatcttatttctgtccccccacctacaggtcaaatctgaattttctacttcctcttaaacatgggagagtcccacaaagactttaaatctaacatggaaatgtatctttgccccttttaactttgctctttttcttttgctaagtttctcatcccagctttctcttccgcctgtctccctttaccatctgtactgcccttgctggggaaggcgggcacgccccttcccaggatggagcatgtcttctcttcctgtcaggtgtgtgagaccaggacagacagcagagaatcttttcattcagagcctcaccctctgtcccgggcaacagcaggtcgagaactctggttcttccttaacactgtttttctaaaaaccagtttgatcaggccactttcttccttagaacctctcttgatttcttttctcttttttttttttttggtttgagatggagtctccctctgtcactcgtgctggagtgcagtggcacaatcctgctcattgcagccttgacctcctgggcccaagcacttctcccacctcagcctcccaagtagctgggactgcgggcatgtgctcccacgcctggctaattttatttatttatttattttctggttgatgggaggtctcactatgttgcctaggccggtctcaaactcctgggcttatggaatccttgtgccttggcctcccagaatgttgggattacagacatgaaccgccacaccaggccacttgatttcttactaattatagaccagaatcgagagtcactgagacatagaagaacctttattatatgtgtcagccttccttggtatgtactgctgagcccaccacacacacccttccagccattccacattctaacctttctcagatgccttcggccttgtgaaagcccctttccttctacgtgcgttttcctctgcctgaagtgctgtgttcgtttctccgagtctctctccttgtttattcctgcttgttcctttactgctgacttcagatgttcctccttgctaagcttttcgttggttcttggctggagtgggctgttctgtattctcagcaccttgttcacatcccttttgggtcatgctattctgaaattgtatatgtgtctgtttttctttttttctttgtgtatctagctcagttctcttagttgttcagtaaatactcagtgaatgaacataaatgaataccctgtaaattttggtctctaagctttaaaagaagtgtattaacttcagtccgttgatggcgtattgataggtcagccattctgggttgtaggtcttggcatattttataaaatagtagatgatgtgagcttatggttatttgcattaaaggccagtgtttttcttgatacatatgtttaagtgtccattcacctttcagttaccttttaaagtagtcctcggtttataaccaactggaaattataccacttgaattctttttatcaggacatgattctaagtggtactgtgcgaagtgaacaaaccagattttggaaaagtggttcagcagtctgtgtattctaattatagggagcattaggactcaaattctccaggtttttagaaaagatttttgtactttaagggtatattgttaatatctgttgagatgcctcacctgagaacctttctctgctgtggttagggagtgttaatcagaatcacttgtgccgtgccctacgcgagaaggactccttgagttctttgaaaacatgtttggaatagaattatagccctgttttcctgagtggaaccagttgtgattttcctttgaaataatttgaatatataaaagattgacattcttctcacatatataatgttgggaatgtaaggtatattcaaaagtaaacatttgtggccaatttttttggctcagattactatgacatggaatccatggtccatgcagacacaagatcatttattctgaagaagccaaagctgtctgaggaagtagtagtggcaccaaaccaagagtcggggatgaagactgcagattcccttcgggtactttcaggacaccttatgcagacacggtagatggtttctttttcttgtgtagttaatttgtgtgattagatagtaaaggttaaccattcgtttgcagcttccctcctccccgccctaaccgctagcgtagagtgctttcattgattcagtagctagcccatgaatagttagccaaattcagttttcaagaattccagttcatctttcttgttcagaaatccattaacctacaaattacaactcagtgtatgatttaactctattaaagattcttttctttatgcaaattcaggaaatgcaagtttaaaagccagctgaccataatcaggtcagctctaaagagagttggcagatcaggtttgggtgatttttcccttagaaaattgactgtttctataaaagaagaaacatacagataattagcataaatgctgctggcccttgtgttctgagcattgatgctaattttttggtttgtttccatgttgaccctatgaagatcgaatgggtgatggggtcaggcttgaggggagattgtccttagtaagtacaggctggagggtcactggtgatgccactgtgactgttcatggccatcgtgtgttagcagagaacccaccagtgctgcacctggtagccctacctagtctttttttattgaaccaaacgcaaagccaagggagtgatagttctgctgaagagcactttagggggctcagcgttttgtgtttgtttccctaattctatggtattttttatctgtctggcagagatcttgtacaaccagataaacctgcaagtcccaagtttatagtgacgctggatggtgtccccagccccccaggatacatgtcagatcaagaggaggacatgtgctttgaaggaatgaaacccgtaaaccaaactgcagcctcaaacaagggactcagaggtctcctccacccacagcagttgcacttgctgagcaggcagcttgaggacccaaatggtagcttttctaacggtgtgttgagagctcagattttcagggtgctgtcattgtgaagggaatctttgacttgtttctctaccttgaatgaatattggttaaaggccttgcttttatttatattcagtaatggccttttttcttctttcagacaaacccaccaagtacatttcagactctttttcctgtgtctttttcataggtgggctgttactccagtttgaaaacggagttcagccatggaacctgagagacctcttccgcttatgctggctaaaggatgaaccaccattcttgttgccttctttacctttgtattttcttcagaaactgtactgccactttgcccttttatcagcaatagtctcttgcaattaacttgagagaaaaatttagatttgatgctatttctacctcagtgaaatttctttgaaaggagtttctcacctaatctatcaagatcttggaactgtttaaattaatgttgaagagtaatatttagcagaactcagatgaactcatttcagatagcaccatagtttttggcaggtgacagtttcttatcaccgtttctttcactgggtatcagtggtagctgcaacgccactgatcatttccattcatgatagagaatggtaattatgttccttatatcttctaaaatatttagaagcacctcttcattggcaggagggataattactcaatcttaaaagcgtacagattcaaaggaaaaacagtaatggattttgaaacatttccttgagtaatcctcttcttggaagagatatgaaaatgtattgaatacctttctcgatcattaaaaatagaatagacttcagagggaaatcatatgttagtggagcaataacacttagctttattttaattggttgcgtttcctactgtgaatcaatgacgtagtgtcgtggttttgattagtggagggagttgaaaatctgaccctatcaacaggaagaaaaacttaaaaaatagtaaaagctgcagtaggcagtcccgatttattgactctgtatgttttgtctaaagagaagactccagtgttttcactactcttgattttcaatttggtaccttaattttttggtctattaggatctggtttcatttaaatgtaggtgtccatatgaggctttatggggtatacatgtagcagcagtgacaccataaataatatgttagtaaaaattcttgccagtgctgtggccattgtgctgacagccatgatgagtggtgagcctcctttcccattgctttgactggggactcagtgtttccctgctgctcaaggatgaagctttgtaagattagcataggggtgtggctggagagactcctgcagaacagttctcaggagtctctagtctctgcaccacttcccctgtgagcagggagtttgaaactgcaattgcttctggttggttttatgttgggttgtttcaaggatgctaccaacaacaacatctgttttaacctgctgtcttttcactcactgtcatatggcagcacagattttatagcttgctttctttgttttttttttttttgagatagagtctctctgtcccccaggctggagtgcaatggagccatctcagctcactgcaacttctgccttccaggttgaaagccattcttctgcctcagtctcccaagtagctgggattacaggcatgcaccatcacacctggctaattttgtagtttaagtagagacggggttttaccatgttggtcaggctaatctccaactcctgacctcaagtgatccaccaacctcggcctcccaaagttctgggattacaggtgtgagccaccgtgcctggcctatagctttcaataaaaggtgaatttgcctcttaaaatttgaacagaaagttttaatagtttacaaagtcggtgtcagccagtgaagactaggggcatgaccttcgtatgacttaatgtttttaaaagaaagataaagtttctttgtaaggtattattgtaataatcacatttctttgtaaagtattatattgttcctgagtatctagctactttgctttccagctaggcttctcttgggtattctcttaatcttttatttgtactgggttcttgtgtatatattatagtctgctgtgtgtaatttattataggaaaagggtaagacacatttactttgcggggatgacacaaaaaacctgtaaaaattagagaaacttccagtcatctcacattttctttggaaccgattattcttgtatcttagaactaaaatgacttatactgttttgtttttagaaagggtatccctcctgttgcccaggctggagtgcattggcacagtcatggctcactgcagcctccacctcccaggctcaagtgattctcccacctcagcctcctgagtagttggttactacaggtgcacaccaccatgcctggctaattttttgtattttttgtagagatggggtttcaccatgttgcccaggctggtctgaaactcctgagctcaagtgatctgcccgcctcggcctcccaaagtgctggggttacaggcatgagccaccacatcctatttaaagcttaaataggacttttactatttttaaagtagcatagaaaactgtttgtatcaggcatagtcataattgctctttgatgctgctcctatctgggctgcatgactacatttgtgtgccttgttctcctgtagtgaggacagaatgtgggtcactggaacagtaagtactcatagaactagctgctgctgctattacgactggttgcctgttttgcattttttccgtttaatcatcagactctaaggaagacattattttctctttgtatagatgaggaaacagaattccaaaaagttagctaacatttgcacagagtgtctggctgagcaactaagtggcagagtcagattttaactgacctctggcaagaggactagaggaatacagttgaagtgatacttgctttcatgaacatgaatgtgaaccataatacataatacccatgatgctattttgtggggagtttaaggtgtctcagtccagaaattagcagctgattattgcctgtagctgtaattttacttattcagtgttatttaataaattgccagcattacaatttcgatgaaggcagatttttggcttactgaaacaggataaaaatctggcaacaggggtcccactttgccctgtcatagtaatcgaagctgtgattggatgtggcacagggagtggagtggatgggtgtgcacttgctttccaggctgctgctccccgtctgtcccttattgcatttatcatcttcagcccagtcagtcttgctgttaggggaactgcccagtctctgtaagtgatggcatttgtgaccccattgtaggtaaaaatgttttcccctttttagacattgctggctgagcgcggtggctcatgcctataatcccagcactttgggaggccgaggtgggtggatcgcttaagtcctggagttcaagaccagcctgggcaacgtggggaaaccctgtagccaggcgtggtggcacgtgctacttggtaggggctgaggtgggagtatcacttgagcctgggaggcagaggttgcagtgagccgagattacaccactggcacaccactgtactccatcctgggtgacagagcaggaccctgtcgtaaaaaaaaaaaaaaaaaaaaaaagtaaaagacattgctgagtttcgcacctggacttacagctcagcaggtgggaatccttttgtatttgggccactcatcatcttgctggcgtgtgaggattcacatctccttatcaccttacctgttttcagtttttatttaattttattagttccccacttgacgtccttctctatttttaattcagctatgaattagtattgagaattagaatttttggtgaaaaatttggccgtagttgcagagtcactgtcctctttccttttcacagtgagaactgttgtcttcttcctggcaaccttttataggattctatggccagtgttaatcccataatttgagctcacttattttatatgactgtacatttaacagaagattctaagacaggtttgagggaaatatgttaaaggtgctgtgtactgaattgatcataatgaatgaaatacttttatttcctttccctttgtagctgagatgagtgaactgagtgtggcacagaaaccagaaaaacttttggagcgctgcaagtactggcctgcttgtaaaaatggggatgagtgtgcctaccatcaccccatctcaccctgcaagtgagtaccatccccccatctcaccctgcaagtgagtaccatccccccatctcaccctgcaagtaccatcccccatctcacctggcaagtaccatcccatctcacccagcaagtaccatcccccacatctcaaccctcaagtgagtaccatcccatctcaccctgcaagtaccatcccatttcaccctgcaagtaccatcccccatctcaccctgcaagtaccatctccccatctcaccctgtaactaccatcccatctcaccctgcaagtgagtaccatccctgcatttcaccctgcaagtaccatctcatctcaccctgcaagtaccaccccctcatctcaccctgcaagtatcatcccccatctagccctgtaagtgcgagtaccatcccccatcttaccctgcaagtaccatcacccacttcaccctgcaagtaccatcccccacctcagcctgcaagtaccatcccccacctcagcctgcaagtaccatcccctatctcaccctgcaagtaccatccccatctcaccctgcaagtatcatcccccacctcaccctgcaagtaccatcccccatctcaccctgcaattgagtaccatcccccatctcaccctgcaagtaccatcccccatctcaccctgcaagtgagtaccatcccccatctcaccttgcaagtaccatcccccatctcaccctgcaagtaccatcccccatctcaccctgcaagtatcttctcaccctgcaagtgagtaccatccccccatctcatcctgcaagtaccatcccccatctcaccctgcaagtaccatcccccatctcaccctgcaagtaccatcccccatcttaccctgcaagtgaataccatccccatctcaccctgcaagtgaataccatccccatctcaccctgcaagtgaataccatcccccatctcaccctgcaagtgaataccatccccatctcatcctgcaagtgaataccatccccatctcaccctgcaagtcatagccagctgattttggctttcagtttagtgtctgtatcttacaccttattttgtttttgtttttctgtggacaagtttttagttttataactaaatggagttacaattaccatggccctctccagagtagcgtatttcttgttcatgtatgtttgttgagaggcaagggtgggggggctttgtttgtgcctcggacctgtgagatactgaaatacctggggttccttaagaattctgtacgtttaagcagatgggtatatggtaactgccccagtttgtatgcattttggccacacgcagtatacacagattttgaggagttgagggaaaagttagttatgggtaatgaaaacattttggacttgggttaaatttttccttacaagctggctggctcaatgtaatgagctttatgagatggctttttggggcttcttttttttgccgggggtaggtcctatggatggaatcttcatttttaattcttttaaggaaatgatgtgggaataatacagctgtacatataaggagagtatgggatgagtctttttgtatcacaaagccttgcatagaggatgtgtttattgtattaatgagttcactgcataaaatatataccttttttattaagtggtgtgatttttatcacaaaagcttgtctttcttggtggcttggcttgagttaaaagcctgtgtttgtgttatcccaagctttggaataaatgattgtgtcctattttgatatatggtcttattttaaaatattctttttgttgctgttttttttgcatttctcaaaacaagtagtgatggggagtgtaaagagcccttatacacagaactaataatgcattgagaagattgaatatgaaatatgctttttttttgttttgtagagccttccccaattgtaaatttgctgaaaaatgtttgtttgttcacccaaattgtaaatatgatgcaaagtgtactaaaccagattgtcccttcactcatgtgagtagaagaattccagtactgtctccaaaaccaggtgagtgagtgactgtgctactacatttgggtaaaaaatataaaatggcattttgtgactgtaaatggaattgaacaaacaaaagatggtttcagaaataattttggcaggatcagttaatccaaccagtctttaaagagcaagtgtgcctatctgtagtattccgaagtattttgactagtgaatatataaaccttaccattctaatttaaaaatggttttcactttcaaaaaaaacatcagtagactgcattaaaaatgggttttccaaacagattggagatcagtcctggtttttattttgttagcagttgcaccaccagcaccaccttccagtagtcagctctgccgttacttccctgcttgtaagaagatggaatgtcccttctatcatccaaaagtaagaacttctattttctcaaatcaatttagtgacaacatctcaatttcctcatttaacttcttttttgtcagagttactacattggtgcaaaagtaattgcgatttttgccagtaaaactattaagttgttcctcgtcactgaacctccatctggccccttaggccaagtggtctgaaactgttcaatgttagtatcccaagcactcagtggggggaagcatatctttgctagtcacattttccattattccctgcatttaagtatatggatgggttttagcgggggctggggggcagtttgaacctaatgtcagaactgagatgaagaaatccagtaggtactgcttaaaaccatccaaacttgtactgatgatggttgatgaatctccagatgtttagttggtcaaaatgaattatctccttcttgccccggtagcttgaggaccatatgaaggccttcacttgcccccatctgtaactgggcgtagatgagggtactcagtgaagagtgtaagggataattagaagtttttgtggtatgctaaactaccttttgaaattgtacttgctgtgattctttgactagaattttgtgtctcaaggttaagtccatttttcaaggcttcactagtattaaaatggtccttatagatggaatctcttactctgttaatggttagggtgggctggttattgtctcctaagttgtatgttggccaggtgaggtgggtcaggcctgctatcctagtactttgggaggtagaggcagaagtggaaggatcgtttgagcccgggagtttgaaaccagcctaggcaacatttaagagaccccatctcttaaaaaaaaaaaaaacaggcttggtagcacacgcctgtagtcccagctactcgggagactgaggcaagaggtcatgccacttcactccagcctgggtgacagagtgagaccctgtctcaaataataaaataatgtgtttacttatattagccttgtggatattgttgaagctctgttatctctattcagcattgtaggtttaacactcaatgtacaagaccggactgcacattctaccatcccaccattaatgtcccaccacgacatgccttgaaatggattcgacctcaaaccaggtaaacattcaaattcgtttttctcatgtcagttcaaattcttttttctaatttgcagtttctaaatttataagcacacaaaattggaaactagactgttactttgaatttttttctttgctgtttaattatagaaggctcctttggcaaaataatttactacatgggctaaattttacattatccagtggttacttttttaacctagattatcttgctctgttgcccaggttggagtgcagtcacactatcatagctcactgcagcctcaaacccctgggttcaatccatcctcccacctgtagctgagactacaagcgtgtgcctctatacctggctaattttttttattttaagtagagatggggtcttgaactcctgagctgaagcgatatccttccaccgtggccttccaaagtaccaggattacaggcatgagccaccacacccagccagattttaacttctcattatatactacgcaaacatatactaaggccagcaggagtatatatatgtgtactgtacttgaatttcacatccattttcttcgacattagcaactgggagatactgaaaggaagtttcaaaatattttagtgtggccagaaaatttaattacatatggtattatcttttatctacctgacataattgaattatttttaaaaatctgccatttatattgtaatcttatgaccaaatatttattgcttaaaactagtcaactttttaaactgagatatatggtatatatggatacaaagcagataattaaaacaatttttggttctgttcattcagcgaatagcacccagtcctgcctggcagaagatcatgcagtttggaagttttcatgtactgatgaaagatactctacagaacttgtcaaatctttgaaacttggaatatattgctttcataatatgaagttttattgcctatctatctgaagtgtctaatttttcaagtttgtaagtttattatgtggttttaacattgggtgtttttgttttgtttttactatgaaaagacagcttaaggaagagctaaattctgttaaaatatttggggcatgtttgtgcactgctgttgtgaggatcagcatatgaaattgacatcatggttagtcatggtactgcagcttagggggctacacggttgctgtgtgagtggagagatgcagtgaggcagttgtcattattctaaaaattgtactactttcacttttcccaaagattatataatgttcataatccaccatgaaaacagcattggccaaaggtactgaggctgcttaaaatattcaattctgctttttaatttttaagtgaatttagtttgaaaagcatgattatacaggcctctcaggctgagtgctactttggtaaagttcccagttttcctgccttctgtgacaggatgaatgaggtgggtatggacagtggaggcagctggaatggcaagtgcagaaaataggaacagttctatacagtgctctcatttactaataacataatgccttctaaataatttttttgggaaactacattatcacaaaattatacaaatttttttacaagtatttacatactgtatctgaaaacagactttaaagtcacaagattataaatgtacatatatattctcacattctgaaaaataacattctcagaatccacagaaaatatacttagttactactgaagataatttttgaaatgtaaaaattagatttaaatagtatattttaaatgacagaactataattacagagatcagatcagataggtaaactgcaagatagataggatgaaacttttggcctactgtattacttacagagtttttttgtgtgtggtttttaaaactgttaaggcaagaagtgtcaaatgctttagagttaaataacagatcactgatttcaaagacttggtgtatagtgttaaaaattaaagcttaaaaggtggttagaaaagtggattaatgcaaaaggggtaataaagactgcaacattctcaggaccaaattaaactgctaaaaaaaaaaaaaaagttcattgacttgcttagtcgtatactcaaatgatgataaacctacatgtgcaaaggctcacgtttaagattgtcaagccagcagtctactgttgtgttgccattgcttttccattgggagaagaaagaattaaccagtcattaaaccatttggtaagttgcactttgctgtgctgatcccacaggaaaggcttgaaacacgagaagcagcaaagacagagcacacaagtgcataaggctgttgtcttcggcttgggtgaaatgacagttcctcttcattctaaaggtttactccattgaatttaaggcatttgttcattccagtgttgagatgctttgcatctctgcagaagaaatttattttaaattgtttaaatatctggaaatacttttagctatcatttataaagatagttttgttctcagtttcactataaattatagaacaaatgggaaacaagggtttaatttagttcagccattttacaaggaaataataaaatactaaaatctgattgttttttgctatttaatagccactgcccagacacatatttaagagtttaatctttcagttgctatggcttatgaacaagctaaggttgaccataaaacatttgttggatgacgtggtttaaaatgatcaccacaaaaagggaccacaaaaaaaggaaggaaatgagcatggttggcgattggaagcaagggtaccagagggcacagtgtgctttggcatgcattttatacataaaatgaatggaacaaaaggtgccagaagtcccaggttacacaatcaggagcttagatactgcacacaaaaataattatctgggttaaaaaagt

SEQ ID NO: 7359 - DNA, 1502 bp, Homo sapiens
gaaactgacagcagcagtgattaaggctgacttaatcaggttggccactttgaaggacagaaatgcagtggaaacagttttattctatgtagtttacatgcttaaggttacagagtttctacctgcactgtaatggaaatataatttctctgtagccaaaagctggcaaacttgacccagagggaaaatttaaaactgcagcaggctcaaatgtagagtatttttctttttatgggcaggttgttcagggatttttttcctcctttaatttattgactgactgtaaatacatgagtagaaacttaatagtcatgtatttcaaaatttggcttaatttaggagaatccactgatgaacaagtaccaacttacgtttcaagcttcttagccccataatcagtccttcagccacagctatttagagctttaaaactaccaggttcaatcactggttatgctttctgtgatgtaatttagtcatttctatttttagtattaaccaagtattagacacagaaaataggtattaagaatcttcatatatcctgtcagaccaaatgggattccaggaacctaaagcgatctattatgctataaagataattaacacattaaaaactcatagggtcaatacagcatcttaaacctcacacttagaaaaatatatttttaaatagcagtctacataattttcaatcttcaggaaactacagataggctagacagcgaattcctgaatgatgagtagtgatctttggcagcatttaaagtgaaaagaaataaggatctaagaattcagccctaatccactaaaaaaaggaattctaactgacaagtttttacaaatggagttgggctcattcattttggaaataaacctatggagtggcacacatctaaacaaattttcccaatagaaaaaaggctataaaaattttattccaagagtgattaaattgtataatgttgtatatgtgaatttaacacttttgtttacatgttaaacaaatgtgtatatattagactacattaaatatgcaattctttcttccagttaaatactgttgctccctaaaacccttacattgtacaccattgggaatgattgttcatcatactacttttccattagtgaggctacagttatgttttaaatgtgcgattacagagatggcatctgaacataaactgatggctcgaaaatgaaaatggaaatgtagcagccatatactgctaactttggatctgttcctgaattcaaaactactaggagaaaagtgtcctttataaaaaaggaccttattaatgcctaaaaaacatcatattctctaggaaagcttgtgtctgtttccttagggaaaatgtttgccttttaaaaactgtgatcctttaggatgatcatgactttccctttccttatggaaatgcaagaataaaatatttcattaaacaatgaaccttgaaaataaaatataaacattaagaaaccattttgctaaaaag

SEQ ID NO: 7360 - DNA, 744 bp, Homo sapiens
aacattgcacagaatatattattatactaatagcttccatatagatgccataggaattcacaagaaaggattatatgagattattaaaggaccacgtgacagaccctaggtagccccacaactcctgcttctgctgtccccacaacccactcctgacccctagtgtggattgcttaggtaataaacatggcaaaaataagaggtttggcagatgtaattgaggtcgtgaatcagctgattttggggtcaggtcctgggtgggcctaacttaattaaatgaaagcccttggctggtctcaaacttctggtctcaagtgatcctcccacctctacttcactgagctgaaattacaggcatgagccactgtgcctggcttttactggcgtaagtgaacagacatgttagtgaaccctttggcaaagaactgtgggcagcctctaggacttgagagtggcttccagatgatagccagaaaaaaatctgggtccttactcataaagccacaaggaaatgaattatttttttttttcctgagacagggtctcactctctcatcaaggctgtagtggcatgatcttggctcactgcaacctctgcctcccaggctcaagcaatcctcccctctcggcttcccaactagctgagactagaagtgcatgccaccacgcccagctaattttttgtacttttgaagagacatgtttttgccatgttgcccaggctggtcacgaactcctggtctc

SEQ ID NO: 7361 - DNA, 1177 bp, Homo sapiens
ctcaacgaccccatctacaactcagttgcctggggtccttctcgaggccggggcggctacattcccaagacaaacgaggagttgctacgggacctggtagcagagcaccaggccaaacagagcctggatgtgctagatctctgtgagggtgacctgtccccaggactcacagactctacggccccctcctcagagttgggcaaggacgacctggaagagttggctgcagctgcccagaagatggaggaagtagctgaggcagcccctcaggagttggacacaatagccttggcatcagagaaggcagttgaaacagatgtcatgaatcaagagacagacccactctgtgcagagtgccggctggtgcgacaggatcccttgccccaagaccttgtgatgttcctacatgccctacgctataaagggccaggctttgagtacttttcaccaatgcctgcctgggcacaggatgactggcaaaaggactgagggtgtggccaatggagggattgcttcttgggttgtgacaaggatgggctatagggcaagggctgaccccatgggctagtacttggggtttctataggaatgaggacgggcttctaaagagacctgctcatacttgctacctccttccagtgggaatttggagactttttggtttgtaaatatatccctttttctaacatctttgatgtctggttttcttccggcttcttttttattactgatgtaaaattcacataacataaaattaaccactttaactagccaggcacagtggctcatggctataatcctagtactttgggaggtagaagtgaaaggatcactggaggccaagagttcaaggttaaagtgaactgtgattgtgctgctgcactccagagcctaggtgacagagtgagaccctgtctcttaaaaaaaaaaaaaattaaccaatttaagatgtacagcgtagtcacatttagtacattcacagtgttgtacaaccataacctcatatatttccaaaacattttcatcaccccaaaaggaaacctgtacccattaagtaagtggtcactttccactccccttccaccagcctctggcaaccactaatctactttctgtctgtttggatttgcctgtttattctggacattttatataaatggaatgataaaacatgtga

SEQ ID NO: 7362 - DNA, 272 bp, Homo sapiens
attttgtattttttagtagagacggggtttcttcatgttggtcaggctggtctcgaactttcgacctcaggtgatccacccacctcagcttcccaaagtgctgggattacaggcgtgagccacctcacccagctggtaaatgcttttctaatttcacattttctagatgagttagtaggatttagaggttaagtaatgtacccaagatcgcaaaactggcgaatggtagagctggagtttgaattttctgacactggtccttatcactccac

SEQ ID NO: 7363 - DNA, 5862 bp, Homo sapiens
aggcgggtcgagtctgaagaatccggcgatgaagaagggaagaaacacagcagtggcatcgtggccgacctcagtgaacagagcctgaaggatggggaggagcggggggaggaggacccagaaggtaccaggcccagctcccttggggacatctgctggttgggggatgtgggctgtgctgcacgtggtctggccctgggtgtgggtgctgtgtcggtctggagaaggactgccgtgctccttaggggtcctcagtggcccagggcaggtggatatgctctttgaggtgctccttcagcaggctgactcattgatggcgtttgcaaaaaggatgtggttttttccaattccactgaaggcaaatcctagcacaaatatgggtactagtatgccgtctgagacagaaccatgacattgttggccagatgcagtggctcatgcctgtaatcccagcactttggaaggccaaggcgggtggatcacgaggtcaggagatcaagcccatcctggccaacatggtgaaaccctgtctctacaaaaaatacaaaaattagctgggcgtggcagcgtgtgcctgtaatcccagttactcaggaggctgaggcaggagaaccgcttgaacccaggaggtggaggttgcagtgagccgagaacacaccactgcactccagcctaggtgacagagggatactccttctccaaaaaaaaaaaaaaaaaaaaaaaaggaaaaagaaaagaaccgcaatattgttatattaaccatatgtttaggaaatgagattcgaaataaatgttatggctgactgctgtgtttctatgtcctaccatagcaatagaaacctttaatctctgagagaaattatttctgagtcttgccttaccatttttataggcctgaggattgacttctaaagtgcctagatgtggccgggcgtaatggcttacgcctgtaatcctagcactttggaaggccaaggcgggtggatcacttgaggtcaggagttcgagaccagcctggccaacatggtgaaaccctgtctctactaaaaatacaaaaaaaagaaaaaaagaaaaattagccaggcatggtggtgtgcacctgtagtcccagctactcaggaggctgaggcaggagaatcgcttgaaccagggaggcagaggttgcagtaagctgagatcacaccactgcactccagccggggtcagaatgagactccatctcaaaacaaaaaagtttctgaacagtatgcatgcatgtatgtacttttacctgctaaagaaagaaaacacatcaaacgggctgagtctgtccaaacagcaggtttaagaaggatctatacattttgtgttttctagatttgtatacagtgtatgaataatcatgcatcccttatgaaaataaatttatgaagaaacaaacctaatttttaaaataacattgtgctctctgtgccagcaaagatgattggtaactatggcaacctacttttaagtcacaaggagattaccacaaaagtaccagtcacattcactttggaactttgaggctgatgttctggaagtgatgtgggtggaataaagtgcatgggagtgatagatggaagcttccgtcatcgcctgacttagtcaccaacagtggagcggtaggagcccccgctatcctcagatgggtgctgctgagacattgggtgtttatggaggacttgagagttggcagagcaagccttgtgtgctttctttccctggctcactagcacaggctaatcatgttgtcatcatgttctgtaagtacaccagtgtggtaatgtgttatagatgaggaaaatgagactctctgcagcttgtccaagggcacacggctacaaggcagaccagctggcctggcctggaaaaatccaagttttttcttcgagatgattagctgattatgaattttctgggaatatgcatttctagcccttagaggagccaagacttgctcctacctgtatttatttaagtcttaaattcaattaaaacaaatttaatcatgtcaactgttaccttctacctattttccttaaattatttttaaaatatgatgaatatataatacactcagaagggcattctaggctggaaacctgtttcagaggttagctgacattttgagtggtgagcggccagccctgctggctgtattacaaacaagaccccttaaagccatgcgaccgtgtgtcctgaggagcctggcacagcccgtttctgcctgctggcccagcataactgtgcccttctgctctcaaagggtcctggtttggactacatgacctgggcgccctgccttaattgtagcacctcttccagtgcaacttcctgagtttatgaacggtgacttgacactgtcttttgaggtgatttgttatctatctcttggttttgcccagttccttttatttaattcttaggttggtatcctttacagttgtggataaactatagtaaacttttttttttaactaaccacagttgatggttatagaaaaggcatagtggaaaacaatgaagtgaatgcaaccatgtgggatcatgactttgttaagctggtctgatgtcaggtgctcctctcagaggcctccaggtgagaggaggagccaggctggaggagccagcccttggcatggggtccagggctgtgtgagctcactcccctgcagaagcaagtgcacgtttgctctaggaagagccacagtaacagcactgacagccctgtaaggtagtgacaatgacaatctgtttacaggagaaagaacatcctatgcatataattcacagactccagactgggagaagcactacaagacaaacagcttgttttcctacaacagaaaactgcaaggggaaaaaagaaatttaagaaaaatgctgggctgggtgcagtggctcgtgcctataatcctggcactttgggaggccaaggtgggaggatcacttgaggctaggagttccagaccagcctgggcaacatagcgagaccctgattgtacaaaacatggttttaaaaaattagccaggcatggtagcacacacccgtagtctcagcttcctgggagcctaagacaaggattgcttgagcccacaagttcaaggctgcagtgagctatgatcacaccactatactccagcctgaacagcagagtgagaccctgtctcttaaaaaaaaattaatttaaaaaagtttttaaaagagaaataccatctagtcacaatatacagccttatttggatcataatgcaagtaaactaaggaaagaaatgttaagacagttgaggaaatacgaacactgacaatctttggtgatattgaggaattactgttaatttttttaagtgttttgaggggtgagtgtgcgtgtttgtgtgtctgcatgagtctgtgtataccactgttgtgcatgcgtgtgtctgtgtagtgtgcatacgtgcctgtgtgtctttgtgcatgcgtgtgtgtgtgcatctgtgtgtgtcttagtccttttcagcacacatgctgaagtaggttccaatgaaatgaaatgaggaagtgcttaacagggaagctgtcgcctcagcagggagagcagctctctccctcctccgcacagaggatgccggctccggggtagagagtcctcgtgaaatccaatgggcttctctgctggagtgagttcaccagtctccccactgagaagtgtgtttaaattattcagtgagcttctttgatcctatctgttgaactatgttttgttttgttttgctctttgcagagggaagtgtttgtagatgctgggccaccttccaaagcaataaaaggcccatcctagagcatctgatgtgcccagcatggtctagattctaatggcctggtttattgccacaaacaaaaagagaaaagctacatgggaggcaggctgctgccagttctgcagctctgggagtcacggaaaggcagtagtgctaccctgctcacctgcactcagctacttcctcccctccttcccactaacaggttcaaaacacatttcctttctcaggaagttcaaaggcacagatggatgtttggtgacctttgccaatatctgaattcaggaaattcagaatgcttaaaacatcactattgttggagcagggtctaaccctgccacattctccaggtcctcagcaaaccttcccattggttcctcctcggggtttgagctggctctgggcaccaaacagccccagacctcagccagaagcagctcttcaccagtgcctcctgttaatggggttctgaacaaatctctttttcttattttttcagaagaacatgagctgcctgtggacatggaaaccatcaacctggacagagatgcagaggtaatgccgcctgctcagcccagccttgggcgtggtgatggaccaccctgtcaggttatcttgtatgagattagtaagttatttccctagagaggtggcctaagcctcccttggttgagtcagagtcccgtgttcatgtttttcttaccagtgattgttatccccatgtctattcgacccttgaggattgtgtggcagatgagatgcctttgactcatacattgtctgggtctgatgattacattatacatgagggtcccaatggccccaggctgtgtatgactggccactgggcctcctgagcccacagcgtgtctctgatggtgatgggatggggtgcatatcctcagaacctgagcttatgttttgtgcatacaggatctaaggaatgagaaaaagatgtcatgtaccaatcattttaagggccagttttacataaaacttagtcatcactaagccaaagagcccccgcagcacaccttgtcactgacatctgtctgctgcagacccacctggcactgcctcccccactgctgcccacttccaggccgcctcttctaggacgacacaggtctccagccactttgctatagctgagtatagatttctgctttgtttcaggatgttgatttgaatcactatcgcatagggaagattgaaggatttgaggtactgaagaaagtgaaggtgagagggactcttatgaggggactatgacgctcacccataggatgtggataagtccagaatcgagcagtcagtcctgagttgtggtccttgtcccagcctgtgggcggcgtggctgcctccaccttgtagcaggcctttctttactgggagcacagcaggtgtgagacagcagtcgagggacttgaggcacagccctggggctggctctcctgagcccaggcagccagtgacctgtgactctggcctgcctcggtttctgtgcctgtgttcaattaggcactcgctgacttttacagtcctccgtgcctctcattggaatttgtcaaaattgagcccaccaaaggttcttatgttctgccaggaagtggcagacacccacaccccaggccaacgcctccctccccaactggcctgcttggtggggagcctgcctcctgcctccctttgggttcccgcccttcctcaggtgtgttaaggaattatagcttagtgcccttgcccacctgcctctcaaaggtcagcacctttctaggaaacagcaggagaatgaagacatgtccttctaccagaaaggcctttcttgtgtcctccagtatcagctgaggccttctcgtggcctcccccttgcctgtgtcaattgtcccttttcccatcccccagactctctgcctccgccaaaatttaattaaatgcattgagaatctggaggagctacagagtcttcgagagctggatctttacgacaaccagatcaagaagattgagaatctggaggcgctaacagagctggag

SEQ ID NO: 7364 - DNA, 32249 bp, Homo sapiens
gcccgcgctaagggttgctagggacgcaccaaacacccctacggcgcttcggaggagccaaaggaataatgggcgcctccgcccccgggccgggcagatgcggtttcctcccgactcgcgatcaaaatgggtgagtagcgcagagctcgcctcttggaggcctctttctgaaggcggaggacgcggggcggctcgttcatgggccgggtggctccgcagggtagacgaaggctgcagcgtccgcactgggctgggaacgacttgcaaggggagcccagctggcgccccggagccagccagctggctagcggccccaccagcgcaagtgccccgcacctgcccgcctgctccgagcgtcaagagaaggcggcatttcgcatgggtaaaatccgcgcggggacgccgggagaatgttgttgctcttgccgttcggcccattgtacagacgcagccagcgaggctcgcagaggtcagggatgcacgtaggactggcccgcaccttgcagccacggaaagatccgcctggcccgcggcccctccacgcctccgaggtcgagacagtgacataagtcaactctcaagcccagggcgtctctccactctgcctagacgtccactccgtctgcctgcagctacggctctgtgcgtcccgcttcgactccctctgctttccttcccagcttctcgcctccagactgttccggctccgccgcctgaaattacctgctctgggggaggcgcggcgcgcggcctcatgacggaactacaactcccatgaggcgctgggcccacgcaggcgcggcgcggctgaagtcgccgcgccggaatcccattggcagggccggctctgaggcgggagccctgattggctgaggggtctgaggcgacagattccggaaaggggaagagcagccaacatggcggcggaacgcggcgcggggcagcaacagtcgcaggagatgatggagggtgagcggcccctgcgggcggcggcccaagggcccagcgggcggggggagctgcgggctggaactgctccgtgcctgagagaaactccacgtcctgcctctggccgccgccgcgcggccccctgacagctgacagccggacccgggggagcgggggaggcgctggacctcgggggagccccggcccgggggcggcagcggccgggaaggacccagagctagggggagagcggcggcgcgaggccaggccgggggtggggctgaatgggacgcggtggctccattcagtccagttggagcctcgccccgagcctctgagattgacgggcgggggagcctcctcggtcagctgacgaggaaactgaggcgctgggatctaccagagtctgctccttggttcacgtggtgagggtggagaagggtcttctcttgaaatcgaatggactgttgggaaggggtaacaaggaaccggaagattgagttacacaaggtgatacctgttttcaaagctgtcatagttccaaaaagtctgaattcaactttcttcctcctcattcactttgttggaaaaaaaaaccacatgcatatatgtatatgttatacgtacacatgtgtttataattttctgcatatctgtaggtacagtcatatacgtgcacgtacagtatgtgtgtaaaaatgcgtgcacacacccacttagcaactggggaatcagttgtgtcatcagcttaagtacttttgggtcccatggtttggtgaggggtacagacctcccagaagagcagtcactgccttatgtgaaaggggtagggaagaggaatgtggagctggggaaggagggcgggtgcagcaggaaggcctgacatgttagggagtggtgacagctgcagaagcagggcgagctctgagctggagcctgaagaataactcgaaggcaacgaggttggggatagggtgagggaaaagagcaagaatcactcaagacggagaaaactgctgtcaaaaggtgtggaggagagtttgaccaaatcgtatgtggtggggatgggggcggtagtgttaagggtcttggacttcataccctttgagtctttttaagaagcgcctcttcatatcctcccactccctcttcagctgtttccatgtcttggtaaatgacagatataaaagcccggcttttctcactgtcccactcccacccatgtcctgttagtcaaggagctctgacttttacttttgaaagtatctccaaatctccgatacgtcctccattcccattgccagtaccttaactcagaccttcatcatctctaggctagattgattgtccctgttcaccagcccatcatccccagtacaccaaagtcattttcttacatgcagagccactgtcccatgttccagaccctctctgctgccctcaggcttcactttggccaaccttcgttagctaagcctttgctaacctcacaccactcctcctcttactggggtttttgtgccagattgtcatgcagtagaactttctctccctgagcctggaccaccaagtgacctgtgcctggtggtgactaatttgttatatatctactgcatgtcatgcacgtgctaactgctcttgtgccttttctaatttaaccgtgacagcaacttgctgaggcataggtgctatactagctcccttccacagactaggagattgaggctttcaaatggaaacgatttgccaaagctgcatctctagcagcaagatgcaaactcaggaagagcattccagaaatacttttggactcaaaagatcagatttggattttagaattagatcagactctctggcaggggagaataggttaagcagggcaagacaagtcacagagacgagttaggaggcagggcaggagcccaggctgcagctaataagtaagtgagccaccgtcattgcgggggtagggaagaagagatggatttggaggttttggaggtgggttttataaggacttgttttctacagcaatcctttcttgggttttactttgctaggctaagcgggaagtacaaagatgaagttgaactttttccctcaaagagcacatctctttgtagataaaccatagtcaggaaagagtattttcagtatggttgataattccaagtaatgtgttagtgcctcatgttttccagacagacttccaaaagaggtcatgagtaaagttataaaaaagaaaaatgatttgacaaccttaccaaagaatttttacctgacacattgaattgccttattctttaattcaaaaaatatttatgaacctttaaaagccttaagttgctaacactctgtccagtgtccagtgtgaaagctcatttcacaccaatgagctttctgtgggcggtcagcactattggctgtattctccttttccttagtgatcctccctgcccacagtctgatttgagttagtcttgatttctttcagaacgtgggcctgtgaacttggctggttttcttagccagataaatagtggagcatggatggaggtatgtggcagaagggtcacagtggtgatcccccagcccaaaagtgaaaggcactcaggaggtgcttcactaccgggttccattagtggatttaatcacaggtgatccaaggctttcagaacactgggcaattcttcacaagctccttgagggcagaagtagtgtgttcctcacctaagtatccatgtgggctccacactctgctccccattctccccgcggccatatgcctcaaatggtgctgggacatgggagacactcagatgttcgttgaactggattcaacaaacatgtttaaatgaaatccttttgacttacaaccgggtgtttattatatgttcctcaaagtcccataaagtggatgtgaattctcattgacatgtgtgggttcagttgacaggcgggtcgagtctgaagaatccggcgatgaagaagggaagaaacacagcagtggcatcgtggccgacctcagtgaacagagcctgaaggatggggaggagcggggggaggaggacccagaaggtaccaggcccagctcccttggggacatctgctggttgggggatgtgggctgtgctgcacgtggtctggccctgggtgtgggtgctgtgtcggtctggagaaggactgccgtgctccttaggggtcctcagtggcccagggcaggtggatatgctctttgaggtgctccttcagcaggctgactcattgatggcgtttgcaaaaaggatgtggttttttccaattccactgaaggcaaatcctagcacaaatatgggtactagtatgccgtctgagacagaaccatgacattgttggccagatgcagtggctcatgcctgtaatcccagcactttggaaggccaaggcgggtggatcacgaggtcaggagatcaagcccatcctggccaacatggtgaaaccctgtctctacaaaaaatacaaaaattagctgggcgtggcagcgtgtgcctgtaatcccagttactcaggaggctgaggcaggagaaccgcttgaacccaggaggtggaggttgcagtgagccgagaacacaccactgcactccagcctaggtgacagagggatactccttctcaaaaaaaaaaaaaaaaaaaaaaaaaggaaaaagaaaagaaccgcaatattgttatattaaccatatgtttaggaaatgagattcgaaataaatgttatggctgactgctgtgtttctatgtcctaccatagcaatagaaacctttaatctctgagagaaattatttctgagtcttgccttaccatttttataggcctgaggattgacttctaaagtgcctagatgtggccgggcgtaatggcttacgcctgtaatcctagcactttggaaggccaaggcgggtggatcacttgaggtcaggagttcgagaccagcctggccaacatggtgaaaccctgtctctactaaaaatacaaaaaaaagaaaaaaagaaaaattagccaggcatggtggtgtgcacctgtagtcccagctactcaggaggctgaggcaggagaatcgcttgaaccagggaggcagaggttgcagtaagctgagatcacaccactgcactccagccggggtcagaatgagactccatctcaaaacaaaaaagtttctgaacagtatgcatgcatgtatgtacttttacctgctaaagaaagaaaacacatcaaacgggctgagtctgtccaaacagcaggtttaagaaggatctatacattttgtgttttctagatttgtatacagtgtatgaataatcatgcatcccttatgaaaataaatttatgaagaaacaaacctaatttttaaaataacattgtgctctctgtgccagcaaagatgattggtaactatggcaacctacttttaagtcacaaggagattaccacaaaagtaccagtcacattcactttggaactttgaggctgatgttctggaagtgatgtgggtggaataaagtgcatgggagtgatagatggaagcttccgtcatcgcctgacttagtcaccaacagtggagcggtaggagcccccgctatcctcagatgggtgctgctgagacattgggtgtttatggaggacttgagagttggcagagcaagccttgtgtgctttctttccctggctcactagcacaggctaatcatgttgtcatcatgttctgtaagtacaccagtgtggtaatgtgttatagatgaggaaaatgagactctctgcagcttgtccaagggcacacggctacaaggcagaccagctggcctggcctggaaaaatccaagttttttcttcgagatgattagctgattatgaattttctgggaatatgcatttctagcccttagaggagccaagacttgctcctacctgtatttatttaagtcttaaattcaattaaaacaaatttaatcatgtcaactgttaccttctacctattttccttaaattatttttaaaatatgatgaatatataatacactcagaagggcattctaggctggaaaccttgtttcagaggttagctgacattttgagtggtgagcggccagccctgctggctgtattacaaacaagaccccttaaagccatgcgaccgtgtgtcctgaggagcctggcacagcccgtttctgcctgctggcccagcataactgtgcccttctgctctcaaagggtcctggtttggactacatgacctgggcgccctgccttaattgtagcacctcttccagtgcaacttcctgagtttatgaacggtgacttgacactgtcttttgaggtgatttgttatctatctcttggttttgcccagttccttttatttaattcttaggttggtatcctttacagttgtggataaactatagtaaacttttttttttaactaaccacagttgatggttatagaaaaggcatagtggaaaacaatgaagtgaatgcaaccatgtgggatcatgactttgttaagctggtctgatgtcaggtgctcctctcagaggcctccaggtgagaggaggagccaggctggaggagccagcccttggcatggggtccagggctgtgtgagctcactcccctgcagaagcaagtgcacgtttgctctaggaagagccacagtaacagcactgacagccctgtaaggtagtgacaatgacaatctgtttacaggagaaagaacatcctatgcatataattcacagactccagactgggagaagcactacaagacaaacagcttgttttcctacaacagaaaactgcaaggggaaaaaagaaatttaagaaaaatgctgggctgggtgcagtggctcgtgcctataatcctggcactttgggaggccaaggtgggaggatcacttgaggctaggagttccagaccagcctgggcaacatagcgagaccctgattgtacaaaacatggttttaaaaaattagccaggcatggtagcacacacccgtagtctcagcttcctgggagcctaagacaaggattgcttgagcccacaagttcaaggctgcagtgagctatgatcacaccactatactccagcctgaacagcagagtgagaccctgtctcttaaaaaaaaattaatttaaaaaagttttttaaaagagaaataccatctagtcacaatatacagccttatttggatcataatgcaagtaaactaaggaaagaaatgttaagacagttgaggaaatacgaacactgacaatctttggtgatattgaggaattactgttaatttttttaagtgttttgaggggtgagtgtgcgtgtttgtgtgtctgcatgagtctgtgtataccactgttgtgcatgcgtgtgtctgtgtagtgtgcatacgtgcctgtgtgtctttgtgcatgcgtgtgtgtgtgcatctgtgtgtgtcttagtccttttcagcacacatgctgaagtaggttccaatgaaatgaaatgaggaagtgcttaacagggaagctgtcgcctcagcagggagagcagctctctccctcctccgcacagaggatgccggctccggggtagagagtcctcgtgaaatccaatgggcttctctgctggagtgagttcaccagtctccccactgagaagtgtgtttaaattattcagtgagcttctttgatcctatctgttgaactatgttttgttttgttttgctctttgcagagggaagtgtttgtagatgctgggccaccttccaaagcaataaaaggcccatcctagagcatctgatgtgcccagcatggtctagattctaatggcctggtttattgccacaaacaaaaagagaaaagctacatgggaggcaggctgctgccagttctgcagctctgggagtcacggaaaggcagtagtgctaccctgctcacctgcactcagctacttcctcccctccttcccactaacaggttcaaaacacatttcctttctcaggaagttcaaaggcacagatggatgtttggtgacctttgccaatatctgaattcaggaaattcagaatgcttaaaacatcactattgttggagcagggtctaaccctgccacattctccaggtcctcagcaaaccttcccattggttcctcctcggggtttgagctggctctgggcaccaaacagccccagacctcagccagaagcagctcttcaccagtgcctcctgttaatggggttctgaacaaatctctttttcttattttttcagaagaacatgagctgcctgtggacatggaaaccatcaacctggacagagatgcagaggtaatgccgcctgctcagcccagccttgggcgtggtgatggaccaccctgtcaggttatcttgtatgagattagtaagttatttccctagagaggtggcctaagcctcccttggttgagtcagagtcccgtgttcatgtttttcttaccagtgattgttatccccatgtctattcgacccttgaggattgtgtggcagatgagatgcctttgactcatacattgtctgggtctgatgattacattatacatgagggtcccaatggccccaggctgtgtatgactggccactgggcctcctgagcccacagcgtgtctctgatggtgatgggatggggtgcatatcctcagaacctgagcttatgttttgtgcatacaggatctaaggaatgagaaaaagatgtcatgtaccaatcattttaagggccagttttacataaaacttagtcatcactaagccaaagagcccccgcagcacaccttgtcactgacatctgtctgctgcagacccacctggcactgcctcccccactgctgcccacttccaggccgcctcttctaggacgacacaggtctccagccactttgctatagctgagtatagatttctgctttgtttcaggatgttgatttgaatcactatcgcatagggaagattgaaggatttgaggtactgaagaaagtgaaggtgagagggactcttatgaggggactatgacgctcacccataggatgtggataagtccagaatcgagcagtcagtcctgagttgtggtccttgtcccagcctgtgggcggcgtggctgcctccaccttgtagcaggcctttctttactgggagcacagcaggtgtgagacagcagtcgagggacttgaggcacagccctggggctggctctcctgagcccaggcagccagtgacctgtgactctggcctgcctcggtttctgtgcctgtgttcaattaggcactcgctgacttttacagtcctccgtgcctctcattggaatttgtcaaaattgagcccaccaaaggttcttatgttctgccaggaagtggcagacacccacaccccaggccaacgcctccctccccaactggcctgcttggtggggagcctgcctcctgcctccctttgggttcccgcccttcctcaggtgtgttaaggaattatagcttagtgcccttgcccacctgcctctcaaaggtcagcacctttctaggaaacagcaggagaatgaagacatgtccttctaccagaaaggcctttcttgtgtcctccagtatcagctgaggccttctcgtggcctcccccttgcctgtgtcaattgtcccttttcccatcccccagactctctgcctccgccaaaatttaattaaatgcattgagaatctggaggagctacagagtcttcgagagctggatctttacgacaaccagatcaagaagattgagaatctggaggcgctaacagagctggagtgagtcatgagacccacaggagaacagcatggtgggaaggccactgggtggggggtgtccagtctccagagccaacctcctgctggctcttagcccttgagaggctgcctctgccacagggtcctgccctgcatctgaatcccaagtctctgcctcctgttttcagggctccaggaggcctcatcggcttcatgcatgtctttggcttcctgaacaatcctgacttccaaagtaaatctttgatgggaaggctgcagtggggacttctggaaagcctccattcagggatgatactgagatcggtagagaggaaagttaatccagaattgcctcttgccttttgaatactcttttttttaattacaaaaaaaagtgacatttctaatttaaggagtcaggtcctaggccaggtgcagtggtgcatacctgtaatctcagtgctttgggaggccaaattgggaggatcacttgagcctagaagttcgagatagcctgggcaacataacaagaccctgtctacaaaaattaaaattaaaattaaaaaagaaggagccaggtcctagttataactttacctggatttctgccctttgtcgctcattcatttttgcttgttttgtttctgtttctaattcaatacttctcaggccccttctgtgtgcagagcctggtgtgaggtcctgtcatgggcacaagtgtgaacaaaacatagtttctgcctcaaataccatactgggagccagggcatcaggagcctgtaggctgcctctggcttgctccgggctcctgggcagcctccaaatccctcatgacagcatcagtgtgagccaggcggcagcaggggcacagtcagaaccccccaccctctcccacccggtagtgactgccgtcccctgatggggacgccacctttagtggttaaattgtgagttctatgcaacctatgctcgtgaaatttttttaaaaaactgttttggttgttctcaggattctagatatttcttttaatctgctgagaaacatcgaaggggttgacaagttgacacgactgaaaaaactcttcttggtcaacaataaaatcagtaaaattgagaacttaagcaacttacatcaactacagatgctagagctgggatctaaccgcatccgggtaggtgcagacagccctgactagtatattcagggagaggcagctagcgggctgtgtgtggactcagtgggtgtatgtagaatgcatggtgagtctgcatttcttacaatgctgtgatttttttcatgaacaaggaaattactatttttttaagaaaaaatgctaactgaaagtcagtatcagtaagtcctgagtggtctagcctttcttccgcacgtagatttcagttgctcttcatccagatcatgaccctgaatcacactgttcccagttacattctgcctgagatgaaccaaccaacctgaatgccttgctcttgaacttcctcatggtcatcttctctggcatgcttcttcgagatgaaagtttcccaagcccagcaaagtggtcacttggagtgaactgatgtacataccggggctttagaaagcctcttgatcatggtcatcttctctggcatacttcttcgagatgaaagtttcccaagcccagcaaagtggtcacttggagtgaattgatgtacataccggggctttagaaagcctcttgatcatggtcatcttctctggcatgcttcttcgagatgaaagtttcccaagcccagcaaagtggtcacttggagtgaattgatgtacataccggggctttagaaagcctcttgatcatggtcatcttctctggcatacttcttcgagatgaaagtttcccaagcccagcaaagtggtcacttggagtgaactgatgtacataccggggctttagaaagcctcttgatcatggtcatcttctctggcatgcttcttcgagatgaaagtttcccaagcccagcaaagtggtcacttggagtgaactgatgtacataccggggctttagaaagcctcttgatcatggtcatcttctctggcatgcttcttcgagatgaaagtttcccaagcccagcaaagtggtcacttggagtgaactgatgtacataccgggggctttagaaaacctcttgatgctgacacactcccaaaggcagtgctgagttgggccttcctccctggacagctttatactcctggacaccgtccccagcaggattagatctgttctccaggatccatttgaccttgaaaacgtgggacagaatggaaataaaagaattttgaaaagtgatctggtgttccacagaagcaggatcaagtcttcaccagctgactcataaccaccgtcatgtgctggaggggaacttgggagggcgtcccaggaggactgacattggaggtggatctgccaggcagggaggagggagggttcccgtgggcaggaaggaggacttctctcagccagaagaacacttgagccccgtgcctggctcctaatcagggtcatggcacggagcctttgctcccccggcctggcttagtggctttggcagctgtgtctaagcacatccgcccctgcccatgttcagaatgcccctctacttggcttctggaagtattacagcattctctgtctgtcctgggcccttgagagcttggacaggatacaaaccaagggagggtggttttggcaacagtctcttgacagttattgttagagatgtcatggccacaaatagcaaagcagcacatttaaaactagagagcagcccagatgtccgcattttaccaagtgtctcactatggaactttctagggcaacagtggctcatcacaaattaatgcaggctacagcatgtgaggatgcccctgcccccgccaagtcctgcagtggtgtgtggattagcacaccatctcccctcctagagtccccacctggttagcatgcaccttatctggttattttgtgtctgctgaaatatttaaagaatgacttgttctgagagagagtgaactgacagaggagggaaactgaagtcaaatcaataaacagtcattaaacatcctgctgtaggcaagtcaccatggggagaccagacagggcagcgtggtcactgcctctggaggtttatggttgaatagaggagcacacgatcacagcaagagtgatgtaggagggtgtggaaactgggcaagaggggcagagtgctgtggtgtgagggccccccaggaatcctaagtgagggtcccaggatttcaaagacttgaggtcagagtgccccgtacctctcttctgtagagactgaggctcttgggaggactttttttttttttttttgagacggagtctcgtgctgttgcccaggctagagtgcagtggcacaatctcggctcactgcaagctctgcctcctgggttcacgccattctcctgcctcagcctccggagtagctggaactacaggcacccgccgccacgcccagctaatttttttgtatttttaataaagacagggtttcaccgtgttagccaggatggtctctatctgaccttgtgatccacctgcctcagcttctcaaagtgctgggatttccacgcccgacagggggacattttaatgtgtcagctcacaaatttagaactggaagggacttgggaatctactggtccttgggttctgagactgttcctcagcaccccaggaaatctgagggttgggaatgagctcaagacagtcttggactcgccactattgtattctaccttcaagtaggatttccactggaagtcttagcagatacgtcactagccccacatcgcagagctgaagcccacatagctctgccccggtccaggcacctgctggctgcctggggcagcctgtcaactgcagtactcattgctgttctgtcctttccacaggcaatcgaaaatatcgacaccttaaccaacctggagagtttgtttttggggaaaaacaaaattactaaacttcagaacctggatgcgctcaccaacctgacagtcctcagtatgcaggtacggagcttcctgagccgcccttccctgcgagccctggcagggccagcgctgctggacacaatcttagtttttatccttcactgccttcacaattggcacttcgttgcactattagtaagcaattgaaacattagatgccatagactttatacacacatgtgccaagcaaaaacttgattctcttttttattttttatttatttttttcacttttttagaaacagggtctttatctgtcactcaggctgcagtgcagtggtgctgtcatagctcactgcagcctccaactcctgggctcaagccagcttcccacctcagcctaccaagtcggtaggactacaggcatgcaccacgaccttcagctaatattttgtcaagggggtgaggaatggaagagatgaggtctcactatgttgcctaggctggtcttgaactcttgacctcaagtgatcttcctgccttggccacccaaaatgctgggtttacaagcatgagtcaccactcgtggcctttcttttttttttaagagacaaggtctcactctgtcatccaggcaggagtgcagtgacaagtgcattcatagctcactatagcctcacactcctaggctcaagcaatcttccctcctcagcctcccaagtagctgggactgcaggtacacagcaccatgcctggctaatttttgtattttatgtagagaaggggtttccctatgttgcccagggtggtcttgaactcctggactcaagcaaacctcctgccttggcctcccaaaaaatttctttcttaagtgccatgtttttggctttttccacccacccacctcccccttctgccccagtagcagtcatagatggtttttagccaaaggggacttcttcagaaggtggagcttattctaaattctaaagtgtttggctcaatggtaaaagcaattccttccattgcacagagaatatcaaccctgttagacttctgcatttgggagttggtaagcacttgggtgtgcctaggctcctgtttaccttttgtgttggaagcaaattagcagaattggacccttgaagcgagatggaacagagtgctctggggacgaggcccggtatggttagttgatccctgatcccttcgactgatactgaggggcatgtggaaaccgctcttaacccttggtgaagcagaagtttgtcaggcttctttaagaaagttcttggcctggtacagtggctcatgcctgtaacctcagcacttcgggagatctaggcggtcagatcgcttgagcccaggagttcaagaccagcctgggcaacatagtgagagcccatctctaaaaaaattaaaaatataaaaaaaagctcttaggccaggcgtggtggctcacgcctgtaatcccagccctttgggaggccaaggcaggcggttcatttgaggtcaggagtttgagaccagcctggccaacatggtgaaatctcatctctactgaaaatacaaaaattagccaggcatggtggcgggcgcctgtaatcccagctactcaagaggatgaggcaggagaaatgcttgaatccaggaggaggacattgcagtgagccaaggttgtgccactgcactccagcctgggtgacagagcgagagtccatctcaaaaaaaagaaagaaagaaattataattaatttactttaaaatattcagtaatttttacactttaaaattattaaatcaggtaaaccttcaccaaatgtatcttttaacaatgagttcttttttttggtttttttttgagatggaatttcgctcttattgcccaggctggagcacaggggtgcaatctcggctcactgcaacctcagcttctgggttcaagcgattctcctgcctcagtctcccaaggagctgagattacaggtgtgcaccaccacgcccggctaattttttgtatttttagtggagacaggtttcaccatgttggccaggctggtctcaaactcctgacctcaggtgatcctcctgccttggcctcccaaagtgctgggattataggtgagagccactgcacctggcctaacaatgaattctttatataaaaaacatgtaattcccatgcatgaattttagctcagtacagcaggctcaaaattttgatcctctttttctctctacatgagtcccattctagcatgttttttgtttgtttgtttgttcgttttgagacggagtctcgctctgtcacccaggctggagtgcaatggtgcaatctcggctcactgcaagctccacctcccaggtttacgccattctcctgcctcagcctcccaagtagctgggactacaggcacccgccaccacgcccggctaattttttttgtatttttttcgtagagacggggtttcaccgtgttagccaggatggtctcgatctcataacctcatgatcctctcgcctcggcctcccaaagtgctgggattacaggcgtgagccaccgtgcccagccctttatatatatatatttttttttgagatggagtctcgctctgttgcccaggctggagtgcagtggcatgatcttggctcactgcaatctccgcctcccgggttcacgccgttctcctgcctcagcctcccgagtagctgggactacaggcgcccatcatcacacctggctaattttttgtatttttagtagagatggagtttcaccacgttagccaggatggtctcgatctcctgacctcgtgatctgccccactcggcctcccaaagtgctgggattacaggcatgagccaccgcgcccggccccattctagcatgttttaagtgaaattctctgttcttagaattcttcaagataacacaaaacctcgtttcctaaaaaccgtttcatttcataccttctgtactgttctgacagctgtgtgctctccctcttgcagagcaaccggctgaccaagatcgagggtctgcagaacctggtgaacctgcgggagctgtaccttagccacaatggcatcgaggtcatcgagggcctggagaacaatgtaagacacccactgtctgtctggggctgtgtgggcggtgggcaccaggcgggcaggcacctggccagccagcacacactggcctctcgggccggtgtcaggaagatgccctgcctctggaggtttatcagaaagaccttcccatcctaaaaactaagggaccctttcctcatactgaaaagtgcaggagctgtgtgtgcctgttggccctctgccctgagtgtgccttgaagggctgacgctttatgtgggatttcagcacaggcttccctaggcttcctcaatggggcagcatccattgcacacccactgtgcactgcaggcattttgcaagatttgaaaaaaacaaacccaacctgctcgtaaagggccctgtatgagggtgactggcatccctttaggccactgacctgtccatgggtccactggcctcagcccctacttcccagcccacagagagcacaggaccagctctcagtcccagccccttcctcttcttacagtatgagcagcttcctcctcccccattcctccctgcctgctttccacacctgtcctcacctgttcatgctcctccctccctccccggcccttctcactcaggtgcaggacagcctcacgtactgaggggaagtgtgctcacagagcccccaccctcctcagctgcctccagctcaccctgctctgccccagtgcggtgttcaagacaaataaaagactttttctcattcaattttacttgtttttttctgttttgttaaattgccagcaaatacaaccagattggtctataaacatagtgtttcaatctcattaaaggcctttgtgcctcaaccccagggcctagttggcagcagtaaatttcaccaacacctgcataaaattttggaaaaattcaaatttgcctgtggaaagtttggtcaccttcctttgactttgcattgaaattaaaagtttataaaactagcatgcaaaccaagtgttcacctgtgtagtttagagtggtaagtcgagacgtgcctgcagtggaatggcgctgaggactgtgtggcaggggctggggttggggccgggtggggtgcgcagcagggagccctggtgccctcctgcaccctggcctccctgagccaaggccctgcagtcaccaccaagcatccaccgggagacagacaatctgcagcacagttcacataagcagccagtcccaggaaaactggaaagaagtgtggttcagaattttaccagtagaagtgctacactgtgatcttggttaaacaccagattattcttgggcctctgaaacaaaacagaaaaaaaaaaattgttgtattaaaggtaattacgttattgtaatcttcatcatgatcaaatgtgacagtctttcttctgccatttttttcaactaaagatcagacaaatattttctcctaagttttgtttcttaatttatctggaatttatttttatggtgggaaataagaaagtaaatgtagttttgtcccaggtgggaacttagacgacaccccccatcccagtgtctcacgactcctgtcttgttcttcgtgtcttctccagctctgggctctcccgttggtctagaatatgtttgcagtggtccctgacaggtgtagtttctgtggcgttgtgtcatgccctttggtgtgcctgctctcctcaccctgttccattctttttttctgtttcttaagcagttcttactagtttgcttttggatgagttttcacaacattgtccagctcctgtagaaaaacgtgaaatagtgttgagtgcctacatggatccctgagctcagaggtgatggaccggttctgacagccagagcccaccaccggctctgcccctcgtgctgagccttggtgcttggacctcacgaggctcaaatcctgcgtgtgttccaggccactttcattttgccagtttctgggcttgcataccagatgaccatgagcatctcagaatggtgcagagtgcgggggagagctgccgtccgtgctagagaggcctgttccagccccaccgccaggcggtgtgtcgttggattacccacagtcgcgtcttctgcaacattttcctgcagtcctttttgctctgaacccgccccactgagctccctcgcacactgttgagcctgatactctgtgagcagacctgaccagggcaccgagatggggtggtttgaaggcacctcctaggcagcatgccacgtatagcctgctggagagtggcgtcagacttgacacacgcagctggtgccagctggggtgctgggcgccaaggcagcaagggtggtacagccagaggagctcccaggccacagccatagcgctttcgaattgggaaagctactggctgggtacatttcaggggagatggggggaggagtatttgcttttgagaaattttttaactttcccttaaaacttagaaggctttggaattggaataccaaaaatgcagtagaaaaccaaggaagggactcaggagggagcagagcgtgagggcagagaagggaatgaactttgtcagaggttctcagacagcttgtaaatgttttccttttgatgagaaacaaaattattactcaggcttagctaacatgtattggaaagtgagtaactgatgtgcattttcagagtagaagatcctaaaaacacactcttgtctcccagtgggggcacacaccctgcagcaggtgctcagcaggcccagcacccagtcctcagcatgggtcccttctctgcacttatgctcccgggacccttttcccagacaagagtgtaggcctggggtctgagagtcctgcctctcccactgctactgtgcgcctgggcagattcttagccccactgagccccaagttcctcatccctaaatgaagagaggaactttgttttgaagattacttggtcgtacatttcctcgtgatgagcactaagtaaatgtttctacaattgtcagcctttcttcagagcgtcagggggttactcggttcttcctgggaccatcagtctcactaggtctgtctcaatggacagggatctgggaggactgggcttggagtctgacacagtctcaaattccagcgatcaggagagctcagggagatagctgggcaggctctgatggaaacactgtcccagggagggctgcaggaagcaagcaggtctcgtcaccctccatagcatgcccttaccctgtgagggcagagagggcagtgcacctgcagccctaaggtcagcacttgacactgcctgcgtggtcatgcaaatcactgttgatcagaggtaatccaggaaacattttatttccttcttttagaacaaactcacgatgttggacattgcatcaaatagaatcaaaaagattgaaaatatcagccatctaacagagctgcaagagttctgggtaagtttaatacacgctggggttgatgacactttgactaaactggtctcactgattaaaatgtcttatgaatgaatacaagaatctcctgtaagccttcatgctgagtgactccgcacatcatgagatttggggtgggcgctcttgtagacttgtattgggtgttgtctgtgctcctcagcgtgagccacagatcagcagcattgacatagcttgttagaaatgcaaaatcttgggccccaccatagcccagatgaaaactgagtcaaaatctttgctttacaagactccgggtgattgcagtacacacaaaggttggagaagccctgatctaggtatgggtagaacctacaattgtcatttgaccaaatggtttgcaaacctcagcagagaggcagacgcattccctacagatatattccagcacaacagaaggaaatgttggatgggtttctgcagttagtcatcttggaatttgccttgtatttgtcttgtcacaggtatggtttcaggagtagtgttgtggagtcagcaggaagagaaacagaatataagaagtttttgcagttcctctaaaggggttgggaaatgatccccgagtggaagtcttcagtgctaggattcccttagagaaatctcctaaggtttattgcctttccgctagcacgtggccctgcagagactgcggcacaggtgtcaccctgtgatgctgggaatgtagtagtgtcctcagatacattcagtctaatccaggattcatgctgagtgtaaggcatcattcttccttgtctctcctctagccgtgctgctgaccctgcttatgtcctgtgctttctcctttccccactttaaaaggtcatccaagtttccctagaacacaggtggcctgctgcaaatgttccttgccccttattagtggcactgggtcttgagtagtgtcatgatgggataccagagcatgtctgggaagatcagagccagaatttggcaggtgataaagatgtaccaggccagggggagcctcaatgagtccaggtgggtctatgtgcagcccacccttgaaggaaggtgtggctggtggtaggctggttgaattagtgcatagggagttggcaaagaagccagggaacaacacaaagaaaccaaacaacaggaataaggagtccagagacagaggaccaggtgatagggaaagggcacctggcaaaaaattagggagcaggtttgggaaacgagctgatactgaagcaatgttcctgaagcgtaacgattccttctgcatgccctgcctaggaacagagcatggggcacagagtgctgagaccacaggcaggggccaacctgggtaccacagctagcagggaggcaggcaggctggtgatcaatcactaggggccaggtagtgcctgaccctgtaacacagaagaatcctgttccttaggccaccaaagatagtaaaaaatagccagaatttgcacagcgctttatggtgtccatacctctctccattctgatccaattatcacagcaaccatgtggataaggtcatattaccccattttacaggtaaagaattgcattccaggaaggaaagctgcaaaccaggaattctcaaactcagttccatgctcatatcacatttgagaggcacatcattcatctctaaggcagaaatagaaaaccagtcttaacaagtttctgataacccacatactatgtttgttgatttttctgcctatttgttccaattactgagaggagaatgttgaaaccttccaactataattgtcaatggatccatttctcctttcagttccatcagtttttgtttcttgtattttgaaagtctgttatcaggtgcatacatatttagaattgaggaattcttgatgaattgatccatttatcatatgaaatgttcttctttcttgcttatcctctttatccttgtcctggaagggtatcttgtctgttattaacacagccccttcatctgtcttatgattagcgctctcatggaatctttctccatccatttcctcttaacccatgcctttataattaaaatgtgtttttcataaaaagtatgtaactagatcttgctttcttctccagtctgagaatctctgccttttaagtggtgtctttagactgcttacatttaatataattacatttaattacattttgtgtaatggttgagtttaagtctatcatcttagtatttgttttttatttgtctcatctattctttgtttactctttcctacctactttttggagtgacttttttttttttgcagtctattttaactctattattggcttatttgctatacctctgtattagtgttttcttgttgattgtttggagggagggttgttttagcgattagaatttaaaaatacatttttaattttcaccatctatatattttacatttaaatatcttacgatccccatgataccttatcttttaaagaaatttaaaaatggccaggcgcagtggctcatgcctgtaatcctagcactttgggaggccaaggcaggtggatcacctgagatcaggagtttgagaccagcctggccaacgtggtgaaaccctgtctctactaaaaatgcaaaacttagctgggcatggtggcacatgctgtagtccaagctactcaggaggctaaggcacgacaatcacttgaacctggcaagtggagattgcagtgggccaagatcgtgccactgcactccagcctgggcaaaaaagtgaaactccgtctcaaaaaaaaaaaaaaagaaatttaaaaacaagaaaactcacttattttaccttttctggcattgtttattctttcgtgtggatctgagtttccacttggtatttcccttccacctgaagaattctattgttttgtcgtgcattctgcagtaaaccaatccttcactttgatttgtttgaaaaatctatttaatttgcctgcatttttggaatttaatattatggatacacaattctagcttgagagatttttttttcctttttaagtacattaaatactttgttctttcatcctctggtttgcattatttctcctttataaaatttttattattttaaaaatattttttaaaaataaatagagatggggccagacacggtggctcacacctgtaatcccaaggtggatcacttcaggtcaggagtttgagaccaacctgaccaacatggcgaaaccccgtctcaactaaaaattcaaaaattagctgggcgtggtggcacgtgcctgtagtcccagctactggggaggctgagacaggagaatcgcttgaatccaggaggcagaggttgcagtgagccaagatcatgccactgtagtccaacttgggcaacagagcaagactttctcaaaaaaaaaaaaaaaaaaaaaaaaggacgggatcttgccatgttgcccagactggtctcgaactcctgagctcagacagtcctcctgcctcagcctcccaaagggctgggagtacaggtgtgagccaccacacacggccctggtttgcattatttctaataagaagccagcagtcatttttatcttttttcctctggctgctttttaatgttctttttaatcattgtttcttattttgttttgttttttgcaacttgaatatagcgtgccatggtgtagtttattttctgtgatgtgtcagggttaactgggtctgtgaatctatggtcttcatcaaatgtggaaagcttctggagactattttctctaaaactgcttctgcccttgctcctcaccccggtttctctctgaaaacccagttatgcatgttcccctggcactagcgaggcccctgaggccattgcctccaccctgctccaccccttgggctttcatcttgctgtgcttgtttgtataatttctgttgttaaatcttcaagatcatgatcttatcatctgtagtagcctatctgctgttaagcccatgtcatgaattttttatttcagatactgtatttttctcaactctaaaagaacatttggctttatttttttttttttggtagattatttttctctcttcattagattcatgttttcctttaagtccttccttcttcacgtcttgtaattttttattagatcctgggctttatggtgttcaattgttgaatgtctggaatttatgttgttttccttcaaaacatactgaactttatctgacaggcaattaagttacagcttgatccttttgaggcttgtttttaagctttattagagtacatctaaatagtctactccgtaagattaatctagcactgttttgaagctgtggccctcctaggatctctggtgaatatcctgtgtatttaagttctctccactgtggttgacgggaacacaaacatggacctgctatgggtgagctctgggcattctgcatcttggggctgcttagtagttcttcgaccagcctttagcttttcactctgcctagcacagcttcatcttcagtccaggattccacaggataccatgtggatttctggaggctttttccctacatagctcactcctatctatacattccagctccctttgcctccccaaactacaatcaccatctcaactctgtgtggccaccaggctctgcttgggttccgcctccttgtggtcctgaaagttcctccaggcagaaggccgggatgatcacaccacccacctcatttgtttcctgtctctcaagaatcactatctgtgttgcctgttgtctgatgtataaaaacaattatttcatatattttatcctcttttttttttttttgagatagagtcttgctctgtcgcccaggctggagtgcagtggcgcgatctcagctcactgcaagctccgcctcctgggttcacaccattctcctgcctcagtctcctgagtagctgggactaccggtgcccgccaccacgcctggctaattttttttgtattttagtagagacagggtttcactgtgttagccaggacagtctccatctcctgacctcatgatccgcccgccttggcctccccaggtgctgggattacaggtgtgagccaccgcgcccggcctattctatcctattttctagtagcttgtgacaaaggcaggagctcagcaccagctattctgtcatggcttgaaacagaagtcctacttatttatcttacttttgtgtctgtctcccccactgtataatacaaacctcataagggcagggaaattagtgtttggtttactttgttttccctcccaatttctttattgtggtaaaacatgcataaaataaaactcaccatcttaaccatgtggaagtgtacagtgagtggtattcagcacattcgtaatggtgcacagccatcaccaccgtccatctccaggactcttttcaacttataaaactggaactctgtacccattaaacaataactccctattttccccttcccagaccttgacaatgacccttctactttctgtctctatgaatttaactacagacctcatatcactggaatcatgcagtatttatttttgtgactggcttacttcactcagcatattgacctgaagattcacccattctgtaagcatgtgtcagaattgcctttctttttagggccaaataatattccgcagtatggatattgttttgttcactcttatctcaccagcatctggaatagtgcctgatacacttttttcttttgagacagagtcttgttctgtcacccaggctagagtgcagtagcatgatcatggctcactgaagccttggcctcctgagttcaagtgatcctcccacctcagcctcccaagtagctgggactgcaggtgtgcaccaatgacctggctacatttgtgggttttttgttttgtttcgttttttgtttttttgagatggagttttgctcttgtcacccaggctggagtgcaatggcacaatctcactgcagcctccgctttccaggttcaaacgattctcctgcctcagcctctcagtagctgggattacaggtgaatgccaccacgcctggctaatttttgcatttttagcagagacggggtttcaccatgttggccaggatggtctcaaactcctgacctcaggtaatccgcccacctcggcttcccaaagtgctgggattacaggagtgagccactatgtctggaccattttaaaatcttttgtagagacaaggtctcactgtggtgtccaggctggtctcaaactcctgaactcaagcaatcctcctgcctgggcctcccaaagtgctgggattacaggtgtgagccaccatgcccagtcagtgcctgaaacatatttgaatgagcagaaggaacatagaaaaggctggccaactgggtggaggccagctacagataacattggaaaatatgttatccacatgtgtcagatgcagggctaacatccttacattaaaaacagctcacacccaggtaccacttgaaaactagggtgttcacagagcaagaagtaacagttgcttgtaaatacataaagcatttcctatctcattaatttttttttctttcttttttttttttttgagatggagctttgctcctgtcgtccaggctagagtgtagtggcacgatctcggctcactgcaacctccacctcccgggttcaagtgattctcctgcctcagcctcccaagtagttgggattacaggtggctgccaccaccatgcctggctaatttttgtatttttagtagagacggggttttgccatgttggccaggctggtcttgaactcctggcctccagtgatctgcctgcctcggcttcccaaagtgttgggattacaggcgtgagccactgtgcctggccatatctcattaacttttaaaatctactaaaacagtgagatacagtgttatctgtcaggttggtgaagactcatagaatgcagctgcaaccagcctgtgatggcagcaggcactctcgtgactacggagatagctgtgtttcatacaagttttctgtagggcatttagagccttaaaaataccacatgcagctgggcacggtggctcacacctgtcatcccagcactttgggaggctgagacgggtgggtcacctaaggtcaggagtttgagactagtctaaccaatatggtgaaaccccatctctactaaaaatacaaaaatgagccaggcgtggcggcatgcacctatagtctcagctactggagaggctgagacaggagaattgcttgaacccaggaggcggaggttgcagtgagccaagatcgtgccactgcacgatcaggtcaggagatcgagaccatcctagccaacatggtgaaaccctgtctctactaaaatacaaaaatttagctggatgtggtggcacgcgcctgtagtcaccactactcgggaggctgaggcaggagaatcgcttgaacctgggaggcagaggttgcagtgagccaagattgtgccactgcactctagcctggcgacaaagctagactccaccttaaaaaaaaaaaaatcatagagagcttcctaaccaagatttaaaaatcagtgaaaaaagaaagaataggtatatctaattttataaagcgtatgtattttgcatgatgaaagagtccattggtcgcctgagaggttaaggttaaggttattttctatgacatacaaaaagttctttaaagtgaaagaaagcgattcaatagaaaaataggtggaggatagcaatacacagttcaccaatatgatgcatcccgcccctgccatacgcgacttgtttcaagctgacatccagggcctggagggtgggctgagaccagcactgccctgctcaggcccccaccctcttcccagtaatccaggggaaaggtagcatcacagtgaccaaaggcagtagccaggggaggagaaacatttggcaggaaagtttccaccctcatggtgtctgatgccggcatggagcccatctgcccactgccctgctggcacaggggcttccccaggaccctcccagatgctctgttggcagatgctgcccgctcgtttaagccaagtgatgccatttaaattacattgcaggcctgctccatgccacagctgtgcttcctcagccctcttgatggaatgctttcctgtaggcagcgccctgcacaagcagcctgtgccagcttggcacccctgacccagggctgtctgggtgtgagctgcaaggagcggggggcacaggtaggggctgctcgaggagaggctgtgtgcctccctcccagcatgtgtgcctggcctgggcccactttctgctccccttcagtctagtgatggccatttcattaggtttcagttgcattcctttaattacagatgagtctaaccctggcgcctctgttttcaaccactttgtccttttgttccctcttgatactttctgctagctttagtccagtgcattttcccttttattattaacttatagagattctatcaatgaatgatactaaaccttagtatgtcatctgtgttgcagatactttactttgtcactggtcttcagcttttttttttttttttgagacagagtctggctctgtcacccaggctggagtgcagtggcgtgatctcggctcactgcaagctccacctcctgggttcacaccattctcctgcctcaacctcccgagtagctaggactacaggtgcccgccaccacgctccgctaattttttttttttttttttagacggagtctggctctgtcccccaggctggagtgcagtggcgcaatctccgctcactgtaacctccgcctcccgggttcaagggattctcttgcctcagcctcccgagtagctcaccatccccacggacagctctcgatgtggccgtgcctgtgtctggcagcctcaccatccccacggacggctcttgatgggccgtgcctgtgtcacgcatctcctttgttaaactgtcatggagattttcagaaaataagtgatttttacattctaccagttgtttatgaaatgtatcttaagaattctacccatcttttgcttaaaacattactgagtttggggtaattaatgtgaattttctataatatcagccaaaaaaattgtgaagggaaatacaggtatcctatgtatgtatatgcaaaatacacagatagaaaaccccataaatacaaaatgcaagtttgggttccaaaaaccaaaagagtctgccaggaaaacgtcagccaagaagatgttctctagcagaatcccagccgttggttcgggcaagggatcagctgctgagattactgggaaggatgttgaagaagggatgtttgcacacaggcccaaggatcatgccacagagaactcgctaattgcaaagggaaagcatgttcccagagtcatctggggtcaccagctgatctgcatgataaaacttagcatccctaattgtgggaccacctgaagtgctgtgtccccagtgtgagtcatctgtgcagtatacctaccaaaaatgtttagtctgatctaaccaagcattcatacctaactttgagtttatgggaagtgtaagagctagaagaacaagctaaatgacagtgagggatactttacaagacagttcttcaagaagccaattttagtttttaaaaaacagtgtgagaaggacatgggaggtgctcaagattagaagagactgaagtggtccctctgggggaaaggaatgtgcccgcgctccccagccaggctccctgacagccccagtgtgcagaacttgataagagaaacataaggtcatcttttttccatgatgagtgtaacatctttgccccatcctgggattcaggagcctctggaatgtctatggagacagagtctcatacaagtgaatgtttttagttccattttggaaaaatgcaaagataagaatctctgaaagttaccagtatcaaacacattatttacacattatttacaatgcaccattggtggtgagtagaattccccgtgttaggtttactaagtcctggagaaaactgctctgagattggcagtgctatggaaaattacaacatctgcaatttataaagatggtccgcccatctagactaataatgacattggaaaatgctgtgatgtgtgagacaagaagcatctggtgtgtgacaaacacaaatacatcacatatcgagaaagaaggaggtgacacagcttgaagacctcccacgccagagctgaaagcctgagtcaactgccagtggtgttttgaatcattttttaaatagactatgctacaagaaaatcttacttcttccaaacagtgtgatattgctactttcattaaatgaatgtcctttttgtgtgttttgtggtagaagtggttaaggcagtggtgttcagtctttgggcttccctgggccacactggaaaaaagaagaattgtcttgggctacacataaaatactctaacgatcgctggtgagctaaaaaaaaaaaaaaaaaaaaaagtgaaaaaatcgcaaaaaaatctcaaaatgtttttaagcttacagatttgcgttgggcctcattcaaagccatcctaggccatttacagcctgcaggccgtgggttggacaagcttggtttaaggcgtgtgtgtgcatcattttcgtgactctccactttaaggggctctttctgttaactgaccagtgaccggccaatcacaggcctggcaggtggatggcttcccctgtaattctagtgttgcaggctctgcactggccacacaaccagcggggcggtgcgagtgtagtaacagagtagcatttaagaaggtacgctcacgtcccgtccacatggaggcactggtcgggacagcagcagcagggcaccagccctggtggtgcagctcctcccagcaggtgtcagtccctcttcaagggctaagctctaggatttggaattcttggtttcccaaggctggtacgcactagtcccacaaaaggttctgtgaaaatagggtccctcaggccaggcgcagtggctcacgcctgtaatcccagcactttgggaggctgaggcgggtggatcacttgaggtcaggagttcaagaccaggctggccaacgtggtgaaaccccatctctacaaaaatacaaaaattagccgagcatgatggcgagtgcctgtaatcccagctacttgggaggctgaggtgggagaatcgcttgaacccaggaggcggaagttgcagtgagcagagattgccccattgcactccagcctgggcgacagagcgagactccctctcaaaaaaaagaaaatagggttcctcaaacaggcaaacctgtgagatgcacgttatattcctctctgggaagcccctgacacacggtaagttactaaagacagcctggctgtgacagtggacctggtgcaaaactagccctcctgccacagacagatagaaaaatatgaaacaactctattcaggcagtggacagcaggcagcacgcacctgcaggctctgaggagggagttccagcgcgagccccgtgatcaccccactccttacctgggatgtttcccaagcagaacacagtacttctgagtggaagaggcagagatcaacatctctggcagctagagtgtgccagacagggccccagagagaaggggagctgtgcagagcagaggtccagaagtccatgcagggaccccccagtcggaccacagctgtgggcagggcagtgggcagtgtgggccccagagtagaacgcccctgcttgccttccgttccacatggacagttcccttcctaacttccctgtaaaaggagtcgaagtctgtcaccctataacgagtgcccctgcctgtgcccattgtaggttcacagtcaagtccagctgcctcttcaggagcagtgcccgtgctcttgcca

SEQ ID NO: 7365 - DNA, 592 bp, Homo sapiens
agagaacataagacacgttgcgttcattcgctagaaatccctgtttccttctctcagaaggcagtcacagtccctacctgagtcgtgtgaaacacagggcctgagagtgctttacaggcattcacgtgctgtccgagtggcattcgggggctggcctagctggccctagtcctggtgtgcagggttcaggcagtcttgacctgcaacaaccgaggttttttagtcttttaacccagccattttcaattttttaaaaattaggtaagttaaaaaagctgggtaaaagctgactcagccctgtgtgcttgtgttccttagagctctccttcaaagagcgccgggcagggctgactgttttcacgtgtgcccgtcagttctcgccacatcccttgcctgtgggtgaaagctcaggtgtggggagggtgtcctgtgtcccacacggtgctgtgctgctgccagaatacgagtcccattgagcctctccaaagacggcctccaaggatctgaactcttggccactggtatagtggcctcctgttctcaccccattgttattttggcttttttaatataaaatgtacattgacagaca

SEQ ID NO: 7366 - DNA, 16607 bp, Homo sapiens
ccaattcatttttctcaaaacatatatttacccctcctctcagtacatctttgagcacctttcccagaatctcaggaatgtatagacccccgccccacacttcatacccgccctaggccttggtgatgaggcccctcacagcttgtgcaatggcatccctgtcgataccaaacatcttcagcagctcagccggcttcccacttcttggtacccggttaactgccaggtgggtgacagtgatgccaggctcgcccactactgcactggacacagcctcaccaatgccacctagaaatgaaaggaggggagtcagaagacgaggcctcagggtgagcagtggtgggcccagccctctgtcagccttagtcaaggatggaggaggctgcatatgcactgcctttctccacctgtagccatgagcccatcacataactcattgattttttttattttaaagagacagacaggtatcaccatgttgcccaggctggtctcccaactcctgagctcaagaaatccgctgtcctcagcctcccaaagtgctgggattgcaggtgtgagccaccatgcacggcccagaactatttttataagcccaaatatggcctctaaatgtttgtttcaaacaccattgttggtgaccagccagccactgtccatagtccaattatctacatttgaccccagagtcaaagcccatctctcccactggggcctcctacttagagaggctggtgtgtacttagggagcctgctgtgtgaaggactcacaaataccagaaattctgcattgcttcccaagctgcaccatagcttccaccctacactacctcagggacgccaccatccaccatttagcagcgaggttggaatcctcaccagcttcctgggcagcaggagctccacagagctcatcagcagctgtgagttagctaggtccccaggccaagcctgaggccttttaagagaccacgtcccagctgctctgagggacagctctgggtgttctgggccacagctgccctcctggggctcagatagaagaggcacgtccaacgctcggctctctggccctgtcccttgcccagcctgcctgccccaggcctccttaccttcataataatggtcctccacggtgaggatcctgcccttggtggcacgagcgctgtcgagaatgagttttctgtccaggggcttgatggtgaaggggtccagcacgcggatgttgatcttttctgtgagggagagcacacggcgtggctgaggggagggctgggcaccactatctgccctggtgggggcctggtgggacatcctgagggctgcgtgtagctaagagctcagcctgcgggcctgtccctgtcccagggagaaccacttgccacctcgttcccatggctgagctcatgcttgccaaccccttgcactggggcatctggtccagctgtgttgcccgcagtatccaagaacccagagcggagcgtgcaggccctgagcgccttccctcatcctcccacaaccttgaagacaaagggaatgcgagagaaaacaccccaggtgtctggcctgatggaaggtgaggcttgatgtggtgacgttggggagctgcagcccgcagagtgatcagaggcccacgtgcggccccagcagcagaggcaccttctcagaaggacaaacccacgcttgccaggccctgcttaaagctcacccccctgggtctccccctgcctggggatggactcctctggctcctccagccccatcttgctcctgcctgaccctcctccggcctcccttcactctcctctctgctaatcaattcctacccactctgaagccactttctggaagatgccacacctgccccctctttcgtgctaaaacatgacatctgctgtgtgattctattgcaggagaggccaatgcctgtctcccctacaaaccactagccaacactgtgagctcgcagtaataataatagaataccaagtcacatgcatgtaaccctcaggagagctctgagggcaaggggctagtatctccattttacagataggaaaacaggcatggtgacagtgaataacttacttccttaactagtgcctggctgagtgattccagcccagctggcaggctccaggccactgatctggccaccatgctgggggggtctcgactttagagtcatagggtagggactgtgggcactgcagccccaggacttagcaacatgccagacagaacaagtgctcaaaggatggctataattgctatcattatttaatgaaatgaaatgctttctctctagctgtgagctcttcaagaaagaacagaaagaacgaaagaaagaaccccaagacctagcatgcagtggccgctcagttgatgactttggaggccccttctcctcacctttcttcagcagttcggcagcggccaaggcctcgtgcagggtcaccccagccccgataacggtcacctggtcatccttgctcttcaggaccacctgggggtgacacagagggtgagtaaggctcagggccctggggcagggtgtgccctgactgctgggagtcacagcagggagggtccaggcagctctgtgggctcctggggcatgcgaggcactgaccttggcttgtccgacctggaagtcctcattgttgttatagatgatggcattttctgggcggctggtccggatgaagcagataccctgagaccgaaacagataaactgaggatacaggatgtggcacacccaacctcagagacgaggtctttctagagaggccatcccttcccatgggagcgttagttactgcatcctggctactccagcagggaaaagggccttgcttgccctctgccgcccgcaccccacttgaacactctgagaactgcccaccaccttgcagcctcagaccgaaggcaactttccaccaggtagactggctgcaggtgggctactcccacagactgcaccaggcagaggggcaggaaccacgcgcactgggtctgtggcatgcagctccgggcctggaccacagggctcagctcatccttgcctgtcttggagaacccaactcaggagggtggagaggtgtcaaccgctggaccggccagggctgccaggattctcagcagagacagactggcaatcagttgacaatgtctgccacgtggcagtaagtggggtgtgtatttcgttttttcttgtctaacttccacaagctacacgaacaccaggggcaaggtcaggaaacaccccctggggcagcaagtgaccagctctggcctcctcttctgtttcccttgggaagtgatggctgccagcaggagaaagaacagccatgcaacctacctttgtattggcggctagttccactgccttctctgtagcaacgccatcacttgggtaaaagacagttgatgtggggactgaccgaaacatagccagatcttctagggccatctgggagggcccgtcttcccctggggtgtgggggaaaggatatgcagaaataagacccctacccccccatccatgggctggaatcctggcccatccccctcccatacctcctggtgcaaaagtcaagggagctccaggtgtaaacaccctggctaaactcaccgatggaaacgccgcagtgggagccgcagaggttgatgttgctctcggagatggcggccatgcgaatctggtcaaaggcccgcgtgaagaaggctgcaaaagtgctgcagaagggcaccgtcctgttgcgggtggcacagcccaccgcgatgctcacctgggggcaggtgggacagggtcagcccaaaggggcaggcagagggtggtcggggagcctaggaccccttttgtggagaaagccacaatttgtatatagattgtccatcctttctgggcttctgaatatgtcccccaccaccttcttctgcagagaccggtcctcccaacccctccctggggtccgagggcagcagcctcatgcctgctgaggctccaggccccaaatcactcatccagaagcagcactgagtacagtcatcagttccaaaccagctgcccttcaaggctccaaaatctgccagccaacacaaggcctctttccctagtacctgggacctccccagccccacgccctgcagagcagtctctggaaaccacagagagaatttcaggtccagttggaagaactctggagatctgagtgccctccagagagaggaagctccctgtccctaggggcctgcaagccaggctgggctcctggaccaccaggaggggatattttgaaaacatggacaaaacattgttccttacttcacaacctcagttcctgacaagggtctgcttccccaaatgggtacatgtcaggggcccagagttccctcatctctgcatccctcagggtggcagggcccagagccgtgtgcattacaggtgctctacagactcgggctgctaaacccatcacggccccacctactggccaggcctgtcctccacctggaagagaccccattcaccaccaggcctggcctgtacgcagctcctcctgagagcacctgcagtcccattcggctcccccatgtgcacacctgtccaggacatttgcacctgggcagaacctcccaaactgtggctgttcaaggtcaggggttaacgctgggtcctggcttttcttatagtctccctgggctggcctacagcaggcacctggctctgccaacatggctgccccgcacccctcagaccacagccctcagccttgggtggacctgtccctgccggccccagcacctaccatgttctgctcagcaatgtagcactcgatgaagcggtccgggtgctcctttttgaagatctccgagaaggtggaatttttggtgtccccatccagggcgatgatgcggtcactggcatggcccagcttggccagtgcctgcccgtaggccttgcgggtggctatctgtgaggaagagagtgggaaggctctggacccctctgagggtgagtgcacacctgcagcctggagccctgctttcagagaaggattaaaacggggccaaaaatggaagccctggagcacaaggtcctgcagaggcttttaactgctgaaaggttgccaacgactacggtcaatgtcttgggagcccctggagccccggccccttctggctgtgaaaggtataagctacagaagacacccaccagccccaacttcccgcctgctgcaccaggtccatgaacctattccactttgcatgggaacacagaaggcttgggagtcaaggccaggcacaggctgcatggatgggttcccttgggacagaaacctggagtgggacagctctgcctagcctttcccaggtcaggtgggggtcctgagctcaggccaagggtccctcgtggaccagcgatgcaagaacttgggagtgagtccttggctttgatctcagttctgtcagtagcttgctaagcttgctaagtgggcaattcccttgcccggtctgagcctctgcaggtcaactccagagatgtctgtcattctgagggaagtgacaggaacaacacctcagggatcactcctcgccctaaatgaatcgctctcctccctttcccagccctccagagggtgtatctgggccacagacttgggaaacctgagaactatgggttcagagaaacaggccccactttgtaccttgtccccaactttgtagctgggcaggctgggcatgcggatgttggcaatgtccactgagggtgcgtcctcctgtggaggggttgccaggatcttctttttgctctggatctggctgtagatctcctggatgatctgctcagccatgtttttggggaggggcttcccatgccaagactccttatcttctacccctgcagacccaacacgggaggacagaggaatgggtaagacagaagctcccagagggccaggaggctgctccaggagactggccctctacctgccgagggcaagggaggaatggcatcatcccagacaggcagagcccagccaggcacgggggccaggaaaggagggtcgcagtgaataggatggactcctacgtgcccaccactcactgtctactgcctggtcctttgggagctcacagctgagtgggaaaggaggggccagacgtgggcaggtgtgtgtttctgggcccactgccccatcccttcaccaatgtgtccattctcttcctccccacaaccccgcctgcagggtcacacacaggtagaggtgtctgctgcagaaatactcagtttgtcgactgggttggaagggaccctggccatcagaaggggaacccaaggcccagaacagggcttccagggtcacccaatgcatctgtgagcagcagaggagtctataagcacctaggcatgcccaccccatggcaccttgttgtgtgcggccaggaaggctgaatatccctctccctggaggtcacctcagtagtcactagagtctggccagagccaagaacagactgaactcccaggtagcacccagcagcccgaaagactagcaggagcccccaagaagctgcaagtggtccagatcctgcccatttttaacaccagagggcagtgccaggcagcagcaccaaagccatgacaatatcccagagccctttcctcgacatccaccccctcccagacacctcccagcactgccaaacccccactcagaacatcctcatatacctgagtctacatgggcagaacaagccacaacccctgagagcaggcaggtgggcagccaggggcatttggcagggaagccgacccaggccctgggatcagcccccctcgtgccatagacttcctctgtccccgggcaagtccctgaccacttgtagtctcattttcccatctttaaaatgggtgaggccatcccaggcctaggaatctgaagcccacacctgggtgccagggagtgacttacgcctgcctcattctccggcctggggcagaacccaggttccaaaccccccaaggctcttggcccacacaggccttgctcagcatctgccattgcttgaggagtaccccactcacctcctggagggaacagttctctccgggccctgcctggctctgtgtcggcccttcagctggagcaggtggccggagctggcagagcacacacagctgcagctctgaaaggcaccagccagggtggggcacgggggctgcctcactccacgaccttcctctcacccacagaccctccaagtccctcctctcctcctgcctgtacatgcccccaccggcagaggccagacggatctgagtttaaatcctggctcagccacaggggtcactgagtcacagcatctcccgctccccttccctggagcctggtgagctcagtgagcagcaagggctgtttccctggatgtgcgggtcagagctacgtagccacagtgtctgggcgaggggtgaaggtggggagggcggcttgtgcatactgacccgtgatccctcggcccttgaaggtcttggcaatgatggctgttggctggtgcttggcctggccaaaggccttgcacagctcctccacgctgtgtccatccacgatgatggcatgccaactggggacagggggcagagagtaaggggcaattcccaggggccacaacaccgaggagccttccagggaaaggtctgccttggcagctggggtctgcccaggctccaccccacaactgcggcctcagctggagtagtagaaagcttgcaacattcctgtttccagtttgggttttttaaatccttttctttttcacattattttacttccttttgtttgcctctgaacaggttttcctcctcctcttaagtaatccagagctcagttcctttattgtctctttcattcctgatctgctcatttcctactgaaagctgttctggggtcagcgcactgggtttggaatctgtctgctattagattcttgatgaattttttggcccaattcttatttggggaacacatttgatcactccacagatgctggatgtggtgctggaaatgtttttgaaatgaaccatggagtcaaatatacaggaaggagctggggcagagcaccctttctcttgaaaagctatccttttggggactctttttgacataagaataaaaatagcacttctcaaactgagtgccatgccaaccactacccatattagcccactgaagcctcaccacgccatgcttgggtgctgagctggccccattgtacagacaaatcaactgagacaccgaaggtggagtaagtaacgtgacccacgccacaaagcaagttagcggtggagccaggacttcaggaatctggcttgagtcacgaggttatggacacaggtcctgggggtgctgctggggttgtactctgagtccccagatagatgtggccttggggaggcctgtggggtgaggaccctgtggctcagtttcctcgcctgtccaacagagattatttcctcccttcctcctctccctttctgaggtcagtcatcagggaacacaggcctgcgtatgctgtgctactgcaaggtaaccccaagcatcctgttacttagtgtagtcacaggcatgggttcatccgcaaaacgcagtcctggaggcctgacctgagtctcaaagccttgcacggcacctgccctgctccctcccctccacagcctcctcagccaatgctgggcccctgtgcagagcagcttgtgtttggcaacaccggtggaggctttgaggtggagcccctctggctgacacccatgcagattgacctccctgctttgtgccctttgaccctgaatttgtaaccaatcaaggccgaaggggggcatctggaaaccctatctcccatttcaccaggagcctgttcctcctccccaggctgggcggggctgggcacaggacgtggccaccaaactgaggttcaaacctctccgcagctatacatcctttagctttaccgagcaagcccccatccctcaagaaccctccttcctcaagaacaaagcgagctgacgtgagatggtgtgtggaagctccgagagccaccatgccacaaccacgaaaacaaggaaactcacttaaaactgggcctggcccacatatcctgagccattaagtccaaatgcctagagtttgaaattgtgagtcaaatgctaaagaaagggacctttagatggtgcttaaggtcccagcttcagctcctgcacctgcacctgcaaagctgtgatcacagaccactctcccgtgctgtgaccacactcaggccacagcctcgtacatacccgaaggcctcgcaccgcttctggtagatgtccatctggtgctgcagtggggccgggtcactctggcccaggcgattgatgtctagaatggccacaaggttgtccagcttatagatgctggcgaaggccatggcctcccatacagagccctctgacagctccccgtctcccagcaagcaatagactcggtagctgtggacagagagtgaatcaggccagtccctctcacctggacccagctggctcccacccccccacccatccaaggagcctgcattctgggtaaaggagcagccacgcatggatatgcagaacagatggcatttacactcgaggggcaacagtgtcaccaggttcctgcagcctaccacaagccacaccccaagagaaaatggcatgaaggaagacgtcaggagctcaggaagaagtactggttgttaagaaacagaggtctaggacaacagggatctggctaataagatctagaaaaatgggggttgttggaatgagaggaaagtgaggaagggtgggtgaataggcttgagccacctgctgcaggggacagaccccgctgtgaaccagaggttggaggaggccttgggactggctgggtgggccagtgggaaaggggaaccttgggaaccaagctctgcttctgcccggaggagggaggtgggccaaggaggcctgaggcactctaggcaacaccctggagcaagagggctctggggaggatagagcagagggcacttgaggaccaggcgcttcctgggacaggctctccccaagcttccaagactagctcttgaccccaagactgaagctgcacctggctctttctctaccacaggggccctctcctcccctcaacacaggcaactgtgatcttttcaagacagtgagacgttaaaaagaacactgaacttgggataaattacccagcaaacagaacgttcccggcctgggagatgtgaggggatgggggtagcagagggacggcagcaacagacaggacttgtctgaaggtcgcgctgtcaggaagttgctgagccaggattcaaacgcaggtctgactgtagcctagactgtccgctccttgccgtgcaggcatgcaagtagggtgaggagtggtaggacttggggacctccccttaccctgcccagtgtctagctgtgtagccctaggaaatgaggctggtgcctggttgggctcagaggggacatggctgccctcctgctcctgcaggaaaaggccctcaacccggctgcatgctcagcagtccaagcctccaggcctccctgccgcagggccaaggcaggggcagcaggaagaggctgggacagctagccacggagctgtcagcatgactcagcacttccacatgccagcaggccaggagcactccctgcagcctctcctgcctcatactgctcttctgtggcctccaccacaggaggtggtgcccctgtggggtaccatggccagaaggacaaagcctcaggcccacacttcagaggccctatcctgtcccagccttgcctcctctttcccctgtaggttttgagggggcccagagaccctgcagggactctggtctggcacagcagctccagaaaggggccacatgatggggctgagccagagaagccaactcgacttcccagaaagggattccagggaaggcaactggctgccaccccaagcccacacccacttccagggaagtcgaaccgaggctagcactggaggcccagcacagctttggcttcgagactagggacaaggctaagccctacagggccatcaggctcaggtcagagggcgtgctgaggtcccgaggagatgccaaggaaggggttgtgaacagggaaggggcctacaggagcctgggctaaccctgaggcttggtattgcctgagctgttagagttaggggtggggggctgcaaacatccattcatgaactaatttgaagagagggaaccctaaacagaaggtcgacatttgttgtagaacgatttggaaactaccttacgtgtccaacaacaaaggactggctagatggattatagcatctccataaaacagaatattatgtgatcattaaaaccagctctcaggatgtgtgcagtggctcacgcctgtaatcccagcactctgggaggctgaagtagggagatgacctgaggtcaggagtttgagactgaccatcctggccaacgtcatgaaaccccgtctctactaaatatataaaaattagctgagtgtggtggtgcgcgtctgtaatcccagctactcgggaagctgaggcaggagaattacttgaacccaggaggcggaggttgcagtgagctaagatggcaccactgcactccagcctgggtgacagagcaagactccatctcaaaaaaacaaaacaaaacaaaaaaaaccagctctccactgttaatatcaggagaaaaagctcatgatagaaggcttggtttaaagtgtaatactagattttatattatacacacacacacacacacacacacacacacacacacacactgggattacagatttgtaagcttttctcatgataacatggacaaaatacatcattagatttaaattgggggtgggaggcagtgtgctaagaataaggaaaacattggttgggtgcagtggctcatgcctgtaatcccagcactttgggaggccgaggtgggcagatcacaaggtcaggagattgagaccatcctggctaacatggtgaaagcccgtctctactaaaaatacaaaaaattagccaggcgtggtggcacgtacctgtagtcccagctactcgggaggctgaggcaggaggagaatcacttgaacccgggaggcggaggttgcagtgggccgagatcgtaccactgcactccagcctgggtgacagagcgagactccatctcagaaaaaataaaaataaaaaaataaggaaaacgttcatttcttaatatcattctgtactttttaaacaggagggcagggagaaacagtgagtggagaccagtttgctctatcaagacgctacctccgggtgcctggcctgacatgataatccctggatgccctggccccttcccccaggtacagtcaggggcctaggctccaggcaaccctggccccaagccaccctggcttctgggaacccagctaaactccttctccctacactgacttgttccattatgttagggtcaggaaatgccccttcacagggaattatttccagcaactgtagggaataattaactcacatctctggttctctgccaaataaaatgctcttaaacatgcatctcattctttgtgtgtctctctctctttacttcatggtgaatcacttctgggtgtagccaagcctgccccaaggctcaccaaggaatgaaagcaaactgtggtcaggtgacactggcctgaaggggtctggaagggactgtgaggcctccttggagagccagtcctggggaagggcctgcacacagaaggtgctccctgcagcctcctgtccttcaaggacccacagtcttcccgaaccccactatggcacttctgctgcaggagtggaggacagggcagtggagatgccatcagctgcagaactgggcccttctcacaccctgcgggctggccccactggccttcctcctctaggaggcttcccgcccacaggactccccgagctcctgtggtgccctcagcctctccaagagcagcctgggtacctccaccaccaactggatggcctaggccagcatcttgcctcagcttcctcacctgtaagacgggtcacggttctcacaccactacccaactcacagggggcttttaaaggtggaacccaatacagcacatgagcactgagcacagggcctagcccccaaagggcaaaggaacccttctgatgagtgactgacatggttaggctctgggtccccacccaaatcttaccttgtagctcccgtaattcctactggttgtgggaggggcccagcaggagataactgaatcatggggacaggtcttccccatgctgttctcgtgatggtgaataagtctcacaagatctgatggttttaaaaacgggagtttccctgcacaaactctctctttgcctgcgccttccacataagatgtgacttgttcctccttaccttccagcatgactgtgaggcctccctagccatgtggaactgtaagtccattagacctctttttcttccccagacttgggtatgcctttatcagcagtgtggaaacagactaatacagtgattattctttaaaaaaaagaataattttttttttaaagaggcagagtctcgctctgtagcccaggctagggtgcagtggctcaatcatgtatagctataatcttgaagccctaggctcaagtgatcctcccacctcagcctcctatgtagctgggactacaggtgtgtaccaccatgcctggctaagttttgtattttttgtagagagagtcttgctctgttgcctaggctggtctggaactcctggcctcaagcaatccttccctcagccagccattattcttaacagtttacaacctcatccccccaggccatatctgaccaccgcagacaaacttatggctagaaccttcctggggggccgttcctacaaatcacctggtgggcgctagagcagcacacctttctggtcaggctcatcacccaccctctgaaggctcaatctctcaaatgtttgtttcttccctgctgataggaggtggcttacaggtatcccagaacccctcagaacatacaaccctcccctttaccaagataaaggcaagtggctcaggcctgggctcctggtgcctagtcagacaggggcctgggggtgggtctttctgagacttctggggtctgggcacagggctgggggcaaaacaggaagtcctcagcctaagcactctggctgaagagcacatgattgagagcacgcactctgtgcaaacctggccctgccagtcactgctgagggacccagggcaggtcccttaactcctgagtgtttcctcatttgtaaagggggccggtcatggcaccagccatagcggatgtttaaagagcaaaagaggccacgcatatgtattactctgccctagccaggaaagaggaagagtctgggggcgatggtgaagggtgggtcacccaaggaccactccccaaaactacccaggttgggggtggggagtaggtgtgttacctggccttgtcgaagtatttgccggtgtaggccatcccacaagcggccccgaggccctggcccagggagccagtggccacgtcggtgaaagcttgtttctgtcataacagaaggccaccgttaatctgagaggagaagggatcctggtctcacccgcctagggagccacactcccacccagcccagcaagcccttcctctgcagaaggtcaggccccaggatggcctctacctagcatgtgacttcttctcctaatgaactaattataattataggttcaaatcccagccctgcccactagccagctatgtggcctcaggcctcaggcaagggactgaacctctgtgagcctcagttcccacatcacccacttcacaaagtgctgggagagagaatcatgaaaaaattgacagaacatttgcccctcgtggggacccagaccatgtgacagtttttgtggtaatccatgaagtcttaacgtttgcagggatgccagatggcaccccaaggaacaaactgggtcccttccccagggtttcgccagcatcctgcagccactcccttatcgagtcccctctcttcccaagctgtagctacctagccaaggaggcccagtgcagaagggtagcttggggagaggccctccctgaagtcatcccagagcaccctggctgaggcctcagaaggccttcccctttggcaccagcttgggttgaatacgtgtccccaaaacacctgcttctttccttcctcaactcaatgccctcctccgcctttcaacacctttggcttctcagtgggcaccccctacccccgtcccacatgtctgggaaataggaagtggaggcagaggcatgggaggctctggcaggagcacttaccgggaccgggtgcccgtccaagtcggagctgatcttcctcaggttcagcagctccgcctcggccaggaaaccagcttcagcccagaccgcgtagaggatgggagctgcatggccctgccgggagatggatggtggggtgaggtcaggtggggagcggttctacttcgggctgtgcctacttcacactgacccctggggcccggccgagccggccaactgcagcatccatttcaggggaggaagcaagtgaaggccacttctcccctttcagccctcttcagcctcttggttttcagcccaaagttcccactgccaaggccaggcaggcactaagacaggtgcagggggcacagctgtgaggctggacgaagccaaaaccccagcaggcagccggctgccctaatccctggtttgtggcatgggaacaacttggacagacttctaagctctaaagcctgcccgagagaccaaacgccacggaggcaggcctgagcacaggtggatttcagggatctgtggctgtgattccacccagaaggggggggtcagggggtccccatccaaaaccctgctacagcacaccaccaccccgagggggcaagccgtggcctcgggagcgctggcacaacacagatagagcaggtagggagccacaacccagaccgagatgccagtcctgcctgtcaacacccagactgggcagaacacacaacagatgtttccgtagtcccctactccatttctttgagttaaagcgttgtttatgtacctgggctccatggcagagcaacccatcaattcagtcctgtattccttagccagctgggtcagcacagagcaggacactgagggagaggccaggacgagcagggagaaggcacctgggagaggtgggcccagccaggtctcctcaaagaccactcaccattccagggcccgtgtgaccctagtcccaggcaaggtgtggctggcagtgggcagctgggctcttaccttggagagcacaaagcggtcattgtgcggattccgggggtcctgggacttgtagcgcatggtgtggaaaaagaggacagccatgatctctgcggcgctgcagcatgacgtggggtggctgtggcc

SEQ ID NO: 7367 - DNA, 600 bp, Homo sapiens
tgaccttggctttgacaggtttattctctccagacggtcaggaggacaggtggacgtgtccacaaatgtgtctcatcctcgcaacagctctgaggatttcctggggactccaccagtggccggggcacccagccctcctcccccagcactagtttgttcttggccagtataaggttttgcacagttgaccttataagcagggctgaccccagctgagcccgagcagcagggggagaaatccactgtggtcagcagtgtgagggcagtcacctaggaacagcagagcaggtcggggctggagcttgggactgcagaattctgtgtgacatcagaagctcctgggccagttgtcacatggagtcccaggccccattggcaagacccagaaatctgcattttaacaagttgagggggacagttccacacttgggattgaggacctctcatgccatcctgagggtcccttttcccccaggacgaaggctgccctgtctctgcttctctgagatgcctagttaaaaggatatgacaaggacgagggacaacaagcaagtgaacctccctatcccaggagacctgactgcaaggctgtggggactt

SEQ ID NO: 7368 - DNA, 388 bp, Homo sapiens
ggagagaggaaggtcagctgcgaggtgaccaagggtgagaagtagaacgtgcagctgattttaagccttccttgctaggcctgcagcctttcattccttccaaaggctgcatccagcctgctgcggccactctcttcacttctaccaagtaaacacgcacaaaagaagaacgcttaggagccaggtgtccccgcactcttccccagagcttttggggctctccctcggcagagcatcctgggttggggaggtgagctgtgccacttgggcttcgtgacttcaacaagtgcttcgtcaacccggggctcagcttcttcacttgggagagtgtctgggagacacagtgagataacgcagcatgcacagtacccaggtctctagcagccgc

SEQ ID NO: 7369 - DNA, 486 bp, Homo sapiens
ctccaccttgtcccacgagtaggagatcccagtaccctggggaaggcgacgtggggtccctaaagacttcctggagccagcggctgcatatctgcagactctctcaggagagagaaaacactctcttaagatgtaagctttaattctaactggaacagcttcccattcttttccaacaccagaaattgccagcagcagctgctcagcggaactaatactacatggcctcatcactccagcccctgcttgccctgagggaggcgggtttttcagcagtgccagcctttcagggcggccagaagcagagcatcccaataaaccagaaagctaagtggctgaagcaataaaagtcactcaaacataacccaaatctgatggtaaaacaaagaaaatcctaagtatggaaaggatggttcctgctgtctttcactgggaaaacccattggttctggtgggggcctagggtggctttggccctgcactgat

SEQ ID NO: 7370 - DNA, 606 bp, Homo sapiens
tgtttttatttttgagacaaagtttcactcttgttgcccaggctggagggcagtggcgcgatctcagctcactgcaacctccgcctcccgggttcaagcaattctcctgcctcagccttccccagtagctgggattacaggcacccgccaccatgcccggctaattttgtatttttagtagagacggggtttctccacgttggtcaggctggtctggaactctcaacctcaggggatccgcctgcctcggcctcccatagtgctggaattacaggcgtaagccaccgtgcccggccctgacaggtgttttttttttaaagtcccaatatgagcaaatatctcaaaatgatcttcagacaaatacaaagaatgttaacaagattgccagaaaaatctaatgaaaaatttctaactattttttgaaggaccagcctcatgagtaaaggagccggcaggagcaagggagcctcctgcttcacagcagctgttacagtcgagcacaatactaacatgtatatcagtgtttcactccaccagggcccagtcccatctctcagaatacccagacaatatgtcattattcaaaaagttaagtcttctctcctc

SEQ ID NO: 7371 - DNA, 627 bp, Homo sapiens
gctggttcttccattcagaaccctaaagtttctttagaacctttgccagccaggctacttcaacaaggacttcagaggtcaagccagattcacacttcttcctcttcacagacccatgtctcctcttcttcccaagcccaaattgctgcctcttctcatgctctgggaacatccgaggcccaagatgcttcttcgttaacacaagtaacaaaggtgcaccagcattcagctgtccagcagaactatgtgtctccattacaggccaccatcagtaaatcccagaccaaccccgtcgtgaagttaagtaataatccccaactctcctgttcctcctcacttattaagacttcagataagccacttatgtaccgccttcccttatctaccccctcacctggaaatggttctcaagggtcccaccccctggtttctaggacagtacctagcaccactacctccagtaactatttagccaaggctatggtgtcacagatctccacgcagggtttcaaatctcccttctcgatggctgcctccccaaaacttgccgcatctcccaagcctgccacatctcctaaacccctgccctcgcctaagccttctgcctcacccaagccctctctgtca

SEQ ID NO: 7372 - DNA, 303 bp, Homo sapiens
gttccttccacttggtgttaagtatgacagctatgtgcaatatatcagatactttgtcttgtgaggacagctcagtcaggagctctgtcatctcaaaaattatttttgttttgatagtctctgaagatttccagtagaaaaacaattgtaattgtcatgagaatcttttagttatttaaaattaactttgtaattttttattcaccatttctatttttttccatatgatgctttacattaggagtgtagtccaaaaaaggaccagaaaactccaacatccctggtggcttcggttagcggtcc

SEQ ID NO: 7373 - DNA, 123 bp, Homo sapiens
ccaacccaactcccaagcctactgtatccccaagtagttccagtccaaatgcactagttgcccagggtagccactccagcactaacagcccagtccataaacagcccagtggaatgaacatca

SEQ ID NO: 7374 - DNA, 4251 bp, Homo sapiens; identical to SEQ ID NO: 7215

SEQ ID NO: 7375 - DNA, 10429 bp, Homo sapiens
ggcagagggcaaacggcccctccaggagggagccgggagattacgcagctccatgtaggtccacgtttaggttgggaggatctaccatgaagaaggtcaagaagaaaaggtcagaggccagacgccaccgagactccacctcccagcatgctagctccaattccacctctcagcagcctagccctgaatccacaccacagcagcctagtcctgaatccacaccacagcagcctagccctgaatccacaccacagcattccagccttgaaaccacctcccggcagccagcattccaagcccttccagcacccgaaatccgccgctcctcttgctgccttttatctccagatgctaacgtgaaggcagcccctcaatccaggaaagcaggtgggctgtcttctagcttcagcagttccagccttcctgctgatggagttctgggtcatcccaaaggctggttcttgtaggatagtgatgcatggttaacgtgtatcctggagctgtgctgtagagtgggaaggtttttgtttttgtttctacccaagagaccaggattcctgggttttgtcatttctcatcatcctgagtctcactgaagacagccacacatacatataaacatttaacttggttccatagtaatacttgctcactaggaatcagcagtgccatgcaactgctaaaaaataaaaaccaaggatgcatttatagaagtatatggtttagaataagggaggtgatgatactgctttattctgtcctcatcaagctatccttttgggctgtaaaagatgcctgacaaactagtccaaggaagatagtctgggttgatggaggatgagaaggatcagggagaccatttagtgtatgacagtcaattgaaggaattggaggatgtctgtctgtcaagtggaagatgtgaatagacttgttccttattgtcctcagagatctaagggtctgatgtggtttggctgtgtccccacccaaatctcttcttgaattcccaggtgttgtaggaaggacccagtgggaagtgattgaatcacgggggagggtcttttccgtggtgttctcgtgatagtgaataagtttcatgagatctaatggttttaaaaaagggagtttccctgcacaaactctcttctcttgtctgccgccatgtgagatgtgcctttcaccttccaccatgattgtgaggcctccccagccacgtggaactgtaagttccacaaacctctttcttttgtaaattgcctagtctcagatatgtctttatcagcagtgtgaaaacagacaaatacaggcccatggataggatagccagacaaaatacaagactctcagttaaattttaattttagtaaacaacaaataatatttttagtatgtgtgtccccagtattgcatgggcatcctatatttttatttgctaaattagcaatcttacccatggaagacattagtgacagaaagccttcggctcaacataaaaaacttcccaacaattagctctgtctgaaaatggaatggctgtcaggaaaagtggttccctgtcttcttgggagccaaacagtgtctgtataagcattggattgtgtagagggaattcaagtggagttcaggaggtgggctggtttatactactaacaataatggtgatagcaaactaacattatcactaagcatttactgtgtacctagcattcagatcaggtgtcttaattttcacacgtgataatcctataaaagttcttccatattatctccattttatagatggggaaactgaggctcataggagtcaaacaggttgctcctgagcagacgctggtagccctgagaagggaaacccactctattctgactccagaaccctcactttaaaccacagcactgacctttccattccaagaggcctaggagtctccacaagaggaagaacatctctgtccgagcatctcctggatctgccatgagccagtgcccacgactccatagccttgaacaggccacactccctgggccacagtttaccccccgggattgtgtgggcataaaataaataagtgatggagatgagagtgctaaatataaggcatgccatgccaatgatccttccatggccaggaatcaaacctttcttgacatatgatattgattttgagcaccatactatatgttgtaaagattgtgatcatcagccagtgagagaaacatttctgggttatgatcttcagaactggcatcttcagtactggtagaaagcaagactttccattcccaagtcttttaatgaacacatgtgactcatactcagagaagaatttggcccattgaacaggcaaagcaagaaagcaagaaatggtggtggctcgccagtggttacagcagacaccctatacttcttccaaaggaattctctgcgtagaaaggaatgttggagatgaaggatgagggcctgcaagtaaagcgtgccattttctaaaatccaagcctttttgtgtgcagaaatattgtagctcaagaaaatgccagtcttccactaggatgggtataatcagaaggatggacaataacaagtgttggtgaggatgtagagaagctggaatcctcatacactgtaggcgggaatgtaaaatggtgcagctgctgtggaaacagtctggtggttcctcagaggaacatgaagttaccttatgacccagcaattccacttctcagtatacatccaagagaattcgaagcatcttattaagcatattagaagcacaccaaaacttgtacacaaatgctcaaagcagcagcatttgtaatagccaaaaagtgggaacaacccaaatgtccatcagctgatgaatggataaacaaaatgtggtatgaaataccacagtacaatgagtatggtgaaatactatttggcaataaaaagagatagtgtcctgatacatggtacagcctggatgaaccttatagacacttggctaagtgaaagaatccagtctcccagaaacccacacatcgaatgattctatttacatgaaatgttcagaataggcaaatgtattgccagggactgggggaaatgggagagtggggagtaactgctcatggagatggggtttctttttggggaaatgaagacgttctgaaattagtggtgatggccacaaaactttgtgaatatactaaaaaccactgagcactctaaaagggtgaattttattgcctgggaatgatatctcaatttaaaaacttttttgtaattaaaaaaaaagacaagtcttgcctttagaatcccctctcctcattccgggaaagtacgtgtcgtgggcaagtctaagcagaaagtgtattgaatctgccaggttgaccacctgtttcatgcagcttagggtcagaagaatctgtagctctgtcaagaagacgcagggctacagataggaaacaggagggaataatccagccagaaattatcttgcccaaccacagagggcatcatctacattctgctgggatccataccagaggaggacagaaacagaaaataggatcgggactggaaactagagctgtggttgtcttctggatggatcagaatgctctagatcaatggaacgtggcagctccaattccaggaatgtcagtgcagcctctcctgaggtgagcagtcacctgaaattccattttcactgaattaaacgtgagaaagcctgagttgagaaagccaacttctgtaatctactccccaaaagggcatatcccttaaattagctgagcctcagtttccttatttgtaaaacaagaccagcagtatcccctttacaggattactgtgaaattaaatgagatgagcatgctaagtgcaaagcatcctgaaggtgtaagccatggcaccatcagcaccacctccatcatcatcatcgttgttgtcgtcgctgttgctactcccaggtagcaccagtataaaacagccattttcccatgcggtcagtcttctcttctgtttggttagagaacattttgtgggagaactgccttccttaggtagttcagtcccaaatcctcaatgatgccttggaaaaaatccagcgttcgccctggtaatcctgcagctgctgccgttgtggggggccttctcagactgtgttccagactcccccgccccagcctcccagggcaggtgcctccctcacctctctccttctgtccccacagggcctctgattcgcgccggcccgcattcctgctcctgtgccacttgcccctgcagctccgcttgctggcgtcgtctggggctatgccatagccgcatcttcgatgtccttctgcctcgggactggcagatggcgccagggagaggactccccaacctgctcaccttctacaggttccaagcgcgaggggctggagcctcggggcacacagtccccagggccaggctctgcccccagaccttattagcaatcatgtatcacttcctcttgggaatcccaggccgaaggaaagcctttctttccctctttgctttgcccacttcctggacgttggcaggcagggccctttctgaccggccccacccccggggtacccaccccgcctgtacagagaggtgccagttttcttcctcactgggattcctcctcaggggcttcctttttcttttctccagagatgccctcccctcctcagaacactctccccctcagcccttcacagagtcgctcaggagctttgtgtttaaacactgtttggccatgcacctccgtgggccctcagtggcctgtgtcataggcaggggccttaggttcctgatctgcctacgaatgtcgcccagaatttaatgataaaaaactacttgtaactcatatgcctcctccacacaatagcaagacgtcagcccccttcagactgtgctgggctctttctgggggtctccacagggaacatctgcccccaggctggtctgttggtggcggcccccatgacatcacccatagtatctgtccttccttcctcttcccaaaaagccaccaggagcagtgtcatggctgccaccgccctcataggaagaccccatccatgcagggaacagactggagatgttcccacgtttgggcgctgctaggttacatgcatgggctgggagaggggtcgccatctgccccacctgagggcctcacagatctcaatggaagaggcccttccacttggcgacctcacacccccaccccaggaactgaggccccccaacccccatccttgtcctgttcctcttcccagcctcttccctacccaatcccctctcctttctggagctgaaaaactccatctctcctacacatggagataagtaaatagataccggggcgtgtggggagaacacgcttggagccaaaaatactccaccacccagtaagctccgtcaaggaaaggtctgcctgccaccgttagccacaccctgcccacacgcttagtacttccatccatccatggccaaatcgtgccatgggttcatatcgttttaaaaccagcaagtgttattgagggaaacttactatgcagaggacatggggcactgtgagggaaaccagaacagggaactttacccctaaaattgttgcagtcgacatggagagctaagacccatgcatttagaaaccaagatgcaagatgcaaagagccttgtgtcctctaggagaggctccaacaggaacctctgaaaggttccaacaggaacaggctccaacaggaacctctgaaaggttcctgtcaacagcatgtgagccgagtccagaaggatcttgaagtcctctctggcttaagatgaaaagcgggagcaatctgggtgcaggaaaaggcaagcgtgaggctcagaatcaggaaagtgagcagggagagacagggtccatatctggccagggcaagacatgtagttttaattctgctccaattttagcactggcatgcttttctcaatggagtgtaatgttggctcttggctttcaatccacattcacattaaacaagaatccctatttttgtaggatttttatcaaaacgggtattgcattttttgaatgccctcctcacaattattgccttagtcatgttttccttgcctttgtgtgggtgtaatatattatttcccaagttcctttctctcaatggagtgaagtgatagaacttacctcatagggttgttgtgaggctggaagaagacactgggtgtgaggtatttagcacaaggcctggctcacagcagacttgaccaccttcctaacctggtccccttctgagtgttcagggcagctagcatcccaggccagctcaccctccgatcctcaggggtctttcagtagggacttgttggaaggatgggaagaattaaatgctctcctaagaggagtttggagagggggaagatgggtattcctgcaatcctgagggggccacataatttccactttctcctgttcgtagagaggcactgaagcccagcttcccaccacccccacttctgctttgctctacagaaaatcttcaagaaaaccctccagtcatcgtaacgcgtgtcctccaagccctcggaactgtggctgtggctctgggggctctaggagctgcctactacatcactgaatccttgtgaacaagcccctaggcccacagtctggcaggtatgttgagcgctctgtcccttcgaatggaggtggtctcttcaggtggaccaagccccggcctctcaagggaagcttgccagtggagtgactccctcctggcctcagggtcagccggcatggccctctagggaagacctgatgctctcagatgacgctagactcattattacaatcatctaaacagagcccccacctcctctgccccgggatggtgtccctggtcatggaccctggacaagaggaaatgggagggatgggggcaaaggtttctacccatctcggacctttcttggaactttctccctgcctggaaagcttgtctcctacccagtcctaccagtccatcacccataaagcccccttcttccatgaaacctttctccatcttcccaacttcaatgacgtcttccatcttctcaacccctgtcctctccacctgtgcctcctgtgttgtggatgatcctgtcgtttgcctgtggcctgtctcccatctgtcctgcaagacccctgagggcaaggggcatggctcatgcagccatcttccctcatccctggaagcagagcctgagactggggttgaatggacaggtttattgaggaggtgctctcagggagtgagggagtgagggaggcaagaagaggcaagggaaggagctgagaggcaggaggccagacctcagcttgaccctgtgggagccctggaacaagaatgatgacacagagttagtctcagcagaggggagagacttgccctctggtgctcctccttgtcagtgctttggctctgagtgttgggtagggactgcatgtctttgtggaaagagcagctccctttgggctgagggtgcttccctagaggaggggcagctctgagctattagcagcacattcacaactcacaggagttgggcagtggatgcaccagcccaaaaaggggataatcgtctgttttccttgcctttgcagtgggcgtaatatattatttcccaaggttcctctctcccagtggagtgaaatgatagaacctaccttgtagggttattgtgaggcttgaagaagacattgggtgtgaggtgtgaaggtctgggtggggtgccaagaactgccacgatgatccccttgccatgtccacacttagcaaatgcttaataagtgacagtggggatgatagcatggggataatgagaaacatttcaacccacttccagacctccaccagccccaggagttgataggtgatggcgctgggagaagatgttcagaatatctcaaaagccaagtccagaaggtaaactccagggagagctcactatcccctcatgtgctctgtgataccatgtcccatgtctgtggcagaggacatagtagttccttagctgctatgctatttcctgaggcgtttcctgagtggcaagaacctcagtttcctcatctgtaaatagggaaaatgacagtaccttcctcttgagcctgttgggagaggtgagataaggtgttagaggacagagctcactgctggggggtcccgttgctgttgtcaacatggaggtggtgggaaggatgccagctttggagttagagctgccggctcctttcttgactctgctgcctgatagctgggtgttagagacacgtttcttaatttctctgacagtgacatgtctagtggggacaataataactacctccacaggcaatggttttgaggattgactgaggggatgtgtggaagtgctgagcacaggacccagtgtcagggatgggtggatgctggccactggcaacatgacaaatgcacccgagttaaagcattttctcttcaaaattccttgcagcagaacctactggttgtgagctggagttctggaggcaggcaggcttgaggtcagaggcctcttcaatacccagtatttctgaggcctggggcaggttccctaactcctgatgtctcattttcttttcgttaaatggagataatcatagcacagatctcattggattgttgggggcattgagtggaaaaaatgcatgtaaaacacttagcacagttcctggcacaggataagcactcaacatagctacatcaccactactaccaccactgtcagcaccatcaccatcaccaccaccacctacctctatcaccaggccctgcacctggcaattctgcacatcccttcaattaatctttacaaccatcacccttggaggtagttgtcatcaacaccattatcatcatcatgataatcattaccatttgttaaatcagtgttcccctaattttactgacttttgatacctgtaaaatcacttaatatttttctttaaatttgcttactttttggctgggaatagtggctcaaacctgtaatcctagacctttgggaggcccaggcagggggataacttgagcctgggagtttgagaccagcctgggtaacataccaagaccttgtctctacaaaaaaaaaaaaaaagagaaagaagaagaaaaaaagattaaaaaattagccaggcatggtcgtacacacctgtaatcccagctatttgggaggctgaggtggaaggattgcatgagctcagcagttggaggttgcaatgagctataattgcaccactgcactccagcctgggtgacagaactcatgagaccctgtctcaagaaaaaaaaaaaaaaaaaaggccgggtgtggtggctcacgcctgtaatcccagcagtttggaaggccgaggcaggcagatcacaaggtcaggagatcaagaccatcctggccaacacggtgaaaccccgtctctactaaaaatacaaaaaaaaatagccgggcgtggtggcgggcacctgtagtcccagctactcgggaggctgaggcaggagaatggtgtgcacccaagaggtggaggttgcagtgagccgagatcgcaccattgcactccagcctgggcaacaacagcgaaactctgtctcaaaaaaaaaaaagaaagaaagaaaaagaaaagaaaattagcttactttttaactggccagggaagaactttagccaatgaaagctgcccgggcacctgtatgagagtcactgtaggggagggcgatggaggtgcatcgtgggggtacattaagtcgtgctgatcttgtaggctcagctcttaatcaacaggcagtttgatgtccttccctgtccagagagtgaagaaccatctgacgacagtgacatctttcctttttggggaaagatgcttctagaattttctttcctaaagtttggtgaacctctcccttggcatcttcctcagctgaaggtgaggccctaaaagcaaaggacttctttcccagccattttgggcgttgaatgtggtcaaaccactgcagtgtagcttttggggagtgagactccatcatagctgcaggggcccccggggaaggcgctggcaccgatgagctgagcaggagccaagcctggccaggcgcctggcaaaaggcattacagcctgaggtgtgtggctgaaagaaggagtgggtgcaaggaatggaagaaatttgaatcctaaataatttatttctccacggaaggatcacagctgctgaagcctcacctgtgaggctgtgaaactggaaagccaccaggattccaggtcacacggggtattgtctaagctgattggctctgtccttgtttttcttacagatccagtttccatcaaagggacctctcttgtcaccaaaatttaaaaaaagaaaaaaaaaacga

SEQ ID NO: 7376 - DNA, 156 bp, Homo sapiens
agtagctgggactacaggcacccaccaccacgcccggctaattttttgtatttttagtagagacggggtttcaccatgtcagccaggatggtctcaatctcctgacctcgtgatctgcccgcctcagcctcccaaagtgctgggattacaggcgtg

SEQ ID NO: 7377 - DNA, 402 bp, Homo sapiens
aaaaacccccccaaaattccatttaatttaatgccatcatttatgcattcagcaatatttttgagggcctactatgtgccaggcactagttggagttgctgagggtataagatgaggttccaattctcatggagcttatcgtttagagggaaaacaatacaaaagtaaacaagtaggtgaggatttctgagtgtgctaagaacaaagtagagcagggtactgaggtgtgagcacatcagtagatttcgtaggaaaggcctttcttaggaagttatatttgagctgagaactgaatgataaaggaaagccagctacttgagtatctgggggaggaatattctaggcaaaggtaatagcctgtgcaaaggccctgaggcaggaatgtgcttgctttgaggaaat

SEQ ID NO: 7378 - DNA, 256 bp, Homo sapiens
actctgggaggccgaggtgggcagatcacctgaggtcaggagttcaagaccagcgtgaccaacatgatgaaaccccatctctactaaaaatacaaaattagccgggcgtggtggcacatgcctgtaatcccagctactcggaggctgaggcaggagaattgcttgaacctgggaggcagaggttgcagtgagtcgagatcgtgccattgcactccagcctgggcaacaagagcggaacaccgtctcaaaaaaaaaa

SEQ ID NO: 7379 - DNA, 150 bp, Homo sapiens
ctgggcatggtggcatgtgcctgtaatcccagctactcgggaggctgaggcaggagaatcacttgaacccgggaggcagaggttgcagtgagtcgagatcgtgccactgcactccagcctgggcgacagagcgagactctcttaaaaaaa

SEQ ID NO: 7380 - DNA, 14252 bp, Homo sapiens; identical to SEQ ID NO: 7278

SEQ ID NO: 7381 - DNA, 2270 bp, Homo sapiens; identical to SEQ ID NO: 7279

SEQ ID NO: 7382 - DNA, 514 bp, Homo sapiens; identical to SEQ ID NO: 7280

SEQ ID NO: 7383 - DNA, 7228 bp, Homo sapiens
ccaggtgtgcagcctacagccctgatggggagatggtggccattggcatgaagaatggagagtttgtcatcttgttggtgaacagcctgaaagtttgggggaaaaaacgagaccggaaatctgctatccaagatatcaggtacctaagtgggtggtctgggcatggaggagaaaggcaagcattctgcttaccagtggttcccattccagccacggctggaataaagaactcagttgtgagagggtcactttcaacaagccacctatgaaagaataccttctcccactctcactcttagacaagtctttgctaatttccataaaagtgtggttaaaattacttgtaaatgtcattctacatatttcccggggattcgatccagataaattgttgaattccgtagaatgccaggagaggctgaccacatgtgagtcacaaggtggctctcattgcctttaggcctggaaggcctgtcacagaccagccttcgtgcctgaccagccccaaacagccctcctcatggactctgctctcggattgctttttctagaatcagcccagacaaccgattcttagccgttggttcttctgaacacacagttgacttctatgacctcactcagggcacaaatctgaaccgcattggctactgcaaagatatcccaagctttgtcattcagatggatttttctgcggatggcaaatacattcaggtatgcttggggtttacttatatctggggcaaccaataataacagcagtaataacaatggcctatattaatcgagtccttactgtgtaccaggcaatgtgctaactcactcttcaccagaactccttaagtagttactttttccatattttataaatgtagaaacagaggcttagagaatttaagaacgtggaggaaatagaatttaaaataataaagagtaagaaaaacaggaaacacaagccctaatcatctttaatctgcccctcaccacctcctcttcagagtttcctgatttctagttttctggggctacacctaagccttgtgccgcttctggtatttattcatgtctttcccaactctactgggtagaatggcccctccatacgtgggccctggactccagccagtgggcctggagtgaaagctcatccctgggtcccaggggaactgaccggtggaagggagggagagggttccactgctgggactgatccctaaaaacagaatgatttctctagcactcaagaaatctgcgtttgtgagctggcctggagctggatattcactgtaaaaggagagaggatgtatttattcattcaactatttgctgaaccgggcactatgctagacttttagatggacaaaatgagactggtcccgtaaccacccaaggggttcaccttgccggctgcctagacagagcccatttctcaagacaggggaattgcaatagagaaagagtaattcacgcagagctggctgtgcgggagaccggagttttattattactcaaattggtctccctgagcattccggaagcagagttgttaaggataatttggtgggtggggggaagccagtgaaccaggagtgctaattggtcagagatgaaatcatagggagttgaagctgtcttcctgcactaagtcacttcctgggtgggggccacaagatcagatgagccagtgtattgatctgggtggggccagctgatccatcaagtgcacggtctgcaaaatatctcaagcgctgaatttaggagcagtttgagggtcagaatcttgtagcctccagctacatgactcctaaaccataatttctaatcttttggctaatgttaatcctacaaaggcaatctggtccccaggcaagaaggaggtctgctttgggaaagggctgctaccatctttgtttaaaccataaactataaactttctcccaaagttagttcagcctacatccaggaatgaacaaggacagcatggaggttagaaacaagatggagccagttaagttagatctctttcactgtctcaatcataattttgcaaaggcagtttcagtccctgcttcctggagcttgctctataacagagaagacaagcactaaacagacaatcacaaaatataaatataattacaaattgtgattatgtgccaagaaggaaaagtacagcattccggggagcatgtaacaaggtgctgaatttagatgcacttcctctcagcaagtgatatttaagctgaggtctgcagggtgtgtaggtgttagccaacagagaggtgggaacattgttccaggccatctgcatgaaagccctgaggcaggaaagagctcagcttcccagctcattccaggagaagcactgcagggagagaggaagctgaacaggaagggcagcagccattcactgcaaatgtcttgatggtaggaaaaatggtctgtttcctttagaagactcccagagcaccgaggttcaggttctagacacctcagagatcatctgtgtcacccactgtccatgagaaacctgccttacctctgtaccaaaggttcttggtttcctgtgaactgggattcctgtgtatcagaaacacctggcggctttgttacagcagagactgctgggccccaccctttcggtgtctgtctgggtaggtttggggtggggcccaaaaatttgcatttctaacacatttctagatgcagctgacgttgctggtcgggaaccacactcagagaaccgctatcttaggactctggaaaatagcgagaaaatggatgagaagaaagatgggaaaatggcctgctgttgttgtcatgggctggccataggctttgcagcctggagctgagcttgggtttggagaaaagccctagggatgcagaggctgggcagtgttctgggaaactgtgcccaaagggagtctgtgggactgagaaagaacgttgatgaacatggcttcccttctacctacaggtgtcaacaggtgcctataagcgccaggtgcatgaggtccccctggggaagcaggtaactgaagccgtggtcattgagaagatcacctgggcctcctggacaaggtgactgactggaagaaaaaacttgaggaaaaggtcacaagggagtctcttgtctcactcaggctcagcctccaagtctgtgcaggatctgaagaagctgagaaatggagctgtcttttcttttgggggtgagggtgggaggcttcttggctagtctagtttaggtcactggctttgatctgacctaggtttttgaaatgcgaagcccctctttttgtgtaatttcttctacaagtctccaaccccttccagcaagttcaacaggaaaccatctcccgtctcttggccaatcctagtgcacagtgaggcctccattcgctaggggaagggagtgggagggccagaccccggcttagcaggatgagaaacaatggctaattcatgggaaaagagaccatttagtctgtgagttgaaaggaacccctgctgttctccccaacacacacatattcaagaggaccacagggaacagggagagaatcaaagatgggggtaacttgtgtttttggagtgtagggaactgaggcagagggggaacagtaagagctggcacaaatgtacagaggggaaggggacagatgctttcatgccaggagagccacatggctgtactgaattacataaaacagcaccagggaccaatttcatggaatacaatttttccagagaccaggtagggggtggggtttcgggatgaaactgttccacctcataaggagcttgcaacctagatccctcgcatgcttagttcacaatagggttcgcactcctatgagactctaatgctgcggcagatctgacaggaggcggagttcaggtggtaatgctcgccaccactgctcacctcctgccctgcggtcggttcctaacaggccatggaccagtaccgttccgtggcctggctgttggggacccctgatgttaaacatccctctcttccttatccctgggaggtgatgactgactgcaaggagccttcgccgtgacttccttctatcctaacccctctttctgttggaacagcgtcctgggagatgaagtcattggaatctggccacgaaatgcagacaaggctgatgtcaactgcgcatgtgtgacccacgctggcctgaacattgtcacaggagatgactttgggctggtgaagctctttgattttccatgcacagaaaaatttgtgagtgttcctcagagtaacctccctgcaggttctctgtttggccgtctgcaggagataggggccacgtctagatggccctctgggagacacagagaaaccctgtcccggtacagtggaaatatggcaatgagtttttcacctcctggaggggcagtcctggaagccagaagggaggatggagggtggataaaatgacctgaagtggggcaaggatgagaggcaggaaagtcagccaaaggctggctaatagatgagtccagaccaaatggaagtccccagtgaaggaaggttctgggagcaggggatttgagtgctggaagtagtctgtggttgctgagaggagccagggtctcttagctgtctccattcacttttgctcacaggccaaacataagcgatacttcggtcactcggctcacgtgacgaacatccgtttctcttatgatgacaagtatgtggtcagcactggaggagacgactgcaggtactaacgtagctgacccagttcttactccacaggcctggccagctctccctccccatctcaggcatcccgtgggtcagcctctcccaggggcatgaggagggctgatgtggggctaataaacaggaaattccatgagtcctcatgaaggcaagtactttccaagataaggcatttactctttggtgactgtcaacccaatggttgtgactggagctgtcctgggatggcatgggcatgtgatagctactctgggcactgctgggggaaagggacaggtggatgacacccgagatggctgatttgagtagaagctcttggcagcccatgggcttttgtgcataatcaggaggttagaatgcaaattcatctatatgtccttttaagaactcccagttgatcaccagtgttgggaatttctttatttactctaaatagagtatagaggaacaggtctaggtcattctaactcactcagcttccccatttctgatgagcttcattgtagcatgaatactgggttctattcagcccaagcaaaactcctgaggggataaagatgaaatacaggccttctgatacttcctggtggtctgagttaggttgtaagaaaggcacctataaagaatctcaacccacttcccactcaaaagcactgtgtatttctcatggcctgcctgggagcccccatctccagcctgctgtgctggctacttctggcacttatagcccttgagatagtaccgccagcagctccctgtgaagtgctaacaccccttcaaagcagcaccaacccaattgtgaacaagctaggagtaaaagacgtaaatgaattggtcaccccaatgcaggggatacagacttgttttaatataaaaaagaagtggccttaaccgtgcagggcttgcaggcctttgtaggcatgggagcatgctgtgatccctggttctgtgctaaacactcaaaagggctctctgactcaagtggaggtgataaaccttttcaatagtaacaggagagagtgtgatatcaaagtgccagaagtctcacggaccaacatttagcacagacattcaaactgctgaaagaaccaaacagaactcaactgaaaaaaacagaccttttaagaaaagcaatagatcttaatttggtggcaagatccctggtttaccttttgaagtcaaaatgttcaatacatcacccgagcttgacttttgagcacttggcaagattgttttttgccacttgacacaagtatgatgtccagctatgcaaaatgactgtttgatctgccttttcagtgtatttgtgtggcgatgtctgtaaaatgccagaagcctcttatgttattgctgctgctgctaccagccagcaactgcagaggccatgctgaggtgcctccttgccaccagccgttgggaaatgcctaccatgctgccccggatgcacaagctcaaaacgctgcagaagttacacaactgctcccataatctggactctccaaaaccgtgatgccacgaaggaaggtcaagttttaaaatgttaaagactgcttgcctctgttcctgagactaaacagtatacatactaactacattgacaaagaaatcctatctgataatgtagcccgctgacgaattttgaagcctcggttaccctaaccaatatgtagcttttaatttgcatcaaaacttttacaaagatgttttgctattgtttctatatacttcaagaatgttcatttttacaaataagttgaacaagacagcctaagttagatgcaccgaagtactagaaatatcgctagcctctgttctccagtttagctttcaaaaccaaatgagccatgtataaaggagttgagaaacttaatttttaaatgtttcatttgcagagttttatatccattaagtgcctttgaaagtttccagttgtgtgggctgctgtctcacctcccaccaatttctcctttctccatatggtgctaaaacctcaaagctgaggagggctgcaggacccttagcagattcagtgtgtcacccttgtcctgtgttcacgccaaggcttcctaaatgaaagacatcggttacctgcttatgggaaggtgagcagcaaaggaattgaagttcgggacagggtagaattatgggttttcattgtgtttcatgccaaacccacaaaatccaaaatagaattcaagttaaacaaacttctactacaaaatggaaggggaaaaaggctcaggaaggtctatgagaatgagctgacttatctcgttaaatcttaagataaatgagggtaacccaaggctgcaccttggtgtaccaccctgagtggagttgaggtgacttcatttgattgcttcaggcgaactatataggtcaagtcagattataaaaacatatctgcagaacaaattgtaaccccagggatagctgggtaatcaaaatataaagtgaggtagagttccttgaagttgg

SEQ ID NO: 7384 - DNA, 5049 bp, Homo sapiens
catggcttcccttctacctacaggtgtcaacaggtgcctataagcgccaggtgcatgaggtccccctggggaagcaggtaactgaagccgtggtcattgagaagatcacctgggcctcctggacaaggtgactgactggaagaaaaaacttgaggaaaaggtcacaagggagtctcttgtctcactcaggctcagcctccaagtctgtgcaggatctgaagaagctgagaaatggagctgtcttttcttttgggggtgagggtgggaggcttcttggctagtctagtttaggtcactggctttgatctgacctaggtttttgaaatgcgaagcccctctttttgtgtaatttcttctacaagtctccaaccccttccagcaagttcaacaggaaaccatctcccgtctcttggccaatcctagtgcacagtgaggcctccattcgctaggggaagggagtgggagggccagaccccggcttagcaggatgagaaacaatggctaattcatgggaaaagagaccatttagtctgtgagttgaaaggaacccctgctgttctccccaacacacacatattcaagaggaccacagggaacagggagagaatcaaagatgggggtaacttgtgtttttggagtgtagggaactgaggcagagggggaacagtaagagctggcacaaatgtacagaggggaaggggacagatgctttcatgccaggagagccacatggctgtactgaattacataaaacagcaccagggaccaatttcatggaatacaatttttccagagaccaggtagggggtggggtttcgggatgaaactgttccacctcataaggagcttgcaacctagatccctcgcatgcttagttcacaatagggttcgcactcctatgagactctaatgctgcggcagatctgacaggaggcggagttcaggtggtaatgctccgccaccactgctcacctcctgccctgcggtcggttcctaacaggccatggaccagtaccgttccgtggcctggctgttggggacccctgatgttaaacatccctctcttccttatccctgggaggtgatgactgactgcaaggagccttcgccgtgacttccttctatcctaacccctctttctgttggaacagcgtcctgggagatgaagtcattggaatctggccacgaaatgcagacaaggctgatgtcaactgcgcatgtgtgacccacgctggcctgaacattgtcacaggagatgactttgggctggtgaagctctttgattttccatgcacagaaaaatttgtgagtgttcctcagagtaacctccctgcaggttctctgtttggccgtctgcaggagataggggccacgtctagatggccctctgggagacacagagaaaccctgtcccggtacagtggaaatatggcaatgagtttttcacctcctggaggggcagtcctggaagccagaagggaggatggagggtggataaaatgacctgaagtggggcaaggatgagaggcaggaaagtcagccaaaggctggctaatagatgagtccagaccaaatggaagtccccagtgaaggaaggttctgggagcaggggatttgagtgctggaagtagtctgtggttgctgagaggagccagggtctcttagctgtctccattcacttttgctcacaggccaaacataagcgatacttcggtcactcggctcacgtgacgaacatccgtttctcttatgatgacaagtatgtggtcagcactggaggagacgactgcaggtactaacgtagctgacccagttcttactccacaggcctggccagctctccctccccatctcaggcatcccgtgggtcagcctctcccaggggcatgaggagggctgatgtggggctaataaacaggaaattccatgagtcctcatgaaggcaagtactttccaagataaggcatttactctttggtgactgtcaacccaatggttgtgactggagctgtcctgggatggcatgggcatgtgatagctactctgggcactgctgggggaaagggacaggtggatgacacccgagatggctgatttgagtagaagctcttggcagcccatgggcttttgtgcataatcaggaggttagaatgcaaattcatctatatgtccttttaagaactcccagttgatcaccagtgttgggaatttctttatttactctaaatagagtatagaggaacaggtctaggtcattctaactcactcagcttccccatttctgatgagcttcattgtagcatgaatactgggttctattcagcccaagcaaaactcctgaggggataaagatgaaatacaggccttctgatacttcctggtggtctgagttaggttgtaagaaaggcacctataaagaatctcaacccacttcccactcaaaagcactgtgtatttctcatggcctgcctgggagcccccatctccagcctgctgtgctggctacttctggcacttatagcccttgagatagtaccgccagcagctccctgtgaagtgctaacaccccttcaaagcagcaccaacccaattgtgaacaagctaggagtaaaagacgtaaatgaattggtcaccccaatgcaggggatacagacttgttttaatataaaaaagaagtggccttaaccgtgcagggcttgcaggcctttgtaggcatgggagcatgctgtgatccctggttctgtgctaaacactcaaaagggctctctgactcaagtggaggtgataaaccttttcaatagtaacaggagagagtgtgatatcaaagtgccagaagtcctcacagaccaacatttagcacagacattcaaactgctgaaagaaccaaacagaactcaactgaaaaaaacagaccttttaagaaaagcaatagatcttaatttggtggcaagatccctggtttaccttttgaagtcaaaatgttcaatacatcacccgagcttgacttttgagcacttggcaagattgttttttgccacttgacacaagtatgatgtccagctatgcaaaatgactgtttgatctgccttttcagtgtatttgtgtggcgatgtctgtaaaatgccagaagcctcttatgttattgctgctgctgctaccagccagcaactgcagaggccatgctgaggtgcctccttgccaccagccgttgggaaatgcctaccatgctgccccggatgcacaagctcaaaacgctgcagaagttacacaactgctcccataatctggactctccaaaaccgtgatgccacgaaggaaggtcaagttttaaaatgttaaagactgcttgcctctgttcctgagactaaacagtatacatactaactacattgacaaagaaatcctatctgataatgtagcccgctgacgaattttgaagcctcggttaccctaaccaatatgtagcttttaatttgcatcaaaacttttacaaagatgttttgctattgtttctatatacttcaagaatgttcatttttacaaataagttgaacaagacagcctaagttagatgcaccgaagtactagaaatatcgctagcctctgttctccagtttagctttcaaaaccaaatgagccatgtataaaggagttgagaaacttaatttttaaatgtttcatttgcagagttttatatccattaagtgcctttgaaagtttccagttgtgtgggctgctgtctcacctcccaccaatttctcctttctccttatggtgctaaaacctcaaagctgaggagggctgcaggacccttagcagattcagtgtgtcacccttgtcctgtgttcacgccaaggcttcctaaatgaaagacatcggttacctgcttatgggaaggtgagcagcaaaggaattgaagttcgggacagggtagaattatgggttttcattgtgtttcatgccaaacccacaaaatccaaaatagaattcaagttaaacaaacttctactacaaaatggaaggggaaaaaggctcaggaaggtctatgagaatgagctgacttatctcgttaaatcttaagataaatgagggtaacccaaggctgcaccttggtgtaccaccctgagtggagttgaggtgacttcatttgattgcttcaggcgaactatataggtcaagtccagattataaaaaaattatctgcagaacaaattgtaaacccaaggaatagctggtaaatcaaaattataaagtgagttagagttccttggagttggttgtatgacggaatatgacttggacaatctttaccagaagccatccgtaagcccctcagtcacactttccatgtagctgaccagtgactacaggatgtggctgacagtgctcactgaaaggagagttggtgcgggactggtggttctgagcacatagacgcctattagtccttctggtcagtgaacgaaaattctagacctacagttactggctacttgcatttgtcagtttagagaaaaggtaaaatgaggcattttcaattgtagaatagactaacatttaccacagaagtgcttcagcattctaaatggattagatcactcattaagctatttttatatgccaatttactaatgccttacatcaatccactaataggttgttgggcccgcagtagagtccctatgcagtcccaattctgttttctgtaaccatgtgactggtgatgcagagtgataaccatgtctgcctatcttgtactagactcttcatgctgatcggatcttgcattgaaataaccatgtggaagaacaatgaatcgattaatgatgacatgtacaaccatatttaaagagcaatagtgtccgtgtgtcatgaaaaacttatttgtaaacgtttatatggtatgattttgattttatgtatgttcataaatcctgcactgtatgatatatgtgagttaaaacattggtgcatgaatttattttcaaagtataaaacacatcacttaaacattttatgtgtcaaataaaatttgattatgtaaacaca

SEQ ID NO: 7385 - DNA, 4710 bp, Homo sapiens
catattttaagtctataagctttattgatactttgcttttacagttcacaatgcattccacagatttagttcagtacagcttaaaccacaatggtataaatcttcattttgtaattaataatttcttgcataacaatgtttgatatttgcaaacaaacaacatttttggaagcattagattcagtccatagattctgtgacaaaattaactacagtcagtctgtgcaatgaaattgatgttgttggagttctatgtgtgtggcatttcatgttgaaaacagatggtagtgctcctagaaatatttcttcttctagcttatgtgctttggaactacacatgtataaccaatgactgactctgaaatatcaagcactgtggggtggctggaaggtaaaggtctaagctttgtgaaacactatacatatataatctatatttacttatattggcaattaatataacagtaaaagtcacaatacacctagaacataccagaaaagcaagctttgtcattcctgctttaccggtatgatctcgtctaaacaaacatttcatttcagaaaatctgcatcaatctacacggaccatacacagtgcacaaactgaaaagggcttttttttttttttttctagctccaccatctctgcaacttgccaagatgcggcaagactatctgcaacaaagtaaaatatacaggttttttattccaccagtgcctcagataggaaaaagatatgattacggtttaaatccatacatagcagcttacaatacttaagatgatgaacacatggcagtcaagacaggtaatttttcctcacaacagtgcatggctaaaaataaagatctaacaacgatctgtgaaactgcactgcaacgtcaaggttcgttcttccctgaccctcccccgtataatcaaatgaatatcccctttaaagatgaactcctactaattattttgggcgttttcattcagctttgcgcttcaatccagggatttttgcttggattctgaaaatgaaaaagtcaatgtaaatatcagttttgtttgctgctgcttaaaataccatcttccaagaactacttgtatgttattcagctaatacaataaatgaaatccttaaagctgcctaattctaagctataattttgccaccttggcctcatgaattagatttaaacaaagccttaaacacataataaacccagaaacgaatggtccaaatgttagaaaaacaatcttttggcaactctgaagtcacacttaaggtctgatagagatttgttactcattatgcctgcaatatgaaaatactgttctcacaatccagcacaccttatcctagtaaaaacactgcagattttaaatacttacttagccatagcatctttaacattcttatttgcaagtcctagataatgatctatctgtgcctgaaagagaggtataaaggaattattaccgttgctaaagaagcttattaaccactactatgtgtcaagctaaaggcttaagaaaccatcacacttctcatttttgtaagacattgaaaatgggcactaatacatccgtaaatcccatgtaatagagtgagtgctctattctgaagtcagcagttagttaggaaattacctgatgccgttcataaataacaggaacactgaagagtgaaatgagagctgaaaagggaaatatacaacttttcaaaaagaatggaatgatttgggaggaataaacactcaaaaaactattaaactggcaactcaagataaccaagcagtgttcctaatgaatgaataaaaacataaggatctctggatgcatctgctgttgaggagccactccagaggaatgaatgaactgtgtgaggctgcagttattagagctaggaaccatttctagcttcaaatcatatcacagtgagatttcataaaataaaggtatccctggttagatttatgactgcaccatcatataaagccaccctttatctggtttatcactgtttgttagtaggagctgtcttcagcaactaaggtagcatttcaataaaccgggaagcagtatcaccaacttatttaaagagaatacaacctcaaacttattttgagatggagtttcactcttgttgcccaacctggagtgcaatggcacgatctccgctcactgcaacctctgcctcttgggctcaagtgattctcctgcctcagcctccggagtagctgggattacaggcgtgcgccaccacgcccagctaattttttctatttttagtagaaatggggtttcaccatgttagccaggctggtctcgaactcctggccccaggtgatccgcccaccttggcctcccaaagtgctgggattacaggcatgagctaccgcgcccggcccacattttcatcccctacttttcatacaatgagaatattctccactaaaatgtctaagctcctggcacacaatctttccagcaatttttcatcccaatggctttgtagacttacccaaaatcagtagtgtcagaccattaaacaaggcaccaacataggtaaatacccacatcaacactgcaaactataagaaaataacattagcccattataaacaaaattcaagtaaagtttcttaattatgctttcaaaagcatcccatctaaatgcctacctacaaaaggcatacaacttgaagactgggtaaagtaccatgagcagttcactattaagtcacgagtctcaattatgaatttcaaaatcctaaaataattaatagatttgacccattttctctggactacactaccaagtagttgattctgctgagatcagacaatataccaagggtgcatcttacccctccagccctaacaacatttaccttttaaatgggaagactataaaggtgttatgagaattgtctattagaattgatttcaaagtatgaactagttgagtgcttgaagatatatgagctgaataattcagacattaatatctcagctgataagcaataattgggcaaagagtacttatcagggaaattacgtttcaggtaccaaaaatatcacctctagcctttgaaggatcaggcacaaagtcagtctgaattttgttaaacattggtcatcatcagttcctttgctttctaattcaaggccttcatgtgtatgtctggcaatcactttgacctacttagtaggtaacaaacatgatgccaccagctacagtgattatttaggcttatgtaacactataaatgaaaaggggagtagtagagcacccccattatctaaagcggggatcagcaaactttctctgtgaagagctagacagtagaattttaggttttatgggccacatagggtttgtgtctcatattattctgtgtcgttgtcataaccctttaaaaatgtacaccacccactcttagctcccacactatacaaaaacaggccgtggcccaaacaagcagtggtttgctaacccttgatctaaagcatatatctttctccatgtattaaacgaactctgactgaatgcttactgaccattaattaagcagtcaaacattagtaagcatatttattacagcttaggaagacactttggatgactctaccaagcaacagttctacaaatagcaacactctggtcaccctaactgaatttaactaatgttcaagtcagtaaatatcaggcattcttaatatctgtcaattgaaaaaaaatttttttaagctgccgtattcttagcaattgctattggaacccctggtagaaaggtttgaaggatgacttcagttagtaaggcttttctctcacagttttatagactcctattgctgaagctaaatataacttttgcacttgagcaagtttactatagagtaagagagttatttttatccatcactatccacaagtctaaagggaaaagtgttgaccttccatattttagaagaaattactctagcaacgaagatgcccttaacatgacagaagatagtaacaaacacaagctaaaataactcctcatttggtcattacagtcactgacaaggcttcactccaagtccacaggggaaaagcccaagacttcacacctgagccactgtaggggctcaaatgtcacttgcctctttgagaacacttcctaaaagccaggctatcccaagacaaagagaagaacacagggaggtctcaaatgtccttagggccaggcaggtgacatacatgtatgtgagaggctgggagagaactgaggcacacagtgatatgcattcttcctctcaaaggggcacttacaaccctgctccatacgctgtggccatgcaaatattccaggccagtgttgccagaaatgtacacttttgtgtgctatcatataatttttaaatgttgcagctatgttgagaaaactgaatacttcggcggcccaaaacagaaatagtggttaagtgtattcagggaacacaccaccaggagagaaaggggtggcagcaagaactaacctagagagtaaccattattaatgggaatccaccacaaatgatggatttgtaacatggcaggaataaggtcaataaacactttaaagaagcaaacagggtgctctcattttggacttaacaaattctacacgattccatggcaaatactttgcaacattatagccaatacttattaactgaagaggtcaaagcttctct

SEQ ID NO: 7386 - DNA, 1730 bp, Homo sapiens
cggcatcacgggggcgggggcggtgacccccatccgggctccccgggggcggtgacccccatcccggctccccgggggcggtgacccccatcccggctccccggccttctctcctccgcccgctcctgcctcccttctgcttactcctctcctggtcaacaggtcagctcggggtcctgcttccaacctcctcctcctagttgaagccggttctcaggagagaacctgccatccgcagctttacacctcggcaggaatgtaaatcactcttctcccgtcccaggaagcctttccagtgttctgattccagaaagcaggtgtgtgtggccggttcaaggaatttcaagcatcagcaggcagaggaaagtaccagagtggaaggcagcccacagggtgtcgaaatcaagccacccagggagcccgcagatcccaccctctccggtgagagagtttggtggggagcacttcatccaatgcagggaacagcgttactgcggccttcacctcccggcttcaagtgattcacctgccgcagcctcccaagtagttgggattacaggcgcgtgccaccacgccgggctagtttttgtatttttagtggagatggagtttcactatttttctctccccatcccgggaaagttgtatctgtttaccacatgttctcccacatctactcggttttacctctgtaaggcctgaactcaaaagccaagaaaaaacctctttctccagaactttaccttttctggcaaaaggaagcagggagacctactaggaaaatgccaagaacaaaatgattaatcatgtgaagacggcatctaccacctcaaatcgcccagctcattgaacctgcgtgaggatccagcactgtccctggtgtgtacagctcagtgcaccgagatgaccaaccgcctgggtttgctttactgtcactgctaaaggcaggaaggcagctgccaaaccaggacaaggtggtcaccccacggtgaacatcagtcaccctccctagcccacacaggcaaacaaccgggggagactatggctcagggcttagaacccaaaggcctgaacaaatgaggaagtttctacaacaaagactttctttgacagagtaaccagtcataatttctgagcattccaggagcgctgtgcagaatcacaggtatttggcaactagtgggataaaacaaaggtgccattgaggatgtttacaaccaacccctctccggagataacctcaaggtctttcccttgcacatggcctttccatgactcatccacagcagctgcctccctccaccacacaaaggaccctgcaagttctgtttggtattcttgagaataaaaactccgtgggtcgttccctggaattggttctcacccattttctttcctctgaccgtagccaggataggcatctaattctatagcttgtccgtggaatggaaaaacaatttggattttcacaacctgaaacctaatttctggtaggaaggtaccatctggtggatatttgtgaaactgctcacgtcctgtgtttgaaaatgagcatctgggggcagcgtgcctctccgaatgtcaataggaacgttgctccgagaggaggagagatccacactcaatgtggctgatccccttaactatgtgacactgtgtatgtgactatgtcataagcagcgtcatccctgtttacagttttctcagtttacaatgaatttaaatagcta

SEQ ID NO: 7387 - DNA, 1730 bp, Homo sapiens; identical to SEQ ID NO: 7386

SEQ ID NO: 7388 - DNA, 85 bp, Homo sapiens
gggcgcgctgcggatacaccgggacgccccctcagccgcgacagtaacgggctccggccaccagggggcggcacacggcgcctca

SEQ ID NO: 7389 - DNA, 85 bp, Homo sapiens
gggcgcgctgcggatacaccgggacgccccctcagccgcgacagtaacggcctccggccaccagggggcggcacacggcgcctca

SEQ ID NO: 7390 - DNA, 541 bp, Homo sapiens
ggcaccagctcctgtacctggaggccaggcggcttcccccagttgggggctccctgccacctctcctcagggcagccagcagggactccctgtgtcggtccaaaacgtcgaagaacgaggcctcgggccccataggtgcaaaggccatgagggcagacggctgccagaagctccagaagcccctgtcctaggctgcgcccttggggcgtggctgcgtgcctttcccgcgctttctgagcggccggcgtgcccacgccacacacccagaggcggggctggacaggcgtatgcgtagagcacggcgtggagtgcgcaagcgcagggctctcaggcgcggtcccacctgtgaggccctgaggcgggcgcctccctgagtgtgggtcgcgcaggcatcggccctgcgtggctgagctgagagatgtttgtgtggcgtgctgcggatattggacctagagtcccttgaggtgatttaattattttgggggttggctatttagggacagcaatatcagcgatttttcattaaaacacataatgatga

SEQ ID NO: 7391 - DNA, 2103 bp, Homo sapiens
gagagtgcacagtgccacttcgccccatggctgaagatggtttgcccaaaatttattctcatcctccaacagaaagcagtaaaacaccaactgcagcaaccattttctttggggctgacaatgctattcccaaatcagaaacaactattacttcagaaggagaccacgtcacttcagtaaatgaatatatgctagaaagcgatttttcaacaactacagacaacaaactgacagctaaaaaggaaaaactcaaatcagaagatgatatggggaccgactttattaagtcaacaactcacctacagaaagaaattacctctctgactggcactacaaactccataacaagagactctattaccgaacatttcatgccagtgaaaattgggaatatttcatcaccagttactactgtttctttaatagatttttccactgacatagcaaaagaagatatcctcttagctaccattgacacaggagatgcagagatctcaataacctctgaagtctctggcacactaaaggacagcagtgctggtgttgctgacgctcctgcctttccacgtaaaaaggatgaagctgatatgagcaattataattcctccatcaaatccaatgtccctgctgatgaggctgtccaggtcactgattccactattcctgaggctgaaatccctcctgctcctgaagaaagcttcactactattccagacataactgcccttgaagaagagaaaataaccgaaattgacctaagtgttttagaagatgacaccagtgctgtggctacattaactgactctgatgagaagtttatcactgtgtttgaactcactacctctgctgaaaaagacaaagataaacgggaagatactctgctaactgatgaagaaactaccgagggagccagtatttggatggagagagatactgcaaatgaagcagagacccattctgttttgcttactgctgttgaatccagatatgacttcgttgtccctgcatcaatagctacaaacctagtggaagaatcatctacagaagaagatttgtctgaaactgataatacagagactgtacctaagatcactgagccattttctggaactacctctgtattagataccccagactataaggaagacacctccacaactgaaacggatatctttgaactactgaaagaagaacccgatgagttcatgatttaaaagcaacaaaagggataccatgtagaattgtgcaatagtctagccagctagccttaacatctaagaaatttttccaacaagcaaaaacctttagaaatgaaagaatgtgggcatttaaggcaagtattcgactcaataaatgcagatgcttaggactacaggtcatgtaacagatttacggaaacttagaaaaaaaaaccgcagtgtaagggtccccctagtatcacaaagtttcaatattctaacaattacttaatgtaaaatttttcgtcctagccttcagggagtatgaagacagagcaatgtaggggctcatttctacaacatttaatgatgcatatcatttagttaacagtcaatattatacttaagtgagaattaaggatatgaagagaagcaaattaacctctccaaaacattaccatagcctaaaaagttctcccaaaatgcttgttctaagcaattttttcattagtatttcatcagtgattctcttctatttaaaaaatttttaatcctcatataagaattaagacaattcagtaattgtttagcacccacatgtaagatacataagatttatgatagggttcttggcacatgttagatacaaactaaagcaaaatgatattttacaaatatgcatatttgtcagaaaaatgttctgtaaacatatacatcaatttaattttctttctgttaaaatgtgttttctgaatttttgtccatgttttccaggtcttaaacactgaatatcacactcttcttatgactcttgttagcgattcaaggacataaatcttcattcttttctggcacagactacttaaatgggtctgttttcactttgctcatttttcttcaataaatctttttggcaagcaactga

SEQ ID NO: 7392 - DNA, 5446 bp, Homo sapiens
gagcagtggttctcccagcacgcagctggagatctgagaacgggcagactgcctcctcaagtgggtccctgacccctgacccccgagcagcctaactgggaggcaccccccagcaggggcacactgacacctcacacggcagtgtattccaacagacctgcagctgagggtcctgtctgttagaaggaaaactaacaaccagaaaggacatctacaccgaaaacccatctgtacatcaccatcatcaaagaccaaaagtagataaaaccacaaagatggggaaaaaacagaacagaaaaactggaaactctaaaacgcagagcgcctctcctcctccaaaggaacgcagttcctcaccagcaacagaacaaagctggatggagaatgattttgacgagctgagagaagaaggcttcagacgatcaaattactctgagctacgggaggacattcaaaccaaaggcaaagaagttgaaaactttgaaaaaaatttagaagaatgtataactagaataaccaatacagagaagtgcttaaaggagctgatggagctgaaaaccaaggctcgagaactacgtgaagaatgcagaagcctcaggagccgatgcgatcaactggaagaaagggtatcagcaatggaagatgaaatgaatgaaatgaagcgagaagggaagtttagagaaaaaagaataaaaagaaatgagcaaagcctccaagaaatatgggactatgtgaaaagaccaaatctacgtctgattggtgtacctgaaagtgatgtggagaatggaaccaagttggaaaacactctgcaggatattatccaggagaacttccccaatctagcaaggcaggccaacgttcagattcaggaaatacagagaacgccacaaagatactcctcgagaagagcaactccaagacacataattgtcagattcaccaaagttgaaatgaaggaaaaaatgttaagggcagccagagagaaaggtcgggttaccctcaaaggaaagcccatcagactaacagcggatctctcggcagaaaccctacaagccagaagagagtgggggccaatattcaacattcttaaagaaaagaattttcaacccagaatttcatatccagccaaactaagcttcataagtgaaggagaaataaaatactttatagacaagcaaatgctgagagattttgtcaccaccaggcctgccctaaaagagctcctgaaggaagcgctaaacatggaaaggaacaaccggtaccagccgctgcaaaatcatgccaaaatgtaaagaccatcgagactaggaagaaactgcatcaactaatgagcaaaatcaccagctaacatcataatgacaggatcaaattcacacataacaatattaactttaaatataaatggactaaattctgcaattaaaagacacagactggcaagttggataaagagtcaagacccatcagtgtgctgtattcaggaaacccatctcacgtgcagagacacacataggctcaaaataaaaggatggaggaagatctaccaagcaaatggaaaacaaaaaaaggcaggggttgcaatcctagtctctgataaaacagactttaaaccaacaaagatcaaaagagacaaagaaggccattacataatggtaaagggatcaattcaacaagaggagctaactatcctaaatatttatgcacccaatacaggagcacccagattcataaagcaagtcctcagtgacctacaaagagacttagactcccacacattaataatgggagactttaacaccccactgtcaatattagacagatcaacgagacagaaagtcaacaaggatacccaggaattgaactcagctctgcaccaagcagacctaatagacatctacagaactctccaccccaaatcaacagaatatacatttttttcagcaccacaccacacctattccaaaattgaccacatagttggaagtaaagctctcctcagcaaatgtaaaagaacagaaattataacaaactgtctctcagaccacagtgcaatcaaactagaactcaggattaagaatctcactcaaagccgctcaactacatggaaactgaacaacctgctcctgaatgactactgggtacataacgaaatgaaggcagaaataaagatgttctttgaaaccaacgagaacaaagacaccacataccagaatctctgggacgcattcaaagcagtgtgtagagggaaatttatagcactaaatgcctacaagagaaagcaggaaagatccaaaattgacaccctaacatcacaattaaaagaactagaaaagcaagagcaaacacattcaaaagctagcagaaggcaagaaataactaaaatcagagcagaactgaaggaaatagagacacaaaaaacccttcaaaaaatcaatgaatccaggagctggttttttgaaaggatcaacaaaattgatagaccgctagcaagactaataaagaaaaaaagagagaagaatcaaatagacacaataaaaaatgataaaggggatatcaccaccaatcccacagaaatacaaactaccatcagagaatactacaaacacctctacgcaaataaactagaaaatctagaagaaatggatacattcctcgacacatacactctcccaagactaaaccaggaagaagttgaatctctgaatagaccaataacaggatctgaaattgtggcaataatcaatagtttaccaaccaaaaagagtccaggaccagatggattcacagccgaattctaccagaggtacaaggaggaactggtaccattccttctgaaactattccaatcaatagaaaaagagggaatcctccctaactcattttatgaggccagcatcattctgataccaaagccaggcagagacacaaccaaaaaagagaattttagaccaatatccttgatgaacattgatgcaaaaatcctcaataaaatactggcaaaccgaatccagcagcacatcaaaaagcttatccaccatgatcaagtgggcttcatccctgggatgcaaggctggttcaatatacgcaaatcaataaatgtaatccagcatataaacagagccaaagacaaaaaccacatgattatctcaatagatgcagaaaaggcctttgacaaaattcaacaacccttcatgctaaaaactctcaataaattaggtattgatgggacgtatttcaaaataataagagctatctatgacaaacccacagccaatatcatactgaatgggcaaaaactggaagcattccctttgaaaactggcacaagacagggatgccctctctcaccgctcctattcaacatagtgttggaagttctggccagggcaatcaggcaggagaaggaaataaagggtattcaattaggaaaagaggaagtcaaattgtccctgtttgcagacgacatgattgtttatgtagaaaaccccatcgtctcagcccaaaatctccttaagctgataagcaacttcagcaaagtctcaggatacaaaatcaatgtacaaaaatcacaagcattcttatacaccaacaacagacaaacagagagccaaatcatgggtgaactcccattcacaattgcttcaaagagaataaaatacctaggaatccaacttacaagggatgtgaaggacctcttcaaggagaactacaaaccactgctcaaggaaataaaagaggacacaaacaaatggaagaacattccatgctcatgggtaggaagaatcaatatcgtgaaaatggccatactgcccaaggtaatttatagattcaatgccatccccatcaagctaccaatgactttcttcacagaattggaaaaaactactttaaagttcatatggaaccaaaaaagagcccgcattgccaagtcaatcctaagccaaaagaacaaagctggaggcatcacactacctgacttcaaactatactacaaggctacagtaaccaaaacagcatggtactggtaccaaaacagagatatagatcaatggaacacaacagagccctcagaaataatgccgcatatctacaactatctgatctttgacaaacctgagaaaaacaagcaatggggaaaggattccctatttaataaatggtgctgggaaaactggctagccatatgtagaaagctgaaactggatcccttccttacaccttatacaaaaatcaattcaagatggattaaagatttaaacgttaaacctaaaaccataaaaaccctagaagaaaacctaggcattaccattcaggacataggcgtgggcaaggacttcatgtccaaaacaccaaaagcaatggcaacaaaagacaaaattgacaaatgagatctaattaaactaaagagcttctgcacagcaaaagaaactaccatcagagtgaacaggcaacctacaacatgggagaaaattttcgcatcctactcatctgacaaagggctaatatccagaatctacaatgaactcaaacaaatttacaagaaaaaaacaaacaaccccatcaaaaagtgggcgaaggacatgaacagacacttctcaaaagaagacatttatgcagccaaaaaacacatgaagaaatgctcatcatcactggccatcagagaaatgcaaatcaaaaccactatgagatatcatctcacaccagttagaatggcaatcattaaaaagtcaggaaacaacaggtgctggagaggatgtggagaaataggaacacttttacactgttggtgggactgtaaactagttcaaccattgtggaagtcagtgtggcgattcctcagggatctagaactagaaataccatttgacccagccatcccattactgggtatatacccaaatgagtataaatcatgctgctataaagacacatgcacacgtatgtttattgcggcactattcacaatagcaaagacttggaaccaacccaaatgtccaacaatgatagactggattaagaaaatgtggcacatatacaccatggaatactatgcagccataaaaaatgatgagttcatatcctttgtagggacatggatgaaattggaaaccatcattctcagtaaactatcgcaagaacaaaaaaccaaacaccgcatattctcactcatagatgggaattgaacaatgagatcacatggacacaggaaggggaatatcacactctggggactgtggtggggttgggggaggggggagggatagtattgggagatatacctaatgctagatgacacattagtgggtgcagcgcaccagcatggcacatgtatacatatgtaactaacctgcacaatgtgcacatgtaccctaaaacttagagtataataaaaaaaataaaataaaataaaataaaaataaatgaaaaaaaaaaaaacaaaaaacaa

SEQ ID NO: 7393 - DNA, 1766 bp, Homo sapiens
agaaatcagggctaatgaaccatctaaggacaggccatgagggttcgattttgtgtaagagacatggccagatctattaggtggaccaggaatgggtgggtatctccctgggctttacaggacttgagaaaagagaggatgttaaagtagtaattgtctttgtatagagccatagagagaaacagtcttaactcatttatgtacttcccatttaattctgatgacagaccaaaggcaatttaattttggttataattgaggatgttgaagaaagcattgaatggaagacattgcagaagaagaaacagcagaaaatcaaggtgagaagaattccatgtacttaagagaaatccagaacatttataactacatcataaggtgtaggactttgcctcttatcaatccagggtctaattaggagtcaactcaatgttggctcatttttcctccattctcttctcagtctgggctgtctggatctgggcctgactgagatattgagagtgattggaaagaatgaaagccttgggaggccgagacaggcagatcatgaggtcaggagattgagaccatcctggctaacacggtgaaaccccatctctactaaaaatacaaaaaattagccgggtgtggtggtgagtgcctgtagtcccagctatgctactcaggaggctgaggcaggagaatgggtgaacccgagaagcggagcttgcagtgagccaagatcacgccactgcactccagcctgggcaacagagcgagactccttctcaaaaaaaaaaaaaaaaaaaagaatgaaagccatcaagaaatgcataaggctgagaggtgagaatgtgagaacttggaattagagagtagactgttcaaaatatggaaagacttggagtagaatatgtggtcagggtattgaaaacctaccatagtatcaaaatatggtcatagcagacagaaatcagccagtggtggtttggggctggaattagcagataattaccaggcagaaggttatgaggcctttccaaacccagtgagcaccaaagaggtgagtgtgactaacaaggtcccacacatccctattgcacccttctagttactaatggtttttcccttgatccatgcactgcagaaatagtctgcagaagaactctgtgactctaagattgaagtgatgtgcccacagtggcagaggaaggtcaccaccaggtctgatggctcctagtcagtgtcctgctaacttccctgaattctgaggaagggctgtgttttgagagagaaaatccaggctccttccaggaagatcctagaagttggtggcaggaagttttctgactgatcgctcttgtctctgcctaggaaaaacttagaataagaacaaaagcagctgtaaagatccaggcctggtggcggggcaccctggtgcgcaggacactgctgcatgcagccctcagggcctggataattcagtgctggtggcggatgacgctgtcgagggtgctggagaagaaacggcaggcagctctgatcgcctacgcaaccagagagagggcagtgatcaagctccagtctttggtccgtatgtggcgtgtccgctggcgatactgccaggtgctcaatgccatctacatcatccagggccactggcaatgccacaactgccagacctgcgctctcctccagggccactgtgtggtcacagccactcacctgcagttccacattgagatcatcaactcctaagggctggcaagaagggcactgtgtct

SEQ ID NO: 7394 - DNA, 1730 bp, Homo sapiens
ctctccctctcccgtctccccacggtctccctctccctctgtttccacggtctccctctcatgccgagccgaagctggactgtactgctgccatctcggctcactgcaacctccctgcctgattctcctgcctcagcctgccgagtgcctgcgattgtaggcacgcgctgccacgcctgactggttttcgtattttttttggtggagacggggtttcgctgtgttggcctggccggtctccagctcctaaccgtgagtgatccgccagcctcggcctcccgaggtgccgggattgcagacggagtctcgttcactcagtgctcaatggtgccccggctggagtgcagtggcatgatctcggctcgctacaacctccacctcccagccgcctgccttggcctcccaaagtgccgagattgcatcctctgcccggccgccaccccgtctgggaagtgaggagcgtctctgcctggccgcccatcgtctgggatgtgaggagcccctctgcctggctgcccagtctgggaagtgaggagcgtctccgtccggccgccatcccatctaggaagtgaggagtgcctcttcccggccgccatcccatctaggaagtgaagagcgtctctgcccggccgcccatcgtctgagatgtggggagcgcctctgccccgccgccccgtctgggatgtgaggagcgcctctgcccggccgtgaccccatctgggaggtgaggagcgtctctgcccagccaccccttctgagaagtgaggagaccctctgcctggcaaccgccccgtctgagaagagaggagcccctctgcccagcagccaccccgtctgagaagtgaggagcctctccgcccggcagccaccccatctgggaagtgaggagcgtctccgcccggcagccaccccgtccgggagggaggtgtggggggtctccccccccgcccggccagccgccccgtccgggaggtgaggggcgcctctgcccggccgccccctactgggaagtgaggagcccctctgcccggccagctgccccatccgggagggaggtgggggggtcagcccccccgcctggccagccgccccgtccgggaggtgaggggcgcctctgcccggccgcccctactgggaagtgaggagcccctctgcctggccaccaccccgtctgggaggtgtgcccaacagctcattgagaatgggccatgatgacaatggcggttttgtggaatagaaaagggggaaaggtggggaaaagattgagaaatcggatggttgccatgtctgtgtagaaagaggtagacatgggagacttttcattttgttctatactaagaaaaattcttctgccttgggatcctgttgatctgtgaccttacccccaaccctgtgctctctgaaacatgtgctgtgtccactcagggttaaatggattaagggcggtgcaagatgtgctttgttaaacagatgcttgaaggcagcatgctcgttaagagtcgtcaccactccctaatctcaagtacccagggacacaaacactgcggaaggccgcagggtcctctgcctaggaaaaccagagacctttgttcacttgtttatctgctgaccttccctccactattgtcctatgaccctgccaaattcccctctccaagaaacacccaagaatgatcaataaaaaataaattaaaaaaaaaaaaaaagaagtttaagaagacctaaataaa

SEQ ID NO: 7395 - DNA, 5632 bp, Homo sapiens
tggtggagtctctttcattgcagggatcttatgctggcaaaatccattccattggtgatgccttcagaaattttaaaaatctccgatccttagatttatcaaggaatttgatcactagccttaaggtaagttatatattctatgaccagccaggtctgcccaatttatttttttgatgggaagaaataagagatagatcatgtcatcctggggaatataagaccttccctttaaatgattcccaactaaatttaattatttcttataaaattctttcaactttgcagtatattttaaattgttataaaatattgggagggcaatttattttatactctcggaaaactatattaagatatcactgtctagggcaaatgcataaattttagtgtgtataaaaaattatgaagaacacttgtagaagtacagattctcagtccctactgtgagagttggtctgatttagtaggtctagggtaggctcaggacatactcaggggattctgatgatggtggtacatggagcatacatggagaaacactggcctgtgttgttattgtgagttttttctatgaggagaaggaaggtgtggtcttgggaaaatttaagtcaggggatgatggagcagagggcagtataggaaggcaggagggaccaagcatgaacagtgtgcgtgtggattagcaaacacgcacaaagaactctacaaacatgagtgtgcacacacagagatggagttttgttttctttgtggtagacccccaaatactgcttcttcctcatgttcccattttgcccaagctctgcacctgtcttggcaaagcccttctatgcaagatcgagcgtgacaaagactcacagatgctatccaggattagttactgatcttctgggtcatctaccagttttgcacttcctaggggatatttgttcaacaacacatccagacccaatcccaaggtttagctaagggcctaaaagatcaaaagccctaagatcaaatttccatctaggactctaaaatcagcaactccaagttcaactaggtctttagactattttttagcagccatttatatttggcctatcagtttcagaaaggattagttctttcacaggtgataggatccaatttaaaaaatgaaaagataaaatataaaaagaaagtattagttcagagttgcttaggtctcctcttttgtttgtttattctttttctggctaaaaaattaagtgaacattgctgtaatttgtttttatacttcctttctttcacttcggtaaactgggtgaaaaacttaggaaaataatcaaattagggctgggcacggtgactcacacctataatgcagcgcttcggaaggctgaggcaggcagattgcttgagcccaggagttcaagaccagcctgagcaacatagtgagacccctatctctattttaaaaaatcaagttgtctggtcacggtggctcatgcctgtaatctcagcactttgggaggccaaggtgggtggatcccgaagtcaggagttcgagaccagcttggccaacatggtgaaaccccgtctctactaaaaatacaaaaattagccaggcgtggtggcaggcgcctgtagtcccagctacttgggaggctgaaggaggagaattgcttgaacctgggaggcagaggttgcagtgagcctagatcgcaccactacactccagcctgggcaaaagagtgagaccatctcaaaaaaaaaaaaaatcaagttaacacgtgtaatcaaatagaacatatataagactcctggtacagtgcttggcatataggaagcactcagtaatgttagttttctatattttttgcatctatgatttttatttattttttttgagacagagtctcactctgtcgtccaggttggagtgcagtagtgtgatcttggctcactgcaacctccgcctcccaggttcaggagattctcctgactcagcctcctgagtagctgagattacaggcacccaccaccacacccagctaatttttgtatttttagtaaagacagggtttcaccatgttagccaggttggtctcaaactcctgacctcaggtgatctgcccacctcagcctcccaaagtgctgggattagaggcatgagccaccatgcccagccacatctgtgattttatattaatctttaacagttctgaatccctttgtttaattttcctgggagaaaatgttttgtgattatttgtagcgtaactttggggaatacataaattcatgacaactggtaaaagtgagaggataagagtttccttaatttttacactgagagacattaaaagattacttaagccaggtgtggtggtttatgtctgtaatcccagcactttgggaggctgaggcaggaggatcacttgaggcaaggagtttgagactagcttgagcaataaagcaagaccctgtctctacaaaacagaaacaaacaaacaaacaaaaaccatagttgttggtgcgtgcctataatcccagctatttgggaggctgaagcaggaggatcccttgccctaggagttcaaggctgcagtgagccttgttcatgccactacactccagcctgggtgacagagcaagatcctctcagaaaaaaccaaaaaacaaaaaaacttgagctgggccattagaccatgaaagacagtcctaatggtgcactgccctgagagtgaggccaagggcactgatagctattcctcaccactgacccattaacaatatggaagttaatggaattggagaaaacaacaacaacaaaaaaaacaaatacaaaacagaaagaaatgcatcaaagtataaacagggttgtgttgggaatgttttgtatctatctttgggttttctaaatttcttgcaatgagaaaatgataattttaaatgggaggagaataaaaacattattttataaatacatgatggaaaataatttcacctttccaaaataattctcaatgacagaattccttttatggaaagcatttttactatttttttttttgcatttgtactattaaaagtatatgattaaccaggcacagtggctcatgcctgtaatcccaacactttgggaggccaaggcaggataattgcttgagctcaggagttcaagaccagcctgggcaacatagtgagacattgtctctactaaaaatcaaaaaatagttagccaggtgtggtgccacatgcctgtattcccagctactcaggggctgaggcgagagcatcacttgagcccaggaagtcagggctgcagtgagctctgatcgtaccactgcactccagcctgggcgatagagtgataccctgtctcaaaaaaaaaaaaaaaaagtatgcgattatacatatgtacatgttttgaaattgtcctgaaatttagtattgggcaaaagcagctaactagctaaatacataaagatgaaatcttttcaatagcaggtttcagcagaggaagaaaactgtggcttttcctcttgagtttgccaggcctgattgtactgttgccagttaggtagagggtggggttgctaaatccacaagaaagagaactgaacaaggaagaacatttctgcaaaggagaactgactgattgattaaatgggaagcttgcgtggtagcaggaactctgaagaggaaaacagtctaggaggcctagactggtccaggagtgaggacttggagatagcattgttttgtttccctaaatagtcctttgaccatataagtgaggcactgagatatgagaacacaacacaacacacacacacatacacacacacacacttttttttttttaaccatgcccctttcccccagaaccagcttttttgcttacctcccttcttcttgtaaattaaggtgcttttgggatcaggagaggggttgggacaaaagtgagagaattctaatgtggcttggccactgggaaaccactgtgaaggattggattgcattgggagaataattggagagccaacagaagtggagaattgactgcagatatttgagtgtcagattttgtaaagaaggaaatgtattatatatgtgaattatttaacgtatggaacacccagtgctcatggactgcagtggtcttattttcggacaagttaagtgagagttccagccctgcctttctcacggggacttggataacatgtttaaggacggaaagtaacatatatttccatctttatctatgaggttcctagtctttaccaatatgccatttcataatgtggtgttttccttgtagggaatccagtatttatgttcactccaagacctgaatttatattataacaacattccttcattagtggaagtgtcccgtctacaaccgttacccttcctcaaagaactggatttgagacttaatcctgttgtaaggaaagatacagattataggctctttgctgtatatacactacaaactctggagaaattaggtaagaccttccttctctgttcctgtccacagaatcttactttaaatcagctgccccttaaccttttggatgttggcccacagtgtgcactggcaggatatatttgtttattagtcaatatttatgtaactcttttgtgttggcaggatgtatgacgagttcttttattgtttattgaatgacagtctatgattttattagttacttccagctttagttttcttcagttgatggtttcaccgccccttcctcctcaacacaaaatttccaggttgagaattatttttccaggtgccccaactttgcaactgtattagcaatagaaagctaatacaatttatttgggggcttagttgggggcttagttgaagaaatattccttcaaatgagctggtctatattttcttattattttactttattttttatttatttatttattttgagacagggtctcactctgttgcccaggctggagtgcagtggcacgatcttggctcactgccgcctggacctcccaggctcaagcaattctcacatctcagtctcccaagtagctggaactacaggcacgcaccaccacacccagctaatttttgtgttttttgtagagatggggtttcatcatgttgcccagactggacttccttataattttattgttgagtatacatttcttattgatacaaaattggatttcacatggccctgggaaagtaattgtagggaaactaagtaaactctttcagacaatggtatgactttcagccctaacattaggcctttgaattgtttactgtccaagctctgctttcctgaagggtagttacaactgtgaggcagtggtcgctatggcttcctgcagtctccctgagttcctgcctgctccagtgacaacataatagcattattttgtgacctgtctctaacacaccaagatgagactggtcctaatttttcctctgcgaatatggttttctgattaactactagttatgtctatgccaaaaaaagaaacatgctcagaccacggtttttgcctccagatgaccgaactgtacgtgaaggtgagagaaaagctgccaagctgcattttagtcagttgggcaacagtgaaaattttcttttagaggtggaaaaaag

SEQ ID NO: 7396 - DNA, 101 bp, Homo sapiens
tttttttttttctttttgagacggagtcttgctctgtcacccaggctggagtgcagtggtgcgatcttggctcactacaacctccacctcccgggttcaag

SEQ ID NO: 7397 - DNA, 1624 bp, Homo sapiens
ctgtgactgtgcaggtcccaaacagtatggacatgaatgtcctcaagctgcatgttagcagggcttctaattccatctgcaagtgatagtgtgtggagcttagttgcacagagcgcatgttactggaggagatatgggtctgtgtcatcctgcatgggaatgatcctaaaaacaaagtgatcagtgactgctcaggactgtggaaaggtcacttggagcagtgggaaaaggtctggcagaggaataagaagatacaggtcttagaacaagccctgggacttcaaccaagtcatttaacatctggggccttcgtttatttatcctcccagcagataaagcaatacctgccctgtcttcctaaccttggaggggtcaaaaaagtgatgggtgtgaaagcattttgtaaactgtagtgcaagcatacggcaggggagtgaaccatactttcactagcgacttgaatgaggtgataaagaaaaggctcagaacttcagaaaatgcaagaggggcttgaccctggattggcagaggaaagcaatggtgggatcgataccttggagagccaaggaccaaggggttaagggtccatgaggacaggcctggatcatcaggaagctgagtgtggtaagactgtggcttcttcagggattgggtggagtacagtcctgccaagaccacagtaactcagggcttggagacatcacaaaggcaggggctcctagagctgagataatctggagaagaggatacccatctactgcattctgagattgggttcgacctgtaggtcatcttggatagacgttttccagctcttctttttttttttttttggaacagagagaacctaattgacccttaaagttccacagagcagagtttgcaaatctctggttcagccttattatttaaatgagaggagaatgaaatcccagaaaagagatgtgattatgtgaaggtcacacagcaagttagttgccaagctgcaactggaactcagaatttctggttcccagttctatatcttagcctcccaaactggctatgtggacaggaaagaacagagtaatggggtgagctttaaggatgcaatttcataggtaagaagatcccttaatctaacaatatctcccccagctccccaacaatgactaaaatcccccctttattgactccttcacaggattccaagagtctcaaggttagagaagtcgcctagtccacctcccctctctgcttctcacagaagggtctgctgaacactctggtgacagagaactcacccaacatgttccatggcagaggcttttcattagatcaaggtgacatctgttttactggagcttccaaccacgtgtcccaatactgcccttagtcacaggcatccaggtcctctctctcaggacagcactttgaataaatgaggacagctcccatccccctttctcccagttgactttccagaaacatctcatattgttgttggctttccaccatttttcctcttcacttcctgggcctactactacactgtgtgtcctccacttggtctcttcctgaaagcaacactgtgcacaatgttcctgggggcagacttattaaaccaagtggaccacttccttca

SEQ ID NO: 7398 - DNA, 1625 bp, Homo sapiens
ctgtgactgtgcaggtcccaaacagtatggacatgaatgtcctcaagctgcatgttagcagggcttctaattccatctgcaagtgatagtgtgtggagcttagttgcacagagcgcatgttactggaggagatatgggtctgtgtcatcctgcatgggaatgatcctaaaaacaaagtgatcagtgactgctcaggactgtggaaaggtcacttggagcagtgggaaaaggtctggcagaggaataagaagatacaggtcttagaacaagccctgggacttcaaccaagtcatttaacatctggggccttcgtttatttatcctcccagcagataaagcaatacctgccctgtcttcctaaccttggaggggtcaaaaaagtgatgggtgtgaaagcattttgtaaactgtagtgcaagcatacggcaggggagtgaaccatactttcactagcgacttgaatgaggtgataaagaaaaggctcagaacttcagaaaatgcaagaggggcttgaccctggattggcagaggaaagcaatggtgggatcgataccttggagagccaaggaccaaggggttaagggtccatgaggacaggcctggatcatcaggaagctgagtgtggtaagactgtggcttcttcagggattgggtggagtacagtcctgccaagaccacagtaactcagggcttggagacatcacaaaggcaggggctcctagagctgagataatctggagaagaggatacccatctactgcattctgagattgggttcgacctgtaggtcatcttggatagacgttttccagctcttcttttttttttttttttggaacagagagaacctaattgacccttaaagttccacagagcagagtttgcaaatctctggttcagccttattatttaaatgagaggagaatgaaatcccagaaaagagatgtgattatgtgaaggtcacacagcaagttagttgccaagctgcaactggaactcagaatttctggttcccagttctatatcttagcctcccaaactggctatgtggacaggaaagaacagagtaatggggtgagctttaaggatgcaatttcataggtaagaagatcccttaatctaacaatatctcccccagctccccaacaatgactaaaatcccccctttattgactccttcacaagattccaagagtctcaaggttagagaagtcgcctagtccacctcccctctctgcttctcacagaagggtctgctgaacactctggtgacagagaactcacccaacatgttccatggcagaggcttttcattagatcaaggtgacatctgttttactggagcttccaaccacgtgtcccaatactgcccttagtcacaggcatccaggtcctctctctcaggacagcactttgaataaatgaggacagctcccatccccctttctcccagttgactttccagaaacatctcatattgttgttggctttccaccatttttcctcttcacttcctgggcctactactacactgtgtgtcctccacttggtctcttcctgaaagcaacactgtgcacaatgttcctgggggcagacttattaaaccaagtggaccacttccttca

SEQ ID NO: 7399 - DNA, 695 bp, Homo sapiens
aggaaacttggaaaccctctctttcggtgactttttttctaatgattgtctctgccatgaaattctaacttcaaatgaaatctttggcaggaacccagggctgttctgtcaaggttcagctgcaggaccagagccccttccacctaacccccactcctatcctgatgcttcctgaggcacatctgctgtggtttctcaccagagaacagtctgcaaaatcactgcaccttgtccaactccattttccaactgagaagacttggcccagagaagtgcacagacttgagggaagtaacacagcaatcggacagacagacatccccagatatacctgctacggtcctgggagaaaatagagacccatccccaaataccatcatcctcatcattctctgtagcccaatcaaatgatgctccaggcctgagattttatccaatgaacactctgtacatctttaaaagagatatgtacttgtcttattcctcctttcctttctttaaaaaaaaacacaggccccagatccagtcattctaaataggaaggaaaaacataacccactgaggcaatggatgctgtttctctccctgctctgtgactttagtttgcctttaaagcccattttcaccatttattgattttagttttctacttgtctatgaatgacaacttgaattaagacaacgcaggctgaaaa

SEQ ID NO: 7400 - DNA, 695 bp, Homo sapiens; identical to SEQ ID NO: 7399

SEQ ID NO: 7401 - DNA, 494 bp, Homo sapiens
caggatgtctcatgaccgtgccaccttctgcctagccccattctctggaggagctgtgggcagaccgaccccagcctggccgcctggcatggggactggttgcgtcagatcggagctctgagataagggtgggccagggcatgatcatcaccactgccagcctcgaagcctctttgctgacctggaggtgatctgtgtatcaaagggggctgtgtattcaacagcacttccagaagaggccaaagatctgtctctacttcagcctccactgggcagaaaactaagcctatttgctctaggcccttcagacttgcacttggagaaagaaaactcactaagtcagcccttatgtaactccactctcctctcttccaaacctccttgctttggacaaatatttgacagaaaatgcccttttgcaacgccttaaaagttacaaaaatggtgcaccctatcctttaatctgtactgtaaataaaaaatattaacacaaa

SEQ ID NO: 7402 - DNA, 494 bp, Homo sapiens; identical to SEQ ID NO: 7401

SEQ ID NO: 7403 - DNA, 738 bp, Homo sapiens
ctggacatggcctcaaagtaagagctccgccagcccaactaaaagttaaaccaactcctgctctggaaaacttagtacccgaggttgaactgcccagtctctttcctgctctgctggccaaatccatggcaggtccaagtcacatgcctcttttcgtgaaggaaaaatcatcagcacctcctacaaaggtcttcctaatcacttcattttgggggtaggggtgtggattttaaaactttgaagactatgtcacactcaccttgcccctcacctctggccttgacaaccatcttgctttacaagtgaattccgccaggtttctaaagatggtcacaacacaggtgccaggaatgccttcctgggtacatggagttcccgcccacgaccacagaagacattacacaaaactgcccaaaaagtatgaaatggcaatctgacaacaacctgacttaaaagccagtaaagacatcagaaaagatgttggtgtgcagcaagaaacccttcgcagcacctcacatgggcaaaaccaaagaggtaagaccctgatcttcctaatggcagacagtgaactacgaccaccccagaaatcacataaaagcatagaaggtaatttctattcaacaaataattactggcactcacagagaaaagcatggtgggacacaaattaatcaggcaaggcactgccctcgaggcactttcagtcttggcggggagtagtggagggcagaagaaaaa

SEQ ID NO: 7404 - DNA, 359 bp, Homo sapiens
agattccaaaagcgcctcttggcttgtatcagatgcatttacctatttcctcatcaggtcacagtcattcaccttgctcattcattcaaatatgtttaagttgctataagcagaagattctgatcaccagaagcacacgattctgatggaagaatcaatctctctcactcactcacacacacacccctgcgccacaagcagctgagaagtgggcaaagggagcccaggaaggctttctcaaagagggccaggatttccttaggctgcagtgggtgggtagggagggggacaggacataaattgaggttctaatatctttgggcatgggagggaacagtgagtcccaaagtaaaacagga

SEQ ID NO: 7405 - DNA, 419 bp, Homo sapiens
tttggggatgtcaagatcattgacagacttgtgaggtgaaagaaagttttagtgaaactgaaaggacgggacgcagattggattgggtgcaaaatacagtaatgagataaagtggaaacaatgggtttgactggctttttagagaagtattgtaaaaagagggtaaatgaatctatgtacttgtaatcccagcactttgagaggctaaggtgggtggtttgcttgagcccaggagttcaagaccagcctgggcaacatggcgaaaccccatctctaccaaaaatagatgaaaattagccaggcatggtggtgcacacctgtagttccagctgcttgggaagctgaggtaggattgcttaactctgggaggtggaggtctcagctgagatcgcaccactgcattcaagcctggacaacag

SEQ ID NO: 7406 - DNA, 634 bp, Homo sapiens
aaaacaaaaattgaaaagcatttttaaagtttagtgttcaggttagggcacataaacacacttgagttggtttatttggtcctttctatgttttgtttcagttcatctacagatggccgctaaaagctatgggaaattttaacagtgaaattagtaatctagggagaaagttgcagttaattcctgttactctaaatgtgtaatcagggcgtggcgtggtggcccacacccgtaatcccagcactcggaggcctcggtgggtggatcacttgaaagctcaggagtttgagagcgacctgggttaacctagcaaaacccggtctctacaaaaactgcagaaataagcctgggttggttgacacacacctgtaggccagctgttcgaaaggctgaggcgatattatcgcttgaggccaggaggtcgaatctgcagtgagccatgatcacggcattgcactccaccttgggccacaaaaaaaaaaaaaaacaaaaaaaaaacggctgggcgcagtggctcacacgcctgtaatccaattactttaggaggctgaggtgggaggatggcttgaggggcaggagtttgagaccagcctgggcaacataataagaccctcattgccacagaaaaattaaa

SEQ ID NO: 7407 - DNA, 398 bp, Homo sapiens
gaatagcattttagttcaggagagatgataataccagactaggttctgtaaagtgtgttatagcttctataagaagcaatatagaattaacatttagataaaacctggaagtttttttgtttcatgttatatagacacagccagaaaagctactcacattaattatgtgattttgtaaataaagaaaaacagagaaggcagtttagtctgccttatactggccaggtgtaatacacctgtattacctgtatagtgctgggtgtaatcccagcactatactggccgggtgtaatacacctgtaatcccagcactttgggaggccaaggcaggtggatcccctaaggtcaggaattcaagaccagcctggccaacatggcaaaaccctgtctctactaaa

SEQ ID NO: 7408 - DNA, 10859 bp, Homo sapiens
aaagcattacactacttcttaaaggcagcaaaggccgggagtgcaaatgccatggcatttataggaaaggtacatgcttcatcttgattcattgttttcatttattaaaaacctaagaaattaaactgggcatagcagcgtgtgcctgttgtcccagctacttgggaagttgaggtggaaagatcattgagcacaggcaaccagcctgggcaacacggcaagaccctcatctcaaaataattaaaatttaaatttaaaaattaaaaatctaacaaattaatgataccagctcattgaacccattgtagagggacagggcagcaggcctctttcacggaagcggctaagtgggacatctggctgcaacccgagggtgatattcttgaggtgacagtttgggaagaagccccatataacagcagcctttatctggggcaccaaaagcagccttaaaagtgcaccttggccgggcacggtggctcacgcctgtaatcccagcactttgggaggctgaggcaggtggattgtttgaggtcaggagttcaagaccagcctggccaacatggtgaaacccccgtctctactaaaactacaaaaattagctaggtgtggtggcgggtgcctgtaatcccagctacttgggaggctgaggcaggagaatcacttgaacctgggaggcagagggtgcagtgagctgagatcacgccactgctctccagcctgggcaacagagggagactccgtctccaaaaataaaaaataaaataaaaatgtgcacctggcccagggctcctcctctgagcgtagctatgagcctatgaccaccccactccccaatatgtaagaggagatccaggttggttgagcactggagaccgggacaggtctcagcccaatcaggcccttctctgctctactgctggagtgtgaatcagctccaggctgaccagagctatccttatgccacctctgatgagaggcctcctgtggctgcagagtagcctggtggagggttcctctggaaaggcatgttcttctgtctccttcaaagactattcactcccctgtgtgccacccttggctccctgcagccgatttgcattagtaaccatagggacgaatgtcctgcttcctaagtgcaacatacagtaaatgtagatgcaaaaaaaaaaaaaaaaaaaagagagagagagagagaaaacacaaacagggtccatttctttgccctcaggcagggtcactccagaagtctgtaataaatggtactcttactttttcttgttttaaattgaggtaaaatgtaaatatgtaaataacacaaaattgaccactttatacaattcagtggcatttacagtggcatttactacattcaatatgttgtaccactgttacctctatttcattttaaaatatttgcattactctcaaattattttgttttttctatcctcttttcatttttcttcctagatgtatttagaggggaatgctgccgtgccgcaaaataacgctactgccttcaagtacttttccatggcagccagtaaggtatgtcctcaatgcactgttgtaaacacatacacacaaattgcttttattacacgcagactggtgccaaagaattgacttcgaagtcccaagcccagataatgggcctgtaaggagttttgtgtcctggagaagtataatactggtgatgggagtaagggaagctacaacttgccttcttggaaaatgaaaaatggcagtggcttgtgctgccctagcagaggccaggaggaggccagacagaagttcagccagacagaagttcagctttcccctctcccttatgcagtagatgaggccatctagcttaggaacaggaaacaaaagagatgaggacagaggaagggaaaatccaatcaatagctgcaggaagttcaagacaaagacatcctaggaatgtccagttttctccagtctcatctcatccaaaggccagagctccctctggcccaggcgggagcttgtcagggaggaggccagggcaaggcgactgagaatagggatctggagacagaatccctggcttgaatggcagccctaaaactgactagctgtgtgaacaagggcaagttacttagcctctctgtgcctcaatttccccatctgtaaaatgggaatttaagaatatttgcctgccaggcacagtggctcacgcttgtaatcccaacactttgggaggctgaaacaggcagattgcttgagctcaggagtttgagaccagcctgggcaacatggtgaaaccccatttctacaaaaaatacaaaaattagcctggcatgctggcacatacctgtagtcccagctgctcacaaggctatgcttcattcatattgtgaagtacttaaagcagtgcctggcacacagtaagggcgcttttatcttttgcagtctggggccagtaaagtggagtgaacttcgaagcacatcccagacagaatgaattagctgtatgagggacgatcgaaatggtataatatgcctcctgcatcgaagtctttgcctctgctcctggggtccgtgaggctggtatctgtcagataagacttagtagactcctttgaatccctttcatgcataaaaaatgccctcatcccacacccatcggcctgctcttggcgaatggccttggtaaactttctaaccctgcacagtaggaagcattttgttgtcttacagttgcatactggaacactggcagtaaagatgtgctcaaaccaggaatcatttcaactgttctcagtttttaaaaacccacacactgctttaggagcctatttataagtgactaccacctcagagctgctgctattgtggtgtaaattactgagaaggctagtactctgctcctctcctttgtaatttatatggaattgttgctcagaaaggcagttatctgaagtaccattagattaggatgacaaggaagagcagactgaaaaggagtaacatggaaaatctcttatcatctggcaaataacactgatttgtcagcccataagaataatgccagggagatgggaatgtaaattaactcagattccaagctattcagggttgtggaaccaaccagcagtgatctgggtctccggtgcgctgaacccgagctactttcctttacaaaggaaatctgaacttacaattaaggtaattattctaaatggcattaggtggagatggccacatacttcttgatcagcgcctgaacaatttattagatttctcactcttactacttttttaaaaactgctttctaaatttgtttttaaatgatatcaataccatgacacagagctacacattttacaacatcttttgtcttatttacttagaaacaagcacagtgactgtatgtgacgttgtgcccatgttggaccacattcctccagttctctcttgcgccctgagcatgtcaggcccgtccccatctccatacttttgtcatctgcctccccttcccagactctcttattctaagtcctactcatccccagagcggagcccaatcctcccttcatccacagagctgcccctgcccttgctggctcacatgatctctttcctgttctgaacttaccctgcgttcactcctgctgctgggatttaactgcttcctacctgtggcttctcccctcctgtccaaaggccatgtgtcctcaactagaggagggcaaaggtcctgccagggggttattaaataaaggggtccagggcaggggattattaaatatttgccaaagaaatgcctgtctgctccctggcttcatgtcagctaacctaagcaagagcattacaccctgaaacagcaggtgtatactgcagggtttggctatacatatggcttttctggcccagaaagtgttttaaaaatcagtaaactggccaggcatggtggatcacgcctgtaatcccaacactttgggaggctgaggcaggcggatcaccaggtcaagagatcgagaccatcctggccaacatggtgaaaccccatctctactaaaaatacaaaaattagctgggcatggtggcacatgcctatagtcccagctactcaggaggctgaggcaggagaatcacttaaacccgggaggaagaggttgtagtgaactgagatcatgccactgcactccagcctggcaacagagcaagactctgtctcaaaaaataaataaataaataaataaaaataaatgagtaaaattcacatccaaatctaaacatctagcttttcttgaaaatggcaaaagctagctaggcatggtggctcacacctgtaaatcccagcactttgggaggctgaggctggtggatcacttgaggtcaggagttcgagaccagcctggtcaacatggtgaaatcccgtgtctacagaaagtacaaaattagccaggcatgggggtgcatgcctgtaatcccagctacttgggaggctgaggcatgaaactcacttaaacccaggaggcaaaggttgcagtgagctgagatcactccacagcactccagcatgggtgatagagcaagagtctgtctcaaaaaaaaaaaaaaagaaaaaagaaaatggcaaacgctgatgaaacaggactgccattccatgtggcaccaaccagctggagcagaggaactgagagctgctgctgccttcacacagggcagggactccacgtgtctccatctgcaccactgtctccactacctggcatattttatttcttatatcaccggcatggttcctgcaggtgtctgaactggccactcttcgcctgacaagttctaaataggcacactgggccttaaacagtgatgggtaattcactgagtccctgggatcccagggactcccttagaggagaaagtaatttgtccctgctattctaacatttctcctttctctctcccttcttccttccctcctttcatatctgtttccttcccttctgtattagtccgttctcacattgctaataaagacatacccaagactgggtaatttataaaggaaagagatttaattggctcacagttcagcattgctggggaggcctcagaaaatgtacaatcatggcagaagggaaagcaaccacgtccttcttcacatggcggcagcaaggagaagtgccgagcaaaagagggaaaagccccttataaagccatcagatcgcatgagaactcactcactatcacaggaacagcagcacgggggtaaccgcccccatgattcaattacctcccaccaggtctctcccatgatgcatggggattataggaactacaattcaagatgacatctaaacaaggctaattagaagaagacagactcactagactttgccacatccatcacactgatccttactacttccagagcagagcaactcaagactcccagaaccacaggagatatagccaggagagaagagggaagaagagagcagagttataccacctgttttaaatacagatggactgtccttaagaacccttacaatagcagatcatttcatatgataggctcaaaatttggagtcttgaaaccacttttgaaatatgccttctctatttatgtgctattcctgtgttactgagggttactccggctgcatctacaataactaaatgtaggtggtaagaagaaatttggagagctttttattagaacataagttcctgcagaaatactaggaacctgtaaaacatacctacagatctgctgaatcaaagtcagttggtcggcagggtgcggtgtctcacgcctgtaatcccaccactttgggaagctgagatgggtggatcacttgaggctaggagtttgagacctgcctggccaacatgatgaaaccccatctctattaaaaatacgaaaaacagctgggcatggtggcgtgcacctgtaatcccagttactcaggaggctgaggcaggagaatagtttgaaccagggaagcagaggttgcagtgagccgagatcacctcactgcactccagcctgggcaacagagtgagactccgtctcaaaaaaaaaaaaagaaagtcaggtggtcaatcatggtttcttactgtagtcactagagggtgaaatgcgtgataggacatggaaagaaaaaggagttttctccttgagtaagtcactttcaaggttcactcttcatccaaaattgatatgctaaatatcaatatatttgaacatgtgctgaatactaaatgtgctaaatactcccttccttagagtattccaatattaatcagaaaataaatagtaattaatttagcatcaagtggaaaaggaaacatcggggatgttataagcaataaatttgaataaagaaatataccaacgatgctttactatctgtagtggctggattgtaatccacagagtctctaaaatgtgattaggccatttacgtcaacctctgtagacctgagtaggtaacaagtgtctggatagacttctcccttctggaaaactcctacacatcctttaagacctagctcaaatgtcaccacccctgacaacttgatctccttcaattcctagtctaaatcaggcaatagagtgtccctcttctaggtgtctgcaacactctcaatctatttcttttttttttttttttttttttgagatggagttttgatctttcgcccaggctggagtgaagtggcgcaatctcggctcactgcaacctccactccatgggttcaagcaattctcctgcctcagcttcccaagtagctgggattacaggtgtgtgccaccacacccagctaatttttacatttttagtagagacagggtttcaccatgttggccaggatggtctcgaactcctgacctcaggtgatctgcccaccttggcctccctaagtgctgggattacaggcatgggccaccatgcccggcctcaatctatttcaactttaggacttaccacatttgacaggactctaagaggtctgacctgcccctcccctttgatatggctcagagccccctagcgtgtgaactcttcaaggcagggatcatggcttcttcatcttttacctttcacctgctacctctgcccagtgcctactatggaatcatacacaaaacaagtcctaaataagtgttgaatacaagaatggaggaaaggtttgacttctgtttccctcttcccttttctagccagaaggtttatgaaagtataaaaggaggaactagagtgggtcagaataacctgccaactgccttgattaatctcttactgggtgcatgtcaaatattttgaaaaattttgcagtaattttccttatcatgaattcttctgggactttacttggctttataaaactcttctagggcaatgcaatcggccttcatgggcttggtcttctttactttcatggaaaaggagttcccctggtaagttaaattattttattatctttttatttgtagcaatttacagggtaaaattcatggtcattcattagtttaaaggaatttatctctattatctggtttgccaaactgtgatatcagataatagagaataaaataatccagtgaaatctctgccaaagagacactgaagaacaagcttgtgacaagaatagtaattctaattatagcttagaatcatagattctaagtaaccttagaaatcatctatcctctgaggactttattgatggagaaatttatcttcatagtcttttgagtgaccttcccccaatatctaacaaaacttactgtcaatgtagaaaaagacataattatgatgaaaatgaggcattatttcctaatagagtctaatataataatgaaataaaatatataatgtttctgatactattttaattaccctaaatcacatagggcactgtctatactctttttaagaagtggaaggcaattgtttccatggagttttacttgtgcctttgagtaatagagtgtaattatcttgcagaattatgccgaagcacttaaatactttcagaaagctgcggaaaaagggtggcccgacgcacagttccagttaggcttcatgtactactgtaagtgccacaaatacagctgctttatttagaatgacatatgcattattaagtctgcttcttttataacaaacatcaaaggtttggtgtgagtggtttagacagaacatttaggcaacaaattaaataagaatttgaaaaagcctaaagaaaaggacactggttgggaggggggacaaggaggtgcagagtcaggaagcttatctttgacaaggttaagttggaggtgctagcgatatcccgtgcacatccccagaagcaagtacgacactcacgagaaaggtcaaacttacagagaaggttcgagaggcatcagcacgcagctattagttaagagtagttgaggttgcaaaaggaaaggagcaagagggtgagaggaaagagcagtgggccatggtagataactagtgatcctccgtgctgtattgaagggtaggcaggggaagtacatcactgagaagaatggaaagccaagctcagcggaatagggaacaaaaaaaaaaaaagatcttaatggagccaagggaagaactttcaaggaagagtaaatgaatgggcacccctgtgaaatgcagtgagaaacctggtttaaaaaacaagtaagaggccgggcgtggtggctcacgcctgtaatcctagcactttgggaggccgaggcgggcggatcacgaattcgagaccagcctggccaatatggtgaaaccccgtgtctactaaaaatacaaaaattagcctggcatggtggcggctgcctgtagtcccagctactcgggaggctgaggcagaatcaaattgcttgaacccaggaggtggaggttgcagtgagcctagatcacgccactgcattccaacatgggcaacagagtgagactccatctcaaaaaaaaaaaaaaaaagtaagaaagaatgaaatatgtatgagacttggcaatacagagactgtgggtgaggtcattggactgcttggggtggaagccgcatgccaacggcatgaacggaagatcaggaagttgagaaataaaagtattcttgcaagcagcatgcccttaaagggaaggaaagagaaggaactcagcatcagggggactaggacccagagggagttacttttaagatgaagagacctgagcataattataattgatggaaagagattctgaaaaacattggtggtattagcacctgattaggcacagatcagtggaagcctctttaaccgtgatagatagacaggattgcttaccctcaaagactggagagagggtggaaaggatgatgcgaatctaagtatgggggaatgggatggggagagaggtgagtgaggaaagacaatatgaagttttcttcaatgatctagtaggtacaaagttgacttctgtgagcaaaggtagagtggttggctaggaggtcttagaaagccatgaaagtttgtaacaatctctgtggggagtgagagaggaagtggccaagacaaataccaggagatatgaacatacctgagtatccccaccaagtccttcatgtcagaggaggagccagggcagcagcagaccacatcatcaaggaggtcacatccggtcaaggggtcactggcattttccacggtggcccagcaggagcacctgttttgtactatcttggggggttgaggttgcctaagatggccttgttcttctagttcattccaagtccttggcttgggatctaccagatttcccaagtttctagaataagaaaaatagtcatggctaatgtatattaagtcttcgtatgttttaactcatttcgtatgttttaactcatttgaccctctcaactcatttgaccctctcaacatctaccgggtatcccacagtgtatccactgtgatgagcaaactaagccaatgttgtggttggacatcttgcccaggatcacacagttgtggagctggaattcaaattcaagcaatttgcctccagagcttttgctcttaatcgctacatggcactgcttctaaaggctccagtgttagagctggaagataacttaaagaccatctaaggaaagccttcacttttgcaaataaagtgcctaaatggcccaagtcacaaaagaactaatgagagagccaggacaagaatcttggctgctgggagtctgctggttctctgctctagcttcaagtgcctattcttgctctaagcaggagtttggtgagagttcggcttcttggagctgggatttacctgctgcatacgccatagtcatggctgggagaagctatatgggtgtcctgatatggaaggatcacaaagatggcgagataaatcatggtggcgcttcgggtcctcagagaccatcacttggtctcctttgcattaattttagttatgccatagtgaggagatactttcataagacgaagtagtccttctttctcaatttttttttcagaatggctcaagaatataaatttccatattcttacttagaaccaaactcagtgttcacccccaccttcacaaatagtggatttagagtagcttgacttttggttggcttttcccattctatttaaatagcaggcatcactatgactattatatccatagattataatataaaaaataaagtcaataaggggtggctcaaaacaattttaattttcagctggctctggaatatggaaggattataaacttgccttcaaatatttttacctggcatctcagagtgggcagccccttgccatttattatctggccaagatgtatgcaacaggaacaggagt

SEQ ID NO: 7409 - DNA, 402 bp, Homo sapiens
gtcaacggccggctgggcgagcacagcacagctgcgaccacttggccaacgcccccgccgagcgggcggatcgagttcctctctggctggtgggctgcaagcggcagagcccgcccgcacagcccagcttttttctttctacccagactctcaacttgaccgcgcgttggtctgtgcgcccgctaacgtgccaggcacgcgccggggagctccgggatatgctccgcggtgctaccggtgacaagtgtggtatctggaatttgtgtagttctttgccccctgtctcaaccacaaaccttgacgacacagtatggccaggggccgagctcctcccttgcccactttgttctccagactgctaggagtcaagagtcagcttgtctccccagactcttcctggga

SEQ ID NO: 7410 - DNA, 694 bp, Homo sapiens
cggaaaccgagacgggctggatggaaaactctttccagacagactccggggccctcaactggtctccgaccttcccctgcaacctgcgacacctgccattttcccatcttaggctccagaagcagaatcaagtgggatgtcttggaagaaaaacaaacaaaaggcccactaggtggagtgaaatggatcaggagcaattatgttcaatttcacctttaagttttctcaaaaggaggagcattaagaatcagccaccttagtacatacttaaaggtaaatattacatttaagaaaatccttgttatcttaatgtggcactgagaaaatactatcaagtacagcacgtggactaagttagaacattaaatacacaggatctcttgatagaattatcctcagactttccagttttaatcttctagatttactgaaacctgatcctgtccccgctgatgaaacatcagaggaatgggatcctgtaggtgaagatcatcagcttataaaatcctgttgccatcaatgggggtagcaggaaaatgatgaagattggttaaggggccagtggactcagcattgaaatgaatcatggacttgaagccaaaagactcagtttgtgtcccagctctctcaagcaaagcccccaagtcccagtttcctcatctataaaaaataataaaaatacttaatggacaaa

SEQ ID NO: 7411 - DNA, 258 bp, Homo sapiens
aagagacacagacatgcagagaaaacacagggaagaaggccacatgggatgaaggcagagaagggaatgatgcagctacaagccagctacaagccaaggaatgccatggactgctggcaaccactagaaagaagctggaagaggcaaggaaggattcttccgtgatgccttcagaggaaaaagggccctgcaaacaccttgatcttggacttctgacctccagaactaagagaatacatttctgttgttttaagttaa

SEQ ID NO: 7412 - DNA, 257 bp, Homo sapiens
aagagacacagacatgcagagaaaacacagggaagaaggccacatgggatgaaggcagagaagggaatgatgcagctacaagccagctacaagccaaggaatgccatggactgctggcaaccactagaaagaagctggaagaggcaaggaaggattcttccgtgatgccttcagaggaaaatggccctgcaaacaccttgatcttggacttctgacctccagaactaagagaatacatttctgttgttttaagttaa

SEQ ID NO: 7413 - DNA, 114 bp, Homo sapiens
cacgcctgtaatcccaacaccttgggaggccgaggtgggtggatcacgatgtcaggagatcgagaccatcctggctaacgcggtgaaaccccgtctctactaaaaatacaaaaa

SEQ ID NO: 7414 - DNA, 114 bp, Homo sapiens; identical to SEQ ID NO: 7413

SEQ ID NO: 7415 - DNA, 11360 bp, Homo sapiens; identical to SEQ ID NO: 6508

SEQ ID NO: 7416 - DNA, 139 bp, Homo sapiens; identical to SEQ ID NO: 6509

SEQ ID NO: 7417 - DNA, 6004 bp, Homo sapiens
caaaggccgggaagggtcagaccaccatccgggtactctaaggtacataaaagaggtaggggaaagagaggatcattcagtaggtaggatccacactggtatctccaatgctgggaatgggagactcatgctgtagttgcgtaggtgcaatgggagctgggagggagaaaggagagagcaacagggaagaggggagctgttcctgttgctgactgattttaccataacactcatcctcattactccacagtcctccctcccccttctccttcacccccaagtgtctcccacgactgccctccccgacctctagctgaccatggcatcagaggcagaaaaaacattccatcggtttgctgcgtttggagaatcatcaagcagtggcactgaaatgaacaacaagaacttctccaagctgtgcaaagactgtggcatcatggatggcaagacagtcacctccacggacgtggacatcgtgttcagcaaagtcaagtgaggagccaaaaatatggaggtgggggtgagaagaacctgcgaggtagttggccacggaagggttcacgtggtggaacatttgcagtgggcctaccaagcaccacagggtacctggcgctgtgctatcctttgtcttcaagacactcactgattgataggacaaaagaggccaaatctgagtgaggcaagagttggaccttggaaggtaatgcattcatgctccaaagtttctggatttctgtctaactgaccagggccaagaacgcccgaaccatcacgtttcaacagttcaaagaggcagtgaaggaactgggccagaagcgcttcaaagggaagagtccagatgaagtcctggagaacatttatggactcatggagggcaaagacccagccaccactggcgctactgtgagtgacagccttcatccccttgaccctacttccctaaatccccattgttccagtctaccctccctaaccctgccaactgtgtgactgtagagacagggccgaaacagactttagagatcatctagacattccagaagtcaggaaaatgtggcccagagaagggaagtgacttgcccaaggtccatggctattttaatagtagatttagactaatttccaagtgtctagtatctaagccaggcaattagggcttggtagcttttggaggacattagtgtagagaatttggtacctgatgcccactcctcttccaattcttatttagggtttaatctcaggcctcctgcctctcacctactcccttttttaattgtcctgtctgaactaaaagctctttctacagtggatattgagtcggggagtgggagtgaagtcctcaggcagcagcctagtcagaataactcctctggaaacaaaaaacctaccctccctctgcacacgccacactcattcccacaccacactcctcctcccccatgagtgaacggctcttaccggagtacctgcccacagctgtatctgggccctaagaaagcagcaccccatgccagtggcagagcaagagctccaagcacttgttctaagtatctcgggccatctttggggaagggatatgacagcgtaaggaaaggaagagagctcaaatccatccctggcttgcagaaagcaacaacagtgggtgcagtggaccgtttgacagacaccagcaagtacaccggcacccacaaggagctctttgatgagagtggcaagggcaagggcattgcgggacgggaagagatgactgacaacacaggctatgtgagtggttacaagggttctggcacctacgataagaagaccaagtagagaggagcttcatctcagcctgctagccccctgaccctgcatgtttaacaccagggagcttggaaaacaataaacatctgtgtgtgcagcagccaaaatctctgtctgtgagggacagatgagcctactagtgtagagagagggagaagaggcagcacgggagggtgggttctccaccacacacccttcactctgcttagccttatgcctaccagccatcagttagcattcctcctcaacagctgcttccaagaacaggatggaagaatatatttggagtaaagagatgaaccagatgtggaggtaaaagtatctactacttgtgttcacacattactgatatccacctctccacccccacccctcaaaagggtgtagcaattcctcacgtgatggactatgactatatcacatattagatccttccctgtccctccaccttcctcatctgttgcaattcaggttttttgggtggaggagtagaagccagctaaggttgcctgacttctattacaaatttgttccagagctggggtaaggggagagtctattttcaacacccagcccagaactaagttttaccccacatcacctccatcatggggcacatgggacagaagagcttactgactgctaagggtagctcaggaagatggccagatgaggcaggctgccaggattccaagagcaggagttctggtgcactgaagaaaaagcaattaaatcacaacagagtcagatgtgtgttattaactttttattttgaattgattatgggttgacaggaagttacaaaaaatggtacagagggggctcgtgtgcccttcacccagtttcccccaatggttacatcttacatactcagatgtggttttagaatttatgttcgatagagccgggctgcctcatcgctgcctgtcagggcagatctggagtctggggatttggaggagcttctggaagagaagagaagcaggaacctctgggatatgggtgagagtagataccttgaaatgccagtgagccaaggtaagaagactggaagaaaaagaggttggaaaaaggaaggcagggtgactacggttgttgggagtgtggggggacagtcctaggctccatggtaagaggaagcaggagaggacagttatatgaagggagaaaccatgatttcacagagagaagcaggctggaaactgggggttgtggggaagtgaggctaacatgagtctgagggcctcagggaggttcctatagctagccatatcccctgagtaggtgggtgagtggagggaattataagggaactgggggaggctgacatgagaaggctggtggggatggggcggtgagactcggagctggtgcctgttgccatggtgtgagctgaggccctgggcctccatccaggacttaggatctggcccagtgggtggacagtcactgccaactggacacagtcaacttcttgggtgggttttactgtctctgggagagggaggatgatgaggaggtgggggcgaagagggggtaaacaagctggaaagaacctagaagatagcaccactttgcatggtgatcaaagccctggacattttcgcacccacctggtctcttgggaggggaccctgcctgcctcgtaagtcaggaaggaagtcttgttacagggatcagagtgttggaaatggagacagctggcctgtggtggtagaggttggggagtggctcaggaattaaattcccgaatagagaccagcgatacctattggatcagcttcatacttgcgggagcagagtaggtagagcttctggttggttagggtgctattgtagtagcagctagtgggtggctgttggtggctcagggagcagaccgtgatggggagggaatcctgggtgagtgtgcagtattcattgtaattctcacagaagctgtcactatacttgcagaacttctggatggccttccaaggggcatgtatcacataatggatctttgggcaatctgaattttgcatcttgcctcgcatataggacatcagaccattacaatagccccggaaaccctttgggtagttaaccctgggatagtcaatgcttaaggtatagaagttcctgctgccaatctgcatcttgatgtccatgaccagagttggccccagaacaagctggaggaaaaggagccgggtcacagctggtgccattcctcctgctggtagagttaaggtggttgggggcagcagtgggcctgaagtggctgtctgccacatcccagagcctccagcattcccaacccaacagtactttagagatcatctcacccataaccaagttctcatgacccagaaagaggagatgcttgcccaaggccacccagacaaccagccaccttcagccagccctgctcccctggtccaccacagaatctcagcctctgcagagtccgtgagctacatttgcagaataagagctctaactggtccttgggtgagagactcttcccaagagtccttgggcccctggcactcctgctagtaaaaaatgcagagaagaaagaaggagcaggctgacctgacaattctctggcagctgggaggaaggacaggagctgaagatagctgggtagggacgtgtattcttcttgccaaggccaagacagtcaagagatgaggagaggctagaaaggtttctaggtaaaaatcagtctgggaggagggaatgtccccgagtttgatgagcccctgtgctaagagggttggatgggtgggaggaaagaggcattactatctggtctcctcctctacagtgtcattggaacacttacttccaatctccttgccaaaagttcctaagtgcctgggctttctttgatgttttctctgttccatagcctgtgctctcgtggcaaggtgagtaggaaagcactgttatgtttctgaggaacaaagtgcttcttattcctgaccctcagagaacagagcattcgccactttgtcatcccactcacgggagcccaggagggcatgtactcaggggcctcccaccaaagtgctgggctgagaatcaaagacctccatgtggactccccacggtccctatcagccttactcctgtcacacccacagccttcacctgtgacctcaggccctgtcagagtttgagcactactggaaatctctgcatgctgactctgaagcctcaaacttggcagtttggatttgaaagcataacctgaacatgaaaagctgtggatgccagagcctggcatgatccgtttcgtactgttggttgatctctgagtggtttgccatgctggggaaagggccacgctcctatctttttcatcaacatcttccctttcatcagaatcaaagagccagctccctggaaactgctagctcttgcccttgacttccacaggtcactcagccttgttagtctgcaaggtgtcttccagatttggggcctcctcttaggagagcctttttacctttgctggacagcagaaaaggggagtcagaacacagaaagctgagtgctccaacaccctcagtatagctcaggaggagggagtaaggccgcagagagaaagattggtgttcctcatgtagagccccctaaactggcactttctgacagcacaaaccacagtccaaaatggaatccatcctccccataacttgtttctcttcctgttttgtcaactcagtttccctggttacctatgcaagaaacctgaaagtgatcctagacccctccacctccccaatcccagctacggggaggcggtcctgcatggtggttaagatcaaggcttttgagtgaaacagaccaggaattgaatcctgcctctgcagcttacaaactgcacaccatctatctgtttacgaaaccactgaaagcttccttgtttcatctgttcatgaggatagtattttttacctcacggcagtatgaggatccattaagatgtatatcaagagtttttagaccagtgcccggcacatggtgagtcctcagtatgagcctgagtccatcagtcacacagccctgacaatcttaaacttttcccaagcccatctcttccattcttatttcttcctcagtggatgctctcgtctcgcctggacagcacacacactccaactccagtaagactcaactcaaatatatctcttatacaacttcaaga

SEQ ID NO: 7418 - DNA, 6014 bp, Homo sapiens
caaaggccgggaagggtcagaccaccatccgggtactctaaggtacataaaagaggtaggggaaagagaggatcattcagtaggtaggatccacactggtatctccaatgctgggaatgggagactcatgctgtagttgcgtaggtgcaatgggagctgggagggagaaaggagagagcaacagggaagaggggagctgttcctgttgctgactgattttaccataacactcatcctcattactccacagtcctccctcccccttctccttcacccccaagtgtctcccacgactgccctccccgacctctagctgaccatggcatcagaggcagaaaaaacattccatcggtttgctgcgtttggagaatcatcaagcagtggcactgaaatgaacaacaagaacttctccaagctgtgcaaagactgtggcatcatggatggcaagacagtcacctccacggacgtggacatcgtgttcagcaaagtcaagtgaggagccaaaaatatggaggtgggggtgagaagaacctgcgaggtagttggccacggaagggttcacgtggtggaacatttgcagtgggcctaccaagcaccacagggtacctggcgctgtgctatcctttgtcttcgagacactcactgattgataggacaaaagaggccaaatctgagtgaggcaagagttggaccttggaaggtaatgcattcatgctccaaagtttctggatttctgtctaactgaccagggccaagaacgcccgaaccatcacgtttcaacagttcaaagaggcagtgaaggaactgggccagaagcgcttcaaagggaagagtccagatgaagtcctggagaacatttatggactcatggagggcaaagacccagccaccactggcgctactgtgagtgacagccttcatccccttgaccctacttccctaaatccccattgttccagtctaccctccctaaccctgccaactgtgtgactgtagagacagggccgaaacagactttagagatcatctagacattccagaagtcaggaaaatgtggcccagagaagggaagtgacttgcccaaggtccatggctattttaatagtagatttagactaatttccaagtgtctagtatctgagccaggcaattagggcttggtagcttttggaggacattagtgtagagaatttggtacctgatgcccactcctcttccaattcttatttagggtttaatctcaggcctcctgcctctcacctactcccttttttaattgtcctgtctgaactaaaagctctttctacagtggatattgagtcggggagtgggagtgaagtcctcaggcagcagcctagtcagaataactcctctggaaacaaaaaacctaccctccctctgcacacgccacactcattcccacaccacactcctcctcccccatgagtgaacggctcttaccagagtacctgcccacagctgtatctgggccctaagaaagcagcaccccatgccagtggcagagcaagagctccaagcacttgttctaagtatctcgggccatctttggggaagggatatgacagcgtaaggaaaggaagagagctcaaatccatccctggcttgcagaaagcaacaacagtgggtgcagtggaccgtttgacagacaccagcaagtacaccggcacccacaaggagcgctttgatgagagtggcaagggcaagggcattgcgggacgggaagagatgactgacaacacaggctatgtgagtggttacaagggttctggcacctacgataagaagaccaagtagagaggagcttcatctcagcctgctagccccctgaccctgcatgtttaacaccagggagcttggaaaacaataaacatctgtgtgtgcagcagccaaaatctctgtctgtgagggacagatgagcctactagtgtagagagagggagaagaggcagcacaggagggtgggttctccaccacacacccttcgctctgcttagccttatgcctaccagccatcagttagcattcctcctcaacagctgcttccaagaacaggatggaagaatatatttggagtaaagagatgaaccagatgtggaggtaaaagtatctactacttgtgttcacacattactgatatccacctctccacccccacccctcaaaagggtgtagcaattcctcacgtgatggactatgactatatcacatattagatccttccctgtccctccaccttcctcatctgttgcaattcaggttttttgggtggaggagtagaagccagctaaggttgcctgacttctattacaaatttgttccagagctggggtaaggggagagtctattttcaacacccagcccagaactaagttttaccccacatcacctccatcatggggcacatgggacagaagagcttactgactgctaagggtagctcaggaagatggccagatgaggcaggctgccaggattccaagagcaggagttctggtgcactgaagaaaaagcaattaaatcacaacagagtcagatgtgtgttattaactttttattttgaattgattatgggttgacaggaagttacaaaaaatggtacagagggggctcgtgtgcccttcacccagtttcccccaatggttacatcttacatactcagatgtggttttagaaatttatgttcgattagagccgggcctgcctcattcgctgcctggtcaggggcagactctggagtctgggggatttgggaggagcttctggaagagaagggaagcaggaacctctggggaatgggtgagagaagataccttgaaatgccagtgagccaaggtaagaagactggaagaaaaagaggttggaaaaaggaaggcagggtgactacggttgttgggagtgtgggggagacagtcctaggctccatggtaagaggaagcaggagaggacagttatatgaagggagaaaccatgatttcacagagagaagcaggctggaaactgggggttgtggggaagtgaggctaacatgagtctgagggcctcagggaggttcctatagctagccatatcccctgagtaggtgggtgagtggagggaattataagggaactgggggaggctgacatgagaaggctggtggggatggggaggtgagactcggagctggtgcctgttgccatggtgtgagctgaggccctgggcctccatccaggacttaggatctggcccagtgggtggacagtcactgccaactggacacagtcaacttcttgggtgggttttactgtctctgggagaggaaggatgatgaggaggtgggggcgaagagggggtaaacaagctggaaagaacctagaagatagcaccactttgcatggtgatcaaagccctggacattttcgcacccacctggtctcttgggaggggaccctgcctgcctcgtaagtcaggaaggaagtcttgttacagggatcagagtgttggaaatggagacagctggcctgtggtggtagaggttggggagtggctcaggaattaaattcccgaatagagaccagcgatacctattggatcagcttcatacttgcgggagcagagtaggtagagcttctggttggttagggtgctattgtagtagcagctagtgggtggctgttggtggctcagggagcagaccgtgatggggagggaatcctgggtgagtgtgcagtattcattgtaattctcacagaagctgtcactatacttgcagaacttctggatggccttccaaggggcatgtatcacataatggatctttgggcaatctgaattttgcatcttgcctcgcatataggacatcagaccattacaatagccccggaaaccctttgggtagttaaccctgggatagtcaatgcttaaggtatagaagttcctgctgccaatctgcatcttgatgtccatgaccagagttggccccagaacaagctggaggaaaaggagccgggtcacagctggtgccattcctcctgctggtagagttaaggtggttgggggcagcagtgggcctgaagtggctgtctgccacatcccagagcctccagcattcccaacccaacagtactttagagatcatctcacccataaccaagttctcatgacccagaaagaggagatgcttgcccaaggccacccagacaaccagccaccttcagccagccctgctcccctggtccaccacagaatctcagcctctgcagagtccgtgagctacatttgcagaataagagctctaactggtccttgggtgagagactcttcccaagagtccttgggcccctggcactcctgctagtaaaaaatgcagagaagaaagaaggagcaggctgacctgacaattctctggcagctgggaggaaggacaggagctgaagatagctgggtagggacgtgtattcttcttgccaaggccaagacagtcaagagatgaggagaggctagaaaggtttctaggtaaaaatcagtctgggaggagggaatgtccccgagtttgatgagcccctgtgctaagagggttggatgggtgggaggaaagaggcattactatctggtctcctcctctacagtgtcattggaacacttacttccaatctccttgccaaaagttcctaagtgcctgggctttctttgatgttttctctgttccatagcctgtgctctcgtggcaaggtgagtaggaaagcactgttatgtttctgaggaacaaagtgcttcttattcctgaccctcagagaacagagcattcgccactttgtcatcccactcacgggagcccaggagggcatgtactcaggggcctcccaccaaagtgctgggctgagaatcaaagacctccatgtggactccccacggtccctatcagccttactcctgtcacacccacagccttcacctgtgacctcaggccctgtcagagtttgagcactactggaaatctctgcatgctgactctgaagcctcaaacttggcagtttggatttgaaagcataacctgaacatgaaaagctgtggatgccagagcctggcatgatccgtttcgtactgttggttgatctctgagtggtttgccatgctggggaaagggccacgctcctatctttttcatcaacatcttccctttcatcagaatcaaagagccagctccctggaaactgctagctcttgcccttgacttccacaggtcactcagccttgttagtctgcaaggtgtcttccagatttggggcctcctcttaggagagcctttttacctttgctgggcagcagaaaaggggagtcagaacacagaaagctgagtgctccaacaccctcagtatagctcaggaggagggagtaaggccgcagagagaaagattggtgttcctcatgtagagccccctaaactggcactttctgacagcacaaaccacagtccaaaatggaatccatcctccccataacttgtttctcttcctgttttgtcaactcagtttccctggttacctatgcaagaaacctgaaagtgatcctagacccctccacctccccaatcccagctacggggaggcggtcctgcatggtggttaagatcaaggcttttgagtgaaacagaccaggaattgaatcctgcctctgcagcttacaaactgcacaccatctatctgtttacgaaaccactgaaagcttccttgtttcatctgttcatgaggatagtattttttacctcacggcagtatgaggatccattaagatgtatatcaagagtttttagaccagtgcccggcacatggtgagtcctcagtatgagcctgagtccatcagtcacacagccctgacaatcttaaacttttcccaagcccatctcttccattcttatttcttcctcagtggatgctctcgtctcgcctggacagcacacacactccaactccagtaagactcaactcaaatatatctcttatacaacttcaaga

SEQ ID NO: 7419 - DNA, 307 bp, Homo sapiens
aggatccgtgaggttcatctatctgtagtgcttctggccagagaaaaggccgaagagagaaaaccctgaggaacatctttgacctgcatagaaacttatctgaagattttcagaatctgagcctcaccctcagtctatcccagttttatcctgacctgtccacatctgttatactccaaggcttgctgggcccaacactggaagctatttaatgtttctattgcgactggccttttaaagccagtgggattctccatgctacacttgagcctggagactagaaaacatgacagcctgttttcattaa

SEQ ID NO: 7420 - DNA, 307 bp, Homo sapiens; identical to SEQ ID NO: 7419

SEQ ID NO: 7421 - DNA, 311 bp, Homo sapiens
tattaaaaacactgtacgtttatttaaaccattacttttcataattcattgagtcttattagaggtcaacatcttcattctgttaccttactgggtacattcactgatgttacataaaacttcatgtaaaattaaataagaattaaaagtacagctaagaacagtgatgatctgtatgagaggatttaccattgtgtaccctagtccctaatatggtcattttttgtttcatgggcctctcaaccttaaattcatttttattttagagagaataaaggcactcctctgagctcttgcccaccacgtgccca

SEQ ID NO: 7422 - DNA, 311 bp, Homo sapiens; identical to SEQ ID NO: 7421

SEQ ID NO: 7423 - DNA, 107 bp, Homo sapiens
aggctgaggcacgagaatcacttgaacctgggaggcggaggttgcagtgagccaagatctcgccactgcactccagcctgggcaacaaagtgagactctgtctcaaa

SEQ ID NO: 7424 - DNA, 357 bp, Homo sapiens
tgaatattaaaattttaattgctttaacatttaatacataggtgattaagagaacatacaaacaaatatatacatatagtgttaacaaattctctctagatcagtgtttttcaaattgtgggtcatgaaatcaatttagatacttgaaatcaaatgaatttaattggaagtattgggagcattgggagcattgctcctagtaaagataagcactgtttcatgaaactttttaaatgtaaatatacatattttgaatgggttatggtttaaaaagaagaaaaaaatagctgagaaaaactgctctagtggcagaatttataggcctttgacctttcctatatccaaattttctataaa

SEQ ID NO: 7425 - DNA, 357 bp, Homo sapiens; identical to SEQ ID NO: 7424

SEQ ID NO: 7426 - DNA, 107 bp, Homo sapiens; identical to SEQ ID NO: 7423

SEQ ID NO: 7427 - DNA, 13024 bp, Homo sapiens
aacaggctcctgcaggagatgggtcacagacccgagggaagatgtctgaaggtggaaggaaatccagcctgctccagaaaagcaaaggtgcgaaacagccatggtcctcgggcagtgatgagcgcggcagtaaattttgtctccatgggtgctaagttaaagttccttctttcctttctgggaagggtcagaagcagtgagcagagagagttggagcataaggacagactggggggatgtggggaggtgagtggggatgcggagcaaaggggagatcatttcttccctgtgtggccccagagaaaagccacattgccatcatggtactgctttgtgacatcagtttcttgtctatgtgactgttttcccactggtgctctgagagcaagactcttagagaggctgtgaggactcatcctgaggtcgggagttcgagaccaacctggccaacatagtgaaaccccatttctactaaaaatacaaaaattagctggccatgatggcacacgcctataatcccagctacttggggtgagggtgcagggctgaggcaggcgaatcgcttgaacctgggaggcggaggttgcagtgagccgagattgctccattgcatgccagcctgggcaaccgagtgagacaccgtctcaacaacatcaacaagaagactcagctctgctgtttgtaacattaaaaacaaccccagaccagacatagaggaacaggtatagctgtgtgccaataaaactatttacaagcaaaggaagcgggctggatttggcctatgagctacaatttgccactcctggtgtagatgtttgtgagaattcgcgctatgcccttcccaggcgtggttgagaagcaggcacactagagccagcctgctagtctttccccatctaattgggttgaaggccatgcatgaagctgggaatgctggtgtggccaggggatcagactgggcctgccacaccttaaaaccagttcttactcaagggcgattctgacccccagggaacgcttaggcagtgtctggagatgtgtttggttgtcatatctgggggaaggggttctactggcgtctggtgggtggaggccagggaggccacttaacatcctgaatgcacaggacacccccaccaccgcaaggaaggatccagccccatgtgctcgcaatgccatggctaagaaaccttaatttaaaccacaccataatgatttcaaaggactgcttgtttgagttccattgtatggctttgtagaaaattaatttttttagtgcaaatgctatacatgctgatgataaaatattccagggcaaaagcaataacaataaaaagttaccacctctagctgggtgtggtggctcacgcctgtaatcccggcactttggaaggatgaagccggtagatcccttgagcccaggagttccagacctacctggcaacatggtgaaaccctgtctctactaaaaataaaaaaataaaaaattatctgggcatggtgacacttgcctgtattctcagttacccaggaggctgaagtgggaggattgcttgagcctgggaggcagaggttgcagtaagcctagattgtgccactgcactccagcctgggtgacagagcaagaccctgtctcaaaaaaaaaaaaaaagaaaatttccacctcctcaccccaggctcccagtctgtgccctgagggcatgtgctctcaatagatttttgctgatctttccagattttttttaagaatttcaacacaaatcgttgttatattgtaccctacacattgcagtgaccttcctcttttcatttccaggtcattcatttcctcagctgcatagttgttcatgaaatagtctcatgcttagttcctaacacaacataccgtacgtgccatctgttggcatctgcagcactcctgggctcttgtgtagtggtagcatgctgtatgctagtgcccatcttagacagtgtaaggcttaattttacagtttagaatatacgttaaaagatgaagggaactcccagggaggatgaacagtccagaagctgcagaaaaaagatggaaagattacttggctgagtgcggtggctcatgcctgtaatcccaacactttgggaggccgaggtggatagatcacctgaagccaggagtttgagaccagcctggccaacatggtgaaacctcatctctactaaaatacagaaattagctgagcatggtggcgagtgcctgtaatcccagctacttgggaggctgaggcaggagaatcacttgaacccgggaggtggaggttgcagtgagccgagattgcaccattgtcacctgggtgacaagagtgaaactccgtctcaaaaacaaaaaaggtggaaagagagtagagggtagaatgggaatatggcatcgtatcccacctgtagcatcttgtgaactagcagaaaggcctatttgcgtctctttggttatacagaatgtctctgtcttctagtggtactttaaaaatagagtcaaggtgatggctgggaatttccacaggttttttttttttttttttttttagcctttccaccttggacgaaattgggcttttagaagcaagtggtattgttcaaaaacacggcctgcgtttcctggcttgaatggagagtgtctcttgactgtgctgactttcggggattcttttcttaacagcagatagcagtggggtcggaaagggtgacctgcagtccacgttgctggaagggcatggcacagctccacctgacctggatctctctgctattaatggtaaatcatttgtttcaccccttctgtcactcactgggggttgcagtaggtctcagtgggcttccaaagtacaattggcctacagtggggtcacatccaacaaacccattgtaagttgaaaatattgtacatcaaaaatatacttaataccttggtaaagggtattaaacttgccttttgccccttgcaaagttgaacaactttaactggactgttataagtccatatactcctcaatttatgatggggttacatcccaataaacccatcattagaaaaaaaatggcaaccagggaccagtctatatacgctacttgccattaaaaatgctgtgctttatcttagacaaaagcatcgtcaaaaagacgccacagttagcaaaaacaatatcaaagaaacctgagtcaacatcattttctgcccctcggaaaaagagcccggtaagtgtctgaaagaagagggcagccacagatgggttgcatagatctgatttagagtccactctgaaccagatgctgagtgcccacggatccaagaacataaaagacacccatgccctttaggacaaaaatcaagactacagatgttcttagatcatttgtagagtttacatttccccaagtacacattcagtagtggataccaatatggagccatgtaaaaaatgagacaggggacttctctgtgcccatgctgtgctgggaaaggcacaatgccaggccctgtcccttggtgggaggacggctaggctgtggtctcactggggtgaggacaagactggtggttgggggaccagcaggtggggagacggcattctggtcctggtgcagcaccaaattggtgggtattctcagcttgtccttgactacccagctgctgctgtctctccacctgccaggtgccaggggaaggaaggttgtggacctccctctttcatctcagcgccgcagaaaaccaaataaaagaaaatagaagcaatagacccactacagtagagaactaccgaatatcaaactgaatacagaaaatccacacaagccagagttctccccctgctgggaaaagagctggatttataccacttcatcaggaattgagagggtctttttcttttcttaaggatttatctgaagcaatggaaatgatggagtctcagacactactgctgacgctactatccgtaaaggtgaaaacagtttcttgttcacgtatgccatggatggaagggtggcctccattcacggggagggagtccccacctgcttgagcttttctttcacatttaacagatggagaacaatcttgctgagtttgaaagaagggcagaaaagaatttattaataatgtgtaaggagaaggagaagctacagaaaaaggcccacgagctgaagcgcaggcttctcctctctcagaggaagcgggagctggcagatgtcctggatgcccaggtcagttgtaagtgacactctgtgaccagtgagtgttccctgtgaatctgtcccatctccactgtttcggtagcattcgtgctagggtatcattgctcactggcttctaactgtgttgggcttttaatgccacacttgctctggtcctggtgttggtctatgatgacacttttagagaatgaggttacaaagtaaagtgtgaatgaataagggaggtgtgcaccttctatgcacttgtgcagagacttcctgagcgcctgatgatcgtgagcagcaacaggatgacgtgctctgggactcccctgcagggtcagggtactggtgagaggcacatcactcctaatgctgtgtggtcagcagtgtccatgtgggagaaggacaggaacaaacccctggaacccagaaagggctgattggcaggggcggaccccccacccagtgggtgagtttcctgtggttgctgggacagagtcccacaacctgggtgggcaaaacaactggaattcattctcttacggttcaggaagctgaaagtccgagattgaggtgttggtggttggccctgtctgagggctgcgagggagaatctctcctggccctgtctttggcctgtgaatggttgtcttctctgtgttcacatgtcctccctgctgtgtgtgtctgtgtccccctttccccacaagacaccagtcgtgttggattagcatcccccctacaacccccctatcacctcatgttaacttgatgaccctgataaagtccctcttttcaaataagggcacattccaaggtactgggagttggatcatcaggtatgaatttggggggatacagctcaacccctaacatccaaaattttcatgtgagcacccgtgcagctagaccctgggcttgagtacaaggtctctgactttagggagctcaaaatggaagaaaaagagacaaacccagttgaccctcaaacaacacgaatttgaagtgtgaggttccacttacatgcagatttttttcaataagtatattggaaaaagttttagagatttgtgacaatttgaagaaactcatagatgaaccttatagcctagaaatactgaaaaaattaagaaaaagttaggcatgtcatgagtgcatacatacttgtcccagcatgggcaacatagtgacacccaatctctacaaaaaaattttttttttttttgagatgggcgtcttgctctgtcacccaggctgtagtgcagtggtgctgtctcagctcactgcaacgtccgcctcccaggttcaggcaactctcatacctgagcttcctgagtagctgggactacaggcatgcaccaccacgcccagctaaattttgtatttttagtacagacagggttttgccatgttggccaggctggtctcgaactctggacctcaagtgatccgccctccttagcctctgaaagtgctgggattataggtgtgagccactgcatccggccaatttctataaaaattaaaaattagccaagtgtggtggcatatgcctatagtcccagctacttgggaagctgaggcaagaggtttgcttgaccctgggaggtggaggctgcagtgaactgtgatcactccacagcactccaccttgggcaacacagtaagatctgtctataaaaaatatgtatgtgcagtggctcacgcctgtgatcccagcactttgggaggctgaggtgggcggattacttgaggtcaggagtttgagaccagcctggccaacatggtgaaaccccgtctctactaaaaatacaaaaaattagctgggcatggtgatgcgtgcctgtaacccagctacttgggagactgaggcgcaagaattgctggaacccgggaggcagaggttgcagtgagccgagactgcgccgctgcactccagcctgggagacagagcaagattccatctaaaaaatatatatgtgtatgtgtgtgtgtgtgtgtctgtatgtgtgtctgtgtgtgtgtgtatgtgtgtgtgtatatagatgctaatctatttacatgtttattgaatgtttactatcagtaaggtttcagtcagcagtagctatcagtaaatttgggggaagtcaaaagttagatacagatttttgactgcacaggggttgatgccccaaactcccgtgttgctcaagggtcaatcgtatatcatttcaaacccccatgaagacccagacagcatgtttggggtgggagtgggccatgccggggatggccttgtggaaggcaggcgtttaggcgcagtactctaaagcaggtgggctcagctgagggcccaagcctagaaccgctggcagacacatgttctcagtaaggggcctgggccgccttgccatccacttggctctcttgggaagagctcaccacaccctcggaaacttcctgagctctgattccctggggggtggtgaagaacagcgctgtatcttaaccctgcacaagccgttaagcttctgttaagtttccagagaggggactccagggtctcccctgattatcccttctgcttacagatcgagatgctcagccccttcgaggcagtggccacacgcttcaaggagcaatacaggacattcgccacggccctggacactaccaggcacgagctgcccgtgaggtccatccacctggagggagatgggcagcagctcttaggtaggaaacggggcgtcccagtgcgtgtgcagcaggcggggcgaggagcgtgtgtgggtgcttcctgtgggcctgatgtcatcaccgcaagtgccctcttccccaactaaggcagaggatggggagggctggccaggctgtggttcctccaagggtctcgccctgagtaagtaaccacactgggatttgaaccttgggcagtgggattcacagtgatctgtcctgccgaaaggcattttgcggggacgacctgtagtctcctgagtcctgctcccaacaaatatgccgtagtggttggggggtgacaagaccaccagccccaccccggctttccccctcagcagagcagtgaggtccctttcaggcatagggttcccacctaatccctaacttgaagactttggcaagtgtgaaaaactgccgcgttgcaccttaaattctcttcagaacaggtatcttcccacagagcaagtttttggctaccctggagtttggttctttttttttttttttttttttttgagacagcatcttgctgtgtcgcccaggctggagtgcagtggcacaatctcagctcactgcaacctctgcttcctgggtttaagtgatcctcccacctcagcctcctgagtagctaggagtacacgtgggcaccaccacacctggcttatatatatatatatatatatatatatatatatatatatatatatatattttttttttttttttttttttttttttttctgtagagacggggtttcgctatgttgccaaggctggacttgaactcttgagttcaagcagtcctcccaccttggcctcccaaagtgctgggattatagacatgagtcaccatgccctgccattgttcttttttttctgcggaggtggaatcttctagcgtagtcacccagcctggagtacagtagtgcaattatagctcactgcagccttcaacttctcaggctctactcagatcctcccacctcagcttcctgagtagtagcctccctagtgcttcaggcatccaccactgcacctggctaatttatttttgaaacggagtttcactcttgttgcccaggctggagtgcaatggtgcaatcctggctctctgcaacctccacctcctgggttcaagcgattctcctgcctcagcctcccgagtagctaggattacaggcatgcaccactatgcccggctaatgttgtatttttagtagagacagggtttctccatgttggtcaggctggtcttaaactcccgacctcaggtgatctgcccgccttgccctcccaaagtgctgggattacaggcatgagccactgctcctggcgcacctggctaattattatatttttttttgtagagacgaggtgtggctatgttgcccaggctgatctagaactgctgggctcaagtgatctcctaccttggcctcccaaagcactgggttcctgaataggtgtgagccccctgcccggccgggtttctgattttatgactgcggtcacctccacatctgtaactcttagaaaacactcagtctctgctcagttccttaggtagttcctgggaacggcctagggatcgtgttgagttttccggggctgccataccaagcggccacagaatgggtggtttgcaacaacagaaagatattccctcccagttctgggagtcttgatttcagccagaagtctgaaatcaaggcgttgatgggattggctccctccaggggctgtcaggtgagctcatcctgtgtctcccccacctgctggtggctgctggtggcccttggcgttccttggctcatggccgtgtccctccattctctgcccgtcctcacgtggcctcctccctggctgtctcgttattgaaatttcctgcatcaggctcagcacggtggctcatgtttgttatgccagcactttgggaggctgaggcgggtggatcacgaggtcagtagttcaataccatcctggccaagacggtgaaaccctgtctctactaaaaatacaaaaaaaatagccaggtgtggtggcaggtgccggtaatcccagctactcaggatcctgaggcaggagaatcgcttgaacccggaaagtggacgttgcagtgagccaatattgtgccactgcactccagcctgggtgacagagcaagactctgtctcaaaaaaaaaaaaaaaagaaaaaaagaaatttcccgcatccgatgaggacacaagtcactggattaggccccacccatcttaactcccccccatccacaaaaccctgtttctggttaaggtcatgttcactaggagtggaggattggagtgaaacgtacgtattggggagggcataattcggtccacagccggagggagaagaggctggctgatacggcacttaaaaggctcccaaaatgtgactctcatgtacgactggccttgatgtgatgtatgtcagggtagagaggcgtgttgtcctagtgcaggtgacacaggtcccgcagttgcaggcatccttctgctcagtggtgcaggcaacaaggactgtttttcagttgctcatggtctggcttggaggcctcaggcattctccctggcacagcacagcccttttcacatttgcattggtttctgttgaggacaccagagtgacatttcagttctggtccaatgccctcctggatagatggatgtgcctgtcccacaatctcagagcacgggatggataagggacgaatgtcttccttggcttctgcttcttccctgtgcgctctccacggttccagcgcgatagccgagcatcatgacagaagtctgtcggccgctccacttgtgtgtgccttgcgtggggcaccttgccatccatcgcccaccatccctcttcccctccagacgccctgcagcatgaactggtgaccactcagcgcctcctgggagaacttgatgttggtgattcggaagaaaatgtgcaggtgctggacttactgagcgaactcaaggacgtgacggcgaaaaaggaccttgagctccgaaggtacctcggaaaatgctttaagaaagaggtggcaccctgtttgctcagggctgttggtggctgcactgttggggtggtgccgagttcctctaggagttcagaggaggttcagtcccctgagcgagctgctcttttcccagacgctgcatgatacaagaatggccagcaggtgtcattgtcatctgtattgtggataacaaaatctccatccaaaagcacccgccttgccttccctttcttttttttttgagacaggttctcactctgtcgcccaggctggagtgcagtggcagatctcagctcactgcaacctcaaattgctgggctcaagtgatcccacctcagcctcttcagtagctgggactgcaggtgtgcgccaccatgcccagctaatttcccttttctagcctacttctcagtcatttttgagctaatggggactctaggtgaagtgaggatcaaatatgctataagacgtgtcctagattcacagagtataagactcaagcagagcagggggaagagagaacaaaagagctcagaaaaatccatggaagggccaggcgcagtggctcacgcctgtcatcccagcactttgggaggccgaggtgggagaatcactttaggccaagagttcaagaccagcctgggcaacatggtgagaccttgtttctatttatttatttatttattttgagacagagttgctcaggcttaagtgcaatgtcatgattttggctcactgcaacctccacctcctgggttcaagcaattctcctgcctcagcctccgaactaactgggattacaggtgcacaccaccacgcccggctaattttgtatttttagtagagacagtgtttcaccttgttggtcaggctggtcttgaactcctgacctcaagtgatctgcccacctcagccccccaaagtgctgggattacaagcgtgagccaccatgccgggcctctctatttaaaaaacacaaaaattagccaggcacactggtgcatgcctgtggtctcagctactcaggaagcagaggtgggagaatcatctgagcctggggaggtcaaggctgtaatgagctgtggtcgtgccactgcattacaacctgagcagtagagtgagaccctgtctcaggaaaaaaaaaaaaaaaaaaaaaatctatggaagttctcaagcagctggaagagaaagggtgtcacctatcattcacatcctcagagtaacccagcagcacaggcgccctcacatcagccctgttggtgttttcaatgccttccagggtaaggtcccaggaggatgttttttgaacttctgattgatagaaatggcccagatcttaaaggactgtgcagtggcttgcacagagcacatatccttgtgcgtccagacccccaaaacccatcaagatctccccccgcttttttttttaacctcccccaggagatttctaaccacgcgcttttctccacctcttccagtagagtatcttttctcttttttacaatgctaaatctttttcctgagttgcttaaaatattggaaaaggacttatgcaaaacagccagccacccactgtggcatttctttctcctgtgggtggccatggatcaattcaggagacatcaaagggttataaagccacagtcccactcccaggataactcattcatccatgaacggcagaatgttcatgaacccagttacctcttaaaggccccacctctcgctgctgccacattggggattattattattattgagacaggatttcatttcattgcttaggctggagtgcagtggcgcgatctcggttcactgcaacctctgcctccgaggctcaagcgatcatcccaccccagtctcccaagtagctgggactacaggcgtgcaccactgcacccagctaatttttttttttttgagacggagtctcactttgtcgcccaggttggagtgccagtggcgcgatcctcggctcactatagaccctgtctcctgggttcaagcgattctcctgcctcagcctccccagtagctgggattacaggtgcgttccaccacgcccggctaatttttgtatttttaatagagatgggctttcaccatgttggccaagctggtcttgaactcctgacctcaggcgatctgcccgcctcagcctcccaaagtgctggaattacaggtgtgagccacagcgcccagtatttttaaaaaaatttttgtatagacgtggttttgccatgttgcccaggctggtctcgaactcctggcctcaagccatctgtctgcctcggcctcccaaagttctgggattacagcacttcaatcccactttacctggccaggggattaatttttaatgggagttttggaggggacagatactcccaccacagcagcagcacagcactgagctccatgaacatttcttggatgaatctttcctttcatgtctggtgctgttcttggggggtttccctgattgagtcttttcagacggatcttatttgctggccctttcccactgagcacgtagggcatgtgaaaatccgcctccccgtgtggcagccctccgttcaccacacacatgcgcttcacctcagagggtgaaagccgttattctttctcccatcctcaacaggagctttgcccaggtgctggaactctccgcagaggcaagcaaagaggcagccttggcaaaccaggaagtctgggaagagacccagggcatggcgccccccagccggtggtatttcaatcaagacagtgcctgcagagaatctgggggagcacccaagaacacgcccctgtctgaggacgacaacccgggtgcctcgtcagcccccgctcaggccacgttcatcagcccaagcgaagatttttcttcaagcagccaggcagaagtcccgccctctctctctcgttcagggagggacttgtcatgactcatggttacattcaggatacttgagcactttatatactaccgtagcactgtagctattttttatgtgataatcttgtttgataaaaaagtaaacctgttttgcaattgaa

SEQ ID NO: 7428 - DNA, 183 bp, Homo sapiens
ttgcttttggttattagaaggccagtgctccatgtgtttctttaaaaaaatattttttgacaacatatgtgtaaaaactttgtttctcctgatgaccaaagttatatgttctctctggaaaactagcaaatacttaaatgtgtctagaaaaaaatcagtcacctgtaatctaccatgtcaata

SEQ ID NO: 7429 - DNA, 5366 bp, Homo sapiens
ttgccctgcccagtaatggcctggaagcagcagcctctcactctggcctggtaggcagcgatgctgagactgaagagccagggcagaggggctggcagcatgaggagggagcagaagaggctgtggctcaggagtctgacagtgatgacatggatctagaggcgaccccccaggaccccaactcagatgcacctgttgtgttcagaagcccaggtggtaagaagcttttcttcttggagttttggaattagacttggggaacaaagagactggatgtggagtcagaaggcttaatgtcacatgccagctttgccacttagggaacaaagaagtgcttctccattctttgtgtgtatttcattctcttttatgggaaaatcagtgagataattgggaatacatttagatttttagaagaaatacactcagaaaattcacagtcctgagaaggagtatcattccttccatttctttactaaactatttttttccctgattttaaaatcattgcagcaggctcactgagaaaaatgtggcacaatattatctttaagtagaaccagtgtttattgagtatgtcatatgaacttgatgttttacatattttatcttttacttccccaaagctcaaagtcagtttattatattcgtttttacttagaatagtacagtgaagaattgtccaaagttggggaaacatttttttctttaaaaattttaaaatatatttaaacagagacagggtcttgctgtgttgcccaggctggtctcactgggttcaagcagtcctcccacctcagctttctgagtagttaggactacaggtgtgagccaccacactgagctgggaaacatctaagtttcctctgagattcatagtatacattggcattttaacaggattgagaagtcctacagtgagaaagcttgtttaacactctatttaaatattcttgcctatggaatcctttttaaagtatcatttactaccattaatgtaatcggtacaactatgctgttatggaaagagcaccaaagtatgactcaggaggcttagattctaatcctgatgaccactaataaactgggcgaccttgagcagttatctaaccattctaagcttccatttcctcaagtgtaaaatggggcaaagcaggaggactacatcgctaaagttgcagttcctttgtgagcagtggtcttttccttctgttttttgtgacatgcatgatcttattttagttctgttctagctttctggtctttgtgtcttctgctttttcgtttctctttatttttcttgttttcttcattctctttttccttttttgttgcagacacaaatatatgtaggttaattaaatgtggcacatgtgctcaatgttattttcattatcattgttctttcactttttttttttttttttttttttgagacagagtcgctttgttgtccaggctggagtgcagtggtgtgatctcatctcactgcaacctccacctccccagttcaagcgattctcgattctcatgcctcagcctcccaagtagctgggactataggtgcacaccaccacgcctggctaatttttctgtgtttttagtagagacaggctttcaccatgttgtccaggctggtctcaaactcctggccccaagcgatccacagggattacaggcataagccactgtgcctggccagcttcttttttatatggctaaacagaatttgtaaataaaggtgtctgtgaaattgctaaaggatataaagaagcaaaacattctatactgagtttgtggattttggaaacatgaagtatttttactttttcatctaggagcctgagcttaggggaaatctcatgatgcagatgataggactggggaaatcaagctttaaagctcctgattaagtgtgcttgaatgtctctactggtggcaggtgtacactggggctatgaagagaccaagacttaccttgcaattcttagtgagacccagttttatgaagccctccggaactgtcaccgcaacagccagctgtatggagcagtggctgagaggttatgggaatatggctttcttaggaccccagaacagtgtcggaccaagtttaaaagcctgcaaaccagctatcggaaagttaagaatggccaggcaccagagacctgtcccttctttgaagagatggatgctttggtgagtgtccgggttgctgccccacccaatgatggccaggaagagactgcttcttgccccgtccaggggaccagtgaggctgaagctcagaagcaagctgaggaagcagacgaggccacagaggaagattctgatgatgatgaagaggatactgagatacccccaggggctgtcataacccgtgctccagtgttattccaaagcccccgtggtaagattatttcactattatggtgtaaataacaaagggaagacaatgggacttaggaaaaatatcatctgattgagaactggcctctacacccagctttcatggattcttcttgtgaccacccatatttcttgtctattaaagcagctcactgaggggatataaattatttatgtgacttgacttcccacactagagcatcaatctgagatagctgcacattgtaaatttgctgtgatttattcatgaaccactaggtttccaaccagtttactaagcagggaatctgaaagctcacatttctcaagtagcatgtcacgtacccacggtaggatgaagttgattttaaaagttcattctcttttatatgtcttcttctagtttcagctcatataccagctgtatgtctgctttattcacatttatgaaaatctgataactgttgttcacttttatgaatctgaggttcctgagagaactgaccctttgaatcttagctgctagataagaaaaaaatacttcacaagggcttccatccttgtgagaagagttctgatttcagagtcatatatgtgtacgtatgtgaatctgggctctgttgtttattagttaagtgacttagagaaggttacttaaggctgggcatggtggcacatgcctgtaatcccagcattttgggaggccgaggcgggcagatcacctgaggtcgggagttggaaagcagcctgaccaacacggcgaaaccccatctctattaaaaatacaaaaaattagccaggggtggtagcgcgcacctgtaatcccagctacttgggtggctgaggcaggagaatcgcttgaacctgggaggcagaggttgcagtgagctgagatcgtgccattgcactcctgcctgggcaacgaatgaaaaaaaaaaaaaagttacttaacccccaagtttgcttatatattaagacctacctcatagggttgatgtaaatgaggtactgtgcacagtgcctggcacatagtagccatttaataatagttttcattttcataagtctttaagatcagcattttttaatgttgttccctggaatatcaattccatggggtattaatatattctactaaaaaataacttataggtttgggaagatggtaaatacccctgttggaggctcacaatacatattcacatatttaaggttctaagatttatttaatctagtgaatatttcatgaaatatctcataagactaggcttctgggtagaaatactgtctcaggaggtacaaacatgggctgatactcaacatgcttttactcctagatttagtctagggaatatgggattcagagtttacctgaaatagctgaataaatgcaaatttgcatagcctaggcccaaaaaagccaggcatttggttcttagggccttttggttctttgaaagacactacatatttttctatcctgtttttacttgcaacgtatattggaatgtgaggggaaggggactcatgaagctcctctggatataaaagtttccaaaaatgttttcctgagcatgtccttctaaaccttttagttactggtgaagaacatgaataagaatactatgacagacccgagatgtggcaaaaatacgtattagaaagtgtctttcctgtagaaacatggaaattattttatctaaaacctggtgattttccatgctgtactgggaggattttccaaagatcctagatgaccaagaggaattaaaagtatatattattcagaccctatgtagatgagaagcacatgataggttaacaagtagagaagtaaaacattgggattttaataagataatggtagttatttgggatctagggctccctaaattttaatcatgtggtgtaatgcttgtttttcccaagttttacattcctgtggcacatatgattaagaaaatagataacttctaaaattctgttttacatcaggttttgaagctggatttgagaatgaagataattcaaaacgggatatttctgaggaagtacaactgcataggacattacttgcaagatctgaaaggaaaattccccggtatcttcatcagggtaaaggcaatgagagtgactgtagatcaggaagacagtgggcaaagacctcaggggagaaaagaggaaaactgacactcccggagaagagcttaagtgaagtcctaagtcaacagagaccttgcttgggagagagaccctataaatatctcaaatacagcaaaagctttggtccaaactcccttctcatgcatcaggtatcccaccaggtggaaaatccatataaatgtgctgattgtgggaaaagcttcagtcggagtgcacgactcattagacaccggagaatccacactggagagaaaccttataaatgtcttgactgtggaaaaagtttccgtgacagttcaaatttcatcacccataggagaatccacacaggagagaaaccttatcaatgtggtgagtgtgggaaatgcttcaatcagagctcaagccttatcattcaccagagaacccacacaggagaaaagccctatcaatgtgaagagtgtggaaaaagcttcaataacagttctcattttagtgcacatcggaggatacacacaggagagagaccccatgtgtgtcctgactgtggaaagagtttcagtaagagttctgacttacgtgcacatcatagaacccacacaggagagaaaccctatgggtgtcatgactgtggtaagtgcttcagtaaaagctctgcccttaataagcacggagaaatccatgcacgggaaaagcttctgacacagtcagctcccaagtaagcccctgaggatatataacggaaagaggctcaataaatgtattgtttagaaagtcttccaatagtgagattcatctactattctgtgtccagttagcttaggaaattcacttta

SEQ ID NO: 7430 - DNA, 927 bp, Homo sapiens
catgtgcactggcaagcaagagcctgcggttaggtagaacagtgactgctgcaattatctgggtgtgagaggataagtagtctggacttggatggtggcagtaggaatagagaggaaggactactaaggtgaacacctttagaacctggtgactgactgtgaaggaaacggataaggtaaagacaatcttctctcgcttcccccttgaaatcacgccgagtttaattctgtagccccaagtgaagaacaattattcccagcagtactaggacctgcctacaaataggagagcttggaatagaattatctgctctgaacacacaacagaatcctttcctctcttgtcaccctgctctggaaaataaaacatttctcatcttttgaggtttcctgtattttccccacctttttcagcccactgaactttctgaaaacatttccctagacactttgtttataaaactcttggatgaaaaaggcaggactgaatttcaagatttttgtgataatcagtccaaactatgacaacttttgtttgtttccctgcaagcaggattgccatttcctaaatccggtgtggtctccaggttggagcaaggagagccatggatcccagatctgctgggctctaaggagaaagaacttccaagtggcagccacataggagacagacgagtgcatgctgatctgttaccatccaagaaagatagaagaagctgggtggaacaggatcactggagctttgaagatgagaaggtggcaggtgtgcactggggctatgaagagaccagaacgctcctcgcaattctcagccagactgagttttatgaggctctcagaaactgccataggaacagccaagtgtatggggctgtggctgagcggctcagggaatatggcttcctccggaccctggaacagtgtcgg

SEQ ID NO: 7431 - DNA, 380 bp, Homo sapiens
ggcaatgtcaccttttacacaaatgccattttccaaatgcaaatggctcatgctctttagactactctttgaataacaagtaagatgcaatctagcaaaagtcagtcagggtgaaagagaattggttgcaaatgaggacttccctccccaaatggacagtcttctctgttgatcacagagggagcctgagtacaggcttggagaaatggctaggacagggaacagggaagcacttacaattattccttgatttattcaaaagaactgggaaagatggttgtagttgtctttagcttcggttcaactgagtttcgttttgttaaacagttcagtgaaggagaaagcacctgtgatatatggcaagtgtccccctgcccaaa

SEQ ID NO: 7432 - DNA, 13553 bp, Homo sapiens
cctatgactccatcaattccagctaatcctcccatggctttcaatccttacataccacatcctgggatgggcctcgttcctgcagaacttgtaccaaatacacctgttctgattcctggaaacccacctcttgcaatgccaggagctgttggcccaaaactgatgcgttcagataaactggaggtatttgtgaacatatatataaatacctgtagaatagatattaaccttacacataaagcagtattctcagagcccagtgtgttgttttaaataagagaacccaaatttcttagcttatagggttgttaaacattttagtactgcaatcataccttgttataaagtgcattgattcacctgtatggtaggtcaaacaatatgttaagtgtacccagccatagactgtgcgatggcacaggaagcctctgtgggaatgttccttttacctaggctccagctttcagaaacagattactatatttgttaatgagtctctacttgctagaataatcaaagtgggaaaaaagtagacaatataactctctacgattgcagaatgtaaagctatatgaacacagaaggtaaattagtctcatagtgcctcaacttttttctccattttgagagtgatgtgctaggcagtaaataaccccgatgcctaagaaaagaaaatctgaaagaaatttcaaacagctttttgatttattgaagtccttcattcttctattgttattctttgtacattgaaataactagtctttccttacaaagtcagctccatttgcagccgcttaaatgcctagtaatgtattgtaatataatctgattgtacatataactcagttatggttcacaagttgactttggaaaaccagtgcattatggtgtgataaagactcatcttggacttaaaaaaacactaattatgcttaaggctgtgtattaactggagaattaaaactggttttcagtaatacttttttaaacatttttatttcaatgtaaggacaacctccttttggggagaatagaatttttttctgggaatagaaattctgtctgtttatatctcatagtgaatatggctttacattattctttatctttttagatttgttcacacataatatattcaatgtatatataattactgttacattcactagcaaaataaataaaagccagtcagcttccagtcatcagtgtgatgcgtgtgtatgtgcatgtgtgtgttctaaggtttgccgagaatttcagcgtggaaattgtacccgtggggagaatgattgccgctatgctcaccctactgatgcttccatgattgaagcgagtgataatactgtgacaatctgcatggattacatcaaaggtcgatgctcgcgggagaaatgcaagtactttcatcctcctgcacacttgcaagccagactcaaggcagctcatcatcagatgaaccattcagctgcctctgccatggtaagaaaaggcctgcacttgtggcctgtttcagagtaaatgctttgtatattcctcaatttgtctaatatcctgtaaccatactcatggatggtcatgagaggaccttaatatgaacagtcaaggttataagctggaaaagaaagaacctatttattctactttatttactaagattttctaaagataattatttaaaagccttactaatgcttttaacctactgtgctctttctcccattttcagagtaagggtaaattatataatttaaacagtaagttatttttgagtgcttttatagtttcactaccctcaatatcctagagaggcagaaagttgcctctgctctgtgagccactttcatgggccctttgctactaacatccttaatgcctttcaaaaacacagcacttaaaagatagggtattaagtaggttgtaatttcctaaaggttaaggccacttttcctctctagaggcatagtatcaaggacagcagcctgcttagtctggggggaaatttctacgtggttgggagcagaggcctgactttggttttttttttttttttttttttttttgttgttgttgttgttttgttttgttttgttttgtgggggtggttgtgtgttttttgttgttgttgtttgttttgagatggagtctcactctgttgcccaggctagggtgcagtggcgtgatctcagctcactgtaacctccgcctcccaggttcaagcaattctctagccttagcctcctgagtagctgggactagaggcgtgcaccactgcttctggctaatttttgtagtttttatagaggccgggtttcaccatgttggccaggctggtcttgaacttctgatctcaggtgatcctcctgcctcaacctcccaaagtgctgggattacaggcatgagctaccgtgcgcagcccagagtcctgacttttaagttgctgtagaaagccagttttgggggaacagttagtgctgcttagtaatactgaaaggtaggaagcaggaaaaatatttgtgtaacactgcagtgtgatcactgagaaccaggaattctcgtgacttaagtttgccacagctgtccgttgttttgatgtgctgcttgctatgtctttctttttctccctggacctttccttgtgtaataaggcataacagccccagtaaaggacaaaacccacaggaaacctcatgttccctgggtgtggaaaaagcactgacatgaccctgaagcccaggagatgcactgtgagctaaatctcctcacaaacattcatagtttggactcccatgacagagactttgcctattcacaacagagagacacttattttcaaacatccctattaagaaggttttcctcataccgagttgaaatttatcttgctgcaactggaacttcacaaaagaagtcagtccctattccaagtgagagtgactctcatgtctcctgtctaagccaaatactgcaaattgctcccttttcctggtagtttatggtttcaaggacacagtaccatttttggactggctccactttttgtcagaactgaactcattacatcgtgaaggatctgagcaccaaagtagaacaaacttactttctcccttgatctgaacaacataatctgttaatgaatgttaaaaaagactttaccaaattctttttgtcttaaatgcttttgaaggggtaattataagctatgaaaatagcttcatatgcatctgtccatttctgattatttgagtgtgtttgatagaatgcataggttacaagtcagcctcaaatttccacgtagagagctaaatattatatcataggccttcaattgttacttgtgaatatcaatataaaattcccttttaagtaactgatcacagcagggtcttagcagtgagatcaagttggctcataagaatttgatagaggtaagattaaataaaggagggcttcatgaagaaattcaagctttttatatttttaaggattcatagtggacatgctttataaaagagacatttttaccttgttcatgtatatagctcaggttgagttcacagaaagcagcttgtatttaaaaaaaaaaagagagagacataaagggttgatacttagttcatccacagtctcacacctcttcggcaggtttatgagtttaatagtacaatcaccacccaattggaactgggcactgacccatcaggataaaccccagccataaataaacaagcagtactaccttaccagcgtctacctgttgaatgttcatctaggtttcaccccaatttgtagtttactagggaacataactggttctgatgatcataccatgctgccaactttcaagagagagaaggggacactccccgtttataccaaagggaaatctttttaacaaccagataagtaggtcttctgtcttagttaaaatgttcagcaaaaccattttctcccaatggtaataaaaggcattcgaaatgatagattttgttttatggtttatgattttagtactgacctttgccatctggtctgctgggataaatttggaaattttatatctctaaagctactcagtttattttatctcactcttctagcatgcttttctttatttaggtgaaatgaaaagcagatctgtcacagtgtgtgcactgacagtagagttcccaaaagaaaatagagataccttgagacctttgttatccacaggaacgaggtcatggcattacccttttggacacatggtaggatagttactcaacacaagcattcctgtttccttaagaatttggagcatacctaattgttgttgctgggacatgttttttaagtaacgtgcaatttgctgagaaaaaaaaaatgtaaagtaatgttaaacttctccaaagaatctgatccaggggcaagtttcacggagtattataagcacagtgggattttgaaagaactgtagacatgaaaggatggtttaaaaatgctaataggttttagaattaaaccttacaagaacttaacaaagcaaatggtacataccgaaatggacagcaagcctctataaataagaactgcatatattttgctaactatctacatagtacctgcgtgaggtaggtcgtgggggaggaaatattcatttgctttttccttacatgttagttaggaaatatataattataggacttgaacctgaagtctttgtataaactggattttattttatggggtgacagtgtcagactctgatctaccaacatctgttttatcacctatatgccatttatgtcctagatctgtattggagttttaacaggcagaaatctctttcctgctatatctgttgcttctgctaatctcatttttatagattcatagatgagtatccctgagatattaattataaatgattgtttactgtagtagctttctgtcatatcctgcccaaatgaggtctaaattagtgaagttgaaaacctttttttttttttgcatttttttttgttttgcactactgctcatgtagttggactacctctttttttttttttttttttcttgagacaggctcttgctctgtcactcaggctggagtgcagtggtgtggtctcagctcactgcagtcttgacgtcctgggctcaagcaatcctcctgtctcagcctcccaagtagctgggaccacaggcatgcaccaccatgcctggctactttttctattttttcagagatggggttttgccatattgcccgggctggtctcaaactcctaagctcaaacaatctgctggtctcagcctcccaaagtgctgggattacaggcgtgagccactgtacacggctgtgaacccccttatctctacatttggttaccttgctgtggggccactgcttatccagtgtcttgcccaatgcatacccttacggaggattcccaggaaataccttatatgactggtgcttgcttggtttgagtacatttgttactttctctagtactagtaccatctctccccccacaggccctgcagcctggtacactgcaactgataccaaagagatcagcactggaaaagcccaatggtgccaccccggtctttaatcccactgttttccactgccaacaggctctgactaacctgcagctcccacagccggcatttatccctgcaggtgagaacacagctctaggcactgcagcgagtttggtgatgttgtgaatgtatacaatgcaaaacagctttcaaagagcttgtataggaggactgtcgacatgtattttgattaaaaataaaacaaggaagttatgcttatctgctagtatctagaactacttgtttttctataattcatgaaaattcatggtttgaaatcaaactaggaaaaagtatcaacatttttctttttagcatttgttggtttttgcttatgattaattcacttggttcagtctcaaactaattccttgactcttaggtatcactgtcacagacagtagagtgctgtcaaataaaaaggcaaaaactcccagcttcgatattatggaaatgcgttgtcaatatgtctttgatatgccaaaggtagttaaaataaaactaccctaagtgcataatatagtataatatagattaaacagatagttttagcctgtaactcctgaatcagttaatataaaatacatagcagtttatattttctgacattttgcagcatattttgttatctcctacattcagctatatttaatagcctgttttacatgaaattgaacagaaaatgttaagccagaaatttgttcaattagatatcatatattggggggaaactaattttcttccagtggtttagtagtttaagaatgagcatatagtctcttaggaataaattgaaaattctaaccattgagagtacagcagttttttttttccatttttttttttttttgacacaatggtaaatgcccaagattggaaactatttttaaatgaaaataacatatgttttaaaaaataatttagaaatccttgttaatacccagacttgagaaaacttattggttaactagtaaattaatcagttaattaattttgaaaggtaccataaaacaccagtctttagttactagccacagcagtccttcatgccatcatttaaattatacaatttgtatacatttatatgatagtttctgagaggaaatatggaattcttcagcactttcttacatcccttataataagtaactactgatatctaataatttagatattttctcccaacctaagaaaaacacacataatgtctacagagtaaaagagaaaaccagtatgagttgacatgactttattcctagcattttttttcttcaaaaattgtggtaatttacctacacattagatcactctaccttggctacttccaatttgtattatagctgtggaatgaattcagtagccctggaagtctagtcaaggtggttgaatataataaaatgtatgctgttcatcatagtttttcttaatactacagttactttgtttccaagtttgaattttttgccagatttggccaacataaaatctagtttcataagcaaaaatgtcagaaaaattccctttcccttaattagtagcaacataaaagcctgtccagctaagaggtctctcttaatggaacctctttgccatatattcatagtcaagtcctattgactatgagacagtggaggagacagtgttaacagattaatactctaaatagaaacacggacaccagatacgagattctggagcatatttagaaaatgatatgtgtaataaattaaaattctcttattataaaaattatttaggatgtatttgtccacaataaatatgtaatttaagtgagttaattcttttaaagaaaaattatagctgattttgtacctaagaatccaagaattattttgattacctgggtttgtgaccttaaaactaatctgtaattgtaaacatgggagattgttggacttgcatgtgctgagtaattgatattgcaaagaaataatctttctgttaaaatgtatttctatcagtaaatccttaataatcaaatatctcttttactttccacgcttttctgcgtggtgtacagggccaatactgtgcatggcacccgcttcaaatattggtaggttttctacaaaaattatcaacattttctaatctgaaaaaatgtgtttttctgttgtgactatgaaagatgaatgactgaaagatgtggctggaaattttctgagtatgttaaggtttaacatggtgctttctgttttatgtctttgtagcatcaaaatagtcctactttctcaagtcctagttggttgccactgtggccaaatactggccctgtcatttctctatttctaccctaacaacagcaactgaaatattaaaaaatcgtttcttttacaatatttgaaactagccagactgggcagttttgttctttgcttaacatgtattatttaaaaattgtaaaatacttaaaatgtataacttgtaaagtacaatgaaacaattcccacctgaaaaagttatctataggacttaaagcattcaatgttcctatgttgcgagaggatgagttcagcaaagccagaggattctgcagtgttctgtaatgaatcctgtagtgttctagcctgaagcaccattggcacagaagctaggcacaacagaatcatttcaaaatgactctttgagtgttacgtgatttttaacaagcagttgcacacagatccttttgttagccactaacacaatatgatagccatctctaaaccattttatacagcactaatactgaagagcatgagaaaggaatggggagttcacagctcctacagtcctcatgggcacaaggaacagaccaggagaaaatagctctgttctatgcaaggagaaatgatcccaacccgtcccactctaccgtctcacatcaatccaggccatcccctcccttttgagagtttgcaacaaattgacctttgtcaccttggtggaccagaatagatgcagagccccaaaagcactactaacaggcttcttgagaataaagttcaaaatgacaaccacatagtagcagcactcactaacatagcgagatctgaaccctgggaatggaagtgaggcccctgttactgagggtttgactgtcttctgtaggaattaataaacatttccattaataccaacaggagcacaatatgtatacctttgaatcataatgtgtacaattagaacagacttctgcaagtttgagaaatgtgtctttgccttcatgttttgtgacagttttcttgaagatgctctcttgtcctttcaccttcagagctttgcttaggaatgcaaactgcattctttagtggatctgcttcctgtacaattgctgcactcccaaagggaaaacaagagtgtttttagaattggcatatgagacaacagggatggctctgggtaatgggtaactagagataaatggaagggataactatggagtttctgttaatcaccatttggggtacattttcagtttctatgacattgcacatgttaatttttctctggccattcattttctctttagactttcagaaaatctgaatttaattgatgtagacatgataaattattacatatgcatgcttgccattcacacattgccattcacacattaattccctggtttgctttctgaaatgagctagacatcagaaagcacccaaaacgctttctaaatgagatagaaactagaaaaggcaaagataaaacatcctgcaagagatttcacagctgctaaccattgtagctataatagttgctgtgaagacaagatttactgtgaagtactccatgtatttgtttgataaatggccaaagtttcccaggagtttgccagaggtgtacttaaaaacctgcatgcatagtccactgtattcttcatatctgcccccctaccacataccaaccagtctacctaccatgtctttgcatgcagatcaggtaagtatacatataactgcctgtttgcacctgcaaatctagtgacggcattcatgtccataagtcagtgaacctaaattccaatttatgattccttaattccattttgaatgtgcagtccagttacttgtctgcttaactagcttcagatagatagcccttgtaacattggatttttgttttcatatgcattcattatagccccttctgaaaatttagccttttgagtaaactacaatgggattctgctcaaaaacttactaaatgttgagaatggttccattttccatattggtaactataattggctttccccttttctctttttaattttccccccttccatgctgtgttgctttgcactgactgtgattgcatgaacaccctgatgtattcatcgttatgatgtcacatggcttgttgctgtgatacctaccacacctcattccatcgtaaatgttatggttgcataaatcctctaccctcccgtgtgttgcttctatggttttcaactgaaagtgcccatgatgcacggtgctacacctaccactgtgtctgcagcaacaacacctgccaccagcgttccgttcgctgcaccaactacaggcaatcaggtttggccatttatttaagctgttcagatcaagataactacaatgttttggtaatgcacagtatatgctttttggattggtgagattcttatgtgtttcttaagccattgtcacatttagaatttttatttttgtgtatattctagaatgctatatgtgctttgctattcatcccaagatgaatcagaggagttttgctcatttttaattggttaccagatgttgctcttgatattctatatttaattactggtaacacaccaatcctcaaatgtatatacttaatgttacttaaatgcttcctcattggtcaagagaatttatttcactgccatttttgattattgtgtttaaactttggcttagtacagtcatcacctttaccttcagatccactggagagaaaacaaaatatcacatttctttccaagacatggatatccttatcatttcgcagtgattacatcagaagttccttctcatatggacattagatgtgcttgttgttttgatttttatttgctttaggtatttctaggcagagttcacaaggcagattataagtttggggggagtcttgaaattataaggagatacatacaataattattgtatagtattagggccattttgccttattaaagtgggaaccatgcttatagactaaaagatccacatatataacaacataaacagaattctcccaagaaactattttaatctaaaatcttttttactactatagataccccaattatcaatagatgaactgaatagcagcatgtttgtttcacagatgtagaagttctcagtagaacagtaagtttctttcagtattaatataaataatatttataggctacatattttatttacacaattgcacttctaaaaggctttcgtaaatattttcattcatagacattgcttgtgatgtagagcttgatttacacattataaattttccaaattgaaatgtgagtgcaaatatgcaatattttttatatggcaatgacagctggtactgtattttctcaatgagctaacacattcttaaatgttttcctattattaaaggaatatataatttgttagccagaggcacagattacttttgagttgtaattctttaaccattttatagcttcattttttttttgaagatcaaacaagaattttcaggatttgactgatatgattatgttaaacacagtaagcactatgcctgtcatgtgacattgtattgaattttgagtgacataatttagtaactgagtcattattttcattccaatcatgtctcttttttaaaatttttgttgttgtgggattttttttttctccttcaccctcaatctcctctttgcctggtgcccatcatggcacacacttttttaagcaatcattcacttaagaacatgtgatttctgaagccacttaagactcctaggtattttaattaattctagggacttactaaaatagtgtaccaactctgaattgcataccttcatcatcgaaagtttgaagttctcacacctggagtgtgtcatttggttgaaggaggcagcagttctgttccctcgtgaactagttccccagaccccagctagcccttctttcctgctgaggacacacgggcttagaacactaagtgttctggacagagcagatagccgactggacattaaataaataggtctcctcaatcataaggaaggattttaaaaggcacctttgagcacatgggataactgaaggagctataaattgtcattgtttccagaggtgtcatttgggatagtggcaacttggaaatagcactaaacatgataatgtaggttttgccaacacttgcccaactttcatgggctgctttacgtcaaggtaaccacaagttgtcaaattaactttccaacagagcatgttagggaagagtgattccttcttgcttgattttgttagaaatgtagagatatttggcagaacataatcacttcaatatgtaataggtgctaaaaattcctctaaagttcaaaaatgtaattttgtacaatacaatacccagatttcacaggtaggctacttctgcatggctctaaaacattcagagaaaaagttgaaagtgtatttaatatttgcatatttcaaaatgttcggtatcaaacatgttttctcagtacatgcctgttgaaaggtggacacatgggtgtatgttcaacaaaaagtagatagataatgccttaaacattggattgcatctctgttaggacagttctccacattagcactcaaagggtatcatagactatcatagatatatggttctttcatgatcattctcaaaagccccatttcaatctgaaattcagattggggatattttggcactgttaacagacagaactggaacaagacccaccacactctcctgactcttccttcaataacctttcaatatttctcactctttctttctttctttttttttccatttcagctgaaattctgaacagcagagttatggagtatcagaatctttccatggaaacctccatatggcctttctatatatattctcgtatgtcttattctaccaacacaacaataagcgtgttgcagtcaatgtattaagcaaagcaaacctgccagccagcaaattcaaataaaaaataaagcattaaaaatcaatggagatgttaaaacaacacaaatagaaaactagtaactaccatccatcctatttgaattatcaagcagaacatgaccataaaatttggtaacttgttacattactctttgtgattttctaataaccatgctaagtgtatttccacagtgagcttttggcttactatatacattcttggtggataaattgttcatctgtttttgaagtgttaccttactattttgtttacaagatagtctattgggttgattcaggatgtaacaaatatattcagtaccatttcttgtgttgtattgtgttgtgctgtgttaggtttttacatactgtagtgttttgctgtatatgtgtggtgtttgatttcaactaaagtgttattagtggggaacagaagtatatgtgcttaagaacatgacaggttcatgcaaatatgctctctttctttagaatatttctgtaggtttcttgggactgacatttaaaacgcctcacttttgaatgtgcacaaaacctgctcattaacatgcatgtgtataatttgtacctgcagatctgatgttgcataatacaatcaaattactagattttttaaagagagaaataattacctgcacaaagcagagaacttcataaaacattaacccctaattcactcttcttaaatagcttggcaaataagactttacctttaaatgaatttctcagcatttatacta

SEQ ID NO: 7433 - DNA, 323 bp, Homo sapiens
gcaaagatatacataaaccatagataatagacctacagtacagctgttttcatgttgcgttaagcactggaagacattaacaatgacttaccttaaagtaaaaggttccgtgaggggtatttagggccactgtatttttggtgccacaattttctacattgttggcattttaaaagttgttttctaaatgaacttaaagaaagaaagctcaaagccctaaagttttgatcaaattcaatagagttttcagaaaaaaatacaattttaagatagcactctttaaactagatgtgcaatgacttattcaaattatctttattcaa

SEQ ID NO: 7434 - DNA, 2275 bp, Homo sapiens
agggaaggatcaggaagacaagacacatcaaaaaggggaggtagagtttgtagaagaaataaaggggaaaaaaagaaactaaggggaagggagagacaaatgatttacatatacttggttttctgagccctctttaatactaaagatcttaatatctggaaattctggcataagcaaagatagagagcaaagattatttttcagggatattgtaaacctacatccatgcccatggggctttatggaaagcaactggcctagagcaaaaagagacttattgattatctctatttctttatattgtcttgtataaacttccacagggttttatgttgataaaccatctctgactatatctattaataggacgtatattccagcattatctctgtatcctgactgtatctttaatagggtataatcagaacacgggcagaagaatcaaaaggctgagttttgtcatggttaaaatgtggggattagagggagaaaatgagttaacttaatttgatttctactttttgggactcttccctagttactgtattcataaatgaacccatttctccaattcattagatacatctctgttggcattttagggaatctacaatggaaggacacaagaaagatcagctggattaagtagtcatgattatgcaaagccatatccagagaccaaggtgtaaagcaggttcgctattgaccccttgcctcatcttccagcctccttctccccttctactcctgttatgcaaccacctccgcaccctaccccaagcatgccataccttcctgaagtgattactgtaaatcccccatccaagcaagcccttccaagataggacttaactttccaatattatccttcattcctatctaaaacaaaagcctctgtgcctcactgtgctaatagtggttaatcaactgaaacacaaaccaatgaattaatttacattagtagaaaaagaaaaatatatcaagagcctcccatgtacccttcccaaaatactctagagttaccattatttcatttaaatttacttcaaaaaagatatttgcatttttgaaagctatgcctagagcctatgtgggtgtgctcaatggaattactctcatggtaaaaatttcaaactttgtagcaggcaagtgagggagaggtgttgaggtgggagaaggaagggaaagattgaagccctatcatgctggtggaaaccccttgtggctctgcagaaagccaggcccaaccagaagtgatatgccaggtgcttagataaaagtgttcaataaatgtgtattgtatgagcaggttttgtgaatagtttatctaagaaaagattgccaagagaaacatttctcctcagcgcaaggggttatttaaggaagcaaagcttctcaagaaaccagagtgaaggtgcactgttagattgagcactttggaggagaaagcctgggaaagacccttgctgactgagctgcgaattatcgaaacagttgtagagcatgatcaagaaatgtaatttttcaagaatgaaaatggtatgcccccagagagagtaaggttaataaactagatgtgttctaaataccctttttggcctgatgattattgatcttgagataactggcccttgttcattttgggggctgagtctataggtcggagaaaatggaaatctcaagattggctcagtcaaaaagaaacattatcagtttgaacatggaccttgaaagggatacgcagagaatagatgaagcaaatcagaaacttcttctcaaaatccaagagagggaagataagattcagaggtgagtattaaggtttcatgagggaagttcccaatccaaagaaggggtggaggaccaaaaccaaaactgaattttcctgcttgttctagagacttctaccttgtgtggcaaaaagttaatttttcattctttgacatttctcttgaacactgaagcatagcaagtttcaaatagattcctaaaagatggagttgagagaacactggggtgtttggcttaggaatcaggcaggtcttcctgctttatggattcagtaaggaagagttttcagcttgagattcatgtacactgtccctgaagttcccttatatctgaaatctgtgttttatcagttctgaaactgccaagcatgggtcctcatggcatgtgcttgtgttgtccaggctggaaagtgagatcattcagacgcggggcctggtggaagatgaagagtgggagaaggagaaccgcaccacgatggaaaggg

SEQ ID NO: 7435 - DNA, 4080 bp, Homo sapiens
gcggcatccaagcctcaggcctgcccggacggggatcgggtgagcctccccaaaacttgtgcaggccatgatcttgaggacaggtctgcctgtgtgtccataggctcctgtctcatcccagtgtcgatctcgtggagagcagaaccccaaagcctcaggggttgcctggggctgtgtgtttctgtgccactgctgtatgtctgtgtgtgtgtctcccattctctcttatctctctgtctctcactctctgtctgtttctctctctctctttctctgtgtgtgtgtgtgccagtgtgggtgtgtgtgttgggatcaatgtgccctgtgcgccaaaaagcgatttcttgcatgtcaacctgtttttggtgagccttttttttggtctctgcctgggtcatgtggccggttgtcaatcgttttcgtggtggttccactttgggattgtgaaggcctcgaccacatgaggagatgcgtcggtcccggagcaactggaatctcatccccatcctgagcggcttttctagaatcaagatgaccacacttcagccaaggaccaaagcctcataggagctcattctcctgcaggaggggagcagaccgatgtcaaaggagatggttgtatctcctcgcggcttttctctgagaaatgaagccacaccacgatacagtcttaaagaggaagccaggaaccggagatgacaacaatacctgctgtcactggaatgctggcctctctggacaagtcacccatttgacactccttcccttaaccctgtcggtgacactgtgctgtgtcttgcctgggatctggcctctgctctgtcctccctcttgctctgtctctcctgtttctgaggggcctagatgcttcttggtctggctcaatgtcttcaacaaagaacacttcccagtccatcagggagaaaattcgtggagatccgtgtcataattgtttctctctccaaacctgtttctggttgattcggccggtttgactatcctggaactctgggcttccatacctgtttcagacagggaagctcccttggtctccaagtttcacctcatggctgggtggattgcctagaatgagcggtaggcgatcatggctggccttggcgtctaggaaaggccgtgcggcatttcctctgcacttcctgtcttattattgagagacatcctcccctctgcttctggatggactgcctcccagaactgaatctttcagctctcacaaatgtcagggatccaaagggcaagggctggggctgggtgcaggggaggttgcctcagggctacctaggctgtggaggggtgagggtggggtgaactatgcagaaacctctccgctcctagagcaggcatcccaaaatctggcttggattcaggcacgggcccattcctggttctcagaggcgctatgcttttccttggcgttgactgggaggtcatctgtgtccccccgcatccaccgggcacatgcccagacaccattgttcgtctcgcaatcaccccatatggcctcggtaatgcacactcacccaatctgctcttagggaagccagtgccacgtgtggtctcattggctctacctcggactcgccctatccctgtttccacgtctcctggaaagtggtgttggcttgcagcagccccacggctttgcgaatcggggcagcccacagctcctccaagggagaagggaggcagagggctcgtgggtcagcgaattttcagctgataccacgccttgaggcccaagagatcatcctgtgctgcagcgaggccctgcctgcctcaccacatgcctcccgcctgagcccatccctgctcacccagtgggatccaaaatcggatctgaagaggagtcctgagagcccagcaggcgccctgaagctccccctccaccggtggaagtcgactcaaggaggccctgaagacaggactcctgggggtttggccctgggacgcccgcggccccctctcccacgccgccctctactggaccccggatccagccgccgccgcggctgcagcaggagcttccctgccttagcgcagccgcgccgccgccattgtttcaaggggccgcagcctgacttctaggagcggagcgcgagtcaaccccgccaatgcgcatgcgcgaggcgcgagcggattctcaccgttgtcttagaaaccagtccctgaggcttggcaaagcaggagccctccgtggcagtgcttggctgtcggggctccgaggctccggcctgacctctccacggggtcgacaggaacgtctccggatgccacgagtcgcacagagctgtcgaggatgacgaaaccacaggcggagtctgggggaagcggcgcggcatcccaggctcaggcctgcccggacgtgttagggtgagtctccgcaaaagtcgtgcccgccgtgatctcgaggacaggtctgcctgtgtgctcgtgggccgccctctcacctgagggtcgttcttgcggagagcagaaccccgcagcctcaggggttgcctggcatttctgtttctatgccactgctctgtctctgtctctttctctctctctctctctcactctatctctgtgtgtgtgtgcgtatgtgtatgtgtgtctgtctgtgtcccattctcttttctctgtctctcacttcctgtttctctctctccctctgtctgtatgtgtgtgtgcccatgagcgtgtgtgtgttgggacgtatatgccccctgcgccaaaaagggatttcttgtatgtccgcctgtcgttggcgagcctttttctgcgtctgcctgggtcacgtggctggttgtctcgttttcgcggcggttgcacttcgggtttttgaaggcctccaccacctcaggagatgcgtcggtcccagagcaactgaagtctcatccccatcctgagtggtctattctctagaatcaagatgaccacactccaggtaaggacaaaagcctcccaggagctcattgtcctaaaggagggaagtagaccgacctcaaaggagatggttgtatctcctcgcgtctcttctctgagaaacgaagccacaccacgatacaatcttaaagaagaagctgggatggggacacggcaaggatccctgtcactggaatgctggcctctttggacaagtcacccgtttggcactcctcccctcagcccgtggcggtggcactgtgctgtatcctgcctgggctctggcctctgctctggcctccctcttgctctgtctcttctgtttctgaggggcctagatgcttcttggtctggctgaatgtcttcaacaaagatcacttcccagtccatcagggagaaacttcatggagatccatgttctgattgtttctctctccaaacctgtttctgcttgattgggtaggtttgatgatcctggagctcttggctcccatacgtgtctcagacagggaagctaccttggtctccacgtttcacctcatgtgtgggggggattgcctagaatgagcggtaggcgaccgtgactggccttgtcttctaggacaggcgctgtcgcattttctctgcacttcctgtctcattcttgagggacatcctctcctccgctccggggtggactgcctccctgaatcttttggctgtaatgaatgtcagggaaccaacgggactgggctggggctgggtgcaggggaggttgcgtcagggctacctgggcggtggagggttgagggtggggtgaactttgcaggaacctctttgctcctccagcaggcatttcaaattgtggcttggactcacgcacaggccccctcctggttcccaggtgttctatgattttcgttggcatcgatggaaaggtcacctgtgccccccttcctccggaacatgcctggacaccattgtttgtttcgccatcgccccgtatgccctctgtgacacacattcacagcatctgctcttgaatacaccagtgccacgtgtggtcacactggctctactttggatttgcccctttccctgtttgcacgtgtcctgcacttttaccagaaggtggtaaaagtaagagaagaataaaattttggacatgtaaaa

SEQ ID NO: 7436 - DNA, 523 bp, Homo sapiens
tttcttgattcttctcagttgtagcaggatggactgacttagaggagctcaggaagattgttatacaacacagaaacacaagatgaattgtactcctcagcaagcctaagttagagcagcaggtccttgaagcctcagccactcctgggacatagcataatgcccctaatgatttgaaatttagtggagagtgggttgctactccctgtgtccaggaacaaaaagagacataaagagcaaaaagttataaaataagtgggactaatatctgcttattttgggaggtagggatttaagatacaagaattcagctgcatgtggaagcttacatctgtaatcttagcacttggggaggccaaggcaggaggatggcttgagtccaggagttggagatgagcgaggcaacatagtaagtccccattcatacaaaaatgtttctgaagaaaagtagttcagtgaggtggcacatgcctgtagtcccagctatgtgggaggctgaggcaaaaaaatcgcttaatcctgg

SEQ ID NO: 7437 - DNA, 394 bp, Homo sapiens
gagaccagagtaaagaagatatggagagggctgtggaccacaagtttaaaactttgccaaagtattttacttcgtgtccatgaaaatcttttattttcctctgagaaattaataggcttttttatgaaagacagtgcaaactatataatgaattttgttaattttagttttatgtcctaatttgtttttcctatgaaggccagattcaaatttgaagcttaattcttaatgaacttatttctgtatatttctaattgaaagtttctccttaatcacttatgttttcctaattttgatccacttagggttttccatcttttgttgagattattgttatctacttttcctgccttatagaataagataataaaataaatacatcatttaaaactca

SEQ ID NO: 7438 - DNA, 489 bp, Homo sapiens
aataaattacccgcaattactcaaagttagtaattgaatttattttggtggtagagagaaaatttatccattttgctagtaatttgtagtcatttttagtaattgatagtaattttcgagtagatactaattaactgtttcactaagtaaaagaagtatagagtaatgtattcactaggcattagtagtcccaatttatctttataccagcaagcggtttcggtggagctgataagatccagtggcattactctcgcggtgttaagctctgaaaaagtgatcaagactgtgtggcttgtccagaatcagctgcacaatcaccgccaggaaggggctccccaggcttcagactttggctccatacagtgtctgagaggagggggctggatgcagaggaatgggccccaaaggaggggttcctgtcaccctgcaggaagccgatgtggcattctccctgccgcatgtcaccctccttgcccatgtcgcaag

SEQ ID NO: 7439 - DNA, 489 bp, Homo sapiens; identical to SEQ ID NO: 7438

SEQ ID NO: 7440 - DNA, 346 bp, Homo sapiens
aataaattacccgcaattactcaaagttagtaattgaatttattttggtggtagagagaaaatttatccattttgctagtaatttgtagtcatttttagtaattgatagtaattttcgagtaaatactaattaactgtttcactaagtaaaagaagtatagagtaatgtattcactaggcattagtagtcccaatttatctttataccagcaagcggtttcggtggagctgataagatccagtggcatttttttcgcggtgttaagctctgaaaaagtgatcaagactgtttggtttgtccagaatcaggtgcacaatcaccgccaggaaggggctccccaggctt

SEQ ID NO: 7441 - DNA, 18408 bp, Homo sapiens
atgtgatgcatgctcacgtgtctccgcagccggctcgggaaagaatcccccaaggtaggtggccggagacaggctctggagggtggaagtgttagatccccgaggtctgtggagcccctcagtccccgccaccgcggaaaagctcagaccctttccctgcaggggtccagatcctggcgtcctcgccccacgcccgtccctctgttgcgccagctctgccgcgcctttacccagccagagggtctccacccagtcctaggccgggatcgggtcccggagctcctccccaggttaccccacagtagcccacccttctcgctccaggcctgggaatcgccccgccccggcctcctggcccgggtgcgccctggctcacctcacaaagcctcacctcacaaagcagcccaccctttctatctcagggctccaaccccaggctggactgggagcacactccagttgggatctgaggggcctacatcgctggcctgagcatgtgggcatcaggcttctattctggctctgccagctacccactgtgaccttagtctaacctctccctcctgggcctgttttcctatctgtcctgaagctccatttcatgagtaagcgtgagagccgctcagtttcctccagctctgctgaagccagcacagaagtagcccaaactcttccctctgctgacagcaaattttaggcaaagtcttgagaaagaagaaattgggtccagaaagggaagtgaggagaatcagatcccagacctttggggagaaggagcaaccgcctctggcacagcccatcagggagaaagagcaggtaaggtgcaacaatgagctgagtaatttgccagtgagcagtgggggtgccgagaggtcttaaccaaggcagagaatctgcaagaggtgggacccccagcttctgagttccacgaggaccccagcctgcactctcatgtgggtggcaggagaggctggaggatggtgcaggactcgggcaggggtgcccaagggaaacattttggttggagagtcaggaagccgcaccaagccttgtgaccttggacgaatcactctgtagacctctgtctctgtgacgtgagcagcggggaggagatggtcacagctctggcagtggtcactttgcagggttctttctctagctacactggaagcctgggagtcccaagactctgccttcgctgctcactgctttgattttgctgagttgctggttgggtgacaggatgtgtaagaggatgtgtaagccctgtgacatctgacagatctttctgggtttcgagccagcagaggaatgtttcctctggtgccatgtcccttggttccatgcttgataacagatggctgagagcacatgaactttcaccctttccctctcatgagtggatggtccccagctttgtttgtccatcatcaggaggagcaatgggaagtagtccaaggggtcttgttagtcattttaaacccccagtgggctgaaggcatcagagagggtggcccaatggttagggcagtcattatggctgaatatgctcagttccctttttttccctctgggctataaagactaaaccaggctgggggctgtggctcacgcctgtaatcccagcactttgggaggccgaggcagcaggattgcttgagcccaggagttcaagaccagcctgggcaacatagtgagacctcctcatctctacagaaaatttaaacatgacaggcgtggggggcttgtcacgtgggagaagtcacatgggagaagagttgagaattggcctgaattttgaaaggccaattttgttccccacaggaacaaaaaatttaaaaagttggccaggcgtggtggctcacgcctgtaatcctagcactttgggaggccaagggggatcacaaggtcaggagttcaagaccagcctggccaacatggcaaaaccccatctctactaaaaatacaaaaattagccaggcatggtggcgggcacctgtaatcccagctactcaggaggctgaggcaggaaagtctcttgaacccgggaggcagaggttgcagtgagctgagattgtgccattgcactccagcctgggtgacaaagcaagactccgtctcaaaaaaaaaaaaaattttaaaagttagctggctgtggtggcacaaacctgtagtcccaggtactcgggaagttgaggtgggaggattgcttgagcctggtagattgaggctgcagtgagccctgattgcgcactggcactccagcctgggcaacagagtgataccctgtctctaaataaataaagactaaaccagggagggagtagagattaaaatggagttttgtatgagtaccgtgaaatcgggactcaggaatgaggagactctaggagaaggagtctttggcagatttcgccagcctgggtggtaaccagctaatagcagcctctggggaagactgccctggctcctccctgcccccttagttcctgcccttgaaatctggccttcttcctgctctttctcccattagctatcccagggcctctgtgcccattgttacctggccaatagcaccaggctgtggtttgagttttgtttgtttgtttgttttgagatagagtctcactctgtcgcccagactggagtgcagtggcgtgatctgggctcactgcaaactctgtctcctaatttcgggcgattctcctgcctcagcctcctgcacagctgggattacaggggtgcaccaccacacctggctaatttttgtatttttagtagagatggggtttcaccatgttggccaggctggtctcaaactcctgaccccaggtgatctgcccacctcgacctctcaaagtgctggaattacagatgtgagccaccacacccggcccaggctctggttttgatcagtgttctgctccctgcttgcttagggctggagagtctcaggcatggtggtggtgggcaacatgggaaggggcatctgcagaaataacagcagcagtgaccatttattgagtcttaaacccttactgatattaacacacgacccacaggaacatatgatgtaaaggcctaaaggggcgaagtgacttgcccagggtcacacagataggcagcggaggagtcagcattctgacggcagaacctactcggagacccagatcacagccctgcccagggctgctcttgatctgggggtggacttgatgctttaggaccatcatttctctgcgggtctcaggctatgagctgaaccttgagaacactgaagatcctttttcagggctgggctcctcagagcctctcgagattcttggaagaaaaaaaactgcatctcaattgtgtttatccagagagcaaagagaatcagtcaggtgataagcctgttatctgagttctgccatacccaaggtaccatcttggacccaggagtggggcagatacaaacagatggatgccctatggtcagacaggcctgggtttgaatcccagctccaccactgaccgccatatgactgaggggagagtggttatcccctctgggattcagcttcctctttggtaaaatggtgactgtcatgtctaccttttagggctgcattgaggattgaatgagaaagcattccatagctgcagcaatagtggtttatagtgacaaacagcactgcatgtttggcactgatcattgtaatctagcccaggaaagcaagcctagtggccagtgagatgctagcacatgagagagtactgagaagaaaccagctagagtggttctgggcccctacatggctccaagaagagctcagtgagtgacccaggaaatggggaagaaataggacctaaaagggtggcggcaaaggagttgggagcattagaagcatgggatgaatcactgttttcctgaagacgcaaacatgacaggcatgggggcttgtcacatgagagaagagtcgagaattggcctgaatttcgaagggcctcgaaagccacagaattcagactccaggccaccgggaggcgtgctggactgtaatatgttgaatctcagttcttggtaaggggtccttttgggaccctgtggggtggaaacaggctgggaagccagacagatctggatccaaatcctgctatgcaacttgctaatatatgaccctgggtcagtgatgggatctctccgaaccttttgaccacaagaccatcctaaggattgaatgagataaagtatatccatgacacacctgcccgatgcggggcctctatcgagtgctgatgtgttagtacccattttatgttgacatctaactggtccattgagtctgtatgcctgaagcaagcatgatttgcacctgatctgtttctgtgtctgtctccccatactctggcacccagtgcactgtctgcacagaggcatacctgggtttggaccctacccatgtgatcttgggaaagttattacacctttttgtcccctagttcccccatcttaggataacagtagtgcctgcctttgtcccatctaggttgagaagagtcctaagctaacagccccaaacaggtgggtgttgctcagctccctgaggcatgtggttgtaaggcagaacccacagaccttgcaggaagaaggctctcggggccatggcccaggtcagcatcaacaatgactacagcgagtgggacttgagtacggatgccggggagcgggctcggctgctgcagagtccctgtgtggacacagcccccaagagtgagtgggaagcctctcctgggggtctggacagaggcaccacttccacacttggggccatcttcatcgtcgtcaacgcgtgcctgggtgcagggttactcaacttcccagcagccttcagcactgcggggggcgtggcagcaggcatcgcactgcagatggtgagtgcactggccgggagggcagaggtgcagttcagttgggcgctttgcctcaaaagggaggcttcgggtcagggatggccagtaagtgatacacgcactgctctcccctccctcacacatggcagacatgactaatctattctagtattctttcctgtgacccaaatgaggcttcagaagccttccaacaatcagagaaatttgaacatcaattacatctctaattttttaggtgtaacattgattttgtggtatgtttaaaaagagggcccttatcttttagaactacatactgaaatatttattgatgaaatgatatgatagcttatattggcttcacaataaatgcagagtgggagggaaggggaatgatgaaacaagttggccatgcattgatcatttttgaagctgagtgatggatacatgccagttctttttactattctctttacttttttctttgagatggagtcttgctttgtcacccaggctggagtgcagtggcccgatctcggcttactgcagcctctgcctcccagtttcaagtgattctcctgcctcagcctcccaagtcgctggcattacaggcacccaccaccatgcccagctaatttttgtatttttagtagagacggggttttaccatgttggccaggctggtctcaaactcctgacttcaagtgatcctcctgcctcagcctcccaaagtgctgggattacaggcatgagccatcgcatccagcctattctctttacttttgtatgttggcaatttttcaaaaaactttttgtttttaaagaaaatctcaactcggcatcctctagcagtctcttaaaattgcctttgtgagatttgccaagcttgctttgggcactggcccagtaaatgctaggcgagcccagggtgccctctgctgccaggcctttgccacaagctcttgttctgcctctgcctgcagggtatgctggttttcatcatcagtggccttgtcatcctggcctactgctcccaggccagcaatgagaggacctaccaggaggtggtatgggctgtgtgtggcaagctgacaggtgtgctatgtgaggtggccatcgctgtctacacctttggcacctgcattgccttcctaatcatcattggcgaccagcaggacaagagtgagcttctccctcagtccctaccccatctcttcttatcagccccagggatcctggggtggagggaaaaggcactgaacacctctccaggacttacctgggcccagcattcatctgggaatcctccctccaggcagagggaggtcctggggcccagcagagcaggagggccacaccccatggtggcctggcttgacattccctccttcctccctgtgcagttatagctgtgatggcgaaagagccggagggggccagcggcccttggtacacagaccgcaagttcaccatcagcctcactgccttcctcttcatcctgcccctctccatccccagggagattggtttccagaaatatgccaggtttggaggccccagcctgggtcagacagaagctatgatcctgggcagctgtagacccaagggctcctggggaaccctgctcctccatgccacctcaccttggggagcaagagtaggcaaggcagggcagaccggggcttgcagggtttcagataagaccatccttttctgtctccatcatagaaaaaggatgcatccatgagagattcagttctaaatgtccttttgcatccatgagtagttcagttctaagtgcccttgtcaaagaaggaacaggtggtatctgggcggtgaaggcagcctcctggcattccctgggaggaatttgggtctttgagactgtcagcctaccagcatcttacctgcagcttggcatgaaggaaggagactggtttcctgtctcggtgtctgaaaggctgtgggattctaggcttccccgtctgtaagtgcaggggccatgctccgctctctccaaggctcccataaatgttgacacaaaagtgtctgtactctcaaccctcttacctctggcatctcttagttctcaaaggccaggctcagaggatggtctcccacagcccctgcccgggctgggctgctctgattcaagtcccaggtgtgctttggagctctgctctctgcatcgtctctgagccatggagctgaaccagcacttcctgatggccaggaatgctgatcaggtcccctgttggctgtccagctccttcctagctgtggcaggtttctctgaaactacttctcaggcgtttcctgagtctgcttggcatagtctccggttcattcagtggacacttgtggtcgctagagctgaaggtggatgtccctaggggtggaatcagataagaggcagctggggatgaggacacttagtctctccttcccggcagcttcctgagcgtcgtgggtacctggtacgtcacagccatcgttatcatcaagtacatctggccagataaagagatgaccccagggaacatcctgaccaggtgagggtgagggccctaggagacatggggaagaagccaccacttgggccccagcaggtgctgggtcaggaaccagaaggccacacaggtgctcttctcaaggctcatgagctcatcagggctgacttggtcattgtaggaaggaggaaagagcccctgctctgatgttactggaaggaagagcaagaatcagagacaggaggcactttgccacctacatccaacagatgagccagtgtgaggctaggccttgggttgtggaggaacctgagggtggaatcccagggtcgaattgcctgtgtttccagcatctgcttatctgtaatttctgtatctttgagggtgaatttattattaaaaaaaaagggggggggccaggcacaatggctcacgcctgtaatcccagcacattgggaggccgaggcgggcggatcatgaggtcaggagattgagaccatcctggctaacacggtgaaaccccgtctctacttaaaaaatacaaaaaaattagccgggtgtggtggcaggcgcctgtagtagcagctactcgggaggctgaggcaggagaatggcgtgaacctgggaggcagaagttgcagtgagccgagatcgcgccactgcactccagcctgggtgacagagcaagactccatctcaaaaaaatacaaaacaaaacaaaacaaaaaaaacaatttccttcttttgaaaggaacaaaccagtaaagcaaaagccccagtccaggagccaggaattctggattttggccccaggggggcttttctgaacctccaggccccatcccagagggccctgggacataaggatgcctcttctccctgttcccagacttctgtgggttgaagctatggaatcccagttgctggagaccatggtgggctgaccgaagagtgagggcgtggggtgggttgtggctctgaggggttcccaggtggcagcaccatgtgtgtttgttcacaggccggcttcctggatggctgtgttcaatgccatgcccaccatctgcttcggatttcaggtgccagtgccagttgcaaggtccctgctgtccccttagatcaccccaccctgggatggaacccagcaaggaggaggaacccaggcagaatggaggaaatcctggggggaaggatggaacaggggcctcaggacttgccccttgttcctggggtctttgttcccaaggtaccttcctctggaaactggggttgaggtcatttccccaccatgacggtgcccttcacctggacagtgccacgtcagcagtgtgcccgtcttcaacagcatgcagcagcctgaagtgaagacctggggtggagtggtgacagctgccatggtcatagccctcgctgtctacatggggacaggtgagtgctccccccccccaagacctgggactagagtgctctcacttccacaggagtccctaggtcctggggcctagctttcctggggacagccctgcattcccagcatgacttgtataggcattggcttgaacttggcctgcctggagcctcctcctgccaagatgagagtggtgtattcatccattcattcaccagttctaacttggtgcctaggaagtgccaggaacggttctcagcatgggggatgccatggagagagacagaactggtcttgccctcatggagttgacattcttgttggagagacagtcatgcaggagtaactggggaatcagtaaggaattccagatggtggcaagcatcctgatgacagtgaaatagggaaggtgtgttttgttttattctattttattttgttttgagaaagggtctcagaaactgtcgcccaggctggagtgcagtggcatgatgatagctcactgcaacctcaacctgctgaggtcgagtgatcctcctgcctcagcctccagagtagctgggactacagccatgtgccattgtgcccagctaatttttttttttttttttttctagcagagacaaggtctcactatgttgcctagcctggtcttgaattcctgggctcaagcaattctcctgcctcggcctcccaaagtgctggggttacaggcatgagccaccaacccagcctaaaatggggaaggtatgaatgggactggatgggtggctttgggagtggttcacagaaggttcttctcagagaaggcccaaatgatgagaaagagccagaagaggaggagctggggaagaagggttccaggcagaggaaccacaaaacaccaaatcactgaggcagggccaggaagaaagtctatgtggctggagtggtgtgtgatgggggcaggtgaaggcagtgaggccagacaggcactggcagccagatcctgttgggcctcgagggctgctgggagtcatcgaggaagtgttttaagcaggggggtggttcggggaaaggtggctctggctgccgtgtggagagtggttggggtgagggagcaagtctaggagaccctggaagaaggatcccctgagttctttccacggatagaccgtaggagctgcctgggccaatactgttctagcctctgaatacacagccaggaacaagagaggcaaacagccaaatccctattctcctggggctcatgtcctggctggggagacagaaaataagcctgtaaaaattaattactattattattgttattatttttatttgtattattgtttacttaaagaccagtgtgatagtacagttaaaaaaaaattagaaagcgatgaggccagtcacagtggctcacacctataatctcagctatgggaggccaaggtgggaggttctctggagcccaggagttcaagacaggctgggcaacatggtgaaactccatctctacaaaaaatttaaaaattagccaggttatggtaacatgcacctgtggacccagctacttgggaggctgaggtgggaggatcgcttgagcctatgagatcaaggctgtagagacccatgatcatgccattacactccaaactgggcaacagagtgagaccctgtctctaaaaaagagagaaatgagtgttaggggacaggcccagtggatcatgcctgtaatcccaacactttgaaaagctgagatgggagaaccgcttgaggccaggagttcaagaccagcctcggcaacatagtgagactcatctctacaaaaattaaagaattagctgggcgtccgccaggcatggtggctcacgcctgtaatcccaggactttgagaggccaaggtgggtgaatcacttgaggccaggagttcgagaccagcctggccaacatggcaaaaccctgtctctatcaaaattacaaaaattagccgggcgtggtggtggtgcctgtaatcccagctactcgggaggctaaggcatgagaatcacttgaacctgggaggccgaggttgcagtgagccaagatcgcgccgctgcactccagcctgggggagaaagtgagactctgtcttcaaaaaaaaaaaattagccaggcatggtggcatgtgcctgtagtcccagtgacttgggaggccaagtcaggaggaacttgagtctaagaattcaagactacagtggaactatgattgtaccacttcactccagcctgagtgacagagcaagatcctgtctttaaaaaaaaaaaaaaaaacggccaggcactggggctcacgcctgtgatcccagcactttgggaggcccaggcaggcagatcacatgaggtcaggagttcgagaccagcccaaccaacatggcgaaaccccatcttactaaaaataaaaaaattagggctgggcgtggtggctcacgcctgtaatcccagcacttcccgaggcaggcggatgacgaggtcaggagttcgagaccagcctggccaacatagtgaaacctcatttctactaaaaatacaaaaattagtcaggcttggtggcgggcgcctgtaatcccagctactcgggagtctgtggcaggagaatcacttaaaaccagaaggcagaggtggcagtaagctgaaatcgcaccactgcattccagcctgggtgaaagagcaaaactccatctcaaaaaaaaaaaaaaattagccaggtgtggcggcaggtgactgtaatcccagctgcttaggaggctgaggcatgagaacccaggagaccaagatcatgccattgtactccagcctgggcatgacagagcgcgactccatctcaaaaaaaaaaaaaaaaaaaaaaaaaaaaaattagccgggcatggtgtaatcccagctactcaggaggctgaggcaggagaatcacttgaacctgggaagtggaggctgcactgagccgagatcgtgccaccgcgtgccagcctgggcaacaagagtgaaactccatctcaaaaaaataaaaaagaagaaggctgggtgtagtggctcacactctgggagggtgaggtaggaggattacttgagcccaggagttcaagaccagactgggaaacgtagcaagaccccatctctacaagaaaattagctgggtgtggtggcatctgcctgtagtcctagctacctgggaggctcaggtgggagaatcgcttgagccgaggaggtcaaggctgcagtgagccatgatcacactactgcgctctagtctgggtaacagggcaagactctgtctcaaaaaagaaaagaaaaataagacagcgtgatgtgagagagtgcctggggtgggggtcattgtagatggactggcaggaagcattctctgaggaaggacatctaaactgagacccaaatgataaggagatggcatctgaaggtctgccagacagaacagtcagtgccaaggcactgaggtgggaatgtgctgggcaagttcaggctcagaaagctgggggctggagggcttccagcgatgggggatctgagaagtcagggagggaggcatctgatcggagccccatctcccactctgagcctccgtctaagtgtccagagctgctgctgcagcctccaggctgatgttgctcctaggaggagtggacagtccaccccactaccctcccagggttgccctgacccagttgtccctgcccacaggcatctgtggcttcctgacctttggagctgctgtggatcctgacgtgctcctgtcctatccctcggaggacatggccgtggccgttgcccgagccttcatcatcctgagcgtgctcacctcctaccctatcctgcacttctgtgggcggtgagcccccttccactccccagggcccctcctagcccctgtgagcgcttccaacatggtcctttggccttgtgtggaccccatcctgtagaaggagaaactgaagcctgtagaaaagagtcggtgcctaggatgggtccctacatatcccaggccaggtgtcagaagcgccctttgtcctggggtcaccagaacattccgtgagtcctgtaagaatctctatccatggcatggcacggtggctcacgtctctaaacccagcactttgggaggctgaggcagaaggatcgcttgagcctgggagttcaagaccacctgggcaacctagtgagaccccatctctacacaaaataaaataaatagccaggtgtggtgggatgcacctgtggtcccagctactcagccacttgggaggctgaggcagaaggatggctggagcccaggagttcaaggctgcagtgagccaagattgcaccactgcactccagcctgggtgagagagccagaccctgtctcaaaaaaacaaaaaacaaaagaatctctatccagatcctttcctgagctttcacatggacaccctcccctttggatgccccagacagttccttttaaggaaaaaacaatatcagtttccatgtgatgtaaagcaaagtgctaagctctcgacattcaccgtctctagtccctgtggtaaacagagtgctggtggcccattttacagaagaggaaactgagggtcaggaatggggctttccccgcagtctacccagttaggggtctggctcctgtgagctagaggtggggagctgctagcagcaggggcacctctaagcccttctccatgtgggcagggcggtggtggaaggcctgtggctgcgctaccagggggtgccagtggaggaggacgtggggcgggagcggcggcggcgagtgctgcagacgctggtctggttcctgctcaccctgctgctggcgctcttcatccctgacatcggcaaggtgatctcagtcattggaggcctggccgcctgcttcatcttcgtcttcccaggtgcggacccctggcgccccatctcacagccccacagcacagactcccagggcctgcctagcctcagctccctacttgctcaaaacatgcaggagagagtaaccaccagcactaattgatcacctgtctcgcctctgtactagcccctatccaagcattatctcctggaaagaaggtatagttgtgatctccagtttactgatggcacgtggggctcagaaagggtcacagacttgcctagagcttaacaaactcaactagtaaccttttccatcccacgctgtctgggtccagagtctattcttttaaccattcattcaggtgtctgctgctccttgactatgagggatctatctggctggttcagcccattacagcccagagggcagtggggtctggggtggcaccctgacacagacatcagggaacctgggttccagacacagatctaccgccagatccctggagaactgtcctgtctgcccagccatgagttccacccttttccagcttgtctctatccaggaagccaccctgaaagccccagctgctttgcttggagcaggggagccagatctgctgggaagtgtactaggaagacccctggggttgggccaccactgagtcaccattgagtgctgtccctttagctgagtctagcatgctgcccaaggggtcttgtcagatgccagcctgtcatgggagagcagatgccagatgaccccagcaggatgtggtgtgggggcagagatggaatttctagaagagtaaacatgggcctttctccatccagcactgcttcttgggaaaggaggtggctaggagggagggagccctctcccctcacaaatgctcagggccacttcttctctttcagggctgtgcctcattcaagccaaactctctgagatggaagaggtcaaaccagccaggtaaagcaggacccagcccttgatcctctcagggaggtgctggattggaatgtggctttgtgggggccttaaaacagataggagtcagaggcttgtgtacttagaaatcatgggtttttgttttgtttttttttttttgagccggagtctcgctgtgtcgcccagcctggagtgcagtggcacgatctcagctcactgcaagctccgcctcctgggttcacaccattctcgtgcctcagcctcccgagtagctaggactacagatgcctgccaccacacccagctaatttttgtatttttagtagagacgaggtttcaccatgttggccaggccggtctcgaactcctgaccttaggtgatcctccttcctcggcctcccaaagtgctggcattacaggcgtgagccaccacacccagccaggttgttgttgttttttttttaatacttttaaaaattcggtagtgtgctagttgttaacaatttaaacattaataaagggcttaatacaaaaagatggaagtccctcttcccccacaacccactcgcccccacatcctttctgagatagctccatgttaccagtatggtctgtgtcctcaaccacttctgtacatgtgtgcgtgtctgtgtacacatagctatggagatgtatacatagatgcagggctcttgttttgttttatgaaaagtggtttcagccaggtgcattggctcatgcctgtaatcccagcactttgggaggccaacatgggcagatcacccgaggtcaggagttcgagaccagcctgaccaacatggtgaaaccccatctctactaaaaatacaaaattagctgggcatggtggcacctgcctgtaatcccagctacttgggagactgaggcaggagaattgcttgaacccaggaggcggaggttgcagtgagccgagatcacaccattacactccagcctgggcaacaagagggaaactctgtctcaaaaaaaaaaaaaaaaaaaaaaaaaaaaagccatacaaacatgtctaaaaaagaaaaaaaattggccaggcacagtgactcacgcctgtaatcccagcactttgggaggccaagacaggcagatcacctgaggtcaggagttcgagaccagcctggccaacatggcaaaaccccgtctttactaaaaatacaaaaattacctggttgtggtggcgcatgcctgtagtcctagctcgggaggctgaggtaggagaattgcttgaaccccggaggcggaggttgcagtaagtggagatcgcaccactgcactccagcctgggtgatagcaaaactctgtctcaaaaaaagaaaaagaagaagaagaaaaaaaatcaccctttatttcttttttttttgtctttttttttttttttttttttgagatggagtttcactcgttgcccaggctggagtgcaatggcgcgatctctgctcactacaacaacctccacctcccgggttcaagcgattctcctgcctcagcctcctgagtagcttggattacaggcgcccaccaccacacccagctaattttttgggtttgttgttgttgttttgagatggaatctcgctctgtcacccaggctggagtgcagtggcatgatctcggctcactgcaacctccagggtatctgggattacaggtgcgcagcaccatgcctggctaatttttgtatttttggtagagacggggtttcaccatgttggctaggctgatctcgaactcctgacctcaggtgatccgcccaccttggcctcccaaagttctgggattacaggcgtgagccaccatacccagccattttttgtatttttttagtagagacggggtttcaccacgctggccaggctggtctcaaactcctgacctcaggtgatccacctgccttggcctcccaaagtgctgggattatagacatgagccaccacacccagcctaatttttctatttttagtagagatggggtttcgccatcttgcccaggctggtcttgaactcctgacctcaggtgatccatctgcctcggcctcccaaagtgctggaattacagacatgagccactgcacccagcctaatttttctgtttttagtagagatggggttttgccatcttgcccaggctggtctcgaactcctgacctcaggttgcccgccttggcctcccaaagtgctgggattacaggtgtgagccaccacacccggccggaaatcaccctttatttcaattccgttttatccctgttgctgttaattggtacatacatttgcagatgtctgctttttgtttcctttttttaatgaaatagaccacattccatgtgacgtgcttttttctgaacatctttccatcaggatgcctacattcgaatcgtggcatgatgtgaacaatcagttactcccattagatcttggtcttcttacctatggactagggacaatacacctggccccacactacctttgtattgaagtctttgggaagtaggaagtgctctaccaacaggagaagtgcgataattacagtaattaacagttatatatattgaagtctgcagtcatgggatgggatgactgatcagacctctctcaccctctgttctacagctggtgggtgctggtcagctacggagtcctcttggtcaccctgggagccttcatcttcggccagaccacagccaacgccatctttgtggatctcttggcataaccactgcctcccagggaacacaaggcctttgccattggtcgcaggaacccatctcttagagctatggggccattcttagtccacgatcattccaactggtgggatgacatccggacatcctcttccagggactggggcaaactcaggccccacacctctggacagctcaaatccagtccccttcctgctccccagtcctggcagtgccgtggatggcggcaggaagtctcacatcatagaggacccctcctcctctcccagttctcaacttctccatgcctggaatccacgggtgaagagagtcggtagatctcataagaaagaatccagtctgacttccctctggagaatgactatggacagaaggccaccatcctccacagagcaccctgtcctgagtaggggttgtgctcattaccccaggccagtggtagcttcctcaggagcctggccacttccaacggtagcactgaagtcatgcaaatgcatagtcaggtagattcagaccttgtccacaccttcctgggcaacccccaccatgaacctgtcagcctctttcccatagctaatagacatttcccaggccttgaggggccccaccctgtctctttcatcaaacctgatggtccaggctgggcatccctctcctcctccatccccagacatcaccaggtctaatgtttacaaacggtgccagcccggctctgaagccaagggccgtcccgtgccacggtgctgtgagtattcctccgttagctttccccataaggttgggagtatctgcttttgtgtctgagatgggcccctcttttcagaggccgcagggtgggtgatggagaaggctgagaacctttcagaccctctgtgtgggctgggctggtcagaatcagggtgtacctccccgacaccttctttttcagtgatgttttctcttcttcctgcctttcctctgcctcctcccctgccagccctagcgtgactacccagagacaaaaaaaaaaaaaaaaaaaaaaggcagggc

SEQ ID NO: 7442 - DNA, 18408 bp, Homo sapiens
atgtgatgcatgctcacgtgtctccgcagccggctcgggaaagaatcccccaaggtaggtggccggagacaggctctggagggtggaagtgttagatccccgaggtctgtggagcccctcagtccccgccaccgcggaaaagctcagaccctttccctgcaggggtccagatcctggcgtcctcgccccacgcccgtccctctgttgcgccagctctgccgcgcctttacccagccagagggtctccacccagtcctaggccgggatcgggtcccggagctcctccccaggttaccccacagtagcccacccttctcgctccaggcctgggaatcgccccgccccggcctcctggcccgggtgcgccctggctcacctcacaaagcctcacctcacaaagcagcccaccctttctatctcagggctccaaccccaggctggactgggagcacactccagttgggatctgaggggcctacatcgctggcctgagcatgtgggcatcaggcttctattctggctctgccagctacccactgtgaccttagtctaacctctccctcctgggcctgttttcctatctgtcctgaagctccatttcatgagtaagcgtgagagccgctcagtttcctccagctctgctgaagccagcacagaagtagcccaaactcttccctctgctgacagcaaattttaggcaaagtcttgagaaagaagaaattgggtccagaaagggaagtgaggagaatcagatcccagacctttggggagaaggagcaaccgcctctggcacagcccatcagggagaaagagcaggtaaggtgcaacaatgagctgagtaatttgccagtgagcagtgggggtgccgagaggtcttaaccaaggcagagaatctgcaagaggtgggacccccagcttctgagttccacgaggaccccagcctgcactctcatgtgggtggcaggagaggctggaggatggtgcaggactcgggcaggggtgcccaagggaaacattttggttggagagtcaggaagccgcaccaagccttgtgaccttggacgaatcactctgtagacctctgtctctgtgacgtgagcagcggggaggagatggtcacagctctggcagtggtcactttgcagggttctttctctagctacactggaagcctgggagtcccaagactctgccttcgctgctcactgctttgattttgctgagttgctggttgggtgacaggatgtgtaagaggatgtgtaagccctgtgacatctgacagatctttctgggtttcgagccagcagaggaatgtttcctctggtgccatgtcccttggttccatgcttgataacagatggctgagagcacatgaactttcaccctttccctctcatgagtggatggtccccagctttgtttgtccatcatcaggaggagcaatgggaagtagtccaaggggtcttgttagtcattttaaacccccagtgggctgaaggcatcagagagggtggcccaatggttagggcagtcattatggctgaatatgctcagttccctttttttccctctgggctataaagactaaaccaggctgggggctgtggctcacgcctgtaatcccagcactttgggaggccgaggcagcaggattgcttgagcccaggagttcaagaccagcctgggcaacatagtgagacctcctcatctctacagaaaatttaaacatgacaggcgtggggggcttgtcacgtgggagaagtcacatgggagaagagttgagaattggcctgaattttgaaaggccaattttgttccccacaggaacaaaaaatttaaaaagttggccaggcgtggtggctcacgcctgtaatcctagcactttgggaggccaagggggatcacaaggtcaggagttcaagaccagcctggccaacatggcaaaaccccatctctactaaaaatacaaaaattagccaggcatggtggcgggcacctgtaatcccagctactcaggaggctgaggcaggaaagtctcttgaacccgggaggcagaggttgcagtgagctgagattgtgccattgcactccagcctgggtgacaaagcaagactccgtctcaaaaaaaaaaaaaattttaaaagttagctggctgtggtggcacacacctgtagtcccaggtactcgggaagttgaggtgggaggattgcttgagcctggtagattgaggctgcagtgagctctgattgcgccactgcactccagcctgggcaacagagtgataccctgtctctaaataaataaagactaaaccagggagggagtagagattaaaatggagttttgtatgagtaccgtgaaatcgggactcaggaatgaggagactctaggagaaggagtctttggcagatttcgccagcctgggtggtaaccagctaatagcagcctctggggaagactgccctggctcctccctgcccccttagttcctgcccttgaaatctggccttcttcctgctctttctcccattagctatcccagggcctctgtgcccattgttacctggccaatagcaccaggctgtggtttgagttttgtttgtttgtttgttttgagatagagtctcactctgtcgcccagactggagtgcagtggcgtgatctgggctcactgcaaactctgtctcctaatttcgggcgattctcctgcctcagcctcctgcacagctgggattacagggggtgcaccaccacacctggctaatttttgtatttttagtagagatggggtttcaccatgttggccaggctggtctcaaactcctgaccccaggtgatctgcccacctcgacctctcaaagtgctggaattacagatgtgagccaccacacccggcccaggctctggttttgatcagtgttctgctccctgcttgcttagggctggagagtctcaggcatggtggtggtgggcaacatgggaaggggcatctgcagaaataacagcagcagtgaccatttattgagtcttaaacccttactgatattaacacacgacccacaggaacatatgatgtaaaggcctaaaggggcgaagtgacttgcccagggtcacacagataggcagcggaggagtcagcattctgacggcagaacctactcggagacccagatcacagccctgcccagggctgctcttgatctgggggtggacttgatgctttaggaccatcatttctctgcgggtctcaggctatgagctgaaccttgagaacactgaagatcctttttcagggctgggctcctcagagcctctcgagattcttggaagaaaaaaaactgcatctcaattgtgtttatccagagagcaaagagaatcagtcaggtgataagcctgttatctgagttctgccatacccaaggtaccatcttggacccaggagtggggcagatacaaacagatggatgccctatggtcagacaggcctgggtttgaatcccagctccaccactgaccgccatatgactgaggggagagtggttatcccctctgggattcagcttcctctttggtaaaatggtgactgtcatgtctaccttttagggctgcattgaggattgaatgagaaagcattccatagctgcagcaatagtggtttatagtgacaaacagcactgcatgtttggcactgatcattgtaatctagcccaggaaagcaagcctagtggccagtgagatgctagcacatgagagagtactgagaagaaaccagctagagtggttctgggcccctacatggctccaagaagagctcagtgagtgacccaggaaatggggaagaaataggacctaaaagggtggcggcaaaggagttgggagcattagaagcatgggatgaatcactgttttcctgaagacgcaaacatgacaggcatgggggcttgtcacatgagagaagagtcgagaattggcctgaatttcgaagggcctcgaaagccacagaattcagactccaggccaccgggaggcgtgctggactgtaatatgttgaatctcagttcttggtaaggggtccttttgggaccctgtggggtggaaacaggctgggaagccagacagatctggatccaaatcctgctatgcaacttgctaatatatgaccctgggtcagtgatgggatctctccgaaccttttgaccacaagaccatcctaaggattgaatgagataaagtatatccatgacacacctgcccgatgcggggcctctatcgagtgctgatgtgttagtacccattttatgttgacatctaactggtccattgagtctgtatgcctgaagcaagcatgatttgcacctgatctgtttctgtgtctgtctccccatactctggcacccagtgcactgtctgcacagaggcatacctgggtttggaccctacccatgtgatcttgggaaagttattacacctttttgtcccctagttcccccatcttaggataacagtagtgcctgcctttgtcccatctaggttgagaagagtcctaagctaacagccccaaacaggtgggtgttgctcagctccctgaggcatgtggttgtaaggcagaacccacagaccttgcaggaagaaggctctcggggccatggcccaggtcagcatcaacaatgactacagcgagtgggacttgagcacggatgccggggagcgggctcggctgctgcagagtccctgtgtggacacagcccccaagagtgagtgggaagcctctcctgggggtctggacagaggcaccacttccacacttggggccatcttcatcgtcgtcaacgcgtgcctgggtgcagggttactcaacttcccagcagccttcagcactgcggggggcgtggcagcaggcatcgcactgcagatggtgagtgcactggccgggagggcagaggtgcagttcagttgggcgctttgcctcaaaagggaggcttcgggtcagggatggccagtaagtgatacacgcactgctctcccctccctcacacatggcagacatgactaatctattctagtattctttcctgtgacccaaatgaggcttcagaagccttccaacaatcagagaaatttgaacatcaattacatctctaattttttaggtgtaacattgattttgtggtatgtttaaaaagagggcccttatcttttagaactacatactgaaatatttattgatgaaatgatatgatagcttatattggcttcacaataaatgcagagtgggagggaaggggaatgatgaaacaagttggccatgcattgatcatttttgaagctgagtgatggatacatgccagttctttttactattctctttacttttttctttgagatggagtcttgctttgtcacccaggctggagtgcagtggcccgatctcggcttactgcagcctctgcctcccagtttcaagtgattctcctgcctcagcctcccaagtcgctggcattacaggcacccaccaccatgcccagctaatttttgtatttttagtagagacggggttttaccatgttggccaggctggtctcaaactcctgacttcaagtgatcctcctgcctcagcctcccaaagtgctgggattacaggcatgagccatcgcatccagcctattctctttacttttgtatgttggcaatttttcaaaaaactttttgtttttaaagaaaatctcaactcggcatcctctagcagtctcttaaaattgcctttgtgagatttgccaagcttgctttgggcactggcccagtaaatgctaggcgagcccagggtgccctctgctgccaggcctttgccacaagctcttgttctgcctctgcctgcagggtatgctggttttcatcatcagtggccttgtcatcctggcctactgctcccaggccagcaatgagaggacctaccaggaggtggtatgggctgtgtgtggcaagctgacaggtgtgctatgtgaggtggccatcgctgtctacacctttggcacctgcattgccttcctaatcatcattggcgaccagcaggacaagagtgagcttctccctcagtccctaccccatctcttcttatcagccccagggatcctggggtggagggaaaaggcactgaacacctctccaggacttacctgggcccagcattcatctgggaatcctccctccaggcagagggaggtcctggggcccagcagagcaggagggccacaccccatggtggcctggcttgacattccctccttcctccctgtgcagttatagctgtgatggcgaaagagccggagggggccagcggcccttggtacacagaccgcaagttcaccatcagcctcactgccttcctcttcatcctgcccctctccatccccagggagattggtttccagaaatatgccaggtttggaggccccagcctgggtcagacagaagctatgatcctgggcagctgtagacccaagggctcctggggaaccctgctcctccatgccacctcaccttggggagcaagagtaggcaaggcagggcagaccggggcttgcagggtttcagataagaccatccttttctgtctccatcatagaaaaaggatgcatccatgagagattcagttctaaatgtccttttgcatccatgagtagttcagttctaagtgcccttgtcaaagaaggaacaggtggtatctgggcggtgaaggcagcctcctggcattccctgggaggaatttgggtctttgagactgtcagcctaccagcatcttacctgcagcttggcatgaaggaaggagactggtttcctgtctcggtgtctgaaaggctgtgggattctaggcttccccgtctgtaagtgcaggggccatgctccgctctctccaaggctcccataaatgttgacacaaaagtgtctgtactctcaaccctcttacctctggcatctcttagttctcaaaggccaggctcagaggatggtctcccacagcccctgcccgggctgggctgctctgattcaagtcccaggtgtgctttggagctctgctctctgcatcgtctctgagccatggagctgaaccagcacttcctgatggccaggaatgctgatcaggtcccctgttggctgtccagctccttcctagctgtggcaggtttctctgaaactacttctcaggcgtttcctgagtctgcttggcatagtctccggttcattcagtggacacttgtggtcgctagagctgaaggtggatgtccctaggggtggaatcagataagaggcagctggggatgaggacacttagtctctccttcccggcagcttcctgagcgtcgtgggtacctggtacgtcacagccatcgttatcatcaagtacatctggccagataaagagatgaccccagggaacatcctgaccaggtgagggtgagggccctaggagacatggggaagaagccaccacttgggccccagcaggtgctgggtcaggaaccagaaggccacacaggtgctcttctcaaggctcatgagctcatcagggctgacttggtcattgtaggaaggaggaaagagcccctgctctgatgttactggaaggaagagcaagaatcagagacaggaggcactttgccacctacatccaacagatgagccagtgtgaggctaggccttgggttgtggaggaacctgagggtggaatcccagggtcgaattgcctgtgtttccagcatctgcttatctgtaatttctgtatctttgagggtgaatttattattaaaaaaaaagggggggggccaggcacaatggctcacgcctgtaatcccagcacattgggaggccgaggcgggcggatcatgaggtcaggagattgagaccatcctggctaacacggtgaaaccccgtctctacttaaaaaatacaaaaaaattagccgggtgtggtggcaggcgcctgtagtagcagctactcgggaggctgaggcaggagaatggcgtgaacctgggaggcagaagttgcagtgagccgagatcgcgccactgcactccagcctgggtgacagagcaagactccatctcaaaaaaatacaaaacaaaacaaaacaaaaaaaacaatttccttcttttgaaaggaacaaaccagtaaagcaaaagccccagtccaggagccaggaattctggattttggccccaggggggcttttctgaacctccaggccccatcccagagggccctgggacataaggatgcctcttctccctgttcccagacttctgtgggttgaagctatggaatcccagttgctggagaccatggtgggctgaccgaagagtgagggcgtggggtgggttgtggctctgaggggttcccaggtggcagcaccatgtgtgtttgttcacaggccggcttcctggatggctgtgttcaatgccatgcccaccatctgcttcggatttcaggtgccagtgccagttgcaaggtccctgctgtccccttagatcaccccaccctgggatggaacccagcaaggaggaggaacccaggcagaatggaggaaatcctggggggaaggatggaacaggggcctcaggacttgccccttgttcctggggtctttgttcccaaggtaccttcctctggaaactggggttgaggtcatttccccaccatgacggtgcccttcacctggacagtgccacgtcagcagtgtgcccgtcttcaacagcatgcagcagcctgaagtgaagacctggggtggagtggtgacagctgccatggtcatagccctcgctgtctacatggggacaggtgagtgctccccccccccaagacctgggactagagtgctctcacttccacaggagtccctaggtcctggggcctagctttcctggggacagccctgcattcccagcatgacttgtataggcattggcttgaacttggcctgcctggagcctcctcctgccaagatgagagtggtgtattcatccattcattcaccagttctaacttggtgcctaggaagtgccaggaacggttctcagcatgggggatgccatggagagagacagaactggtcttgccctcatggagttgacattcttgttggagagacagtcatgcaggagtaactggggaatcagtaaggaattccagatggtggcaagcatcctgatgacagtgaaatagggaaggtgtgttttgttttattctattttattttgttttgagaaagggtctcagaaactgtcgcccaggctggagtgcagtggcatgatgatagctcactgcaacctcaacctgctgaggtcgagtgatcctcctgcctcagcctccagagtagctgggactacagccatgtgccattgtgcccagctaatttttttttttttttttttctagcagagacaaggtctcactatgttgcctagcctggtcttgaattcctgggctcaagcaattctcctgcctcggcctcccaaagtgctggggttacaggcatgagccaccaacccagcctaaaatggggaaggtatgaatgggactggatgggtggctttgggagtggttcacagaaggttcttctcagagaaggcccaaatgatgagaaagagccagaagaggaggagctggggaagaagggttccaggcagaggaaccacaaaacaccaaatcactgaggcagggccaggaagaaagtctatgtggctggagtggtgtgtgatgggggcaggtgaaggcagtgaggccagacaggcactggcagccagatcctgttgggcctcgagggctgctgggagtcatcgaggaagtgttttaagcaggggggtggttcggggaaaggtggctctggctgccgtgtggagagtggttggggtgagggagcaagtctaggagaccctggaagaaggatcccctgagttctttccacggatagaccgtaggagctgcctgggccaatactgttctagcctctgaatacacagccaggaacaagagaggcaaacagccaaatccctattctcctggggctcatgtcctggctggggagacagaaaataagcctgtaaaaattaattactattattattgttattatttttatttgtattattgtttacttaaagaccagtgtgatagtacagttaaaaaaaaattagaaagcgatgaggccagtcacagtggctcacacctataatctcagctatgggaggccaaggtgggaggttctctggagcccaggagttcaagacaggctgggcaacatggtgaaactccatctctacaaaaaatttaaaaattagccaggttatggtaacatgcacctgtggacccagctacttgggaggctgaggtgggaggatcgcttgagcctatgagatcaaggctgtagagacccatgatcatgccattacactccaaactgggcaacagagtgagaccctgtctctaaaaaagagagaaatgagtgttaggggacaggcccagtggatcatgcctgtaatcccaacactttgaaaagctgagatgggagaaccgcttgaggccaggagttcaagaccagcctcggcaacatagtgagactcatctctacaaaaattaaagaattagctgggcgtccgccaggcatggtggctcacgcctgtaatcccaggactttgagaggccaaggtgggtgaatcacttgaggccaggagttcgagaccagcctggccaacatggcaaaaccctgtctctatcaaaattacaaaaattagccgggcgtggtggtggtgcctgtaatcccagctactcgggaggctaaggcatgagaatcacttgaacctgggaggccgaggttgcagtgagccaagatcgcgccgctgcactccagcctgggggagaaagtgagactctgtcttcaaaaaaaaaaaattagccaggcatggtggcatgtgcctgtagtcccagtgacttgggaggccaagtcaggaggaacttgagtctaagaattcaagactacagtggaactatgattgtaccacttcactccagcctgagtgacagagcaagatcctgtctttaaaaaaaaaaaaaaaaacggccaggcactggggctcacgcctgtgatcccagcactttgggaggcccaggcaggcagatcacatgaggtcaggagttcgagaccagcccaaccaacatggcgaaaccccatcttactaaaaataaaaaaattagggctgggcgtggtggctcacgcctgtaatcccagcacttcccgaggcaggcggatgacgaggtcaggagttcgagaccagcctggccaacatagtgaaacctcatttctactaaaaatacaaaaattagtcaggcttggtggcgggcgcctgtaatcccagctactcgggagtctgtggcaggagaatcacttaaaaccagaaggcagaggtggcagtaagctgaaatcgcaccactgcattccagcctgggtgaaagagcaaaactccatctcaaaaaaaaaaaaaaattagccaggtgtggcggcaggtgactgtaatcccagctgcttaggaggctgaggcatgagaacccaggagaccaagatcatgccattgtactccagcctgggcatgacagagcgcgactccatctcaaaaaaaaaaaaaaaaaaaaaaaaaaaaattagccgggcatggtgtaatcccagctactcaggaggctgaggcaggagaatcacttgaacctgggaagtggaggctgcactgagccgagatcgtgccaccgcgtgccagcctgggcaacaagagtgaaactccatctcaaaaaaataaaaaagaagaaggctgggtgtagtggctcacactctgggagggtgaggtaggaggattacttgagcccaggagttcaagaccagactgggaaacgtagcaagaccccatctctacaagaaaattagctgggtgtggtggcatctgcctgtagtcctagctacctgggaggctcaggtgggagaatcgcttgagccgaggaggtcaaggctgcagtgagccatgatcacactactgcgctctagtctgggtaacagggcaagactctgtctcaaaaaagaaaagaaaaataagacagcgtgatgtgagagagtgcctggggtgggggtcattgtagatggactggcaggaagcattctctgaggaaggacatctaaactgagacccaaatgataaggagatggcatctgaaggtctgccagacagaacagtcagtgccaaggcactgaggtgggaatgtgctgggcaagttcaggctcagaaagctgggggctggagggcttccagcgatgggggatctgagaagtcagggagggaggcatctgatcggagccccatctcccactctgagcctccgtctaagtgtccagagctgctgctgcagcctccaggctgatgttgctcctaggaggagtggacagtccaccccactaccctcccagggttgccctgacccagttgtccctgcccacaggcatctgtggcttcctgacctttggagctgctgtggatcctgacgtgctcctgtcctatccctcggaggacatggccgtggccgttgcccgagccttcatcatcctgagcgtgctcacctcctaccctatcctgcacttctgtgggcggtgagcccccttccactccccagggcccctcctagcccctgtgagcgcttccaacatggtcctttggccttgtgtggaccccatcctgtagaaggagaaactgaagcctgtagaaaagagtcggtgctaggatgggtccctacatatcccaggccaggtgtcagaagcgccctttgtcctggggtcaccagaacattccgtgagtcctgtaagaatctctatccatggcatggcacggtggctcacgtctctaaacccagcactttgggaggctgaggcagaaggatcgcttgagcctgggagttcaagaccacctgggcaacctagtgagaccccatctctacacaaaataaaataaatagccaggtgtggtgggatgcacctgtggtcccagctactcagccacttgggaggctgaggcagaaggatggctggagcccaggagttcaaggctgcagtgagccaagattgcaccactgcactccagcctgggtgagagagccagaccctgtctcaaaaaaacaaaaaacaaaagaatctctatccagatcctttcctgagctttcacatggacaccctcccctttggatgccccagacagttccttttaaggaaaaaacaatatcagtttccatgtgatgtaaagcaaagtgctaagctctcgacattcaccgtctctagtccctgtggtaaacagagtgctggtggcccattttacagaagaggaaactgagggtcaggaatggggctttccccgcagtctacccagttaggggtctggctcctgtgagctagaggtggggagctgctagcagcaggggcacctctaagcccttctccatgtgggcagggcggtggtggaaggcctgtggctgcgctaccagggggtgccagtggaggaggacgtggggcgggagcggcggcggcgagtgctgcagacgctggtctggttcctgctcaccctgctgctggcgctcttcatccctgacatcggcaaggtgatctcagtcattggaggcctggccgcctgcttcatcttcgtcttcccaggtgcggacccctggcgccccatctcacagccccacagcacagactcccagggcctgcctagcctcagctccctacttgctcaaaacatgcaggagagagtaaccaccagcactaattgatcacctgtctcgcctctgtactagcccctatccaagcattatctcctggaaagaaggtatagttgtgatctccagtttactgatggcacgtggggctcagaaagggtcacagacttgcctagagcttaacaaactcaactagtaaccttttccatcccacgctgtctgggtccagagtctattcttttaaccattcattcaggtgtctgctgctccttgactatgagggatctatctggctggttcagcccattacagcccagagggcagtggggtctggggtggcaccctgacacagacatcagggaacctgggttccagacacagatctaccgccagatccctggagaactgtcctgtctgcccagccatgagttccacccttttccagcttgtctctatccaggaagccaccctgaaagccccagctgctttgcttggagcaggggagccagatctgctgggaagtgtactaggaagacccctggggttgggccaccactgagtcaccattgagtgctgtccctttagctgagtctagcatgctgcccaaggggtcttgtcagatgccagcctgtcatgggagagcagatgccagatgaccccagcaggatgtggtgtgggggcagagatggaatttctagaagagtaaacatgggcctttctccatccagcactgcttcttgggaaaggaggtggctaggagggagggagccctctcccctcacaaatgctcagggccacttcttctctttcagggctgtgcctcattcaagccaaactctctgagatggaagaggtcaaaccagccaggtaaagcaggacccagcccttgatcctctcagggaggtgctggattggaatgtggctttgtgggggccttaaaacagataggagtcagaggcttgtgtacttagaaatcatgggtttttgttttgtttttttttttttgagccggagtctcgctgtgtcgcccagcctggagtgcagtggcacgatctcagctcactgcaagctccgcctcctgggttcacaccattctcgtgcctcagcctcccgagtagctaggactacagatgcctgccaccacacccagctaatttttgtatttttagtagagacgaggtttcaccatgttggccaggccggtctcgaactcctgaccttaggtgatcctccttcctcggcctcccaaagtgctggcattacaggcgtgagccaccacacccagccaggttgttgttgttttttttttaatacttttaaaaattcggtagtgtgctagttgttaacaatttaaacattaataaagggcttaatacaaaaagatggaagtccctcttcccccacaacccactcgcccccacatcctttctgagatagctccatgttaccagtatggtctgtgtcctcaaccacttctgtacatgtgtgcgtgtcatgtgtacacatagctatggagatgtatacatagatgcagggctcttgttttgttttatgaaaagtggtttcagccaggtgcattggctcatgcctgtaatcccagcactttgggaggccaacatgggcagatcacccgaggtcaggagttcgagaccagcctgaccaacatggtgaaaccccatctctactaaaaatacaaaattagctgggcatggtggcacctgcctgtaatcccagctacttgggagactgaggcaggagaattgcttgaacccaggaggcggaggttgcagtgagccgagatcacaccattacactccagcctgggcaacaagagggaaactctgtctcaaaaaaaaaaaaaaaaaaaaaaaaaaaaagccatacaaacatgtctaaaaaagaaaaaaaattggccaggcacagtgactcacgcctgtaatcccagcactttgggaggccaagacaggcagatcacctgaggtcaggagttcgagaccagcctggccaacatggcaaaaccccgtctttactaaaaatacaaaaattacctggttgtggtggcgcatgcctgtagtcctagctcgggaggctgaggtaggagaattgcttgaaccccggaggcggaggttgcagtaagtggagatcgcaccactgcactccagcctgggtgatagcaaaactctgtctcaaaaaaagaaaaagaagaagaagaaaaaaaatcaccctttatttcttttttttttgtctttttttttttttttttttttgagatggagtttcactcgttgcccaggctggagtgcaatggcgcgatctctgctcactacaacaacctccacctcccgggttcaagcgattctcctgcctcagcctcctgagtagcttggattacaggcgcccaccaccacacccagctaattttttgggtttgttgttgttgttttgagatggaatctcgctctgtcacccaggctggagtgcagtggcatgatctcggctcactgcaacctccagggtatctgggattacaggtgcgcagcaccatgcctggctaatttttgtatttttggtagagacggggtttcaccatgttggctaggctgatctcgaactcctgacctcaggtgatccgcccaccttggcctcccaaagttctgggattacaggcgtgagccaccatacccagccattttttgtatttttttagtagagacggggtttcaccacgctggccaggctggtctcaaactcctgacctcaggtgatccacctgccttggcctcccaaagtgctgggattatagacatgagccaccacacccagcctaatttttctatttttagtagagatggggtttcgccatcttgcccaggctggtcttgaactcctgacctcaggtgatccatctgcctcggcctcccaaagtgctggaattacagacatgagccactgcacccagcctaatttttctgtttttagtagagatggggttttgccatcttgcccaggctggtctcgaactcctgacctcaggttgcccgccttggcctcccaaagtgctgggattacaggtgtgagccaccacacccggccggaaatcaccctttatttcaattccgttttatccctgttgctgttaattggtacatacatttgcagatgtctgctttttgtttcctttttttaatgaaatagaccacattccatgtgacgtgcttttttctgaacatctttccatcaggatgcctacattcgaatcgtggcatgatgtgaacaatcagttactcccattagatcttggtcttcttacctatggactagggacaatacacctggccccacactacctttgtattgaagtctttgggaagtaggaagtgctctaccaacaggagaagtgcgataattacagtaattaacagttatatatattgaagtctgcagtcatgggatgggatgactgatcagacctctctcaccctctgttctacagctggtgggtgctggtcagctacggagtcctcttggtcaccctgggagccttcatcttcggccagaccacagccaacgccatctttgtggatctcttggcataaccactgcctcccagggaacacaaggcctttgccattggtcgcaggaacccatctcttagagctatggggccattcttagtccacgatcattccaactggtgggatgacatccggacatcctcttccagggactggggcaaactcaggccccacacctctggacagctcaaatccagtccccttcctgctccccagtcctggcagtgccgtggatggcggcaggaagtctcacatcatagaggacccctcctcctctcccagttctcaacttctccatgcctggaatccacgggtgaagagagtcggtagatctcataagaaagaatccagtctgacttccctctggagaatgactatggacagaaggccaccatcctccacagagcaccctgtcctgagtaggggttgtgctcattaccccaggccagtggtagcttcctcaggagcctggccacttccaacggtagcactgaagtcatgcaaatgcatagtcaggtagattcagaccttgtccacaccttcctgggcaacccccaccatgaacctgtcagcctctttcccatagctaatagacatttcccaggccttgaggggccccaccctgtctctttcatcaaacctgatggtccaggctgggcatccctctcctcctccatccccagacatcaccaggtctaatgtttacaaacggtgccagcccggctctgaagccaagggccgtcccgtgccacggtgctgtgagtattcctccgttagctttccccataaggttgggagtatctgcttttgtgtctgagatgggcccctcttttcagaggccgcagggtgggtgatggagaaggctgagaacctttcagaccctctgtgtgggctgggctggtcagaatcagggtgtacctccccgacaccttctttttcagtgatgttttctcttcttcctgcctttcctctgcctcctcccctgccagccctagcgtgactacccagagacaaaaaaaaaaaaaaaaaaaaaaggcagggc

SEQ ID NO: 7443 - DNA, 482 bp, Homo sapiens
cagccaagaacagaaccaggactggatgcccgtttcgtcattcaacaaatatttactgagcacctacaatccctcaaaaactgttctagagtctaaaccgatggggtcgtaaccatgcccccagcccactcccttgcaggaaagaccgtggctccaggtcccccacattactgattaaaaaaaaactccagtgctctggccatgggcgtgaaggcaaggacagagaccgggaggataatgaggccaaacagctttggcccaccgccaccgggactggcaaagaggccagacctcctaatgctcttccttggaggaaggagcagtgtttgatttggtcaagaggccaagactaaaagtaagaggataaacacgagctggctggacgcgaggctggctcagggcagtgctgtcgggctgaggattcagggagctggtgttgtccaagcttcacatttgcggaaactacaactcccagcgtgtcc

SEQ ID NO: 7444 - DNA, 482 bp, Homo sapiens
cagccaagaacagaaccaggactggatgcccatttcgtcattcaacaaatatttactgagcacctacaatccctcaaaaactgttctagagtctaaaccgatggggtcgtaaccatgcccccagcccactcccttgcaggaaagaccgtggctccaggtcccccacattactgattaaaaaaaaactccagtgctctggccatgggcgtgaaggcaaggacagagaccgggaggataatgaggccaaacagctttggcccaccgccaccgggactggcaaagaggccagacctcctaatgctcttccttggaggaaggagcagtgtttgatttggtcaagaggccaagactaaaagtaagaggataaacacgagctggctggacgcgaggctggctcagggcagtgctgtcgggctgaggattcagggagctggtgttgtccaagcttcacatttgcggaaactacaactcccagcgtgtcc

SEQ ID NO: 7445 - DNA, 1254 bp, Homo sapiens
gggcgcagtggctcacgcctgtaatcccagcactttgggaggccaaggcgggcagatgacttgaggtcaggagttcgagaccagcctggccaacacggcaaaaccccatctctactaaaaatacaaaaaattaaccgggcatggtggcgggcacctgtaatcccagctacttgggaggctgaggcagcagagccgcttaaacccaggaggcagagactgcaatgagctgagatcgtgccattgcactccagcttgggcaacaagagtgaaacttcatctcaaaaaaacagaaacaaacaaaaaggcagctgggttgtcactgatgggcagcatttgagcctgccacactggcctggaagtttcccttccagtctggattttgtctgctccttccttccccctcaccccgttacctcttcacctcccatctcacttcactgtgtagctcagtctctcccacgcacataattggggacagtgggggctctcttaccagcctcctcagcaacgcacgtccatcaggcctggcctcagtggccagccacattgatgtcacactggaattgttaccccagagagggcgaagagataggctatctccccacctcccaccctactccccactatattcccgttttgaccacctcagcccctcagctgccccctctcactttggccaatcccaggcaccaatcagacttcctcctccacctggagcccctagcatttccttgtcccctcttccccaaaacctctgtaaagggtacgagagggaccccctgccgagccgcccgccactcagggcagtccgatctaagaagcagaagctggttggaggctggctgggcctctgtccagtccccagatggataaactgccttttctcacatcccctcttggtgcctgatcttctctgcccccggggccagacccactgtgctgttttctgtcagtctgtggcacagcaccaagctctgccagcaccagtccctgacagggctaggaggacagcctggtcagcagggctgcagtcccccagtgccgtgtttcgggggtcaagggatgtaagtggagtcattgcacagagacagaccagtcaggagaaggagctggaatctggcctcttgtcctaacctcaggagccccctcccatcctctccccaccctccctatcggggtacttcactgtttcttttctacttgtgtatactcgagaaagggaagatggttaataaaagggatttgtgctgctga

SEQ ID NO: 7446 - DNA, 1254 bp, Homo sapiens; identical to SEQ ID NO: 7445

SEQ ID NO: 7447 - DNA, 368 bp, Homo sapiens
agacagcatgaaggctttaaacctctctgaacctgatcagcattggcaatgatcttctgcagatccaacaacagcacagaagaatgtatcatcaggaacacatttggatattgacacaacttcatctgcagttggcttgtcatcctgagctccgttcccaggcagcgtagatattgcacaggattttgctgaccagggagttgggttataagtggtaactccaacctcttaatactaacgacattgacagtaccatataatccatctattacaccacacaggaaaatcaagcccagtggtacaggacagaagaactggctccagccaggatcaagcattgctttggcattgttccccaatacctgggc

SEQ ID NO: 7448 - DNA, 952 bp, Homo sapiens
tttcttctccaattgttggggtaactggagtgaggagcctgaggggacccaaagatgttctcctggtaggattccctctcatggtcttctgcatttgtagacattttgattggttccatttctaagggccaattatctgtgctttaacctgaaataaggaacctgccttctgatcttcaaggatatgtacatggacacacatctttcagattcaactcttgagatttttggttttaaacaaacaattgtgttcatcacaaatgaagattccctcaagcagcagcctcctggaatcaactgctgagtccaaatcttgtagcccttaaaaatatttagtatttttactaagtaataagtatttagggtgttatgaaaaatgcaatttgaaaaagtacattggtttttaagaacaagaggaactatttagaaattatacaatatattaacaaaagtaaatatttaatatatctcaaacacaaaaatgcaaaaactggttaccaagcatcaagaaaaacttaaaacttgtaaaatacaaaggttaaatgtattttatcttcattctattattagcagataaccttaataaaaatgagctgttatttacagcaaaatatcatgtaattttagatttatcactttttatttctatggaaaagcaacaccagcatgtattgttgctgaaggtgaagcaactttttgattctgttctgttccactctgtgttctaagatgtgtgtcagataccggccacacaccctacatgtgctcggggcacagcctggccccacacagcactttagtctgcaggtgggcatctaaggccctgccattcccacttcttattgtcatatttacttagttctcagcacctctgcccatctttaaatgacttaagtgagagtatgttaaagtagcttacatgttcctaagcttcctcacagcacatcccatc

SEQ ID NO: 7449 - DNA, 413 bp, Homo sapiens
ttccaagccaaagaggttttcagtcccacccactgaaatcatccagtcctttattcacctgtgtcaacccggctcggaggtgtggcctgcgagatccttcatgcaatcaagaagtcaggcctccacctggtcctgggggtcatctgaggcccgcagttttggaagaggaatgttttctgccagcagttcccacagacgggctggctccccactgtggggacatgcaccatgccctctgtgggcctctgtttttcatccctgaattcatcccccacagaatggttcagttgtcatatctagctatctaataagcttgagggcactgtgtcccctaggggatgcccacatgcctgaccatgcaggctgatgcagtgacaagcacaaagtatcgtgattatagttcctgctctcct

SEQ ID NO: 7450 - DNA, 681 bp, Homo sapiens
gggatattgagtgatgaagtggtgtctattttagataaggtggccaaaaaaggcctgttgataagaaaagtgaaaatgaaatgagaaagtgaatgacatggaagagtgtcccaagcagtgggagcagcacgtgcacagccctacattggaagttagttggtgatgttcaggaaccgctggtcagtgtagttctagcagacagagtaggaggaaagggtggtagaaaatgaagtccagaggtgattggcattgggtcagattatgcagagccttggaagccatggtgaggactttgaattatattaagaagaaaaagcgggaagctgttggaggattttgaacaggaaagtcatgatctaatttatatcttaagatataaacacataaaatacgttttaaaatccataagtttctaataataataacaagctatttgatcacaattagaggatgctagtgaacaattcatttttctgaaagctagtaaagggcaagaataaaccatgtgtcctgcctttccaacatgaactgtactattgggtaaccaaagagtggaggaggagaaattctccttacagaattattccagctaatgtatgaagaaggaatgatagaattagtatatttgcattttataatcttttgttaattttccatgtagttttcctaatatcagagaaa

SEQ ID NO: 7451 - DNA, 681 bp, Homo sapiens
gggatattgagtgatgaagtggtgtctattttagataaggtggccaaaaaaggcctgttgataagaaaagtgaaaatgaaatgagaaagtgaatgacatggaagagtgtcccaagcagtgggagcagcacgtgcacagccctacattggaagttagctggtgatgttcaggaaccgctggtcagtgtagttctagcagacagagtaggaggaaagggtggtagaaaatgaagtccagaggtgattggcattgggtcagattatgcagagccttggaagccatggtgaggactttgaattatattaagaagaaaaagcgggaagctgttggaggattttgaacaggaaagtcatgatctaatttatatcttaagatataaacacataaaatacgttttaaaatccataagtttctaataataataacaagctatttgatcacaattagaggatgctagtgaacaattcatttttctgaaagctagtaaagggcaagaataaaccatgtgtcctgcctttccaacatgaactgtactattgggtaaccaaagagtggaggaggagaaattctccttacagaattattccagctaatgtatgaagaaggaatgatagaattagtatatttgcattttataatcttttgttaattttccatgtagttttcctaatatcagagaaa

SEQ ID NO: 7452 - DNA, 681 bp, Homo sapiens; identical to SEQ ID NO: 7451

SEQ ID NO: 7453 - DNA, 435 bp, Homo sapiens
caaagcaacacaatcagtaaacaaacattagaaccagggctgaaactttaggtttttggttccttgaagtgctattttcacttaaccaggaaaaaaatgcctgaccctatcgacttgttcagccaataatggctgtgtttgtaaagtcactgaaatatatgacttgaagatacagttcggtgatttcttagagagctctacctgtcatttctataggggtagaggattattttccccaacccatctttaaccttgctaataaatgattcattcagcaaatattgaatgtgttacacctgtgtgtactgggcagataacagcgaacatgaggaataaacttctgtcctcaagggacttatcttctatttggggagataatagacaaacaatagtaatagctaataaaatattagatagaagtaagtactatgaaga

SEQ ID NO: 7454 - DNA, 435 bp, Homo sapiens
caaagcaacacaatcagtaaacaaacattagaaccagggctgaaactttaggtttttggttccttgaagtgctattttcacttaaccaggaaaaaaatgcctgaccctatcgactcgttcagccaataatggctgtgtttgtaaagtcactgaaatatatgacttgaagatacagttcggtgatttcttagagagctctacctgtcatttctataggggtagaggattattttccccaacccatctttaaccttgctaataaatgattcattcagcaaatattgaatgtgttacacctgtgtgtactgggcagataacagcgaacatgaggaataaacttctgtcctcaagggacttatcttctatttggggagataatagacaaacaatagtaatagctaataaaatattagatagaagtaagtactatgaaga

SEQ ID NO: 7455 - DNA, 435 bp, Homo sapiens; identical to SEQ ID NO: 7454

SEQ ID NO: 7456 - DNA, 8553 bp, Homo sapiens
gagggcacaggcgcttgcgcagtagggtggccgctcccggccgcgtgcagcgcgaacgtcggcgcaggcgccaaggctctggcagttggccagcacaccactacgcatgtgtgtcaactctagggttgggtgctggggttgcggctttcggttaacaccgcaggtgaggtcgttaaactgtgtattgcgactcggctcctatcggaccgtgaaggctaagaaaggcttcacagttcccactcttttggtctagccttagcaacaggtggactagagaggcgggactccagccagcacatgggggaaagacctgccggcttggcgcagggtgaagtgggagttgtagtcttaccgggccggactgcgcagcctttttccgggcacactgggagttgtggtttatcgcctctggactaatggctgtatgtggacttttcccttcttaggaaatgctttcagtgaggctgtgagcagtaccggagggtgatggcttgcgtttccttaagttatcctatctaaaatattttcccaagtatttccgccgggcgctgtggctcacgcctgtaatcccagcactttgggaggccgaggcgggtggatcacctgaggtcaggagttcgagaccagcgtggccaacatggcgaaaccccgtctctactaaaaatacaaaaattagccgggcgtggtggcgcgcgcctgtaatcccagctactcaggaggctgaggcaggagaatcgcttgaaccctggagacggaggttgcagtgagccgacatcgtgtcactgcactccagcctggcgacagagcgagactccatctcaaaaaaaaaaaaaaaagtattccctgtggtgctttgagatttttttcccccacatccatccctctcccgctgtcctgagtcttagttagagatgatggggagccagagttttaaaattaccattcgggataggagaaggacttatcataccgtggaaattaaacatggtgagaacacggaaagtaactgcctgttcgtcagagacgtttaaggtttgggtttggttaaattactattttgtccagaaaaaaaaggaagcactaaaggaaaactgttttccaaactagtgaaggggccgtgagagcaccaacagttcaagaacagtcacctgtttggccatgaaatagagtttcctactttttcctctgcagattggaacaggctgagatctgctggagacaacttaggaaattatcatagtgaaaatactaacatggattgttgatcatctgatgctatgattctttcccaggcaccacacctgttggtgttcagatggagcggcacactagtcatcctaacagaaaaggtgtgtgttggaggccctgcttcccctcccttaaaaagcaagacctcctttgcattccccactaaatgggagcattgctgtattcccagcacctagaactggatctgttaaatagtagatgctcagtaattatttgttaaatgaatttattattcttcctttgtatctcctcttaatacttagaacaagactatgtacaggatcttagaagacatggtgttaactagagtgaagagatactgagttgtagtgggacagccccattggtgggccagggaaatgcctgaggccttctgactccagagcctatccacttaactttagctggatcagattatctgaaagacctaccattccatagcctggacataattttttttttgtttagacggagtctcgctctgtcacccaggctggggtgcagaggcaccatctctgctcactgcaagctccgtctcctgggttcacgccattctcctgcctcggcctcctgagtagctgggactgcaggcacctgccaccatgcccggctaatttttttgtgtttttagtagagacggggtttcaccgtgtcagccaggatggtcttaatctcctgaccttgtgatccaactgccttggactcccaaagtgctgggattacaggtgtgagctaccgcccccggccttttttttttttttttttttgagatagagttttgctcttgttgcctaggctggagtgcagtggcactaccttggctcaccgcaacctctgcctcccgggttcaagcaattctcctgcctcagcttcccgagtagctgggattgcaggcgtgcacccccacgcccagctaattttgtatttttagtagagatggggtttcgccatcttggtcaggctggtttcgaactcctgacctcaggtgatccgcctgcctcggcctcccgaagtgctgggattacaggtgtgagccaccgcgcccagccccagcttgggcataaattaactggctcttttcacagagtatatagtgcagtggtaaagagcatgactttggagtctacaggaccaaatttaattccagctgctatttgccagaccctcttaagcagtttacctacttaggatcactgccacctctgtctccttgattcaagtgattcttgtgcctcagccacccaagtagctgggattacaggtgtatgccaccacgcctggctaatttttgtatttttagtacagactgggttacgccaggtcttgaactcctggcctcaagtgatccgcccactctggcctcccaaagtcctgggattacaggcgtgagccatcgcgcctggccagtttaccacttatttaatgctcacgattctactagaaaatactattaaccccacaacagatcgaaacatttaaattaactgctactaagggatgggctaagggtataaagctaggcctaactaaaaaaacattattcatgcagccacacatatcaactgtggaatcttgagcaaatttcatgacttaagtttcctcaagtgaaatgtaggtaaagctacctactttatctacattcctcaggtcacgttccccagtgccacaagactctcatagcacttactgaaatgtaatagtttgtgtgcttgatcacctaatgactgtctacactgcaagactatcagttccaggagagtagtgaccacatctgtttagcagactgtggtatccacaatgaccctactttaagggtcattgtgagaaacatataagagaatgtatgtaaagcaccttttattatcatatcctctgttctgcctccttttgcctctctccaccctcatcctctgttatacattgtcagaaatacagctcctttagtatagagtgtgtgtaaagcagtctctttctttaattaaaaaacaattttaatttctcatgccaccttgtgtaaaaatgtgtaaagcattcttcaaaccttataacccagtataaaatgcattcttggccgggcgcagtggctcacgcttgtaatcccagcactttggaaggctgaggcaggcagatcacgaggtcaggagatcgagaccatcctgactaacacggtgaaacccgtctctactaaaaatacaaaaaattagccgggcattgtagtgggcacctgtagtcccagctacttgggaggctgaggcaggagaatggcatgaacctgggaggcggagcttgcagtgagccgagatggcaccactgcactccagcctgggcgacagagcaagactccgtctccaaaaaaaaaaaaaaaagaaagaaaaaaaaatgcattctcctatgtccaggaaggactcaaattatttaaaagtgcatttgcatggaaattaacacattttgcatggaaattaacacattattgagaagaatcttgagacctgagtttcaacttctgtctccttaccacattctgcacaagccatcaagtgactgatgactctggagcaggagggaaaagaagatggatgacctaccagtagagcctggaaaatccacaaacccagtaacccagtgcaaaagaaaaaaaccaaaaccaaaaaaacatatttccctcaccaagagtgactgacagaacagatttcagttttcataggctcagtgaccttccagacagaaagcatctcaccctggcacccacatataagcacttcttcctcttaccaggccattccttctgttgccctctgagtaaagaacaagaataagacattttccttcatacaacctacttttcacacttctgcccccaggcttgttttttatgaagaggcccttcttaatccttcagatcccagctgagatattatttcctcaggacatgttttccagctctacagactaggtcagttgctttcatagcacttactgaagtgtaatagcatgtgtgcttgatcacctaatgcctgtctgcacagcaagactgtcagttccaggagagtagtgaccacttctgtttagcaaactgtggtatccacagcgatgacacataggcacttagctatctcttatgtgtatgatgaaaatgaattgttttaccatcctttcttgatttcattataacagtgaattattgtctccctactgtcttgcctttttaattcttacctagttccagctgtctgactttccatccattgcccttgtctactttgccacttccttttcatcttctagactcctgaggaggagttccttgaaggttcagtttttctctctctgttttttgccttggagagctaatgtatttttgcagctccttcatcccctttttggggctgcctggcagtttgacctttcacttgagctccggtgccagctctctggctgtttttctgggcacttctatttggatttcctactctcacctcagattcaatatgtccagatgtgattatgttaatatgagagttgagttttactcaaacttctttaagtaaaaaaggcaattcagggacttgtgcagttgggagagatgctgaaatagctcacagaataatgggaagaagagcggcaaaaaccaggcctcggggactaaaactggggatttggtgcctgttggtgtctgtgtatccatctgtctctctcctatgcttttccttgtctctagtctcttgcttttccacttctcatgatatgctagccaaatagctttcactgggcccaaccatacattttctcagaataggagatcagaagaaagtaaatttcttagacacagaatccatatattgatcccagggaatgactctggcccaacttacctcatgcgcctaatcccttggctcagtcacagttgccaagggggatgggaataccatgattggcctgtattgggtcacaggccaatccttgttagggagaggggcttgattgtggtctcaccagtatagcctggcttctcaagtttttttttgttgttgtttcattttttttgagaaggaatctcacccttgttgcccaggctggagtgcagtgttgtgatctcggctcgctgcaatctctgcctcccgggttcaagtgattatcctgcctcagcctcccaagtagctgggactacaagcgtctgccaccacgcccggctagttttgtatttttagtagagacggagttttaccaggttggtcaggctagtcttgaactcctgatctcaggtaatctgcctgccttggcctcccaaagtgctgggattacaagcatgagccaccgtgcccagccgcttctcaagtttttaaggttcagtaaatatcctctacctgaaaggaggtagagttctctcgctactcatattgatctcttctcccttttaagaaacattcatttttacctttaatcacatagtataactaacagataaaaggcttttattttcaccccagactcagactcattgtttatgtcctcatgttgttagatcactgtttcacctgtgtctgatttgtcttcctaactagatactaagcatctaagaaaccatgtcttaacacatcttatgtataccctaggatttagtacagtcgcaagcatgtagtgtatatcagtaagaacttgtaaacaaattagattttggcttatcccactcctgcttggtttctcttaatcctattatgatttcttttttgtcttatgtatctttctgatatgtaacatattcacggcagggcctgggcacctgctttcatggaccaggtgcagggatctaattagaaaggctgtcccttgttggaatgagctctgatttagttatctctgatttagttccagccaaagaggaagctaatgctgtgcctctctgtagagcaaaaccctcccccagctatattaatcttcaagcaagttccccaccagccacttttctgaacatccagacaacaaagctgccctcgggtaaggatgtagggagggttttctaatggactcaacagggggaagggttgcatggaggaggtggcttgagctgtcgcctattgatcaagagccaaatctatgttaggcatctatagatctttccgtgatagcttgttgattatttagtttcattgatatcattatcatcccagttctaccaacttgtattgtttccttgcttgttagcacttttgctagactaggcaggagtgaagtgaacctctcattgcttactggtaatgttagttaaaagatggccaggtttacccctgttcacttgggaaggtaaaattttaaaaaacggtggctagagaaggaaactattagctcagtctcagggtctttgaattttcatcattcatcttcccttggggaggtcagtgggtatttggcatagctatggggaacccaacagggcactaactagacagtcataacccctgtttttgaggacctcagagtccaacaaagaagtcaagactgataaaaatacaaacagcagataatataattaccaaggttaactggctgtgtaaaatattagaaaaagtggctgggcacggtagctcatccctgtaatcccagcactttgggaggccaaggcaggtggattgtctgaggtcaggagcttcagaccagcctgaccgacatggtgaaaccctgtctctactaaaaatacaaaaataagctgggcgtggtggcaggtgcctgtaatctcagctgcttaggaggccgaggcaggagaattgcttgaacctgggaggcggaggttgcagtgagccaagactgggccattgcactccagcctgggcaacaagagtgaaactccatctcaaaacaaacaaaagaatggactggcagggctcggtggctcatgcctgtaatcccagcactttgggaggccaaagcgggcggattacctgaggtcaggagtttgagaccagcctcaccaacatggtgaaaccccatctctactaaaaatacaaaaattagctgggcatggtggcacctgcctgtaatcccagctacttgggagactgaggcaggagaattgcttaaactgggaggtggaggttgcagtgagccaggattgtgccgctgcactgcatcctgggagacagagcaaggctccattgaaaaaaaaaaaaagaaaaaagaaaaatattagaaaaagaatggactggccaggtgcagtggctcacacttgtaataccagcactttggaaggccaaggcaggtggatcacctgaggtcaggagttcgagaccagcctgggcaacgtggtgaaacctcgtctctactaatgatacaaaacttagccaggcatggtggcacatgactgtaatcccagctactcaggaagttgaggcaggagaattgcttgaacccaggaggtggaggttgcagtgagctgagatcgtaccattgtactctagcctgggtgacaagtgaaactccgtctccaaaaaaaaaaaaaaaaaagaaaaagaaaaaaaacaatggaccaatgtagcaagaatggttgaagttagggaacttcaggtcactgctaatgatacactatgtcaagtaacagaggaggctgaggtatcccctgagctctagggaaggtaggcctccctcccagaccatttcattcactcatcaaatatttgttatatgctgggcatttttctaggtgctagggttaaagtagtgaacaaatcagataaaaatccttgccttcctggagcttacgttctagaagggggacttagacaaaaattaagtaattataaaatatgccatatgaccataaatattatgggaaaagtgaaacaagggagggggtaataagttccagtgattgatttcaaattaaaataggatagccaggtatgcctcactgggaggtgacagctgggcaaaggtatgtctgggttgggttgtgcctggaaagattggagaggtcattttattagggtccttccaacctcagtacaattaccaaatctctctcctttgttcccttgcacctccgttgcttttccttctggagttgatcacaagcccaaggaatgcctaggactcctggaatgtatgtatgcaaacctccagcttcagacccagctcgcccaacaacagatggctgttttggaacatttacaggcatctgtgacacaactggctcctgggaggggaagcaataactcttctctcccagccttatctcctaatccattgttaaatcacctgccccaattcagtaaatgaattgtggaacaaagt

SEQ ID NO: 7457 - DNA, 5258 bp, Homo sapiens
aaccctgtctctactaaaaatacaaaaattagctgggcgtggtggcacgtgactatagtcccagctacttgggaggctgaggcaggagaatcgcttgaacctgggaggcagaggttgcagtgagccaagatcgcaccaccacactccagcatggtgacagagtgagaatctgtctcaaaaaaaaaaaaaaaaagaatattataacttacagtgaataaagagaattaactattagtttatcagccagatttgcatagctcaccctattcatataaatgttttatacccaactggagagaatacatagaaaataaccaataagctatttaaatatctgtaattagtggatctgtaacagaatttccttcttaaaatatgacacaggtgttacttctaatttttccttatcaacctcttattctcctcttaccaagaataattactgatgtggtcccatctccaacctcttcatcctgggtccggctaatttcgatcatggacttggccgctggatgctggacttgaatctaaaaaggtagatcactagtgaattcacactattcaaagacctctgaactcatgaagcttggccctaactcttgggcttcttgcttctatatgtacttactttccctttaatgttttaccatatcttgaaagattaaaattggcaccccaaatagcttaagtaaaccactttccaaatcctttttgggaaaaagtgtattacatgaactcaactattaaagctgccagaggacagaacgatatcttttagcttatttactggaagcactattgtggctgaattgtgttcttcagtaagatacgttgaagccagctgggcatggtggctcacatctgtaatctcagcactttgggaggcggaggcaggtggatcgcctgaggtcaggagttcgagaccagcctggccaacatggggaaaccctgtctctactaaaagtacaaaaattaagccgggtgtggtggcatgcgcttgtaattccagctaatcaggaggctgaggcagaagaattgcttgaacccatgaggcggaggctgcagtgagccgagatcacatcactgtactccagcctgggtgacaagagcgagactccgtctcaaaaaaaaaaaaaaaaagatatgttgaagtcataactcccagaacctgtgaattttactttattttaaaatagggtttttgcagatgtaaccaagttagataaggtcattctgaattagggtgggctcgaagaccaatcaccggtgtccttgtgtaagagacacacaaggggaataacatgaagaccaaggcagagaccaagttcatgccaaagaaagccagcaaccatcagaagggagaagcggagttcttccctagagacttcagaaggagcatggccctactgacgcctttatttcagacttctagcttcattctataagataataaatttctgttgttgaagccaaccagtttctggtaatctgttatagcagccctaaaaaactaatcagagcctgtatcttaacaggtcctttatgtttacagaactgtcagaaagcaaaaaaacataaccaaaaacaaaacacacctctcgaagaatggcattgccatcattggtcatcacaatgcctcccattgggtccaaaagcatctaagatgaaagcaaaagttatatttaaagtgtcctagataacaggaagaaaaaaattgtagcctaagagttttaggaagagataagcctaccttcatcatggacttgggtcccaaacatgttcggatgatatctgcaatagtctaatggaaagggaacataaaatacgcaagcacaaatcagaggacagtgtgagaaatgttggagtaatagggaaaaggggcatgaacaacccacagagtcagtgttttattttattttaattttattttatttttagatatggggtctcaccatgttgctcgggctggtctcaaacccctgggcccaagtgatccacctgcctcagcctcccaaagtgttgggattagaggcgtgagccattccgcccagccagagtcagtgtttttaatgacacccctaaagcatggttagccatcactttagacatagcatgccactttagatataggatgtggctagctctgttgtttttctccccttgggaatgctttcagaatggatacagaaatgacttttcacaagaataagggggaaatggctcccagagcttgtttcccagcagtcctaattactagaagtccatgtcttagtatttctttccatgacggtggcctctacaccatcctaaatcagatataaggctatttcactatttcattcaaaagacatttaccgaatatctatccaagatctacggtgggcactaggaatacaaaagggaataaagtacttatgttcaagtaactcagtttagtatgggagacaaacacaaatagaatactataaaacaatacacagcaacagaataatgcacaagttaatacgagaagattatcagtcctaactcagaaggggagggcttcctttcccctaacatcatcaggaaaatgttctgaaagaggtcaacttttcctctgcctatttgcctactctataaagtctagatgcacaggacacatggctatgaccgaataccaggaaagatagctgcaggcaaactaccataaacacttaaaagatttgtgaccttggcagcattgatgtttccagattgaacttttcttccggattcacgctttgtgttctggcctaaaatagacaaaaacacaagtcaacagcccaggactgccccatcgtacacaagctatttatttccccgtctttgaaaaataagaatgcaggtttcatggtatatccacagagcaaagcttatcaaactctacactttaaataagtgcagtttattatatgtcaaccatatctcaaaaaactgtaaacatatgtccttatggctgttaacttccttctgtatttcaatccttggtatattaagaaataactttggaatcttggttaatacttttcttctaaccaaatattcctatatttacagcagggattcataacctgagatctatgaatgggccttagtgggatagcgaactccctgagattatgtgagaaaatgagagatactgcaatttttttttttttccggaaagaggatccacaactattatcagattctcaaagggctggtgaccctaagaaatgaccattcattgctttgcgtaagcagggaaagagtttggggattcacatttttctgcttggatagggggatcatactctaacaggtccagcataattagtgatagcgcccccacagcatactgtttagaacacactcaacagtttgcaagataaattatatagtcacctcataattggatgtaataagaaggcctcagtaacccatttaccatcactaagaactgactacatactttaactgggaggctaatcggtcacagccaactaatgccagagattaatgcagacctgaaaggagctttgcaaatacaccactcacccccaggccatgtcagtggagacaagccagtggttataaccaaaccaacataatgtttatttccttcctctctctaaattaccttcctttacaatttaagtctgtaaatctttcaatccagtcccatcaaaccaaaacacccacaatgcttaggatttacatctatctcagggagctgtaaccaaaaacctgcatggacctacaatccatcagaaagaaggcggcttttttttttcaaaatagcgtttttattttatttttttccttaaaagttatttcccaggtacagagataatgaataataactctgaaaggcagtcagtatacagaagacggtaagggaggggagatggctagccaggctctgcagatgaggtacagaagttacacacagaatggaaacataccaaaggaagacaatggaggtggtgctcatcagaaaaaaataagggaccgggcgcggtggctcacgcctgtaatctcagcactttgggaggccgaggtgggcggatcacctgagctcatcagcagttggagaccagcctggtcaacatggtgaaactccgtctctaccaaaaatacaaaaattagccgtgcgtggtggcgcgcgcctgtactcccagctactcgggaggctaaggcaggaggatcgcttgaacctgggaggcagaggttgcagtgaacagagatcgcgccactgcaacccagcctgggtgacagagcgagactttgtctcaaaatataaaaagaaaaaaaataagggatcttccaaaaggaaaaggtgaccagtcgagaaatctgggaaaacccaactggttagtgggaaagagtacaacgccggggacacggagggaacgattacatctaagatcagtgaggcaagtacggttacttcgggaaaagggattgctgttcaagagactgttactgaaaataaatgtaacgtaaagtgaccaaggatattacctatttaccagaccctctttaagcagtctaccgacttacctcatttaattctcacaattctactaggaaatactgttaactccgtaatacagattgaaacatttaaattaccgctactaagggatgggccaagaatataaagctagacctaactgaaaaaaaaacaaaaaaaaacgttattcgtgcagctacatagcgacaatcaggctagaaagggcgcaggggcgggggaagcgtgggggctgagggacagaacgcggagtgggaaagagcttcccaagacgagcacacgtcaaggaaagaggctcggcgagaataaggccagtttgagtttgtgcagagaagcgaacaggttaagagaagagaggaaagcgggacactgggcttccaaaatgaagacgatgattggaaggctcagtggcccggtcagtgggggacggagctggggcaacactgaaaagtatggacagaagagggcgaaaagggggtccatttcctggcatccccagaactcactgagcacgagcactggacgatggcccatcatggcgacgcgatgcagagccgggtacccagagctgggggaaccggcagaaccttctggagagagagaaccagacagaagcccagaaaacgctgcctcctcagggcttacacctcaacccgctactctcaaggtagtcgccaatcaccgcacccatctcattgatcggcacaaaaacagaccaattgacagc

SEQ ID NO: 7458 - DNA, 1032 bp, Homo sapiens
ggttccttgtcccactgccatgaaaattcaggcttgcagacaatttgaatggtgagtaagacagggttttattgggtgaaagggaagaaaagggggaaacagggactctcgctaggccagagtccctgctagagcgcttcctactcagcagttcgaatcccagtttccacacagaagagatggggccaggctccccgctctgcaaacatcgtgaacttcctgagactccacccctgtgggcagggtggttggagtttcttcagggactccttcccatgtggctgtctcaatgctgtggctacgttcatgtatttagttacctatgtgatgagctacagcaactactcagaatcagcagaaagatagctctgcaatttggcatcctcagcaagaatatgcaggaatgctcagggcctgtggtgaactaactctgcctagagtgtgcccctggtgatatttgtttgcaagtcattgacagaagtgaagtttccaccaagattcagctgagaccttgccgctgcaggctaagatcctcaactctctagtgtggacgtcacatctggaatcttgtgtcttctgattgaggccccctggcacacagtgaggaggtaagtttatactgaattgagctccaatattttgttgaagttcttcgcactgaattttattttgttttcttaggaattaggtgccctggcatccttccattatctgatcagacttgtatcgttccttggtgaaactgttgtctagtcttccagctgttccttttacggtctgtctgcttaccaagttgtcaattagagaaaaagtctacaagaagataccaggcagaggctctataattctatccttgtgctggccctgggggctgggaagttcaggtctcctcagaccactctctttgaaccaactctttgtcttgagtctccattacaaattatgcaaagacatcctccttagttttgtctttgtgttagtactttaattttatctgcttggaatcaggaggtttgtccaccccatgtttgg

SEQ ID NO: 7459 - DNA, 1032 bp, Homo sapiens; identical to SEQ ID NO: 7458

SEQ ID NO: 7460 - DNA, 3318 bp, Homo sapiens
agcccttccacacagccaatgctattatgaggcaaatttaatacacgaagcaacgtcagcttggccacacccatcatccgaaccagccgattattagctactgataactgtaaaaaggaaacatattgttatttttaggaataacatatataaaatatttcacattaaagtgatttaaaaggtttatttagacagccaaacactctcaaacaaactccttttgtacatttcacatatattgtctaaatattctacagtatgactatcagttttttgttattgttcctgggcaatagaaaatacagataaagctgagcgatcagacctcctctaactactaagacatttttaacacagcaacaacttgagaatgtaagttccacaagaatagtgctgttaaactctcagtcaaaacttaatacagtgccagacatataagagggacgcagtaaccatttcttgaatgaaggaatgaatgaactctttacccccatcatgaggtaaaaggttaccttagtaacacagtattttgcaaaataaaatgcttccttttcttaacaatgctttttttttctaatctactctcaatgtagtacatgtatgttcatcttcagaagaaactgtcatgtaaaaatttaaggcaacaatgactgcttgctagggctgcacagttactttttgtcaggttattttattgttttgtttaataataaattgatcctatgtaaccatttcccagattgcaatacctacctgtattaatcgtttgcatttctccagattttccaatttaataatctgatttttatccagaatcaaagtgtgaatatcagcttcacagggtaaatttggacctaatttctgtagtccctgtcctgaccaattgaccactgatccttgaaaagaaacggaaatgttagaaaacacaaataaaataaaacatgtacaacagctaagcatagggctggaattataaaatctctataccatttcaagttaaagaacagtagagcataataaatatcaacattgtaaaattaaagcaatcttgagttctaaatgaccagattgaattactcatttttcttcagaaatatcaaattaaaactagacgtgtgatattctcctcaagttgctaagatatactttgaaaattttcacatttaaatatggacgattacttccatttgttgtgcctaagtaatgatactattgtttaaatgttactaaacttttgactgcaatccaccagcttacagcctaactaccaatatatcctaaagtgcccaaactgtgattttgaaaatcaaagtatagttcaactaattctcccataaaataggataatacacccatttccctagcttgatatgagaattaaaagagaaaccatatgaatagtacttagccccgttcctgccaccgggcactcaataaggcactttagtataacatagacgttcaaaccctggctccaccaattaaccattgtggtatattaggcaaattattgatttcttttgggctcccttttctactctgtaaagtggggataatacctgccttataaatgtagttctacagagaaaatgagataatgtaaaaaaaaaaacaaaaaaaaaaaggactgagaacatcgcctgggtcatacaaagtgctctgtaaatgttaactgctattaacagttaagtagccctggtgggcttgagaggtgtggtttaagaaaagccgatctccaaagagggcggggccagagaaacggccaatttcaaatttacacccagattaggactactgcaggaaataattatgccagattgctctcctggaggatttcaacgttttcccgttgtctaatggctcttagcatgtgaggagtcgtgagcccctctgaaaaattgatgaaaggggtgtgctgtctcagaaaagtgcacagcctttgtacacaattccaaggggtcgacagagaggtctgagaaccatccaccaactcttcccccaagaatttacagctcccagaaaatgcactcctggtctaagccatgaagacgggcctcgacccctgggccctgtccccgatttagaggactgactgctgccaagcctcggagctgtaaccaaaacaaaagcagctcgcgtccggcgccccaaagaggtaggtatcttcaggccacagaagcacccacacagtcctgtgctctactgggcagcgaccaaactcgatcctaggacccgtgtgcaagaacaaggagtacagaactgcgggctctggatcatcccttagattttatcacggccactggccacctccgaggaagggttcaaagccagactaggcagcggtctctgagggaaggttttcctgatggttccaggaaccaagaagagagggagatgtgtgaagcgaaagagggagatcccaaacatttcgcttaggcacccatgactcaaagtaaatggtcaagaaaggtcatcgcagcccgaaatccaccgcctcctcagcatcgggagcgcgggagccagggcgccgggccgcgcgaaggcttctgggggctgtagtcccccgctcggccctcaccgcgacgccggagagctgggaacggcaggtgaactacaactcccagagggtagcccgcctccgcgacgaccacagatccgcatcaaaagaactggtccagaactgcacatctaaacctaggttttctgctctccactatttaattcagctccgtgaagtaaaccttaggactcggggtagggatcgccttaccttctccgggaggcaaagccgcgtccacgcgcgccaccgccatatttgctgcttgctaataataccaggcaaccgtcctcccgcggctctgtggagcttgtaatctgaaggagggagccggaaactataactcccaggatgcacggctcccagacggcccaattggctgcttacgcctaatgatgtgaagctggagttagaatctgagggtagtgagctcagggaccctggcccactcgcttatttgacagatgagtcaactgcgttattagatgatcatttcacttccttgtccaggcgtttgcgaaatttgacacttttaccatcgggatgattgtaaggaagctacttaatgcagactgcattttacaactcattgctggaagtctctgtgggggctgctccattcttttgataattgtgaataagttgaaagttttcaactccgctataggaatgaccgatcttgttgagatcataaaagtggatacattttatttgaaattttagttaagtaaaagtaaagtatgccgaaatagaaactttta

SEQ ID NO: 7461 - DNA, 4708 bp, Homo sapiens
atcgagatgctgtagagctgtgcagctattgatctgttccatggcctatcacaagaaaagcatcacactatttaatgaaaacaaaatcaaaaaataaaattattccctagttctttgcagctgaaagagtgtcttccctcctcttattattagaagcagagtagaagaacttagcaagagaaaaggggcagtactaacagaatttagtagattgtcaggttgtaaacgtacactttcattatctctctatgagtagagggctaccaagtagttcataccatccaagatctttacagcttgaaaaaaaacatagtaatggccaggcgctatggctcacacctgtaatcccagcactttgggaggccgaggtgggtggacagcctgaggtcaggagttcgagaccagcctggccaacatggcgaaaccctgtctctactaaaaaaatactaaaaattagccaggcatggtgggcaggcgcctgtaatcccagttactcttgaggctgaggcaggagaattgcttaaacccaggaggcagaggttgcagtgagccaagatcgtgccactgcactccagcctggacaataagagcaaaactccatcaaaaaaaaaaaaaaaacaaaagaaaccatagtaataatatatgacagttggtggtatagaatagagtttacaagtttagattaaaaccaaacagcctggatttacattctggccctgcaacttcctagctgtgtgaccttgagcaagttacttttctgtgctttagttccttcacctttataacacgcataatgtctatatctacttcgcaggctaccatgagattgaataagttaatacagataaatgtttagaacagtagctcagatacattaatggctcaataaaaggcagctattggtaatctagtcctctcagctagcatgccaaaaaataagacgcagaaatatgtattaatttacccaaaattacacagttactaagtagtgcaagtaggactagaattcagatctcctaacttttaaaactgtatattctcccttatagcattaaacatttacttaaagcttaattcagcatgatatagtctccctcctaaacactctatggtttgatctacttttttctaagtacaatatagattctttgttcaaatttaaaagaatattatgtcatattatatgtttcaaaatgagatttatttttagtttattttaacagagattatccctggagagtgggagtgggtactttcactttttaatttgacttatttctacattgcttgaattttttttacgcagaatagttttgtaaacaaaaaagaaaccattcaccttaagattatttcctgccaaattcagccattccagatgtactagttcctttagcccttccacacagccaatgctattatgaggcaaatttaatacacgaagcaacgtcagcttggccacacccatcatccgaaccagccgattattagctactgataactgtaaaaaggaaacatattgttatttttaggaataacatatataaaatatttcacattaaagtgatttaaaaggtttatttagacagccaaacactctcaaacaaactccttttgtacatttcacatatattgtctaaatattctacagtatgactatcagttttttgttattgttcctgggcaatagaaaatacagataaagctgagcgatcagacctcctctaactactaagacatttttaacacagcaacaacttgagaatgtaagttccacaagaatagtgctgttaaactctcagtcaaaacttaatacagtgccagacatataagagggacgcagtaaccatttcttgaatgaaggaatgaatgaactctttacccccatcatgaggtaaaaggttaccttagtaacacagtattttgcaaaataaaatgcttccttttcttaacaatgctttttttttctaatctactctcaatgtagtacatgtatgttcatcttcagaagaaactgtcatgtaaaaatttaaggcaacaatgactgcttgctagggctgcacagttactttttgtcaggttattttattgttttgtttaataataaattgatcctatgtaaccatttcccagattgcaatacctacctgtattaatcgtttgcatttctccagattttccaatttaataatctgatttttatccagaatcaaagtgtgaatatcagcttcacagggtaaatttggacctaatttctgtagtccctgtcctgaccaattgaccactgatccttgaaaagaaacggaaatgttagaaaacacaaataaaataaaacatgtacaacagctaagcatagggctggaattataaaatctctataccatttcaagttaaagaacagtagagcataataaatatcaacattgtaaaattaaagcaatcttgagttctaaatgaccagattgaattactcatttttcttcagaaatatcaaattaaaactagacgtgtgatattctcctcaagttgctaagatatactttgaaaattttcacatttaaatatggacgattacttccatttgttgtgcctaagtaatgatactattgcttaaatgttactaaacttttgactgcaatccaccagcttacagcctaactaccaatatatcctaaagtgcccaaactgtgattttgaaaatcaaagtatagttcaactaattctcccataaaataggataatacacccatttccctagcttgatatgagaattaaaagagaaaccatatgaatagtacttagccccgttcctgccaccgggcactcaataaggcactttagtataacatagacgttcaaaccctggctccaccaattaaccattgtggtatattaggcaaattattgatttcttttgggctcccttttctactctgtaaagtggggataatacctgccttataaatgtagttctacagagaaaatgagataatgtaaaaaaaaaaacaaaaaaaaaaaggactgagaacatcgcctgggtcatacaaagtgctctgtaaatgttaactgctattaacagttaagtagccctggtgggcttgagaggtgtggtttaagaaaagccgatctccaaagagggcggggccagagaaacggccaatttcaaatttacacccagattaggactactgcaggaaataattatgccagattgctctcctggaggatttcaacgttttcccgttgtctaatggctcttagcatgtgaggagtcgtgagcccctctgaaaaattgatgaaaggggtgtgctgtctcagaaaagtgcacagcctttgtacacaattccaaggggtcgacagagaggtctgagaaccatccaccaactcttcccccaagaatttacagctcccagaaaatgcactcctggtctaagccatgaagacgggcctcgacccctgggccctgtccccgatttagaggactgactgctgccaagcctcggagctgtaaccaaaacaaaagcagctcgcgtccggcgccccaaagaggtaggtatcttcaggccacagaagcacccacacagtcctgtgctctactgggcagcgaccaaactcgatcctaggacccgtgtgcaagaacaaggagtacagaactgcgggctctggatcatcccttagattttatcacggccactggccacctccgaggaagggttcaaagccagactaggcagcggtctctgagggaaggttttcctgatggttccaggaaccaagaagagagggagatgtgtgaagcgaaagagggagatcccaaacatttcgcttaggcacccatgactcaaagtaaatggtcaagaaaggtcatcgcagcccgaaatccaccgcctcctcagcatcgggagcgcgggagccagggcgccgggccgcgcgaaggcttctgggggctgtagtcccccgctcggccctcaccgcgacgccggagagctgggaacggcaggtgaactacaactcccagagggtagcccgcctccgcgacgaccacagatccgcatcaaaagaactggtccagaactgcacatctaaacctaggttttctgctctccactatttaattcagctccgtgaagtaaaccttaggactcggggtagggatcgccttaccttctccgggaggcaaagccgcgtccacgcgcgccaccgccatatttgctgcttgctaataataccaggcaaccgtcctcccgcggctctgtggagcttgtagtctgaaggagggagccggaaactataactcccaggatgcacggctcccagacggcccaattggctgcttacgcctaatgatgtgaagctggagttagaatctgagggtagtgagctcagggaccctggcccactcgcttatttgacagatgagtcaactgcgttattagatgatcatttcacttccttgtccaggcgtttgcgaaatttgacacttttaccatcgggatgattgtaaggaagctacttaatgcagactgcattttacaactcattgctggaagtctctgtgggggctgctccattcttttgatattgtgaataagttgaaagttttcaactccgctataggaatgaccgatcttgttgagatcataaaagtggatacattttatttgaaattttagttaagtaaaagtaaagtatgccgaaatagaaactttta

SEQ ID NO: 7462 - DNA, 3051 bp, Homo sapiens
ttcaacagcaacacaggtttattactagcaaaaccctgcggagggggaaaccagcttagtgtcagtgcccactgccgctcacaggctggggtaatcatagcgctgggagggagggctctggacagtatagcttgctgctcagtagaagatgataaggatgttcctgaagtcaggctgttgggcctttgcccagcaggatgtgataaggatgtttctgcagtcaggtggttaggacatttctcacagcccgagttcccatggaatgttttactccaaccaggatctgcaaaacagcaaggggtttaccaaatagtgcagcttagactaacagtaacctctcccaggtagacagttctataaagtaaacttcccttgagcacctacactgtaccagacatggtgctaggacccaggccacaggaggaacaggacagatgaggcccctgccatcctggtgctcttgtctgatgaaggaagctaacaggtcgtaagaccaggtcagatggtggtggtaatgaaagacattaccagagtgagatgagctagaaagaaactgagggagctgttccaaacacagtgacagggagagacccctccaagaggtgacctttgagcagcaacctgagagatgttgggtggggggaggcatggaaaaggagctgcccctgaagccatcccaggagtaaagacccagcacgaggtgggcaacagaatggcctgacctgtgcgtccttcatgcttccttcctcagtggtgcccaaacagaaacatggggcaattccacgcagggtccatggagggagcagaaagcagccgcaatgaagagccacggtggggatgaaatctggcccaacagtgaagctagaagcaggtgctgcttaccactcaccaaaacacaggtcatgaagcatacccagcccctgaaggcacgtccagggccagaccagctggctgggctgccagcatcctagtagagatcccagaagatcagataagctggttgaaggtgggggagaaaaggaaagcttcagaaaattccataggacccatgacacttagcatggactttccctgagtgggatctgtttggcattgctggttctaaaaagttggtcccaccacccccacctgcccggtgcccgaccaggggaaaacctgggataaggtccacagaaacaatccctgtggaatgggaaagggtgttctcatccaaaaccaagggaggaatcccacaaaacaccactcataaggagcagaggggcctacagggagaaacaggattctgctgctcgctggggaatctgcttttcagcaggaaaaggaacatgcaggatgcagaagcaaagtggaccctgagctgtggggttaggggagctagctggtgctgacactgtcagggatgagccacaataggaggcttagaaccccttacttagaacacactaactcagagggcacctgagagtaacctgagatggtccctaaagacttttcatccaagcaggatccctcccttgccatctccagacctgcccgacaagctccctccctggtctcctggctgttgttcactccttccaggaagccttccacagtcatctctaaaacgtggctgactgtccctcctttatccagaaccttccatggctccccagagccctccagatcaagttcaagttctttgatcagacacttgatctcaagctgcattctacctcctgaattaagatcccagagatgcccaccttgctcggcacaagtgcatcaatgaagtccaaagtcttgaatgtggccttggccttgaggacgtcaacaccctggctagtgagggtgcagtgccgctccaggatgatggtgtctaaagttgagcaccaggtcgcaggcccgcagaagcatctcccctcaggagtgaggtagtacaggaagtctgtgcacaggcagatctgctggtgccattacactatgagggcatggagctccaagatggtggcaacatagtcactagaattcctacagggtaaggctggggagaggaagtagctgcataacacatatgataccctggaagcacttcccagccagagtctcaggaccacattacatccagatacaggtgccctctgagcacacttctctctctgcctcccactctgagctgcctcctggccccacatgggcagcctggcccaagggttggagcccagcaagtgttcagtccatggtgttgactgctccctgggccaggagagcccttggtgactctctgactcctcctgtggaacctctgactctgccttgggacctcccaattcccatgggaagcccccatggctctggattgccccaccttgcctgggatcctccagccccacaggccttacttgatgccttagccctcccagaacatgacatgttcctcagaatgtggctgatgtccagggccatctgtggatgtttgctgggggcttcttgctgttctcctttatggtctgtagggcagggcaaggccaaaaggagaaaccaatccaacctcagaatggacaaaatgctcactgccacaaacggcaaccacttacagtcagcagtgcttctggaaacaaaggtttcattctgcaaaacgctccttgttggcttctttctgaagccagggaaggataccaagcccagcttacctgcagtgcctgcattagcatctgtgcctaggatgtgcgatgggcccctgttcccactgcagggttgacgttccctccagctggagacctgggctcctgacaccaccgggcctgtttgtcctgctctggatgagggtggaaaggctgtatctggcattttcctaggtccttagtttccaccttctagacatccagcaggagtgaccatgcccagccccacacctgaaatgggactcccttgtagagcagctgagacatctacagacagaagagtgctctggtgagacaggccacaggggtccccagggagggttgggggccagaagattctgaaggcttccagtcttgggctctgtggttcctcaaagaggttaggttt

SEQ ID NO: 7463 - DNA, 3047 bp, Homo sapiens
ttcaacagcaacacaggtttattactagcaaaaccctgcggagggggaaaccagcttagtgtcagcgcccactgccacttacaggctggggtaatcatggggctgggagggagggctctggacagtatagcttgctgctcagtagaagatgataaggatgttcctgaagtcaggctgttgggcccttgcccagcaggatgtgataaggatgtttctgcagtcaggtggttaggatgtttctcacagcccgagttcccatggaatgttttactctgaccaggatctgcaaaacatcaaggggtttaccaaatagtgcagcttagactaacagtaacctctcccaggtagacagttcttcaacagtaaacttcccttgagcatctacactgtaccagacatggtgctaggacccaggccacaggaggaacaagacagatgaggcccctgccatcctggtgctcatgtctgatgaaggaagctaacaggtcataagactaggtcagatggtggtggtaatgaaagacattaccagagtgagatgagctagaaagaaactgagggagctgttccaaacacagtcacagggagagacccctccaagaggtgacctgtgagcagcaacctgagagatgtggggtggggggaggcatggaaaaggagctgcccctgaagccatcccaggagtaaagacccagcacgaggtgggcaacagaatggcctgacctgtgcatccttcatgcttccttcctcagtggtgcccaaacagaaacatggggcaattccatgcagggtccatagagggagcagaaagcagctgcaatgaagaaccacggtggggatgaaatctggcccaaaagtgaagctagaagcaggtgctgcttatcactcaccacaacacaggtcataaagcataaccagcacctgaaggcacgtccagggccagaccagctggctgggctgccagcatcctagtagagatcccaggagatcagataagctggttgaaggtgggggagaaaaggaaagcttcagaaaattccataggacccatgacacttagcatgaacttcccctgagtgggatctgtttgacattgctggttctaaagagttggtcccaccacccccacctgcccggtgcccgaccaggggaaaacctggggtaaggtccacagaaacaatccctgtggaacgggaaagggtgttctcatccaaaaccaagggaggaatcccacaaaacaccactcatatggagcagaggggcctgcagggagaaacaggattctgctgctcattggggaatctgcttttcagcaggaaaggggaacatgcaggatacagaagcaaagtggaccctgagctgtggggttaggggagctggtgctgacactgtcagggataagccacaataggaggcttaaaaccccttacttagaacacactaactcagagggcacctgagtgtaacctgagatggtccctgaagacttttcatccaagcaggatccctcccttgccatctccagacctgccccacaagctccctccctggtctcctggctcttgttcactccttccaggaagacttccacagtcatttctaaaacgtggctgactgaccctcctttatccagaaccttccatggctccccagagccctccagatcaagttcaagttctttgatcagacacctgatctcaagctgtattctgcctcctgaattaagataccagagatgcccaccttgctcagcacaagtgcatcaatgaagtccaaagtcttgaatgtggccctggccttgaggatgtcaacactctggctagtgagggtgcagtgctgctccaggatgatggtgtctaaagttgtgcaccaggtcataggccctgcagaaacatctcccctcaggagtgaggtagtacaggaagtccatgcacaggcagatctgctggtgccattacactatgagggcatggagctccaagatggtggcaacatagtcactagaattcctacagggtaaggctggggagaggaagtaactgcataacacatatgataccctggaagcacttcccagccagtctcaggaccacattacatccagatacaggtgccctctgagcacacttctctgcctcccactctgagctgcctcctggccccacatgggcagcctggcccagggcttggagcccagcaggtgttcagtccatggtgttgactgctccctgggccaggagagcccttggtgactctgtgactcctcctgtggaacctctgactctgccttgggacctcccaattcccatggaaagcccccatggctctggattgccccacgttgcctgggatcatccagccccgtaggcctaacttgatgccttagccctcccagaacatgacatgtttctcagaatgtggctgatgtccagggccatctgtggatgtttgctgggggcctcttgctgttctcctttatggtctgtagggcagggcaaggccaaaagaagaaaccaatccaacctcagaatggacaaaatgctcactgccacaaacggcaaccacctacagtcagcagtgcttctggatggaaaagaggtttcattctgcaaaacgctccttgttggcttctttctgaagccagggaagggtaccaagcccagcttacctgcagtgcctacattagcatctgtgcctaggatgtgcgatgggcccctgctcccactgcagggttgacgttccctccagctggagacctgggctcctgacaccacctggcctgtttgtcctgctctggatgagggtggaaaggctgtatctggcattttcctaggtccttagtttccatcttctagacatccagcaggagtgaccatgcccagccccacacctgaaatgggactcccttgtagagccgctgagacatctacagacagaagagtgctctggtgagacaggccacaggggtccccagggagggttgggggccagcagattctgaaggtttccagtcttgggctctgtggttcctcaaagaggttaggttt

SEQ ID NO: 7464 - DNA, 3047 bp, Homo sapiens; identical to SEQ ID NO: 7463

SEQ ID NO: 7465 - DNA, 220 bp, Homo sapiens
ctgcagacaccggtcatggaggccctcccctctccatattaccctcttgctgctcctatatttcttctagttattaaacaatttgggccatttttctgtgcatccgatctgacatttttgctctcagatgaaacatgataaaggaagccaagccgccagtattcctggaggggaccttgggtgctgggtcttgggctccagggccctaatgggactgaac

SEQ ID NO: 7466 - DNA, 1564 bp, Homo sapiens
atctgactttttttttattttttattgatcattcttgggtgtttctcgcagagggggatttggcagggtcataggacaatagtggagggaaggtcagcagataaacaagtgaacaaaggtctctggttttcctaggcagaggaccctgcggccttccgcagtgtttgtgtccctgggtacttaagagtagggagtggtgatgactcttaatgagcatgctgccttcaagcatctgtttaacaaagcacatcttgcaccgcccttaatccatttaaccctgagtggacacagcacatgtttcagagagctcagggttgggggtaaggtcatagatcaacaggatcccaaggcagaagaatttttcttagtacagaacaaaatgaaaagtctcccatgtctacttctttctacacagacacagcaaccatccgatttctcaatcttttccacacctttcccccttttctattccacaaaaccgccattgtcatcatggcccgttctcaatgagctgttgggtacacctcccagacggggtggtggccgggcagaggggctcctcacttcccagtaggggcggccgggcagaggcgcccctcacctcccggacggggcggctggccgggcggggggctggccccccactccctcccggatggggcggctggcctgccgggggctgactcccacctccctctcggacggggtggctgccgggcggaggggctcctcacttcccagacgaggtggctgccaggcggtgacgctcctcacttctcagacggggcggctgccaggccgagggtctcctcacttctcagacggggcggccgggcagagacgctcctcacctcccggatggggtcacggccgggcagaggcgctcctcacatcccagacggggcggtggggcagaggtgctccccacatctcagacgatgggcggccgggcagagacgctcctcacttcctagatgggatggcggccgggtagaggcactcctcacttcctagatgggatggcggccgggcagagatgctcctcactttccagactgggcagccaggcagaggggctcctcacatcccagacgatgggcggccaggcagagacgctcctcacttcccagatggggtggcggccgggcagaggctgcaatctcagcactttgggaggccaaggcaggcggctgggaggtggaggttgtagcgagccgagatcacgccactgcactccagcctgggcaccattgagcactgagtgaacgagactccgtctgcaatcccagcaccttgggaggccgaggctggtggatcactcgcggttaggagctggagaccagcccggccaacacagcgaaaccccgtctccaccaaaaaaataggaaaaccagtcaggcgtggcggcgcgcgcctgcaatcgcaggcactcggcaggctgaggcaggagaatcaggcagggaggttgcagtgagccgagatggcggcagtacagtccagctttggctcggcatcagagggagaccgtggaaagagagggagagggagaccatggggagaggga

SEQ ID NO: 7467 - DNA, 3013 bp, Homo sapiens
agttttatttttctctgcaaagttttagttttcattatagtcttcttacacacttttgttaaatgtatccctatgtatttggatgctattataaaaggcattcaaaattttttatcttcaaatgctacataattatgcatgaatgtactatgggtaactttgggtttaaccaacatggattcacagaactttttggatttgtatatttacatctttcctccaacttgggaagtttttggccactacgtcttcaaataatttttctgcccttttctctttcttttgtctggagatttcaataatgtatatgtgtttggtgcatggtgtcttttaggctctgtttactttttctcactcttatcttttgctccttaactcgatagtttcaatggacttatcttcaagtttgctaattccttcttctgccttttcaagtctgcttttgtatccttctagtcaatttttctgttaggttactctatttttcagctccagaatttctatttggttctctttacaattccaatctctttgttgatattcttatttgtttatatattgttttcttgatttcctttatttccttgtctgtgttttcctttagccctttaagcatatttaagacagctgttttgaaatcttaatttagtaagtctgagacctgtgttttttcaaagatgagtctggatattcattttcttgctttgaatgggctatgcgtgttttcccatttcctatatgctttgtaagtttttgttgaaaactgcaatttggattaaatggccacctctcccaatctttgaagaatggctctgcacagaggaagacctttgttaatcactctaatgtaaatgcttatggtctttggacatacaccttccatgggcctatgtgtgcactatttttccaaatatcccacatagacagctgttattaatgtcttaatttccctaggagattcactcctgcctcttctagaggcctcagcattctattgcattctttaatcaaaaatctctttccgctggcatccctgcttctgtagtttggtacgtttttcacaagccttacccactcttcctgcagatttcactagcctgagatttgagctagtcagttttgccatccaagttctgatttaggccacacaaagaccaactcctcagccacccccaacagatgaggatgtaacaaatctggcctctgcattttataagttgaggtttcatggctgctaggtatatttcataacttattttatttttagctgttactccactctttactattaaaacttcctaagcatacagatatttccaaggaaggtcttggagaaaattaagtagaggcagaaaaaagctggcatagagatccacatggagatttggaggaagtcatggcgttacgacagtaaaataaaagtttctttgtcctcatgcaattcaatcgttcttttaacaggcatttactgtgtgcttactctgtaagagtcattggagataaagcagtgacaaagtggaaaaaaatcctgccctcatcaaacttacaatctagcaatgaaggagagaaatacacaaataaggatggtatttggcatgctgaatgataatgagggctgcaagagaaatggggcaggaagttaatagggggtggtggtttgggggtgggtgtcaacactgttcctaatggatgatcactacaagtgatctgggaagacattattgacaaggtgacatttcagcagagattggaacagaagagagaccatcatttgggtatcaggggtagcaattcaaggcagagggaagagcaaatgccaagccctggggcagatgcatcttcgtgcattcaaggagcagcaaggtgaccttttatactggagcagagtgagcgaaggcccagctctggagttagatcagagagataaccagtggccagctcagcctggacttcatgggtgatgggcataatttggcttctactctgatgagtggaaatatattggggttttgagctggggagtgacctgggaggctattctggtgctggctggagcacagactgggtgcaagggcaggagaaggaatattgttagtaggcagccacagtcatcctgtcaagaagtgatggtgccaagaacacatgaaggcaaagaagtggtaagacacaggcacatcctgaaggtagggatagaggctttgctgatgggatggagaagagacaaccagggaataagtcaagaaataccacaaagctgtattctgaacacctgtcaggatgatgttgctttcacagcaaaggggtactgagggacagtaagtttggagaagtctaaggtttggttctgacacgtcaattgtccacatgaacagtttcagaggagttagttttcaggggccttttaaatatcaaagtagaaataaccagtgctcaggaggatataagggtctgaggctcaagagaaaggtcatagctgcaggtataaatgtggtggctcatcggggagtgagctgtccaagttctgtgcagatttcaaggggtaaattcaatgagcctgtttgtggccacagccttcctcaggcttcccagtatccacattaccacaaaaagcctcagtggtgatctacttgagtctgtccccacatgttggggcttgagttgtgcagaatccccatcttgctccctttctccaacatgacaagaagacctcagttagccaaaatgtcctgaagagggctgaggaatttggtctgaatcatcccacaaattcatggtacaggaaataagtgctgctcttgtcgttggctctagaaagatgatatcggccgggcgcagtggctgatgcctgtaatcccagcacttagggaggccgaggcaggcggatcatgaggtcaggagatcaagaccatcctggctaatacggtgaaatcccatctctactaaaaatacaaaaaattagccgagcatggttgtgggtgcctgtagtcccagctactccggaggctgaggcagg

SEQ ID NO: 7468 - DNA, 1564 bp, Homo sapiens; identical to SEQ ID NO: 7466

SEQ ID NO: 7469 - DNA, 3013 bp, Homo sapiens; identical to SEQ ID NO: 7467

SEQ ID NO: 7470 - DNA, 22927 bp, Homo sapiens
caaatattaagtaaataatttaatgatagaacactgaaatttctttagacacagtattttcaagttatatttctgcctggagtacagatatgaaatagcacaaactgtactctgaattaagcaaacagaatgaataaaaaaaaaatattctcccaacctaagtttccgttcctcatttccacttgcctcagactctttctattgaacatatctagttaaatctctaatggacggcctgtgggaagatttactgccaacagggatgactgacttctttccggacactgagcaggggactgtgggctctgaagcagtttacttcctgtggaaagccagtcccatttctattttacttcgatccaggcctattcagataaagcaccactcagtagctactgaccatttaagtatggagagaaaagcaaagtagaaaaatggttttcacttaaagaaaaagcaaatggaagaccagccataatagctccatggcacaagagacatgacagggatctcctccccagatgtcccctgatgtttgtcagcctctcatatccctggccctctggcttctggctctgtgattacagttgccacagaggattcatggacagcaaaaagcttaaggaacctggaggttttgtacaacatgtacattctgctgacagaaacacatacatggtatggactattattaaaattgatagcctgcttgcactcagtatacaggctgcttaggaacactttattgggagataccctgctggtgttggagcagcacaaaatgatgaggctaacttaagtagtgacaagaatgatcctcttataccatatggccaaagaacagctgtccatccccaagtctatgggggatcagatgaagtgtggagtttggttggttggtcagtgaatttttggtcagtgaatacatacatatggcatagtgaagtacaattgcttttcttttctttttttttttgagatgaagtctcgctgtgtcacccagtctggagtgcagtggcacaatctcagttcactgcaacctctgcctcccgggttcaagcgattctcctgcctcagcctcctgagtagctgggattacaggcacgtgccaccacgcccagctaatttttgtatttttagtagagatggggtttcaccatgttggtcaggctgttctcgaactcctgaccttgtgacccgcccgcctcagcctcccaaagtgctgggattataggcgtgagccactgcgcctggcctacaattgcttttcttatgttccattgctttataaactcatatcacatatacagtcatcattaagacttactgactgcaagtaccaaatgtagaagcctccaacactgtaaaagcatggcaagacaggcttcaggatgggtcagacctgacattactcactgtggagtacaagcactgagttctttctagttctctctgagagaggttcacccactgtcacacaatcaccaaacagggaagaaggcttctcttggctttggctctcactgttccttggaagggtttctgattggtggaggcagagcagacagtgagtggcccaaagtggattgatggccccaggccaggacccagagacaaaaggtaagcgctgttgctagccacatgggtcttcatcagagcacagcagcaccgcctaccactcagccccttcctcaatctaaagcccaagaagggaagttctttgggagagaagggaagctggtaaaggccatgctatttcccaaaggcctgaccctctgggccacccctagcaatatagtcagcgtggaatatgatcccacctagaaaatgaatggcactattttaagagtagagcatcttggggaaatctaggatacctactctgaagcttttactcaagtgtggaagccacaccagtatgcaggtatactgtcttacaaatctagaaggatattttagttttcaagcaccccatgaacactttttaaaaaattcaaccactggctgggcatggtggctcacaccagtaatcccagcactttgggaggccgaggtgggcggatcacttgaggtcaggagttcgagaccaacctggacaacatggtgaaacctcgtctctacaaaaaataccaaaaaaaattagctggacatggtggcgcgtacctgtaatcccagctactcaggaggctgaggtgagagaatcgcttgaacccaggaggcggaggttgcagtgagccgagatcgtgccactgcactccagtctgggtgacagagtgagactctgtatcaaaaaaataaaaaataatcaaccacttagaaaagtacacacattaagcagaccctacatctagaatgggttaagcaaccatttataagcatcttcatgagaaatgatcacctctgggtttttctgatatttgaaataaacaaggtaccaaactgtatttccctcaacacataactgtccaaattgcatgtacaagtggaggtttacgtaaaagccctgacagaactatattccaccttttgaattaggtgcataaggctactgaccactctatattttaccaagagcaagagcggtcacttttctatttcagtacaattatggacagaaatgatatgatgcaaaatagaggttcttccataaagtttaagatgtagggtagaagggaagacaaaaagcaaaattcccaagaaatcagaataacttcacactggtcttgtactccaagaaaccctgagatgaactgtagtcctcaaacacctgtgcttggctcaggcccaccaagacacttcagtatgcttccaactggttcatcatcaacttcctgctatattcgtaggccaaaaagagtgctccattggcagggaatgctcgaatcatagtaggtttcagtccagaatataaggccgttattcctagcaaataaaagggcggtcaaagactgcaacaatccctcctttggggatacccacgcagctgcatagcataggtatatttacacatgcaaacccagacaacagtgctaaaaaccaacaagtcatagaaggatgcattcccagcttttcctaaatagactaatggaaacaaggacaagtatcaggtctcctggcaaaactgactgatgctcaggtaacataccccaattccacgcttggttaactcttagtatatggatggggcagagctgaggcctgagatggccagacagaggcaaccatggagatagaggtggcagcagctttgcagcttcacctgggcagtggcaggaacaccaaccttgaagttggagacctgtgtatagtattagtactgcccagggtggttatgaagattgaattagataagggaggtgtaagtactttgtaaaactttacatgttatacaaatgtaagggaggattactatgagtaacagacaaggtatctgtcctctatttgggacacaaagtttctgtgttactgtcctctttctttttacaatcaaaacagagttcatatctcagattttttttttttttttttttttgagacagagtctcgctgttgcccaggctggagtgcagtggtgcaatctcagctcactgcaagctccgcctcccaggttgacgccattctcctgtctcagcctcccgagtagctgggactacaggtgcctgccaccacgcctggctgatttttttggtatttttagtagagacggggtttcaccgtgttagccaggatggtctcgatctcctgacctcatgatccacctgcctcagcctcccaaagtgctgggatcacaggcatgagccaccacgcccggcccgtatctcagattttaagatgtatatagatgcttgaaaaacaggtatttactcaccttcatttttcacaacatttataaaggttctgataaatcctgcctgttttccagacatggaaagaacttgaattctggatttgatacaatccactgggtataccgcaagccagaggcaaatcccaccaactccaccacttaacatcaaaggtacagggcctagagaaaaaaaaaatagcaaatggtattttgtctcaagaacagctgatgtgacatttccagaggtcaatgtagtaatggctgcaggtagatgaaaataaaaatgctaatgctacagaatacaattctttgaggaaaactgtcaaagctcttgttcccaagctctaagaacacagggttttgtttggtagcccaggtctactcctgggtcttgccaagtacaagaagccttagtgagggttatatttcgcttggtcactgaggtgtcaagggctggcccacacgaaccagcaggcctccagctgagtggcaaccccctacagtggggagaagacaggccaaacacaatctatgtcttttttcaactttctcactcttaagtattttaatagccctgattcttcatttatcattaaaagccaaaattgtttttattaaacatagcaattaagtctgggagcttgactaaccacagaatagattcaacacacactgagggagatggtaagaaaaactcacttatgtgagccaaacattgcatgtagttgtaccaaccagctaaacacgataagctacaaagaactatggttttcactgctctcaaaacactattaagatttccaagttttaaccttatttcaagattatttataggtgattccccaattgggaaagtaatttctggatttcttctcccctaaaatagatccagaaaaattaaaaaactttattccagtaagaaagtttgggatgtactgcttcaggccctgtcctaaggaaattatcaggcctggagggtgggtgctatcaactgcctgccaccatgttaccttcaggcatccagaagcttccctgtgccagatggagccaccaatgtggggaggagagcacaaagggcagagaatccacagaaaccatacctgcagggagcaaacaccatcacaccccactgctgtcaatgcaaacacatttacctaattcatcttttgatctccctgatgcaaaaaaggaccggctcagttcatagccaccgaagaagaagaaatagcctggtacttctcgaagtaaagtgcttgagagtccatggtagaaccccaaggggccatctttcctaagaatacttttgatgacagaccacactgtactgggaggagacacagagagatagcacggttacagcaggtgggaaggaagaaaagacaagggcatttgcaaccaattaacagatctgatcaagcactagtaaggaagaagctgattttgtaaatgaagagccaggaattaagactcaacggcatccttctgtgggaaggaaatttatttacagtaaggaattatctaaactcagcaaacataaaatggcattgtattgcccagtcccttatcgctgtgattcctatttcctcaatctttctggtgtgtttttgggaaatttgttcaggtgtttacaggatctgtttttagtgcagagaaatgagtgaaggagtaaatgttgtctgaagacaagacaaattctgagaacaagttatatagctcctgttatgcagaagcaccaagaatttatttctcagagcaccagggatgcgggagaatttcttctaagcagccctgctcctgtagcagccagaacacaggacactctttgtctgactccccttcatgattgagggcaaccagggcaggtttatccctgctaagaacaggccaagaaatcacatactcagtgcaacttagtgaatccctctctcctcactttgttctcagcaagaaggagacttggcttggacagatgaaggatcaagtcccaaggtaataaaggccacagacatttaaaaactattttccttctgagagcttcagaagacactgtcaggtattccccatcagccagcccttcctgcagcactgctacatggaatgtaacaaagtaatccagctcaacacaattaacctcccttccaatccgagtcttagccccaagctaccataccatgccttgtgtgaacactgctagacctcaaatacaaagtcaactgataattcaaggtgttgatctgcctaagtcctttggatataactattactatcttttaattaccttgaattacttccaaggaacatgagggcagctttctgggtgttgttaatgttctatttgttaatctggacacaggttacaaaggcacataaattgtgtcactatttatagagctgcatactgtgacttcaatgtgcattcatgatactatgtgtattatttcaataaaaagttttaaagacttacactcttggacttctaggcaatgaatattagattcaagttggctgtaatgaatctcaagggtgcagaaaatagggcacttttccaaaccccattctcactgagtggggactgatccttgaaaatggtcaatttatctactgctttttcccagcagatttataggctttgagttaaccacagcaatatccttggtcagaactcagccagatgtcaagataagtaagcaagttttgcaattaataaggataataaattgctttccaattcaagtaaatcaaattgtgtatgaaacagtactctcaaaggataatgagaatgtgttttcaagagtgagctagagagtgatttaatcactgaagagtagctatgcttataaaagtattgattaatgttctcagaacttgggccatctgcaggtacacttgaaggactggggataagtggggtaagaatagttacctctaggatctgggtcaatcagcctgaatacccatacgaaacctgaagtggggatcaaatattcatctcagaatccaaattggcacttatgaaggctcaggtctaaggcaaagttcaaaagccacccattatgtacctccaaaaatggctgaagatcatgccttatgtttccaagaggccaaaaagggtgttaagctcctggcttctccagttctggggtattaaatatctgtctaagactttttatgcagtgggtggtgggtcccatcacagccaatcctttcagaaaatctttgataggggaaagcattctagaaacaatattttggagtagataaattggcttccacatctgccactttagtacaatgtaaaatgaaaaatcatccaatacactagggcaatagagacctgacgtttgtgcccaagtggtgcttacttctggctcttggctatcttccctgatgtctccatctcatacatggtctgcagccggcacttcacgagctccgtggggcagagcaccagtgcagcaaaggcagaggcgaaggaaccggcggctgcattctgcagatcactgaaagcacacaagcagacagttacccctcagtttcttcattcctttggcactcaccacacagacagcactttggtgataaagcagggtaaggagccgggcgtgagggcatgaacctgtgattacagctacttaggagactgaggtgggaggatcacttgagcccatgtgttctaggctacagtgctatgactgcatctgtgaacagccactgcattccagcttgggaaacaaagagagacctccatgtctaaaaaaatgatgaaagggccgggcgccgtggctcacaactgtaatcccagcactctgggaggccgaggcgggcggatcacgaagtcaggagatcgagaccatcctggctaacatggtgaaaccctgtctctactaaaaatacaaaaaaaaaaaaaaattagccgggcgtagtggtgggtgcctgtagtcccagctactcaggaggctgaggcaggagaatggcgtgaacccaggaggcagagcttgcagtgacctgagattgtgccactgtactctagcctgggcaacagagtgagactccgtctcaaaaaaaaaaaaaaaatgatgaaaggaaggaaacttgcatgtgctgtttcatctaaggatcccacaaccctatgaagcagacagcagcaccccagttccctatgggaagtgacacttagagatgacataatgtggccagtcacacagctactaagtggcagtgctaggatgtgaacccaggtcttcctgactgcaacaaccatattcttttgattacacacagcgctatggactgaattttatccccccaaggtgatggtgttaggagatggggcctttgggagtaatcaggtgtagatgaggtcatgaggatagggccattgtgatgggattagtcccttagaagaagaggccagagagctcgctcactctctgccatatgaggacacagtgagaagacggctatgttcaaattaagaacaagccctcatcagacaccagatctgctggaaccttgatattagacttttcagaccatagaactgtgagaaatgtttgtttaagccactcaatctgtagtattctgttacaacagccaaagccaagatacatcgtgacatgacaaaataaaacgccacaaaaaaacctaaaggaaaggaggaaaatattgcccatagtcccccactgaaaaacatgcactattaatacttcagtgtgtctgccctaagttttaaataaatctaggttctaagcctatccccacatgcccacaatccaacctggagcaaccagatgtgcaatgtaactgccacagatgaaaacccagaaaaaacgtttaaccaaaagttgctgcatcacaaaaagattttccagttcaactggtgacctaccacctcagcaacacagacgagggtaaaatggtgccacaggagtgggtgaagccagtacaagtctgcaagctcaatggtattaggtgaaattgctaaactggaaatctaaactaggcagagggatgaatgcacaaatacaaaacagaagcattcacctcatgtatggatttagtaccagcagccaaatgtcaccagcagggttgtgaaactggaatccagtaagagttcaagaatatggggaggccaggcgtggtggctcatacctgtaattccagcactttgggaggccaaggcaggcagatcagttgaggcctggccaacatggcaaaaccccgtctctactaaaaattagccatgcctggtggtgcacgcctgtaatcccagctactctggtggctgaggcacaagaagcgcttgaaccagggaggcagaggttgcagtgagccaagatcatgccactgcactccagcctgggtgacacagtgagactctttcaaaaaaaaaaaaacgaatacggggaaaagtctgagaagtgtttcagaagaaaggcttctctgcgagttcctggttcatgggagttgggatagaagatcccttccagccctagaagagtgttgtgtcatgggatcatgactggcatttgggggtaggacaatccttcattgggcaggaaggactgaactggttccctgacacccattcaatgccagcatcatgctctcactggacagccaagatcaccctcagagatttccaaaaacccctaagggtgggtgggaatctcctcagctaactactcaggtagagatataatcccctaacaatttttctccaaactgtgagcaaaagcacagatggggcagggcacggtggctcacacctgtaatcccagcactttgggaggccgaggtgggcagatcacgaggtcaagagatcaagaccatcctggccaacatggtgaaaccccatctctactaaaatacaaaaattagctgggcatggtggtgggcgcctgtagtcccagctactcgggaggctgaggcaggagaattgcttgaactggggaggcgaggttgcaatgagttaagattgcgccactgcactccagcctgggcgacagagtgagactccgtctcaaaaaaaaaaaaaaagcacagatggacttaccatattcaggggtactcaagtttttccagtgttaaagattagtataaaatcaaggtggcaccagtcttggccctggtttgctagtccctggtggtctagcttctgtaccatggccagaggcaactctttcagaagacttggcttagagtggagctttctttcagtaggaagacactgtttgcagtaaggacttccttttgatgttagagaattaagcctaaaaccattagcaaaggagaaccaggtacacaaatgtacttgcacacgcttttatggggtgtggaaaccatccaatgctgttcagtccactcctttcccccacttcactccttagcagcttgttagaactgaagcttaaaatggtttctgttgtcttgcagccagcctgcagatccacagttggcctccctcagggactctctgttaacctgttgacaggcaatagtcaattaggagcattaaccaggatctgccaagtttgccaggacaaaggtggcagtcaataaatgtagaagtctattgagtttaagatataataatggctcagacatctgaatgaacaccaagcacattattatagtgcaaggacacagtcaaatcagatatgcagtggactttggctttccaataaatactttcattgaccagtgcacagaaggaggtgcatgggcccctggttctgcatgtagtatgaatgtgtagaactggaattgaaacagtaataggtataggatgggattttgtaagaatcatccatttgtcatatgttcaacaaacatgtacctgagcactcctgctatgtaagaccctgtccagccaaacgtcaaactagaacattctgggtcatgttgaaaccgggaacagacaaatatttacaatgtgattgcagaaattcaccacaggctctcacaagcagttctttcctttcactgctcctgattaatcttctctctagaactgacccttataaaatattccagacccccaactgtggtctgatggaaaggagactgggcaggagctcagaggacacaatttcaagtccttagcggggtgaccttgagcaggtcaacatcggcacctcagttttccatccctaagagaggtaacatctgccttgctcttctcacaggatcacggtgagggctatagagacatgatatacatgtcagagctttgtagactctaagagagcatttccccaacaggtaagaggcaaacactgttcctcaggatggaaaaaaaaaacgggcccaagctcaaaaaagatgagtgctggattagacaaggttaatcaggatggtttcttttcttttcttttttttttttttttgagagacacagtctcgctctgttgcccaggctggagtgcagtggcatcatctcactgcaacctctgcctcctgagctcaagcaatcctcccacctcagcctccctggtagctgggaccacagacatgtgctaccacactcagctaagttttgtattttttgtagtgacggggttttgccatgttgctcaggttggtctcaaactcctgggctcaagtaatctgcccacctcagcctctcaaagtgctgggactacaggcgtgagccactgtgcccagccttacgcatctttaatgaactaaataacacatacactatatgaaataaatgtacccagagtgattcttcacgagagagacactgtgacgtaatttcccaaccctttcttaaggacacccagcaattcaatgttctgaaagcagtgtgggaaaatgcagctgtaaggtattagattgttctcagcagaaaagcaatatgctcttacctgtccttcactttgttcacaggctaaggaagcaagaaagtggaggggcgggcagagccagatccagtggtttcactcatgcaagacagaagtcactgtctatcctgtggctggaggggctactttgctcagaagacacaggtcttccccagaatctcacgtggctgcttactgtttccctgtcttctctccccattttgtcctttgctaaggaaactgaactgaattccaggtcttctctaatagagtgtctctccttcaacagggaacaaaactacagttgcctgtagtttttgcttctgttcagtctccatcatggcatgccatactctcctggtttgtgccctgcttgtttctttactgccttcctgcctgccctttctgtgctggaggctcatcccattcatgctcagccctcctcgctgtctacactgtcttcttgggcaatcgtatctagtcccaagcctttttaaaaaacaagctctacccatcatggtggaattcctgtctataaaagggcacaccttcagacctccaggcacctccagagaacagtgctgtgcacaagaaaccgaattcagttgtgtgggacctgcagctgcaatcaggtttcaaactcctactgaaataactaagactgccctttgcaatcttgaagcttatataataattttaagtggtataaaataaatcaacattcaaagcagggatagctaaacatcccagtggtttccaaattctgtttagtctctatataataaatacccaaggcaagaccaacaaagaggcaaagtctgatgttttgggaagatttggacagagaaaggtgggttcccttgcatcttcgcagacatttccgacccttcctaaaactcctcaagttcatctggctcagacaacctcttccaatactctgctttttgctaatgaaagaaaagctaaatcttggatcataagcagcatctacagtttcagtgcagcatgtctgctgacgagaggtagcactgccagctgcatctgaacagcattctcctggagaaaactgaaacagaagggcggttcattctcagtggtggatgatgagcaggtctcctctgtggtgtgcatatgtggtttctaagttttatatgatgacaatgtataacttcataaataaaaggaaagcagttatttttaaaaaaggaaatgttcttccacataaggcaccagtaaaattgtgaccatacaacagtagattttttttaatttttatttttttgtagagatgaggatcttgctgtgttgcccaggctggttttgaactctcagcctcaagccattttcctgcctttgcctcccaaagtgctgggattacaggcatgagccaccatgtcttgccagttttgtggggtttttttaaacaaataaaaaaagtgtgtgtccttgactcacctcagctttgcctgcttgtccaatccagccactttccgcaccacctgctggcagaagccgtagcacatgaagaggactgagttctcagcgatgttggcgattagtgctggactggtacccttgtagaagccacggaagcccacctgggagtaagtcttcaggcagcagtcggtgaggccccggtacaggtcagggaacgtctgcatcttcactttcattgtgtcaaagggctgcccggtcagtacacatgctgtacctcctgcaatcaggacagatgactgctctagtacgaggctacagttccattatccatggaaggaaggcacaggcagcctaccccagaacttacccctgcttcggttcatttcaacctcttttcctccaaaaccttccagccatgtccagtaaacaatttagagcaggtccttgatgtgcctggcatctaagtcccaccctgaaggagctcatgccaggcaggggagagagacagacatgtgttcaacagcggcaaacagtgcagtgaatatgtaggagcctgggcaatagggtcagagggactatggctttgctgtgagatcctggacaagccatgtaacttctgagcctcagctcctcatccatgccacctcacagggttagcgtgaggattaaataaaaatggaggagacaggcttggcacagcaccggctacgtaatcagtaaacagcagctactgtgtgcacaagaaacggaaaccacagaaagggaggggagacctgggaagacttcatcgctcactttgcctaatgcccagtgggactgatcagacccggcaccacggaaaggaaacaaggagtctggctaattaatccccaaagagctaaatatttcattctatagaaaaacctctttaatttgagctctaccgattaataacgtgtatgtaaatagagaatgaactgaaatttatttatgcttaaatcctttatttatatacttctataagattaaatacagcagagtctacattgcacaaaataattttttttttttttttgagatggtgtcttgctctgtcacccaggctggagtgcagtggtgcaatctcagctcactgcaaactccacctcccaggttcaaggaattcctgtgcctcagcttcccaagtagctgggattacaggcacccaccaccacgcctggctaatttttgtacttttcatagagatggggtttcaccatgttggccagggtggtctctaactcctggcctcaaatgatcctcctgccttggcctcccaaaatgctgggaggcataagccaccatgcccagccacgtgaaatcattttagtaaaaattctaaacagaagagaagaatgaactgtaaccaccctacaacatccccacaccctgtagtagggttggcgtcgtgggaactgccagtggttagtgtttaccgtctccttctggacctgagaggagctcttaaagcttcatcaaaatgcaaaagaaggcttacagaaaatatttaagaaatgcaacttcctgaatttgatgttatacacagttattccatctaaactctggaaagtggagttgggggaagggacattaagaataattctcaattatttattggcaaataagccaacaattccagagtctgaaaactgcttgatctcttttttaagcaacaagcaatatgatctctgtgagcccatcattactgttcatttcttacaggagaggaatgacacacttccgcctttaattgccaaattatccccaattctgaattagtggaatataatttaatatgattttattatgattaatcctgagtcattctctcccaggtaatgctgggctaggataaaaagaaatctgaattacattaaaataatttaattattccaagagaaaaggtgacagaatgttttaagtgggtgcgtaattcagagagcctagatgcagataagctgaataaagcatttaattcagcacattcatattttaacttgatcatcttgaacagttcaggcatcacaggttactagaatacacatttgctgtgtagctgggacagttacatttccaacagggagaagggggaggctaatgaatgtacaaatgctagcaacaactgtctcccgtcctctgcaagggtaagctaacttcccgtgtaatttaccacaaatgatatggtcacggcgctcactgtgccctcaagtgagagaagactgttctgaacaccagtaccaaccacagagactgacacctagtaggttctcaaagatcgatcaagtccataaagccatgaataaatattatatttctccacttgcctagaaatcagacttctgatcttattctccttaaaagacaaataacaacattctttcggcgatatggtggccagccaagcatcttattccgcaggaaaggcactcagattatgtcatacctaacactttactaagggtggtggtttggattttcagtccttgacatagagtcagtaaatcacgagatacagaggaaatctatcagggcagggacagtgtctcagggaagggacagctctgaagaaggcagagaggtgaggagagagaagcagactcacaccacaggaccaggcccaccaagcagaggtgagaccctcaaacccctctggaggccatcgtaaaggtttaacagggcagggaagaatatcattttcaagaaactccaatcaaaaaaggtttggggttgtttttaattttggcatttgagaagataaacttcaatgatctgaaatgccacattctccaactatgctaaacaaggtaaactgcaacagtagtcaaagtagtgactgcattgttttagagttgctgaatgactattaaagtggtaccaagtttctctttaaggctatttaacttttgggatccacgcacccccatttcaataattacctaatcacctaagttcttgaaatcctcctttatcctagctgtttagggatctagatgtcttacagccattgcagatagggaaatgggaacttcccagcactttagagtagataagctggctaaaaacctgtgtggtggggaaaacgttgtttaaaggaaaagaagagacacacacaacaccacatttaagctccatccacatcacctcgggctgcagctggctctgtgcttacagatggatcgcttccgtgggtgacctctgccacaaaacacaacaggtcctctgctcctatcaatggctggcagaaaattcccaaagcccagcaagttccacatccagaaaggcagggcccaaaggctccaaactaaccctcccctccagtgtgctgcagatgcattacggagtactaaagcagagacagcaacgacaccagacaagggacccagggatcacagtcctgccctgtcttcacaccatcttgctgtgtaaccttgaacaaatctactgctcctctgtgggcctttttctacatatccaacgagcattggagccaacaatgtctaaaggtctctctagctccagcactccaagactccaagatcctcaaaagtgggttccatttgcattccataggcctcacagcagaacagaggtttctgtgtcactgctaggcacctcctctgcccagcccccaacctatagaccatgtctcgctccccctccctatcctgtccccccaggaatgggcttcgttgtcctcagaagttaagactacccacagcatctctacctcggtgaggggcgtccctgtgtcgccagcacagggggaaatacctgtccaacagtgatggggacagtgtgtcagtatacataagggatcaatacatgttcaaaacatgcccaccagcaaatgccttacataccaggctcccaaccatactgttgcaatttctatctttcaaactaacttgtaaattataaatgtggtacccaaatacctgtatgcacataaataggaaaaggtaaacttttaaattctatcaccataggttctagatctttgacagattgactgaaagacataaaatgtcaaaagctgagactatatgtggctaaacaccctccttctgcagaaacagaactgagcccaagagcattcactcgctggtgagaggcggcctggggcaggcagatgtttgcaccattctcagggtcagcgtcctccccagtgtggcatgggggaggggagggggaaaggggcttgggaggctgtagcctaaaggcacgcagtgggcaagagactactgggcagacccccactggccttccgttccctgggcatctggggctgggacgctccttgtgggttctgccctgggagaagtgcccttgcccagtgctcctcattaggctcggtgacggtgacgcgctctctccagtcttcctcattagcataccctggctgacctttggctcatggaaaaacactttgctcttctctgaacaatttctttttcacaattgagcaaatgactgatgaggtgaccatattcatgaccatactcatctgctggtggtgggggtggggggtgtgctggataaggacagcactgggcaacacccccgctggcctccccactccagggagctgcaactactatgagaatcctgcgggagcccagggtagtccagggttttcctttgggcaatcagtattccagccactcctcctacttctggactctggagaaccaaattaccaccatgcacttcccattccgccctgtttcccagcctgagggtcctgctcttcctgcatgttcaagctgatctttctaaggagtagcctgcatggtgccagcactaccccttatcacaggtagcacctccctgtgctgggggagcctcaggctcttgggctcaggcccctaggctcaggttagctgacattcccagcaaatcctacaactttcacggctctaagacacagtccattatcagtctcattttcagagacatgtcttttttttttttttttgagacagagtttcactgttgttgcccaggctggagtgcaatggcgcgatcttggctcaccacaacctccgcctccggggttcaagcgattctcctgcctcagcctcccaagtagctaagattacaggcatgcaccaccacgcctggataattttgtatttttagaagagacggggtttctccatgttggtcaagctggtcttgaactcctcacctcaggtgatctgcccgccttggcctcctaaagtgctgggattacaggcgtgagccactgcgcccagccttttaaagacatttctaagagtgtcctcctttctttcccaacactagcagggacagtaagtggtgtttcccaggagatgctatggtgttatttttgcacaacaagggctctgaagactgccaggcttgaagtgaagaaccacatcacctgcatatcccagccaggtgacaatggacacgtggcttcacctctgagctgttttccagctgtactgggcaccttccacccatcaccctgactgacaaggtgttaacaataacggacactcctctagcttctgctactctctgaacaatactaaacttccatcaaatggattaatcccaaaggtaaagtactggagggagaaaggtagtattttcataccactttcatttgatctcatttagagagtagttgaggaatagagagaactgggttttctctgggattatagttaggcattgcttaatgactgggacatgttctgaaatacatgtcattacacaatttcgtcattgtgctatcatagagcatacacacctgaccctagatggcgtagcctactccacacctaggctattcggtatggcctattgctcctaggctatacacctgtacaggatgttactgtactggatgttgcaggcaactataacacagtggtatttatgtatctaaatgtatctaaacacagaaaaggtacagtaaaaatatggtagtataatctcatgggaccaccatcagatacaccatccatcaacgacagaaacatggtgatgaggcacatgactgtacctgcagcccccgctgtgaggtcaatggcagcctggatagcaggattggatttcatgtttgcccactcttctgctggtcttgtggaaggcagctctctggagcttatgacaggcaccacatatccctggggggaggcaagagttcaccattagtccaagtctgcagcatcctgttctctaggcctgcagccaaattacagaacctaaacttctgggagccatgacctggggtccacactgttccaaaggaaaggggctcaaggtatcagtgcagcttagcaactgcctcctagaaagctcacagatcaaaaacctcccctgtgtatcaatgctacagccaccagcagcacttcaactgacctttctgaaaactgaaaaaacgaacaccaaataagtaagccaaccacaggtgtaccaaaccgcatcagacttgtttttttagaggcctatgttgagccatcaattgaacaggctcagttctaaattcagacagcagcctgtgctgggtgcctaaggggatctcacaagacagtaggtctggaaaagagcacccaggcagccaagggtgggagctgcaccctgggatcacacacgccttggtgaatgcctgctctacctgcagtgtggctccttcagcctctacagctgggagtcctcatctgtacaaggtgaataataaaaatattataaaacaaacacagtcacaaatagccacatcagactgatgggacgccacaccgtgcacaagcatcatgtgttcttagaacaaggccctgcgcaagcatcttcctgtcacacacatcttcccgtcaccacagaccaccagcccttcaaatgtaaacgtgtgcaggagtagcctgggggccttgctaaataaaatgcggcctctgattcagtagccttggacaggaccagaggttctgcctgttctgatgagttcccaagtgaggcggacagtgccagtccacagactcacactttgagatacaacacctgggccgttgtgtccaaatccacttgataacctggagcacttattaaatatccaaattgccaggactttcctctggaaatctggattcagtatgttttggttggagccttgggcatttgggaaaactagaatttctttctctctctttagacaaaagtcaactactgttgaggcatgggcttaataaatgttgactaaaatatccaactcaacgaccaatcctgtacagttttcaaacggtgttagtaacttatttgcaaataataaggaacaacttattcctcatcacactgaggagccgtgtgacccatcgtgctggatcagagatgaacaccaagcacgctcctaacaccaatgtcaccctgaacgtcaacaggaaacattggccgtggagaagttgtttaaacctcttgaagcatcttgccaacgacgagacttcaataatcctcctttattcacaaaaaatttaaaaccagtggcaacaacggcacattacttaataaagcaactaagttagaagtgcaagacactgatttatatgctgttgataggtctggagagacaggaccattcactaggctgaaaaggtggtggccatctggtatcttcctaaaaaagtttatcagggtcctggccaggcgcggtggctcacgcctgtaatcccagcactttgggccggctgaggtgggaggatcacgaggtcaggagtttgagaccagcttgacgaatatggtgtaaccctgtctctacttaaaatacaaaaatgaccccagcgtggtgatgcacacctgtagtcccagctactcaggaggctgaggcagaagattcacttgaacccgggaggtggaggttgcagtgagccgagattgtgccactggactccagcctgggcaacaaagtgagactctgtctcaaaaaaaaaaataataataataatagaaaataaaaaataaaataaataaataaataaataaataaataaataaaaagtttatcagggtcctaatcctttcccagaaggcaaactaaagcctggagcaagacaaggtcttctccaaggccacacaactgtcagtgacagaggattcagttcaaagtcctgtcttttcaggcctgtgcctacaaaccaaccgttaatctgagtatttcaacctggccaaaggcaacacaaaacacccaaccctatatttttgggaaagaaaaaaacgggggcaactgagcagacagacagaggcaagtacaatgtggcctcctagataaacctcaatgcgcttatttcttttggcacagacacttccttcttaattttgaaggaaagtcacatcacattacattctatctgtccctaagaattaaaccctgttaggtgagccaaacttaaacacattaaattctacaaataggccaggcacagtggctcacgcctgtaatcccagcactttgggaggccaaggcgggcggatcacctgaggtcgggagttcgagaccagcctgaccaacatgagaaacccccgtctctattaaaaatacaaaattagcctggcgtggtgggccatgcttgtaatcccagctactcgggaggctgagggaggagaatagcttgaacccaggaggcggaggttgcggtgagccgagatcgccccattgcactccagcctgggcaacaagagcgaaactccgtctcaaaaaaataaacaaacaaataaattctacaaatagccattagaattattaggatagaaaacgatgatgggtactaacagattcactcagaaggagtgggcagctaattcacattatgtgtagctctggcttggagaagacacagggcttggaggaggcaagactgttcagcatgaattaaaattgatttatgagcttgctgtagcacttggaatagaaaaaagaatcttttcagcgcctttgacccctctctcaaattacaccagggtgcaactgaggaacaacagtgccgaccacccacttttctcgacccttggggaaaataacttttttttggaagggagagtcagtagatgaggctgcattttccaccagggaacacgaactgctgcgggaagatcccagcttctggctaaaggagccgcaggccagctcgccatccagtccccagagcccgggctttaggtaaagcgtggagatgcaaatcagtttcgccgccaaggaccggccaggcgcgtctcctcccgggcctcgcaaggaacaggtcagggagacgacttccaactttcttggccggaccctaaacgttcaccgcccctgcccagccgcccactcctgggcagccagcaagtctccattcacaagcggctccatgctgcccagcactggcgcccctgaggcgcggagccccgcagccaaatgacaggacttgggggcaaacaaggacaaaagttcccaccaggtgggcactgcaggaaggaggccgacaaccccgagattctccgagtcccgcggcacgtgcgctgcgacgctggccgcttcccccgccgctcgggaaggtcacgccgcccgcacaccgaggcccgccccgcgccccgctccccgctccctctgcctggcgcgctccccgcagctgcaggcgccagaccgggctgcgctcaccgccgcgccggcgtggccgcgtccagctcaggctccgccgcccgctctcggctccgggtcgccggctggggcggccacttaacacccacgtcggcaacggccggcccttcgcccctcccttcgcgc

SEQ ID NO: 7471 - DNA, 358 bp, Homo sapiens
cgttttgcagacatgggcactgaagcttagaaagcccaagtgatttccttgggaacacccagcatacccacatctctggtgtgttctctttcgagggcttgattctctgggtatctttctgagacatgaagtatggtttaggatcagaggagaacattttgctgtgcctggacaacccaaaactagcatagcagaatttatatgatagagcctattttaatctgcagatgtcgagggaggtgttttaatgttttccttttttaaaaaggaaactctcttggatcaagcagaagcccaaaaatgagatgacgaaggcattgtaattggcttgggtctgcttgtgtaggtctcggtgggg

SEQ ID NO: 7472 - DNA, 304 bp, Homo sapiens
atgaaataaagatcagccaggctcagtggcttatgcctataagcccagcactttgggaggccaaaggtgggcagatcacttaagcccagaagttcaagaccggcatgggcaacgtggtaagaccccatctctacaaaaaatacaaaaattagccaggcgtggtggcacgtacttgtagtcccagctacttgggaggctgaggtgggaggatcgcttgagcctgggaagttgaggctgcagtgagctgtgattgctccactgcactccagcttatatgacagaggcagactctgtctcaaataaa

SEQ ID NO: 7473 - DNA, 1089 bp, Homo sapiens
ggccgcggtgggaatggaaacatctgccccacgtgcaggaagccgggtggtggccacgacagcgcgccactccgcagcgtaacctcgcagatcccctgcgtgtgtcctcgcaagactagctcaccgaaatggccgcgtccagtcaaggaaactttgagggagatattgagtcagtggaccttgcagaatttgctaagcagcagccgtggtggcgtaagctgtttgggccagaatctggactctcagccgaaaagtatagcgtggcaacccacctgttcattggaggtgtcactggatggtgcacgggttttatattccagaaggttggaaagttggctgcaacagctgtgggaggtggattttttctccttcagcttgcaaaccattctgggtacatcaaagttgattggcaacgagtggagaaggacatgaagaaagccaaagagcagctgaagatccctaagagcactcagatacctaaccaggtcaggagcaaagctgaggaggtggtgtcatttgtgaagaaaaatgttctagtgactgggggatttttcggaggctttctgcttggcatggcatcctaaagaagatacctcattttcattgttcctggttttttccagtcagcagcctctacactccatcacaggacattgagtccctcctcctcttctcccatgccttcctccctgctgtggcaaatccgagtggcttctataagcatccgttggtacaagttaatgtggcaccatgagcctgactggcttctataagcatctgttggcacaagttaacgtggcaccatgagcttgatggcagcagaagagacaatagtccttagctcttcttccagtacgccccctacttagtcagtctgtaggtcatcaagaaggtccctctacccctatgcaagacacttacaagaacacattgcaagatagctgaccgtggaggatgagtggatcctgaaatgttgtcccgaactgttgatttggaaaagaaataagcacatagataaccttattgtgtgctgcatggaaaggaactgaatacaattgcctttaagcattaaaaaaaaaggatgaaaaa

SEQ ID NO: 7474 - DNA, 1089 bp, Homo sapiens; identical to SEQ ID NO: 7473

SEQ ID NO: 7475 - DNA, 386 bp, Homo sapiens
gaaaactcagccccagaagatgatctgtgcaggaggttttgagcctatccagggtaccagagacaccaggactacctcctccagccaagactgaccacagtccagagaacaaaacccagatatcagaatctatctctgacactggactcttctttcttgcattgtgggaaatgtaagaactactcttggaaagaaacagtagagaccaagagacactgcgatggaagctgactggtttcagggttcaaaggtctgtgttccaccccaacttggccagttatcagcaggaggggccatgaacaatccagaaaaaccctctgggcctctggttccccatctgaaaaattaaggatagtgaaacttgccttgcctactcacaagtctgt

SEQ ID NO: 7476 - DNA, 386 bp, Homo sapiens; identical to SEQ ID NO: 7475

SEQ ID NO: 7477 - DNA, 32249 bp, Homo sapiens
atacaggttttgtaagaaagtaatgctgatttaaaatcttacatttgcatatgtgaatattaaagtccaggaatctttaatacatacaagaaatgtttagcattattttttaataaatgaaggtacaaaacattttttcataatatgattatgaaattgatagaattaaacttctgtaaaaaattttctactcccacgatttcttagaagtattttctaaataatagtaagggttagtaaccacattgatatggaaagacagacttatggtatctgcaagttttagttttacccttgtggaaaattgaactctaacatctcttcccaagattaatatatgaattttaccaaatacatattagcaaatactgatttggctcctttgaaagcagcataccaggttgtactttatgtatgtctttctgttggtgaccccttaatgactgcccagtgatataccttcttttgtattcttctggtgaacctcagttctctaattgaggtaatctaaatgtgtctgctaggtttttgcgagggtttgtttggcatctgtgctcagatgaatgtcagtgtccttaactagttttcccatagattcagccatgctgtttattcaggctgctgtctcggccttcttctctactccactgaacccctttctgggaagtgcaatattcatcacttcatatgtccgacctgtgaaattctgggagagagactataagtgagtaaagtaaaacacttgaaaaacaatttttatctttcctactgggaaaaactattgacagcattattattagaatttatggttcataatttattgtgttgaaatatttatttttgctaaaacttaataaatagtcttaaaatttgaaaagtatataaaagaagaggccagaggaaattactttttatttttctttctttccttttttttttttcatacagggtctcattctgttgcccaggctggagtgcagtggtgcgtctctgctcactgcaacctccacctcctggggggctcaagtgatcctcctgcctcagcctcctgaatagcgaggactacaggcttgagccaccacgtcggttaattttggtattttttgtagagatggagtttgactgtgttgcctatactgctctcaaactcttgagctcaagtgacccacccgcctcagcctcccaaagtgttaggatcacaggcatgagccactgtgctcagccattttttcctacttaaaagatatttttaaacattgttctgattgaatatgttcatgtttatattttttctttcagtaatattgaattatttcacattaataatactctgcaactttatgctatataatatcgttataacagtcataatgagttatagttttcttagaaatacctggctatttctaaagctaaatttttataggttatttctgctattttgagaagataagtttgtaatgaccatctttgtgcatgaagtattttctccatttaggcttagttccttgggctagctacttaatctgaagcttagtaactatccttgtatgtaatctctccaaatttcattttgtttcagaaagcgttcctaaaagggaacgcttttaggagttatgagttatggagcataaacatttttaaggcttttaatataaacacattggtttagaaagagcttgtactaatttataattctactgaccatctccatgactgcctttctctctatactttcacaaattggcatatttaataggtgaaaattgtaatctcaccttttaaacagtgggctagtttgtaggtttgaaacttttactctggtcctttatctaaaaccacacatgatatttcccattttggtgaattttggtgttattaattattattcctctggaccaattagcccaaagtaatgttcagtggctgcagttcttaactttttggatttagaacccctttatactctttttttttcttttcttttctttttctttttttgagacagagttttgcccttgtcatccaggctggagtgcaatgacacaatctcgactcactgcaacctccgcctcccggagtgcaatggcgccatcttgattcactgcaacctccgcctcccaggttcaagcaattctcctgcctcagcctcccgagtagctgggattacaggcgcccaccagcacacctggctattttttgtatttttagttgagatggggtttcaccatgttgaccaggctggtcttgaacttctgagctcaggtgatccacccgcttcggcctcccaaagtgctgggattacaggcgtgagccactgtgcccggccttatggtcttaaaaattattggaaacaccagagttttaaaaatatggattttatctactaatatttactagagtggaaagaaaaactcaaaaatttcaaatgtttacttattaactaatttaaaaataacaatgtcgtatctattgtatattagcataaataacattttaaagttaagaataactatatttccactcccccaaaaaattagtgagaagagtggcattgttatatagttttgcaaatctcttaatgtctgggttattaaaagacagctggattcttgtatctacctgtacattcagtcaggtgcagtatattgttttgattgaagtagctgaaaaaaaaaattcaccttcactcaccatgttggccaggctggtctcaaactcctgatctgaagtgatttgcctgccttggcctctcaaagtgctgggattacaggcatgagccaccttgcccaggcaaaaaagaagtattctaatagccttttaagacaatcatggatatttttctttgatctttcactgaaacccaagaaatgggagcttcttaaaagctacttgcaatatggaatctaaaaccatatctgtgaacttgtgggactatattacatcaaaattcactcatctgtcttatatcctgaatggatcttttacccatgcataattttttaacattttgtgttggtcatttggaaaatactgcttcactgagtaatgtagattttctaaatgttgatacattttattatgtagtgaattttaaaatatgttcattggcatcaccaccaatcggaaagaaattttaattattgggaagttgtcaagcttatggtggtagataggagtttcccaaattttaatttttgcttgaaaatttggatttttattattgtcaacaagtattgccagttgttttccttgaaataacaggctcactttctttatttttgggaaatatctgttaaatgaccacatctaaataatctcataatttttccatcagtgttaagtaaaaatggtgttccaagaaaaaaacgcagctagttcagctcggagttcaagcagttgcacaaatacttgccctcatgacagccgttgtacttcagaaggcagcagaagtgcttcatacgtattttctcattttgccatacagagtattaaaaaggcctttactgtgagttgagatttattaaggttaatactttttattgcttcattagggacatttttttgtgaaacttggactttttgtttgctttattgtgcaagtgtggcagcgaagggtagaacagtttggtgctgctgccttgattaatgcccaggcaccacagtcttacctaccattgctttagtaccaccagtgcagttgtcaacacagtgtaaaaagcaaataacagctcagtgttactttgaaaatagttttgatctggaaaactgcctgaaagagccttaggttctgtggaccacattttgggaactactgttccaaagaacattgcatcactgagcattaatacatacaccttcctttggcaaagaatgttctaacctctttgaatttttaagaaccatatacagtatacatttttttcatcctggtcagcttttttctcacagtgcatgcctagatgtctttccatacactgtacaataaaaaaaaaactgctatgttcatgtgtggtgaagggggaagaatttttttttaatttccaaaagtgtgctaaggcattttatcattatactaatcacagattttttccagagattttcataaagtgataacctttattttatacatttcctatagtttcttcctcagtctaaattgttaaatattttttaatgtaaagaaagttactaaaaatgttttattttctttagcacaaaacgagtggatcattcaaataccagattggcttcccagcttgatagaaatccaggtaatagctctatttgtgactaaggaggcaagactaaggatttgttttatatatatatgtttatattcactcctaacttgttgggaatcctctatgaatcccaaatattcacttttaaaaactaaatattatttgttttactttagcaaaatatatataaattacagtatctacagtttatatgcccatctttttataaaatgcatcttaagaatgcttataagaatgaaaaattccattcaaagattgttcttacataggttaaaatgtagaaaaacagttaaaataaaactggtcagatgtttgaagggtctgcagtcagactgacacatgttttattagtatgtttccttccacccttccctcaatgttttggtcaatattaatttaatttgattcagtttattgtttacagagatgtcatcaagtgggagcatatagccagtcaggatagagcttcagtgggtgacaccttgctggtgttaccattatctaaagtctggttcttagttttgtcatttgggaaacatcattttattggcccacccaatagtaatctgtcacagagaatcagagattagcatatcatccagaacctcagtgtattaatttactaaaataaatattactcccaaatacactggaatatttgtatccatttgacttacaaattccttcaaatctgattaattctcagtgataaaattggactaaggagaactagttatttgatactaatgaccatcgtcatcatgttctggtagagaaaataagcatttcagctctggtatgtgcttgtaaagggctagatttctcatgctgatgatgccatcctgcataaccaaaggccatgccctgaatcagtatatacatttttgtgtgttgtgctgacatagaattgatacagccattttgttgacattagaatttggagtttccctttcattattttattcaattagactgggtttaaaataattattaagctctgaatattttaccattctccaatactatgcttggggcatgcatttacagattatcgctttgcatgagttacttctagagatggtcatgtaatttattaagtgatgtttattttaatgtttttctttctttttctttttttttttggagacagagtctctctctgtcacccaggctggagtgcagtggcacagtcacagctcactgcaacctccacctcccaagttcaagcaattctgccttctcagcctcccatgtagctgggattacaggcgtgcaccatgatgcccagctaatttttgtatttttagtagtgacagggttttgccatgttggcccaggttagtctcctggcctgaagtgatctgcccacctcagcctcccaaagtgctgagattccaggcatgagccaccacacccagcctatcttaatgtctttttttaaggttctctgttgctatatacagtttatctctgcttaacattagccatctcaatatggctaatattgactaaccagcttctttttgattgtcttatttgttcaaatcttgtattattttatctacttcctttactaaatagtcttttgttcttcttctgaattcttttattttcctcatttctcttccatggttttaattataaagcatattttattgaataattacgaactgttgaagaggtcaaaaagtccttagattgcttcaaatcaaattctcacattttgtgaatgagaaccatagattccgggaggttatgtgacttctaaatctaaattcagaaaccttttccattttcctgttttacttttgtatagaaactgtaagggtatgaatgttattttccttgtcaaataaatataaccccatactagaagtttttaatatttttaacaatcttgtttgtcaagaggacttaaggttaaatttaactttttttaaaatctctttttataggatcagatgacaacaatctgaattccatcttttatgagcatttaactagatccctacagcacagcctctgtggtgatttgctactaggacggtggggaaactacagtacaggggactgtttcatccttgcctctgactatctcaatgcattagtacaccttatagagataggcaatggtctggtcacttttcagctgcggggacttgaattcagaggtaagacattcattcaccttttatttctgtagcatactcctgtggcaccttagttttacatgtttctatctcaaaccagaagttgtcatagaattagatatttgggattgtggaatgagaaaagttgttaaagagtaagtattagattttttcaccccacattccatattccaagaagaatcatgtttgcaatatggctttatatgtaaaggtagtagcattagtgtgtaattgatttgttttcctagatatgttgaatttctgttgttctgtgcttggtctcttgctggtcccttttgtgaccagttgcataaatttgttaggtggctagcagcatggaatgctgaatttttgtgtgaggcagaatagttaactgagttatgttcatataaacaccatgcctttgtcttccaacaattttttttaattgaggtgaaattcacataaaataaaattgatatttagagcaaagaaatcacaggagcgtttagtacattcacagtgttgggcagccaccacctctgtctcattccaaagcattttcatcactccaaaataaaacggtgtacccattaagtagttactggccattctcctttccatcagccctctacaattttatatactgataaagttatttctttacagaaaatcacgcattcagaaacatcaactttatgttatcaattcctgtaaaactgaataacatgtaagcacaagtagaaactggtttcacaggatgcttgaagtcctgttactgaatatctttccagtctaggaaacattttgacttgagttttcagagagtttttcatctattctaagtgctttggagtagttttagtctggaatagaaataagaaagcatttgactagaaagagaaggaagtcagatctataaccccatagctttattttcatcctggtgttgcataagaaggcttgcaccttagctatgtagtgtctatgttagtggagcaagtactagtctagaagttacactgtttgctagaaataaatctttagctatgcagcactcaaattaatgcggagtaaatgttgatgtttacttgtgatctgtttataatccattcatattctcttttccttcaaaatatcttattcttgccttatgaatatttgtttctgcctctccatcaggagcctaggaccttaactccatctcttccagagtcttaaccccaggctgttcaatcctaatccaactaggctcatccaaaagttagcatacccttaccaccattcctgctactgctgtgacttttagcttcctttttaagttttggcacctgaagacttcatccttgttttttaattttaattttttaaaataaatgtgcatgggaggctgttttatctaacatttctacatatgtgaaatgaaagggggggtggttcttcttaccatctgctcactccatcatattgatcagtagttctccaaatcagaaaagttatccagatttttattctctggtattgagtagattccgataaacttttggataaatcttttgctatctaaatgctaattatttgccaatcaaaactcaaatttgaaaatacagcaacccttactctttgaactcctatagatttgggtaacaagggatacctgtaattcttaactcagacattagcatttttttttttaagagacaggggtctcgctctgtcacccaggctggagtgcagtggcgtgatcacagctcactacatcctcaaactcctgggctcaagggatcctcttgcctcagcctcctgagtagttgggactacaggtgcacaccaccactcctggctaatttttttttaatttttacttttgtatagataggagtctcaccaccttgccaaggctggtcttgaactcctgagctcaagcgaccctccagccttgacctcccaaagtgctgagattgtaggtgcgagccaccacacccagccgggatttttttaaagacacatttgatcatggcattcgcacgcttacaatttttcagtgacttctcattgcatttaacatagaattcaaatgcctgaacacatcctatggtactctgtgatctggcctctgccagtttctccatcctcactttacagcactatctgcactcactgtagccacactggccttcttgcagtttcttagatgtgctaaattctttactaaggactccttattgcccttcattttgccagaaagtgccagccatctctctttctcccctaatcctccatctggctgattcctttgcctgaatgtccctttctcagagaagccttctctagccacctatcccacgtgattatctcactttaccatgtttttatcgttagattcttacacagtcatggactgcagcaatggactgcacatatcacaatggtcccttaagattataatggaactgaaaaattcctgttagtgacatcgtagccattctgtcctatcacaaagcattacttgtgtttatggtgatgctggtataaacaaaactatgctactggtcatgtaaaaatctagcacatacaattatgtacagtacatagtactagataatgataataaacaactatgtgtttattatattatgctatactttttatggttagaatgtactccttgtacttagaaaaaaaagtttactttagaacagtatgtcttgttatgctagtggcagactcatacatctcacatttactgtatctcttgattgcatcattttctctgtgtttgatttgatcttgtgtcattcgattttatggcccctacatgtgcaaaattcacagctattgttgccaggaagaggccacatcgagtagattgaccaggaagctaaattaaaagtgattaaggactatgaaggtggcaaatcagcaatggttgttgtcaggtaattatgtcccattccaccatagctgtgatcttgaagaacaagaacaaagtgacagaagccattaaaggatctgcttcattgaagacaaaaagatgaacaaaaatttgaaaagggcctaaatcatacatggagaaactactgaagaccagacacagaagcatattatacctctcagcatcatgacaatcacagacaaaacaaaaagtttgtttgcgatattgaaagataagattgaacacaactacagtgttgaattttctgctagctctgtgtgattttattcaagaattgttatttattgcataatgtgaaagctggtgagtggtgagtctgtaaatgctgatgtgaaagcagctgaagaatttttggaactctagataagctgattgtgaggaaaattacttcacagggcaaatcttcagtatagatgaaagcttgctattctgaaaacagatactggaaaggactttcatccataaagaggccaagtcaatgccaggtttcaagttattaaggacaggataacagtcttgcatgggagaaacgttgcaggttacaaatggaagccctttgtgatctggcccagtgagaaccccagggccttcaagcttatcactaagcacacactgccagtgtattgcaggagcaatcagaagtcttgaatgacccagcttttcttcccagatgccctcctgaattgctctgccagcacaatggagaagtactgtttggagaataacataccattcaagattgtgcttattgttgataatgctccacacatcctccttttattggtgatctttatcccggtatcaaagtggtatttctgcctccaaacacccacctctctgatccaaccaatggatcaagaagttgtcgcagcttttcagacctaccacctgagaaggacatttacccaggctatttctgcaactgaaaagacactgatgcaattctggaaggattacatctatgactgcatcaagaaccttgcttagggtgatgtcaccaatatgggtatgaatggcatctggaagaagacactcaagaggttcatctgtgacttcaaaggatttgccaaggatgaagagattgcaaaaatcaacatggctgtggttgggatggcaagcaactttaaccatggtgtggacaaggatgacattgatgagcacctagaggtggttcctgaggaactgactaatgaggggttgttggaactggaacaggaacacatagctgaagaacaggccagagaaagggaaacagctagagaagaaaaagaagaaaccccaagaaaattcacagtgaagggttttagcagaagctttagcagaagctttttaaggagctcaacaagctccttaaaaagtttgaaaacatggaccataacaccaaaaggttttcattaatagagaggaatgttcttgctgcattatctgcatacaacaagcaaatctatgatgaatgaaagaaacaaaccaagcaaactattgtggacataatttttcaaagagtgatacctcctcaagaagagcctcaggcaggtccttcagggggtatccagaggaagtcattgttgtcataggagatggcagctccatgtgtgtcattgcttctgaaggccttccagtgggataagatgtgtaggtggaagccagtgatattgatgaccctgagcctgtgtagaccttggctagtgtgtgtgtttgtgtcttagtttttaacaaaaaagcttaaaaagtaaaaaaattttaaattttaaaaatatttaaaaatttttctaaacaaatttttaaaagttttaaaacattttaaaatgtttaaaaaattttttaacaaaaaagtttaaaaattaaaaaaattttaaaaaagcttacagaataaggatataaggaaaaaatatttttatgcagctatacaatatgtgttttaatttaagcgttattacaaaggagtcaaaaagtttaaaaaaattgaaagtttataaagtaaaaaagttacagtaagcttaggtaaatttattattggagaaaataattaatttcatgtagcctaaggtatagtgtttataaagtctacagtagtgtacagtaacaccctaggccttcacactcactcactactgactcagtgactcacccagagcaacttccagtcctgcaaactccatttgtggcaagtgccctatatagatataccattttttatctttttgccatatttttactgtaccgtttctgtgtttagatgtgttcagatacacagatacctaccattgtattaccgttagtgacattattcagtactataacatgctgtacaggtgtgtttaacctaggagcaataggctatattatatagccaaaatgtgtagcaggctgtaccatctaggtttgtgtaagtacattctatgatgtttgcacaacgaaatttcttaacagcgcatgtcacagaatgtatccccatagttatgcaacatgtgactgtttattgtttaaagtttattttttctctagccaaagggttggcctacttattctgttaggaaccagacagtaaatattttagggtttgagagccatacacattctctgttgcatattcttctttgttgttttctctttcttttaaatgaccccttaaaaatatcaaaaccattctaagcttggatttggccctgggctgaagttgatcaatctttgttttagaatataggcagattgtaaagggcaggaatcacatgtacttcatttatcattatgtacccagtacctatcacacacagcaattagtatataataagtattttgttagtttcgtagactgattaaataatgtaagtgtgtagccttttcttctttctgttcattccagagctctcatgagggatgagtatactcttgctcacatgttgatgtgatctttggttacttccttttctttatagtgtgatcccctgtctcacctacccgtctgccaaatattaatcaaaagtgtcattattttgccaggcagatatttggatctgctgagcattttatctactttccaagacagactccattcagccaatttattatttttaaattttatttgtctatcctggatgcttacttttaagtaatattgaaacaagtttcttgatcagtttttatagctcttagttaaacccattcatatttctcatttccatttttattttacagatactctagattctttccatgtaaactttatgtgaaaaatttgggttatcagtcattttttgtctatatcagaattttctgattacactttctttcatgttaattttttactgataagtgtaaactgtaccaggtacagttttagaagtcaaactttacacatcaacagtatgttcggctgactggattcctttccatttttactcaggttaaacatgccttattttcatgattgtttgttttatttagttttatcagtaatattcactatgaagtgactggaagatttaggtaatccagggaacagttggtaatagttcctcatagaatccctattaattaatattaataattgaaaacagaatatctcctagtaatacattttgctcagaaaaaaaatcttttttcaattattaatattgctataattattgacttcattttctgagcaaaatatattagtagggcatattgggtggaaatagtcatgggattagaatggtagagtaaaaacattctgctttaattcaggtatcccattctccttattctgctgctataaacaaggacctcagttgggtaaatgtccaaacttttacatttcctcttgccatgtatgatttctgtccaccactaacagtgatctgcacaaaatacagctcttgtgttatttcgtcatttaaaaatctttgataaacttcctggaaagaaagaaaaatgaagtagtaacacataaaactaagaaatagtctcaacttcatgttacaattttcttttaatatactttaagttctggggtacatgtgcaaaacatgcaggtttgttacataggtatacacatgccatggaggcttgctgcacccgttaactagtgatctacattaggtatttctcctaatgctatccctcccctggcccccatcccccgacaggcctgggtatgtgatgttcccctccctgtgtccatgtgttctcactgttcggctcccacttatgagtgagaacatgtggtgtttggttttctgttcttctgttagtttgctgagaatgacagtttccagttccatccatgtccctgcaaaggccatgaactcatccttttttatggatgcgtagtattccaatggtgtatatatgccacattttctttatccagtctatcattgatgggcatttgtgttggctccaagtctttgctgttgttaacagtgccacaataaacatacatgtgcatgtgtctttatagtagaatgacttataatcctttgggtatatacccattaatgggattgctgggtcaaatggtttttctagttctagattcttgaggaatcgccacattgtcttccacaatggttgaactaatttacactcccaccaacagtgtaaaagcattctgatttcttcacatcctctccagcatctgttgtttcctgattttttaatgatcgccattgtaactggcttgagatggtatctcattgtggttttgatttgcatttctctaatgaccactgatgatgagcttttcttcatatgttttttgaccacataaatgtcttcttttgagaagtgtctgttcatatcctttgcccatttttcgatggggttgtttgtttttttcttgtagatttgtttaagttatttgtagagtctggatattaaccctttgtcagatggatagattgcaaaaattttgtctcattctgtaggttgcctgctcactctaatgatagtttcttttgctttacagaagctctttagtttagatcccatttgtctattttggcttttgttgccattgctgttggtgttatagttgtgaagtctgcccatgcctatgtcctgaatggtattgtctagcttttcttctagagtttttatggttttaggtcttagatttacatctttaatccatcttgagttaatttttgtataaggtgtaaggaaggggtccagtttcagttttctgcatatggctagccagttttcccaacaccatttattaaatagggagtcctttccccattgcttgtttttgtcaggtttgtcaaagatcagatggtcgcagatgcgtggcattatttctgaggcctctgttctgttccattgatctatatatctgttttgtacaagtaccatgctgttttgattactgtagccttgtagtatagtttgaagttaggtagcatgatgcctccagctttgttctttttgcttaggattgtcttggctatgtgggctcttttttggttccatatgaaatttaaagtagtttttcctaattctgtgaagaaagtcagtggcagcttgatggggatagcattgaatctataaattactttgggcagtatggccattttcacaatattgattcttcctatccatgagcatggaatgtttttccatttgtttatgtcctctcttatttccttgagcagtggtttgtagttctccttgaagaggaccttcgcatcccttgtaagttgtattcctaggtattttattctctttgtagcagttgtgaatgggagttcacttatgatttgactctctgtttgttattggtatataggaatgcttgtgatttttgcacattgatctgtatcctgagactttgctgaagttgcttatcagcttaaggagattttgggctgagacagtggggttttctaaatatacaatcatgtcatctgcaaacagagacaatttgacttcctctcttcctatttaaataccctttatttctttctcttggctgattgccctgtccagaacgtccaatagtgtgttgaatatgagtggtgagagagggcatccttgtcttgtgctggttttcaaagggaatgcttccagtttttgcccattcagtatgatattagctgtgggtttgtcataaatagctcttattattttgagataggttccatcaatacctagtttatggagaggttttagcatgaagggctgttgaattttattgaaggccctttctgcatctattgagataatcatatagtttttgtcattggttctgtttatgtgatggattacgtttattgatttgcgtatgttgaaccagccttgcatcccagggatgaagccaacttgatcatggtgaataagctttttgatgtgctgctggattctgtctgccagtatcttattgaggattttctcattgatgttcatcaggtatattggcctgaaattttcttttttttttttaatgtctctgccaggttttggtatcaggatgatgctggcctcataaaatgagttagtgaggagtccctctctttttattgtttggaatagtttcagaaggaatggtaccaactcttctttatacctctggtagaattcggctgtgaatctgtccagtcctggactctctttggttggtaggctattaattactgcctcaatttcagaacttgttattggtctattcaggggttcaacttcttcctggtttatatgtgggagggtgtatgtgtccagaaatttatctattttttttctagactttctagtttatttgcataggggtgtttatagtattctctgatggtactttgtatttctgtgggatcggtggtgatatctcctttatcattttttgtgtccatttgattctgctctcttttcttcatttgtctgactattgttctattttgttgatcttttcaaaaaaccagctcctagcttcattgatttttttgaagggttttttgtgtctctgtctccttcagttctgctctgatcttagttatttcttgtcttctgctaccttttgaattcgtttgctcctgcttctctagttcttttaattgtgatgttagggtgttgattttagatcttctctgctctctcttgtgggcacttagtgctataaatttctctctaaacactgctttagctgtgtcccagagattctggtacgttgtgtctttgttcttattggtttcaaagcacttatatatttctgccttcatttcgttatatatatctagtagtcattatagtagtcattcaggagctggttgttcagtttcacaattaaaaaaaaggctttggaagtttcttctagaaatttctaattagttgtagcacatggagaaaaaagctaaatttctccaagcttttaaaaaactaatgtaatactgatatcaaaatgtgactaagtgggttgggcacagtggctcacacccataaacccaacactttgggaggcctaggcgggtggatcatctgaggtttggagttcgagaccagcctgaccaacatggtgaaaccccgtctctactaaaaatacaaaaaaaaattagccaggcatggtggtggacacctgtaatcccaactactcaggaggctgaggcaggagaatcgcttgaacccaggaggtggagggtgctgtgagcaaagattgtgccactgcactccagcttgggtgacagagtgagactccatctcaaaaaatatatatatgtgtatatatatgtatacatacatgtatacatatatgtgtgtatatttatgtatacgtatatatatgtatttatatgtatatgtatatatgtatgtatatgtatatatgtgtatatacatatatatgtgcatatgtatacacacacacatatatatgtatatatatgtatacatacatatactgtgtgaatccgtccagtcctggactctttggttggtagactttttaggtttgtatgtacgtgcgtgtgtgtgtgtgtgtgtgtgtgtgtgtgtgtataaaaatatatatacatatattgttgcatgtatagtcacaagcaaaattacagttattttttatgtgaacatatacatgcatatatgtatgtatatataatatacaaataacatttatatattttatatacattatatattatgtatacttctacacatacatacatatatggatatatacattttgtatacatgtatataagttcacataaaaaataagtatagtttaattttgcttgtgcctatagatgcaaaaatcctgcaattgcaaagtaagcagaaactagcagtccttttttataagtgcctatattagtctgttctcacactgctgataaacacgtactcgagactaggtaatttataaagaaaaagagatttaatggacttaacagttccatgtggctggggaggcctcccagtcatggcagaaggtgaaaggcatatcttacatggcagcaggcaagacagaataagagccaagcaaaaggggaaacaccttataaaaccatcagatctcttgagacttacttactaccacaagaacagtatgtgggaactgcccccatgattcagctatctcccactaggtccctctcacaattatggaattatgggagctacaattcaagatcagatttgggtggggacacagccaaaccatatcagtatctctaaaaaaattgaaccatttttcatttttaaagtcaatttaaatattagcaaattaatagaattctattttaaaaggtcactgtagtaaaacatgatcctctcaaaagatgtcagaagatgtttgattaatttcatttctattattggtttaaaagacactttataatattgcatatgtttttattatgttgaaaaacatgtgtatgtattactggcataccttggagatattgcatgttgggttcagaccactgcagtaaagtaagtatcgcagtaaagcaagtcacacaaattgcttggttttccactgcatataaaagttatgtttacattatatggtagtgtattaaatgtgcaatagcattatggctaaagaaagaatgtactacatatcttaattttaaaaatttactgctaataaatgctaaggatgatctgagccttcagtgagttgtaatctttttgctgatggagggtcttgccccgatgttgatggctgctaactggtcaggttggtgattgccgaaggttggggcagctttggcaagatcttaaaatcagacaacaatgaagtttgctacatttattgactctttgtttgatgaaggattcctctgtagcatgcgatgctgtttaatagcatttgcccatagtatgatttctttcaaaattggagtcagtgctctcaaactttttgctattgctttattcatcaagtttatgtagtattataaatcctttgttgtcattttaaccaaggctcacaacatcttcacttaggagtcaatttcttctcaagaaactgctttcttctcaaccataagaaacaacgcgtcagctctttacgttttatcaggatattatagcaattctgccacatccttcagatttcacttctaattctgcttctcttgctattcctgccatatctgcaattacttccaccactgaagtcttgaaaccccacaaagtcatccatgaatcaacttatttcaaattcctattagtgttgacattttgacctcctcccatgaatcatgaatgtccttactggcatctaaaagggtgaatcccttccaggaagttgtcagtttactttgcccagactcatcagaggaatccctctgtggcagctatagccttacaaaatttatttcttaagtaataagacttgacagttgcagttatttcttgatgtacagactgcagaacggatgttgtcttagcaggcaacactaatgtcttgtacatttccatcagagttcttgggtgatcaggtgcattgtcaatgagtagtaatatttggaaaggaatcctttttttggagcagaaggtctgaacagtaggcttaaaatatccagtaaaccatgctataaacagatgtgctgtcatccagtctttgttattccatttatagtgcacagttagaggaaatttagcataattcttaaaggttctagcatttttgaaatggtaaatgagcatttcaacttaaacttagcagctccgttagaccctatcaaagagagtcagcctgtcctttgaagatttgaagccaggcattgactcctctctagctgtgaaagtcctagatggcatcttctttccgtgtaaggatgtttagtctattttgaaaatctgttgttgtagtgtagccaccttcatcagtgatcttagctagatcttctggataatttgctgcagctttaacgtcagcacttgcagcttcaccttgcagttttatgttatgaagacagcttctttccttaaacctcatgacccaatctctactagcttccaacttttcttctgcagcttgcttgcttctcagccttcaaagaattgtagagagttagagctttgctctggatcaggctttggcttaagggaatgttatagttggtttgatcttctctccagaccactcaaacattctccatatcagcaataaggcttttttgctttcttatcttttgtttgttcactggagtagcacttttaattttcttcaagaatgtttcctttgcattcacaacttggctatttggtgcatgaggcctaacttttggcccatcctggtgatacggtttggatttgtgtccctgcccaaatctcatgttgaattgtaatacccagtgttggaggaggggtttggtgggatgtgattagatcatgggggtagattttccccttgctgttctcatgatagtgagtcctcatgtgatctggttgttcaaaagtgtatagcgcctcccccttaaccctattccttctgctccagcatgtaaaatgtgcttgcttctccttcaccttacaccgtgattatgtttcctgaggcctacccagccacacttcctgtacagtctgcagaactgtgagccagttaaacctcttttcattacaaattaccctgtctcaggtagttctttacagcaacacaagaatggactaatgcatttggcttttgacatgccttcctcactaagcttccttatttctagcatttgatttgaagtgagacatgcaactgtttctttacttaaacacttagaggccattgtagtgttataaattgcccaaatttcaatattgctatgtcttagggaatgggaaggcctgaaaagagggagaggtaggggaatggctggtcagtggagcagtcagagttcatacaccatttgtcaatttaagtttgccatcttatatgggcataaattgtggtactccaaagtacttagaacactaacattaaagatcactgatcacaaatcaccattatagatacaacagtaatgaaatgtttgaaatattgagagaattaccaaaatgtgatccagagacaggaagtgagcacatgctgttggaaaaatggtaccaatagatttgcttgacacaaggttgtcaaaaaccttcaatttgtagatatcacagtgccttcaaagagcagtaaagcaaagtacaataaaacaaggtatgcctgtatatttttaggcagtatcatataaaatggtcacccacagcatgtattcctatcagtgtcaggttcaagtcaagggtttttcttgtcaacactatgtaacattattatggaagtgttggtgacagttattaaacaagaaaatgaattaatggaattattgagggctatagagtgctaaagagcactctgtagctgtgctaaacagcacagctccttagcttggctataaaaacctttttagccttatctttcatcgtaccaccaccaccatcagctgggactaggtgtcatggtatcagtttctctcaaagcagtggttttcagacatggatggtgtatgtattaatattacttttaaagaaaaaaaattattgtgcagcctgatttctgtacagttaagtatgattactttatagtctttacataatataaggaatttacaaattgagttgaaacaagaccacagaacaaaataaaaattaacattagtgtaacagatggtattttgctggcactagattgctatgggtctcattctatatttaatctgtttttgtatttttacttcaataacattccactggtttttgtatttctaaaattaactcagaccttcaggagatgtgcctttactctttggtccttcatttgatacaaacacaattgtaaacccatttgaaacatttagaaatcagtaagtcaaaattaaagttactttaccacacgaattatcagacccgtagtgtgagtgcggtggctcatgcctgtaatctcagcactttggaagcctgaggcaggcagatcgcaaggtctggagttcaagaccaacatggtgaaaccccgtctctactaaaaatacaaaaattagctgggcctggtggcgcatgcctgtaataccagctcctctggaggctaaggcaggaaattacttgaaccgggacccaggaggcagaggttgcagtgggctgagatcacgccactgcactccagcctgggctacagagggagactctgtctcaaaacaaacaaaaaaagcgtagtgtgctaatgctaatgcacattgtgtttttgcaggatatgaatatagaatatgcgtgatttctggagtttgctacaatttgttaatgaatattctaaggcaaatccatcacatactttcaattgcaataaaatatgtatttttttctaaatcttatgtgtccttgcattcatttttcccactttctggttttccccctttgtaaagctctctctctctctctaaggtacctactgtcaacaacgggaagtggaggccattactgaaggtgtagaggaagatgaaggattttgctgttgtgaacctggccatattcctcacatgctttcatttaatgctgcatttagccagcgatggctagcttgggaagtgatagtcacaaagtacattctggagggttatagcatcactgataacagtgctgcttctatgcttcaagtctttgatcttcggaaagtactcaccacttactatgtcaaggtaggagtatgtgcctacttagatctttagataatcagagtttcttcttgggaatgacatatataagtatatatatatgtatatacttttttttaacgtatgctttgcttccaagtacttatttaaattctctaggatccagaatactccataaaaataagcctactaacgtcttgccttctctttgtttactggaattcattctattcattcattaataataatagctagacatttgtagcttgtgttttagcttgtgctaaggaatatgtacacacaaatacgcatacacacgtgtatcttacttaatactgtaaagaagtatttccctattttacaaataaacaacttaaggatcagaagttaacttgtccaagatcctctaacaagtagagtttggggcttaaaagccaggcttgtctgactcttgagcccttgcccttgaccactgctttgcactgctttcattcaacaaactgaataaaagtattgcaaaattcaagaggtccctaagaccaccctcacttctgacatcagctgtaattttggggtccccaagaccactcatagggtaagttgctagaaacacccacggaactcagcaaagttgtcatacccacattacactcatgttactacagtagaaggacacagattaaaatcagccaaaggaagaggtacataggatattgtccagagacaccgaatcaaggagcttccagttgtcctctcacagtagagttgtgcagatgcctgtttttcccagcagtgaagcatggctgtactcacgggctgttgtccaccaaggaagcttgctcgagcttggtgtcctgtcacgtaggcatggttgaccatccacatggccagcgtaagtctccaggacgtccagaggtcatgctgatactgtgtggctctaggtctccagctgaacaaagactctttaacgggaagggcatcccaaggcttagcggttaccccctagaacccaagggtaaaggccaaacccctcgttgggcaaggttaatcctttactgcacaagatactcttatttttgctaaagagtttacagaaatacagtatggttgtcacttaggggcttccaggtgaagccagtatttttaagaaggaaatgtgtgctaagctttaataaccaacatctgaatttttcacatcgttttttcttttcttctcttttttttttttttttttttttgagacagggtttcattctgttgcccaggctggactacagtggcatgatcgtagctcactgcagccttgacctccagggctcaagcaatacacccacgttaacctcctgagtaactgggactacaggtgcatgccaccacacccagctaattttttatttttttgtagagatgaggtttcactgtgttgcccaggctctcaaactctgggctcaagcagttctcccacactggcctcccaaagtgctggggttataggtgtgagccgccatccccagcctgaaattttcatatcttgtgttgttacctctcctcacgaccttatttgctgattgggatgaacgctgagccttccattttatgtttggcttaacctaacctcaggaagctagagattgatttcacaatattttttacttgtatgtgcgtgtggcattttctatctctagttctaaatatatatctctataacttggcctaggaccaccagatggccttaataactctctatgagaaattattcaaaataaatgcagcacagtaaagttttttttacctcttttgaaatatcctaagttcaaaatctgtaaaatccatagattagggccaggcgcagtggctgatacctgcaatcccagcactttgggaggccgaggcggatggaccacttgaggtcaggagttcaagaccaacctggccaaaatggtgaaaacccatctctactaaaaatacaaaaatttatctgggtgtggtggcgggcacctgtagtcccagctgaggcatgagagttgcttgaacccaggagatagaggttgcagtgagccgagattatgccatcgcactctagcatgggcgacagagtaagactctgtctctaaataaataaataataaaataaaataaatagaattgttttgaagttgctttgttgaatttatggttgtgattttaaagtattagatgttttttcatccagtaaggcctgaggtatattattatagtattcttaaaatatatatgtagaatattgagggggaataaaatactttttagtcagactaaaaagtgttttactatttatcattataaataattggaatttatttcattgagtaatctgagttaattgaaattgtaatttaatctgaattcttttttttttgtcttgttcatgttagggtatcatttattatgttacgacctcgtctaagctagaggagtggctagctaatgagacaatgcaggaaggacttcgtctgtgtgctgatcgcaattatgtcgatgtggacccgacctttaatccaaacattgatgaagactatgaccaccgactggcaggcatatctagggagagtttctgtgtgatttacctcaactggatagagtactgctcttcccgaagagcaaaggtagagtttatttcatttataactctttgaatccaggtttttccaaagatgcaaagaatgtccctgttagttcttatgaggtcagtttttcaagaccttcctctttctgatcttctggttaagataacctaactggttcattatggttgggccaaaccagctctgccaaaacaggttaaaggaagtggcctccctctttctttcatttgcagtgtcccagtctcactgtccaggtagcacctccttcatcctgggcatgtacaggcatgcacatacattcacattccatgcattaccctccaaaatctagtccttaagaaattctacctctgtctgccacacttaaggataattaaatgtctttgtcccaaatagaaagtctagaccagtgctggctaatggactttctgcagtgttggaaatatgctgtcactgccacatgtggctgtgaaacacatgaaatgtggctagtacaactgaaaagccgaattgtaaattttatttaattttaactgatttaaatttaggagcccatatagctagtgactaccatattagacagtgtgcatctagaccattgattttcaaatgttaatatgagtaaaaaagacataggaacttgtaaaaatgcagattcctgggccccacctgcaagactctgatctaggtctaggctggggatcaccctaggtgattttaattctggtggctcccaatccacacattaggataacatgtcttatcctaaaagtaagatgagttagggacttcagcaactacagctttcttctaggtctcatgatttttgtggtagtatcacacccctgatcagactccatgtaacagaattgcagtgccaaggcctgtgattacaaagctaattcctaccaccactgctgctttttaagcaaaagccttgtgtagttgaaccaccagtgtcgtatgtacagatgtacctgctatcatggagcagtgtgagctaccttgacaactggtgccttcgtcatggtctaggaggtgcataccgaccatcttcacgtttagcacttggtttagtccttcctttgccaccacttagagtaagacagccatcatatcagcctctttttactccatcaataagaacaggagcatcttgtacttcctttctgagcagtggcctttgagcttttatactagatgtgcagtatatactgagcagagtagtatatcttaaaagaagggatagtgagttggataaaataacctcacaaaaggttcagaagaccagcagacagtggctagaagtagaggacctcaaagctaaacttctttcttccaaacatataataaatagttttattttttcataaataaaatacacttaaaatacttcgcgtactgttctcaaatccttgaactgacttttgttggggagagtaatgggaacagtcatgttattctatatctcttctttggcttagatgatattggctattttgttatgagttaatcatgatgttttgggctaggagttcacagtctacccactcaggaacagggttccatcctaccttaaggacctttctcttagagattattgctgaagtcatgaacatggctcaaggaagtcctcctgattggtaataaatcatatattcaaaaggtttacctctaaacttgggtatccccagtctcatcaggtagcttatttcactaatcctggtctgttttgttttctactcttacaatctgtttagaaaaaaattatcagttgtatttttccagctatatagtcttcccatctgctctagtttctcttttaagttgaacaagattatcttcatctccttaagatcttgcatgctattccctgaatcaacattcccagaataaccttttcctggggacattaatcaggccagacttgctgactccaaactgtagtgccctcatctgaatgtttaaaagctgcctcagacccttcttccatagtttcctttcaagatagtgtaagattgatcctgaactaactgcattaaaattaccttcaatgggaaaatgaaaagattcatctcagcttctttctcctacttttcaaacgataagtatttctttcactttgttgttagtattagcaagaattcttggtgagaatttctaatgcaatttagggactagggcacacgccttctccaccagtaacaaaatagtgctaccaggcttgaactaatttttttctttcagcaaattaaagatgttgctatactgtcttctggcttgcattgtttctgatgagaagtctgctgtcattcttttctttgttcctctgaaaaaaatggtaggtacaatataatatcttttttcactggctgcttttaagattttctctttattactggttttaagcaatttaaatatgatgtgccttagtgtagttttctcatgtttcttttttaattattattatactttaagttctgggatacatgtgcagaacatgcaggtttgtggcatgggtatacacatgccatggtggcttgctgtacccatcaacctgtcatctacattaggtatttctcctaagctatgcctcccatagccccctacaccccgacaggccccggtgtgtgatgttcccctccctgtgtccatgtgttctcattgttcaactcccacttatgagtgagaacatccagtgtttggttttctgtccctgtgttagtttgctaagaatgatgctttccagcttcatccatgtccctgcaaaggacatgaactcatccttttttatggctgcatagtattccatgttgtatatgtgtcacattttatctagtctatcactgatgggcatttggattggttccaagtctttgctattgtgaacagtgctgcaataaatatacatgtgcatgtgtctttatagtagaatgatttataatcctttgtgtgtatacccaaaatgggattgctgggtcaaatggcatttctggttctagatccttggggaatcgccactctatcttccacaatggttgaactaatttacactcctaccaacagtgtaaaagcattcctatttcttcacatcctctccagcacctgactttttaatgatcgcctgactttgtaacttttttttgtttcctgactttttaatgatcgccattctaacgggagtgagatggtatctcattgtggttttgatttgcatttctctaatgaccattgatgatgaactttttttcatatgtttgttagccacataaatgtcttcttttgagaagtgtctgttcatatccttgacctacttttggatcgggtttttttttcttgtaaatttaaattccttgtagattctggatattagccctttgtcagatgggtagattgcagaaattttctcccattctgtaggttgcctgttcactctgataatagtttcttttgctgtacagaagctttttagtttaattagatcccatttgtcaattttggcttttgttgccattgcttttggtgttttagtcatgaagtctttgcctatgcctatgtcctgaatggtattgcctaggttttcttctagagtttttatggatttaggtcttacatttaagtctttaatccgtcttgagttaatttttgtataaggtgtaaggaaggggtccagtttcagttttctgcatatgggtagccagttttcccagcaccatttattaaatagggaatcctttccccattgtcttgtttttgtcaggtttgtcaaagatcagatggttgtagatgagtggcattatttctgaggcctctgttctgttccattgatctatatatctgttttggtgccagtaccatgctgttttgattactgtagccttgcagtagagtttgaagttaggtaatgtgatgcctccagctttattctttttgcttaggattgtcttggctatgcgggctcttttttgattctataggaaatttaaagtagttttttctaattcttagaagcaagtctgtggtagcttgatggggatagcattgaatctgtaaattactttgggtagtatggccattttcacaatattgattcttcctatccatgagcatggaatgtttttccatttgtttgtgtcctctcttatttccttgagcagtggtttgtagttctccttgaagaggtcgttcacatccttgtaagctgtattcctaggtattttattctctttgtagcaattgtgaatggaagttcactcatgatttggccctctgtctgttattgctgtataggaatgcttgtgatttttgcacattgattttgtatcttgagactttgctgaagttgcctatcagcttaaggagattttgggctgagacagtggggttttctaaatatacagtcatgtcatctggaaacagagacaatttgacttcctctcttcctatttaaataccctttatttctttctcttggctgattgccctgtctagaacttccaatactgtgttgagtaggagtggtgagagagggcatccttgtcttgtgccggttttcaaagggaatgcttccagtttttgctcattcagtatgatattagctgtgggtttgtcataaatagctcttattattttgagataggttccatcagtacctagtttatggagagtttttagcatgaagggctgttgaattttattgaaggccttttctgcatctattgagataatcatgtggtttttgtcattggttctgtttatgtgatggattacgtttattgatttgcatatgttgaaccagccttgcatcccagggatgaagccaacttgattatggtggataagctttttgatgtgctgctggattctgtctgccagtatcttattgaggattttctcattgatgttcatcatgtatattggcctgaaattttctgtttttgttgtgtctctgccaggttttggtatcaagatgatgctggtctcataaaatgattagggaggagtccctctttttctgttgtttggaatagtttcagaaggaatggtaccagctcttcttcgtacctctggtagaattcagctgtcagtccgtctgatcccgggctttttttggttggtaggctattaattactgcctcaatttcagaacttgttattgatctattcagggattcgacttcttcttggtttatacttgggagggtgtgtgtgtccagaaatctatccatttcttctagacctagtttatttgcgtagaggtgtttatagtattctctgatggtagtttgtatttctgtgggatcagtggtgatatcccctttatcatttttactgtgtctatttgattcttctctcttttcttctttattaatctaactagcagtctatttgttgatcttttcaaaaaaccagctcctggattcattttttgaagggttttgttgtatctctatctccttcagttctgctctgatcttagttatttcttgtcttctgctaccttttgaatttgtttgctcttgcttttctagttcttttaattgcgatgttagggtgttgattttagatctttcccactttttttctgtgggcatttagtgctataaatttctctctaaacactgttttagctgtgtctcagagattctggtatgttgtgtctttgttctcattggtttcaaagcacttatttatttctgccttgatttcattatttacccaatagtcattcaggggcaggtttttcagtttccgtgttgttgtgcggttttgagtgattttcttaatcctgagttctaatttgattgcactgtggtctgagagaccgtttgttttgatatctgttctcttgcatttgctgaggagtgttttacttccaattatgtggtcagttttagaataagtgcaatgtggtgctgagaagaatgtatattctgttgatttggggtggagagttctgtagacatctattaggtctgcttggtccagagcggagttcaagtcctgaatatccttgttaattttctatctcgctgatctaatattgacagtggggtgttaaaatctcccactatgattgtgtgggagtctgagtctgtttgtaggtctctaaggacttgcttcatgaatctgggtgctcctgtattgggtgtatatatatttaggatagttggctcttctcgctacattgatccctttaccgtagcttttctttgtcttttttgatctttgttggtttaaagtctgttttatcagagactaggattgcaacccctgctttttttttgctttccattcacttggtaaatattcctccatccctttattttgagcctatgtgtgtctttgcacatgagatggatctcctgaatacagcacaccgatgagtcttggctctatccagtttgccagtgtgtgtcttttaattggggcatttagcctgcttacatttaaggttaatattgttatatgtgaatttgatcctatcattatgatgttagctggttattttgcccattagttgatgcagtttcttcatagtgtcagtggtctttacaatttggtaaatttatagtaccagtggctggtactggtttttcctttccatatttagtgcttccttcaggagctcttgtaagggaggcatggtggtgacaaaaatctctcagcatttgcttgtctgtaaaggattttattactccttagcttatgaagcttagtttggctggatatgcaattctgggttgaaaattcttttctttaagaatgttgaatactggccctcactctcttctggcttgtgcggtttctgcagagagatctgctgttagtctgatgggcttccctttgtgggtaatccgacctttctctctggctgcccttaacattttttccttcatttcaaccttggtgaatctgacgattatgtgtcttggggttgctcttcttaaggagtacctttgtggtgttctctgtatttcctgaatctgaatgttggcctgtcttgctaggctggggaagttctaggtaataatcctgaagaatgtttccaagttgattccattctctgcatcactttcaggtacaccaatcaaatgtaggtttggtcttttcacatagtcccatatttcttggaggct

SEQ ID NO: 7478 - DNA, 395 bp, Homo sapiens
ctctcatcttgtcttcatgctttatttcattaagttgatcttcaatctctgatatcctttctcctgcttgatcgatttggctattgatacttttgtatgcttcacaaagttctcatgctgtttttcagctccatcaggtcatttatgttcttctctaaactggttattctagttagcaattcctctgaccttttttcaaggttcttagcttccttgcattgggttagaacatgctccgttagcttggaggagtttgttattacccatgttctgaagcctacttctgtcaatttgtcaaactcattctccatccagttttgttcccttgctggcgaggagttgtgatcctttggaggagaaaaggcattctggtttttggaattttcggccttttt

SEQ ID NO: 7479 - DNA, 400 bp, Homo sapiens
ctgacctggtagtatgcattgtaattggtgtgctgtattttgctattcatgtaagcacagtcttcacagtattgcaggtaaggaatcattttctccttttatttgtttgtttgtttgagacagggtctcactctgtcacccaggctggagtgcagtgttgcgatcacagttcattctaaccttgaatccctgggctcaagtgatcctcccacgtagctaggactacagttgtgcaccaccacaccaggctaatttaaagaattttttcttctttttttgtagaaactgagtcttgttgtgttgcccgagctggtctcaaactcctgggctcaagcatttctcctgccccagtctcccaaagtgctagaattacagatgtgagctacttcacccagcctgt

SEQ ID NO: 7480 - DNA, 298 bp, Homo sapiens
tggcagcagcaatggggcagaataaagccatgcaaggtggtacaacgtaatgctgggtggctgtctgcttcccctcatcgcggggtgtcagtggagggaccaataggggctgaacttttaccttaatgcaacaataatgaagtaaaatgagcagagtgaggctgtgagagtcagcactttgcttccatccacctccactggtgttggcgaaaaaagagggaaatggagcttttccccacacttggcagcaaaggagcagaatgagacaacaagaggaggtggtgctactcacagctca

SEQ ID NO: 7481 - DNA, 2194 bp, Homo sapiens
aagtgcccagttcttgttgctacttcagtagctgccagagggctggatattgaaaatgtgcaacatgttatcaattttgatcttccttctaccattgatgaatatgttcatcgaattgggcgtactggtcgttgtgggaatactggcagagcaatttccttttttgatcttgaatcggataaccatttagcacagcctctagtaaaagtattgacagatgtaagttaaacttttatgatggaatggatagttttcttactttgttgttgaaagtagacattttatgcatgtgtatataacaagtaaacttttccaatatttaatactttatgttgcatatgaagtcaattttttttaaaggctcaacaggatgttcctgcatggttggaagaaattgcctttagtacatacattcctggcttcagtggtagtacaagaggaaacgtgtttgcatcagttgataccagaaaggttagtagaaaggaaaacttgagaacttgtcttctagttactctttgtaaatgttgtgcttaatattgtgaagtaactataatatttaataatcaagccattgttttcgtgcctggaaggtagctactttattatttcattaacattttatgtatatacatatttttggttttaaaggtcaggaattaactttgagatttatgcctaaacagtctcctttcccagattttaaattttaatttggaatcttttaaacttctgatggaattatttaatttttgaattctgacaacattaattaatataaaatacaggacctgttggggttacaagtcttttctttttcttttctttttttttttttttgagatagtgtctggctctgttgtccaggctggagtgcagtggcatgatcttggctcactgcaacctccgcctcccaggttcaaacaattctcatgcctcagcctccagtgtatctgggattacaggcatgtgccaccatcttagctggttttttttttttttttttttgtatttttaatagagacagggtttcaccatgttggccaggctggtctcaaactcctggcctcaagtgatccacctgcttcaacctcccaaagtgctgagattacaggcgtgagccactgcgcccagccacgaggctacaagtcttttctggtatgtcaggtttttataggctgaacaccgcctttattcagaaacaatgagcatgttaattaaatatttatgctgattcattgagtgtagtgcattaagttttccccacttgtcaaaactattgacttaaaaaatatttttcttgaaacattttgtgcaatttagatttcctcatttgacaggagccttttttcaggtgaatcagatttagtgagaataaagttctttgattatttggggaagacatggtagatactttgagtccttgctctcagtctgagtgatgtaactttaaagctgtcataaaattaaatgtttgtttgtttctttttttttttttttaaataattaccagggcaagagcactttgaacacagctgggttttcttcttcacaagctcccaatccagtagatgatgagtcatgggattaaagccaaaacatccttcaagtctgtggttttgatgcagagaagaaaatagttttgatttttgagtttttaacagaagtataaaacttaacattctcatagctcctgtccttgtattctcactcctacacttaaaaaaaaaatccttactgactagttatgtgagatgctaaaacttacaacattgcagttactgatacaaatggtgttaactgggaatattaaagcattctaaatgtctttcttatttctggtatattctttagggggcttagacatgtttaatgtttaaatgccaagtcttactatagtgtttattgatcttataaaacaagcaaataggatatgatacacttttggttaaaaattactgggtctcatttttacttgagtctttaaaacagtagtgtgtcactataatgtgataatctttaagagaaagtagaatacttaagcctttcaaagtgattttgatttttagatcatcagatgtatgatgaaaatggttaaatgtttgtgatgggagctctgtactcaatggcataacaatgtttatttttataatatacaatctttccttgaaataaaggatgaaacacttttccctta

SEQ ID NO: 7482 - DNA, 2195 bp, Homo sapiens
aagtgcccagttcttgttgctacttcagtagctgccagagggctggatattgaaaatgtgcaacatgttatcaattttgatcttccttctaccattgatgaatatgttcatcgaattgggcgtactggtcgttgtgggaatactggcagagcaatttccttttttgatcttgaatcggataaccatttagcacagcctctagtaaaagtattgacagatgtaagttaaacttttatgatggaatggatagttttcttactttgttgttgaaagtagacattttatgcactgtgtatataacaagtaaacttttccaatatttaatactttatgttgcatatgaagtcaattttttttaaaggctcaacaggatgttcctgcatggttggaagaaattgcctttagtacatacattcctggcttcagtggtagtacaagaggaaacgtgtttgcatcagttgataccagaaaggttagtagaaaggaaaacttgagaacttgtcttctagttactctttgtaaatgttgtgcttaatattgtgaagtaactataatatttaataatcaagccattgttttcgtgcctggaaggtagctactttattatttcattaacattttatgtatatacatatttttggttttaaaggtcaggaattaactttgagatttatgcctaaacagtctcctttcccagattttaaattttaatttggaatcttttaaacttctgatggaattatttaatttttgaattctgacaacattaattaatataaaatacaggacctgttggggttacaagtcttttctttttcttttctttttttttttttttgagatagtgtctggctctgttgtccaggctggagtgcagtggcatgatcttggctcactgcaacctccgcctcccaggttcaaacaattctcatgcctcagcctccagtgtatctgggattacaggcatgtgccaccatcttagctggttttttttttttttttttttgtatttttaatagagacagggtttcaccatgttggccaggctggtctcaaactcctggcctcaagtgatccacctgcttcaacctcccaaagtgctgagattacaggcgtgagccactgcgcccagccacgaggctacaagtcttttctggtatgtcaggtttttataggctgaacaccgcctttattcagaaacaatgagcatgttaattaaatatttatgctgattcattgagtgtagtgcattaagttttccccacttgtcaaaactattgacttaaaaaatatttttcttgaaacattttgtgcaatttagatttcctcatttgacaggagccttttttcaggtgaatcagatttagtgagaataaagttctttgattatttggggaagacatggtagatactttgagtccttgctctcagtctgagtgatgtaactttaaagctgtcataaaattaaatgtttgtttgtttctttttttttttttttaaataattaccagggcaagagcactttgaacacagctgggttttcttcttcacaagctcccaatccagtagatgatgagtcatgggattaaagccaaaacatccttcaagtctgtggttttgatgcagagaagaaaatagttttgatttttgagtttttaacagaagtataaaacttaacattctcatagctcctgtccttgtattctcactcctacacttaaaaaaaaaatccttactgactagttatgtgagatgctaaaacttacaacattgcagttactgatacaaatggtgttaactgggaatattaaagcattctaaatgtctttcttatttctggtatattctttagggggcttagacatgtttaatgtttaaatgccaagtcttactatagtgtttattgatcttataaaacaagcaaataggatatgatacacttttggttaaaaattactgggtctcatttttacttgagtctttaaaacagtagtgtgtcactataatgtgataatctttaagagaaagtagaatacttaagcctttcaaagtgattttgatttttagatcatcagatgtatgatgaaaatggttaaatgtttgtgatgggagctctgtactcaatggcataacaatgtttatttttataatatacaatctttccttgaaataaaggatgaaacacttttccctta

SEQ ID NO: 7483 - DNA, 2197 bp, Homo sapiens
aagtgcccagttcttgttgctacttcagtagctgccagagggctggatattgaaaatgtgcaacatgttatcaattttgatcttccttctaccattgatgaatatgttcatcgaattgggcgtactggtcgttgtgggaatactggcagagcaatttccttttttgatcttgaatcggataaccatttagcacagcctctagtaaaagtattgacagatgtaagttaaacttttatgatggaatggatagttttcttactttgttgttgaaagtagacattttatgcatgtgtatataacaagtaaacttttccaatatttaatactttatgttgcatatgaagtcaattttttttaaaggctcaacaggatgttcctgcatggttggaagaaattgcctttagtacatacattcctggcttcagtggtagtacaagaggaaacgtgtttgcatcagttgataccagaaaggttagtagaaaggaaaacttgagaacttgtcttctagttactctttgtaaatgttgtgcttaatattgtgaagtaactataatatttaataatcaagccattgttttcgtgcctggaaggtagctactttattatttcattaacattttatgtatatacatatttttggttttaaaggtcaggaattaactttgagatttatgcctaaacagtctcctttcccagattttaaattttaatttggaatcttttaaacttctgatggaattatttaatttttgaattctgacaacattaattaatataaaatacaggacctgttggggttacaagtcttttctttttcttttcttttttttttttttgagatagtgtctggctctgttgtccaggctggagtgcagtggcatgatcttggctcactgcaacctccgcctcccaggttcaaacaattctcatggcctcagcctccagtgtatctgggattacaggcatgtgccaccatcttagctggtttttttttttttttttttttgtatttttaatagagacagggtttcaccatgttggccaggctggtctcaaactcctggcctcaagtgatccacctgcttcaacctcccaaagtgctgagattacaggcgtgagccactgcgcccagccacgaggctacaagtcttttctggtatgtcaggtttttataggctgaacaccgcctttattcagaaacaatgagcatgttaattaaatatttatgctgattcattgagtgtagtgcattaagttttccccacttgtcaaaactattgacttaaaaaatatttttcttgaaacattttgtgcaatttagatttcctcatttgacaggagccttttttcaggtgaatcagatttagtgagaataaagttctttgattatttggggaagacatggtagatactttgagtccttgctctcagtctgagtgatgtaactttaaagctgtcataaaattaaatgtttgtttgtttctttttttttttttttttaaataattaccagggcaagagcactttgaacacagctgggttttcttcttcacaagctcccaatccagtagatgatgagtcatgggattaaagccaaaacatccttcaagtctgtggttttgatgcagagaagaaaatagttttgatttttgagtttttaacagaagtataaaacttaacattctcatagctcctgtccttgtattctcactcctacacttaaaaaaaaaatccttactgactagttatgtgagatgctaaaacttacaacattgcagttactgatacaaatggtgttaactgggaatattaaagcattctaaatgtctttcttatttctggtatattctttagggggcttagacatgtttaatgtttaaatgccaagtcttactatagtgtttattgatcttataaaacaagcaaataggatatgatacacttttggttaaaaattactgggtctcatttttacttgagtctttaaaacagtagtgtgtcactataatgtgataatctttaagagaaagtagaatacttaagcctttcaaagtgattttgatttttagatcatcagatgtatgatgaaaatggttaaatgtttgtgatgggagctctgtactcaatggcataacaatgtttatttttataatatacaatctttccttgaaataaaggatgaaacacttttccctta

SEQ ID NO: 7484 - DNA, 430 bp, Homo sapiens
cttcagagtacgcctctctgcctcagccaagctctctgttctggaacctctgcaggttatttctaattgagaaggtgcagcaaagcagttagggacctggactctcaaatccagtacagtcacatgttctcagccacacgacctggggaaggcacccagccactcgcaggctggaaggaggttacagaggtcaccgaggcacagccctcacaggagatgtgggtggcatgggcactcaggaagttagctgttatcagtcattattccttgacacccactctgcctgtttgttccctcaaacttcttgcaagagaactatgaagaggttgggattcttgctgatttatggtcattactgatgatgtcacgactgtccactcagggcccaaggacaccaggacaagttagcagcctgcacaggaatccagga

SEQ ID NO: 7485 - DNA, 430 bp, Homo sapiens; identical to SEQ ID NO: 7484

SEQ ID NO: 7486 - DNA, 430 bp, Homo sapiens; identical to SEQ ID NO: 7484

SEQ ID NO: 7487 - DNA, 9544 bp, Homo sapiens
gaaatcatcactcagttcaacatttattgaacaccacaatgctagaatctaggaattcaactgtgaataaggaagttatggtgtactctctgtaaacttctcataaataatgtctaaaatacaacaacattcctattgatgtatattgcttgcttccaaagactatgaagcctgtatcctcacacgtacatcacctttatttttcctattcaggtaggcttggtgatgaagatggagtaacgaaactgacaggtaaatgatattgcaccagattataactgatatcaggatgatttctgcttttcaggagtggccacaggtaccaaaggatggcacatcataccaggaatttgttgatctagtgcagtggaactgcaaggcaggtaggcaagaccatgtggaaactgaacgagccgaaattaggctacattaccttgaagccaactgtgcattcatctggtcacacctaggtatctttcacacatgtgcagtaatttgaatccataagaaaaccaccaggagatgtggcgtcaggaatatttccatctcttttgtggatatagtttgacctagctggaaaccacacattctgaggcctgtgtgctggcaatcatttctggctggtaaatacaaagacagacagttggagtgccactggtgtctaatgattacgtgtggattattcactggcctttggagaaatcaaccacgaaacaaatattttaaagacaggattttcagcagagaataagaaattctccataaactttgagaccacttgctgggagagggggtagtgtcgttttctccagctctggctcttctcccttcattcaaaattaggttttcatgttgtaatgttttatcacttccaaaggcgagttttcataggggagtcctgaaaacagttcagccctaaccctagaaaggtatcgagacatcagtggaacttgaaacctgattgcaagttagaagagaaaagaaatgaaataatgtcctgtgcagtcaaaggttattctgttgacatgtgccaggtgtgagtaaaaagacccgtgtgtgaacaacaatatccccaggaatttaaggaaaagcctgttgccacatttgtaccttaggccttatagaatccatagatttctgtgaccccaactgctatcccaccgtctacagataattgattccaatttgccactccataactgtttccgtaatgaaatgaacgtaagaggattttttcagtacattttgattggctgtgggaagctgggcagatttgtttttttaattatgtagttgaaaacagtaccctttttaaagcaaaacaccaccacatgatgagctcaacaaaacacctccatctgacctctactgcatgttttttaaaaaactcatcgagtgaagtggtaatttagtcagtgaagatagagctcgccacaattcagctctaactgcctcattctggaggcgtcatcttttctttttttcattaataaagattgaatcagtcacttgcacaacacttttcctttaatgacatttgttctaaggagtcaaccagactaactgcttgtccttgcccactattaaagctcttgaaaataccatttacaaccctgctgccccagtgacagtgctggcttctcagcacttcatttgcactctagctcagatccatttcttcaaaagtttctgatgtgttcttttactgttgagtttcacgcctgtaatcacgagaaatgactagggtcttgcagacacctttcttatctctaactggaatttcatttgtgtgccacgattttgttaaagggtgttagaatagaaaattactgtaggtgataaattaggaaaatccacaatgcattcttacatactgataatgtctctgaccctcatctactctaacactacagaatacatttaatttataaaaaaaagaatgctccttagtcataagcattatgatgttaagaatagaaccactgtcgcaatttaagtgctttatttacatcattttttttcctaactcttataaatttgttgataaggagaaatctggagagaattacccagacttcatgaggggcgtttttaaaaataaatataattgtctggtgcaggggctcacatctataatcccagcacttggggaggctgagggaggaggatcacttgagcccaggaggtgaagaccagtctgggcaacacagcaagacccccgtccctaaaaataaataaataaataaataaataaataaataaatacaataaatagaatgtaagctcctaaaggtaaagattaattatgaaaatccacaaacatagtagtaaatatttctgatcaagaatggaaaataataagtctttatgtcttaagctctgatgtccattcaacttttcaagatttccaaggatatcactgaactatagatcagaagtcaggtccaacaaaatcagtcagttatgttacagttaaatttatttcgctttcttgaagatcacaaggtaagctacatatttaagaaacataaggggtagtgaaaactaggatgatgctttttctaacaagtgatgtattatgcttccctaatacatccaaattttcatgtagatttaaaccctacttacctaaactgcacatacttctttctctcatttaagaaaagctgcatttctggctaggcgcggtggttcacacctgtaatcccagcacttggggaggccgcagcggggggatcacaaggtcaagagatcgagaccatcctggctaacacaagtgaaaccccgtctctactaaaacacaaaaaaattagccgggcgtggtggcgggcgcctgtagtcccagctactcgggaggctgaggcaggagaatggcgtgaacccgggaggcggagcttgcagtgagccgagatcgcgccactgcactccagcctgggcgacagagggagactctgtctcaaaaaaataaaaacatgaaaaataaataaaagctgcatctcttatctctagacaatagcgaaaatatataggctaatttttaaattctattatcgtagtggggtttgtttgtcgctcagaatttctggcatgcaaatagagctaagaagcagtgtttccatgactgagatgacattaaatatgtcttcatatggatcgtactgtatcatttagtagctcttcctaatgagacattcacaagcagctctcaaaaggcaatgaatcaccattgcattgaattgaatcgagataataattaagcacatttgaaacaaccacatttgttatgaattatggaaaggctatcttaatttctttacaccttttggggtatgatggttttattctgaggctaaaaatacttgtaaccaaatcttgaacagtgtaattatgaaaaaggatggctaaatcactatgcaacgtattagtgggtggcatggtaattcacataatttcttttcaatgttgctttttatcccctgttttttcacttacatataacatttgaactgactcataggttacatgatatttgaaatatggtgcaactacaagactaaatgcattctgccttattcattacttgataagttacaagaagttctttagaagcttaacagaatatccacttataataggactgccagttactgggaagatctggttttcctgaagtaagaaacagtcatccaactaaacttacagacaaatgcttttaactgctaatcaatgtgtaaatcctccagtggaatgctagagtgcttaaaatctggaacatcaagcaaaaatacaagggacggtggaatggtcagggcatagatgttcataatgtggtcccaacatcagacttagtttattttctgagtaaagaaaaaagaaattgcctcctattgtctgccttgcgttgtacctcttgggcatttttagtcacccaagacaatgacagagaacatccatttgggaccagtgatcttttgcaccactcgttctatctttgggaagtcaaaattgattttcttccacttgtcacactaaaatctcaactctgtcctttctgtttcactctcaaagagttcagcggtatcgggatcaaaggattaggaagccgcagctttaagggaggcaagcagcatgagaagactttgtggaggcagctctgagcattttatgtaagcaatctatttcagcttcaaaggaagcactggctaagtgggtgaacaacatgtaaagtgctcacttgacataaattttttttttttttaagtagctgagataaagacagcctccaatcactgaccttttattattagtcagagccctgagtacaagagagacttcagcagaggtggccaacgggcgcctgcagagactccaggcgcgttcttgcctgttggtgcaatatttgcagctgcggcactctccttcaagttgtttgttccactctctgcctgatgctatgggtatctgatttctatctctggaaacagcgtgggagccatgtggcggtcaaggctggactttaactgcaaaggagcacatcacagcaagctcccagggagccaggcacagctcagtatcagtcttggtttcacttgaaaaatgtacagaccttttataaattataggaaagagataatggaatccctatgcatttactcttctcttcataaaccatggcgagaatttttttaaaattccatgtattcagactagttaaaaaatatggataggcttttgctaattgtacattttacttggtttaatagatatatatattagagtagagctaccatttgctgtatgtcacacgtgccaggctctgggctacgtactttccatgtaaaaactcactattcctagtgaaaaacctttcggttaagtgttctacctcctatttacagaagaataaattgaggccctgcaaggattaaggaatctgtacaaagtcacacggtaagtaaaagatcaattttcaaataattaaagacaaaaacaatcaaatgtatttaatataaaataaatatttggtaaatcagaaagcagttccatagtatatattgcttctgcctcatcatgataaagttccatgttttcagcataacgatcagttttagtctgctttcttgatgtaaggattctagcgcttttgaaaaataagctgaattgataatgattttttataggtggtgatagatttgatttctgaacacctacgaagtcttacgtggttaacattgggagtgtattttcacatacacatcaaatttcttttcaaattcagtctcagactatagcctatgttttagacacatttctgtacataattaagcaattttcaaatagaaaagcgagccaccgcataaatagaagacatactatagtggttaatattgaattatggcataattaatcatagaaactcatctgaatctaatttattagtgttccccaaaaaacaccatctttgatttctactagaaaaagaaaagacaaaagtataaaaaacaacgcgtgtaatgcatttatccttctcgtgaacaagaaagagccacgtctctcgtgggttgaatgagctttatgaatactacctttactcttaaaaacaatcctggttctttcctctttccaggaagagaagctaaccttaaggggagtaatgctgctgtgccttgtcccctgttttggtgacatctcctctggggacgggcttaaaattcaggagagatgatgagggacagcgacaagggtagggcccctgttggcctcggtttgtccagtccacacatcactcccttaggagggaagaccacctataggaaggggctggaaggacacacagcaggtgatggtgctcctatggtcatgcagagctaaacaagtgaccttccttgtagggtcatcttctgtgatacacaccggtctacggagagagggtacctagactgagagaagagcctggggcttaggtgcggagttgggagcaggaagagtggggaagacctgcttggcaaaatagagtgcagtttggagatcagcagaaaagaagtgatttaggccctactgccagtcagggcatcggaagcctcagtaggtgctgcagcttgatgaacatggagttttgagaagattaatatgacaatgatacaaaaaaaaaaaaaaaaactagagagggggaaaatggaggcagcgagacagttctaaaaaatcaggcccaaattcctgacgtcttagaaatcagatgaaccccaagagacatgattataataatacaaaatataataaatacaaaataataaaaataatttgattaaaataatcaaacaaaatatttgaaggactgagatactggacagaaagtgagagaagcataataagtaaaggcttccaggctttgagaggagagagtaacaggaaggccactgagtaaaatgggttggggggaaaagaagcctattttgaacaaactttggttttcaatgttgaggtgctgaattcaaggaaaatgcttgcaatccaagtgaagtgaaatctgtagcatgtgagaccagtgtaaaggagacctctctgaaggggagaggtcagagctgatggtgtcggtgtgaccgtccatccgcccgagggtgtgagagcacgggatctagagagaaaagcagggtgtggcatgtagtgttgccagcactcatcatttggcaggagggagagggaaagagaaacctagatgaaacaggattcatggcggaggatgcggcacagggaggctggggagggctggaggttgtggatgctgtggggaccacagctgcggagacacctcacactctatgacacagcctgggtgtagaggagtggactgagacatgaatgagttaattctaccccacctccccctgcaggtgacttcactcacctaggtctcatcaactgagagagagagccagtcttggatctcattctcttgagaattgaatacccatcagtacccccacgggctgctatgttcgtgcaccttcagattccatctacctctcaaagccccagactcctaccccaggcaaggtcctattcagctactgtactcccaagcccagttaatacccccatcaaatggtaacagacgcatttacacaattactaactgtgcctgaagaattctcccaggccaccatgtttcttcaagaactttactcggctataccttaagaccttaagatatatcggcaaagaggagctattctggtgcgaagggggctcctagcagtgtcaaaggacaagcagaggtttaggacagcaaagactgggtctgccagcaggagtcttggcagcctttgagtgtagctttgatctagtggtggggacgggagctctactgcatgagcatgcacagtggggccacacgcacacaaggtgcctgggaagcacctgccttgagtgtgggggatgggatgggaggtagagcatggcagtgtcaaaacaacgatttttttttttttttaaagagggacagctgggctggatgcggtggctcacgcctgtaatcccagcactttgggaggccaaggagggtagatcacttgaggtcaggagttcgagaccagcctgaccaacgtggtgaaaccccgttgctactaaaaatacaaaaattggccgggcatggtgccgcgcacctgtaatcccagctacctgggaggctgaggcaggagaatggcttgaacgcagaggcggaggttgcagtgagctgagactgtgccaccgcactccagcctgggcgacaagggcgaaactccatctcaaaaaaaaaaaaacaaaaaaaaagagggacagctgagcccatgtgaatgtgaaggctgaattgaaggacgtcatggaaagtgacagctggatttccaaaagataggaaatatactttgaccactaaaccaacgttgcaacagaggcaagcacaggtttgatcagatgagcctgagaacctctggtggagtctgggctctgcaggtctaagaggccaccgcagtgacatgaaatcagctgctcccaagaacacactttgagcaaagcccccttctaggacatactatggtcctgtgggccaaatccagcctgctgcctacttttatatggcccttgagctcagaatggtttttgataagaaatgctacctttgaactctaattaggcaaaatgtcaactctcccccacaacaatccattcttctcattagtagacctgtattacatttaaaaagtataccctatcattactactatattaaaattttgtcagtaaaatgtgtggaaatgtgtggaatactttcacactattcttaatttgtactcctggcctgcaaagcctaaaatactatctgtccctttacggaaattgtttgctgactcctgccctagagtcttcattagaagtaattgttgctcttgagatgagagaaacacaggcagattcccagaaagtgaatcatgagcatattcatagaaactgacgtgttaaggtacattcagatctggcatctgacttcttaatggggtgattacccagtgctttttattattttgaaaagtcaagttcttttacttctcacaaatacttaacatcataaagcatttataaagtacaaagtctcctgctagaaaaaggcatgttggacattaactctgtgcttaagcagcttgcattattaaaaaatatctacaacagaaagggaaaggccaactctcttttgcaacacttacatttttaaggcttatgaaactgacaaaacttctgaggaaacacacgacttcaaggacattctcttgtaaattacagcaacagcagcagcagcatttttaaccagatgaccatttgagataacttaaactgctggaaaggtattttaagcacagctgtgatgccaaaagaaggtaccaaaggcagagctttggtagaacacaatacattacaaaagatgaaagtctaaagtgatgacaataataaattcctgttttccagaaaatcggcatttttaggagttctaaagttaatgcacttaaaatacttttgatcatatttttcccaagcttttacatattaagaaattttcagacacccaaaatttgctttataagtagttcttagaaagactaaaggagctgtatagttattttaaaatccaccctaagtgatgtgtaagttacttagctggcagcttcaatttgtaatatgcactccccaaaaaagcagggggagcatcagctataattttaataacagctctgccccgccacatatctttttgcatgggctgggaagcatgctcaccctgtgctaagagcttaagctttggagtcctgtttagataaagcacttacatttaaaaatgaagtaaataacttaatgtgtaagtagaaaaagctcccagcttagttataaaatatgacataccaagtgaacctagagctgcctaaataagtgttttacattttccagcaggctgaactatgaaaagcaactagaggacattctcccccttgaagataatcacttttattgttgccgg

SEQ ID NO: 7488 - DNA, 611 bp, Homo sapiens
tttctttttatggggctttaatattcataacattattattcattgtttttctgccccaaagatatcaagaataattaaaagagaaatctcaaataatatcacaaaatagcaatagtcatattgtgcacaggttcaaagcacaaaaattggaacaaactgcctagattcgagtctcagttctaccacatgttggctttgtggccttgggcacatgatttgatatctccaggcctcagattcctcatctgtaaaatgggtataatgttacccatctcacagaagggttatgcgaattaaagagttaataccggtaaagtacctcgaacaagcacctggcacacagtaagcgctcaatgcatgtcagttattgttaccacaggcactaggttaggcgaggggttcattcagtatttttctttagaaacactcagaaacatgccatatcctatttgatataaacatcaggcactttattatctttgttgcagtagtactagtcagataatcactttgcaggtaagttatgaatagaaacgatggtgaaatttaggccaggtgcggtggctcacgtctgtaatcccagtactttgggaagccgaggtgggtggatc

SEQ ID NO: 7489 - DNA, 148 bp, Homo sapiens
  SITE (136): n equals a,t,g, or c
aaaaaaaaaaaaaaaaaaaaaaaaaaaaaaaaaaaaaaaaaaaaaaaaaaaaaaaaaaaaaaaaaaaaaaaaaaaaaaaaaaaaaaaaaaaaaaaaaaaaaaaaaaaaaaaaaaaaaaaaaaaaaaaaaaaaaaanaaaaaaaaaaaa

SEQ ID NO: 7490 - DNA, 158 bp, Homo sapiens
taaaaaaaaaaaaaaaaaaaaaaaaaaaaaaaaaaaaaaaaaaaaaaaaaaaaaaaaaaaaaaaaaaaaaaaaaaaaaaaaaaaaaaaaacaaaaaaataaaaaaaaaaaaaataaaaaaaaaaaaaaaaaataaactaaaaaaaaaaaataaaaaaa

SEQ ID NO: 7491 - DNA, 165 bp, Homo sapiens
gggggggttggtttaacaaaaaaaaaaaaaaaaaaaaaaaaaaaaaaaaaaaaaaaaaaaaaaaaaaaaaaaaaaaaaaaaaaaaaaaaaaaaaaaaaaaaaaaaaaaaaaaaaaaaaaaaaaaaaaaaaaaaaaaaaaaaaaaaaaaaaaaaaaaaaaataaaa

SEQ ID NO: 7492 - DNA, 195 bp, Homo sapiens
  SITE (3): n equals a,t,g, or c
  SITE (30): n equals a,t,g, or c
  SITE (32): n equals a,t,g, or c
  SITE (37): n equals a,t,g, or c
gcncccaatacgcaaaccgcctctccccgngngttgnccaattcattaatgcagctggcacgacaggtttcccgactggaaagcgggcagtgagcgcaacgcaattaatgtgagttagctcactcattaggcaccccaggctttacactttatgcttccggctcgtatgttgtgtggaattgtgaacggataaca

SEQ ID NO: 7493 - DNA, 250 bp, Homo sapiens
ggtcaaagtctgtctggactccaaagtctacattcacttctcctaatccacgacctctccaagctgcagatatgtcaagggagcaccaagcggtgcagttgactagaacgctgaactctgaatgccaggctggggaaacgtgaattccattctggcttgaagggacacacagaagctcctgagcaggaaaagccatgatgggattttcacttcaggaactggcatttcaaaaacatgcaagaggccaggc

SEQ ID NO: 7494 - DNA, 250 bp, Homo sapiens; identical to SEQ ID NO: 7493

SEQ ID NO: 7495 - DNA, 250 bp, Homo sapiens; identical to SEQ ID NO: 7493

SEQ ID NO: 7496 - DNA, 391 bp, Homo sapiens
aaacatattcaagaggggtggaagaactgaggaagagaactgaagagtcacccagggaaaggctgagaggcgggagatgctgtgccaggtcacactttttaagcactgacctgtgtcaggcaccatgctgggcacacgtggtacgtcctttctgttcatgctaacctgactgtgttagttgtctgtggctgtgtaactcattatgcaaatgtagcagtttaaaacaacaaacacatattgttgcacattgttcttagggctaataatccaggaacttagctgggtaggtctggatcagggtctcttatgaggtcacagtcaactgtcagctagggctgcagtctctgaagacttagctggggctgacggatccacttccacgcgctgtctt

SEQ ID NO: 7497 - DNA, 391 bp, Homo sapiens; identical to SEQ ID NO: 7496

SEQ ID NO: 7498 - DNA, 392 bp, Homo sapiens
aaacatattcaagaggggtggaagaactgaggaagagaactgaagagtcacccagggaaaggctgagaggcgggagatgctgtgccaggtcacactttttaagcactgacctgtgtcaggcaccatgctgggcacacgtggtacgtcctttctgttcatgctaacctgactgtgttagttgtctgtggctgtgtaactcattatgcaaatgtagcagtttaaaacaacaaacacatattgttgcacattgttcttagggctaataatccaggaacttagctgggtaggtctggatcagggtctcttatgaggtcacagtcaagctgtcagctagggctgcagtctctgaagacttagctggggctgacggatccacttccacgcgctgtctt

SEQ ID NO: 7499 - DNA, 404 bp, Homo sapiens
gcagccgctcttccgggagcgcccgcttaggactcactcccgcccattccttacctcgatggaatccttagcccttagagagagggctaaaaaacaaataaacaaacaacagacaaacaaaaaaaaaaccaaattccaaatggcccccggaccctcccgcagatgcagggcgcacactggccagttctaaccatagacttgactgcatgttgacaagggtttccaacctagcttccccgaggtactgcatgaatcagtccttgctcagatggtggttgctgtaaatagctgcaatttccctccttccgtctcaaagcacggatgggaatggatttgcagcagggactctgcattatatttaaggtcttggtgagatggacacgggctccatcagctccagactt

SEQ ID NO: 7500 - DNA, 4812 bp, Homo sapiens
ctcccacaggcaagagcacatcctactggacctgaggaagaaaatgatctgtccatacccactgcctggagaatgatctgttgccagaagctggatgacttcggggcctagcccaaatgccaagctatgctaagggaagttggggttcttgtcctggaaaattgcagaatggtgaggagaatgtattgtctagacacttgcatttctcagaggttgaatgaaagtgtattcccaggtttaataatagcctggcatcctgtccttatgaataaggcatatgtgtctaacagagaaagtcttaacccttgagaggcagggtggcataagaaagaaccagagacctattcgctgacccccgcttttgttcacttacatacttgctgtgtgaccctggacaaatcacttcatctctgtgtctttggtttcctaatgagtgtaatgagatcctttccagttctaactttctgtgattctcctcatatgtagggctataaaccacaatgctgcttaccagtcctgcaagtgacatacaggtaaagagttgctgcttgttgtttttttcagtttggccgccacagactccaggttttgtaacaaaagtatattagtcctttcttgcactactatagagaaatacctgaaaccgggtaatttataaagaaaagagatttaattggctcatggttccacaggctctacaggaagcatggtgctgcatctgcttctggggaggcctcaggaagcttttactcatggtagacagcaaagccggagcgggcatcttacatggttaggagcaggaccaagtgtcgggaggagatgctacacattttcaaacaaccagatctcacaataactcactcgctcaggatcaggagaacagcgctggggcgcttgtgctaaaccattcatgagaactctgtccccatgatcccatcgcctcctaccaggccccatttccaatattggggattacaactgaacatgagatttgggtaaggacatagatccaaaacatatcaaaaagcaaatacatataccatagctttcttgttttcttcttccacttcacacatagcaatactaaagctgagctttttgacagtggtggcaatggtaagaacaatgacaaataggtcacttcaataaagaaatgataatgaggtgggagagttctctggcccccccttgcagggtgtgtgacaaggggtgcagctctctgttcgacctccatgagctcaaaccccttacgggagggggagtatgcagacaggcaggtgcaggaattggggcgagcacttttgggctctggccccacagcagcgtctaggggtgtgtgcctgcaaccctagtgttacaatgctgttttagctctgccatccacagatggcttaagtgttaaccagctcattggccccttggtacccaggcatcccaaaagaattgggtcacacacagacttgaaggatgaatgcaggggttttattgagtggtagaggtggctctcagcaggatggatggggagctgaaagtggcaagggaatgggaagatgatcttaccctggattttggccatccagttgccaaactcctctctgactgtccccagccaaactcctctcagccttcagatgctccttctcttctctctttctctgcctcacctttccgccattcatctgtgtgtctcctcatctcctagtctgcctctggagcctggggtttggggtttatatgggtacaggttagggggtatggtgggccaaagggcaactttttgggagcaaaaacaagaatgcctgtcctcatttagggccgtgggtatccaggcttgagggtggggcctttgctggggaatcgccctcttctacccagtatttccctgtcttctgtccatatcagcaactcactcaaaccttacttttgaagtctcttttctgactggatggtcagcagccttcactcttcaaataggaaaggcccaaaccaagggttccccaacttgctcctcttttcatgtcatctggattagtaaatgatgcctcattcaatccagtgcctcaagccagaaactgggagagatccttgaccttgctctgtccatcagtcatcctgtccaatccatcaccaaactgcaaatagcttatccacttctctcaatttccactatggcaggccttgtccaaacctttatcaatcctcactgagctagtgcacaaacttcctgaagtctctccacactcactccctcatcctacctcctatccattctccccactgcaaacaaagcaatctttctaaaatacaatttggatcgctttattctcattcttgaatctcttaagggggtattcccattgcatttaacatgatgtcaccaatctttactctggtttatcagatcccacgtgagctctccagcttcctctcccactcattccccaacaccatttcctcctcaaggcttcctcatatctctccatattatgcccaggcccatcctggacccggctaacccttactcatgctgtatctgtctgtgtaaatggcatttcctcggacaggctttcttgactccctcctccgaagtataccaggccccctttgtaatcatcacaaattacaattatgtgtttgattgttcacttagttataacccctttctctcacgaggttccatgaggggatagagcacttctgtcttcttcattaccataattcagtgccaaccacaatggccagtccactgtatgcaaatgtttgtggaatgaatagccaggtgaggtccccttaatggaagtttccttcttctggtttatttccatcctataagctattatcaggagcaacactgaggatgatcatttctttgtacgtttttcacttttgcaagagctctccctatgaagagcttttccatttcagcctagataggccttatttgaaagtggccatctctcttcacacgcaccctcctttgcttagagatgcagagagtttaagactttgccaagggaggtatgtcgtcaagacactcgacatggtgatgtggagcaaggctctgggtcagtctctactgaggtttgaatcttggttttgtccctttctagctaatcgactttgtgcaactaacttgcctcagtttttttcaactctaaaatatggataataatataatctaaccaataggttgtcttgaggatttaatgaagtaacaaatataaaacggttagtacaatgcctgggacatagcaagtgcctgataaacattgactcctattaatatgtttcactgaatcccagaggaaagtttgttcacgtgctgagttctagggctggagaatttcagggaaggcatctttctttgtcttctgtctccctttccctctcatttactttaccctatacccccatcctgatgtgctgtggtcccaaaaggcggcaagcaaaactatgatagactgtaattccctaccttaataatttgaagtcataagcagatttgaaatttacaagccagcagtataaaattgctgatgaccattgcttaaactttggcaagatgaattatgtctagaaataattagtaatatgttagtcaagtcactcctagataatgttgttgcattgccatttagtgacagttcaggagagcgcccttacaagaggctctgtaggcagagagtaggtgacattaaccttctaaacagaagccgctgcacaccgagtgccagagtaccaagaagaatttaacattccactcctaccgccgtctcccacttcccggcttcggcaaggtggttttaaaatgagaagcacatcccgagtactctgtgtaggtggtggagtgggaggaggtgaaatgcaagctttattttcccggctgcctgtcatccgattccccgctttcctccgactttcatgagtgatgaggtcatcccggtgcaggaaaatcaaactcctatttttcaaacccaataaaggccagcattgtacgtctgcgtaaacagagaggccagacgggcagggtggcgggaggaccagtggcccgccctctggcggccgcgagagacagcgtgccccgcgctccaccaagccgcgacagggaggcggggagggtgcgtgcgaacatgtaagttaaaattagatcaatagtcagcttagcggcctcaatcaatgcttcgcagggagagcatgcaaccatctatttataagctaacaccggcattatcttcctcttttaggacgcagagatccattactgcgcgcggcggggaagaggacgccgccgggagctggtgcgtgacacactgcagcctcgcgggctgcccgggacttcatcaagcccgggtcggctcggggcgggcaggggtaggatccataccgccgaactgcggccccgctgctcgcagccgctcttccgggagcgcccgcttaggactcactcccgcccattccttacctcgatggaatccttagcccttagagagagggctaaaaaacaaataaacaaacaacagacaaacaaaaaaaaaaccaaattccaaatggcccccggaccctcccgcagatgcagggcgcacactggccagttctaaccatagacttgactgcatgttgacaagggtttccaacctagcttccccgaggtactgcatgaatcagtccttgctcagatggtggttgctgtaaatagctgcaatttccctccttccgtctcaaagcacggatgggaatggatttgcagcagggactctgcattatatttaaggtcttggtgagatggacacgggctccatcagctccagactt

SEQ ID NO: 7501 - DNA, 404 bp, Homo sapiens; identical to SEQ ID NO: 7499

SEQ ID NO: 7502 - DNA, 1735 bp, Homo sapiens
ctgattggctgggcagatgggtgggtgagttccctctccccagagccatcggccaggtaccaaagctcagctgtatggattcccaacaggaggacctgcgcttccctgggagtaagtgctcctccagtccctgtcactggacttgtgccttagggcttggggacaaacactcagggaaggccctttgcatggatgggacagtgcctggctgcctggaggagagctaagcagttaggagatagtctactctagaaaactaagaattattttaaggcaaagaccatgctctgatcaaccagagaagatactatcaatagcccaggactatcacagctgaatggaatgggatgggacattggtgtctctgtcaactgatgaactttcacttttttttttttttttgagatgaagttttgctctgttgccccggctggagtgcagtggctcaatctaggctcactgtaacctccacctcctggattcaagtgattctcctgcctcagcctctgaagtagctgggactgcaggcatgcaccaccacacctggctaattttaaaatttttagtagagacggggtttcaccatgttggccaggctggacttgaagtcctgacctcaagtgatctgcccacctgggcctcacaaagtgctggtgaacttttgcttcttgatggacttgcccatagtgaaacttctcagtctgatggattggatgggtcctgggttaggaatcagaggcttgactgagcctgggcagcacatgcccccgctagacctagcttttgtgatctgtaaagagttaaaggtggtgcttaagctccctggaaatctagctttgactgaataagggaatgatgaggcaagtcaataagggagggaaggaacggtgagagtagttaagtggatggagcgattgatgcatgggttaagtgaaagaggaatgagaaacagctcaggccccaagctacagctatcagccagcatgcctctttttctttcttgctgccttagtgtgggtctcattgtactttggaatcctggggctgtgttctgtgataactggagggtgcattatctttctgcactggaggaagaacttgaggcgggaagagcatgcccagcagtgggtggaggtgatgagagctgccacattcacctacagcccattgttgtactggattaacaagcgacggcgctacggcatgaatgcagccatcaacacgggccctgcccctgctgtcaccaagactgagactgaggtccagaatccagatgttctgtgggatttggacatccccgaaggcaggagccatgctgaccaagacagcaaccccaaggcggaagcccctgctcccctgcaacctgcactgcagctggctccacagcagccccaggccagatccccattcccacttcccatctttcaggaggtgccctttgccccacccttgtgcaacctaccccccctgctgaaccactctgtctcctatcctttggccacctgtcctgaaaggaatgttctcttccattccctcctgaatctggcccaggaagaccatagcttcaatgccaagccttttccttcagaactgtagcctcctctcactgaaggtgggagctgcaggaatcaggtgcagagtaggaaatggaactaacctcaggaaggtggtattgacagaggtcaggacccacctggatgtcatgctatgaaacattaaaagaaaaaaaaaaaag

SEQ ID NO: 7503 - DNA, 1754 bp, Homo sapiens
gattggctgggcagatgggctgactggctgggcagatgggtgggtgagttccctctccccagagccatcggccaggtaccaaagctcagctgtatggattcccaacaggaggacctgcgcttccctgggagtaagtgctcctccagtccctgtcactggacttgtgccttagggcttggggacaaacactcagggaaggccctttgcatggatgggacagtgcctggctgcctggaggagagctaagcagttaggagatagtctactctagaaaactaagaattattttaaggcaaagaccatgctctgatcaaccagagaagatactatcaatagcccaggactatcacagctgaatggaatgggatgggacattggtgtctctgtcaactgatgaactttcacttttttttttttttttgagatgaagttttgctctgttgccccggctggagtgcagtggctcaatctaggctcactgtaacctccacctcctggattcaagtgattctcctgcctcagcctctgaagtagctgggactgcaggcatgcaccaccacacctggctaattttaaaatttttagtagagacggggtttcaccatgttggccaggctggacttgaagtcctgacctcaagtgatctgcccacctgggcctcacaaagtgctggtgaacttttgcttcttgatggacttgcccatagtgaaacttctcagtctgatggattggatgggtcctgggttaggaatcagaggcttgactgagcctgggcagcacatgcccccgctagacctagcttttgtgatctgtaaagagttaaaggtggtgcttaagctccctggaaatctagctttgactgaataagggaatgatgaggcaagtcaataagggagggaaggaacggtgagagtagttaagtggatggagtgattgatgcatgggttaagtgaaagaggaatgagaaacagctcaggccccaagctacagctatcagccagcatgcctctttttctttcttgctgccttagtgtgggtctcattgtactttggaatcctggggctgtgttctgtgataactggagggtgcattatctttctgcactggaggaagaacttgaggcgggaagagcatgcccagcagtgggtggaggtgatgagagctgccacattcacctacagcccattgttgtactggattaacaagcgacggcgctacggcatgaatgcagccatcaacacgggccctgcccctgctgtcaccaagactgagactgaggtccagaatccagatgttctgtgggagttggacatccccgaaggcaggagccatgctgaccaagacagcaaccccaaggcggaagcccctgctcccctgcaacctgcactgcagctggctccacagcagccccaggccagatccccattcccacttcccatctttcaggaggtgccctttgccccacccttgtgcaacctaccccccctgctgaaccactctgtctcctatcctttggccacctgtcctgaaaggaatgttctcttccattccctcctgaatctggcccaggaagaccatagcttcaatgccaagccttttccttcagaactgtagcctcctctcactgaaggtgggagctgcaggaatcaggtgcagagtaggaaatggaactaacctcaggaaggtggtattgacagaggtcaggacccacctggatgtcatgctatgaaacattaaaagaaaaaaaaaaaag

SEQ ID NO: 7504 - DNA, 1754 bp, Homo sapiens
gattggctgggcagatgggctgactggctgggcagatgggtgggtgagttccctctccccagagccatcggccaggtaccaaagctcagctgtatggattcccaacaggaggacctgcgcttccctgggagtaagtgctcctccagtccctgtcactggacttgtgccttagggcttggggacaaacactcagggaaggccctttgcatggatgggacagtgcctggctgcctggaggagagctaagcagttaggagatagtctactctagaaaactaagaattattttaaggcaaagaccatgctctgatcaaccagagaagatactatcaatagcccaggactatcacagctgaatggaatgggatgggacattggtgtctctgtcaactgatgaactttcacttttttttttttttttgagatgaagttttgctctgttgccccggctggagtgcagtggctcaatctaggctcactgtaacctccacctcctggattcaagtgattctcctgcctcagcctctgaagtagctgggactgcaggcatgcaccaccacacctggctaattttaaaatttttagtagagacggggtttcaccatgttggccaggctggacttgaagtcctgacctcaagtgatctgcccacctgggcctcacaaagtgctggtgaacttttgcttcttgatggacttgcccatagtgaaacttctcagtctgatggattggatgggtcctgggttaggaatcagaggcttgactgagcctgggcagcacatgcccccgctagacctagcttttgtgatctgtaaagagttaaaggtggtgcttaagctccctggaaatctagctttgactgaataagggaatgatgaggcaagtcaataagggagggaaggaacggtgagagtagttaagtggatggagcgattgatgcatgggttaagtgaaagaggaatgagaaacagctcaggccccaagctacagctatcagccagcatgcctctttttctttcttgctgccttagtgtgggtctcattgtactttggaatcctggggctgtgttctgtgataactggagggtgcattatctttctgcactggaggaagaacttgaggcgggaagagcatgcccagcagtgggtggaggtgatgagagctgccacattcacctacagcccattgttgtactggattaacaagcgacggcgctacggcatgaatgcagccatcaacacgggccctgcccctgctgtcaccaagactgagactgaggtccagaatccagatgttctgtgggatttggacatccccgaaggcaggagccatgctgaccaagacagcaaccccaaggcggaagcccctgctcccctgcaacctgcactgcagctggctccacagcagccccaggccagatccccattcccacttcccatctttcaggaggtgccctttgccccacccttgtgcaacctaccccccctgctgaaccactctgtctcctatcctttggccacctgtcctgaaaggaatgttctcttccattccctcctgaatctggcccaggaagaccatagcttcaatgccaagccttttccttcagaactgtagcctcctctcactgaaggtgggagctgcaggaatcaggtgcagagtaggaaatggaactaacctcaggaaggtggtattgacagaggtcaggacccacctggatgtcatgctatgaaacattaaaagaaaaaaaaaaaag

SEQ ID NO: 7505 - DNA, 16939 bp, Homo sapiens
ttgagagaaaaaagaaatttttttatttagctaaattaaaatggctgtgttacttatttgaaatatgcaaagctcaaatcaagtcatggaaaccctgaattctccctaaacagaaccaaaattgcttatacattaccaaaatagcttcactaaaacaaagtagatttaaatttcttaatatgagaaaacaacaaggtaggttaggttcgtataacaaacaatacacgctctataaagtctcaggaatacccaaatgtgttctggtttggatatgaaagagggaccacttctagctggtgttggtaagcaagccaatgaggtgtgcagcaaacaaaacctgtcactaaaaacaactcaacaggccattatgagtatgagcccatcacagccaaaatcctcaactgtgaccggcaggaccagcaagggggggtgttgaaggggttatgaacagcaaccataaagaaaggaatctccaacagaagggacaatggccagcagtaggtgaagggaacccattcttcagctctgttgcatcatacacattcctgagggtcaggcacctctgccttttagatgacaccacagtcatctagaagtcaggttttctcttcttttggttcttctttttatatgctacctttttgcctctctgatttatggggaggctcttttagtaaacattatacaagatagtacaaggcaaaagaaaacaaggaccaagaagcagtgctttgagtaacttaggaaagcagcagtaggagctgccagactgaaaaggtaaaagggtttaaaaccaaaaccaaaaccaaactcactatccagtcttcctctcagagatgagatatggctggtgaggcttgactacagctaaatacaagtcacaggcttagtaagttaagacaacatacaaataaaagtcccaaattcacactaaataataggcttatgggatgcttaagccagtgagtctgctcaactcagaagaaaggagttcaagataccctacttttgcctggaagatgtactttctcaggcaggatgacaaaaatattcatagatctgagaatgcagtataaacacctctgccaaacttggtagggggagaggatggtactgtatactggctcaggggtgatactagtcagacaagcacaaggtaggaagaacagaagataaaccaaaaaacaaaatggatttctccatgtatagttatctgatgcaagggaaaatacacacaacaaagagttaaggtgtcttcaaagtatctgcctatgaataagaatttgaaactaaaaaggacaagctacattaccctcaagtatatttcatataaatcagttctcaaaaaaataccttccaggtacagacatactatttatggtacagtatatacaaatatagcagtataattcaatttattgctagaattttatttggttgttagaaaatctgtaagggtgtatatatattaaaaaaaggtgtggggtgagagtggatggaaggcagtcagaagggtgagagttattttcaagttacctaaagtgccaggctaatttgttttaacctttccaagaaagtgaaactgagcataagctataatgagataaggggacacattcatgggaaaagacttcatcttgctttaactaaattttaatacttctggaaaaaaaatttaagtttggttaataccaagctgaacatcatgtaaagaaaaaaaaaacagcccttaaatgtttaagggtaccggactgtatccatggtgaagggcaacctgaacaaagttaaaaaggaaatgatctccactaaagaagtctgtggcatgacagctttctctactttctccctgacttggcctataccaaagttaagtttttgtagtttttttttcccctttcaagttgttgcccaaagactgcttctaagaacaacacagcaattctagactcaacatacaggagacatggaggtattattcctttcaatctagggatctttcatgccaggtccacagaagcatttaaaggaagtattgtacttgattgtattagatttgaaaaacttgctaccaccatgtgaaggccctagctccaggcctgccctgctatactttggcatcctttgggtagaaagcctctagctacttctgagctggtaatggtaaggaaactgaatattatttcacatgtttcatctcacagcctttttggctttagtcatccccaaagaaacatattaggctcttggttagcctctaggtaaaatctcaaggggtatggttttctgggtcaaaattagaagcacagctctcttctaaagctctgggtggtcagtgtgagataatggctgggggaatttagccctgccattcaaatggagatggtactggtggtgggagccagctacggctttaagacagacttaagtgggtgggtggggaaggcaatctagctcactcagcagggaaaatggagctccccaatggataactttttatgctcataaaccctgaaatagtactaaaaatgagaaaaatccccaagacttctctgattcccaggttgggattagctgagggaataggaacaaagaaccagaatcctacttccatgagccatgcctggagtcagtattgtctccagtgtctactccctgaaatcggttcctccagctaccaggacaaaccccctggcagcgcctgggcctttgagggataccttatggagacatggatgtagtttcagctgccacctacaccagatcagcaatttttaataagtcatttgttcatatcctgttcaaaaccattcttcctactttccacacaatatgcacaatgctttctttcatttaaatatttacaaacagaaaaggcctatcttttaaagaaaagacattttctgagtctctataaagtgcagctaatttaaggcaaatttaagtgaaatataaaagtggcttattctctctctatatacatttcccagctttaaaagataaggtctcctcccctcaaaaaaaggaaagagaaaaaaagagggctttaattttttttctggcaattttaaaatgtaagatcttactggttgtaggaaatcatagatttctgaacatcataagtaaaatggtcttcttctttaaaaaaataacttttatatagcttcttcaaacaagttaaaaggtggcaaagtatctgctacagtagtttggaggactagaggactgatgggtaagtaagggttgttttgttgttaggtaaatagatattaggcagtccatttctaaaatatgcctgatgaagctagatacctaaagctacccttagctccaggaatgagtatcttccatctccatcggaatcaaatgctctcaagctctctggttctggcatagcagaacctagggaggtccagatttcctggtaggtcagcttcccatccacgtcctggccagtcttgcggaataaatcctgaagatctgtcaaaaatgaattacaaaaaatgtatacgtctaaacatacagctaaatttagttaaaagtagtctcaactgaatttaaaacactaaaagaaaagctactccgcaaattttgtttccaaatggtaaagtttaggatttcactaaatcaggaagactaatttttgatcccttaaaaatatattaaaaaaaaaaaaaaaaaaaaggctgggtgcagtggcttatgcctataatcccaacactctgggaggctgaggcaggaggattgcttgaggccaggaatttgagaccagcctgggcaacacagtgagacactgccaaagtagaagcagtgacagataatcgcaggagaatgaatggtctcatcttctctctgtccagcgtcttccctttagattttcctgaatttattcttatgttgaaggggtgaaaaggaatgcagaggcctaatgagttatgtgataggagctagctcataaaacagactgtggcatattgtgagatttcttgttggatggctgagtggagactggaggaatgacttggaagcccataaaacaatcccaaacactcatagctttctcagttttgacaggaaatccaaagctcaaagaggaaagtaacttgcctacggtcatgtaactcttaagtggaatacaatacaaatttcttttcttttttttgaagctaagtctcactctgtcgcccacgctggagtgcagtggcgcgatcttggttcactgcaacctctgcctcctgggttcaagtgattcttgtgcttcagcctcctgcgtagctgggattacaggcgcccgccaccacgcccagctaattttttttaatgtttagtagagatggggtttcaccatgttggccaggctggtcttgaactcctgacctcaggtgattcgcccacctgggcctcccagagtgctgggattataggcgtgaaccaccacgcctgtttttttttttttttttttttttttttttttggtggagtcttactctgtcacccaggctggagtgcagtggtatgatcttggctcactgcaacctctgcctcctaggttcaagctattctcctgcctcagcctccttagtagctggcatgacaggtgtgtatcaccaggcctggctaatttttgtatttttagtagagatgcggtttcatcatgtcggccaggtctctaactcctagcctcaaatgatctgcccacctcagcctccccaaagtgctaggacaccacacctggcctagaatacaaatttcttattacctagtccagtgctctttctactatgtgacacttgtctctctggatccagaaattaagcagctcaagaaccagtgactcaaaagtgtaatgagataccatgtcataatcactacgatggctataataaaaaaagacaggccttaccaagcattagggaggatgtggagaaagtggattgaaccctcacacattgctgatgggaatgtaacatggtacagccactctggaaaagtgtaggagttcctcaaaaagttagggctatcatatgacccattaattccattcctaggtatatatatactcaaggcaaatgaaaacatatgtttacataaaaacttgcacatgaatgttcatggcagcattactcttaatagcccaaaagtgagaacaatcgaaatgtccatcaacggatgaacagaccaaaatgtgttaggtcaacagaatggaatattattcagccataaaaaggaacgaagtactgatacatgctccaacatgaatagaccataaaaacattatgctaagtgaaagaatcatattgaaagaaaaagcacacacaaggccacatactgtatgattccatttatgtgaaacaccccaaataggcaaatccatagagatagtgattaagagactagtggttgctggagactggcaggagaggggactgggagtgactgtttaatgggtacagagattctgtgaggggtgatgaaaatgttctggaattagatagtggtgatggttgcatgaccttgtgaatacactaaaaaacactggattaaaaacactgcattttaaaaaggtgaatgttatggtatgtgaattgtatttcaataaaaaagaaccagaggaattatctctccaaagtgcatgctctctactttttaaaaatcagtaaaaagaaaaagagcaatattaccagttgatctgtatcttttttatttcaatggcaatattgagccaaaatgattagagaatgtctatcaatagtttcttctggcattttctcaagggcctcatcacaaacacttaggaaggtcagttatatacataactttttttttttttttgagacagggtctccctctgtcacccaggttagagtgcagtggcatgatcacagctcactgtagcctcaaacttttaggctcaggctattctcccgagtagctgggattacagggtgtgcgctaccacgcctggctaatttttgtattttttgtagagttgggatttcactgtgttgcccaggctggtctcgaactcctgagctcaagccatctgcctgccttggcctcccaaaatgctgggattacaggcatgagccactgcacctggccgtatatacataacatttaaaaaatacttgtgtccccataatcaaatagaagatttaatatctaataccaaagaaggtcaatgagctttatgtttctttaaaaatcttcccaaactcctttaatttcatcatttattccacaccatacctaggtaaaataggcctcttgatgtttggtattcaggaagaataaaaatagcttgaagggagggaaaacagttgcagtgcaaggtccagtccatcaaggagctcctataaacaagctcctgaatagggccctactctcactcctacaataggtgcagcaatgcagctaataaaatgtcaaaagctctctgaaaggcaggaaagcagtgggacacttgttcccaatgccttacaccaagtggctagctgaagagttctgtttttttttttctttttttttgtggcatgagtttatacaacatgctacactacgcacttggtagcagtattcaaataaaaatatgattgctgcctcaggtcattccaaaagtatagtcatccaaaagtatttaaggcctatgctgaggactgaagcacaagtgttaagactgctattccttactctgacctaatagctttcccccattcattctcatcaaatattgatttaacaatggaaagtggcaggaagcttgtgttcccattaaacacaacacttcccctcctccccagaaaacagaaaaaaaaaaagtcaggaacagggaagaaaagtaatcacatttaaatggtgatagaaaaatttaagtcttctatgctttaagcatttaattgcaatgtgtaggtaactcattcatttatttaacaaatattcaggagtaccaggtactgtgctaggggctgggagtaaacaagacatagtccttacccataggaagttatattttgtatctccccaggaaattccaacagagtgacatgtgctaaacaggggcaaacaaaatttaagagcacacaggaggagcctaatccagtcactggaggtaaggaaatgttcctggtagaatggtatctaggctaaagagaagagccagaggaaggtgtggtggacaggagcaagtgatttgccaggcagccagctaatacaaaatcgggaggcactaaacatcaccatgagggatagaacatgcactgctggaagcagtgcaaacacatttttctgtgaatcatatcctttgtactaatattttgctgattttcagtaaaagggtccttcatttttggagggccctgacaaacagggtcaacttttactttattttactaatctcatggtattgtatttgcttttatgccttctccattagactgtaatatccttgaagaaagaaaatgagaccatatcttatactgtattcttattgcttagcactaggtttaatgaggcactcagtgaatgaagaccctaaaaaacattaacagaaagataatatagtacactggttaaaagtgcaagcttcggccaggtgagttggtttgtgcttgtaatcccagcacttcagtaggctgaggcaggtgggtcacttgaggtcaggagttcaagaccagcctggccaacatggtgaaaccctatctttactaaaaatacaaaaaattagccaggcatggtggcacacacctgtcccagctacttgggaggctgaggcatgagaattgcttaaccctgggaggcagaggttgctgtgagcccagattgtgccactgcactccagcctgggggtctaaaaaaaaagcacaagctttggcatcagactgtcttggtttgcattctgtttcaaccaattatttgctgtgtggacttaggcagtttccctatcagtaaaatgggtataatacataaatacttatgttcatgggatggttatcaggattatatgacataatgcatataaagtatctggcacttgatatctcctcaataaatgttagatcatatatatttttgacaagtgaaaataaacattaaaaagttattactttgaacattcccattactaccccgtggtataaaaatttaccttcagtgctagaaactcctggtagggagataggtcttagttgggcagctttctcaactgggtctccaagaaactgtgaaaattttggcaatgctgatggctttgatgtgaaactctctacttgctctgtaacaaatacataaggttttatttagtattattgaatctaacaccaaattaaactagtatcgaaggtcaccttttaggaaaattggatatacaattaatttagagaaacatttgaagataaagtagcatagtgactatgtgaagttaaaggcttggattgagacatatttgtgggcaagggaacaccaatcagtattatattacgttaaggtttgcagcagcagtcccattagaagatcttacagtacaagctagcattaaacatgtttagatggtaagagcttaagctgtcaagtggcaagaacagtggctggatatcaaagatcttgacatcctgggagatgtgctttaaacccagtctaggggtatgtgccacccgctaagctggtgctaagagtgcaaccgtaagatgatgtagcacaatgttaggacaagacattccaccacagttctgtctcctactaaaggagaattcaagagagtttgtactgcttttctaaaatagaaaaatacttgtgtgggggaaaaggtcaaagctaacacagtccagtgccttggttatgtcctcacagggtctaaatcagtggaggctcatgtatctgctaatattgattagacaggtccatacctaaagccaaagacccttccaacccaaagatcccatcattatttttgttaacgattttcagaagggcgaatatttatttttaaatacatgttatgcacttacagaaaggaaaagactctcataaacaacttttagggctggcttaatatactctatgacagtaacatttttgcctataattggatgcagacagcatggagaattctatttccagctaaacattaccaattcttcccttaatagactagagtacaaatcatgtacaaaatgggccttttctaaatgaaagcaaagtgtatcagcttcatctcggtgcgttcaggcatcactcgcttggtgcgatcagtactgctggaacaccttccctgctccccatgtgagaggcaagctgctcaagcctccatgaaatattaagaagccggctctgctctcaccttcatcggcggtctctggaggcctgttgctctcaggtttgtttgtaagagcactgatcagctggagtttctctcttagcttggatacctgagaatttgaactatcttctttctgcacaaaacaaagattatagaaggtttaaggtggtagtaagacttcatctaagtgtccactgtattcccagagcctgtttagcatgtagtgtttgaccctcagtaggttccctataaagacaataaaagaatgaatcaacatatactggtgatgtctttggtcctcagcactgataagtatcttgctggatttgaaaccattaagggaacattatgctacagatgatctgattcactgtgaacatttggttgatgggggaaggaatgcatgtgtcagcagtaaaggaaatgtacccttgctcaggtgcctatgcgacacccatttcctaaataagcaggatcttgttttctaggagctatttcacactaactaaataactttccgaaatatcttgcttcaccttgtgactagaccactttaggcagaatttcatgctcttaccaccttacaaaaagaagcaactgaacaaaaacaaaccacaagttttcccctgatctttcctctgtttctccctggtgatgagtcaactggtggcagaaactgttaagacataaagaaggagctgtaatatttctaattcaaagtcttgcttgctcgtatcttttaaaaaagttttttcgcccataccctgcctcattcccaggagtatcaagagtggcatatacaaatacatttaattataaaaagagagacatctggtttctatgaggctcatttctaactgcttagatgagtgtgaaaggtcctgatcctatgttaattagaacacccaactcattacacatttattttattattgatttacttttcttgtataagtaattgttaacttctcttgccccatcttatttctactctaatagttactgtatagtagttcactcagtttatttagggagctaaaatatgaacatatgtagtgaaaactaggtactaaatgtttgaagaactaatggtaaggagaaattgtatctggttaggatgtttggatgaggtaggacaaaggaactgataccctgcgatgacagttaaaaacaaaaaaggcctgaaagtaaagccaagatgaaatttatgtatacatgtgtactggtgtgttctgatatttattgttaaaatgtgaactgtggctgaaattgctactactttctaatagaaaccacctattagtttttttgtgctcaaaatttacatctggctcttaagtttttctgtcttctctaggtgaggtttaaaaaaaatctgcagaagcagttagaaaactcaacaaaagcttagcttatgatgcattaaaaccttaatatattgtgactttatctagataatataaaactattaaggtaggaaaaataaagatataaagcattacatcaaaagctgcctttactgtgtggttccagttcaagttcattttctctgaacctcagatcctcccaacttctcaaacataatatgcatttgagatggtaatttagtcacttggtcataatcttcctggcttttcttttatcttagcccagagtttaacactctaatcagagaatactgtaatcacactttctttcctggaatatcaaagcatatcatagattgctgtcttgacagtatgtctaggaagaacaaaaaaggggaaggtacaaggtgaagggaactggctgaggtttaaatggactatgaatacatagagattgcaatacaaaaataggaaataaattttagattagacaccatttttagattatctctgcctctgtcccccatcattagtacagataacttactgtcttagtgtaaaagtcatttccttagggaagccttcttgatcttatcatatcctgtatttgtcctttataatacttatcatactcatgattcatgacctgttcaattatgtgttaacgattttctgactgacaggactttgagctccaccacaataggggtcacatgtctgccttgctcactatggtccccccagctcctactaaagtgtttggcacagggtaggtgcctaaaaaagtattcatttattcactaacatactaatttactaattgctttgttttgaagtttcagcacatgagaacaaaagtacgccctttgaaaaagtagcagtagatcaaaagcacagagatgctgctgcatttacttttacttcagggtaagcctcccattatttacctttatgctttggatttttactgtatctgttctgttggtgacttgatccaaagactgtcttttcagagtggcagatctatcacccatcttaaagggcaaaacaaaaacaaacaaacaaagggaagattaaaggcaaacattaaaacttgaacacctagcacttttaaacaaattcgtcaaacttatttaaaggatctcagaacactctcaacagaaattgcagaggagtgggagatgggaggagagagggagaaaggccagagacgaagttgaaactagtgcttctagctgtttcagtcacaaactttaaggctttgaaggataaaaggtggtagaacttttactcaaaataccatgctgagcacgatactgctctaagaaacagtaggacagatggatactattacctattttctctgctggagaaatataaagtagggggagagggcagagacagtaaagagagtttaggagtggtaagttttcacaataagccttgaaaactttcaaggcataatactcatcatccaaaattcttagccaacctagtttagctgagttcaaaagggcttcgtaaaataaagctcctttaatcttcacagctttgtagtaaattatacaactctgtaaagcaggagggggaacaggtcttccaactccacccttcaaagccaagtccaggcaacttgccaaggctccactgtggcagagccagttcaaatgctgctttccatgaaccagagtttgactttatttgtgggcttacttccagctttggtggttacttgaatttatggcacaatttcctgtatttggtttctatttttaaatatatgcctgtgtctttgctatatgaaatctttaagggtgggggctgcagttattaaaaaaagaatccatgtggatccctgcacaaagtttatgtgaaactgcacattttattcacaacaatatgaaaatcagtaagccgtgcacagtcggccagcatcagtgacttagtaggtcagtttccttacatgtaaaatgaggaggtgaactcaatgacctcttaagttggggagctgatctgacctgatctgtttcctgacatacgcaaaaggttccccttaatatatagacagcaggataaatatgaaagccaagttcaggcttaaagaaatgataaaagatttttggttactatcattttcatggctcccacccctaataacttaaaaaagaaaagacccaaaaggccctcggaaatacgtgccagcacttccctaccagatggcgcactggtaacatgacagtagccttgtcatctctgccaacaactagtggtgaggccttggtaagcgactcgacctctccgcatctccctctccaaatcaggacaaacactgcctggccattcacatcacacagctagtgtgaggattaaatgagacaacacattgtgaggattaagcacaacacaaatgtgtggcctctcaaatatgccagaaggctgttctcaaaaggtggtagaatgttatccatgcacagacaaaacacactgcatgtcacaaaagatcagaaaaggcttaccatgctgaaggacaggtttgctttcttttctaccttgctcatagcaaccacatcgctttctatcaggttgactctctgggtaagattactgactgtctcgttcattccctcgagtttaagatcattctgtctctggtaccccactagggcactgtttacctcctctaaagagttgtgaaggtacaggatatcctagagtggaaataaataaagttatggaatccactaaagacgtaaattagacaagcaggccagcagcaccgaacaaccattactatgtcaagtactgaagtaaactccttttcctggttttgaccatcaatcgtctgtctttgctttgtccctcgcactctaaattgctccttttggaattgtttggcctcagctagacaggagggggaaagagggaagaggactacctacatgattcactctttggtcccagaaagctgagagcttgggaattgatttccccaatgtttacctcacctgctggaggaaaggcttgctgggttattaaatgaaaggtccattaacctaatttgtcagaacaaacctacctcaggaacaataccgattactgaattggctcatgtaacaataccataacaagtagtgcattgtttagtataagattcaattatttttactgacatcctccagtactgattgctactttaaaaagaatgataactataggttttaaagggcattaaactcaggacaggaattcttctgagtgaagatttcctctattctctttaatgtgattctgaactcaaagtcttttttccccctcttgccttttcgtctttagactttagaaaatcctgattttcaaggatatgctttctaacattcttagaatttactgtggctcaaaatagccatcactctggattacttagctatccattcatctttaacctgcccagatagctattttttcataaagagtttcaggataatctgctcattctatgtctttcaagataagaaaaggaatttactccactgactgacatgcagggaaaaactgcaaagtgccaaagaagggaaaggacagcaatatggatccccgagataccaacacacattcctctctgctcagctcccaggcaggcaaataaatacaggatgcacctgctgagacaccaaacactaagcccaaactatttggctgcctctgcagtgcactgtggtcacagggagttaagccagagataaaaagcacctgtttcaaattctcactgtgggttttattgtcaagttctgatgtggctgaaggtgacggaatgatctggttgcttccaggagtctccttcaagaagtgctgattctgttaagaggaaagaagtttagtgtaggcaacaaggaattattaggtctacttaactatctgagattgtcctagaacattctagcctcccccagaatgcatccacagattaatcagtaagtattgccagggaatgtacaggctaaccagtcttgtgctaggttctgagagaacccagcttgagcatgcactaggccagcagcaccaagattacattagggaactgagatcctcctagtctatttctcaatctcttaaaggaatgaactctctagaaaccatttctcctttgccccattgcctgtgctcccagagaaactatagcatcactgtaactttccagggaccaactcggtctcaacctgggacagtgtcattgtttccactggactcaagagctttgacattaaaaaggcagccagtcatgtaaccactggcttgggcatttagcataaccaccaatcatgtgcattattagtttttcccttatagcattatgctaagtaagacttatgtttgagggttatctttcctttcccattcccttcccactgctcaagtttctttccagagactgaagtataacatgtttatatacacttttcctttagtgaggaaaactttgcatggcttaacccttcagagcccataactatgacttatctagcacaaagaatgacagtaggaggattaccattggcagctatggaaatttaaaagaagtagatttaattataacagaatgcaactggtgaaaataagttgttttccttgaaatctgaaatcaaccctgtttttataagaaaaccaaaaggcaacaataaagagaaaaggaggagagaaggaggggggaatccatggttctagaaggcaggaaattttttagttaggaaaaattattttagaaaatagtgaattacttgagagcataatcaagatattaaaataataaaagaattgctgaattagaggggtctttgttactatgggtcacacagttactcagcggcagttagaaccagaaccaagggtcttgacacccagatcaatgttttttcctctgggttagccccactaagtaacagtgaggtgtgccagtcctgaagaaaatggaaaaaaactctcttctagagctctctaatatagcccaggtctccttggtacaaacttcccaatttaaacttgaaattctgaagcttgcaaagagcaggtgggggtgggagggcagatccagaaattggcagagagactagggaacttttgtgtgccttgaatagtcctgatttcagatgagttacatataactcatctccccagcaagatggcaagggctgcaccatcctttttttactcttcataaatccttcacggggctgtcacccattaagtgattgattaaggcctccaaatgactgcagacagcttacatctgcagcagcactaagtgatccagagatatttgaaaacaattcctaggcactgcaggggtttgattctgtcagttatctgttgctgcctaacaaattatcccaaagctttgtggcttagaacaacaacaattaagtatttctcatgattctgtgggttgactgggctcagctgggggttgagggatgggggtggtgctgttccatgtgttgtaggctgcatttaactgacagcctggctggagctggaacatgctagacagcctgcctttcatccacgagcacatgtttcagcatttgggagtctaagagccttgctcaaattcctgatgcacagaatagtgagaaataattacttgttttaagccacaaacttctgggggtgctttgttatgtagtaataaacaatgagacacttttccacttcctttccttcttttccattttctgtcctacccattccatcctcaggaactgtgtcttattaccttacctcctccagtactatgtttgcaaaagatttggcttttaattttatctaccataattgctttattaacaaattgtagaacaatcaatgtatactgcttattagatcttttgaacagatgcatagcagggccttttcagattagtggaaagttggcaacatgactcttacacaaaaaagggtgagcaggagcatgctgacttgctgggtctccttaccatatcactctgcagtaattccatcgttttcttgtgttcatccacagttttctgtagtgcttccacagcaagatggacgctgtttaaagtattgccaatggaagctacactctgaatggaaacatataggaaggtgtaaaaaagctttaagagacaactgacatgcaataaactgtacatattcaaaaatgtataatttgaatgttttgacacataaacaattgtgaaaccagtactacaatcaagataataaacactcatcacctctgaaa

SEQ ID NO: 7506 - DNA, 217 bp, Homo sapiens
ttgagagaaaaaagaaatttttttatttagctaaattaaaatggctgtgttacttatttgaaatatgcaaagctcaaatcaagtcatggaaaccctgaattctccctaaacagaaccaaaattgcttatacattaccaaaatagcttcactaaaacaaagtagatttaaattttttaatatgagaaaacaacaggtaggttaggttcgtattacaaa

SEQ ID NO: 7507 - DNA, 22689 bp, Homo sapiens
ttgagagaaaaaagaaatttttttatttagctaaattaaaatggctgtgttacttatttgaaatatgcaaagctcaaatcaagtcatggaaaccctgaattctccctaaacagaaccaaaattgcttatacattaccaaaatagcttcactaaaacaaagtagatttaaatttcttaatatgagaaaacaacaaggtaggttaggttcgtataacaaacaatacacgctctataaagtctcaggaatacccaaatgtgttctggtttggatatgaaagagggaccacttctagctggtgttggtaagcaagccaatgaggtgtgcagcaaacaaaacctgtcactaaaaacaactcaacaggccattatgagtatgagcccatcacagccaaaatcctcaactgtgaccggcaggaccagcaagggggggtgttgaaggggttatgaacagcaaccataaagaaaggaatctccaacagaagggacaatggccagcagtaggtgaagggaacccattcttcagctctgttgcatcatacacattcctgagggtcaggcacctctgccttttagatgacaccacagtcatctagaagtcaggttttctcttcttttggttcttctttttatatgctacctttttgcctctctgatttatggggaggctcttttagtaaacattatacaagatagtacaaggcaaaagaaaacaaggaccaagaagcagtgctttgagtaacttaggaaagcagcagtaggagctgccagactgaaaaggtaaaagggtttaaaaccaaaaccaaaaccaaactcactatccagtcttcctctcagagatgagatatggctggtgaggcttgactacagctaaatacaagtcacaggcttagtaagttaagacaacatacaaataaaagtcccaaattcacactaaataataggcttatgggatgcttaagccagtgagtctgctcaactcagaagaaaggagttcaagataccctacttttgcctggaagatgtactttctcaggcaggatgacaaaaatattcatagatctgagaatgcagtataaacacctctgccaaacttggtagggggagaggatggtactgtatactggctcaggggtgatactagtcagacaagcacaaggtaggaagaacagaagataaaccaaaaaacaaaatggatttctccatgtatagttatctgatgcaagggaaaatacacacaacaaagagttaaggtgtcttcaaagtatctgcctatgaataagaatttgaaactaaaaaggacaagctacattaccctcaagtatatttcatataaatcagttctcaaaaaaataccttccaggtacagacatactatttatggtacagtatatacaaatatagcagtataattcaatttattgctagaattttatttggttgttagaaaatctgtaagggtgtatatatattaaaaaaaggtgtggggtgagagtggatggaaggcagtcagaagggtgagagttattttcaagttacctaaagtgccaggctaatttgttttaacctttccaagaaagtgaaactgagcataagctataatgagataaggggacacattcatgggaaaagacttcatcttgctttaactaaattttaatacttctggaaaaaaaatttaagtttggttaataccaagctgaacatcatgtaaagaaaaaaaaaacagcccttaaatgtttaagggtaccggactgtatccatggtgaagggcaacctgaacaaagttaaaaaggaaatgatctccactaaagaagtctgtggcatgacagctttctctactttctccctgacttggcctataccaaagttaagtttttgtagtttttttttcccctttcaagttgttgcccaaagactgcttctaagaacaacacagcaattctagactcaacatacaggagacatggaggtattattcctttcaatctagggatctttcatgccaggtccacagaagcatttaaaggaagtattgtacttgattgtattagatttgaaaaacttgctaccaccatgtgaaggccctagctccaggcctgccctgctatactttggcatcctttgggtagaaagcctctagctacttctgagctggtaatggtaaggaaactgaatattatttcacatgtttcatctcacagcctttttggctttagtcatcccccagagaaacatattaggctcttggttagcctctaggtaaaatctcaaggggtatggttttctgggtcaaaattagaagcacagctctcttctaaagctctgggtggtcagtgtgagataatggctgggggaatttagccctgccattcaaatggagatggtactggtggtgggagccagctacggctttaagacagacttaagtgggtgggtggggaaggcaatctagctcactcagcagggaaaatggagctccccaatggataactttttatgctcataaaccctgaaatagtactaaaaatgagaaaaatccccaagacttctctgattcccaggttgggattagctgagggaataggaacaaagaaccagaatcctacttccatgagccatgcctggagtcagtattgtctccagtgtctactccctgaaatcggttcctccagctaccaggacaaaccccctggcagcgcctgggcctttgagggataccttatggagacatggatgtagtttcagctgccacctacaccagatcagcaatttttaataagtcatttgttcatatcctgttcaaaaccattcttcctactttccacacaatatgcacaatgctttctttcatttaaatatttacaaacagaaaaggcctatcttttaaagaaaagacattttctgagtctctataaagtgcagctaatttaaggcaaatttaagtgaaatataaaagtggcttattctctctctatatacatttcccagctttaaaagataaggtctcctcccctcaaaaaaaggaaagagaaaaaaagagggctttaattttttttctggcaattttaaaatgtaagatcttactggttgtaggaaatcatagatttctgaacatcataagtaaaatggtcttcttctttaaaaaaataacttttatatagcttcttcaaacaagttaaaaggtggcaaagtatctgctacagtagtttggaggactagaggactgatgggtaagtaagggttgttttgttgttaggtaaatagatattaggcagtccatttctaaaatatgcctgatgaagctagatacctaaagctacccttagctccaggaatgagtatcttccatctccatcggaatcaaatgctctcaagctctctggttctggcatagcagaacctagggaggtccagatttcctggtaggtcagcttcccatccacgtcctggccagtcttgcggaataaatcctgaagatctgtcaaaaatgaattacaaaaaatgtatacgtctaaacatacagctaaatttagttaaaagtagtctcaactgaatttaaaacactaaaagaaaagctactccgcaaattttgtttccaaatggtaaagtttaggatttcactaaatcaggaagactaatttttgatcccttaaaaatatattaaaaaaaaaaaaaaaaaaaaggctgggtgcagtggcttatgcctataatcccaacactctgggaggctgaggcaggaggattgcttgaggccaggaatttgagaccagcctgggcaacacagtgagacactgccaaagtagaagcagtgacagataatcgcaggagaatgaatggtctcatcttctctctgtccagcgtcttccctttagattttcctgaatttattcttatgttgaaggggtgaaaaggaatgcagaggcctaatgagttatgtgataggagctagctcataaaacagactgtggcatattgtgagatttcttgttggatggctgagtggagactggaggaatgacttggaagcccataaaacaatcccaaacactcatagctttctcagttttgacaggaaatccaaagctcaaagaggaaagtaacttgcctacggtcatgtaactcttaagtggaatacaatacaaatttcttttcttttttttgaagctaagtctcactctgtcgcccacgctggagtgcagtggggcgattttggttcactgcaacctttgcctcctgggtttaagtgatttttgtgcttcagcctcctgcgtagctgggattacaggggcccgcccccacgcccagctaattttttttaatgtttagtaaagatggggtttcaccatgttggccaggctggccttgaactcctgacctcaggtgattcgcccacctgggcctcccagagtggtgggattataggcgtgaaccaccacgcctgtttttttttttttttttttttttttttttttggtggagtcttactctgtcacccaggctggagtgcagtggtatgatcttggctcactgcaacctctgcctcctaggttcaagctattctcctgcctcagcctccttagtagctggcatgacaggtgtgtatcaccaggcctggctaatttttgtatttttagtagagatgcggtttcatcatgtcggccaggtctctaactcctagcctcaaatgatctgcccacctcagcctccccaaagtgctaggacaccacacctggcctagaatacaaatttcttattacctagtccagtgctctttctactatgtgacacttgtctctctggatccagaaattaagcagctcaagaaccagtgactcaaaagtgtaatgagataccatgtcataatcactacgatggctataataaaaaaagacaggccttaccaagcattagggaggatgtggagaaagtggattgaaccctcacacattgctgatgggaatgtaacatggtacagccactctggaaaagtgtaggagttcctcaaaaagttagggctatcatatgacccattaattccattcctaggtatatatatactcaaggcaaatgaaaacatatgtttacataaaaacttgcacatgaatgttcatggcagcattactcttaatagcccaaaagtgagaacaatcgaaatgtccatcaacggatgaacagaccaaaatgtgttaggtcaacagaatggaatattattcagccataaaaaggaacgaagtactgatacatgctccaacatgaatagaccataaaaacattatgctaagtgaaagaatcatattgaaagaaaaagcacacacaaggccacatactgtatgattccatttatgtgaaacaccccaaataggcaaatccatagagatagtgattaagagactagtggttgctggagactggcaggagaggggactgggagtgactgtttaatgggtacagagattctgtgaggggtgatgaaaatgttctggaattagatagtggtgatggttgcatgaccttgtgaatacactaaaaaacactggattaaaaacactgcattttaaaaaggtgaatgttatggtatgtgaattgtatttcaataaaaaagaaccagaggaattatctctccaaagtgcatgctctctactttttaaaaatcagtaaaaagaaaaagagcaatattaccagttgatctgtatcttttttatttcaatggcaatattgagccaaaatgattagagaatgtctatcaatagtttcttctggcattttctcaagggcctcatcacaaacacttaggaaggtcagttatatacataactttttttttttttttgagacagggtctccctctgtcacccaggttagagtgcagtggcatgatcacagctcactgtagcctcaaacttttaggctcaggctattctcccgagtagctgggattacagggtgtgcgctaccacgcctggctaatttttgtattttttgtagagttgggatttcactgtgttgcccaggctggtctcgaactcctgagctcaagccatctgcctgccttggcctcccaaaatgctgggattacaggcatgagccactgcacctggccgtatatacataacatttaaaaaatacttgtgtccccataatcaaatagaagatttaatatctaataccaaagaaggtcaatgagctttatgtttctttaaaaatcttcccaaactcctttaatttcatcatttattccacaccatacctaggtaaaataggcctcttgatgtttggtattcaggaagaataaaaatagcttgaagggagggaaaacagttgcagtgcaaggtccagtccatcaaggagctcctataaacaagctcctgaatagggccctactctcactcctacaataggtgcagcaatgcagctaataaaatgtcaaaagctctctgaaaggcaggaaagcagtgggacacttgttcccaatgccttacaccaagtggctagctgaagagttctgtttttttttttctttttttttgtggcatgagtttatacaacatgctacactacgcacttggtagcagtattcaaataaaaatatgattgctgcctcaggtcattccaaaagtatagtcatccaaaagtatttaaggcctatgctgaggactgaagcacaagtgttaagactgctattccttactctgacctaatagctttcccccattcattctcatcaaatattgatttaacaatggaaagtggcaggaagcttgtgttcccattaaacacaacacttcccctcctccccagaaaacagaaaaaaaaaaagtcaggaacagggaagaaaagtaatcacatttaaatggtgatagaaaaatttaagtcttctatgctttaagcatttaattgcaatgtgtaggtaactcattcatttatttaacaaatattcaggagtaccaggtactgtgctaggggctgggagtaaacaagacatagtccttacccataggaagttatattttgtatctccccaggaaattccaacagagtgacatgtgctaaacaggggcaaacaaaatttaagagcacacaggaggagcctaatccagtcactggaggtaaggaaatgttcctggtagaatggtatctaggctaaagagaagagccagaggaaggtgtggtggacaggagcaagtgatttgccaggcagccagctaatacaaaatcgggaggcactaaacatcaccatgagggatagaacatgcactgctggaagcagtgcaaacacatttttctgtgaatcatatcctttgtactaatattttgctgattttcagtaaaagggtccttcatttttggagggccctgacaaacagggtcaacttttactttattttactaatctcatggtattgtatttgcttttatgccttctccattagactgtaatatccttgaagaaagaaaatgagaccatatcttatactgtattcttattgcttagcactaggtttaatgaggcactcagtgaatgaagaccctaaaaaacattaacagaaagataatatagtacactggttaaaagtgcaagcttcggccaggtgagttggtttgtgcttgtaatcccagcacttcagtaggctgaggcaggtgggtcacttgaggtcaggagttcaagaccagcctggccaacatggtgaaaccctatctttactaaaaatacaaaaaattagccaggcatggtggcacacacctgtcccagctacttgggaggctgaggcatgagaattgcttaaccctgggaggcagaggttgctgtgagcccagattgtgccactgcactccagcctgggggtctaaaaaaaaagcacaagctttggcatcagactgtcttggtttgcattctgtttcaaccaattatttgctgtgtggacttaggcagtttccctatcagtaaaatgggtataatacataaatacttatgttcatgggatggttatcaggattatatgacataatgcatataaagtatctggcacttgatatctcctcaataaatgttagatcatatatatttttgacaagtgaaaataaacattaaaaagttattactttgaacattcccattactaccccgtggtataaaaatttaccttcagtgctagaaactcctggtagggagataggtcttagttgggcagctttctcaactgggtctccaagaaactgtgaaaattttggcaatgctgatggctttgatgtgaaactctctacttgctctgtaacaaatacataaggttttatttagtattattgaatctaacaccaaattaaactagtatcgaaggtcaccttttaggaaaattggatatacaattaatttagagaaacatttgaagataaagtagcatagtgactatgtgaagttaaaggcttggattgagacatatttgtgggcaagggaacaccaatcagtattatattacgttaaggtttgcagcagcagtcccattagaagatcttacagtacaagctagcattaaacatgtttagatggtaagagcttaagctgtcaagtggcaagaacagtggctggatatcaaagatcttgacatcctgggagatgtgctttaaacccagtctaggggtatgtgccacccgctaagctggtgctaagagtgcaaccgtaagatgatgtagcacaatgttaggacaagacattccaccacagttctgtctcctactaaaggagaattcaagagagtttgtactgcttttctaaaatagaaaaatacttgtgtgggggaaaaggtcaaagctaacacagtccagtgccttggttatgtcctcacagggtctaaatcagtggaggctcatgtatctgctaatattgattagacaggtccatacctaaagccaaagacccttccaacccaaagatcccatcattatttttgttaacgattttcagaagggcgaatatttatttttaaatacatgttatgcacttacagaaaggaaaagactctcataaacaacttttagggctggcttaatatactctatgacagtaacatttttgcctataattggatgcagacagcatggagaattctatttccagctaaacattaccaattcttcccttaatagactagagtacaaatcatgtacaaaatgggccttttctaaatgaaagcaaagtgtatcagcttcatctcggtgcgttcaggcatcactcgcttggtgcgatcagtactgctggaacaccttccctgctccccatgtgagaggcaagctgctcaagcctccatgaaatattaagaagccggctctgctctcaccttcatcggcggtctctggaggcctgttgctctcaggtttgtttgtaagagcactgatcagctggagtttctctcttagcttggatacctgagaatttgaactatcttctttctgcacaaaacaaagattatagaaggtttaaggtggtagtaagacttcatctaagtgtccactgtattcccagagcctgtttagcatgtagtgtttgaccctcagtaggttccctataaagacaataaaagaatgaatcaacatatactggtgatgtctttggtcctcagcactgataagtatcttgctggatttgaaaccattaagggaacattatgctacagatgatctgattcactgtgaacatttggttgatgggggaaggaatgcatgtgtcagcagtaaaggaaatgtacccttgctcaggtgcctatgcgacacccatttcctaaataagcaggatcttgttttctaggagctatttcacactaactaaataactttccgaaatatcttgcttcaccttgtgactagaccactttaggcagaatttcatgctcttaccaccttacaaaaagaagcaactgaacaaaaacaaaccacaagttttcccctgatctttcctctgtttctccctggtgatgagtcaactggtggcagaaactgttaagacataaagaaggagctgtaatatttctaattcaaagtcttgcttgctcgtatcttttaaaaaagttttttcgcccataccctgcctcattcccaggagtatcaagagtggcatatacaaatacatttaattataaaaagagagacatctggtttctatgaggctcatttctaactgcttagatgagtgtgaaaggtcctgatcctatgtttaattagaacaccaactcattacacatttattttattattgatttacttttcttgtataagtaattgttaacttctcttgccccatcttatttctactctaatagttactgtatagtagttcactcagtttatttagggagctaaaatatgaacatatgtagtgaaaactaggtactaaatgtttgaagaactaatggtaaggagaaattgtatctggttaggatgtttggatgaggtaggacaaaggaactgataccctgcgatgacagttaaaaacaaaaaaggcctgaaagtaaagccaagatgaaatttatgtatacatgtgtactggtgtgttctgatatttattgttaaaatgtgaactgtggctgaaattgctactactttctaatagaaaccacctattagtttttttgtgctcaaaatttacatctggctcttaagtttttctgtcttctctaggtgaggtttaaaaaaaatctgcagaagcagttagaaaactcaacaaaagcttagcttatgatgcattaaaaccttaatatattgtgactttatctagataatataaaactattaaggtaggaaaaataaagatataaagcattacatcaaaagctgcctttactgtgtggttccagttcaagttcattttctctgaacctcagatcctcccaacttctcaaacataatatgcatttgagatggtaatttagtcacttggtcataatcttcctggcttttcttttatcttagcccagagtttaacactctaatcagagaatactgtaatcacactttctttcctggaatatcaaagcatatcatagattgctgtcttgacagtatgtctaggaagaacaaaaaaggggaaggtacaaggtgaagggaactggctgaggtttaaatggactatgaatacatagagattgcaatacaaaaataggaaataaattttagattagacaccatttttagattatctctgcctctgtcccccatcattagtacagataacttactgtcttagtgtaaaagtcatttccttagggaagccttcttgatcttatcatatcctgtatttgtcctttataatacttatcatactcatgattcatgacctgttcaattatgtgttaacgattttctgactgacaggactttgagctccaccacaataggggtcacatgtctgccttgctcactatggtccccccagctcctactaaagtgtttggcacagggtaggtgcctaaaaaagtattcatttattcactaacatactaatttactaattgctttgttttgaagtttcagcacatgagaacaaaagtacgccctttgaaaaagtagcagtagatcaaaagcacagagatgctgctgcatttacttttacttcagggtaagcctcccattatttacctttatgctttggatttttactgtatctgttctgttggtgacttgatccaaagactgtcttttcagagtggcagatctatcacccatcttaaagggcaaaacaaaaacaaacaaacaaagggaagattaaaggcaaacattaaaacttgaacacctagcacttttaaacaaattcgtcaaacttatttaaaggatctcagaacactctcaacagaaattgcagaggagtgggagatgggaggagagagggagaaaggccagagacgaagttgaaactagtgcttctagctgtttcagtcacaaactttaaggctttgaaggataaaaggtggtagaacttttactcaaaataccatgctgagcacgatactgctctaagaaacagtaggacagatggatactattacctattttctctgctggagaaatataaagtagggggagagggcagagacagtaaagagagtttaggagtggtaagttttcacaataagccttgaaaactttcaaggcataatactcatcatccaaaattcttagccaacctagtttagctgagttcaaaagggcttcgtaaaataaagctcctttaatcttcacagctttgtagtaaattatacaactctgtaaagcaggagggggaacaggtcttccaactccacccttcaaagccaagtccaggcaacttgccaaggctccactgtggcagagccagttcaaatgctgctttccatgaaccagagtttgactttatttgtgggcttacttccagctttggtggttacttgaatttatggcacaatttcctgtatttggtttctatttttaaatatatgcctgtgtctttgctatatgaaatctttaagggtgggggctgcagttattaaaaaaagaatccatgtggatccctgcacaaagtttatgtgaaactgcacattttattcacaacaatatgaaaatcagtaagccgtgcacagtcggccagcatcagtgacttagtaggtcagtttccttacatgtaaaatgaggaggtgaactcaatgacctcttaagttggggagctgatctgacctgatctgtttcctgacatacgcaaaaggttccccttaatatatagacagcaggataaatatgaaagccaagttcaggcttaaagaaatgataaaagatttttggttactatcattttcatggctcccacccctaataacttaaaaaagaaaagacccaaaaggccctcggaaatacgtgccagcacttccctaccagatggcgcactggtaacatgacagtagccttgtcatctctgccaacaactagtggtgaggccttggtaagcgactcgacctctccgcatctccctctccaaatcaggacaaacactgcctggccattcacatcacacagctagtgtgaggattaaatgagacaacacattgtgaggattaagcacaacacaaatgtgtggcctctcaaatatgccagaaggctgttctcaaaaggtggtagaatgttatccatgcacagacaaaacacactgcatgtcacaaaagatcagaaaaggcttaccatgctgaaggacaggtttgctttcttttctaccttgctcatagcaaccacatcgctttctatcaggttgactctctgggtaagattactgactgtctcgttcattccctcgagtttaagatcattctgtctctggtaccccactagggcactgtttacctcctctaaagagttgtgaaggtacaggatatcctagagtggaaataaataaagttatggaatccactaaagacgtaaattagacaagcaggccagcagcaccgaacaaccattactatgtcaagtactgaagtaaactccttttcctggttttgaccatcaatcgtctgtctttgctttgtccctcgcactctaaattgctccttttggaattgtttggcctcagctagacaggagggggaaagagggaagaggactacctacatgattcactctttggtcccagaaagctgagagcttgggaattgatttccccaatgtttacctcacctgctggaggaaaggcttgctgggttattaaatgaaaggtccattaacctaatttgtcagaacaaacctacctcaggaacaataccgattactgaattggctcatgtaacaataccataacaagtagtgcattgtttagtataagattcaattatttttactgacatcctccagtactgattgctactttaaaaagaatgataactataggttttaaagggcattaaactcaggacaggaattcttctgagtgaagatttcctctattctctttaatgtgattctgaactcaaagtcttttttccccctcttgccttttcgtctttagactttagaaaatcctgattttcaaggatatgctttctaacattcttagaatttactgtggctcaaaatagccatcactctggattacttagctatccattcatctttaacctgcccagatagctattttttcataaagagtttcaggataatctgctcattctatgtctttcaagataagaaaaggaatttactccactgactgacatgcagggaaaaactgcaaagtgccaaagaagggaaaggacagcaatatggatccccgagataccaacacacattcctctctgctcagctcccaggcaggcaaataaatacaggatgcacctgctgagacaccaaacactaagcccaaactatttggctgcctctgcagtgcactgtggtcacagggagttaagccagagataaaaagcacctgtttcaaattctcactgtgggttttattgtcaagttctgatgtggctgaaggtgacggaatgatctggttgcttccaggagtctccttcaagaagtgctgattctgttaagaggaaagaagtttagtgtaggcaacaaggaattattaggtctacttaactatctgagattgtcctagaacattctagcctcccccagaatgcatccacagattaatcagtaagtattgccagggaatgtacaggctaaccagtcttgtgctaggttctgagagaacccagcttgagcatgcactaggccagcagcaccaagattacattagggaactgagatcctcctagtctatttctcaatctcttaaaggaatgaactctctagaaaccatttctcctttgccccattgcctgtgctcccagagaaactatagcatcactgtaactttccagggaccaactcggtctcaacctgggacagtgtcattgtttccactggactcaagagctttgacattaaaaaggcagccagtcatgtaaccactggcttgggcatttagcataaccaccaatcatgtgcattattagtttttcccttatagcattatgctaagtaagacttatgtttgagggttatctttcctttcccattcccttcccactgctcaagtttctttccagagactgaagtataacatgtttatatacacttttcctttagtgaggaaaactttgcatggcttaacccttcagagcccataactatgacttatctagcacaaagaatgacagtaggaggattaccattggcagctatggaaatttaaaagaagtagatttaattataacagaatgcaactggtgaaaataagttgttttccttgaaatctgaaatcaaccctgtttttataagaaaaccaaaaggcaacaataaagagaaaaggaggagagaaggaggggggaatccatggttctagaaggcaggaaattttttagttaggaaaaattattttagaaaatagtgaattacttgagagcataatcaagatattaaaataataaaagaattgctgaattagaggggtctttgttactatgggtcacacagttactcagcggcagttagaaccagaaccaagggtcttgacacccagatcaatgttttttcctctgggttagccccactaagtaacagtgaggtgtgccagtcctgaagaaaatggaaaaaaactctcttctagagctctctaatatagcccaggtctccttggtacaaacttcccaatttaaacttgaaattctgaagcttgcaaagagcaggtgggggtgggagggcagatccagaaattggcagagagactagggaacttttgtgtgccttgaatagtcctgatttcagatgagttacatataactcatctccccagcaagatggcaagggctgcaccatcctttttttactcttcataaatccttcacggggctgtcacccattaagtgattgattaaggcctccaaatgactgcagacagcttacatctgcagcagcactaagtgatccagagatatttgaaaacaattcctaggcactgcaggggtttgattctgtcagttatctgttgctgcctaacaaattatcccaaagctttgtggcttagaacaacaacaattaagtatttctcatgattctgtgggttgactgggctcagctgggggttgagggatgggggtggtgctgttccatgtgttgtaggctgcatttaactgacagcctggctggagctggaacatgctagacagcctgcctttcatccacgagcacatgtttcagcatttgggagtctaagagccttgctcaaattcctgatgcacagaatagtgagaaataattacttgttttaagccacaaacttctgggggtgctttgttatgtagtaataaacaatgagacacttttccacttcctttccttcttttccattttctgtcctacccattccatcctcaggaactgtgtcttattaccttacctcctccagtactatgtttgcaaaagatttggcttttaattttatctaccataattgctttattaacaaattgtagaacaatcaatgtatactgcttattagatcttttgaacagatgcatagcagggccttttcagattagtggaaagttggcaacatgactcttacacaaaaaagggtgagcaggagcatgctgacttgctgggtctccttaccatatcactctgcagtaattccatcgttttcttgtgttcatccacagttttctgtagtgcttccacagcaagatggacgctgtttaaagtattgccaatggaagctacactctgaatggaaacatataggaaggtgtaaaaaagctttaagagacaactgacatgcaataaactgtacatattcaaaaatgtataatttgaatgttttgacacataaacaattgtgaaaccagtactacaatcaagataataaacactcatcacctctgaaagtttcctcatgactctctgtaatcactcccttgccgatcgttcccaggcaaccactgatccactttctgtcacaataaatcagtcttcattttctagattttatataagtagaaccagtgagcaagtagtgctttttaaagtgtggctgcttctactcagcagaattgggattcatccatgttgaggctacttggcaggctgccgagcagcattccattgtgtggctctatcacagtttatctctccccctgctcatggacatttaggctgtgttcaatatttgactattacaaatgaagctgctataaacattcgtgttcaggtcttcatgtggacttatagacattcccctttatcatatgctttctaatcgccataatacctagcaggtgaatggctgatcatatggcaggtctatgcttcacttgttaaaaaactgcccaacaatgttctaaaatggttatgccattttacattcccaccagcagggaatgagagttcctgttactccatatcctcaccaatcctgtaccaatattggtacagtcattcttttcaacttcagccattctaatggaagtgtatattgtgattttaatttacattgccctaatgaaacactgccctaatgaaaatcggtgtttctgattatttcaaatatcttcaaactatgattacatgtagtgtatactgagataattaacaggactctttctctatcaatcaaacaagtaattttcttaatttaaatgatttttcctagaggaaaaccaaatcttccctaaagaaaaaatattagtttataaatctggaacccagggataaggttctctcacaaactgcctctgtcaatccctgctgtgggaaggcagatggccgagctaacacagtagactgccacttgttaggagcaaaggacacttcgagcaaaagtgggagggaaccatatctggctttgggaaactcaatactgcagagatgaaaaaaaagtagaatcctgtcagcaaccactgaatagggatatgagtagtggcttactttgctttcattagccctaaaaagcccaagtggacagggaacttggagatataattcagaagccatgttttaaaaaaagcctgtcctaagggaacatctaaaagggtgttactattcagtgagttttggccttttcaagacatgctgacagttttacagtgccacattagtatttttaaccaaggtcatttttattacactgatatccaagaatccaagagaacacgagatgacactaataaaaattacatgagatacaataaagttaggtatttggcatgacctaccacttcaaaactgagccacttgaaagaaacacagtgcctggcatgataaacacacagatttgcaaagagacaacacactgggtaaaagtatctaagctggtttgctatctatgtaagctctgttgctatctatgtaagctctgaatgcctgttgcaaaagctacaggcattcaaagacacctactgtttgtgaatccaatcctcactggctggatgtatgaacccattgggatgccagaagatagtaagctcttgtttaaggattttttttttcttttcttttttcccctaaggaagcaactgacagagccatgtgaactctggagcaaaactctgaaactagtattcccatcaacagcaaagtgcctggtacatactggaggaagttccacaaatgtttattgaatgaataaattcaagaataaaccagtttccttttctggtaccaaaacagagatatagaccaatggaacagaacagagccctcagaaataataccacacatctacaaccatctgatctttgacaaacctgacaaaaacaaaaaatgggaaaggattccctatttaataaatggtgctgggaaaactggctagccatatgtagaaagctgaaactggatcccttccttacaccttatacaaaaattaattcaagatggattaaatacttaaatgttagacctaaaaccataaaaaccctagaagaaaacctaggcaataccattcaggacataggcatgggcaaggacttcatgtctaaaacaccaaaagcaatggcaacaaaagccaaaattgacaaatgggatctaactaaactaaagagcttctgcacagcaaaagaaactaccatcagagtgaacaggcaacctacagaatggaagaaaatttttgcaatctcctcatctgacaaacggctaatatccagaatctacaaagaacttaaacaaatttacaagaaaaaatcaaacaaccccatcaaaaagtgggtgaaggatacgaacagacacttctcaaaagaagacatttatgcagccaacagacacatgaaaaaatgctcatcatcactggccatcacagaaatgcaaatcaaaaccacaatgagataccatctcacaccagttagaatggtgatcattaaaaatcaggaaacaacaggtgctggagaggatgtggagaaataggaacacttttacactgttggtgggactgtaaactagttcaaccattgtggaagacagtgtggagattcctcaaggatctagaactagaaataccatttgacccagccatcccgttactgggtatatacccaaaggattataaatcatgttgctataaagacacacgcacacttatgtttattgcggcactattcacaatagcaaagacttggaaccaacccaaatgtccatcagtgatagactagattaagaaaacatggcagatatacaccatggaatactatgcagccataaaaaatgatgagttcatgttctttgtagggacatggatgaagctggaaaccatcattctcagcaaactattgcaaggacaaaaaaccaaacactgcatgttctcactcataggtgggaattgaacaatgagaacacttggacacaggaaggggaacatcacacaccggggcctgttttggggtggggggagggatagcattaggagatatacctaatgtaaatgatgagttaatgggtgcagcacaccaacatggcacatatatacatacgtaacaaacctgcacgttgtgcacatgtaccctagaacttaaagtgtaataaaaaaaagaataaaccagtttccttttctaatgcaagactgtgagagctgcttctgtactaatggctacagaagcctatcatttcctgaattggccctaggaacaacggcaagaatctggcctcatcagagttgtccctaccccttttttttccccccgaatttgtaagtagatggccacattggacaagtagcaaattatggagactgagcacacacagatggtgtggctataaaatagcaaattttgtcttcgcttatggcttagaaatttcttgctcctttgtggaaagaattcatatgctcatagaccctggcacataatctgaccaaacttagcacatatttttataattcaaagatcctagatttgatatccaccgtttggggaatcccttcttccatttcctgtgtcaggggatgatgttctttatgttcgaattaggcacctcttctgccttcctacccctatccactcttcccgtccatctctaaggatccctgagtactattcatctggttggtcacagctcactgtagcctcaacctcccaggctcaagtgatcttcctacttcagcctcccatgtagctgggactacagttgtgtgccaccatgcccagctaactttaaaattttttgtaaagacgaggtctccctatgttgcccaggctggtctgtaattcctgggttcaagtgatcctcctggctcagcctcccaaaacgttgggattacagtcatgagctaccatgcccagcctccaaagtgatttttaccaattaatactcctagcaggagcaggagtgtttgaaaatttccttcgttccacatatccttgccaacacttgtttcctgaatttttaatttttgcatttccccaggtcatcttttttttttttttttaactttcttaattatggaaagtaacagagatttagggtaactatcatgtacaattggtctgctttgatgaagatattgtgagtggtgaactgaaaaagcaagctgaaaagcgaacccatatatgctaacacaagagtgccagcagagcaattctgggactcagagagccaaataaaaaggtatgaacccatataaatcacagctgaggtaacctgttgcaaattaaaggcctaactaaccagaccaaaacaaaattgttctgaattctttaggacacagtgatacactccattactgccctcttggagcagctgatttcaaatgctaggctttcaatgaaaacttataagaagctagaattatggcaaatagtacccacacatggcacctaccttctgaagtctctgtacccacacatggcacctaccttctgaagtccctctacagtggtaggcaggctaatcaagtctgcagctgacttaacattggctttgaggtggttcactgcagaagtcaacagagaaatctgaacaaaaaagagtaacaaacaatgaaaacaaatgagaatttgtagaggacacgttaccttcacaaactctacggttggtgatgtcaagatagtctaggattttatgtgtttctgcaaccctgtcagctcacagaagtaaaggagacagtactttggatagagttgggatctgggaggcaacaataataccccttctttccctgcccaatttgaacactagtgtcaaagagtgaaggcaagtgttattctttaccctgtcctggcagcacaagatcccaaaatcttaaattactcaaaagatgctgtaattatcacacactccctcaacaattggacaggaagaaagctaatgatgaaggatcacttcaaaatttcattttggtaaaatgtaatacctcagtaatttaccaaacttttgttcctgcccaagtgggaacatataaagtaaaagcccatctcacaaaatacagtctacaggaactgcactctgacaatttgaacagcactttcaactacttggggatttggttttggtttaaaaatgtgactaatatttcaaactcaatagctctaccagagcactactttgtatcctgaaggggctcaataaatactcactgactcactgactgatgcaatgtatgtattaaaataggaatttaatcaaaataaaatgaggcttccgttctgctatttaggcatagaattctaaacatctagacttcgctcttgaatgggaactgggggaacctgtgtaatagtcagtttcaggctgcagagacaatattctaaaagctttgcagtttggctcgaaacacttgaaagactcttagttctaaaccgctttcccattctaaattctaggatgagaacacagatctaccaatagcaattatattcagagtggcctcagagtacccaccagtttctgggcacttgttatgggccaagcacagtggtaggcactggggggtgtaagacaaaacagaacctgattccctactcattcctttagcaaatgtttggcatctctgtgccagacactgctgcagtcattgtggagacagcagagaggcaaacaagaccatgaagctctgctctcatggagcatacatcctagtaaaaggtgacagaaaaacaaagaaaagaaatcagattgtaataagtactgtgctaagaattttttcctttctct

SEQ ID NO: 7508 - DNA, 546 bp, Homo sapiens
gtccacggggccagcaaaacaccttcatcccaatttcatcgcattccttctaagtatccgaatttgaagaaaaagcaaaactgttgagtggtcagatggcccccacctggcgttgccggtgagcggaacccagtgctggttatttctggctagaggcgcaccgaggccggccctgggtctggccctggggtggcgccaccaggttacttgcccaccggtgaaggatggcagctttacagctccccgacgcatcagactaaagaacgttggccagggtctgcaccggtggttctcaaagtacagtccccagatccgcagcatcagcaccgcctgagaactacttagaaatgcacattctcggccctggataggcagctctggcagtggggcctagcagcgggtgtttaaacaagccacgggtctagacgttcctttctgtttctaaaagaggccttgctttcctaagacagttgctgtgaaccagctttttccttttgctgtcttgcccctgcaagtgtgaaatagaactttgacccgtgctcgaaa

SEQ ID NO: 7509 - DNA, 546 bp, Homo sapiens; identical to SEQ ID NO: 7508

SEQ ID NO: 7510 - DNA, 2325 bp, Homo sapiens
gattgccagttaaggttgtggaatcaaagagcaaaggctgttgtgaagtggaatatcaggctcaaatggaggtccctcccgaatgagcactgacacctgtgtgcccggacatccacgagggccccaacacctgtgctcctgacagctccatgcactaagcagggcacagtctggatccaggggactgactgtctctggcattgagcggttggtaatcaataccccaccctccctgttctcagtcacttggggacaaaaaagaaagcctgcagaacacgactgctggcccacctgccagagtagccaaggaaacaggatgcccgctaaagcatgttaaggaaggtgtggagcagctgctgggaactgtcttgatttaaaggaagacatggaggactgctgtatgctaccgtattacacggcccaaagcagccccgcaatgggcatgtttaacacctccatggggaagctgcagcggcaactgtacaaaggcgagtatactatattcaggtatgcacccatgtttgagagcgactttatccagatcagcaaaagaggagaagtgattgacgtgcacaaccgtgcccgaatggtaacaatgggcatcgttcgcaccagcccctgcctcacactacctgatgtcatgctgctggcccgaccagctgctgtctgtgacaatgccaggtgtggtcctgccacccagaaaagagaaagtccgcctgcagagatcttagaactaaccaggctgcttcccttgatgtttgtgaaaataaccatccacaacagcgtaaaaaaacagctccacctgaagcttgccacgggccgctctttttatcttcagctgtgtcctccatcggatgcaagtgaagacctttttgttcactgggaaaaccttgtttacatcctgagaccaccagtggaggcttacagtgataccagggctatcctagctgggaacacattggactcatctgtgttggaggaagtgcagaggagcccagtggtgagtctatgcagagactagatggggcctggatgctttgggggagagcaggtacaggtcctgtaaagcctttggtgctgcagctcacctgggaaatgcattgcatttggaaggtctgaaggccaaatgagcttccatttggaggccatggtacattgaggaggttcctagtgcttctccagggttctccaagcctgaatttcagagatttcttagctgtcagcaactcttcattttatatccacagctgttcattttatatcaatgttgtaatgctgtccaaagcatcctgaccagtctattctgaaacacatactatgacctaggcaggctgatatgttgtaggacgtgtctccctgcaattgccacttatatacattggtggcaacacaacatgtttgtgtacttgtgcaataatttctttttgttgtttacctataggaagagaaaggagatcttgctggtctcactgtctttgcttatttgttctctccctagggatatgccatgaagttttgtgaagagaaggagcaattcagaatcagtagacttcacatgaatgctgaaatgtttgggtccacctattgtgattatacaatagagatatgaatccaacatacctcccacatatactacgttcaagagttcacacacccctgcagtcataaaacctatagtgcctgatgaaggggcagggtagcaacagcagtagtgatgacagtaagcaccaccacaggtaccatggatgtggctgcaaccaagtctgcagactcaggagagaaacacagcactggcaaaagcagccttcagaggtccaggaggaagtatagccagcatggctattagtgggtgcttccatgtcttaatcttgttatagcaagggctgcatgcacattcttgtcctaaaagggtacttcaagcatatcagtaagtgctactggcctctccctagagagcagtatgaatgtggtggctacaggagcagagagatactgagaaggctgttgcattgacagtatctctctgctactcaaaggctgactctctgctactcagcattgggagtcagttatctcaactctgcaggatgaggccacatgcgtgaatgggatggaagccagagggtctctacctagctggattgactctgcagtaataacctcaaagcccagtactacacatggtgcagaggtggacatctcacctaagactgtggaggggaacaatgtgattcaccataataaaatccatcaactcaaattatctgctctaataacatatgctctattgacaggaagggtagcaataaaactaatggcaattta

SEQ ID NO: 7511 - DNA, 2792 bp, Homo sapiens
ccctggcctgcctctttgaatagtttactctgtctacattctcagctggagctggcacatggtcagctgtgaatcggaggctccacccttgccctggcttcctaggccttaggttctggggctgatagaatggagaacgcgaatgaaccaaggtgccagtctaacgtctgctcacttctgactttcaccaacttctgctttagtctattgctgatcgcagtggctcttcatcagacagctgggtttattaatatttgccctaaccaaggtttctcatttcctactgaattatgatgactttgattaaaagacatataattgattgagtgtgcaggtttaagccattattgataacataggctattttgtttgagtctcacaataaaacctatggagtatggaaatcaaagctcagacagtagaaataacttgccaagggtcatacagcttgtcaacgggaaggtagggtttaaacctggcctgactgcaaagcccatgctctcttttaccataatatagtcctctttccgattatgtctatgggtctctgggaagaaacagtgcttagaaaatttctttgtagctattatctttgtcttcctggcccttaaatttagagaagactgtttcccaagaaacaagtgatagtcagctcccagtccctggatatcttaccacagcaatcagtattatcctctgtctgtgcatgagcaaaaatctctttcttctccaataataatgaatgatgaaaatgggctccgatgcctgatagatgtgcagtctcctgtctcattgcaagacgtgccaattcaattggccattttcagcatggatgcacagggacttttgactctgtgtgttgaactgtgatgctggaatctttttttttttttttttaaatcaaggcaattgcagggaggcgaattttggacttcagggaatgaaaagataaaatgcaatttccggcttgaaattattttttaaactcctcagcaggatggattttcacttttggcaggttttgtcttatcaaacatgtagggctggcagctctactcagagcctgtcctaaggcaatgctgtggtgaagctgccttcccatttttattttttatttcctcttctactcccagctgtctctactcttctcctccaataaccctgcactctcatgcctggcaccacagcgtgggtcaaagagcaataactctggactgtcaggatctggttattggtcctagccctgccaacctctagctatgtggctttagagaggtctcctatcccactaggctttcattacctcgttataagatgggcaggctaagcacacaacttccagcaatgtccagcgactcaaaggagatgatgtaatcaaagtgctttgctaactataagaatttcacaaactttggttacagttttacaaactttcgattctctcaagttccccacccgtctttcgaggcctaatgtcatataaaactcaatttttttctctgtactccatctttataaaagtttacaattcctcaggccacttgaactggagagaggctggagaaagagaagatctttagctagtgccccttctgtctccccacaggagacatctcggtggaggagagggcagcaagtatcattgatgtctattcagggaagccacagagcgcatggtcaccctgtgacatgcagttcttcgttacaattgtagggagcaccacactcaccaggaaaagaggatattggctttcgatcttgtctctgagaggtacaggccttctatctatgctgtctgtatttggcctgtggatcactcacagcagaaagccagccgggaccctatgacatggccaggccccagtgaaacgtccccttgtgaatgcccttcaccattcaaagaccaaggatgcctgtaagtcctccgtctccagaaagagagttttgtagccagcaggtcaaagacagtgaggaaggaaaggcctcagtgccagtgtttaggtgggaaaccctccaaagagattcacattcaccataaatttattaaatgctctgggtggtattataaagaagagagctattcaatttcatctaatgtaacacttcccaaatatgtctgacaatatgatcctctttaattttctccccataaaggctagtaacattccacaaacacactctgggaaaccacagtacagtgaaatgcaaatcaagaataaatcttggctgggtgtggtggctcatgcctgtaatcccagcactttgggaggccgaggcaggcagatcacttgaagccaggagttcaagaccaacctggccaacaaggtgaaaccccatttctactaaaaatacaaaattagccgactgtggtggcacatgcctgtaatcccagctacttggggggctgaggcgggagaatcgctggaacctgggaggtagaggttgcagtgagccaagattgtgccactgcactccagtctgggcagcagagtgggtgagactctgtctcaaaaaacaaaacaaaacagaaataatctaaacctctaggttcagagtaagacctcacaatttcataatacttcctatgtactaggcactgttccaagtacttctcatctattaactcatttagtcctcacagtaaccccataaagtatcatcatctcatttttacatgtacagaaactcaggcacagagaagttaagcaacttgctcaagatcacacagtcattaagtggcaaaactgggaatggaacctaggcattttggctcgtctttctcctaaccaaca

SEQ ID NO: 7512 - DNA, 2792 bp, Homo sapiens; identical to SEQ ID NO: 7511

SEQ ID NO: 7513 - DNA, 2790 bp, Homo sapiens
ccctggcctgcctctttgaatagtttactctgtctacattctcagctggagctggcacatggtcagctgtgaatcggaggctccacccttgccctggcttcctaggccttaggttctagggctgatagaatggagaacgcgaatgaaccaaggtgccagtctaacgtctgctcacttctgactttcaccaacttctgctttagtctattgctgatcgcagtggctcttcatcagacagctgggtttattaatatttgccctaaccaaggtttctcatttcctactgaattatgatgactttgattaaaagacatataattgattgagtgtgcaggtttaagccattattgataacataggctattttgtttgagtctcacaataaaacctatggagtatggaaatcaaagctcagacagtagaaataacttgccaagggtcatacagcttgtcaacgggaaggtagggtttaaacctggcctgactgcaaagcccatgctctcttttaccataatatagtcctctttccgattatgtctatgggtctctgggaagaaacagtgcttagaaaatttctttgtagctattatctttgtcttcctggcccttaaatttagagaagactgtttcccaagaaacaagtgatagtcagctcccagtccctggatatcttaccacagcaatcagtattatcctctgtctgtgcatgagcaaaaatctctttcttctccaataataatgaatgatgaaaatgggctccgatgcctgatagatgtgcagtctcctgtctcattgcaagacgtgccaattcaattggccattttcagcatggatgcacagagacttttgactctgtgtgttgaactgtgatgctggaatctttttttttttttaaatcaaggcaattgcagggaggcgaattttggacttcagggaatgaaaagataaaatgcaatttccggcttgaaattattttttaaactcctcagcaggatggattttcactcttggcaggttttgtcttatcaaacatgtagggctggcagctctactcagagcctgtcctaaggcaatgctgtggtgaagctgccttcccatttttattttttatttcctcttctactcccagctgtctctactcttctcctccaataaccctgcactctcatgcctggcaccacagcgtgggtcaaagagcaataactctggactgtcaggatctggttattggtcctagccctgccaacctctagctatgtggctttagagaggtctgttatcccactaggctttcattacctcattataagatgggcaggctaagcacacaacttccagcaatgtccagcgactcaaaggagatgatgtaatcaaagtgctttgctaactataagaatttcacaaactttggttacagttttacaaactttcgattctctcaagttccccacccgtctttcgaggcctaatgtcatataaaactcaatttttttctctgtactccatctttatcaaagtttacaattcctcaggccacttgaactggagagaggctggaggaagagaagatctttagctagtgccccttctgtctccccacaggagacatctcagggtggaggagagggcagcaagtatcattgatgtctattcagggaagccacagagtgcatggtcaccctgtgacatgcagttcttcattacaattgtagggagcaccacactcaccaggaaaagaggatattggctttcgatcttgtctctgagaggtgcaggccttctatctatgctgtctgtatttggcctgtggatcactcacagcagaaagccagccgggaccctatgacatggctaggccccagtgaaacgtccccttgtgaatgcccttcaccattcaaagaccaaggatgcctgtaagtcctccgtctccagaaagagagttttgtagccagcaggtcaaagacagtgaggaaggaaaggcctcagtgccagtgtttaggtgggaaaccctccaaagagattcacattcaccataaatttattaaatgctctgggtggtattataaagaagagagctattcaatttcatctaatgtaacacttcccaaatatgtctgacaatatgatcctctttaattttctccccataaaggctagtaacattccacaaacacactctgggaaaccacagtacagtgaaatgcaaatcaagaataaatcttggctgggtgtggtggctcatgcctgtaatcccagcactttgggaggccgaggcaggcagatcacttgaagccaggagttcaagaccaacctggccaacaaggtgaaaccccatttctactaaaaatacaaaattagccgactgtggtggcacatgcctgtaatcccagctacttggggggctgaggcaggagaatcgctggaacctgggaggtagaggttgcagtgagccaagattgtgccactgcactccagtctgggcagcagagtgggtgagactctgtctcaaaaaacaaaacaaaacagaaataatctaaacctctaggttcagagtaagacctcacaatttcataatacttcctatgtactaggcactgttccaagtacttctcatctattaactcatttagtcctcacagtaaccccataaagtatcatcatctcatttttacatgtacagaaactcaggcacagagaagttaagcaacttgctcaagatcacacagtcattaagtggcaaaactgggaatggaacctaggcattttggctcgtctttctcctaaccaaca

SEQ ID NO: 7514 - DNA, 128 bp, Homo sapiens
ttttgtatttttagtagtgacggggtttcaccatgttggccaggctggtcttgaactcctgacctcaagtgatccacccacctcagcctcccaaagtggtgggattacaggcatgagccaccacgccc

SEQ ID NO: 7515 - DNA, 128 bp, Homo sapiens; identical to SEQ ID NO: 7514

SEQ ID NO: 7516 - DNA, 634 bp, Homo sapiens
ctgaacttgtggtctcctcagttgatgaggtgaagaaagaaagcctggagaattatgcacgagcttctcactgtctcagcccacaagtaacacacctctttccctcacagcccacactggctggaaccaatcacatagccctgcctaactgcaagggaggccagaaagtgcaacactttctcatggtcacgggtgagcacgaaacatctctccaaatatgggttgggaagattaagagactagtccagaagaaaacagtctccagggagaaatatatctgggaataggaatcgagaaagcaaccaagagagcagaactgagtggatgagaggaactgtcagaccacatctgcagctctgattagtcaaatccgaaatgtgcctgttgatctactattccgtggaaatactggaatcaccagctcaataataagaggaaagtaaataataccatacttgcgtggataattcccctctgctcataccttcattcaggtcaacatagatctatcatactcctacagtgtataagggacgtgctaagcttgaagtacattcattctaaaaatcaaaatacaaaggcatgggaagactaagaaaatttcataaaccttcattaaattatcagaaatacc

SEQ ID NO: 7517 - DNA, 634 bp, Homo sapiens; identical to SEQ ID NO: 7516

SEQ ID NO: 7518 - DNA, 3805 bp, Homo sapiens
caggacactccagaggttgacgggtgcagaaggaaggcgggcgctttcctggaagagaagtgggtcaggcccaactgaaaagcaagcctggcaccagaagggggacattccggaactagatatgaagagacttttctccctgaagttccccggacccaattagatgttgtacccaggctggttaccctggtaacaggcgtcgcggtttgtcaaggaactgagagaagaggtgggtttgccaacctatagaatgattacccgttagaactgagagaagaggtgggtttgcagacctatggaatgattatccgttagttaagtttcccgtttagcataacccttacacagtaattgaagaatctaaacctcttttcctcattctaaagatgctgtgggacacctctccaatgggagaagaggctaaggagatttatctgaagacgtagagaagtgtcccagcctctctattagcttacttaatctcgcaataatcctatggtagaggtattatcgtcttcattttgaacagaacattaattgctcaaggtcacagagctagtgagagatagaactaagaccggaatctaggcattctggctcacaagtccatgctttgaaatactaaactatactgaggattaaggaagtcttatgtggccctcaccccacaccacacctctggcaatttcagaactggggagccaccagtcaggtgttggaacaagaagatcaggaaacccagacttaaaatgattactctgacttgtcagggtccaaatagaagtaaggccttatctgagaggacaatgtgagaatttaggaagaggtactagataattaaagaataaggaaaacataaagtggtgctgatccacaaccttttagacacaaatgctgtcctaacttcaccaaaacaattcctgacccattccacctccccaaagcagaaatgaatcaataattacacagacagttttcttcctgaagtcgtgtttttccacaggcttaagaaaattattcaccactcataagtcatggagacatcctcaaaaggtctgcttacccaagttactcagttttggaacctcctagatgatctagctcagagtgaccctgagggctatgagaagtttattcagcagcagctgaaagaagggaaacagctctgtgctgccccagaaccacagctttgtctacagaccaggattctggtatgtcgagttggtgccagggatggggaggtcttgaatgaaatgatcccagaataaccagagaatactttacacttaggtattgctaattttttttgttttttttttgttttgttttgttttgttttgttttttgagacagagtcttactttgtcaccaggctggagtgcaatggtgtggtcttggctcgctgcaacctctgcctcccgggtttaagcgattctcctgcctcagcctcccaagtagctgggattacaggtgtgtactaccatgcccggctaatttttgtattattagtagaggcggggtttcaccatgttggccaggctggtcttgaactcctgacttcaggtgatccacctgactcagcctcccaaagtgctgggattacaggcatgagccactgcgcctggcagacttttttttttttttttttttttttttttttgagatagggtcttgctggctctgtcgctcaagctggagtgcagtggcacaatcacagctcacaatcacagctcattgcagcccaagcgatcctcccacctcagcctcccaagtagctgggatcacaggtgggcatcaccacacccggctaatttttaaatgatttttgtagagacagggtctccctatgtttcacaggctaatctcgaactcctaggcctcaagcaaccctcctacctcagcctctcaaagtactagggtaacatacgtgagccaccaccccagtctggattcctaattaaaagccagcagccttggggaaatcaaataacaacagtataatcaaacgcagttttaatacatgaaatgacttacttggagcctaaaattctttcattcctgtggtgagtggcttttaggatattattttttaaatgtttttgtttttgttttttttgagatggagtttcactctcgtcacccgggcaggagtgcaatggcacaatcttggctcactgcaacctccgcctcctgggttcaagcgattctcctgcctcagcctcccgagtagctgggattacaggtatccaccaccacacctggctaatttttgtatttttagtagaaacggagtttcaccatgttggccaggctggtctcaaattcctgacctcaggtgatccggccgccttggacccccaaagtgctcggattacaggcgggagccaccatgcctggccttaaatggttttaaactaggttttgagatgtgcaaaattatttgctttccagaaaccaaaagaaaaaatactttttatcaacctgtgtcagtggacaaggatcccagctccccaatcaaccactcatccagtacctctaactgttggcaaaccagaagatacaactgagatatcaggtacaaataattgagagaaagcacattgtaaaaattttattaggaatggacaagatcttacttggttgagagcatttcaagtaaaactctttatttgttgataatataattacaattagtgtatctttatgcaaatttaatactgtttaacttttgtaataaggtgagctgttttaatccatgcaaaagtgccaagaaatgtcataattgctgtagcactactgtgattacctctgaaaaatacaggaatattctctagctttatcaggaatatggtttaatatattgcctgacagtatcattagtgcaacaatttttcttcatttcataccctttcaattacacacacagatgcttacacagtcattgatgttgcctacaatcctgatgttcttcatgcagcagaaaaggaccaagtgaaaaaaaatcagttaattcagatggccatgaaatgcattgaggagaaattccagttcaccctctcacactcttaccatattaccaaatttagaataaaaggaagcattcaaagaatgaaacaaaatctgatgggaatccaaactgattccatacatttaagagaaaaaatgagaaggggtaagttgatgattgtaaatggaaaattaaactgctttaagatgtttttggatcctgtatacattttgccaaactagaaatctctattttaaaaggtgaaaaacttaagatagaaaaatgcaaatattaaatattagaaatatcatatccttgatttttaaatcctgaaaaattttcaatcaaattctttggtttaagattcttttggcttgattcccaaactaatttaactgcagctttatctaccatctctactaacaccacatatattatagctcatagtattttatgttgtagatttattttttatctcccctccaccctttttttcataaagaactaactcttggacagatacgaagcagtactatgagcaatccagatcactttcctcaactgttactgccaaaagaccaagtttcaggcaaagcagtgtgtctgatagaagagatttccagtactgaaatccaggtggagatgaagatgccagcctatgaactaaaaattgtgcatgatcacagtgagaaacctctgaaaattgagttgaaagttgaattacctggtattaattctgtctctctctgtgaccttagtgtttctgaggtaagttgaatagataacactgtaaatttg

SEQ ID NO: 7519 - DNA, 4013 bp, Homo sapiens
cttgaactgctgggtagcattttccttttggtcccccggtaagcatcttccatctgtttttccagttctcttattttccacatatctgattcctcctgaatctagaatttttaaaaaggaaataaaaataagttactaaaaataactttacattacagaaaagtaactaactggccgggcacagtggctcacacctgtaatcccagcactttgggaggccaaagcaggcagatcatgaggtcaagagtttgacaccagcctgaccaacatggtgaaaccccgtctctaataaaaatacaaaaattagccgggcgtggtagcatgcacctgtaatcccagctactcaggaggctgaggcaggagaatcgcttgaaccctggaggcagaggttgcagtgagccgagattgcaccactgcactccagcctgggcgatggagtgagactctgtatcaacaaaaaaagaaaaaaaaaaaaaagcaactaactgaaaatacaatctgactaattattgggctacagactgggctatgatcaggaacctggaaaacaaattggtttctctagaaagtggctgaacagtccaatccagtaaatctcaaatatgtggaaatcttccccaatagaatttttaaaccgctgcacagacaaacatcaccttatcaatcttgcaattatgctgcgattagcaaatgataatgccacatttccaaaatgcaatatgattttaattatatcatctcaattgaaccttaagcaatctcatgaggaaaatatagcagctaccattattacattttactgtaaagaaacaaaagctcagagattttaacaaagtcaaaaaactagtaaggacaggtctttaaactccctaagctaaatctcttctggtaatattataatttttgtcaaaaataaaataaaataaaataatcagtatggctgctagggaatttcttgaaaagcagaatgtgattacccaaagaacacattttatttctaagtcttcctgcataatttcattagatctgtgctagatttatctttttctagctaccattttaaatctaagcttactatataactaggggcaggttaacataattgcataggcagctcgggtaacagttttaccctcgcccataattttaaaaatcaggtgatatgataataataatatgatcaaaccaaaagtagtacagtttactgaagaaaactaaaccaggggccttggccctcttttcattatatgtgctctcctaggtgacctcatctactctcatgacctcttatcatcaacctatacatcaataatcccgaaacctttatgtccagccccaacttttctcctctactccaagtctgaattttcaactgcttggacatcctataagcacctcaccatcaacatgttgaaaaccaaactaattacctttcctatcataattgtcccattttttgttctttatctcaattaacagaatcgtcatcatctacccagtcacataggtggttacacagttgaccttgaacaacaggaatctcaactgtgcaggtccacttatcctcagattttcttccacctctgccacctgtaagatagcaaaacaagtccctcttcttcctcctcagcctactcaatgtgattttcttaatgaaatgttgttttctctagctactttactataagaatacagtatataatacatgtaacataaaaaatatgtgttaatccactgtttatggtatcgctatggctttcagtcagtagtaggctattggcacttacattttgagggagtaaaaagttatacatggattttcgactatgcagggggttgatgcccctagcccctgcattgttcaagggtcaactgaattagattccattcttatcattataatctaattagccaccaacttctttggattctatctcctaaattcctcttcttcatccctgctgtcactaatttcatgcgaaccctcatcatctctcacctgtaatactgcaattgcctcctaattactctcccttctgtatctccccatctgattcattccctacccagctgacaaaccatctttctaaaatataactatgatcatgccacaccctgtttaaaaacatttgatggcttctttattgcctagaggaagaagtctcagctccaaacatcacaatccaactctaattaccactgaggccttatcttctgccactatcccctaccttccctgctttctggataaatttcttgccatgccccaagtgattaatgctctttctcgttgccatattaatgcatgatgctgtctatccagaatgatatttcatacctggtaaacgtatacctattcaagaaccagttcaaagatcagcagctgaaataccactaattctgtaaaatcttttctaattccccagtgtagattttattatttcctccttagtgctccaaagcactttgcaaatatctctgttatacagtacttatcaaactgtattataattatctattttattcatcattttatttcctactgtgtacggaagcttccaaaaactagatgacaagaatattctttgtatctcccagttgttccaaaataatgcttggcacactgcttgccttcagtaagcgttgaggagtaactaggttgtacctcccaccttattgtgagcatctgtgtgccggatgacattcctcaggaggaccttccccagtggaatccgggacattcttcaatctgaaatgaatcaacaaataacgtttagtaataatttctgttattactttatcttttcttgaagttttataaagaagcatatgaggtacaggaaagatcactgaactagaagtcagagattctaaagaatagttttccctttaccattaaaagagggaaatgcctaaacacactaatgtgagatgaaaggagataatgtacattaaagttctttgaaaatgcacaagactacataaaattaagtgctttcatgagcaccattttatttaatcctcataactactttttatatgaggcaagtatctccatccctattttgtagatgaagttcccttaaagctgtaacgtcccaagccacatagtcccaggcaaatgatgtatgtcactgtctaaattaaaaatcaaacctccaatcccaatatagtttgcactgaagcaaatacgtagatttgagagtgtcaggaaccacgggtgtcaacagtaacagaaactgattactcaaaacatcaaatgcaaagatgtcctaaatttctccatttgggggcattttatttcctacttgctacggaagcttccaaaaactagatgacaagaatattttcgtgtgtagctagcaggagctttgtgcaaccaccccaacgctcactcaccccttgatcctgaggaaatcaggcatcttgctagtgagacgaagaaccactccattacaagatctcctccgacccaggaagccaaggagtcagggctcaaaggcagctctgcagcttcacccgagtccttcgtgaaaacgcagccttcccactggttactctgccctcacctgtggcccaggccactgccgcgtttcccccagcccagaccgacaggcagatctctctcccggactgaggccggaggctgagccggggcggaattcggacagcccggttgacctgggcattccccgctcacgctcctctaggacgaaccccgggggtaagtttcactccccagaaaggctgggaacgctttggatggctacggccttcggttgggccccagaaagtatctagggagcctgaagcgggggttgaggtttccaagtggaagacagaggaaatatccccatctttgtcaccgggatccctgttccccagcggcctcggagctcccggtaaccttccctccaaacgccctccccacacaaatacacacaaacacacccataccgtgcgccgcagcctcgcgtggcggggggtaggggggaagaagtggtttgggagaa

SEQ ID NO: 7520 - DNA, 3286 bp, Homo sapiens
acaatgcgcaggcaatccacagcagctgcccctgcaaatgtcagcgccagcccagtcaaaagagcttgaaacctaccaagccggaggactgtgctgtgcctctctcgcccacattttccccaagcactctcaggaacctggcaacaggtaacgtggcaacctttgacttataaaagggcaagtggcacaatctcagggaacaaatggacttttttttaaagccagcatctcccccaccactcccacacccccctccctccctccctccctcccaaccaaaagtctgtaaaaaacaaaacattgacgcgggcagtcctactctctagtgtccccttgtggccaagcctggaacatcacatctgtacgttgcaatctgtggatcagctacgaggtaagtcgctctttggaaggggtggaggtctttgctggacttgtcttccgaaaagtatgaagagtggaagtcaaggctcagaatggcgtccttttttaccttatcaccttaacaaaaacttcaccttagctgcagggttaaacctctgggttggggctggggattttcgttgttgttgttttaaagcagcagccaaggccatgttttttaaggtggtgagttaaacggagcaagagctgcggtagccttttccacccaatctctttcttcacatcctagtcacagccaagggtagggtggatggcagtgaggataaacagcccagaaacaggattcctgcggggtgggactggcattttccatttttatctgaagttgtactttgaatgcagacacctttctctcaggccagaagcactgctcatttgtattgctggcttccagttagcctatttgcaaggattacttaggatttccagactgcaggcccagctacccagagagtgtgcctcaaagccccacctcaaagcttttatctctatgtggcgggaaacacccacgaaaatgccaacggcggtatttgtaacttgccttcttccttttgggaactgctttctgcagctctctctgcgttagaggaatagctacagctgggagctgctccagccacgcaggaggagagggcacccattgagaggcgggcaccccttctgtctccctctggctatgttaactggaaactaggaaaggggttcagatcaaagtaactgctgtcttcagaaagttccattcattaactaagttagcggaaattaaatggtgtttggaggaaggtcatttcagaaggcccagggccagaggctgaggtctaaaacttctaatctggacttctattgaagtttggcagtaagttaaacaggaagttgaaggctaccatatgtaaatccagttgttgcctgaaatcagtcatttcaagggagtatcttgaaaggacacagactgggaaacaggcatgagaaaaaaaaaaggaagtagacagacatttggctagtatgtgcctggaccacttaacactaaagattagaaacctagggctctgagtaagaatcatttgaccagtagctaaagtgagtcatggcctgcacagaactagggcacacatgttgaagtcaggatgttgagaacatcaggcttactaatttgcaaggcaggagtgctgcttccagtagggaatgtgatcaggatttcacggctcattttcccagcctttccaacaggtgcaatcaagtcatccgtgtacacaagtgactgccctgttacatctgttaggattaaatttccatttgttccattactttatatgaagtgatttctactgctgagtcagacagaacacttcctcttagacctagggacttttttcaacatttttaacaatgtgtgtgtttttcaaaatgtgtcccaaccaggtctgcaggtcttcctgggttgaatggactgtttacagaaggggaagattcaggcccaaggtcagggttacagaattatataaggtttcctgtttgggcagctggtctagcaacacctctggttggggcagactgggtcttgttgagagatagcatgcccaggaggctagggcagggagagtgccaggagcaggaaagaacatttttcttttctttttttttttaagaccgtgtcttactctgtcacccaggctggggtgcagtggtgcgatctcggctcactgcaacctccgcctcccaggttcaaacgattctcctgcctcagcctctcgtgtagctggaattacagccgcccgccaccatgcttagcttatttttatatttttaatagagacggggtttcaccatgtgggccaggctgatcttgaactcctgaccttagatgatctgtctgcctcggcctcccaaagtgctgggattacaggcttgaaccaccaagcccggcctgacatttttcttttaaatcttttatcaaccagctttcatttcttgtcagatgtcacttttcagcaacctgttgctatattctctgttaggagaactttttttttttttttctggccagactgagagaaaggaatgaaaggatggaagaattacaagatcaggcactgctgtctgtctgttccacggatgtaaccacagcacacgcgtggctcacggtactagtgtgataaatgcttgttacatgaaggcgtgaacagggatgagaagagacttcctggagaaacaaaaggactaacaatcaggaaggggaggtgatcggggcaggagtaaagtggacacctcagcaaagccattcgctgtgatctctgattgtgcagtgtcatgtcctgtcaccagagccccctcgtgtttgatgttggccaatgccgccagcatgatctagcaggccaaatcctaatctaccattctctgacaccagctggtcccctgggtcgtccacccgatgtcccccattctccccacttggcctcccccacaggctctcggcaaaggaccgtgggaggcacctgtgacactgcccttttcctgtgcagctgtttttcttcttcattcttttcactcctcgttactcttttttttttcactctcagcccacacaaaactaggaactttgttattctacttatttttctgtactctgtctgtttgcacacagatggatatctgagagccagcgaactttctttacctcctagtatcatttcatgaaaattagtagcacctgcacaatggggccttggagacaggaataaaaggaaaaatctggaatggaatcacatgacgcaacaggctatgaagactccctgcccggctgctatatgtctggtaaacagaataaatagtacttgagcatccctga

SEQ ID NO: 7521 - DNA, 3286 bp, Homo sapiens; identical to SEQ ID NO: 7520

SEQ ID NO: 7522 - DNA, 233 bp, Homo sapiens
attgttctcagcaaggaggaagaatggaaaggtttgtttcagagtcacaactttattttttttaaaaggcacccaagttgtttcaacaagctgctacaaaacttgggcttcctgagtggaggctgttttgcacagtgcatgtactgtacaaaaatccaggcagggaggggtcagagagttcgtcattaaagaaaaaaaaaaaaaaaagccccaggcacttgatgcctggaaat

SEQ ID NO: 7523 - DNA, 233 bp, Homo sapiens; identical to SEQ ID NO: 7522

SEQ ID NO: 7524 - DNA, 343 bp, Homo sapiens
tgggctctgtggtggttctactgcctttaagagccttatgtcccttggttatcagaggctgagcctttctccagagcatcaggaatgccaggactcttcattggggtgttagctttgtgggaggggctggaggatatgggaagtaggattgggaaaaagaggaattgaagcctgtgattgaaactattttgtctctctccttgttttagaaaattaaaggatgggagtggtggggtccacactgattgttcaatgggggatggggtccttggcccacccctgctttcccataggccctcccataaccaagggcacctattttgagatggctggccccccagcc

SEQ ID NO: 7525 - DNA, 4296 bp, Homo sapiens
ggagccgcgactaagggtgacgctgtttctcggcccaggtatgtcatctcgctgagtccccacaagctgaccctatgagggggttactatagttaggtccatttgacctggaggaaactgaggctcccacgggtgagctgcccagctcagtggccctgagtaccagactcctgctggctgaccccagtgcagggctctgtctctggtgctgaggggcatggggagagtgcagcaatttagcaggcctcagttctgtcccagcctggggcagtggttaagcagggccagtagagacagcagataagcacaggctagtcgggaggtttgggcaacaccaggccacaggtatgtctggacagtgtggggcagcaggtgaggccagcccaggacagggcactggcttcatggcaggccgtgtagtcagccagacctgggtctacatctaggcttggcccctctccagctgcaaggcctgggggaggctctggacactctgagccccagggttggtttctgctaaatgcggagcagcgggaggcttcactgaggggatgatggtctctgctaagctcagcacacactgaccagaacgtgccaggatggacgctccatctaattctggggccaggcacctgggagccatccccgtcaccctgatggccacccaatggcagatacgctttcccctcaacatctcagggaggtcaaacaagggcagggttacagggagctggtgactaaaggtgcttttctctccccatggctgagggggcaaaagagcccgaccggaagctgctcttggaagacagaagcccatgtgcagggaatgtgccagtgcccagcaggtgaatgcaggtctcgaggggtcggagggcacacctgcctgagtcccaggtgcgcctgagggcttcggctattcctcctcatctcctccccatactgccttccccagtctcctctccccctcccccaggccttccccagtccctcctccttgcctttgcagacactgtgtccctccctgtacgccctttctgtccttctcagccctttgtaattcaacctggttttcaggcacagcaaatccagcatcctctgggatctgaaggtggccagcccctctggcctctgcaggtctctctgtgctgggactgcctctgagccatctacccacaagttcttaacttgcaaattagccccaaagctggatggcaggaccccggaggcctggccagggactgtctagagatgtgttaggacagagctccaacctgacctcagtacacagggactgagaacctggttggggctccataaacactcctggttggcagggataatgataatagcaaacaaatccttagagacagggaggaaattccacagggatccctccaagccagaaagcagggaaattacactaaggagtggccaaaaatcctctatcaagttgaaacagggaaggctaccaggttcaatacgaacccccatcatctgtccactgggggcctatcaagggacacacctaccctcaggggcctacagtctttgggagagcagaaacatcatctaacttcccatgcatggtggagggagagacagcactggggcctgatcaagagtgggcatcctcctacctgtgttcaaacaccagctctgccactcaccagctgtgtgaccccaggcacacagcttcgtgtttttgtctctccatatccctaagacctacctcatgttatatgacctccctcatggggttgctggaaggatgaaacctgttaatatatcttgtaaagagtttccaacagggcctagcatagagtgaaccttcaacagaagtttgctctaattgggaactgagacacacgcacataaagaactaggggaggacaggggaaaaaaaatcttgtggccagagtggaccacaagtgaaagatggtagcagtgccaaatccagactttaaaaagttacaaaaggagctggatgtgatgctgggaccagcaggaggcagcaccaagcacaggtgtgggagtcccagcgcctgactctgtcactgatttgctgtgtgaccctggataagctgctttgtctgtttaggtattagtttttaaggtgtgggctctctcccgtctacactctaaaaggctgggaggctcctagggtctggagagcaatcctgagctgggcttggagagagtcgggaggtgaatgcatagcaaggaccagtgcgtgtgactttatggtgcccttccacggagcagtggagtgggtgcctttcttgtgtagaacgggacaaaaaggcaaagatgtaattgcagtgggagggatgtgggtgagactttgtgcataacttccaaattcgaaggcctgggaaagcttcagaacatttctgtttctgtattcttaagaaaggggcaagcaacccctcggtgcacctttgctgagggtaaggagtttcttattcatcttttcttttgagacgaattcttgctctgtcgcctaggctggagcgcagtggtgcgatcttggctcactgcaacctccaccttttgggttcaagcaattcttgtgcctctgcctcccaagtagctgggattacaggtgcataccaccatgcctggttaatgttcataattttagtagagacttgggtttcactatgttggccaggctggtcttgaactcttgaccttaggtgatccaccagcctcggcctcccaaggtgctggatttagaggtgtgagccatggcacccagccctcttattcatctttttgatggttagcactgaatatgtggttgctgaatgaatgaatgaatgcaggcatgtgtgaatgaacaacagaggctgggtcttgtatactgtggctggctgtggccatcagatccaaggatacagaagctgagacccaggcaggccagcaacttaaacaccacaacccccaactgggagcctcagttttctcatctgtgagatgccgacaaagacatctggacttaggtcacaggattcttgtggggataaaatgtgatcgatgatctgaaggtattttgaagacttccttctgcataactgagggaggtactcctggaaggtgcctccctaaggaagataggaatatggtggaagagaaatacttccctgaggccacatgggaaaatgtgaaggacaaaggttcccttcacagcaggagtgtcctggaagacctgtcccaggcgccatgaatggcagcctatatctggtccacacctgcctctatgaaccccttcctcaaactccaacaaaagggcagaagggggaaagcaatcctatgtcctttaacctttaatactgtcctgggactctgggctctggtttcttccgctggtctctggagttggtactccacgaactgaattcatatccatatgaaatatcttgatcactcaagggaatctacaatgttcactttctctgaaaatgggctaaatgaaatcagtggcctgtaaaattcttttggttttgagactcttcaaatatagttaagaagggaacatcagttttaaacttcctttgtcttctaaaaaaattttaaaaccaggtcactacatatcaatgtacgattatggggcacgttccataatctacaagcagatcatctcccacagcagataagccaggaaatactgggcagataccagcaaatcaggtatctctggagtgtctgggcttgtttggggcacacagatcccagaccatggacaaccaccagtttcaaggaagaaagtagaaacactcaaagattaacagagggaaatggaaacaaattgcattcaacctggcctctggctttcaagtcatttcttcttatatctctgcacagaaacaatgaagtcatttccacccttgaacttgggaatgaagagaggcaaaagtcacaggctgggaaccgcagcctgaattggatgaacttatcttgtggttgacttgtgcatgtatgagtttcacacctgagaacaggataggaacttttgaaatgcagcccacgccctctggccctcgtgtgtacagagccgccttcgttgggtgactcagggtaatgactgagcaacaactgttggcttgagtggtgccggggatgccctgggaggctctccctgccatgctgcctgccctgcaccaacaggcccctgctccatggctgcagcctccagcctgtctggccatctaccggcagatgctgctcccagggtctgcctcccacagcgcgcgcctctgattcagccttccaagctcacaaaacaaagtatgtgta

SEQ ID NO: 7526 - DNA, 355 bp, Homo sapiens
gtgtggaacccaggagctgatggtctcatctgggcccagctgcctctttgcagactttatggccttcacctgggttgcaggaggcagatagtttctgggtctggataagcaatgggtcctggaacaaaaactctagagaccgggggctattcatgacaggctccatttcttattgaacattcagttcaccatcaggtcttgtctagtctacccccagagcatccatttctccatcaccttggccaccactaccatcccctggctcctggctggtacctccatggtcccacctttgggactttgagtatgcaatgtttttgaaagactcagtccctacccattatgggtagaatta

SEQ ID NO: 7527 - DNA, 1052 bp, Homo sapiens
cccctgctcccctctccgaccctttgagccgtggccgttgccagatgtccacaatgggaaacgaggccagttacccggcggagatgtgctcccactttgacaatgatgaaattaaaaggctgggcaggaggtttaagaagttggacttggacaaatcagggtctctgagcgtggaggagttcatgtccctgccggagctgcgccacaacccgttggtgcggcgagtgatcgacgtcttcgacaccgacggtgatggagaagtggacttcaaggaattcatcctggggacctcccagttcagcgtcaagggcgacgaggagcagaagttgaggtttgcgttcagcatttacgacatggataaagatggctacatttccaacggggagctcttccaggtgctgaagatgatggtgggcaacaacctgacggactggcagctccagcagctggtcgacaaaaccatcatcatcctggacaaggatggcgatgggaagatatcctttgaggaattcagtgctgtggtcagagacctggagatccacaagaagctggtcctcatcgtatgagcctttttcttacaagcaccacccaacaacttctgctttcttccctatctctttcaagatttgctcaagacgtccaactgtctctctgacttatctggaagtatttctttttgtgaagccatatgtcctaacaggagcttcatcaccaactcagtgctattaattctccttctctgaatgactcagggtaccctatagggggaagagcaagtcaaatgagcatagtggggaaagaaaaggaaatggcttttataaacatcttttactttgttttgattcaaagaccaaactagaactttaaaagttcaaaaataagaaagtatacatttttgctgttatttctcatcattttgtatatgggaggaaatttataatttgcatgggtgttaggtgaactgttttcatttgcttgtgttcagatatcttgccagattgttaacttcctattgtagcaacagggacaaatatatttgtctttgctgggca

SEQ ID NO: 7528 - DNA, 1650 bp, Homo sapiens
ctgtggttccaggggagatccagaatgcatgtgtctcttcccacgcatttatgtcatgttggtagctttagatcagccatggtgagaaaagaacaaaagcttttagttgtttttgttttgttttggagaatttgtttaccagtaaatacatcactgcctgtaccccaaatgttaccagctccctgaggtgtcccacatactattgtgagttctcagagcatgaactgtcctcagaagagcagggctaggacttgtcccagcatctgtgcctccataccaatcctctttctcacagagaaccacttcccatataagatgcttaaggctctcaaaacagcagaacaatgaaacatactctccctacacttgcttagccaagagataccactcaggtaacttttttcaggacatggaagatctgtttcaaggagatttactgctattttatttggaagaagctggcaactggtcttgaccaaaatagaaaaaaaaaaaaaaagtccacaaatttaatcacttgtagggaacccatctatcaaggtaccctaccatatacttttgtatttaatagattacttagaaaccacaaaaataggaatccttaccccttcaattcctgttcaaccctaaaaactgtgataaacgctcccaaccctgtggtgatcagggttatgtaatgttcaaagattcagacacacctgggtttggattcagttgcaactgggttgttatcacactcacttctttttagctgtgtgagcatgaataatttacttagcctctctgtgtctttccacctaattaaagaggatccaccccagggttattttgaggattcaaaaaggcatgcaacacacctggagcacaattccactttcattcaactaattcccttcccttcccccttcttccccttctacaagatcaatatgtaaaggagacatgaggcttactggttgcttttgaacacttacttagttcttagctacacccactctaaaattaactggacattagtgtacagcccatgtccaagcccagagagaaaacaatgggaacaatttcaaggtcctcaccactccttcatttgcagaggggacaacagactttctgacctgagaactggagaatttttaaaacaaaatctctcattccagcccaacctatttaactttttgtggaggaattttacatggaggaagtgagcacatgtcatgctagccaagaggacattattgtcattaaagagaggcattatttatacaccctgcaatgtgcacattaaaatatggaaattttaaaattatgaccaagggcttgaaacatattggattacatgctcacatttaacaaagagaggaaatgtgtttcagtttctggagtggctggaatttacaagctaattgttcaataaatctactcaagatagttacctaaggctttgtggcaatgaccttgaactgagagcctgtatctggatttagcacttgaaagatctaactggatatttgggttaaaagaatcacatttattcccaaatcggaatgctttgtttttcctgtcagttaattgccagttgccaacaaatctagttctatacagtttcttgggatgatgataataaacatttattgagcaattgtcccataa

SEQ ID NO: 7529 - DNA, 1172 bp, Homo sapiens
agctgtgttggccatagatggacatgaggtcatcctagagaagatagaagactggaatgtggtggaactcatggtgaatgaagaagtcatcttccactgcaacattaaggacttggagttcggtaagccctttggcgatgcttccagccagcaatttgcctcctctgaggagtccctcaatttctagttgaaatgatcagtgtatcatgcctggattcaaattgggtttctttctgagtttgaaacttgtactgaaagccctgtgctttcagtggcacacacaggagagtatccaaaaccacacagtaaagtgtgtgatgctacgagtttccccaaacattggaaacaggaaggaaaatgaagtgaagccctggacttcgagggatgtgatggaattaagggataacaggtttttgtactttaataatatgtattctgttattatttgctttcgaagctgctttttttccacttgtttattctatctagacttgctaagacactgagttgatatgccagcagtgcatgacactatcagcaacattcaaatgagagcttctggcctggcaggctggcactgtgcgtgcctctctgtgctcagaagttaaagctttgcaatccactaacactctattaaaaactagttaacattttaccagcccatggcctttgaaaatgcactctgggtggaagccataggtatgtctgatatgataacaaattgtatataaagctaaccaaaagacaattatatctgtttccctaggaggcgatggtaaactagacccactgtgtgaaaaggccaggatagccgtgctgaatgcctactgatctcctcatggaacaggcatctcaagtcggcacaacagcagctgccccagccattctatgatgcaggcagaagtggctgtgccacggtgtggacactgggctctgctagtcagaacagggcaactcgggcctgacctccagcttacgcagcctcaggattgtcacctggctgcacaggagcccacagaaataataaaaaccacatcatttataacatgtctcaatctcaacccatagggagagccctccaatatcaggtacacattgagctgaaggaaacaataaaatgcaatcaaataacaaggtgccattcctgactaataacacatagttgccagaag

SEQ ID NO: 7530 - DNA, 1172 bp, Homo sapiens
agctgtgttggccatagatggacatgaggtcatcctagagaagatagaagactggaatgtggtggaactcatggtgaatgaagaagtcatcttccactgcaacattaaggacttggagttcggtaagccctttggcgatgcttccagccagcaatttgcctcctctgaggagtccctcaatttctagttgaaatgatcagtgtatcatgcctggattcaaattgggtttctttctgagtttgaaacttgtactgaaagccctgtgctttcagtggcacacacaggagagtatccaaaaccacacagtaaagtgtgtgatgctacgagtttccccaaacattggaaacaggaaggaaaatgaagtgaagccctggacttcgagggatgtgatggaattaagggataataggtttttgtactttaataatatgtattctgttattatttgctttcgaagctgctttttttccacttgtttattctatctagacttgctaagacactgagttgatatgccagcagtgcatgacactatcagcaacattcaaatgagagcttctggcctggcaggctggcactgtgcgtgcctctctgtgctcagaagttaaagctttgcaatccactaacactctattaaaaactagttaacattttaccagcccatggcctttgaaaatgcactctgggtggaagccataggtatgtctgatatgataacaaattgtatataaagctaaccaaaagacaattatatctgtttccctaggaggcgatggtaaactagacccactgtgtgaaaaggccaggatagccgtgctgaatgcctactgatctcctcatggaacaggcatctcaagtcggcacaacagcagctgccccagccattctatgatgcaggcagaagtggctgtgccacggtgtggacactgggctctgctagtcagaacagggcaactcgggcctgacctccagcttacgcagcctcaggattgtcacctggctgcacaggagcccacagaaataataaaaaccacatcatttataacatgtctcaatctcaacccatagggagagccctccaatatcaggtacacattgagctgaaggaaacaataaaatgcaatcaaataacaaggtgccattcctgactaataacacatagttgccagaag

SEQ ID NO: 7531 - DNA, 1172 bp, Homo sapiens; identical to SEQ ID NO: 7530
